United States Patent Application Publication US 2018/0305689 A1 - sequence listing, part 149

SEQ ID NO: 2105462 - RNA, 19 nt, Artificial Sequence
  Description of Artificial Sequence: Synthetic oligonucleotide
  Sense strand starting at position 2919 of SEQ ID NO: 1882237
aaucuuaagugguugugau

SEQ ID NO: 2105463 - RNA, 19 nt, Artificial Sequence
  Description of Artificial Sequence: Synthetic oligonucleotide
  Antisense strand to SEQ ID NO: 2105462
aucacaaccacuuaagauu

SEQ ID NO: 2105464 - RNA, 19 nt, Artificial Sequence
  Description of Artificial Sequence: Synthetic oligonucleotide
  Sense strand starting at position 3256 of SEQ ID NO: 1882237
auauaauuaugccugagua

SEQ ID NO: 2105465 - RNA, 19 nt, Artificial Sequence
  Description of Artificial Sequence: Synthetic oligonucleotide
  Antisense strand to SEQ ID NO: 2105464
uacucaggcauaauuauau

SEQ ID NO: 2105466 - RNA, 19 nt, Artificial Sequence
  Description of Artificial Sequence: Synthetic oligonucleotide
  Sense strand starting at position 3258 of SEQ ID NO: 1882237
auaauuaugccugaguaua

SEQ ID NO: 2105467 - RNA, 19 nt, Artificial Sequence
  Description of Artificial Sequence: Synthetic oligonucleotide
  Antisense strand to SEQ ID NO: 2105466
uauacucaggcauaauuau

SEQ ID NO: 2105468 - RNA, 19 nt, Artificial Sequence
  Description of Artificial Sequence: Synthetic oligonucleotide
  Sense strand starting at position 3269 of SEQ ID NO: 1882237
ugaguauaaauguacaugu

SEQ ID NO: 2105469 - RNA, 19 nt, Artificial Sequence
  Description of Artificial Sequence: Synthetic oligonucleotide
  Antisense strand to SEQ ID NO: 2105468
acauguacauuuauacuca

SEQ ID NO: 2105470 - RNA, 19 nt, Artificial Sequence
  Description of Artificial Sequence: Synthetic oligonucleotide
  Sense strand starting at position 3371 of SEQ ID NO: 1882237
cagugaaaugccuaugcau

SEQ ID NO: 2105471 - RNA, 19 nt, Artificial Sequence
  Description of Artificial Sequence: Synthetic oligonucleotide
  Antisense strand to SEQ ID NO: 2105470
augcauaggcauuucacug

SEQ ID NO: 2105472 - RNA, 19 nt, Artificial Sequence
  Description of Artificial Sequence: Synthetic oligonucleotide
  Sense strand starting at position 3386 of SEQ ID NO: 1882237
gcauuaccaucuguuagga

SEQ ID NO: 2105473 - RNA, 19 nt, Artificial Sequence
  Description of Artificial Sequence: Synthetic oligonucleotide
  Antisense strand to SEQ ID NO: 2105472
uccuaacagaugguaaugc

SEQ ID NO: 2105474 - RNA, 19 nt, Artificial Sequence
  Description of Artificial Sequence: Synthetic oligonucleotide
  Sense strand starting at position 3455 of SEQ ID NO: 1882237
ugaaguuguucugccauuu

SEQ ID NO: 2105475 - RNA, 19 nt, Artificial Sequence
  Description of Artificial Sequence: Synthetic oligonucleotide
  Antisense strand to SEQ ID NO: 2105474
aaauggcagaacaacuuca

SEQ ID NO: 2105476 - RNA, 19 nt, Artificial Sequence
  Description of Artificial Sequence: Synthetic oligonucleotide
  Sense strand starting at position 3502 of SEQ ID NO: 1882237
auuaguauggauggcuaga

SEQ ID NO: 2105477 - RNA, 19 nt, Artificial Sequence
  Description of Artificial Sequence: Synthetic oligonucleotide
  Antisense strand to SEQ ID NO: 2105476
ucuagccauccauacuaau

SEQ ID NO: 2105478 - RNA, 19 nt, Artificial Sequence
  Description of Artificial Sequence: Synthetic oligonucleotide
  Sense strand starting at position 3529 of SEQ ID NO: 1882237
cuuggaauugaccguaaag

SEQ ID NO: 2105479 - RNA, 19 nt, Artificial Sequence
  Description of Artificial Sequence: Synthetic oligonucleotide
  Antisense strand to SEQ ID NO: 2105478
cuuuacggucaauuccaag

SEQ ID NO: 2105480 - RNA, 19 nt, Artificial Sequence
  Description of Artificial Sequence: Synthetic oligonucleotide
  Sense strand starting at position 3548 of SEQ ID NO: 1882237
gccauccauuucgugaauu

SEQ ID NO: 2105481 - RNA, 19 nt, Artificial Sequence
  Description of Artificial Sequence: Synthetic oligonucleotide
  Antisense strand to SEQ ID NO: 2105480
aauucacgaaauggauggc

SEQ ID NO: 2105482 - RNA, 19 nt, Artificial Sequence
  Description of Artificial Sequence: Synthetic oligonucleotide
  Sense strand starting at position 3559 of SEQ ID NO: 1882237
cgugaauucuuacccagag

SEQ ID NO: 2105483 - RNA, 19 nt, Artificial Sequence
  Description of Artificial Sequence: Synthetic oligonucleotide
  Antisense strand to SEQ ID NO: 2105482
cucuggguaagaauucacg

SEQ ID NO: 2105484 - RNA, 19 nt, Artificial Sequence
  Description of Artificial Sequence: Synthetic oligonucleotide
  Sense strand starting at position 3560 of SEQ ID NO: 1882237
gugaauucuuacccagaga

SEQ ID NO: 2105485 - RNA, 19 nt, Artificial Sequence
  Description of Artificial Sequence: Synthetic oligonucleotide
  Antisense strand to SEQ ID NO: 2105484
ucucuggguaagaauucac

SEQ ID NO: 2105486 - RNA, 19 nt, Artificial Sequence
  Description of Artificial Sequence: Synthetic oligonucleotide
  Sense strand starting at position 3697 of SEQ ID NO: 1882237
guuccuucccuuuagaaga

SEQ ID NO: 2105487 - RNA, 19 nt, Artificial Sequence
  Description of Artificial Sequence: Synthetic oligonucleotide
  Antisense strand to SEQ ID NO: 2105486
ucuucuaaagggaaggaac

SEQ ID NO: 2105488 - RNA, 19 nt, Artificial Sequence
  Description of Artificial Sequence: Synthetic oligonucleotide
  Sense strand starting at position 3930 of SEQ ID NO: 1882237
uaaggauaacugugaccgu

SEQ ID NO: 2105489 - RNA, 19 nt, Artificial Sequence
  Description of Artificial Sequence: Synthetic oligonucleotide
  Antisense strand to SEQ ID NO: 2105488
acggucacaguuauccuua

SEQ ID NO: 2105490 - RNA, 19 nt, Artificial Sequence
  Description of Artificial Sequence: Synthetic oligonucleotide
  Sense strand starting at position 3933 of SEQ ID NO: 1882237
ggauaacugugaccguuaa

SEQ ID NO: 2105491 - RNA, 19 nt, Artificial Sequence
  Description of Artificial Sequence: Synthetic oligonucleotide
  Antisense strand to SEQ ID NO: 2105490
uuaacggucacaguuaucc

SEQ ID NO: 2105492 - RNA, 19 nt, Artificial Sequence
  Description of Artificial Sequence: Synthetic oligonucleotide
  Sense strand starting at position 3934 of SEQ ID NO: 1882237
gauaacugugaccguuaau

SEQ ID NO: 2105493 - RNA, 19 nt, Artificial Sequence
  Description of Artificial Sequence: Synthetic oligonucleotide
  Antisense strand to SEQ ID NO: 2105492
auuaacggucacaguuauc

SEQ ID NO: 2105494 - RNA, 19 nt, Artificial Sequence
  Description of Artificial Sequence: Synthetic oligonucleotide
  Sense strand starting at position 3954 of SEQ ID NO: 1882237
ccacccuucuugucagaua

SEQ ID NO: 2105495 - RNA, 19 nt, Artificial Sequence
  Description of Artificial Sequence: Synthetic oligonucleotide
  Antisense strand to SEQ ID NO: 2105494
uaucugacaagaagggugg

SEQ ID NO: 2105496 - RNA, 19 nt, Artificial Sequence
  Description of Artificial Sequence: Synthetic oligonucleotide
  Sense strand starting at position 5 of SEQ ID NO: 1882238
cugguuuagcucuggauau

SEQ ID NO: 2105497 - RNA, 19 nt, Artificial Sequence
  Description of Artificial Sequence: Synthetic oligonucleotide
  Antisense strand to SEQ ID NO: 2105496
auauccagagcuaaaccag

SEQ ID NO: 2105498 - RNA, 19 nt, Artificial Sequence
  Description of Artificial Sequence: Synthetic oligonucleotide
  Sense strand starting at position 7 of SEQ ID NO: 1882238
gguuuagcucuggauauuc

SEQ ID NO: 2105499 - RNA, 19 nt, Artificial Sequence
  Description of Artificial Sequence: Synthetic oligonucleotide
  Antisense strand to SEQ ID NO: 2105498
gaauauccagagcuaaacc

SEQ ID NO: 2105500 - RNA, 19 nt, Artificial Sequence
  Description of Artificial Sequence: Synthetic oligonucleotide
  Sense strand starting at position 15 of SEQ ID NO: 1882238
ucuggauauucgccaggaa

SEQ ID NO: 2105501 - RNA, 19 nt, Artificial Sequence
  Description of Artificial Sequence: Synthetic oligonucleotide
  Antisense strand to SEQ ID NO: 2105500
uuccuggcgaauauccaga

SEQ ID NO: 2105502 - RNA, 19 nt, Artificial Sequence
  Description of Artificial Sequence: Synthetic oligonucleotide
  Sense strand starting at position 16 of SEQ ID NO: 1882238
cuggauauucgccaggaaa

SEQ ID NO: 2105503 - RNA, 19 nt, Artificial Sequence
  Description of Artificial Sequence: Synthetic oligonucleotide
  Antisense strand to SEQ ID NO: 2105502
uuuccuggcgaauauccag

SEQ ID NO: 2105504 - RNA, 19 nt, Artificial Sequence
  Description of Artificial Sequence: Synthetic oligonucleotide
  Sense strand starting at position 53 of SEQ ID NO: 1882238
uuuauaaacuuacucggaa

SEQ ID NO: 2105505 - RNA, 19 nt, Artificial Sequence
  Description of Artificial Sequence: Synthetic oligonucleotide
  Antisense strand to SEQ ID NO: 2105504
uuccgaguaaguuuauaaa

SEQ ID NO: 2105506 - RNA, 19 nt, Artificial Sequence
  Description of Artificial Sequence: Synthetic oligonucleotide
  Sense strand starting at position 81 of SEQ ID NO: 1882238
caguaagcggcuugauugu

SEQ ID NO: 2105507 - RNA, 19 nt, Artificial Sequence
  Description of Artificial Sequence: Synthetic oligonucleotide
  Antisense strand to SEQ ID NO: 2105506
acaaucaagccgcuuacug

SEQ ID NO: 2105508 - RNA, 19 nt, Artificial Sequence
  Description of Artificial Sequence: Synthetic oligonucleotide
  Sense strand starting at position 87 of SEQ ID NO: 1882238
gcggcuugauuguauuuca

SEQ ID NO: 2105509 - RNA, 19 nt, Artificial Sequence
  Description of Artificial Sequence: Synthetic oligonucleotide
  Antisense strand to SEQ ID NO: 2105508
ugaaauacaaucaagccgc

SEQ ID NO: 2105510 - RNA, 19 nt, Artificial Sequence
  Description of Artificial Sequence: Synthetic oligonucleotide
  Sense strand starting at position 1581 of SEQ ID NO: 1882238
ugucuacaugguuggauua

SEQ ID NO: 2105511 - RNA, 19 nt, Artificial Sequence
  Description of Artificial Sequence: Synthetic oligonucleotide
  Antisense strand to SEQ ID NO: 2105510
uaauccaaccauguagaca

SEQ ID NO: 2105512 - RNA, 19 nt, Artificial Sequence
  Description of Artificial Sequence: Synthetic oligonucleotide
  Sense strand starting at position 1582 of SEQ ID NO: 1882238
gucuacaugguuggauuaa

SEQ ID NO: 2105513 - RNA, 19 nt, Artificial Sequence
  Description of Artificial Sequence: Synthetic oligonucleotide
  Antisense strand to SEQ ID NO: 2105512
uuaauccaaccauguagac

SEQ ID NO: 2105514 - RNA, 19 nt, Artificial Sequence
  Description of Artificial Sequence: Synthetic oligonucleotide
  Sense strand starting at position 1583 of SEQ ID NO: 1882238
ucuacaugguuggauuaau

SEQ ID NO: 2105515 - RNA, 19 nt, Artificial Sequence
  Description of Artificial Sequence: Synthetic oligonucleotide
  Antisense strand to SEQ ID NO: 2105514
auuaauccaaccauguaga

SEQ ID NO: 2105516 - RNA, 19 nt, Artificial Sequence
  Description of Artificial Sequence: Synthetic oligonucleotide
  Sense strand starting at position 1591 of SEQ ID NO: 1882238
guuggauuaauccgauagu

SEQ ID NO: 2105517 - RNA, 19 nt, Artificial Sequence
  Description of Artificial Sequence: Synthetic oligonucleotide
  Antisense strand to SEQ ID NO: 2105516
acuaucggauuaauccaac

SEQ ID NO: 2105518 - RNA, 19 nt, Artificial Sequence
  Description of Artificial Sequence: Synthetic oligonucleotide
  Sense strand starting at position 1592 of SEQ ID NO: 1882238
uuggauuaauccgauaguu

SEQ ID NO: 2105519 - RNA, 19 nt, Artificial Sequence
  Description of Artificial Sequence: Synthetic oligonucleotide
  Antisense strand to SEQ ID NO: 2105518
aacuaucggauuaauccaa

SEQ ID NO: 2105520 - RNA, 19 nt, Artificial Sequence
  Description of Artificial Sequence: Synthetic oligonucleotide
  Sense strand starting at position 1594 of SEQ ID NO: 1882238
ggauuaauccgauaguugc

SEQ ID NO: 2105521 - RNA, 19 nt, Artificial Sequence
  Description of Artificial Sequence: Synthetic oligonucleotide
  Antisense strand to SEQ ID NO: 2105520
gcaacuaucggauuaaucc

SEQ ID NO: 2105522 - RNA, 19 nt, Artificial Sequence
  Description of Artificial Sequence: Synthetic oligonucleotide
  Sense strand starting at position 1636 of SEQ ID NO: 1882238
ggaaguuugugugauggga

SEQ ID NO: 2105523 - RNA, 19 nt, Artificial Sequence
  Description of Artificial Sequence: Synthetic oligonucleotide
  Antisense strand to SEQ ID NO: 2105522
ucccaucacacaaacuucc

SEQ ID NO: 2105524 - RNA, 19 nt, Artificial Sequence
  Description of Artificial Sequence: Synthetic oligonucleotide
  Sense strand starting at position 1640 of SEQ ID NO: 1882238
guuugugugaugggauaau

SEQ ID NO: 2105525 - RNA, 19 nt, Artificial Sequence
  Description of Artificial Sequence: Synthetic oligonucleotide
  Antisense strand to SEQ ID NO: 2105524
auuaucccaucacacaaac

SEQ ID NO: 2105526 - RNA, 19 nt, Artificial Sequence
  Description of Artificial Sequence: Synthetic oligonucleotide
  Sense strand starting at position 1651 of SEQ ID NO: 1882238
gggauaauuuaaugucauc

SEQ ID NO: 2105527 - RNA, 19 nt, Artificial Sequence
  Description of Artificial Sequence: Synthetic oligonucleotide
  Antisense strand to SEQ ID NO: 2105526
gaugacauuaaauuauccc

SEQ ID NO: 2105528 - RNA, 19 nt, Artificial Sequence
  Description of Artificial Sequence: Synthetic oligonucleotide
  Sense strand starting at position 1986 of SEQ ID NO: 1882238
gauagaugaucggaaagaa

SEQ ID NO: 2105529 - RNA, 19 nt, Artificial Sequence
  Description of Artificial Sequence: Synthetic oligonucleotide
  Antisense strand to SEQ ID NO: 2105528
uucuuuccgaucaucuauc

SEQ ID NO: 2105530 - RNA, 19 nt, Artificial Sequence
  Description of Artificial Sequence: Synthetic oligonucleotide
  Sense strand starting at position 2468 of SEQ ID NO: 1882238
gagugcucccuucgcggaa

SEQ ID NO: 2105531 - RNA, 19 nt, Artificial Sequence
  Description of Artificial Sequence: Synthetic oligonucleotide
  Antisense strand to SEQ ID NO: 2105530
uuccgcgaagggagcacuc

SEQ ID NO: 2105532 - RNA, 19 nt, Artificial Sequence
  Description of Artificial Sequence: Synthetic oligonucleotide
  Sense strand starting at position 3232 of SEQ ID NO: 1882238
gggagacccucucagacuu

SEQ ID NO: 2105533 - RNA, 19 nt, Artificial Sequence
  Description of Artificial Sequence: Synthetic oligonucleotide
  Antisense strand to SEQ ID NO: 2105532
aagucugagagggucuccc

SEQ ID NO: 2105534 - RNA, 19 nt, Artificial Sequence
  Description of Artificial Sequence: Synthetic oligonucleotide
  Sense strand starting at position 3356 of SEQ ID NO: 1882238
ugacguacacguuacagaa

SEQ ID NO: 2105535 - RNA, 19 nt, Artificial Sequence
  Description of Artificial Sequence: Synthetic oligonucleotide
  Antisense strand to SEQ ID NO: 2105534
uucuguaacguguacguca

SEQ ID NO: 2105536 - RNA, 19 nt, Artificial Sequence
  Description of Artificial Sequence: Synthetic oligonucleotide
  Sense strand starting at position 3385 of SEQ ID NO: 1882238
cgcuccauccagugaauua

SEQ ID NO: 2105537 - RNA, 19 nt, Artificial Sequence
  Description of Artificial Sequence: Synthetic oligonucleotide
  Antisense strand to SEQ ID NO: 2105536
uaauucacuggauggagcg

SEQ ID NO: 2105538 - RNA, 19 nt, Artificial Sequence
  Description of Artificial Sequence: Synthetic oligonucleotide
  Sense strand starting at position 3395 of SEQ ID NO: 1882238
agugaauuacauuguggga

SEQ ID NO: 2105539 - RNA, 19 nt, Artificial Sequence
  Description of Artificial Sequence: Synthetic oligonucleotide
  Antisense strand to SEQ ID NO: 2105538
ucccacaauguaauucacu

SEQ ID NO: 2105540 - RNA, 19 nt, Artificial Sequence
  Description of Artificial Sequence: Synthetic oligonucleotide
  Sense strand starting at position 3397 of SEQ ID NO: 1882238
ugaauuacauugugggaga

SEQ ID NO: 2105541 - RNA, 19 nt, Artificial Sequence
  Description of Artificial Sequence: Synthetic oligonucleotide
  Antisense strand to SEQ ID NO: 2105540
ucucccacaauguaauuca

SEQ ID NO: 2105542 - RNA, 19 nt, Artificial Sequence
  Description of Artificial Sequence: Synthetic oligonucleotide
  Sense strand starting at position 3398 of SEQ ID NO: 1882238
gaauuacauugugggagau

SEQ ID NO: 2105543 - RNA, 19 nt, Artificial Sequence
  Description of Artificial Sequence: Synthetic oligonucleotide
  Antisense strand to SEQ ID NO: 2105542
aucucccacaauguaauuc

SEQ ID NO: 2105544 - RNA, 19 nt, Artificial Sequence
  Description of Artificial Sequence: Synthetic oligonucleotide
  Sense strand starting at position 3410 of SEQ ID NO: 1882238
gggagaugccaaggaaugu

SEQ ID NO: 2105545 - RNA, 19 nt, Artificial Sequence
  Description of Artificial Sequence: Synthetic oligonucleotide
  Antisense strand to SEQ ID NO: 2105544
acauuccuuggcaucuccc

SEQ ID NO: 2105546 - RNA, 19 nt, Artificial Sequence
  Description of Artificial Sequence: Synthetic oligonucleotide
  Sense strand starting at position 3438 of SEQ ID NO: 1882238
cagccagguuugccaauaa

SEQ ID NO: 2105547 - RNA, 19 nt, Artificial Sequence
  Description of Artificial Sequence: Synthetic oligonucleotide
  Antisense strand to SEQ ID NO: 2105546
uuauuggcaaaccuggcug

SEQ ID NO: 2105548 - RNA, 19 nt, Artificial Sequence
  Description of Artificial Sequence: Synthetic oligonucleotide
  Sense strand starting at position 3471 of SEQ ID NO: 1882238
gacugcugguuuccaggaa

SEQ ID NO: 2105549 - RNA, 19 nt, Artificial Sequence
  Description of Artificial Sequence: Synthetic oligonucleotide
  Antisense strand to SEQ ID NO: 2105548
uuccuggaaaccagcaguc

SEQ ID NO: 2105550 - RNA, 19 nt, Artificial Sequence
  Description of Artificial Sequence: Synthetic oligonucleotide
  Sense strand starting at position 3472 of SEQ ID NO: 1882238
acugcugguuuccaggaaa

SEQ ID NO: 2105551 - RNA, 19 nt, Artificial Sequence
  Description of Artificial Sequence: Synthetic oligonucleotide
  Antisense strand to SEQ ID NO: 2105550
uuuccuggaaaccagcagu

SEQ ID NO: 2105552 - RNA, 19 nt, Artificial Sequence
  Description of Artificial Sequence: Synthetic oligonucleotide
  Sense strand starting at position 3682 of SEQ ID NO: 1882238
gcucgcccguauuuacaua

SEQ ID NO: 2105553 - RNA, 19 nt, Artificial Sequence
  Description of Artificial Sequence: Synthetic oligonucleotide
  Antisense strand to SEQ ID NO: 2105552
uauguaaauacgggcgagc

SEQ ID NO: 2105554 - RNA, 19 nt, Artificial Sequence
  Description of Artificial Sequence: Synthetic oligonucleotide
  Sense strand starting at position 3741 of SEQ ID NO: 1882238
gagguaugcgcucggauua

SEQ ID NO: 2105555 - RNA, 19 nt, Artificial Sequence
  Description of Artificial Sequence: Synthetic oligonucleotide
  Antisense strand to SEQ ID NO: 2105554
uaauccgagcgcauaccuc

SEQ ID NO: 2105556 - RNA, 19 nt, Artificial Sequence
  Description of Artificial Sequence: Synthetic oligonucleotide
  Sense strand starting at position 3759 of SEQ ID NO: 1882238
agggcuguuuaguuuggaa

SEQ ID NO: 2105557 - RNA, 19 nt, Artificial Sequence
  Description of Artificial Sequence: Synthetic oligonucleotide
  Antisense strand to SEQ ID NO: 2105556
uuccaaacuaaacagcccu

SEQ ID NO: 2105558 - RNA, 19 nt, Artificial Sequence
  Description of Artificial Sequence: Synthetic oligonucleotide
  Sense strand starting at position 3763 of SEQ ID NO: 1882238
cuguuuaguuuggaaguga

SEQ ID NO: 2105559 - RNA, 19 nt, Artificial Sequence
  Description of Artificial Sequence: Synthetic oligonucleotide
  Antisense strand to SEQ ID NO: 2105558
ucacuuccaaacuaaacag

SEQ ID NO: 2105560 - RNA, 19 nt, Artificial Sequence
  Description of Artificial Sequence: Synthetic oligonucleotide
  Sense strand starting at position 3767 of SEQ ID NO: 1882238
uuaguuuggaagugaagaa

SEQ ID NO: 2105561 - RNA, 19 nt, Artificial Sequence
  Description of Artificial Sequence: Synthetic oligonucleotide
  Antisense strand to SEQ ID NO: 2105560
uucuucacuuccaaacuaa

SEQ ID NO: 2105562 - RNA, 19 nt, Artificial Sequence
  Description of Artificial Sequence: Synthetic oligonucleotide
  Sense strand starting at position 3828 of SEQ ID NO: 1882238
aaauaaaugucugcgagga

SEQ ID NO: 2105563 - RNA, 19 nt, Artificial Sequence
  Description of Artificial Sequence: Synthetic oligonucleotide
  Antisense strand to SEQ ID NO: 2105562
uccucgcagacauuuauuu

SEQ ID NO: 2105564 - RNA, 19 nt, Artificial Sequence
  Description of Artificial Sequence: Synthetic oligonucleotide
  Sense strand starting at position 3829 of SEQ ID NO: 1882238
aauaaaugucugcgaggaa

SEQ ID NO: 2105565 - RNA, 19 nt, Artificial Sequence
  Description of Artificial Sequence: Synthetic oligonucleotide
  Antisense strand to SEQ ID NO: 2105564
uuccucgcagacauuuauu

SEQ ID NO: 2105566 - RNA, 19 nt, Artificial Sequence
  Description of Artificial Sequence: Synthetic oligonucleotide
  Sense strand starting at position 3830 of SEQ ID NO: 1882238
auaaaugucugcgaggaaa

SEQ ID NO: 2105567 - RNA, 19 nt, Artificial Sequence
  Description of Artificial Sequence: Synthetic oligonucleotide
  Antisense strand to SEQ ID NO: 2105566
uuuccucgcagacauuuau

SEQ ID NO: 2105568 - RNA, 19 nt, Artificial Sequence
  Description of Artificial Sequence: Synthetic oligonucleotide
  Sense strand starting at position 3853 of SEQ ID NO: 1882238
gcacuugcucuguaguguu

SEQ ID NO: 2105569 - RNA, 19 nt, Artificial Sequence
  Description of Artificial Sequence: Synthetic oligonucleotide
  Antisense strand to SEQ ID NO: 2105568
aacacuacagagcaagugc

SEQ ID NO: 2105570 - RNA, 19 nt, Artificial Sequence
  Description of Artificial Sequence: Synthetic oligonucleotide
  Sense strand starting at position 3858 of SEQ ID NO: 1882238
ugcucuguaguguuuaguu

SEQ ID NO: 2105571 - RNA, 19 nt, Artificial Sequence
  Description of Artificial Sequence: Synthetic oligonucleotide
  Antisense strand to SEQ ID NO: 2105570
aacuaaacacuacagagca

SEQ ID NO: 2105572 - RNA, 19 nt, Artificial Sequence
  Description of Artificial Sequence: Synthetic oligonucleotide
  Sense strand starting at position 3860 of SEQ ID NO: 1882238
cucuguaguguuuaguuau

SEQ ID NO: 2105573 - RNA, 19 nt, Artificial Sequence
  Description of Artificial Sequence: Synthetic oligonucleotide
  Antisense strand to SEQ ID NO: 2105572
auaacuaaacacuacagag

SEQ ID NO: 2105574 - RNA, 19 nt, Artificial Sequence
  Description of Artificial Sequence: Synthetic oligonucleotide
  Sense strand starting at position 3863 of SEQ ID NO: 1882238
uguaguguuuaguuauggu

SEQ ID NO: 2105575 - RNA, 19 nt, Artificial Sequence
  Description of Artificial Sequence: Synthetic oligonucleotide
  Antisense strand to SEQ ID NO: 2105574
accauaacuaaacacuaca

SEQ ID NO: 2105576 - RNA, 19 nt, Artificial Sequence
  Description of Artificial Sequence: Synthetic oligonucleotide
  Sense strand starting at position 340 of SEQ ID NO: 1882241
gcucacuuuguguuugcaa

SEQ ID NO: 2105577 - RNA, 19 nt, Artificial Sequence
  Description of Artificial Sequence: Synthetic oligonucleotide
  Antisense strand to SEQ ID NO: 2105576
uugcaaacacaaagugagc

SEQ ID NO: 2105578 - RNA, 19 nt, Artificial Sequence
  Description of Artificial Sequence: Synthetic oligonucleotide
  Sense strand starting at position 341 of SEQ ID NO: 1882241
cucacuuuguguuugcaaa

SEQ ID NO: 2105579 - RNA, 19 nt, Artificial Sequence
  Description of Artificial Sequence: Synthetic oligonucleotide
  Antisense strand to SEQ ID NO: 2105578
uuugcaaacacaaagugag

SEQ ID NO: 2105580 - RNA, 19 nt, Artificial Sequence
  Description of Artificial Sequence: Synthetic oligonucleotide
  Sense strand starting at position 342 of SEQ ID NO: 1882241
ucacuuuguguuugcaaac

SEQ ID NO: 2105581 - RNA, 19 nt, Artificial Sequence
  Description of Artificial Sequence: Synthetic oligonucleotide
  Antisense strand to SEQ ID NO: 2105580
guuugcaaacacaaaguga

SEQ ID NO: 2105582 - RNA, 19 nt, Artificial Sequence
  Description of Artificial Sequence: Synthetic oligonucleotide
  Sense strand starting at position 866 of SEQ ID NO: 1882241
ggacuugucuugcugaggu

SEQ ID NO: 2105583 - RNA, 19 nt, Artificial Sequence
  Description of Artificial Sequence: Synthetic oligonucleotide
  Antisense strand to SEQ ID NO: 2105582
accucagcaagacaagucc

SEQ ID NO: 2105584 - RNA, 19 nt, Artificial Sequence
  Description of Artificial Sequence: Synthetic oligonucleotide
  Sense strand starting at position 992 of SEQ ID NO: 1882241
cugugauuugugcgccgga

SEQ ID NO: 2105585 - RNA, 19 nt, Artificial Sequence
  Description of Artificial Sequence: Synthetic oligonucleotide
  Antisense strand to SEQ ID NO: 2105584
uccggcgcacaaaucacag

SEQ ID NO: 2105586 - RNA, 19 nt, Artificial Sequence
  Description of Artificial Sequence: Synthetic oligonucleotide
  Sense strand starting at position 1328 of SEQ ID NO: 1882241
ccauaaaggaccggguaau

SEQ ID NO: 2105587 - RNA, 19 nt, Artificial Sequence
  Description of Artificial Sequence: Synthetic oligonucleotide
  Antisense strand to SEQ ID NO: 2105586
auuacccgguccuuuaugg

SEQ ID NO: 2105588 - RNA, 19 nt, Artificial Sequence
  Description of Artificial Sequence: Synthetic oligonucleotide
  Sense strand starting at position 1329 of SEQ ID NO: 1882241
cauaaaggaccggguaauu

SEQ ID NO: 2105589 - RNA, 19 nt, Artificial Sequence
  Description of Artificial Sequence: Synthetic oligonucleotide
  Antisense strand to SEQ ID NO: 2105588
aauuacccgguccuuuaug

SEQ ID NO: 2105590 - RNA, 19 nt, Artificial Sequence
  Description of Artificial Sequence: Synthetic oligonucleotide
  Sense strand starting at position 1338 of SEQ ID NO: 1882241
ccggguaauuucgcggaau

SEQ ID NO: 2105591 - RNA, 19 nt, Artificial Sequence
  Description of Artificial Sequence: Synthetic oligonucleotide
  Antisense strand to SEQ ID NO: 2105590
auuccgcgaaauuacccgg

SEQ ID NO: 2105592 - RNA, 19 nt, Artificial Sequence
  Description of Artificial Sequence: Synthetic oligonucleotide
  Sense strand starting at position 1340 of SEQ ID NO: 1882241
ggguaauuucgcggaaugc

SEQ ID NO: 2105593 - RNA, 19 nt, Artificial Sequence
  Description of Artificial Sequence: Synthetic oligonucleotide
  Antisense strand to SEQ ID NO: 2105592
gcauuccgcgaaauuaccc

SEQ ID NO: 2105594 - RNA, 19 nt, Artificial Sequence
  Description of Artificial Sequence: Synthetic oligonucleotide
  Sense strand starting at position 1410 of SEQ ID NO: 1882241
gggcgaucucgugaacaca

SEQ ID NO: 2105595 - RNA, 19 nt, Artificial Sequence
  Description of Artificial Sequence: Synthetic oligonucleotide
  Antisense strand to SEQ ID NO: 2105594
uguguucacgagaucgccc

SEQ ID NO: 2105596 - RNA, 19 nt, Artificial Sequence
  Description of Artificial Sequence: Synthetic oligonucleotide
  Sense strand starting at position 1541 of SEQ ID NO: 1882241
gcugguuuccucgcucacu

SEQ ID NO: 2105597 - RNA, 19 nt, Artificial Sequence
  Description of Artificial Sequence: Synthetic oligonucleotide
  Antisense strand to SEQ ID NO: 2105596
agugagcgaggaaaccagc

SEQ ID NO: 2105598 - RNA, 19 nt, Artificial Sequence
  Description of Artificial Sequence: Synthetic oligonucleotide
  Sense strand starting at position 1717 of SEQ ID NO: 1882241
gagaaagcccgggagcauu

SEQ ID NO: 2105599 - RNA, 19 nt, Artificial Sequence
  Description of Artificial Sequence: Synthetic oligonucleotide
  Antisense strand to SEQ ID NO: 2105598
aaugcucccgggcuuucuc

SEQ ID NO: 2105600 - RNA, 19 nt, Artificial Sequence
  Description of Artificial Sequence: Synthetic oligonucleotide
  Sense strand starting at position 1785 of SEQ ID NO: 1882241
cggagaccugccuagauuc

SEQ ID NO: 2105601 - RNA, 19 nt, Artificial Sequence
  Description of Artificial Sequence: Synthetic oligonucleotide
  Antisense strand to SEQ ID NO: 2105600
gaaucuaggcaggucuccg

SEQ ID NO: 2105602 - RNA, 19 nt, Artificial Sequence
  Description of Artificial Sequence: Synthetic oligonucleotide
  Sense strand starting at position 1885 of SEQ ID NO: 1882241
ccgagugcccgcagaaaga

SEQ ID NO: 2105603 - RNA, 19 nt, Artificial Sequence
  Description of Artificial Sequence: Synthetic oligonucleotide
  Antisense strand to SEQ ID NO: 2105602
ucuuucugcgggcacucgg

SEQ ID NO: 2105604 - RNA, 19 nt, Artificial Sequence
  Description of Artificial Sequence: Synthetic oligonucleotide
  Sense strand starting at position 2373 of SEQ ID NO: 1882241
gggagucacucacacucua

SEQ ID NO: 2105605 - RNA, 19 nt, Artificial Sequence
  Description of Artificial Sequence: Synthetic oligonucleotide
  Antisense strand to SEQ ID NO: 2105604
uagagugugagugacuccc

SEQ ID NO: 2105606 - RNA, 19 nt, Artificial Sequence
  Description of Artificial Sequence: Synthetic oligonucleotide
  Sense strand starting at position 2532 of SEQ ID NO: 1882241
ugcuacuaaguuugggaga

SEQ ID NO: 2105607 - RNA, 19 nt, Artificial Sequence
  Description of Artificial Sequence: Synthetic oligonucleotide
  Antisense strand to SEQ ID NO: 2105606
ucucccaaacuuaguagca

SEQ ID NO: 2105608 - RNA, 19 nt, Artificial Sequence
  Description of Artificial Sequence: Synthetic oligonucleotide
  Sense strand starting at position 2625 of SEQ ID NO: 1882241
acagguuucccaggaguua

SEQ ID NO: 2105609 - RNA, 19 nt, Artificial Sequence
  Description of Artificial Sequence: Synthetic oligonucleotide
  Antisense strand to SEQ ID NO: 2105608
uaacuccugggaaaccugu

SEQ ID NO: 2105610 - RNA, 19 nt, Artificial Sequence
  Description of Artificial Sequence: Synthetic oligonucleotide
  Sense strand starting at position 2756 of SEQ ID NO: 1882241
gucccuuucuguguaggga

SEQ ID NO: 2105611 - RNA, 19 nt, Artificial Sequence
  Description of Artificial Sequence: Synthetic oligonucleotide
  Antisense strand to SEQ ID NO: 2105610
ucccuacacagaaagggac

SEQ ID NO: 2105612 - RNA, 19 nt, Artificial Sequence
  Description of Artificial Sequence: Synthetic oligonucleotide
  Sense strand starting at position 2757 of SEQ ID NO: 1882241
ucccuuucuguguagggau

SEQ ID NO: 2105613 - RNA, 19 nt, Artificial Sequence
  Description of Artificial Sequence: Synthetic oligonucleotide
  Antisense strand to SEQ ID NO: 2105612
aucccuacacagaaaggga

SEQ ID NO: 2105614 - RNA, 19 nt, Artificial Sequence
  Description of Artificial Sequence: Synthetic oligonucleotide
  Sense strand starting at position 3150 of SEQ ID NO: 1882241
ucuguuucagaggagaguu

SEQ ID NO: 2105615 - RNA, 19 nt, Artificial Sequence
  Description of Artificial Sequence: Synthetic oligonucleotide
  Antisense strand to SEQ ID NO: 2105614
aacucuccucugaaacaga

SEQ ID NO: 2105616 - RNA, 19 nt, Artificial Sequence
  Description of Artificial Sequence: Synthetic oligonucleotide
  Sense strand starting at position 3326 of SEQ ID NO: 1882241
uagccuaaacugugugaaa

SEQ ID NO: 2105617 - RNA, 19 nt, Artificial Sequence
  Description of Artificial Sequence: Synthetic oligonucleotide
  Antisense strand to SEQ ID NO: 2105616
uuucacacaguuuaggcua

SEQ ID NO: 2105618 - RNA, 19 nt, Artificial Sequence
  Description of Artificial Sequence: Synthetic oligonucleotide
  Sense strand starting at position 3327 of SEQ ID NO: 1882241
agccuaaacugugugaaau

SEQ ID NO: 2105619 - RNA, 19 nt, Artificial Sequence
  Description of Artificial Sequence: Synthetic oligonucleotide
  Antisense strand to SEQ ID NO: 2105618
auuucacacaguuuaggcu

SEQ ID NO: 2105620 - RNA, 19 nt, Artificial Sequence
  Description of Artificial Sequence: Synthetic oligonucleotide
  Sense strand starting at position 3328 of SEQ ID NO: 1882241
gccuaaacugugugaaaua

SEQ ID NO: 2105621 - RNA, 19 nt, Artificial Sequence
  Description of Artificial Sequence: Synthetic oligonucleotide
  Antisense strand to SEQ ID NO: 2105620
uauuucacacaguuuaggc

SEQ ID NO: 2105622 - RNA, 19 nt, Artificial Sequence
  Description of Artificial Sequence: Synthetic oligonucleotide
  Sense strand starting at position 3329 of SEQ ID NO: 1882241
ccuaaacugugugaaauaa

SEQ ID NO: 2105623 - RNA, 19 nt, Artificial Sequence
  Description of Artificial Sequence: Synthetic oligonucleotide
  Antisense strand to SEQ ID NO: 2105622
uuauuucacacaguuuagg

SEQ ID NO: 2105624 - RNA, 19 nt, Artificial Sequence
  Description of Artificial Sequence: Synthetic oligonucleotide
  Sense strand starting at position 3485 of SEQ ID NO: 1882241
cagauuugguuccagaacu

SEQ ID NO: 2105625 - RNA, 19 nt, Artificial Sequence
  Description of Artificial Sequence: Synthetic oligonucleotide
  Antisense strand to SEQ ID NO: 2105624
aguucuggaaccaaaucug

SEQ ID NO: 2105626 - RNA, 19 nt, Artificial Sequence
  Description of Artificial Sequence: Synthetic oligonucleotide
  Sense strand starting at position 3577 of SEQ ID NO: 1882241
uggcauuagagaugggacu

SEQ ID NO: 2105627 - RNA, 19 nt, Artificial Sequence
  Description of Artificial Sequence: Synthetic oligonucleotide
  Antisense strand to SEQ ID NO: 2105626
agucccaucucuaaugcca

SEQ ID NO: 2105628 - RNA, 19 nt, Artificial Sequence
  Description of Artificial Sequence: Synthetic oligonucleotide
  Sense strand starting at position 3579 of SEQ ID NO: 1882241
gcauuagagaugggacucu

SEQ ID NO: 2105629 - RNA, 19 nt, Artificial Sequence
  Description of Artificial Sequence: Synthetic oligonucleotide
  Antisense strand to SEQ ID NO: 2105628
agagucccaucucuaaugc

SEQ ID NO: 2105630 - RNA, 19 nt, Artificial Sequence
  Description of Artificial Sequence: Synthetic oligonucleotide
  Sense strand starting at position 3597 of SEQ ID NO: 1882241
uggagaacuuaauuaagcu

SEQ ID NO: 2105631 - RNA, 19 nt, Artificial Sequence
  Description of Artificial Sequence: Synthetic oligonucleotide
  Antisense strand to SEQ ID NO: 2105630
agcuuaauuaaguucucca

SEQ ID NO: 2105632 - RNA, 19 nt, Artificial Sequence
  Description of Artificial Sequence: Synthetic oligonucleotide
  Sense strand starting at position 3637 of SEQ ID NO: 1882241
cauuguaaaguaggucaua

SEQ ID NO: 2105633 - RNA, 19 nt, Artificial Sequence
  Description of Artificial Sequence: Synthetic oligonucleotide
  Antisense strand to SEQ ID NO: 2105632
uaugaccuacuuuacaaug

SEQ ID NO: 2105634 - RNA, 19 nt, Artificial Sequence
  Description of Artificial Sequence: Synthetic oligonucleotide
  Sense strand starting at position 3638 of SEQ ID NO: 1882241
auuguaaaguaggucauaa

SEQ ID NO: 2105635 - RNA, 19 nt, Artificial Sequence
  Description of Artificial Sequence: Synthetic oligonucleotide
  Antisense strand to SEQ ID NO: 2105634
uuaugaccuacuuuacaau

SEQ ID NO: 2105636 - RNA, 19 nt, Artificial Sequence
  Description of Artificial Sequence: Synthetic oligonucleotide
  Sense strand starting at position 3640 of SEQ ID NO: 1882241
uguaaaguaggucauaaua

SEQ ID NO: 2105637 - RNA, 19 nt, Artificial Sequence
  Description of Artificial Sequence: Synthetic oligonucleotide
  Antisense strand to SEQ ID NO: 2105636
uauuaugaccuacuuuaca

SEQ ID NO: 2105638 - RNA, 19 nt, Artificial Sequence
  Description of Artificial Sequence: Synthetic oligonucleotide
  Sense strand starting at position 3666 of SEQ ID NO: 1882241
uagagauucuguuugggag

SEQ ID NO: 2105639 - RNA, 19 nt, Artificial Sequence
  Description of Artificial Sequence: Synthetic oligonucleotide
  Antisense strand to SEQ ID NO: 2105638
cucccaaacagaaucucua

SEQ ID NO: 2105640 - RNA, 19 nt, Artificial Sequence
  Description of Artificial Sequence: Synthetic oligonucleotide
  Sense strand starting at position 3667 of SEQ ID NO: 1882241
agagauucuguuugggagu

SEQ ID NO: 2105641 - RNA, 19 nt, Artificial Sequence
  Description of Artificial Sequence: Synthetic oligonucleotide
  Antisense strand to SEQ ID NO: 2105640
acucccaaacagaaucucu

SEQ ID NO: 2105642 - RNA, 19 nt, Artificial Sequence
  Description of Artificial Sequence: Synthetic oligonucleotide
  Sense strand starting at position 3674 of SEQ ID NO: 1882241
cuguuugggaguuagauga

SEQ ID NO: 2105643 - RNA, 19 nt, Artificial Sequence
  Description of Artificial Sequence: Synthetic oligonucleotide
  Antisense strand to SEQ ID NO: 2105642
ucaucuaacucccaaacag

SEQ ID NO: 2105644 - RNA, 19 nt, Artificial Sequence
  Description of Artificial Sequence: Synthetic oligonucleotide
  Sense strand starting at position 3747 of SEQ ID NO: 1882241
agggauggcguuuauuauu

SEQ ID NO: 2105645 - RNA, 19 nt, Artificial Sequence
  Description of Artificial Sequence: Synthetic oligonucleotide
  Antisense strand to SEQ ID NO: 2105644
aauaauaaacgccaucccu

SEQ ID NO: 2105646 - RNA, 19 nt, Artificial Sequence
  Description of Artificial Sequence: Synthetic oligonucleotide
  Sense strand starting at position 3784 of SEQ ID NO: 1882241
ggccacauguugguugaau

SEQ ID NO: 2105647 - RNA, 19 nt, Artificial Sequence
  Description of Artificial Sequence: Synthetic oligonucleotide
  Antisense strand to SEQ ID NO: 2105646
auucaaccaacauguggcc

SEQ ID NO: 2105648 - RNA, 19 nt, Artificial Sequence
  Description of Artificial Sequence: Synthetic oligonucleotide
  Sense strand starting at position 3785 of SEQ ID NO: 1882241
gccacauguugguugaaua

SEQ ID NO: 2105649 - RNA, 19 nt, Artificial Sequence
  Description of Artificial Sequence: Synthetic oligonucleotide
  Antisense strand to SEQ ID NO: 2105648
uauucaaccaacauguggc

SEQ ID NO: 2105650 - RNA, 19 nt, Artificial Sequence
  Description of Artificial Sequence: Synthetic oligonucleotide
  Sense strand starting at position 3786 of SEQ ID NO: 1882241
ccacauguugguugaauau

SEQ ID NO: 2105651 - RNA, 19 nt, Artificial Sequence
  Description of Artificial Sequence: Synthetic oligonucleotide
  Antisense strand to SEQ ID NO: 2105650
auauucaaccaacaugugg

SEQ ID NO: 2105652 - RNA, 19 nt, Artificial Sequence
  Description of Artificial Sequence: Synthetic oligonucleotide
  Sense strand starting at position 3792 of SEQ ID NO: 1882241
guugguugaauauggaaau

SEQ ID NO: 2105653 - RNA, 19 nt, Artificial Sequence
  Description of Artificial Sequence: Synthetic oligonucleotide
  Antisense strand to SEQ ID NO: 2105652
auuuccauauucaaccaac

SEQ ID NO: 2105654 - RNA, 19 nt, Artificial Sequence
  Description of Artificial Sequence: Synthetic oligonucleotide
  Sense strand starting at position 3865 of SEQ ID NO: 1882241
aggcaacuuguccaagguu

SEQ ID NO: 2105655 - RNA, 19 nt, Artificial Sequence
  Description of Artificial Sequence: Synthetic oligonucleotide
  Antisense strand to SEQ ID NO: 2105654
aaccuuggacaaguugccu

SEQ ID NO: 2105656 - RNA, 19 nt, Artificial Sequence
  Description of Artificial Sequence: Synthetic oligonucleotide
  Sense strand starting at position 101 of SEQ ID NO: 1882240
ucuaauuuguccggauaau

SEQ ID NO: 2105657 - RNA, 19 nt, Artificial Sequence
  Description of Artificial Sequence: Synthetic oligonucleotide
  Antisense strand to SEQ ID NO: 2105656
auuauccggacaaauuaga

SEQ ID NO: 2105658 - RNA, 19 nt, Artificial Sequence
  Description of Artificial Sequence: Synthetic oligonucleotide
  Sense strand starting at position 111 of SEQ ID NO: 1882240
ccggauaauugccucaacu

SEQ ID NO: 2105659 - RNA, 19 nt, Artificial Sequence
  Description of Artificial Sequence: Synthetic oligonucleotide
  Antisense strand to SEQ ID NO: 2105658
aguugaggcaauuauccgg

SEQ ID NO: 2105660 - RNA, 19 nt, Artificial Sequence
  Description of Artificial Sequence: Synthetic oligonucleotide
  Sense strand starting at position 113 of SEQ ID NO: 1882240
ggauaauugccucaacuuu

SEQ ID NO: 2105661 - RNA, 19 nt, Artificial Sequence
  Description of Artificial Sequence: Synthetic oligonucleotide
  Antisense strand to SEQ ID NO: 2105660
aaaguugaggcaauuaucc

SEQ ID NO: 2105662 - RNA, 19 nt, Artificial Sequence
  Description of Artificial Sequence: Synthetic oligonucleotide
  Sense strand starting at position 186 of SEQ ID NO: 1882240
cagagcacuuuacgggaaa

SEQ ID NO: 2105663 - RNA, 19 nt, Artificial Sequence
  Description of Artificial Sequence: Synthetic oligonucleotide
  Antisense strand to SEQ ID NO: 2105662
uuucccguaaagugcucug

SEQ ID NO: 2105664 - RNA, 19 nt, Artificial Sequence
  Description of Artificial Sequence: Synthetic oligonucleotide
  Sense strand starting at position 187 of SEQ ID NO: 1882240
agagcacuuuacgggaaau

SEQ ID NO: 2105665 - RNA, 19 nt, Artificial Sequence
  Description of Artificial Sequence: Synthetic oligonucleotide
  Antisense strand to SEQ ID NO: 2105664
auuucccguaaagugcucu

SEQ ID NO: 2105666 - RNA, 19 nt, Artificial Sequence
  Description of Artificial Sequence: Synthetic oligonucleotide
  Sense strand starting at position 496 of SEQ ID NO: 1882240
uaggauuaguccgaggcca

SEQ ID NO: 2105667 - RNA, 19 nt, Artificial Sequence
  Description of Artificial Sequence: Synthetic oligonucleotide
  Antisense strand to SEQ ID NO: 2105666
uggccucggacuaauccua

SEQ ID NO: 2105668 - RNA, 19 nt, Artificial Sequence
  Description of Artificial Sequence: Synthetic oligonucleotide
  Sense strand starting at position 668 of SEQ ID NO: 1882240
accugcuuuaggcgaauua

SEQ ID NO: 2105669 - RNA, 19 nt, Artificial Sequence
  Description of Artificial Sequence: Synthetic oligonucleotide
  Antisense strand to SEQ ID NO: 2105668
uaauucgccuaaagcaggu

SEQ ID NO: 2105670 - RNA, 19 nt, Artificial Sequence
  Description of Artificial Sequence: Synthetic oligonucleotide
  Sense strand starting at position 669 of SEQ ID NO: 1882240
ccugcuuuaggcgaauuau

SEQ ID NO: 2105671 - RNA, 19 nt, Artificial Sequence
  Description of Artificial Sequence: Synthetic oligonucleotide
  Antisense strand to SEQ ID NO: 2105670
auaauucgccuaaagcagg

SEQ ID NO: 2105672 - RNA, 19 nt, Artificial Sequence
  Description of Artificial Sequence: Synthetic oligonucleotide
  Sense strand starting at position 678 of SEQ ID NO: 1882240
ggcgaauuaugguagcacu

SEQ ID NO: 2105673 - RNA, 19 nt, Artificial Sequence
  Description of Artificial Sequence: Synthetic oligonucleotide
  Antisense strand to SEQ ID NO: 2105672
agugcuaccauaauucgcc

SEQ ID NO: 2105674 - RNA, 19 nt, Artificial Sequence
  Description of Artificial Sequence: Synthetic oligonucleotide
  Sense strand starting at position 681 of SEQ ID NO: 1882240
gaauuaugguagcacuaga

SEQ ID NO: 2105675 - RNA, 19 nt, Artificial Sequence
  Description of Artificial Sequence: Synthetic oligonucleotide
  Antisense strand to SEQ ID NO: 2105674
ucuagugcuaccauaauuc

SEQ ID NO: 2105676 - RNA, 19 nt, Artificial Sequence
  Description of Artificial Sequence: Synthetic oligonucleotide
  Sense strand starting at position 1416 of SEQ ID NO: 1882240
gcucacuuuguguuugcaa

SEQ ID NO: 2105677 - RNA, 19 nt, Artificial Sequence
  Description of Artificial Sequence: Synthetic oligonucleotide
  Antisense strand to SEQ ID NO: 2105676
uugcaaacacaaagugagc

SEQ ID NO: 2105678 - RNA, 19 nt, Artificial Sequence
  Description of Artificial Sequence: Synthetic oligonucleotide
  Sense strand starting at position 1417 of SEQ ID NO: 1882240
cucacuuuguguuugcaaa

SEQ ID NO: 2105679 - RNA, 19 nt, Artificial Sequence
  Description of Artificial Sequence: Synthetic oligonucleotide
  Antisense strand to SEQ ID NO: 2105678
uuugcaaacacaaagugag

SEQ ID NO: 2105680 - RNA, 19 nt, Artificial Sequence
  Description of Artificial Sequence: Synthetic oligonucleotide
  Sense strand starting at position 1418 of SEQ ID NO: 1882240
ucacuuuguguuugcaaac

SEQ ID NO: 2105681 - RNA, 19 nt, Artificial Sequence
  Description of Artificial Sequence: Synthetic oligonucleotide
  Antisense strand to SEQ ID NO: 2105680
guuugcaaacacaaaguga

SEQ ID NO: 2105682 - RNA, 19 nt, Artificial Sequence
  Description of Artificial Sequence: Synthetic oligonucleotide
  Sense strand starting at position 1919 of SEQ ID NO: 1882240
ccgugucgucucuggugaa

SEQ ID NO: 2105683 - RNA, 19 nt, Artificial Sequence
  Description of Artificial Sequence: Synthetic oligonucleotide
  Antisense strand to SEQ ID NO: 2105682
uucaccagagacgacacgg

SEQ ID NO: 2105684 - RNA, 19 nt, Artificial Sequence
  Description of Artificial Sequence: Synthetic oligonucleotide
  Sense strand starting at position 1922 of SEQ ID NO: 1882240
ugucgucucuggugaagag

SEQ ID NO: 2105685 - RNA, 19 nt, Artificial Sequence
  Description of Artificial Sequence: Synthetic oligonucleotide
  Antisense strand to SEQ ID NO: 2105684
cucuucaccagagacgaca

SEQ ID NO: 2105686 - RNA, 19 nt, Artificial Sequence
  Description of Artificial Sequence: Synthetic oligonucleotide
  Sense strand starting at position 1942 of SEQ ID NO: 1882240
ggacuugucuugcugaggu

SEQ ID NO: 2105687 - RNA, 19 nt, Artificial Sequence
  Description of Artificial Sequence: Synthetic oligonucleotide
  Antisense strand to SEQ ID NO: 2105686
accucagcaagacaagucc

SEQ ID NO: 2105688 - RNA, 19 nt, Artificial Sequence
  Description of Artificial Sequence: Synthetic oligonucleotide
  Sense strand starting at position 2045 of SEQ ID NO: 1882240
uugagagcgucuggaaaug

SEQ ID NO: 2105689 - RNA, 19 nt, Artificial Sequence
  Description of Artificial Sequence: Synthetic oligonucleotide
  Antisense strand to SEQ ID NO: 2105688
cauuuccagacgcucucaa

SEQ ID NO: 2105690 - RNA, 19 nt, Artificial Sequence
  Description of Artificial Sequence: Synthetic oligonucleotide
  Sense strand starting at position 2068 of SEQ ID NO: 1882240
cugugauuugugcgccgga

SEQ ID NO: 2105691 - RNA, 19 nt, Artificial Sequence
  Description of Artificial Sequence: Synthetic oligonucleotide
  Antisense strand to SEQ ID NO: 2105690
uccggcgcacaaaucacag

SEQ ID NO: 2105692 - RNA, 19 nt, Artificial Sequence
  Description of Artificial Sequence: Synthetic oligonucleotide
  Sense strand starting at position 2404 of SEQ ID NO: 1882240
ccauaaaggaccggguaau

SEQ ID NO: 2105693 - RNA, 19 nt, Artificial Sequence
  Description of Artificial Sequence: Synthetic oligonucleotide
  Antisense strand to SEQ ID NO: 2105692
auuacccgguccuuuaugg

SEQ ID NO: 2105694 - RNA, 19 nt, Artificial Sequence
  Description of Artificial Sequence: Synthetic oligonucleotide
  Sense strand starting at position 2405 of SEQ ID NO: 1882240
cauaaaggaccggguaauu

SEQ ID NO: 2105695 - RNA, 19 nt, Artificial Sequence
  Description of Artificial Sequence: Synthetic oligonucleotide
  Antisense strand to SEQ ID NO: 2105694
aauuacccgguccuuuaug

SEQ ID NO: 2105696 - RNA, 19 nt, Artificial Sequence
  Description of Artificial Sequence: Synthetic oligonucleotide
  Sense strand starting at position 2414 of SEQ ID NO: 1882240
ccggguaauuucgcggaau

SEQ ID NO: 2105697 - RNA, 19 nt, Artificial Sequence
  Description of Artificial Sequence: Synthetic oligonucleotide
  Antisense strand to SEQ ID NO: 2105696
auuccgcgaaauuacccgg

SEQ ID NO: 2105698 - RNA, 19 nt, Artificial Sequence
  Description of Artificial Sequence: Synthetic oligonucleotide
  Sense strand starting at position 2415 of SEQ ID NO: 1882240
cggguaauuucgcggaaug

SEQ ID NO: 2105699 - RNA, 19 nt, Artificial Sequence
  Description of Artificial Sequence: Synthetic oligonucleotide
  Antisense strand to SEQ ID NO: 2105698
cauuccgcgaaauuacccg

SEQ ID NO: 2105700 - RNA, 19 nt, Artificial Sequence
  Description of Artificial Sequence: Synthetic oligonucleotide
  Sense strand starting at position 2416 of SEQ ID NO: 1882240
ggguaauuucgcggaaugc

SEQ ID NO: 2105701 - RNA, 19 nt, Artificial Sequence
  Description of Artificial Sequence: Synthetic oligonucleotide
  Antisense strand to SEQ ID NO: 2105700
gcauuccgcgaaauuaccc

SEQ ID NO: 2105702 - RNA, 19 nt, Artificial Sequence
  Description of Artificial Sequence: Synthetic oligonucleotide
  Sense strand starting at position 2486 of SEQ ID NO: 1882240
gggcgaucucgugaacaca

SEQ ID NO: 2105703 - RNA, 19 nt, Artificial Sequence
  Description of Artificial Sequence: Synthetic oligonucleotide
  Antisense strand to SEQ ID NO: 2105702
uguguucacgagaucgccc

SEQ ID NO: 2105704 - RNA, 19 nt, Artificial Sequence
  Description of Artificial Sequence: Synthetic oligonucleotide
  Sense strand starting at position 2617 of SEQ ID NO: 1882240
gcugguuuccucgcucacu

SEQ ID NO: 2105705 - RNA, 19 nt, Artificial Sequence
  Description of Artificial Sequence: Synthetic oligonucleotide
  Antisense strand to SEQ ID NO: 2105704
agugagcgaggaaaccagc

SEQ ID NO: 2105706 - RNA, 19 nt, Artificial Sequence
  Description of Artificial Sequence: Synthetic oligonucleotide
  Sense strand starting at position 2780 of SEQ ID NO: 1882240
ucgggugacucccgagaaa

SEQ ID NO: 2105707 - RNA, 19 nt, Artificial Sequence
  Description of Artificial Sequence: Synthetic oligonucleotide
  Antisense strand to SEQ ID NO: 2105706
uuucucgggagucacccga

SEQ ID NO: 2105708 - RNA, 19 nt, Artificial Sequence
  Description of Artificial Sequence: Synthetic oligonucleotide
  Sense strand starting at position 2793 of SEQ ID NO: 1882240
gagaaagcccgggagcauu

SEQ ID NO: 2105709 - RNA, 19 nt, Artificial Sequence
  Description of Artificial Sequence: Synthetic oligonucleotide
  Antisense strand to SEQ ID NO: 2105708
aaugcucccgggcuuucuc

SEQ ID NO: 2105710 - RNA, 19 nt, Artificial Sequence
  Description of Artificial Sequence: Synthetic oligonucleotide
  Sense strand starting at position 2861 of SEQ ID NO: 1882240
cggagaccugccuagauuc

SEQ ID NO: 2105711 - RNA, 19 nt, Artificial Sequence
  Description of Artificial Sequence: Synthetic oligonucleotide
  Antisense strand to SEQ ID NO: 2105710
gaaucuaggcaggucuccg

SEQ ID NO: 2105712 - RNA, 19 nt, Artificial Sequence
  Description of Artificial Sequence: Synthetic oligonucleotide
  Sense strand starting at position 2961 of SEQ ID NO: 1882240
ccgagugcccgcagaaaga

SEQ ID NO: 2105713 - RNA, 19 nt, Artificial Sequence
  Description of Artificial Sequence: Synthetic oligonucleotide
  Antisense strand to SEQ ID NO: 2105712
ucuuucugcgggcacucgg

SEQ ID NO: 2105714 - RNA, 19 nt, Artificial Sequence
  Description of Artificial Sequence: Synthetic oligonucleotide
  Sense strand starting at position 3449 of SEQ ID NO: 1882240
gggagucacucacacucua

SEQ ID NO: 2105715 - RNA, 19 nt, Artificial Sequence
  Description of Artificial Sequence: Synthetic oligonucleotide
  Antisense strand to SEQ ID NO: 2105714
uagagugugagugacuccc

SEQ ID NO: 2105716 - RNA, 19 nt, Artificial Sequence
  Description of Artificial Sequence: Synthetic oligonucleotide
  Sense strand starting at position 3608 of SEQ ID NO: 1882240
ugcuacuaaguuugggaga

SEQ ID NO: 2105717 - RNA, 19 nt, Artificial Sequence
  Description of Artificial Sequence: Synthetic oligonucleotide
  Antisense strand to SEQ ID NO: 2105716
ucucccaaacuuaguagca

SEQ ID NO: 2105718 - RNA, 19 nt, Artificial Sequence
  Description of Artificial Sequence: Synthetic oligonucleotide
  Sense strand starting at position 3701 of SEQ ID NO: 1882240
acagguuucccaggaguua

SEQ ID NO: 2105719 - RNA, 19 nt, Artificial Sequence
  Description of Artificial Sequence: Synthetic oligonucleotide
  Antisense strand to SEQ ID NO: 2105718
uaacuccugggaaaccugu

SEQ ID NO: 2105720 - RNA, 19 nt, Artificial Sequence
  Description of Artificial Sequence: Synthetic oligonucleotide
  Sense strand starting at position 3832 of SEQ ID NO: 1882240
gucccuuucuguguaggga

SEQ ID NO: 2105721 - RNA, 19 nt, Artificial Sequence
  Description of Artificial Sequence: Synthetic oligonucleotide
  Antisense strand to SEQ ID NO: 2105720
ucccuacacagaaagggac

SEQ ID NO: 2105722 - RNA, 19 nt, Artificial Sequence
  Description of Artificial Sequence: Synthetic oligonucleotide
  Sense strand starting at position 3833 of SEQ ID NO: 1882240
ucccuuucuguguagggau

SEQ ID NO: 2105723 - RNA, 19 nt, Artificial Sequence
  Description of Artificial Sequence: Synthetic oligonucleotide
  Antisense strand to SEQ ID NO: 2105722
aucccuacacagaaaggga

SEQ ID NO: 2105724 - RNA, 19 nt, Artificial Sequence
  Description of Artificial Sequence: Synthetic oligonucleotide
  Sense strand starting at position 3836 of SEQ ID NO: 1882240
cuuucuguguagggaucuu

SEQ ID NO: 2105725 - RNA, 19 nt, Artificial Sequence
  Description of Artificial Sequence: Synthetic oligonucleotide
  Antisense strand to SEQ ID NO: 2105724
aagaucccuacacagaaag

SEQ ID NO: 2105726 - RNA, 19 nt, Artificial Sequence
  Description of Artificial Sequence: Synthetic oligonucleotide
  Sense strand starting at position 3932 of SEQ ID NO: 1882240
gucccuucuugccaggaau

SEQ ID NO: 2105727 - RNA, 19 nt, Artificial Sequence
  Description of Artificial Sequence: Synthetic oligonucleotide
  Antisense strand to SEQ ID NO: 2105726
auuccuggcaagaagggac

SEQ ID NO: 2105728 - RNA, 19 nt, Artificial Sequence
  Description of Artificial Sequence: Synthetic oligonucleotide
  Sense strand starting at position 132 of SEQ ID NO: 1882239
cagccuuugcugcaagaag

SEQ ID NO: 2105729 - RNA, 19 nt, Artificial Sequence
  Description of Artificial Sequence: Synthetic oligonucleotide
  Antisense strand to SEQ ID NO: 2105728
cuucuugcagcaaaggcug

SEQ ID NO: 2105730 - RNA, 19 nt, Artificial Sequence
  Description of Artificial Sequence: Synthetic oligonucleotide
  Sense strand starting at position 265 of SEQ ID NO: 1882239
gccucaacagaagguaaau

SEQ ID NO: 2105731 - RNA, 19 nt, Artificial Sequence
  Description of Artificial Sequence: Synthetic oligonucleotide
  Antisense strand to SEQ ID NO: 2105730
auuuaccuucuguugaggc

SEQ ID NO: 2105732 - RNA, 19 nt, Artificial Sequence
  Description of Artificial Sequence: Synthetic oligonucleotide
  Sense strand starting at position 274 of SEQ ID NO: 1882239
gaagguaaaucagauagua

SEQ ID NO: 2105733 - RNA, 19 nt, Artificial Sequence
  Description of Artificial Sequence: Synthetic oligonucleotide
  Antisense strand to SEQ ID NO: 2105732
uacuaucugauuuaccuuc

SEQ ID NO: 2105734 - RNA, 19 nt, Artificial Sequence
  Description of Artificial Sequence: Synthetic oligonucleotide
  Sense strand starting at position 300 of SEQ ID NO: 1882239
gggcuuucuuucucccaga

SEQ ID NO: 2105735 - RNA, 19 nt, Artificial Sequence
  Description of Artificial Sequence: Synthetic oligonucleotide
  Antisense strand to SEQ ID NO: 2105734
ucugggagaaagaaagccc

SEQ ID NO: 2105736 - RNA, 19 nt, Artificial Sequence
  Description of Artificial Sequence: Synthetic oligonucleotide
  Sense strand starting at position 301 of SEQ ID NO: 1882239
ggcuuucuuucucccagaa

SEQ ID NO: 2105737 - RNA, 19 nt, Artificial Sequence
  Description of Artificial Sequence: Synthetic oligonucleotide
  Antisense strand to SEQ ID NO: 2105736
uucugggagaaagaaagcc

SEQ ID NO: 2105738 - RNA, 19 nt, Artificial Sequence
  Description of Artificial Sequence: Synthetic oligonucleotide
  Sense strand starting at position 347 of SEQ ID NO: 1882239
caggcagugucgcuucaga

SEQ ID NO: 2105739 - RNA, 19 nt, Artificial Sequence
  Description of Artificial Sequence: Synthetic oligonucleotide
  Antisense strand to SEQ ID NO: 2105738
ucugaagcgacacugccug

SEQ ID NO: 2105740 - RNA, 19 nt, Artificial Sequence
  Description of Artificial Sequence: Synthetic oligonucleotide
  Sense strand starting at position 371 of SEQ ID NO: 1882239
ccaugagcuucuuucuugu

SEQ ID NO: 2105741 - RNA, 19 nt, Artificial Sequence
  Description of Artificial Sequence: Synthetic oligonucleotide
  Antisense strand to SEQ ID NO: 2105740
acaagaaagaagcucaugg

SEQ ID NO: 2105742 - RNA, 19 nt, Artificial Sequence
  Description of Artificial Sequence: Synthetic oligonucleotide
  Sense strand starting at position 380 of SEQ ID NO: 1882239
ucuuucuuguccucacuga

SEQ ID NO: 2105743 - RNA, 19 nt, Artificial Sequence
  Description of Artificial Sequence: Synthetic oligonucleotide
  Antisense strand to SEQ ID NO: 2105742
ucagugaggacaagaaaga

SEQ ID NO: 2105744 - RNA, 19 nt, Artificial Sequence
  Description of Artificial Sequence: Synthetic oligonucleotide
  Sense strand starting at position 409 of SEQ ID NO: 1882239
guuggaaucuggcucauca

SEQ ID NO: 2105745 - RNA, 19 nt, Artificial Sequence
  Description of Artificial Sequence: Synthetic oligonucleotide
  Antisense strand to SEQ ID NO: 2105744
ugaugagccagauuccaac

SEQ ID NO: 2105746 - RNA, 19 nt, Artificial Sequence
  Description of Artificial Sequence: Synthetic oligonucleotide
  Sense strand starting at position 441 of SEQ ID NO: 1882239
guguaagccugggcaaguu

SEQ ID NO: 2105747 - RNA, 19 nt, Artificial Sequence
  Description of Artificial Sequence: Synthetic oligonucleotide
  Antisense strand to SEQ ID NO: 2105746
aacuugcccaggcuuacac

SEQ ID NO: 2105748 - RNA, 19 nt, Artificial Sequence
  Description of Artificial Sequence: Synthetic oligonucleotide
  Sense strand starting at position 556 of SEQ ID NO: 1882239
ggugguacgacucagaugu

SEQ ID NO: 2105749 - RNA, 19 nt, Artificial Sequence
  Description of Artificial Sequence: Synthetic oligonucleotide
  Antisense strand to SEQ ID NO: 2105748
acaucugagucguaccacc

SEQ ID NO: 2105750 - RNA, 19 nt, Artificial Sequence
  Description of Artificial Sequence: Synthetic oligonucleotide
  Sense strand starting at position 566 of SEQ ID NO: 1882239
cucagauguuagcuguuau

SEQ ID NO: 2105751 - RNA, 19 nt, Artificial Sequence
  Description of Artificial Sequence: Synthetic oligonucleotide
  Antisense strand to SEQ ID NO: 2105750
auaacagcuaacaucugag

SEQ ID NO: 2105752 - RNA, 19 nt, Artificial Sequence
  Description of Artificial Sequence: Synthetic oligonucleotide
  Sense strand starting at position 589 of SEQ ID NO: 1882239
uucuuauggcuaugguuau

SEQ ID NO: 2105753 - RNA, 19 nt, Artificial Sequence
  Description of Artificial Sequence: Synthetic oligonucleotide
  Antisense strand to SEQ ID NO: 2105752
auaaccauagccauaagaa

SEQ ID NO: 2105754 - RNA, 19 nt, Artificial Sequence
  Description of Artificial Sequence: Synthetic oligonucleotide
  Sense strand starting at position 595 of SEQ ID NO: 1882239
uggcuaugguuaucucagu

SEQ ID NO: 2105755 - RNA, 19 nt, Artificial Sequence
  Description of Artificial Sequence: Synthetic oligonucleotide
  Antisense strand to SEQ ID NO: 2105754
acugagauaaccauagcca

SEQ ID NO: 2105756 - RNA, 19 nt, Artificial Sequence
  Description of Artificial Sequence: Synthetic oligonucleotide
  Sense strand starting at position 596 of SEQ ID NO: 1882239
ggcuaugguuaucucaguu

SEQ ID NO: 2105757 - RNA, 19 nt, Artificial Sequence
  Description of Artificial Sequence: Synthetic oligonucleotide
  Antisense strand to SEQ ID NO: 2105756
aacugagauaaccauagcc

SEQ ID NO: 2105758 - RNA, 19 nt, Artificial Sequence
  Description of Artificial Sequence: Synthetic oligonucleotide
  Sense strand starting at position 600 of SEQ ID NO: 1882239
augguuaucucaguugcca

SEQ ID NO: 2105759 - RNA, 19 nt, Artificial Sequence
  Description of Artificial Sequence: Synthetic oligonucleotide
  Antisense strand to SEQ ID NO: 2105758
uggcaacugagauaaccau

SEQ ID NO: 2105760 - RNA, 19 nt, Artificial Sequence
  Description of Artificial Sequence: Synthetic oligonucleotide
  Sense strand starting at position 774 of SEQ ID NO: 1882239
ugucacuaacauugcagaa

SEQ ID NO: 2105761 - RNA, 19 nt, Artificial Sequence
  Description of Artificial Sequence: Synthetic oligonucleotide
  Antisense strand to SEQ ID NO: 2105760
uucugcaauguuagugaca

SEQ ID NO: 2105762 - RNA, 19 nt, Artificial Sequence
  Description of Artificial Sequence: Synthetic oligonucleotide
  Sense strand starting at position 990 of SEQ ID NO: 1882239
ccaccugccugaggauuua

SEQ ID NO: 2105763 - RNA, 19 nt, Artificial Sequence
  Description of Artificial Sequence: Synthetic oligonucleotide
  Antisense strand to SEQ ID NO: 2105762
uaaauccucaggcaggugg

SEQ ID NO: 2105764 - RNA, 19 nt, Artificial Sequence
  Description of Artificial Sequence: Synthetic oligonucleotide
  Sense strand starting at position 1215 of SEQ ID NO: 1882239
uauugagauuuccacggga

SEQ ID NO: 2105765 - RNA, 19 nt, Artificial Sequence
  Description of Artificial Sequence: Synthetic oligonucleotide
  Antisense strand to SEQ ID NO: 2105764
ucccguggaaaucucaaua

SEQ ID NO: 2105766 - RNA, 19 nt, Artificial Sequence
  Description of Artificial Sequence: Synthetic oligonucleotide
  Sense strand starting at position 1236 of SEQ ID NO: 1882239
cugaguggugcgucugcua

SEQ ID NO: 2105767 - RNA, 19 nt, Artificial Sequence
  Description of Artificial Sequence: Synthetic oligonucleotide
  Antisense strand to SEQ ID NO: 2105766
uagcagacgcaccacucag

SEQ ID NO: 2105768 - RNA, 19 nt, Artificial Sequence
  Description of Artificial Sequence: Synthetic oligonucleotide
  Sense strand starting at position 1239 of SEQ ID NO: 1882239
aguggugcgucugcuaaca

SEQ ID NO: 2105769 - RNA, 19 nt, Artificial Sequence
  Description of Artificial Sequence: Synthetic oligonucleotide
  Antisense strand to SEQ ID NO: 2105768
uguuagcagacgcaccacu

SEQ ID NO: 2105770 - RNA, 19 nt, Artificial Sequence
  Description of Artificial Sequence: Synthetic oligonucleotide
  Sense strand starting at position 1403 of SEQ ID NO: 1882239
ucuaauuuguccggauaau

SEQ ID NO: 2105771 - RNA, 19 nt, Artificial Sequence
  Description of Artificial Sequence: Synthetic oligonucleotide
  Antisense strand to SEQ ID NO: 2105770
auuauccggacaaauuaga

SEQ ID NO: 2105772 - RNA, 19 nt, Artificial Sequence
  Description of Artificial Sequence: Synthetic oligonucleotide
  Sense strand starting at position 1413 of SEQ ID NO: 1882239
ccggauaauugccucaacu

SEQ ID NO: 2105773 - RNA, 19 nt, Artificial Sequence
  Description of Artificial Sequence: Synthetic oligonucleotide
  Antisense strand to SEQ ID NO: 2105772
aguugaggcaauuauccgg

SEQ ID NO: 2105774 - RNA, 19 nt, Artificial Sequence
  Description of Artificial Sequence: Synthetic oligonucleotide
  Sense strand starting at position 1415 of SEQ ID NO: 1882239
ggauaauugccucaacuuu

SEQ ID NO: 2105775 - RNA, 19 nt, Artificial Sequence
  Description of Artificial Sequence: Synthetic oligonucleotide
  Antisense strand to SEQ ID NO: 2105774
aaaguugaggcaauuaucc

SEQ ID NO: 2105776 - RNA, 19 nt, Artificial Sequence
  Description of Artificial Sequence: Synthetic oligonucleotide
  Sense strand starting at position 1488 of SEQ ID NO: 1882239
cagagcacuuuacgggaaa

SEQ ID NO: 2105777 - RNA, 19 nt, Artificial Sequence
  Description of Artificial Sequence: Synthetic oligonucleotide
  Antisense strand to SEQ ID NO: 2105776
uuucccguaaagugcucug

SEQ ID NO: 2105778 - RNA, 19 nt, Artificial Sequence
  Description of Artificial Sequence: Synthetic oligonucleotide
  Sense strand starting at position 1970 of SEQ ID NO: 1882239
accugcuuuaggcgaauua

SEQ ID NO: 2105779 - RNA, 19 nt, Artificial Sequence
  Description of Artificial Sequence: Synthetic oligonucleotide
  Antisense strand to SEQ ID NO: 2105778
uaauucgccuaaagcaggu

SEQ ID NO: 2105780 - RNA, 19 nt, Artificial Sequence
  Description of Artificial Sequence: Synthetic oligonucleotide
  Sense strand starting at position 1971 of SEQ ID NO: 1882239
ccugcuuuaggcgaauuau

SEQ ID NO: 2105781 - RNA, 19 nt, Artificial Sequence
  Description of Artificial Sequence: Synthetic oligonucleotide
  Antisense strand to SEQ ID NO: 2105780
auaauucgccuaaagcagg

SEQ ID NO: 2105782 - RNA, 19 nt, Artificial Sequence
  Description of Artificial Sequence: Synthetic oligonucleotide
  Sense strand starting at position 1983 of SEQ ID NO: 1882239
gaauuaugguagcacuaga

SEQ ID NO: 2105783 - RNA, 19 nt, Artificial Sequence
  Description of Artificial Sequence: Synthetic oligonucleotide
  Antisense strand to SEQ ID NO: 2105782
ucuagugcuaccauaauuc

SEQ ID NO: 2105784 - RNA, 19 nt, Artificial Sequence
  Description of Artificial Sequence: Synthetic oligonucleotide
  Sense strand starting at position 2718 of SEQ ID NO: 1882239
gcucacuuuguguuugcaa

SEQ ID NO: 2105785 - RNA, 19 nt, Artificial Sequence
  Description of Artificial Sequence: Synthetic oligonucleotide
  Antisense strand to SEQ ID NO: 2105784
uugcaaacacaaagugagc

SEQ ID NO: 2105786 - RNA, 19 nt, Artificial Sequence
  Description of Artificial Sequence: Synthetic oligonucleotide
  Sense strand starting at position 2719 of SEQ ID NO: 1882239
cucacuuuguguuugcaaa

SEQ ID NO: 2105787 - RNA, 19 nt, Artificial Sequence
  Description of Artificial Sequence: Synthetic oligonucleotide
  Antisense strand to SEQ ID NO: 2105786
uuugcaaacacaaagugag

SEQ ID NO: 2105788 - RNA, 19 nt, Artificial Sequence
  Description of Artificial Sequence: Synthetic oligonucleotide
  Sense strand starting at position 2720 of SEQ ID NO: 1882239
ucacuuuguguuugcaaac

SEQ ID NO: 2105789 - RNA, 19 nt, Artificial Sequence
  Description of Artificial Sequence: Synthetic oligonucleotide
  Antisense strand to SEQ ID NO: 2105788
guuugcaaacacaaaguga

SEQ ID NO: 2105790 - RNA, 19 nt, Artificial Sequence
  Description of Artificial Sequence: Synthetic oligonucleotide
  Sense strand starting at position 3221 of SEQ ID NO: 1882239
ccgugucgucucuggugaa

SEQ ID NO: 2105791 - RNA, 19 nt, Artificial Sequence
  Description of Artificial Sequence: Synthetic oligonucleotide
  Antisense strand to SEQ ID NO: 2105790
uucaccagagacgacacgg

SEQ ID NO: 2105792 - RNA, 19 nt, Artificial Sequence
  Description of Artificial Sequence: Synthetic oligonucleotide
  Sense strand starting at position 3244 of SEQ ID NO: 1882239
ggacuugucuugcugaggu

SEQ ID NO: 2105793 - RNA, 19 nt, Artificial Sequence
  Description of Artificial Sequence: Synthetic oligonucleotide
  Antisense strand to SEQ ID NO: 2105792
accucagcaagacaagucc

SEQ ID NO: 2105794 - RNA, 19 nt, Artificial Sequence
  Description of Artificial Sequence: Synthetic oligonucleotide
  Sense strand starting at position 3370 of SEQ ID NO: 1882239
cugugauuugugcgccgga

SEQ ID NO: 2105795 - RNA, 19 nt, Artificial Sequence
  Description of Artificial Sequence: Synthetic oligonucleotide
  Antisense strand to SEQ ID NO: 2105794
uccggcgcacaaaucacag

SEQ ID NO: 2105796 - RNA, 19 nt, Artificial Sequence
  Description of Artificial Sequence: Synthetic oligonucleotide
  Sense strand starting at position 3706 of SEQ ID NO: 1882239
ccauaaaggaccggguaau

SEQ ID NO: 2105797 - RNA, 19 nt, Artificial Sequence
  Description of Artificial Sequence: Synthetic oligonucleotide
  Antisense strand to SEQ ID NO: 2105796
auuacccgguccuuuaugg

SEQ ID NO: 2105798 - RNA, 19 nt, Artificial Sequence
  Description of Artificial Sequence: Synthetic oligonucleotide
  Sense strand starting at position 3707 of SEQ ID NO: 1882239
cauaaaggaccggguaauu

SEQ ID NO: 2105799 - RNA, 19 nt, Artificial Sequence
  Description of Artificial Sequence: Synthetic oligonucleotide
  Antisense strand to SEQ ID NO: 2105798
aauuacccgguccuuuaug

SEQ ID NO: 2105800 - RNA, 19 nt, Artificial Sequence
  Description of Artificial Sequence: Synthetic oligonucleotide
  Sense strand starting at position 3716 of SEQ ID NO: 1882239
ccggguaauuucgcggaau

SEQ ID NO: 2105801 - RNA, 19 nt, Artificial Sequence
  Description of Artificial Sequence: Synthetic oligonucleotide
  Antisense strand to SEQ ID NO: 2105800
auuccgcgaaauuacccgg

SEQ ID NO: 2105802 - RNA, 19 nt, Artificial Sequence
  Description of Artificial Sequence: Synthetic oligonucleotide
  Sense strand starting at position 3718 of SEQ ID NO: 1882239
ggguaauuucgcggaaugc

SEQ ID NO: 2105803 - RNA, 19 nt, Artificial Sequence
  Description of Artificial Sequence: Synthetic oligonucleotide
  Antisense strand to SEQ ID NO: 2105802
gcauuccgcgaaauuaccc

SEQ ID NO: 2105804 - RNA, 19 nt, Artificial Sequence
  Description of Artificial Sequence: Synthetic oligonucleotide
  Sense strand starting at position 3788 of SEQ ID NO: 1882239
gggcgaucucgugaacaca

SEQ ID NO: 2105805 - RNA, 19 nt, Artificial Sequence
  Description of Artificial Sequence: Synthetic oligonucleotide
  Antisense strand to SEQ ID NO: 2105804
uguguucacgagaucgccc

SEQ ID NO: 2105806 - RNA, 19 nt, Artificial Sequence
  Description of Artificial Sequence: Synthetic oligonucleotide
  Sense strand starting at position 3919 of SEQ ID NO: 1882239
gcugguuuccucgcucacu

SEQ ID NO: 2105807 - RNA, 19 nt, Artificial Sequence
  Description of Artificial Sequence: Synthetic oligonucleotide
  Antisense strand to SEQ ID NO: 2105806
agugagcgaggaaaccagc

SEQ ID NO: 2105808 - RNA, 19 nt, Artificial Sequence
  Description of Artificial Sequence: Synthetic oligonucleotide
  Sense strand starting at position 330 of SEQ ID NO: 1882242
cuucgagcucuuuggcaca

SEQ ID NO: 2105809 - RNA, 19 nt, Artificial Sequence
  Description of Artificial Sequence: Synthetic oligonucleotide
  Antisense strand to SEQ ID NO: 2105808
ugugccaaagagcucgaag

SEQ ID NO: 2105810 - RNA, 19 nt, Artificial Sequence
  Description of Artificial Sequence: Synthetic oligonucleotide
  Sense strand starting at position 511 of SEQ ID NO: 1882242
cugggaccuuccucuagua

SEQ ID NO: 2105811 - RNA, 19 nt, Artificial Sequence
  Description of Artificial Sequence: Synthetic oligonucleotide
  Antisense strand to SEQ ID NO: 2105810
uacuagaggaaggucccag

SEQ ID NO: 2105812 - RNA, 19 nt, Artificial Sequence
  Description of Artificial Sequence: Synthetic oligonucleotide
  Sense strand starting at position 600 of SEQ ID NO: 1882242
gcccgguggguuuaggaaa

SEQ ID NO: 2105813 - RNA, 19 nt, Artificial Sequence
  Description of Artificial Sequence: Synthetic oligonucleotide
  Antisense strand to SEQ ID NO: 2105812
uuuccuaaacccaccgggc

SEQ ID NO: 2105814 - RNA, 19 nt, Artificial Sequence
  Description of Artificial Sequence: Synthetic oligonucleotide
  Sense strand starting at position 601 of SEQ ID NO: 1882242
cccgguggguuuaggaaau

SEQ ID NO: 2105815 - RNA, 19 nt, Artificial Sequence
  Description of Artificial Sequence: Synthetic oligonucleotide
  Antisense strand to SEQ ID NO: 2105814
auuuccuaaacccaccggg

SEQ ID NO: 2105816 - RNA, 19 nt, Artificial Sequence
  Description of Artificial Sequence: Synthetic oligonucleotide
  Sense strand starting at position 647 of SEQ ID NO: 1882242
cccgguggguugagaagau

SEQ ID NO: 2105817 - RNA, 19 nt, Artificial Sequence
  Description of Artificial Sequence: Synthetic oligonucleotide
  Antisense strand to SEQ ID NO: 2105816
aucuucucaacccaccggg

SEQ ID NO: 2105818 - RNA, 19 nt, Artificial Sequence
  Description of Artificial Sequence: Synthetic oligonucleotide
  Sense strand starting at position 820 of SEQ ID NO: 1882242
cguagagcuguucacuaug

SEQ ID NO: 2105819 - RNA, 19 nt, Artificial Sequence
  Description of Artificial Sequence: Synthetic oligonucleotide
  Antisense strand to SEQ ID NO: 2105818
cauagugaacagcucuacg

SEQ ID NO: 2105820 - RNA, 19 nt, Artificial Sequence
  Description of Artificial Sequence: Synthetic oligonucleotide
  Sense strand starting at position 1370 of SEQ ID NO: 1882242
gccaaugagcuccaaacau

SEQ ID NO: 2105821 - RNA, 19 nt, Artificial Sequence
  Description of Artificial Sequence: Synthetic oligonucleotide
  Antisense strand to SEQ ID NO: 2105820
auguuuggagcucauuggc

SEQ ID NO: 2105822 - RNA, 19 nt, Artificial Sequence
  Description of Artificial Sequence: Synthetic oligonucleotide
  Sense strand starting at position 1383 of SEQ ID NO: 1882242
aaacaucauuagugagaag

SEQ ID NO: 2105823 - RNA, 19 nt, Artificial Sequence
  Description of Artificial Sequence: Synthetic oligonucleotide
  Antisense strand to SEQ ID NO: 2105822
cuucucacuaaugauguuu

SEQ ID NO: 2105824 - RNA, 19 nt, Artificial Sequence
  Description of Artificial Sequence: Synthetic oligonucleotide
  Sense strand starting at position 1386 of SEQ ID NO: 1882242
caucauuagugagaagaaa

SEQ ID NO: 2105825 - RNA, 19 nt, Artificial Sequence
  Description of Artificial Sequence: Synthetic oligonucleotide
  Antisense strand to SEQ ID NO: 2105824
uuucuucucacuaaugaug

SEQ ID NO: 2105826 - RNA, 19 nt, Artificial Sequence
  Description of Artificial Sequence: Synthetic oligonucleotide
  Sense strand starting at position 1421 of SEQ ID NO: 1882242
acuccacauuuguauugau

SEQ ID NO: 2105827 - RNA, 19 nt, Artificial Sequence
  Description of Artificial Sequence: Synthetic oligonucleotide
  Antisense strand to SEQ ID NO: 2105826
aucaauacaaauguggagu

SEQ ID NO: 2105828 - RNA, 19 nt, Artificial Sequence
  Description of Artificial Sequence: Synthetic oligonucleotide
  Sense strand starting at position 1447 of SEQ ID NO: 1882242
auaaauggauucuugucaa

SEQ ID NO: 2105829 - RNA, 19 nt, Artificial Sequence
  Description of Artificial Sequence: Synthetic oligonucleotide
  Antisense strand to SEQ ID NO: 2105828
uugacaagaauccauuuau

SEQ ID NO: 2105830 - RNA, 19 nt, Artificial Sequence
  Description of Artificial Sequence: Synthetic oligonucleotide
  Sense strand starting at position 1596 of SEQ ID NO: 1882242
cguuguauuccugggagag

SEQ ID NO: 2105831 - RNA, 19 nt, Artificial Sequence
  Description of Artificial Sequence: Synthetic oligonucleotide
  Antisense strand to SEQ ID NO: 2105830
cucucccaggaauacaacg

SEQ ID NO: 2105832 - RNA, 19 nt, Artificial Sequence
  Description of Artificial Sequence: Synthetic oligonucleotide
  Sense strand starting at position 1597 of SEQ ID NO: 1882242
guuguauuccugggagagc

SEQ ID NO: 2105833 - RNA, 19 nt, Artificial Sequence
  Description of Artificial Sequence: Synthetic oligonucleotide
  Antisense strand to SEQ ID NO: 2105832
gcucucccaggaauacaac

SEQ ID NO: 2105834 - RNA, 19 nt, Artificial Sequence
  Description of Artificial Sequence: Synthetic oligonucleotide
  Sense strand starting at position 1653 of SEQ ID NO: 1882242
aaggguggucgccaugagu

SEQ ID NO: 2105835 - RNA, 19 nt, Artificial Sequence
  Description of Artificial Sequence: Synthetic oligonucleotide
  Antisense strand to SEQ ID NO: 2105834
acucauggcgaccacccuu

SEQ ID NO: 2105836 - RNA, 19 nt, Artificial Sequence
  Description of Artificial Sequence: Synthetic oligonucleotide
  Sense strand starting at position 1710 of SEQ ID NO: 1882242
guccucagcucaucaagaa

SEQ ID NO: 2105837 - RNA, 19 nt, Artificial Sequence
  Description of Artificial Sequence: Synthetic oligonucleotide
  Antisense strand to SEQ ID NO: 2105836
uucuugaugagcugaggac

SEQ ID NO: 2105838 - RNA, 19 nt, Artificial Sequence
  Description of Artificial Sequence: Synthetic oligonucleotide
  Sense strand starting at position 1810 of SEQ ID NO: 1882242
uggccuguucgugauggaa

SEQ ID NO: 2105839 - RNA, 19 nt, Artificial Sequence
  Description of Artificial Sequence: Synthetic oligonucleotide
  Antisense strand to SEQ ID NO: 2105838
uuccaucacgaacaggcca

SEQ ID NO: 2105840 - RNA, 19 nt, Artificial Sequence
  Description of Artificial Sequence: Synthetic oligonucleotide
  Sense strand starting at position 1972 of SEQ ID NO: 1882242
ugguuuccauccucuauca

SEQ ID NO: 2105841 - RNA, 19 nt, Artificial Sequence
  Description of Artificial Sequence: Synthetic oligonucleotide
  Antisense strand to SEQ ID NO: 2105840
ugauagaggauggaaacca

SEQ ID NO: 2105842 - RNA, 19 nt, Artificial Sequence
  Description of Artificial Sequence: Synthetic oligonucleotide
  Sense strand starting at position 1982 of SEQ ID NO: 1882242
ccucuaucaugagauagau

SEQ ID NO: 2105843 - RNA, 19 nt, Artificial Sequence
  Description of Artificial Sequence: Synthetic oligonucleotide
  Antisense strand to SEQ ID NO: 2105842
aucuaucucaugauagagg

SEQ ID NO: 2105844 - RNA, 19 nt, Artificial Sequence
  Description of Artificial Sequence: Synthetic oligonucleotide
  Sense strand starting at position 2010 of SEQ ID NO: 1882242
cugagaacauucuagaacu

SEQ ID NO: 2105845 - RNA, 19 nt, Artificial Sequence
  Description of Artificial Sequence: Synthetic oligonucleotide
  Antisense strand to SEQ ID NO: 2105844
aguucuagaauguucucag

SEQ ID NO: 2105846 - RNA, 19 nt, Artificial Sequence
  Description of Artificial Sequence: Synthetic oligonucleotide
  Sense strand starting at position 2277 of SEQ ID NO: 1882242
cagugauggcugcacaguu

SEQ ID NO: 2105847 - RNA, 19 nt, Artificial Sequence
  Description of Artificial Sequence: Synthetic oligonucleotide
  Antisense strand to SEQ ID NO: 2105846
aacugugcagccaucacug

SEQ ID NO: 2105848 - RNA, 19 nt, Artificial Sequence
  Description of Artificial Sequence: Synthetic oligonucleotide
  Sense strand starting at position 2293 of SEQ ID NO: 1882242
guuccuaaaugcucugaag

SEQ ID NO: 2105849 - RNA, 19 nt, Artificial Sequence
  Description of Artificial Sequence: Synthetic oligonucleotide
  Antisense strand to SEQ ID NO: 2105848
cuucagagcauuuaggaac

SEQ ID NO: 2105850 - RNA, 19 nt, Artificial Sequence
  Description of Artificial Sequence: Synthetic oligonucleotide
  Sense strand starting at position 2295 of SEQ ID NO: 1882242
uccuaaaugcucugaaguu

SEQ ID NO: 2105851 - RNA, 19 nt, Artificial Sequence
  Description of Artificial Sequence: Synthetic oligonucleotide
  Antisense strand to SEQ ID NO: 2105850
aacuucagagcauuuagga

SEQ ID NO: 2105852 - RNA, 19 nt, Artificial Sequence
  Description of Artificial Sequence: Synthetic oligonucleotide
  Sense strand starting at position 2302 of SEQ ID NO: 1882242
ugcucugaaguuuaugaaa

SEQ ID NO: 2105853 - RNA, 19 nt, Artificial Sequence
  Description of Artificial Sequence: Synthetic oligonucleotide
  Antisense strand to SEQ ID NO: 2105852
uuucauaaacuucagagca

SEQ ID NO: 2105854 - RNA, 19 nt, Artificial Sequence
  Description of Artificial Sequence: Synthetic oligonucleotide
  Sense strand starting at position 2321 of SEQ ID NO: 1882242
cauuucgcuuuagaggaau

SEQ ID NO: 2105855 - RNA, 19 nt, Artificial Sequence
  Description of Artificial Sequence: Synthetic oligonucleotide
  Antisense strand to SEQ ID NO: 2105854
auuccucuaaagcgaaaug

SEQ ID NO: 2105856 - RNA, 19 nt, Artificial Sequence
  Description of Artificial Sequence: Synthetic oligonucleotide
  Sense strand starting at position 2323 of SEQ ID NO: 1882242
uuucgcuuuagaggaauau

SEQ ID NO: 2105857 - RNA, 19 nt, Artificial Sequence
  Description of Artificial Sequence: Synthetic oligonucleotide
  Antisense strand to SEQ ID NO: 2105856
auauuccucuaaagcgaaa

SEQ ID NO: 2105858 - RNA, 19 nt, Artificial Sequence
  Description of Artificial Sequence: Synthetic oligonucleotide
  Sense strand starting at position 2324 of SEQ ID NO: 1882242
uucgcuuuagaggaauaua

SEQ ID NO: 2105859 - RNA, 19 nt, Artificial Sequence
  Description of Artificial Sequence: Synthetic oligonucleotide
  Antisense strand to SEQ ID NO: 2105858
uauauuccucuaaagcgaa

SEQ ID NO: 2105860 - RNA, 19 nt, Artificial Sequence
  Description of Artificial Sequence: Synthetic oligonucleotide
  Sense strand starting at position 2564 of SEQ ID NO: 1882242
agccuucauguccgggaau

SEQ ID NO: 2105861 - RNA, 19 nt, Artificial Sequence
  Description of Artificial Sequence: Synthetic oligonucleotide
  Antisense strand to SEQ ID NO: 2105860
auucccggacaugaaggcu

SEQ ID NO: 2105862 - RNA, 19 nt, Artificial Sequence
  Description of Artificial Sequence: Synthetic oligonucleotide
  Sense strand starting at position 2567 of SEQ ID NO: 1882242
cuucauguccgggaaugcu

SEQ ID NO: 2105863 - RNA, 19 nt, Artificial Sequence
  Description of Artificial Sequence: Synthetic oligonucleotide
  Antisense strand to SEQ ID NO: 2105862
agcauucccggacaugaag

SEQ ID NO: 2105864 - RNA, 19 nt, Artificial Sequence
  Description of Artificial Sequence: Synthetic oligonucleotide
  Sense strand starting at position 2720 of SEQ ID NO: 1882242
ugaggagucugggcucaga

SEQ ID NO: 2105865 - RNA, 19 nt, Artificial Sequence
  Description of Artificial Sequence: Synthetic oligonucleotide
  Antisense strand to SEQ ID NO: 2105864
ucugagcccagacuccuca

SEQ ID NO: 2105866 - RNA, 19 nt, Artificial Sequence
  Description of Artificial Sequence: Synthetic oligonucleotide
  Sense strand starting at position 2999 of SEQ ID NO: 1882242
aaagaauguuggccagaug

SEQ ID NO: 2105867 - RNA, 19 nt, Artificial Sequence
  Description of Artificial Sequence: Synthetic oligonucleotide
  Antisense strand to SEQ ID NO: 2105866
caucuggccaacauucuuu

SEQ ID NO: 2105868 - RNA, 19 nt, Artificial Sequence
  Description of Artificial Sequence: Synthetic oligonucleotide
  Sense strand starting at position 3026 of SEQ ID NO: 1882242
uuuacuccuuugguaagua

SEQ ID NO: 2105869 - RNA, 19 nt, Artificial Sequence
  Description of Artificial Sequence: Synthetic oligonucleotide
  Antisense strand to SEQ ID NO: 2105868
uacuuaccaaaggaguaaa

SEQ ID NO: 2105870 - RNA, 19 nt, Artificial Sequence
  Description of Artificial Sequence: Synthetic oligonucleotide
  Sense strand starting at position 3205 of SEQ ID NO: 1882242
cgucuucugggaugacuga

SEQ ID NO: 2105871 - RNA, 19 nt, Artificial Sequence
  Description of Artificial Sequence: Synthetic oligonucleotide
  Antisense strand to SEQ ID NO: 2105870
ucagucaucccagaagacg

SEQ ID NO: 2105872 - RNA, 19 nt, Artificial Sequence
  Description of Artificial Sequence: Synthetic oligonucleotide
  Sense strand starting at position 3222 of SEQ ID NO: 1882242
gaggcugguaucugggaga

SEQ ID NO: 2105873 - RNA, 19 nt, Artificial Sequence
  Description of Artificial Sequence: Synthetic oligonucleotide
  Antisense strand to SEQ ID NO: 2105872
ucucccagauaccagccuc

SEQ ID NO: 2105874 - RNA, 19 nt, Artificial Sequence
  Description of Artificial Sequence: Synthetic oligonucleotide
  Sense strand starting at position 3227 of SEQ ID NO: 1882242
ugguaucugggagaugcau

SEQ ID NO: 2105875 - RNA, 19 nt, Artificial Sequence
  Description of Artificial Sequence: Synthetic oligonucleotide
  Antisense strand to SEQ ID NO: 2105874
augcaucucccagauacca

SEQ ID NO: 2105876 - RNA, 19 nt, Artificial Sequence
  Description of Artificial Sequence: Synthetic oligonucleotide
  Sense strand starting at position 3236 of SEQ ID NO: 1882242
ggagaugcaucaucugacu

SEQ ID NO: 2105877 - RNA, 19 nt, Artificial Sequence
  Description of Artificial Sequence: Synthetic oligonucleotide
  Antisense strand to SEQ ID NO: 2105876
agucagaugaugcaucucc

SEQ ID NO: 2105878 - RNA, 19 nt, Artificial Sequence
  Description of Artificial Sequence: Synthetic oligonucleotide
  Sense strand starting at position 3499 of SEQ ID NO: 1882242
aggugcuugccagaaagga

SEQ ID NO: 2105879 - RNA, 19 nt, Artificial Sequence
  Description of Artificial Sequence: Synthetic oligonucleotide
  Antisense strand to SEQ ID NO: 2105878
uccuuucuggcaagcaccu

SEQ ID NO: 2105880 - RNA, 19 nt, Artificial Sequence
  Description of Artificial Sequence: Synthetic oligonucleotide
  Sense strand starting at position 3673 of SEQ ID NO: 1882242
gcuucuuggucuuccaaac

SEQ ID NO: 2105881 - RNA, 19 nt, Artificial Sequence
  Description of Artificial Sequence: Synthetic oligonucleotide
  Antisense strand to SEQ ID NO: 2105880
guuuggaagaccaagaagc

SEQ ID NO: 2105882 - RNA, 19 nt, Artificial Sequence
  Description of Artificial Sequence: Synthetic oligonucleotide
  Sense strand starting at position 3701 of SEQ ID NO: 1882242
gcuguugagaaaggucagu

SEQ ID NO: 2105883 - RNA, 19 nt, Artificial Sequence
  Description of Artificial Sequence: Synthetic oligonucleotide
  Antisense strand to SEQ ID NO: 2105882
acugaccuuucucaacagc

SEQ ID NO: 2105884 - RNA, 19 nt, Artificial Sequence
  Description of Artificial Sequence: Synthetic oligonucleotide
  Sense strand starting at position 3707 of SEQ ID NO: 1882242
gagaaaggucagugaugca

SEQ ID NO: 2105885 - RNA, 19 nt, Artificial Sequence
  Description of Artificial Sequence: Synthetic oligonucleotide
  Antisense strand to SEQ ID NO: 2105884
ugcaucacugaccuuucuc

SEQ ID NO: 2105886 - RNA, 19 nt, Artificial Sequence
  Description of Artificial Sequence: Synthetic oligonucleotide
  Sense strand starting at position 3814 of SEQ ID NO: 1882242
aaggcauuccugcagguga

SEQ ID NO: 2105887 - RNA, 19 nt, Artificial Sequence
  Description of Artificial Sequence: Synthetic oligonucleotide
  Antisense strand to SEQ ID NO: 2105886
ucaccugcaggaaugccuu

SEQ ID NO: 2105888 - RNA, 19 nt, Artificial Sequence
  Description of Artificial Sequence: Synthetic oligonucleotide
  Sense strand starting at position 19 of SEQ ID NO: 1882243
agauguugaauucguuuga

SEQ ID NO: 2105889 - RNA, 19 nt, Artificial Sequence
  Description of Artificial Sequence: Synthetic oligonucleotide
  Antisense strand to SEQ ID NO: 2105888
ucaaacgaauucaacaucu

SEQ ID NO: 2105890 - RNA, 19 nt, Artificial Sequence
  Description of Artificial Sequence: Synthetic oligonucleotide
  Sense strand starting at position 20 of SEQ ID NO: 1882243
gauguugaauucguuugaa

SEQ ID NO: 2105891 - RNA, 19 nt, Artificial Sequence
  Description of Artificial Sequence: Synthetic oligonucleotide
  Antisense strand to SEQ ID NO: 2105890
uucaaacgaauucaacauc

SEQ ID NO: 2105892 - RNA, 19 nt, Artificial Sequence
  Description of Artificial Sequence: Synthetic oligonucleotide
  Sense strand starting at position 64 of SEQ ID NO: 1882243
aauccuguuggugaaugua

SEQ ID NO: 2105893 - RNA, 19 nt, Artificial Sequence
  Description of Artificial Sequence: Synthetic oligonucleotide
  Antisense strand to SEQ ID NO: 2105892
uacauucaccaacaggauu

SEQ ID NO: 2105894 - RNA, 19 nt, Artificial Sequence
  Description of Artificial Sequence: Synthetic oligonucleotide
  Sense strand starting at position 72 of SEQ ID NO: 1882243
uggugaauguagccaguga

SEQ ID NO: 2105895 - RNA, 19 nt, Artificial Sequence
  Description of Artificial Sequence: Synthetic oligonucleotide
  Antisense strand to SEQ ID NO: 2105894
ucacuggcuacauucacca

SEQ ID NO: 2105896 - RNA, 19 nt, Artificial Sequence
  Description of Artificial Sequence: Synthetic oligonucleotide
  Sense strand starting at position 73 of SEQ ID NO: 1882243
ggugaauguagccagugau

SEQ ID NO: 2105897 - RNA, 19 nt, Artificial Sequence
  Description of Artificial Sequence: Synthetic oligonucleotide
  Antisense strand to SEQ ID NO: 2105896
aucacuggcuacauucacc

SEQ ID NO: 2105898 - RNA, 19 nt, Artificial Sequence
  Description of Artificial Sequence: Synthetic oligonucleotide
  Sense strand starting at position 125 of SEQ ID NO: 1882243
gaacgcaucuaucuguaau

SEQ ID NO: 2105899 - RNA, 19 nt, Artificial Sequence
  Description of Artificial Sequence: Synthetic oligonucleotide
  Antisense strand to SEQ ID NO: 2105898
auuacagauagaugcguuc

SEQ ID NO: 2105900 - RNA, 19 nt, Artificial Sequence
  Description of Artificial Sequence: Synthetic oligonucleotide
  Sense strand starting at position 128 of SEQ ID NO: 1882243
cgcaucuaucuguaaucuu

SEQ ID NO: 2105901 - RNA, 19 nt, Artificial Sequence
  Description of Artificial Sequence: Synthetic oligonucleotide
  Antisense strand to SEQ ID NO: 2105900
aagauuacagauagaugcg

SEQ ID NO: 2105902 - RNA, 19 nt, Artificial Sequence
  Description of Artificial Sequence: Synthetic oligonucleotide
  Sense strand starting at position 829 of SEQ ID NO: 1882243
agucccaguucccuaaaga

SEQ ID NO: 2105903 - RNA, 19 nt, Artificial Sequence
  Description of Artificial Sequence: Synthetic oligonucleotide
  Antisense strand to SEQ ID NO: 2105902
ucuuuagggaacugggacu

SEQ ID NO: 2105904 - RNA, 19 nt, Artificial Sequence
  Description of Artificial Sequence: Synthetic oligonucleotide
  Sense strand starting at position 830 of SEQ ID NO: 1882243
gucccaguucccuaaagau

SEQ ID NO: 2105905 - RNA, 19 nt, Artificial Sequence
  Description of Artificial Sequence: Synthetic oligonucleotide
  Antisense strand to SEQ ID NO: 2105904
aucuuuagggaacugggac

SEQ ID NO: 2105906 - RNA, 19 nt, Artificial Sequence
  Description of Artificial Sequence: Synthetic oligonucleotide
  Sense strand starting at position 925 of SEQ ID NO: 1882243
acaguaaguacguauuagu

SEQ ID NO: 2105907 - RNA, 19 nt, Artificial Sequence
  Description of Artificial Sequence: Synthetic oligonucleotide
  Antisense strand to SEQ ID NO: 2105906
acuaauacguacuuacugu

SEQ ID NO: 2105908 - RNA, 19 nt, Artificial Sequence
  Description of Artificial Sequence: Synthetic oligonucleotide
  Sense strand starting at position 933 of SEQ ID NO: 1882243
uacguauuaguugagguuu

SEQ ID NO: 2105909 - RNA, 19 nt, Artificial Sequence
  Description of Artificial Sequence: Synthetic oligonucleotide
  Antisense strand to SEQ ID NO: 2105908
aaaccucaacuaauacgua

SEQ ID NO: 2105910 - RNA, 19 nt, Artificial Sequence
  Description of Artificial Sequence: Synthetic oligonucleotide
  Sense strand starting at position 1139 of SEQ ID NO: 1882243
ccagguguucucgaaaguu

SEQ ID NO: 2105911 - RNA, 19 nt, Artificial Sequence
  Description of Artificial Sequence: Synthetic oligonucleotide
  Antisense strand to SEQ ID NO: 2105910
aacuuucgagaacaccugg

SEQ ID NO: 2105912 - RNA, 19 nt, Artificial Sequence
  Description of Artificial Sequence: Synthetic oligonucleotide
  Sense strand starting at position 1303 of SEQ ID NO: 1882243
agaugcuacccaugagcaa

SEQ ID NO: 2105913 - RNA, 19 nt, Artificial Sequence
  Description of Artificial Sequence: Synthetic oligonucleotide
  Antisense strand to SEQ ID NO: 2105912
uugcucauggguagcaucu

SEQ ID NO: 2105914 - RNA, 19 nt, Artificial Sequence
  Description of Artificial Sequence: Synthetic oligonucleotide
  Sense strand starting at position 1444 of SEQ ID NO: 1882243
cucagucccuaugucuaau

SEQ ID NO: 2105915 - RNA, 19 nt, Artificial Sequence
  Description of Artificial Sequence: Synthetic oligonucleotide
  Antisense strand to SEQ ID NO: 2105914
auuagacauagggacugag

SEQ ID NO: 2105916 - RNA, 19 nt, Artificial Sequence
  Description of Artificial Sequence: Synthetic oligonucleotide
  Sense strand starting at position 1447 of SEQ ID NO: 1882243
agucccuaugucuaauaaa

SEQ ID NO: 2105917 - RNA, 19 nt, Artificial Sequence
  Description of Artificial Sequence: Synthetic oligonucleotide
  Antisense strand to SEQ ID NO: 2105916
uuuauuagacauagggacu

SEQ ID NO: 2105918 - RNA, 19 nt, Artificial Sequence
  Description of Artificial Sequence: Synthetic oligonucleotide
  Sense strand starting at position 1540 of SEQ ID NO: 1882243
gcacccagaccuuguuaaa

SEQ ID NO: 2105919 - RNA, 19 nt, Artificial Sequence
  Description of Artificial Sequence: Synthetic oligonucleotide
  Antisense strand to SEQ ID NO: 2105918
uuuaacaaggucugggugc

SEQ ID NO: 2105920 - RNA, 19 nt, Artificial Sequence
  Description of Artificial Sequence: Synthetic oligonucleotide
  Sense strand starting at position 1710 of SEQ ID NO: 1882243
cauuaaugcuguccaguag

SEQ ID NO: 2105921 - RNA, 19 nt, Artificial Sequence
  Description of Artificial Sequence: Synthetic oligonucleotide
  Antisense strand to SEQ ID NO: 2105920
cuacuggacagcauuaaug

SEQ ID NO: 2105922 - RNA, 19 nt, Artificial Sequence
  Description of Artificial Sequence: Synthetic oligonucleotide
  Sense strand starting at position 1711 of SEQ ID NO: 1882243
auuaaugcuguccaguaga

SEQ ID NO: 2105923 - RNA, 19 nt, Artificial Sequence
  Description of Artificial Sequence: Synthetic oligonucleotide
  Antisense strand to SEQ ID NO: 2105922
ucuacuggacagcauuaau

SEQ ID NO: 2105924 - RNA, 19 nt, Artificial Sequence
  Description of Artificial Sequence: Synthetic oligonucleotide
  Sense strand starting at position 1733 of SEQ ID NO: 1882243
uucugcaaugauggauaua

SEQ ID NO: 2105925 - RNA, 19 nt, Artificial Sequence
  Description of Artificial Sequence: Synthetic oligonucleotide
  Antisense strand to SEQ ID NO: 2105924
uauauccaucauugcagaa

SEQ ID NO: 2105926 - RNA, 19 nt, Artificial Sequence
  Description of Artificial Sequence: Synthetic oligonucleotide
  Sense strand starting at position 1745 of SEQ ID NO: 1882243
ggauauauucuauguugca

SEQ ID NO: 2105927 - RNA, 19 nt, Artificial Sequence
  Description of Artificial Sequence: Synthetic oligonucleotide
  Antisense strand to SEQ ID NO: 2105926
ugcaacauagaauauaucc

SEQ ID NO: 2105928 - RNA, 19 nt, Artificial Sequence
  Description of Artificial Sequence: Synthetic oligonucleotide
  Sense strand starting at position 1755 of SEQ ID NO: 1882243
uauguugcaugguccaaua

SEQ ID NO: 2105929 - RNA, 19 nt, Artificial Sequence
  Description of Artificial Sequence: Synthetic oligonucleotide
  Antisense strand to SEQ ID NO: 2105928
uauuggaccaugcaacaua

SEQ ID NO: 2105930 - RNA, 19 nt, Artificial Sequence
  Description of Artificial Sequence: Synthetic oligonucleotide
  Sense strand starting at position 1802 of SEQ ID NO: 1882243
cuuugagugcuugaaaugu

SEQ ID NO: 2105931 - RNA, 19 nt, Artificial Sequence
  Description of Artificial Sequence: Synthetic oligonucleotide
  Antisense strand to SEQ ID NO: 2105930
acauuucaagcacucaaag

SEQ ID NO: 2105932 - RNA, 19 nt, Artificial Sequence
  Description of Artificial Sequence: Synthetic oligonucleotide
  Sense strand starting at position 2302 of SEQ ID NO: 1882243
gcuggcacucaauaaaucu

SEQ ID NO: 2105933 - RNA, 19 nt, Artificial Sequence
  Description of Artificial Sequence: Synthetic oligonucleotide
  Antisense strand to SEQ ID NO: 2105932
agauuuauugagugccagc

SEQ ID NO: 2105934 - RNA, 19 nt, Artificial Sequence
  Description of Artificial Sequence: Synthetic oligonucleotide
  Sense strand starting at position 2335 of SEQ ID NO: 1882243
ucauaaauggaccguaguu

SEQ ID NO: 2105935 - RNA, 19 nt, Artificial Sequence
  Description of Artificial Sequence: Synthetic oligonucleotide
  Antisense strand to SEQ ID NO: 2105934
aacuacgguccauuuauga

SEQ ID NO: 2105936 - RNA, 19 nt, Artificial Sequence
  Description of Artificial Sequence: Synthetic oligonucleotide
  Sense strand starting at position 2361 of SEQ ID NO: 1882243
auaaguucugauuaagcaa

SEQ ID NO: 2105937 - RNA, 19 nt, Artificial Sequence
  Description of Artificial Sequence: Synthetic oligonucleotide
  Antisense strand to SEQ ID NO: 2105936
uugcuuaaucagaacuuau

SEQ ID NO: 2105938 - RNA, 19 nt, Artificial Sequence
  Description of Artificial Sequence: Synthetic oligonucleotide
  Sense strand starting at position 2364 of SEQ ID NO: 1882243
aguucugauuaagcaagau

SEQ ID NO: 2105939 - RNA, 19 nt, Artificial Sequence
  Description of Artificial Sequence: Synthetic oligonucleotide
  Antisense strand to SEQ ID NO: 2105938
aucuugcuuaaucagaacu

SEQ ID NO: 2105940 - RNA, 19 nt, Artificial Sequence
  Description of Artificial Sequence: Synthetic oligonucleotide
  Sense strand starting at position 2805 of SEQ ID NO: 1882243
gucugacuucuggauccca

SEQ ID NO: 2105941 - RNA, 19 nt, Artificial Sequence
  Description of Artificial Sequence: Synthetic oligonucleotide
  Antisense strand to SEQ ID NO: 2105940
ugggauccagaagucagac

SEQ ID NO: 2105942 - RNA, 19 nt, Artificial Sequence
  Description of Artificial Sequence: Synthetic oligonucleotide
  Sense strand starting at position 2883 of SEQ ID NO: 1882243
auggcagacuacucugaga

SEQ ID NO: 2105943 - RNA, 19 nt, Artificial Sequence
  Description of Artificial Sequence: Synthetic oligonucleotide
  Antisense strand to SEQ ID NO: 2105942
ucucagaguagucugccau

SEQ ID NO: 2105944 - RNA, 19 nt, Artificial Sequence
  Description of Artificial Sequence: Synthetic oligonucleotide
  Sense strand starting at position 2885 of SEQ ID NO: 1882243
ggcagacuacucugagaga

SEQ ID NO: 2105945 - RNA, 19 nt, Artificial Sequence
  Description of Artificial Sequence: Synthetic oligonucleotide
  Antisense strand to SEQ ID NO: 2105944
ucucucagaguagucugcc

SEQ ID NO: 2105946 - RNA, 19 nt, Artificial Sequence
  Description of Artificial Sequence: Synthetic oligonucleotide
  Sense strand starting at position 3048 of SEQ ID NO: 1882243
gaggcauguccacauguca

SEQ ID NO: 2105947 - RNA, 19 nt, Artificial Sequence
  Description of Artificial Sequence: Synthetic oligonucleotide
  Antisense strand to SEQ ID NO: 2105946
ugacauguggacaugccuc

SEQ ID NO: 2105948 - RNA, 19 nt, Artificial Sequence
  Description of Artificial Sequence: Synthetic oligonucleotide
  Sense strand starting at position 3076 of SEQ ID NO: 1882243
guccuucuccaaggagauu

SEQ ID NO: 2105949 - RNA, 19 nt, Artificial Sequence
  Description of Artificial Sequence: Synthetic oligonucleotide
  Antisense strand to SEQ ID NO: 2105948
aaucuccuuggagaaggac

SEQ ID NO: 2105950 - RNA, 19 nt, Artificial Sequence
  Description of Artificial Sequence: Synthetic oligonucleotide
  Sense strand starting at position 3155 of SEQ ID NO: 1882243
aggucucaacuguauaaca

SEQ ID NO: 2105951 - RNA, 19 nt, Artificial Sequence
  Description of Artificial Sequence: Synthetic oligonucleotide
  Antisense strand to SEQ ID NO: 2105950
uguuauacaguugagaccu

SEQ ID NO: 2105952 - RNA, 19 nt, Artificial Sequence
  Description of Artificial Sequence: Synthetic oligonucleotide
  Sense strand starting at position 3252 of SEQ ID NO: 1882243
agcugacucuguuuaccau

SEQ ID NO: 2105953 - RNA, 19 nt, Artificial Sequence
  Description of Artificial Sequence: Synthetic oligonucleotide
  Antisense strand to SEQ ID NO: 2105952
augguaaacagagucagcu

SEQ ID NO: 2105954 - RNA, 19 nt, Artificial Sequence
  Description of Artificial Sequence: Synthetic oligonucleotide
  Sense strand starting at position 3253 of SEQ ID NO: 1882243
gcugacucuguuuaccaua

SEQ ID NO: 2105955 - RNA, 19 nt, Artificial Sequence
  Description of Artificial Sequence: Synthetic oligonucleotide
  Antisense strand to SEQ ID NO: 2105954
uaugguaaacagagucagc

SEQ ID NO: 2105956 - RNA, 19 nt, Artificial Sequence
  Description of Artificial Sequence: Synthetic oligonucleotide
  Sense strand starting at position 3301 of SEQ ID NO: 1882243
cugucuugacagcauuacu

SEQ ID NO: 2105957 - RNA, 19 nt, Artificial Sequence
  Description of Artificial Sequence: Synthetic oligonucleotide
  Antisense strand to SEQ ID NO: 2105956
aguaaugcugucaagacag

SEQ ID NO: 2105958 - RNA, 19 nt, Artificial Sequence
  Description of Artificial Sequence: Synthetic oligonucleotide
  Sense strand starting at position 3312 of SEQ ID NO: 1882243
gcauuacuagcugaaucaa

SEQ ID NO: 2105959 - RNA, 19 nt, Artificial Sequence
  Description of Artificial Sequence: Synthetic oligonucleotide
  Antisense strand to SEQ ID NO: 2105958
uugauucagcuaguaaugc

SEQ ID NO: 2105960 - RNA, 19 nt, Artificial Sequence
  Description of Artificial Sequence: Synthetic oligonucleotide
  Sense strand starting at position 3452 of SEQ ID NO: 1882243
gucaccauuugagauacga

SEQ ID NO: 2105961 - RNA, 19 nt, Artificial Sequence
  Description of Artificial Sequence: Synthetic oligonucleotide
  Antisense strand to SEQ ID NO: 2105960
ucguaucucaaauggugac

SEQ ID NO: 2105962 - RNA, 19 nt, Artificial Sequence
  Description of Artificial Sequence: Synthetic oligonucleotide
  Sense strand starting at position 3600 of SEQ ID NO: 1882243
accagugguuccuugagga

SEQ ID NO: 2105963 - RNA, 19 nt, Artificial Sequence
  Description of Artificial Sequence: Synthetic oligonucleotide
  Antisense strand to SEQ ID NO: 2105962
uccucaaggaaccacuggu

SEQ ID NO: 2105964 - RNA, 19 nt, Artificial Sequence
  Description of Artificial Sequence: Synthetic oligonucleotide
  Sense strand starting at position 3603 of SEQ ID NO: 1882243
agugguuccuugaggagga

SEQ ID NO: 2105965 - RNA, 19 nt, Artificial Sequence
  Description of Artificial Sequence: Synthetic oligonucleotide
  Antisense strand to SEQ ID NO: 2105964
uccuccucaaggaaccacu

SEQ ID NO: 2105966 - RNA, 19 nt, Artificial Sequence
  Description of Artificial Sequence: Synthetic oligonucleotide
  Sense strand starting at position 3897 of SEQ ID NO: 1882243
acaaaugugcagcaguaaa

SEQ ID NO: 2105967 - RNA, 19 nt, Artificial Sequence
  Description of Artificial Sequence: Synthetic oligonucleotide
  Antisense strand to SEQ ID NO: 2105966
uuuacugcugcacauuugu

SEQ ID NO: 2105968 - RNA, 19 nt, Artificial Sequence
  Description of Artificial Sequence: Synthetic oligonucleotide
  Sense strand starting at position 206 of SEQ ID NO: 1882244
gaggcaacaugucccuaaa

SEQ ID NO: 2105969 - RNA, 19 nt, Artificial Sequence
  Description of Artificial Sequence: Synthetic oligonucleotide
  Antisense strand to SEQ ID NO: 2105968
uuuagggacauguugccuc

SEQ ID NO: 2105970 - RNA, 19 nt, Artificial Sequence
  Description of Artificial Sequence: Synthetic oligonucleotide
  Sense strand starting at position 699 of SEQ ID NO: 1882244
ggcucagcauguuagaacu

SEQ ID NO: 2105971 - RNA, 19 nt, Artificial Sequence
  Description of Artificial Sequence: Synthetic oligonucleotide
  Antisense strand to SEQ ID NO: 2105970
aguucuaacaugcugagcc

SEQ ID NO: 2105972 - RNA, 19 nt, Artificial Sequence
  Description of Artificial Sequence: Synthetic oligonucleotide
  Sense strand starting at position 705 of SEQ ID NO: 1882244
gcauguuagaacuggcauu

SEQ ID NO: 2105973 - RNA, 19 nt, Artificial Sequence
  Description of Artificial Sequence: Synthetic oligonucleotide
  Antisense strand to SEQ ID NO: 2105972
aaugccaguucuaacaugc

SEQ ID NO: 2105974 - RNA, 19 nt, Artificial Sequence
  Description of Artificial Sequence: Synthetic oligonucleotide
  Sense strand starting at position 959 of SEQ ID NO: 1882244
ggauaaaguggcugcuaau

SEQ ID NO: 2105975 - RNA, 19 nt, Artificial Sequence
  Description of Artificial Sequence: Synthetic oligonucleotide
  Antisense strand to SEQ ID NO: 2105974
auuagcagccacuuuaucc

SEQ ID NO: 2105976 - RNA, 19 nt, Artificial Sequence
  Description of Artificial Sequence: Synthetic oligonucleotide
  Sense strand starting at position 1011 of SEQ ID NO: 1882244
ggcucagagaugugacaga

SEQ ID NO: 2105977 - RNA, 19 nt, Artificial Sequence
  Description of Artificial Sequence: Synthetic oligonucleotide
  Antisense strand to SEQ ID NO: 2105976
ucugucacaucucugagcc

SEQ ID NO: 2105978 - RNA, 19 nt, Artificial Sequence
  Description of Artificial Sequence: Synthetic oligonucleotide
  Sense strand starting at position 2091 of SEQ ID NO: 1882244
guuggaaacuucccagaau

SEQ ID NO: 2105979 - RNA, 19 nt, Artificial Sequence
  Description of Artificial Sequence: Synthetic oligonucleotide
  Antisense strand to SEQ ID NO: 2105978
auucugggaaguuuccaac

SEQ ID NO: 2105980 - RNA, 19 nt, Artificial Sequence
  Description of Artificial Sequence: Synthetic oligonucleotide
  Sense strand starting at position 2092 of SEQ ID NO: 1882244
uuggaaacuucccagaauu

SEQ ID NO: 2105981 - RNA, 19 nt, Artificial Sequence
  Description of Artificial Sequence: Synthetic oligonucleotide
  Antisense strand to SEQ ID NO: 2105980
aauucugggaaguuuccaa

SEQ ID NO: 2105982 - RNA, 19 nt, Artificial Sequence
  Description of Artificial Sequence: Synthetic oligonucleotide
  Sense strand starting at position 2102 of SEQ ID NO: 1882244
cccagaauucugggaagca

SEQ ID NO: 2105983 - RNA, 19 nt, Artificial Sequence
  Description of Artificial Sequence: Synthetic oligonucleotide
  Antisense strand to SEQ ID NO: 2105982
ugcuucccagaauucuggg

SEQ ID NO: 2105984 - RNA, 19 nt, Artificial Sequence
  Description of Artificial Sequence: Synthetic oligonucleotide
  Sense strand starting at position 2103 of SEQ ID NO: 1882244
ccagaauucugggaagcaa

SEQ ID NO: 2105985 - RNA, 19 nt, Artificial Sequence
  Description of Artificial Sequence: Synthetic oligonucleotide
  Antisense strand to SEQ ID NO: 2105984
uugcuucccagaauucugg

SEQ ID NO: 2105986 - RNA, 19 nt, Artificial Sequence
  Description of Artificial Sequence: Synthetic oligonucleotide
  Sense strand starting at position 2149 of SEQ ID NO: 1882244
agauuaguuggagguagag

SEQ ID NO: 2105987 - RNA, 19 nt, Artificial Sequence
  Description of Artificial Sequence: Synthetic oligonucleotide
  Antisense strand to SEQ ID NO: 2105986
cucuaccuccaacuaaucu

SEQ ID NO: 2105988 - RNA, 19 nt, Artificial Sequence
  Description of Artificial Sequence: Synthetic oligonucleotide
  Sense strand starting at position 2234 of SEQ ID NO: 1882244
gguggagacuuggaggaaa

SEQ ID NO: 2105989 - RNA, 19 nt, Artificial Sequence
  Description of Artificial Sequence: Synthetic oligonucleotide
  Antisense strand to SEQ ID NO: 2105988
uuuccuccaagucuccacc

SEQ ID NO: 2105990 - RNA, 19 nt, Artificial Sequence
  Description of Artificial Sequence: Synthetic oligonucleotide
  Sense strand starting at position 2363 of SEQ ID NO: 1882244
uggguuuguucuguccuca

SEQ ID NO: 2105991 - RNA, 19 nt, Artificial Sequence
  Description of Artificial Sequence: Synthetic oligonucleotide
  Antisense strand to SEQ ID NO: 2105990
ugaggacagaacaaaccca

SEQ ID NO: 2105992 - RNA, 19 nt, Artificial Sequence
  Description of Artificial Sequence: Synthetic oligonucleotide
  Sense strand starting at position 2368 of SEQ ID NO: 1882244
uuguucuguccucaagaac

SEQ ID NO: 2105993 - RNA, 19 nt, Artificial Sequence
  Description of Artificial Sequence: Synthetic oligonucleotide
  Antisense strand to SEQ ID NO: 2105992
guucuugaggacagaacaa

SEQ ID NO: 2105994 - RNA, 19 nt, Artificial Sequence
  Description of Artificial Sequence: Synthetic oligonucleotide
  Sense strand starting at position 2405 of SEQ ID NO: 1882244
guaucugucuucccucuua

SEQ ID NO: 2105995 - RNA, 19 nt, Artificial Sequence
  Description of Artificial Sequence: Synthetic oligonucleotide
  Antisense strand to SEQ ID NO: 2105994
uaagagggaagacagauac

SEQ ID NO: 2105996 - RNA, 19 nt, Artificial Sequence
  Description of Artificial Sequence: Synthetic oligonucleotide
  Sense strand starting at position 3467 of SEQ ID NO: 1882244
gguggaguuucuccacguu

SEQ ID NO: 2105997 - RNA, 19 nt, Artificial Sequence
  Description of Artificial Sequence: Synthetic oligonucleotide
  Antisense strand to SEQ ID NO: 2105996
aacguggagaaacuccacc

SEQ ID NO: 2105998 - RNA, 19 nt, Artificial Sequence
  Description of Artificial Sequence: Synthetic oligonucleotide
  Sense strand starting at position 64 of SEQ ID NO: 1882245
gagagaacgccaugugaac

SEQ ID NO: 2105999 - RNA, 19 nt, Artificial Sequence
  Description of Artificial Sequence: Synthetic oligonucleotide
  Antisense strand to SEQ ID NO: 2105998
guucacauggcguucucuc

SEQ ID NO: 2106000 - RNA, 19 nt, Artificial Sequence
  Description of Artificial Sequence: Synthetic oligonucleotide
  Sense strand starting at position 388 of SEQ ID NO: 1882245
gguggugugacaggaaauu

SEQ ID NO: 2106001 - RNA, 19 nt, Artificial Sequence
  Description of Artificial Sequence: Synthetic oligonucleotide
  Antisense strand to SEQ ID NO: 2106000
aauuuccugucacaccacc

SEQ ID NO: 2106002 - RNA, 19 nt, Artificial Sequence
  Description of Artificial Sequence: Synthetic oligonucleotide
  Sense strand starting at position 399 of SEQ ID NO: 1882245
aggaaauugacugguguca

SEQ ID NO: 2106003 - RNA, 19 nt, Artificial Sequence
  Description of Artificial Sequence: Synthetic oligonucleotide
  Antisense strand to SEQ ID NO: 2106002
ugacaccagucaauuuccu

SEQ ID NO: 2106004 - RNA, 19 nt, Artificial Sequence
  Description of Artificial Sequence: Synthetic oligonucleotide
  Sense strand starting at position 455 of SEQ ID NO: 1882245
caggauaaaugugucauau

SEQ ID NO: 2106005 - RNA, 19 nt, Artificial Sequence
  Description of Artificial Sequence: Synthetic oligonucleotide
  Antisense strand to SEQ ID NO: 2106004
auaugacacauuuauccug

SEQ ID NO: 2106006 - RNA, 19 nt, Artificial Sequence
  Description of Artificial Sequence: Synthetic oligonucleotide
  Sense strand starting at position 464 of SEQ ID NO: 1882245
ugugucauaucucccauaa

SEQ ID NO: 2106007 - RNA, 19 nt, Artificial Sequence
  Description of Artificial Sequence: Synthetic oligonucleotide
  Antisense strand to SEQ ID NO: 2106006
uuaugggagauaugacaca

SEQ ID NO: 2106008 - RNA, 19 nt, Artificial Sequence
  Description of Artificial Sequence: Synthetic oligonucleotide
  Sense strand starting at position 799 of SEQ ID NO: 1882245
ccggcuugcucagugauuu

SEQ ID NO: 2106009 - RNA, 19 nt, Artificial Sequence
  Description of Artificial Sequence: Synthetic oligonucleotide
  Antisense strand to SEQ ID NO: 2106008
aaaucacugagcaagccgg

SEQ ID NO: 2106010 - RNA, 19 nt, Artificial Sequence
  Description of Artificial Sequence: Synthetic oligonucleotide
  Sense strand starting at position 935 of SEQ ID NO: 1882245
uguuccucucaauggaagu

SEQ ID NO: 2106011 - RNA, 19 nt, Artificial Sequence
  Description of Artificial Sequence: Synthetic oligonucleotide
  Antisense strand to SEQ ID NO: 2106010
acuuccauugagaggaaca

SEQ ID NO: 2106012 - RNA, 19 nt, Artificial Sequence
  Description of Artificial Sequence: Synthetic oligonucleotide
  Sense strand starting at position 1067 of SEQ ID NO: 1882245
gucuaucuauagcuaagaa

SEQ ID NO: 2106013 - RNA, 19 nt, Artificial Sequence
  Description of Artificial Sequence: Synthetic oligonucleotide
  Antisense strand to SEQ ID NO: 2106012
uucuuagcuauagauagac

SEQ ID NO: 2106014 - RNA, 19 nt, Artificial Sequence
  Description of Artificial Sequence: Synthetic oligonucleotide
  Sense strand starting at position 1161 of SEQ ID NO: 1882245
ccaggucugcuauacauac

SEQ ID NO: 2106015 - RNA, 19 nt, Artificial Sequence
  Description of Artificial Sequence: Synthetic oligonucleotide
  Antisense strand to SEQ ID NO: 2106014
guauguauagcagaccugg

SEQ ID NO: 2106016 - RNA, 19 nt, Artificial Sequence
  Description of Artificial Sequence: Synthetic oligonucleotide
  Sense strand starting at position 1207 of SEQ ID NO: 1882245
uaguaacucugugauuuga

SEQ ID NO: 2106017 - RNA, 19 nt, Artificial Sequence
  Description of Artificial Sequence: Synthetic oligonucleotide
  Antisense strand to SEQ ID NO: 2106016
ucaaaucacagaguuacua

SEQ ID NO: 2106018 - RNA, 19 nt, Artificial Sequence
  Description of Artificial Sequence: Synthetic oligonucleotide
  Sense strand starting at position 1230 of SEQ ID NO: 1882245
augaucugaaguuaucgau

SEQ ID NO: 2106019 - RNA, 19 nt, Artificial Sequence
  Description of Artificial Sequence: Synthetic oligonucleotide
  Antisense strand to SEQ ID NO: 2106018
aucgauaacuucagaucau

SEQ ID NO: 2106020 - RNA, 19 nt, Artificial Sequence
  Description of Artificial Sequence: Synthetic oligonucleotide
  Sense strand starting at position 1292 of SEQ ID NO: 1882245
ggaaguuuccgucuguguc

SEQ ID NO: 2106021 - RNA, 19 nt, Artificial Sequence
  Description of Artificial Sequence: Synthetic oligonucleotide
  Antisense strand to SEQ ID NO: 2106020
gacacagacggaaacuucc

SEQ ID NO: 2106022 - RNA, 19 nt, Artificial Sequence
  Description of Artificial Sequence: Synthetic oligonucleotide
  Sense strand starting at position 1411 of SEQ ID NO: 1882245
agccaaauccaacagaugu

SEQ ID NO: 2106023 - RNA, 19 nt, Artificial Sequence
  Description of Artificial Sequence: Synthetic oligonucleotide
  Antisense strand to SEQ ID NO: 2106022
acaucuguuggauuuggcu

SEQ ID NO: 2106024 - RNA, 19 nt, Artificial Sequence
  Description of Artificial Sequence: Synthetic oligonucleotide
  Sense strand starting at position 1440 of SEQ ID NO: 1882245
cccaccuguguuugaauua

SEQ ID NO: 2106025 - RNA, 19 nt, Artificial Sequence
  Description of Artificial Sequence: Synthetic oligonucleotide
  Antisense strand to SEQ ID NO: 2106024
uaauucaaacacagguggg

SEQ ID NO: 2106026 - RNA, 19 nt, Artificial Sequence
  Description of Artificial Sequence: Synthetic oligonucleotide
  Sense strand starting at position 1558 of SEQ ID NO: 1882245
acuggcaguccucagaaga

SEQ ID NO: 2106027 - RNA, 19 nt, Artificial Sequence
  Description of Artificial Sequence: Synthetic oligonucleotide
  Antisense strand to SEQ ID NO: 2106026
ucuucugaggacugccagu

SEQ ID NO: 2106028 - RNA, 19 nt, Artificial Sequence
  Description of Artificial Sequence: Synthetic oligonucleotide
  Sense strand starting at position 1763 of SEQ ID NO: 1882245
ggaauuauuuaucaaaguc

SEQ ID NO: 2106029 - RNA, 19 nt, Artificial Sequence
  Description of Artificial Sequence: Synthetic oligonucleotide
  Antisense strand to SEQ ID NO: 2106028
gacuuugauaaauaauucc

SEQ ID NO: 2106030 - RNA, 19 nt, Artificial Sequence
  Description of Artificial Sequence: Synthetic oligonucleotide
  Sense strand starting at position 2409 of SEQ ID NO: 1882245
gcucaucaccgguaucaca

SEQ ID NO: 2106031 - RNA, 19 nt, Artificial Sequence
  Description of Artificial Sequence: Synthetic oligonucleotide
  Antisense strand to SEQ ID NO: 2106030
ugugauaccggugaugagc

SEQ ID NO: 2106032 - RNA, 19 nt, Artificial Sequence
  Description of Artificial Sequence: Synthetic oligonucleotide
  Sense strand starting at position 2672 of SEQ ID NO: 1882245
gcgggaugucgcgcucaca

SEQ ID NO: 2106033 - RNA, 19 nt, Artificial Sequence
  Description of Artificial Sequence: Synthetic oligonucleotide
  Antisense strand to SEQ ID NO: 2106032
ugugagcgcgacaucccgc

SEQ ID NO: 2106034 - RNA, 19 nt, Artificial Sequence
  Description of Artificial Sequence: Synthetic oligonucleotide
  Sense strand starting at position 2797 of SEQ ID NO: 1882245
accggugaucaaugaacuu

SEQ ID NO: 2106035 - RNA, 19 nt, Artificial Sequence
  Description of Artificial Sequence: Synthetic oligonucleotide
  Antisense strand to SEQ ID NO: 2106034
aaguucauugaucaccggu

SEQ ID NO: 2106036 - RNA, 19 nt, Artificial Sequence
  Description of Artificial Sequence: Synthetic oligonucleotide
  Sense strand starting at position 2821 of SEQ ID NO: 1882245
ugaggucuucuugaugugu

SEQ ID NO: 2106037 - RNA, 19 nt, Artificial Sequence
  Description of Artificial Sequence: Synthetic oligonucleotide
  Antisense strand to SEQ ID NO: 2106036
acacaucaagaagaccuca

SEQ ID NO: 2106038 - RNA, 19 nt, Artificial Sequence
  Description of Artificial Sequence: Synthetic oligonucleotide
  Sense strand starting at position 3113 of SEQ ID NO: 1882245
guucgucgaguaagguaau

SEQ ID NO: 2106039 - RNA, 19 nt, Artificial Sequence
  Description of Artificial Sequence: Synthetic oligonucleotide
  Antisense strand to SEQ ID NO: 2106038
auuaccuuacucgacgaac

SEQ ID NO: 2106040 - RNA, 19 nt, Artificial Sequence
  Description of Artificial Sequence: Synthetic oligonucleotide
  Sense strand starting at position 3116 of SEQ ID NO: 1882245
cgucgaguaagguaaucaa

SEQ ID NO: 2106041 - RNA, 19 nt, Artificial Sequence
  Description of Artificial Sequence: Synthetic oligonucleotide
  Antisense strand to SEQ ID NO: 2106040
uugauuaccuuacucgacg

SEQ ID NO: 2106042 - RNA, 19 nt, Artificial Sequence
  Description of Artificial Sequence: Synthetic oligonucleotide
  Sense strand starting at position 3119 of SEQ ID NO: 1882245
cgaguaagguaaucaagag

SEQ ID NO: 2106043 - RNA, 19 nt, Artificial Sequence
  Description of Artificial Sequence: Synthetic oligonucleotide
  Antisense strand to SEQ ID NO: 2106042
cucuugauuaccuuacucg

SEQ ID NO: 2106044 - RNA, 19 nt, Artificial Sequence
  Description of Artificial Sequence: Synthetic oligonucleotide
  Sense strand starting at position 3134 of SEQ ID NO: 1882245
agaggaggucuucggaaug

SEQ ID NO: 2106045 - RNA, 19 nt, Artificial Sequence
  Description of Artificial Sequence: Synthetic oligonucleotide
  Antisense strand to SEQ ID NO: 2106044
cauuccgaagaccuccucu

SEQ ID NO: 2106046 - RNA, 19 nt, Artificial Sequence
  Description of Artificial Sequence: Synthetic oligonucleotide
  Sense strand starting at position 3139 of SEQ ID NO: 1882245
aggucuucggaaugucuca

SEQ ID NO: 2106047 - RNA, 19 nt, Artificial Sequence
  Description of Artificial Sequence: Synthetic oligonucleotide
  Antisense strand to SEQ ID NO: 2106046
ugagacauuccgaagaccu

SEQ ID NO: 2106048 - RNA, 19 nt, Artificial Sequence
  Description of Artificial Sequence: Synthetic oligonucleotide
  Sense strand starting at position 3267 of SEQ ID NO: 1882245
aguaaucgugcccacauau

SEQ ID NO: 2106049 - RNA, 19 nt, Artificial Sequence
  Description of Artificial Sequence: Synthetic oligonucleotide
  Antisense strand to SEQ ID NO: 2106048
auaugugggcacgauuacu

SEQ ID NO: 2106050 - RNA, 19 nt, Artificial Sequence
  Description of Artificial Sequence: Synthetic oligonucleotide
  Sense strand starting at position 3279 of SEQ ID NO: 1882245
cacauauugcuguagaaag

SEQ ID NO: 2106051 - RNA, 19 nt, Artificial Sequence
  Description of Artificial Sequence: Synthetic oligonucleotide
  Antisense strand to SEQ ID NO: 2106050
cuuucuacagcaauaugug

SEQ ID NO: 2106052 - RNA, 19 nt, Artificial Sequence
  Description of Artificial Sequence: Synthetic oligonucleotide
  Sense strand starting at position 3326 of SEQ ID NO: 1882245
cugggugguggccaauaua

SEQ ID NO: 2106053 - RNA, 19 nt, Artificial Sequence
  Description of Artificial Sequence: Synthetic oligonucleotide
  Antisense strand to SEQ ID NO: 2106052
uauauuggccaccacccag

SEQ ID NO: 2106054 - RNA, 19 nt, Artificial Sequence
  Description of Artificial Sequence: Synthetic oligonucleotide
  Sense strand starting at position 3329 of SEQ ID NO: 1882245
ggugguggccaauauaaca

SEQ ID NO: 2106055 - RNA, 19 nt, Artificial Sequence
  Description of Artificial Sequence: Synthetic oligonucleotide
  Antisense strand to SEQ ID NO: 2106054
uguuauauuggccaccacc

SEQ ID NO: 2106056 - RNA, 19 nt, Artificial Sequence
  Description of Artificial Sequence: Synthetic oligonucleotide
  Sense strand starting at position 3340 of SEQ ID NO: 1882245
auauaacacugagauaaag

SEQ ID NO: 2106057 - RNA, 19 nt, Artificial Sequence
  Description of Artificial Sequence: Synthetic oligonucleotide
  Antisense strand to SEQ ID NO: 2106056
cuuuaucucaguguuauau

SEQ ID NO: 2106058 - RNA, 19 nt, Artificial Sequence
  Description of Artificial Sequence: Synthetic oligonucleotide
  Sense strand starting at position 3357 of SEQ ID NO: 1882245
aggugauaauggcuaauac

SEQ ID NO: 2106059 - RNA, 19 nt, Artificial Sequence
  Description of Artificial Sequence: Synthetic oligonucleotide
  Antisense strand to SEQ ID NO: 2106058
guauuagccauuaucaccu

SEQ ID NO: 2106060 - RNA, 19 nt, Artificial Sequence
  Description of Artificial Sequence: Synthetic oligonucleotide
  Sense strand starting at position 3374 of SEQ ID NO: 1882245
acauauugugucuaucaug

SEQ ID NO: 2106061 - RNA, 19 nt, Artificial Sequence
  Description of Artificial Sequence: Synthetic oligonucleotide
  Antisense strand to SEQ ID NO: 2106060
caugauagacacaauaugu

SEQ ID NO: 2106062 - RNA, 19 nt, Artificial Sequence
  Description of Artificial Sequence: Synthetic oligonucleotide
  Sense strand starting at position 3462 of SEQ ID NO: 1882245
aucucuauauauguggaaa

SEQ ID NO: 2106063 - RNA, 19 nt, Artificial Sequence
  Description of Artificial Sequence: Synthetic oligonucleotide
  Antisense strand to SEQ ID NO: 2106062
uuuccacauauauagagau

SEQ ID NO: 2106064 - RNA, 19 nt, Artificial Sequence
  Description of Artificial Sequence: Synthetic oligonucleotide
  Sense strand starting at position 3494 of SEQ ID NO: 1882245
guuugauuugccugagguu

SEQ ID NO: 2106065 - RNA, 19 nt, Artificial Sequence
  Description of Artificial Sequence: Synthetic oligonucleotide
  Antisense strand to SEQ ID NO: 2106064
aaccucaggcaaaucaaac

SEQ ID NO: 2106066 - RNA, 19 nt, Artificial Sequence
  Description of Artificial Sequence: Synthetic oligonucleotide
  Sense strand starting at position 3551 of SEQ ID NO: 1882245
cucaaaguucucuaguguu

SEQ ID NO: 2106067 - RNA, 19 nt, Artificial Sequence
  Description of Artificial Sequence: Synthetic oligonucleotide
  Antisense strand to SEQ ID NO: 2106066
aacacuagagaacuuugag

SEQ ID NO: 2106068 - RNA, 19 nt, Artificial Sequence
  Description of Artificial Sequence: Synthetic oligonucleotide
  Sense strand starting at position 3597 of SEQ ID NO: 1882245
cggcucauacuugaaaucu

SEQ ID NO: 2106069 - RNA, 19 nt, Artificial Sequence
  Description of Artificial Sequence: Synthetic oligonucleotide
  Antisense strand to SEQ ID NO: 2106068
agauuucaaguaugagccg

SEQ ID NO: 2106070 - RNA, 19 nt, Artificial Sequence
  Description of Artificial Sequence: Synthetic oligonucleotide
  Sense strand starting at position 3638 of SEQ ID NO: 1882245
ggaaggauugcucgaggug

SEQ ID NO: 2106071 - RNA, 19 nt, Artificial Sequence
  Description of Artificial Sequence: Synthetic oligonucleotide
  Antisense strand to SEQ ID NO: 2106070
caccucgagcaauccuucc

SEQ ID NO: 2106072 - RNA, 19 nt, Artificial Sequence
  Description of Artificial Sequence: Synthetic oligonucleotide
  Sense strand starting at position 3639 of SEQ ID NO: 1882245
gaaggauugcucgagguga

SEQ ID NO: 2106073 - RNA, 19 nt, Artificial Sequence
  Description of Artificial Sequence: Synthetic oligonucleotide
  Antisense strand to SEQ ID NO: 2106072
ucaccucgagcaauccuuc

SEQ ID NO: 2106074 - RNA, 19 nt, Artificial Sequence
  Description of Artificial Sequence: Synthetic oligonucleotide
  Sense strand starting at position 3919 of SEQ ID NO: 1882245
aguugaaauuggccagaug

SEQ ID NO: 2106075 - RNA, 19 nt, Artificial Sequence
  Description of Artificial Sequence: Synthetic oligonucleotide
  Antisense strand to SEQ ID NO: 2106074
caucuggccaauuucaacu

SEQ ID NO: 2106076 - RNA, 19 nt, Artificial Sequence
  Description of Artificial Sequence: Synthetic oligonucleotide
  Sense strand starting at position 3979 of SEQ ID NO: 1882245
ugauuuacugcugguuauu

SEQ ID NO: 2106077 - RNA, 19 nt, Artificial Sequence
  Description of Artificial Sequence: Synthetic oligonucleotide
  Antisense strand to SEQ ID NO: 2106076
aauaaccagcaguaaauca

SEQ ID NO: 2106078 - RNA, 19 nt, Artificial Sequence
  Description of Artificial Sequence: Synthetic oligonucleotide
  Sense strand starting at position 16 of SEQ ID NO: 1882246
uggucaucauucuuggauu

SEQ ID NO: 2106079 - RNA, 19 nt, Artificial Sequence
  Description of Artificial Sequence: Synthetic oligonucleotide
  Antisense strand to SEQ ID NO: 2106078
aauccaagaaugaugacca

SEQ ID NO: 2106080 - RNA, 19 nt, Artificial Sequence
  Description of Artificial Sequence: Synthetic oligonucleotide
  Sense strand starting at position 450 of SEQ ID NO: 1882246
gugucuuucccauaaaggu

SEQ ID NO: 2106081 - RNA, 19 nt, Artificial Sequence
  Description of Artificial Sequence: Synthetic oligonucleotide
  Antisense strand to SEQ ID NO: 2106080
accuuuaugggaaagacac

SEQ ID NO: 2106082 - RNA, 19 nt, Artificial Sequence
  Description of Artificial Sequence: Synthetic oligonucleotide
  Sense strand starting at position 594 of SEQ ID NO: 1882246
gugaaaugacuaugaaucc

SEQ ID NO: 2106083 - RNA, 19 nt, Artificial Sequence
  Description of Artificial Sequence: Synthetic oligonucleotide
  Antisense strand to SEQ ID NO: 2106082
ggauucauagucauuucac

SEQ ID NO: 2106084 - RNA, 19 nt, Artificial Sequence
  Description of Artificial Sequence: Synthetic oligonucleotide
  Sense strand starting at position 647 of SEQ ID NO: 1882246
ugacuaaauuuguacauga

SEQ ID NO: 2106085 - RNA, 19 nt, Artificial Sequence
  Description of Artificial Sequence: Synthetic oligonucleotide
  Antisense strand to SEQ ID NO: 2106084
ucauguacaaauuuaguca

SEQ ID NO: 2106086 - RNA, 19 nt, Artificial Sequence
  Description of Artificial Sequence: Synthetic oligonucleotide
  Sense strand starting at position 670 of SEQ ID NO: 1882246
gaaauuauugccugguaag

SEQ ID NO: 2106087 - RNA, 19 nt, Artificial Sequence
  Description of Artificial Sequence: Synthetic oligonucleotide
  Antisense strand to SEQ ID NO: 2106086
cuuaccaggcaauaauuuc

SEQ ID NO: 2106088 - RNA, 19 nt, Artificial Sequence
  Description of Artificial Sequence: Synthetic oligonucleotide
  Sense strand starting at position 671 of SEQ ID NO: 1882246
aaauuauugccugguaaga

SEQ ID NO: 2106089 - RNA, 19 nt, Artificial Sequence
  Description of Artificial Sequence: Synthetic oligonucleotide
  Antisense strand to SEQ ID NO: 2106088
ucuuaccaggcaauaauuu

SEQ ID NO: 2106090 - RNA, 19 nt, Artificial Sequence
  Description of Artificial Sequence: Synthetic oligonucleotide
  Sense strand starting at position 863 of SEQ ID NO: 1882246
gauguugggauagguuaca

SEQ ID NO: 2106091 - RNA, 19 nt, Artificial Sequence
  Description of Artificial Sequence: Synthetic oligonucleotide
  Antisense strand to SEQ ID NO: 2106090
uguaaccuaucccaacauc

SEQ ID NO: 2106092 - RNA, 19 nt, Artificial Sequence
  Description of Artificial Sequence: Synthetic oligonucleotide
  Sense strand starting at position 932 of SEQ ID NO: 1882246
ccucauauuugugacauuu

SEQ ID NO: 2106093 - RNA, 19 nt, Artificial Sequence
  Description of Artificial Sequence: Synthetic oligonucleotide
  Antisense strand to SEQ ID NO: 2106092
aaaugucacaaauaugagg

SEQ ID NO: 2106094 - RNA, 19 nt, Artificial Sequence
  Description of Artificial Sequence: Synthetic oligonucleotide
  Sense strand starting at position 1100 of SEQ ID NO: 1882246
aucuauguccuugaguauc

SEQ ID NO: 2106095 - RNA, 19 nt, Artificial Sequence
  Description of Artificial Sequence: Synthetic oligonucleotide
  Antisense strand to SEQ ID NO: 2106094
gauacucaaggacauagau

SEQ ID NO: 2106096 - RNA, 19 nt, Artificial Sequence
  Description of Artificial Sequence: Synthetic oligonucleotide
  Sense strand starting at position 1108 of SEQ ID NO: 1882246
ccuugaguauccuuggaug

SEQ ID NO: 2106097 - RNA, 19 nt, Artificial Sequence
  Description of Artificial Sequence: Synthetic oligonucleotide
  Antisense strand to SEQ ID NO: 2106096
cauccaaggauacucaagg

SEQ ID NO: 2106098 - RNA, 19 nt, Artificial Sequence
  Description of Artificial Sequence: Synthetic oligonucleotide
  Sense strand starting at position 1138 of SEQ ID NO: 1882246
augggauccugagcugauc

SEQ ID NO: 2106099 - RNA, 19 nt, Artificial Sequence
  Description of Artificial Sequence: Synthetic oligonucleotide
  Antisense strand to SEQ ID NO: 2106098
gaucagcucaggaucccau

SEQ ID NO: 2106100 - RNA, 19 nt, Artificial Sequence
  Description of Artificial Sequence: Synthetic oligonucleotide
  Sense strand starting at position 1140 of SEQ ID NO: 1882246
gggauccugagcugaucaa

SEQ ID NO: 2106101 - RNA, 19 nt, Artificial Sequence
  Description of Artificial Sequence: Synthetic oligonucleotide
  Antisense strand to SEQ ID NO: 2106100
uugaucagcucaggauccc

SEQ ID NO: 2106102 - RNA, 19 nt, Artificial Sequence
  Description of Artificial Sequence: Synthetic oligonucleotide
  Sense strand starting at position 1241 of SEQ ID NO: 1882246
cucugagaagucuaguucu

SEQ ID NO: 2106103 - RNA, 19 nt, Artificial Sequence
  Description of Artificial Sequence: Synthetic oligonucleotide
  Antisense strand to SEQ ID NO: 2106102
agaacuagacuucucagag

SEQ ID NO: 2106104 - RNA, 19 nt, Artificial Sequence
  Description of Artificial Sequence: Synthetic oligonucleotide
  Sense strand starting at position 1734 of SEQ ID NO: 1882246
ccgaucucaugacuaucua

SEQ ID NO: 2106105 - RNA, 19 nt, Artificial Sequence
  Description of Artificial Sequence: Synthetic oligonucleotide
  Antisense strand to SEQ ID NO: 2106104
uagauagucaugagaucgg

SEQ ID NO: 2106106 - RNA, 19 nt, Artificial Sequence
  Description of Artificial Sequence: Synthetic oligonucleotide
  Sense strand starting at position 1735 of SEQ ID NO: 1882246
cgaucucaugacuaucuau

SEQ ID NO: 2106107 - RNA, 19 nt, Artificial Sequence
  Description of Artificial Sequence: Synthetic oligonucleotide
  Antisense strand to SEQ ID NO: 2106106
auagauagucaugagaucg

SEQ ID NO: 2106108 - RNA, 19 nt, Artificial Sequence
  Description of Artificial Sequence: Synthetic oligonucleotide
  Sense strand starting at position 1776 of SEQ ID NO: 1882246
ggaugucaauggagagaug

SEQ ID NO: 2106109 - RNA, 19 nt, Artificial Sequence
  Description of Artificial Sequence: Synthetic oligonucleotide
  Antisense strand to SEQ ID NO: 2106108
caucucuccauugacaucc

SEQ ID NO: 2106110 - RNA, 19 nt, Artificial Sequence
  Description of Artificial Sequence: Synthetic oligonucleotide
  Sense strand starting at position 1905 of SEQ ID NO: 1882246
gcuaauggccaucaaagau

SEQ ID NO: 2106111 - RNA, 19 nt, Artificial Sequence
  Description of Artificial Sequence: Synthetic oligonucleotide
  Antisense strand to SEQ ID NO: 2106110
aucuuugauggccauuagc

SEQ ID NO: 2106112 - RNA, 19 nt, Artificial Sequence
  Description of Artificial Sequence: Synthetic oligonucleotide
  Sense strand starting at position 1935 of SEQ ID NO: 1882246
gaggccucuucuguaauuu

SEQ ID NO: 2106113 - RNA, 19 nt, Artificial Sequence
  Description of Artificial Sequence: Synthetic oligonucleotide
  Antisense strand to SEQ ID NO: 2106112
aaauuacagaagaggccuc

SEQ ID NO: 2106114 - RNA, 19 nt, Artificial Sequence
  Description of Artificial Sequence: Synthetic oligonucleotide
  Sense strand starting at position 1969 of SEQ ID NO: 1882246
uuaggaaucuugcuaagug

SEQ ID NO: 2106115 - RNA, 19 nt, Artificial Sequence
  Description of Artificial Sequence: Synthetic oligonucleotide
  Antisense strand to SEQ ID NO: 2106114
cacuuagcaagauuccuaa

SEQ ID NO: 2106116 - RNA, 19 nt, Artificial Sequence
  Description of Artificial Sequence: Synthetic oligonucleotide
  Sense strand starting at position 1981 of SEQ ID NO: 1882246
cuaagugugaaauagguca

SEQ ID NO: 2106117 - RNA, 19 nt, Artificial Sequence
  Description of Artificial Sequence: Synthetic oligonucleotide
  Antisense strand to SEQ ID NO: 2106116
ugaccuauuucacacuuag

SEQ ID NO: 2106118 - RNA, 19 nt, Artificial Sequence
  Description of Artificial Sequence: Synthetic oligonucleotide
  Sense strand starting at position 1986 of SEQ ID NO: 1882246
ugugaaauaggucauagcu

SEQ ID NO: 2106119 - RNA, 19 nt, Artificial Sequence
  Description of Artificial Sequence: Synthetic oligonucleotide
  Antisense strand to SEQ ID NO: 2106118
agcuaugaccuauuucaca

SEQ ID NO: 2106120 - RNA, 19 nt, Artificial Sequence
  Description of Artificial Sequence: Synthetic oligonucleotide
  Sense strand starting at position 2066 of SEQ ID NO: 1882246
aggguagaaucucaauuua

SEQ ID NO: 2106121 - RNA, 19 nt, Artificial Sequence
  Description of Artificial Sequence: Synthetic oligonucleotide
  Antisense strand to SEQ ID NO: 2106120
uaaauugagauucuacccu

SEQ ID NO: 2106122 - RNA, 19 nt, Artificial Sequence
  Description of Artificial Sequence: Synthetic oligonucleotide
  Sense strand starting at position 2224 of SEQ ID NO: 1882246
ugaguauucuaaucuauga

SEQ ID NO: 2106123 - RNA, 19 nt, Artificial Sequence
  Description of Artificial Sequence: Synthetic oligonucleotide
  Antisense strand to SEQ ID NO: 2106122
ucauagauuagaauacuca

SEQ ID NO: 2106124 - RNA, 19 nt, Artificial Sequence
  Description of Artificial Sequence: Synthetic oligonucleotide
  Sense strand starting at position 2252 of SEQ ID NO: 1882246
acuugugguaccuauggua

SEQ ID NO: 2106125 - RNA, 19 nt, Artificial Sequence
  Description of Artificial Sequence: Synthetic oligonucleotide
  Antisense strand to SEQ ID NO: 2106124
uaccauagguaccacaagu

SEQ ID NO: 2106126 - RNA, 19 nt, Artificial Sequence
  Description of Artificial Sequence: Synthetic oligonucleotide
  Sense strand starting at position 2274 of SEQ ID NO: 1882246
auugguagguugguaugaa

SEQ ID NO: 2106127 - RNA, 19 nt, Artificial Sequence
  Description of Artificial Sequence: Synthetic oligonucleotide
  Antisense strand to SEQ ID NO: 2106126
uucauaccaaccuaccaau

SEQ ID NO: 2106128 - RNA, 19 nt, Artificial Sequence
  Description of Artificial Sequence: Synthetic oligonucleotide
  Sense strand starting at position 2440 of SEQ ID NO: 1882246
ugaugaaacuauucuuugu

SEQ ID NO: 2106129 - RNA, 19 nt, Artificial Sequence
  Description of Artificial Sequence: Synthetic oligonucleotide
  Antisense strand to SEQ ID NO: 2106128
acaaagaauaguuucauca

SEQ ID NO: 2106130 - RNA, 19 nt, Artificial Sequence
  Description of Artificial Sequence: Synthetic oligonucleotide
  Sense strand starting at position 2453 of SEQ ID NO: 1882246
cuuuguuauugaucuacau

SEQ ID NO: 2106131 - RNA, 19 nt, Artificial Sequence
  Description of Artificial Sequence: Synthetic oligonucleotide
  Antisense strand to SEQ ID NO: 2106130
auguagaucaauaacaaag

SEQ ID NO: 2106132 - RNA, 19 nt, Artificial Sequence
  Description of Artificial Sequence: Synthetic oligonucleotide
  Sense strand starting at position 2729 of SEQ ID NO: 1882246
gauguuugcagugaaugau

SEQ ID NO: 2106133 - RNA, 19 nt, Artificial Sequence
  Description of Artificial Sequence: Synthetic oligonucleotide
  Antisense strand to SEQ ID NO: 2106132
aucauucacugcaaacauc

SEQ ID NO: 2106134 - RNA, 19 nt, Artificial Sequence
  Description of Artificial Sequence: Synthetic oligonucleotide
  Sense strand starting at position 2733 of SEQ ID NO: 1882246
uuugcagugaaugauaagu

SEQ ID NO: 2106135 - RNA, 19 nt, Artificial Sequence
  Description of Artificial Sequence: Synthetic oligonucleotide
  Antisense strand to SEQ ID NO: 2106134
acuuaucauucacugcaaa

SEQ ID NO: 2106136 - RNA, 19 nt, Artificial Sequence
  Description of Artificial Sequence: Synthetic oligonucleotide
  Sense strand starting at position 2823 of SEQ ID NO: 1882246
ggacauacaugguuuacua

SEQ ID NO: 2106137 - RNA, 19 nt, Artificial Sequence
  Description of Artificial Sequence: Synthetic oligonucleotide
  Antisense strand to SEQ ID NO: 2106136
uaguaaaccauguaugucc

SEQ ID NO: 2106138 - RNA, 19 nt, Artificial Sequence
  Description of Artificial Sequence: Synthetic oligonucleotide
  Sense strand starting at position 2830 of SEQ ID NO: 1882246
caugguuuacuaugguaca

SEQ ID NO: 2106139 - RNA, 19 nt, Artificial Sequence
  Description of Artificial Sequence: Synthetic oligonucleotide
  Antisense strand to SEQ ID NO: 2106138
uguaccauaguaaaccaug

SEQ ID NO: 2106140 - RNA, 19 nt, Artificial Sequence
  Description of Artificial Sequence: Synthetic oligonucleotide
  Sense strand starting at position 2893 of SEQ ID NO: 1882246
ucuguuuauuaaguugaca

SEQ ID NO: 2106141 - RNA, 19 nt, Artificial Sequence
  Description of Artificial Sequence: Synthetic oligonucleotide
  Antisense strand to SEQ ID NO: 2106140
ugucaacuuaauaaacaga

SEQ ID NO: 2106142 - RNA, 19 nt, Artificial Sequence
  Description of Artificial Sequence: Synthetic oligonucleotide
  Sense strand starting at position 3043 of SEQ ID NO: 1882246
ccuagaugagaugguguga

SEQ ID NO: 2106143 - RNA, 19 nt, Artificial Sequence
  Description of Artificial Sequence: Synthetic oligonucleotide
  Antisense strand to SEQ ID NO: 2106142
ucacaccaucucaucuagg

SEQ ID NO: 2106144 - RNA, 19 nt, Artificial Sequence
  Description of Artificial Sequence: Synthetic oligonucleotide
  Sense strand starting at position 3088 of SEQ ID NO: 1882246
aguacuuacuuuguuaaag

SEQ ID NO: 2106145 - RNA, 19 nt, Artificial Sequence
  Description of Artificial Sequence: Synthetic oligonucleotide
  Antisense strand to SEQ ID NO: 2106144
cuuuaacaaaguaaguacu

SEQ ID NO: 2106146 - RNA, 19 nt, Artificial Sequence
  Description of Artificial Sequence: Synthetic oligonucleotide
  Sense strand starting at position 3143 of SEQ ID NO: 1882246
uccuaaugugguugauaac

SEQ ID NO: 2106147 - RNA, 19 nt, Artificial Sequence
  Description of Artificial Sequence: Synthetic oligonucleotide
  Antisense strand to SEQ ID NO: 2106146
guuaucaaccacauuagga

SEQ ID NO: 2106148 - RNA, 19 nt, Artificial Sequence
  Description of Artificial Sequence: Synthetic oligonucleotide
  Sense strand starting at position 3373 of SEQ ID NO: 1882246
cuuuauaagucaguagaaa

SEQ ID NO: 2106149 - RNA, 19 nt, Artificial Sequence
  Description of Artificial Sequence: Synthetic oligonucleotide
  Antisense strand to SEQ ID NO: 2106148
uuucuacugacuuauaaag

SEQ ID NO: 2106150 - RNA, 19 nt, Artificial Sequence
  Description of Artificial Sequence: Synthetic oligonucleotide
  Sense strand starting at position 3557 of SEQ ID NO: 1882246
augugaauuccaggcaaag

SEQ ID NO: 2106151 - RNA, 19 nt, Artificial Sequence
  Description of Artificial Sequence: Synthetic oligonucleotide
  Antisense strand to SEQ ID NO: 2106150
cuuugccuggaauucacau

SEQ ID NO: 2106152 - RNA, 19 nt, Artificial Sequence
  Description of Artificial Sequence: Synthetic oligonucleotide
  Sense strand starting at position 3569 of SEQ ID NO: 1882246
ggcaaaggaucagucacuu

SEQ ID NO: 2106153 - RNA, 19 nt, Artificial Sequence
  Description of Artificial Sequence: Synthetic oligonucleotide
  Antisense strand to SEQ ID NO: 2106152
aagugacugauccuuugcc

SEQ ID NO: 2106154 - RNA, 19 nt, Artificial Sequence
  Description of Artificial Sequence: Synthetic oligonucleotide
  Sense strand starting at position 3846 of SEQ ID NO: 1882246
gcauuaauuugacaugaug

SEQ ID NO: 2106155 - RNA, 19 nt, Artificial Sequence
  Description of Artificial Sequence: Synthetic oligonucleotide
  Antisense strand to SEQ ID NO: 2106154
caucaugucaaauuaaugc

SEQ ID NO: 2106156 - RNA, 19 nt, Artificial Sequence
  Description of Artificial Sequence: Synthetic oligonucleotide
  Sense strand starting at position 3889 of SEQ ID NO: 1882246
gaccuugaguucuugagag

SEQ ID NO: 2106157 - RNA, 19 nt, Artificial Sequence
  Description of Artificial Sequence: Synthetic oligonucleotide
  Antisense strand to SEQ ID NO: 2106156
cucucaagaacucaagguc

SEQ ID NO: 2106158 - RNA, 19 nt, Artificial Sequence
  Description of Artificial Sequence: Synthetic oligonucleotide
  Sense strand starting at position 18 of SEQ ID NO: 1882247
uuaggauuagcuugccaau

SEQ ID NO: 2106159 - RNA, 19 nt, Artificial Sequence
  Description of Artificial Sequence: Synthetic oligonucleotide
  Antisense strand to SEQ ID NO: 2106158
auuggcaagcuaauccuaa

SEQ ID NO: 2106160 - RNA, 19 nt, Artificial Sequence
  Description of Artificial Sequence: Synthetic oligonucleotide
  Sense strand starting at position 68 of SEQ ID NO: 1882247
agggauuguguagaaucuu

SEQ ID NO: 2106161 - RNA, 19 nt, Artificial Sequence
  Description of Artificial Sequence: Synthetic oligonucleotide
  Antisense strand to SEQ ID NO: 2106160
aagauucuacacaaucccu

SEQ ID NO: 2106162 - RNA, 19 nt, Artificial Sequence
  Description of Artificial Sequence: Synthetic oligonucleotide
  Sense strand starting at position 126 of SEQ ID NO: 1882247
guguucugaucugugaaca

SEQ ID NO: 2106163 - RNA, 19 nt, Artificial Sequence
  Description of Artificial Sequence: Synthetic oligonucleotide
  Antisense strand to SEQ ID NO: 2106162
uguucacagaucagaacac

SEQ ID NO: 2106164 - RNA, 19 nt, Artificial Sequence
  Description of Artificial Sequence: Synthetic oligonucleotide
  Sense strand starting at position 127 of SEQ ID NO: 1882247
uguucugaucugugaacau

SEQ ID NO: 2106165 - RNA, 19 nt, Artificial Sequence
  Description of Artificial Sequence: Synthetic oligonucleotide
  Antisense strand to SEQ ID NO: 2106164
auguucacagaucagaaca

SEQ ID NO: 2106166 - RNA, 19 nt, Artificial Sequence
  Description of Artificial Sequence: Synthetic oligonucleotide
  Sense strand starting at position 145 of SEQ ID NO: 1882247
uaggauaucuuuccguuua

SEQ ID NO: 2106167 - RNA, 19 nt, Artificial Sequence
  Description of Artificial Sequence: Synthetic oligonucleotide
  Antisense strand to SEQ ID NO: 2106166
uaaacggaaagauauccua

SEQ ID NO: 2106168 - RNA, 19 nt, Artificial Sequence
  Description of Artificial Sequence: Synthetic oligonucleotide
  Sense strand starting at position 228 of SEQ ID NO: 1882247
uuguuaaaguuauuccugu

SEQ ID NO: 2106169 - RNA, 19 nt, Artificial Sequence
  Description of Artificial Sequence: Synthetic oligonucleotide
  Antisense strand to SEQ ID NO: 2106168
acaggaauaacuuuaacaa

SEQ ID NO: 2106170 - RNA, 19 nt, Artificial Sequence
  Description of Artificial Sequence: Synthetic oligonucleotide
  Sense strand starting at position 328 of SEQ ID NO: 1882247
acaguuucucuuuguauau

SEQ ID NO: 2106171 - RNA, 19 nt, Artificial Sequence
  Description of Artificial Sequence: Synthetic oligonucleotide
  Antisense strand to SEQ ID NO: 2106170
auauacaaagagaaacugu

SEQ ID NO: 2106172 - RNA, 19 nt, Artificial Sequence
  Description of Artificial Sequence: Synthetic oligonucleotide
  Sense strand starting at position 694 of SEQ ID NO: 1882247
gcccuauauuagguugaag

SEQ ID NO: 2106173 - RNA, 19 nt, Artificial Sequence
  Description of Artificial Sequence: Synthetic oligonucleotide
  Antisense strand to SEQ ID NO: 2106172
cuucaaccuaauauagggc

SEQ ID NO: 2106174 - RNA, 19 nt, Artificial Sequence
  Description of Artificial Sequence: Synthetic oligonucleotide
  Sense strand starting at position 696 of SEQ ID NO: 1882247
ccuauauuagguugaagaa

SEQ ID NO: 2106175 - RNA, 19 nt, Artificial Sequence
  Description of Artificial Sequence: Synthetic oligonucleotide
  Antisense strand to SEQ ID NO: 2106174
uucuucaaccuaauauagg

SEQ ID NO: 2106176 - RNA, 19 nt, Artificial Sequence
  Description of Artificial Sequence: Synthetic oligonucleotide
  Sense strand starting at position 752 of SEQ ID NO: 1882247
ucaucaugaaaggguguua

SEQ ID NO: 2106177 - RNA, 19 nt, Artificial Sequence
  Description of Artificial Sequence: Synthetic oligonucleotide
  Antisense strand to SEQ ID NO: 2106176
uaacacccuuucaugauga

SEQ ID NO: 2106178 - RNA, 19 nt, Artificial Sequence
  Description of Artificial Sequence: Synthetic oligonucleotide
  Sense strand starting at position 1329 of SEQ ID NO: 1882247
gacagccaucuuugugaac

SEQ ID NO: 2106179 - RNA, 19 nt, Artificial Sequence
  Description of Artificial Sequence: Synthetic oligonucleotide
  Antisense strand to SEQ ID NO: 2106178
guucacaaagauggcuguc

SEQ ID NO: 2106180 - RNA, 19 nt, Artificial Sequence
  Description of Artificial Sequence: Synthetic oligonucleotide
  Sense strand starting at position 1330 of SEQ ID NO: 1882247
acagccaucuuugugaaca

SEQ ID NO: 2106181 - RNA, 19 nt, Artificial Sequence
  Description of Artificial Sequence: Synthetic oligonucleotide
  Antisense strand to SEQ ID NO: 2106180
uguucacaaagauggcugu

SEQ ID NO: 2106182 - RNA, 19 nt, Artificial Sequence
  Description of Artificial Sequence: Synthetic oligonucleotide
  Sense strand starting at position 1479 of SEQ ID NO: 1882247
gaugccauacgcgaugaaa

SEQ ID NO: 2106183 - RNA, 19 nt, Artificial Sequence
  Description of Artificial Sequence: Synthetic oligonucleotide
  Antisense strand to SEQ ID NO: 2106182
uuucaucgcguauggcauc

SEQ ID NO: 2106184 - RNA, 19 nt, Artificial Sequence
  Description of Artificial Sequence: Synthetic oligonucleotide
  Sense strand starting at position 1488 of SEQ ID NO: 1882247
cgcgaugaaauccacaagu

SEQ ID NO: 2106185 - RNA, 19 nt, Artificial Sequence
  Description of Artificial Sequence: Synthetic oligonucleotide
  Antisense strand to SEQ ID NO: 2106184
acuuguggauuucaucgcg

SEQ ID NO: 2106186 - RNA, 19 nt, Artificial Sequence
  Description of Artificial Sequence: Synthetic oligonucleotide
  Sense strand starting at position 1490 of SEQ ID NO: 1882247
cgaugaaauccacaagugu

SEQ ID NO: 2106187 - RNA, 19 nt, Artificial Sequence
  Description of Artificial Sequence: Synthetic oligonucleotide
  Antisense strand to SEQ ID NO: 2106186
acacuuguggauuucaucg

SEQ ID NO: 2106188 - RNA, 19 nt, Artificial Sequence
  Description of Artificial Sequence: Synthetic oligonucleotide
  Sense strand starting at position 1499 of SEQ ID NO: 1882247
ccacaagugugaucuuguc

SEQ ID NO: 2106189 - RNA, 19 nt, Artificial Sequence
  Description of Artificial Sequence: Synthetic oligonucleotide
  Antisense strand to SEQ ID NO: 2106188
gacaagaucacacuugugg

SEQ ID NO: 2106190 - RNA, 19 nt, Artificial Sequence
  Description of Artificial Sequence: Synthetic oligonucleotide
  Sense strand starting at position 2034 of SEQ ID NO: 1882247
uuuacucuuggauguuaaa

SEQ ID NO: 2106191 - RNA, 19 nt, Artificial Sequence
  Description of Artificial Sequence: Synthetic oligonucleotide
  Antisense strand to SEQ ID NO: 2106190
uuuaacauccaagaguaaa

SEQ ID NO: 2106192 - RNA, 19 nt, Artificial Sequence
  Description of Artificial Sequence: Synthetic oligonucleotide
  Sense strand starting at position 2085 of SEQ ID NO: 1882247
gaucgugguguauaaucca

SEQ ID NO: 2106193 - RNA, 19 nt, Artificial Sequence
  Description of Artificial Sequence: Synthetic oligonucleotide
  Antisense strand to SEQ ID NO: 2106192
uggauuauacaccacgauc

SEQ ID NO: 2106194 - RNA, 19 nt, Artificial Sequence
  Description of Artificial Sequence: Synthetic oligonucleotide
  Sense strand starting at position 2149 of SEQ ID NO: 1882247
uuugcaucuuauuuguaag

SEQ ID NO: 2106195 - RNA, 19 nt, Artificial Sequence
  Description of Artificial Sequence: Synthetic oligonucleotide
  Antisense strand to SEQ ID NO: 2106194
cuuacaaauaagaugcaaa

SEQ ID NO: 2106196 - RNA, 19 nt, Artificial Sequence
  Description of Artificial Sequence: Synthetic oligonucleotide
  Sense strand starting at position 2152 of SEQ ID NO: 1882247
gcaucuuauuuguaagaga

SEQ ID NO: 2106197 - RNA, 19 nt, Artificial Sequence
  Description of Artificial Sequence: Synthetic oligonucleotide
  Antisense strand to SEQ ID NO: 2106196
ucucuuacaaauaagaugc

SEQ ID NO: 2106198 - RNA, 19 nt, Artificial Sequence
  Description of Artificial Sequence: Synthetic oligonucleotide
  Sense strand starting at position 2167 of SEQ ID NO: 1882247
gagauauuagucuguagcu

SEQ ID NO: 2106199 - RNA, 19 nt, Artificial Sequence
  Description of Artificial Sequence: Synthetic oligonucleotide
  Antisense strand to SEQ ID NO: 2106198
agcuacagacuaauaucuc

SEQ ID NO: 2106200 - RNA, 19 nt, Artificial Sequence
  Description of Artificial Sequence: Synthetic oligonucleotide
  Sense strand starting at position 2168 of SEQ ID NO: 1882247
agauauuagucuguagcuu

SEQ ID NO: 2106201 - RNA, 19 nt, Artificial Sequence
  Description of Artificial Sequence: Synthetic oligonucleotide
  Antisense strand to SEQ ID NO: 2106200
aagcuacagacuaauaucu

SEQ ID NO: 2106202 - RNA, 19 nt, Artificial Sequence
  Description of Artificial Sequence: Synthetic oligonucleotide
  Sense strand starting at position 2367 of SEQ ID NO: 1882247
acaauuuaguagugauaag

SEQ ID NO: 2106203 - RNA, 19 nt, Artificial Sequence
  Description of Artificial Sequence: Synthetic oligonucleotide
  Antisense strand to SEQ ID NO: 2106202
cuuaucacuacuaaauugu

SEQ ID NO: 2106204 - RNA, 19 nt, Artificial Sequence
  Description of Artificial Sequence: Synthetic oligonucleotide
  Sense strand starting at position 2788 of SEQ ID NO: 1882247
ccuaguaaccacuguucua

SEQ ID NO: 2106205 - RNA, 19 nt, Artificial Sequence
  Description of Artificial Sequence: Synthetic oligonucleotide
  Antisense strand to SEQ ID NO: 2106204
uagaacagugguuacuagg

SEQ ID NO: 2106206 - RNA, 19 nt, Artificial Sequence
  Description of Artificial Sequence: Synthetic oligonucleotide
  Sense strand starting at position 2993 of SEQ ID NO: 1882247
cuaugauucugacugcucu

SEQ ID NO: 2106207 - RNA, 19 nt, Artificial Sequence
  Description of Artificial Sequence: Synthetic oligonucleotide
  Antisense strand to SEQ ID NO: 2106206
agagcagucagaaucauag

SEQ ID NO: 2106208 - RNA, 19 nt, Artificial Sequence
  Description of Artificial Sequence: Synthetic oligonucleotide
  Sense strand starting at position 3041 of SEQ ID NO: 1882247
guauuuaucuuugugugau

SEQ ID NO: 2106209 - RNA, 19 nt, Artificial Sequence
  Description of Artificial Sequence: Synthetic oligonucleotide
  Antisense strand to SEQ ID NO: 2106208
aucacacaaagauaaauac

SEQ ID NO: 2106210 - RNA, 19 nt, Artificial Sequence
  Description of Artificial Sequence: Synthetic oligonucleotide
  Sense strand starting at position 3053 of SEQ ID NO: 1882247
gugugauugguuuaucuca

SEQ ID NO: 2106211 - RNA, 19 nt, Artificial Sequence
  Description of Artificial Sequence: Synthetic oligonucleotide
  Antisense strand to SEQ ID NO: 2106210
ugagauaaaccaaucacac

SEQ ID NO: 2106212 - RNA, 19 nt, Artificial Sequence
  Description of Artificial Sequence: Synthetic oligonucleotide
  Sense strand starting at position 3055 of SEQ ID NO: 1882247
gugauugguuuaucucaca

SEQ ID NO: 2106213 - RNA, 19 nt, Artificial Sequence
  Description of Artificial Sequence: Synthetic oligonucleotide
  Antisense strand to SEQ ID NO: 2106212
ugugagauaaaccaaucac

SEQ ID NO: 2106214 - RNA, 19 nt, Artificial Sequence
  Description of Artificial Sequence: Synthetic oligonucleotide
  Sense strand starting at position 3149 of SEQ ID NO: 1882247
auuccauuguagguauaca

SEQ ID NO: 2106215 - RNA, 19 nt, Artificial Sequence
  Description of Artificial Sequence: Synthetic oligonucleotide
  Antisense strand to SEQ ID NO: 2106214
uguauaccuacaauggaau

SEQ ID NO: 2106216 - RNA, 19 nt, Artificial Sequence
  Description of Artificial Sequence: Synthetic oligonucleotide
  Sense strand starting at position 3157 of SEQ ID NO: 1882247
guagguauacaucacguuu

SEQ ID NO: 2106217 - RNA, 19 nt, Artificial Sequence
  Description of Artificial Sequence: Synthetic oligonucleotide
  Antisense strand to SEQ ID NO: 2106216
aaacgugauguauaccuac

SEQ ID NO: 2106218 - RNA, 19 nt, Artificial Sequence
  Description of Artificial Sequence: Synthetic oligonucleotide
  Sense strand starting at position 3187 of SEQ ID NO: 1882247
ucaucuuucgacggacacu

SEQ ID NO: 2106219 - RNA, 19 nt, Artificial Sequence
  Description of Artificial Sequence: Synthetic oligonucleotide
  Antisense strand to SEQ ID NO: 2106218
aguguccgucgaaagauga

SEQ ID NO: 2106220 - RNA, 19 nt, Artificial Sequence
  Description of Artificial Sequence: Synthetic oligonucleotide
  Sense strand starting at position 3240 of SEQ ID NO: 1882247
ugcugcuaugaacaagaaa

SEQ ID NO: 2106221 - RNA, 19 nt, Artificial Sequence
  Description of Artificial Sequence: Synthetic oligonucleotide
  Antisense strand to SEQ ID NO: 2106220
uuucuuguucauagcagca

SEQ ID NO: 2106222 - RNA, 19 nt, Artificial Sequence
  Description of Artificial Sequence: Synthetic oligonucleotide
  Sense strand starting at position 3258 of SEQ ID NO: 1882247
auauaucuuugagaacaug

SEQ ID NO: 2106223 - RNA, 19 nt, Artificial Sequence
  Description of Artificial Sequence: Synthetic oligonucleotide
  Antisense strand to SEQ ID NO: 2106222
cauguucucaaagauauau

SEQ ID NO: 2106224 - RNA, 19 nt, Artificial Sequence
  Description of Artificial Sequence: Synthetic oligonucleotide
  Sense strand starting at position 3266 of SEQ ID NO: 1882247
uugagaacaugcuuuccau

SEQ ID NO: 2106225 - RNA, 19 nt, Artificial Sequence
  Description of Artificial Sequence: Synthetic oligonucleotide
  Antisense strand to SEQ ID NO: 2106224
auggaaagcauguucucaa

SEQ ID NO: 2106226 - RNA, 19 nt, Artificial Sequence
  Description of Artificial Sequence: Synthetic oligonucleotide
  Sense strand starting at position 3348 of SEQ ID NO: 1882247
gaggaaucgccaugccaua

SEQ ID NO: 2106227 - RNA, 19 nt, Artificial Sequence
  Description of Artificial Sequence: Synthetic oligonucleotide
  Antisense strand to SEQ ID NO: 2106226
uauggcauggcgauuccuc

SEQ ID NO: 2106228 - RNA, 19 nt, Artificial Sequence
  Description of Artificial Sequence: Synthetic oligonucleotide
  Sense strand starting at position 3479 of SEQ ID NO: 1882247
aguuguuauagguauacuc

SEQ ID NO: 2106229 - RNA, 19 nt, Artificial Sequence
  Description of Artificial Sequence: Synthetic oligonucleotide
  Antisense strand to SEQ ID NO: 2106228
gaguauaccuauaacaacu

SEQ ID NO: 2106230 - RNA, 19 nt, Artificial Sequence
  Description of Artificial Sequence: Synthetic oligonucleotide
  Sense strand starting at position 3517 of SEQ ID NO: 1882247
gaaucagguuugguaguuu

SEQ ID NO: 2106231 - RNA, 19 nt, Artificial Sequence
  Description of Artificial Sequence: Synthetic oligonucleotide
  Antisense strand to SEQ ID NO: 2106230
aaacuaccaaaccugauuc

SEQ ID NO: 2106232 - RNA, 19 nt, Artificial Sequence
  Description of Artificial Sequence: Synthetic oligonucleotide
  Sense strand starting at position 3578 of SEQ ID NO: 1882247
uguaauauguuggcauaca

SEQ ID NO: 2106233 - RNA, 19 nt, Artificial Sequence
  Description of Artificial Sequence: Synthetic oligonucleotide
  Antisense strand to SEQ ID NO: 2106232
uguaugccaacauauuaca

SEQ ID NO: 2106234 - RNA, 19 nt, Artificial Sequence
  Description of Artificial Sequence: Synthetic oligonucleotide
  Sense strand starting at position 3944 of SEQ ID NO: 1882247
uuauuucugugagauuagu

SEQ ID NO: 2106235 - RNA, 19 nt, Artificial Sequence
  Description of Artificial Sequence: Synthetic oligonucleotide
  Antisense strand to SEQ ID NO: 2106234
acuaaucucacagaaauaa

SEQ ID NO: 2106236 - RNA, 19 nt, Artificial Sequence
  Description of Artificial Sequence: Synthetic oligonucleotide
  Sense strand starting at position 3981 of SEQ ID NO: 1882247
aauucuggauuugguaauu

SEQ ID NO: 2106237 - RNA, 19 nt, Artificial Sequence
  Description of Artificial Sequence: Synthetic oligonucleotide
  Antisense strand to SEQ ID NO: 2106236
aauuaccaaauccagaauu

SEQ ID NO: 2106238 - RNA, 19 nt, Artificial Sequence
  Description of Artificial Sequence: Synthetic oligonucleotide
  Sense strand starting at position 552 of SEQ ID NO: 1882248
agggaaugcuuauacaacu

SEQ ID NO: 2106239 - RNA, 19 nt, Artificial Sequence
  Description of Artificial Sequence: Synthetic oligonucleotide
  Antisense strand to SEQ ID NO: 2106238
aguuguauaagcauucccu

SEQ ID NO: 2106240 - RNA, 19 nt, Artificial Sequence
  Description of Artificial Sequence: Synthetic oligonucleotide
  Sense strand starting at position 566 of SEQ ID NO: 1882248
caacuacuguugguggaaa

SEQ ID NO: 2106241 - RNA, 19 nt, Artificial Sequence
  Description of Artificial Sequence: Synthetic oligonucleotide
  Antisense strand to SEQ ID NO: 2106240
uuuccaccaacaguaguug

SEQ ID NO: 2106242 - RNA, 19 nt, Artificial Sequence
  Description of Artificial Sequence: Synthetic oligonucleotide
  Sense strand starting at position 567 of SEQ ID NO: 1882248
aacuacuguugguggaaau

SEQ ID NO: 2106243 - RNA, 19 nt, Artificial Sequence
  Description of Artificial Sequence: Synthetic oligonucleotide
  Antisense strand to SEQ ID NO: 2106242
auuuccaccaacaguaguu

SEQ ID NO: 2106244 - RNA, 19 nt, Artificial Sequence
  Description of Artificial Sequence: Synthetic oligonucleotide
  Sense strand starting at position 1312 of SEQ ID NO: 1882248
uuaugucauucucauaguu

SEQ ID NO: 2106245 - RNA, 19 nt, Artificial Sequence
  Description of Artificial Sequence: Synthetic oligonucleotide
  Antisense strand to SEQ ID NO: 2106244
aacuaugagaaugacauaa

SEQ ID NO: 2106246 - RNA, 19 nt, Artificial Sequence
  Description of Artificial Sequence: Synthetic oligonucleotide
  Sense strand starting at position 1887 of SEQ ID NO: 1882248
cguaauaaguucuccaagu

SEQ ID NO: 2106247 - RNA, 19 nt, Artificial Sequence
  Description of Artificial Sequence: Synthetic oligonucleotide
  Antisense strand to SEQ ID NO: 2106246
acuuggagaacuuauuacg

SEQ ID NO: 2106248 - RNA, 19 nt, Artificial Sequence
  Description of Artificial Sequence: Synthetic oligonucleotide
  Sense strand starting at position 1888 of SEQ ID NO: 1882248
guaauaaguucuccaagua

SEQ ID NO: 2106249 - RNA, 19 nt, Artificial Sequence
  Description of Artificial Sequence: Synthetic oligonucleotide
  Antisense strand to SEQ ID NO: 2106248
uacuuggagaacuuauuac

SEQ ID NO: 2106250 - RNA, 19 nt, Artificial Sequence
  Description of Artificial Sequence: Synthetic oligonucleotide
  Sense strand starting at position 2860 of SEQ ID NO: 1882248
gugggcugaugcuuucaga

SEQ ID NO: 2106251 - RNA, 19 nt, Artificial Sequence
  Description of Artificial Sequence: Synthetic oligonucleotide
  Antisense strand to SEQ ID NO: 2106250
ucugaaagcaucagcccac

SEQ ID NO: 2106252 - RNA, 19 nt, Artificial Sequence
  Description of Artificial Sequence: Synthetic oligonucleotide
  Sense strand starting at position 3005 of SEQ ID NO: 1882248
augauaaggugguaucgau

SEQ ID NO: 2106253 - RNA, 19 nt, Artificial Sequence
  Description of Artificial Sequence: Synthetic oligonucleotide
  Antisense strand to SEQ ID NO: 2106252
aucgauaccaccuuaucau

SEQ ID NO: 2106254 - RNA, 19 nt, Artificial Sequence
  Description of Artificial Sequence: Synthetic oligonucleotide
  Sense strand starting at position 3011 of SEQ ID NO: 1882248
aggugguaucgauagggua

SEQ ID NO: 2106255 - RNA, 19 nt, Artificial Sequence
  Description of Artificial Sequence: Synthetic oligonucleotide
  Antisense strand to SEQ ID NO: 2106254
uacccuaucgauaccaccu

SEQ ID NO: 2106256 - RNA, 19 nt, Artificial Sequence
  Description of Artificial Sequence: Synthetic oligonucleotide
  Sense strand starting at position 3013 of SEQ ID NO: 1882248
gugguaucgauaggguauu

SEQ ID NO: 2106257 - RNA, 19 nt, Artificial Sequence
  Description of Artificial Sequence: Synthetic oligonucleotide
  Antisense strand to SEQ ID NO: 2106256
aauacccuaucgauaccac

SEQ ID NO: 2106258 - RNA, 19 nt, Artificial Sequence
  Description of Artificial Sequence: Synthetic oligonucleotide
  Sense strand starting at position 3070 of SEQ ID NO: 1882248
accaaugacugauaagaag

SEQ ID NO: 2106259 - RNA, 19 nt, Artificial Sequence
  Description of Artificial Sequence: Synthetic oligonucleotide
  Antisense strand to SEQ ID NO: 2106258
cuucuuaucagucauuggu

SEQ ID NO: 2106260 - RNA, 19 nt, Artificial Sequence
  Description of Artificial Sequence: Synthetic oligonucleotide
  Sense strand starting at position 3163 of SEQ ID NO: 1882248
guaaacuguuauugacaca

SEQ ID NO: 2106261 - RNA, 19 nt, Artificial Sequence
  Description of Artificial Sequence: Synthetic oligonucleotide
  Antisense strand to SEQ ID NO: 2106260
ugugucaauaacaguuuac

SEQ ID NO: 2106262 - RNA, 19 nt, Artificial Sequence
  Description of Artificial Sequence: Synthetic oligonucleotide
  Sense strand starting at position 3429 of SEQ ID NO: 1882248
cacaguaugcaacagugau

SEQ ID NO: 2106263 - RNA, 19 nt, Artificial Sequence
  Description of Artificial Sequence: Synthetic oligonucleotide
  Antisense strand to SEQ ID NO: 2106262
aucacuguugcauacugug

SEQ ID NO: 2106264 - RNA, 19 nt, Artificial Sequence
  Description of Artificial Sequence: Synthetic oligonucleotide
  Sense strand starting at position 3435 of SEQ ID NO: 1882248
augcaacagugaucauauu

SEQ ID NO: 2106265 - RNA, 19 nt, Artificial Sequence
  Description of Artificial Sequence: Synthetic oligonucleotide
  Antisense strand to SEQ ID NO: 2106264
aauaugaucacuguugcau

SEQ ID NO: 2106266 - RNA, 19 nt, Artificial Sequence
  Description of Artificial Sequence: Synthetic oligonucleotide
  Sense strand starting at position 3436 of SEQ ID NO: 1882248
ugcaacagugaucauauua

SEQ ID NO: 2106267 - RNA, 19 nt, Artificial Sequence
  Description of Artificial Sequence: Synthetic oligonucleotide
  Antisense strand to SEQ ID NO: 2106266
uaauaugaucacuguugca

SEQ ID NO: 2106268 - RNA, 19 nt, Artificial Sequence
  Description of Artificial Sequence: Synthetic oligonucleotide
  Sense strand starting at position 3620 of SEQ ID NO: 1882248
ggcagcauauuccaaauuu

SEQ ID NO: 2106269 - RNA, 19 nt, Artificial Sequence
  Description of Artificial Sequence: Synthetic oligonucleotide
  Antisense strand to SEQ ID NO: 2106268
aaauuuggaauaugcugcc

SEQ ID NO: 2106270 - RNA, 19 nt, Artificial Sequence
  Description of Artificial Sequence: Synthetic oligonucleotide
  Sense strand starting at position 67 of SEQ ID NO: 1882249
ugagaagaauuugaggcau

SEQ ID NO: 2106271 - RNA, 19 nt, Artificial Sequence
  Description of Artificial Sequence: Synthetic oligonucleotide
  Antisense strand to SEQ ID NO: 2106270
augccucaaauucuucuca

SEQ ID NO: 2106272 - RNA, 19 nt, Artificial Sequence
  Description of Artificial Sequence: Synthetic oligonucleotide
  Sense strand starting at position 69 of SEQ ID NO: 1882249
agaagaauuugaggcauua

SEQ ID NO: 2106273 - RNA, 19 nt, Artificial Sequence
  Description of Artificial Sequence: Synthetic oligonucleotide
  Antisense strand to SEQ ID NO: 2106272
uaaugccucaaauucuucu

SEQ ID NO: 2106274 - RNA, 19 nt, Artificial Sequence
  Description of Artificial Sequence: Synthetic oligonucleotide
  Sense strand starting at position 79 of SEQ ID NO: 1882249
gaggcauuauaguuggcuu

SEQ ID NO: 2106275 - RNA, 19 nt, Artificial Sequence
  Description of Artificial Sequence: Synthetic oligonucleotide
  Antisense strand to SEQ ID NO: 2106274
aagccaacuauaaugccuc

SEQ ID NO: 2106276 - RNA, 19 nt, Artificial Sequence
  Description of Artificial Sequence: Synthetic oligonucleotide
  Sense strand starting at position 81 of SEQ ID NO: 1882249
ggcauuauaguuggcuuga

SEQ ID NO: 2106277 - RNA, 19 nt, Artificial Sequence
  Description of Artificial Sequence: Synthetic oligonucleotide
  Antisense strand to SEQ ID NO: 2106276
ucaagccaacuauaaugcc

SEQ ID NO: 2106278 - RNA, 19 nt, Artificial Sequence
  Description of Artificial Sequence: Synthetic oligonucleotide
  Sense strand starting at position 83 of SEQ ID NO: 1882249
cauuauaguuggcuugaag

SEQ ID NO: 2106279 - RNA, 19 nt, Artificial Sequence
  Description of Artificial Sequence: Synthetic oligonucleotide
  Antisense strand to SEQ ID NO: 2106278
cuucaagccaacuauaaug

SEQ ID NO: 2106280 - RNA, 19 nt, Artificial Sequence
  Description of Artificial Sequence: Synthetic oligonucleotide
  Sense strand starting at position 119 of SEQ ID NO: 1882249
agaaguaaugcagguacuu

SEQ ID NO: 2106281 - RNA, 19 nt, Artificial Sequence
  Description of Artificial Sequence: Synthetic oligonucleotide
  Antisense strand to SEQ ID NO: 2106280
aaguaccugcauuacuucu

SEQ ID NO: 2106282 - RNA, 19 nt, Artificial Sequence
  Description of Artificial Sequence: Synthetic oligonucleotide
  Sense strand starting at position 177 of SEQ ID NO: 1882249
caaggaacuguaugagcau

SEQ ID NO: 2106283 - RNA, 19 nt, Artificial Sequence
  Description of Artificial Sequence: Synthetic oligonucleotide
  Antisense strand to SEQ ID NO: 2106282
augcucauacaguuccuug

SEQ ID NO: 2106284 - RNA, 19 nt, Artificial Sequence
  Description of Artificial Sequence: Synthetic oligonucleotide
  Sense strand starting at position 183 of SEQ ID NO: 1882249
acuguaugagcauggaaac

SEQ ID NO: 2106285 - RNA, 19 nt, Artificial Sequence
  Description of Artificial Sequence: Synthetic oligonucleotide
  Antisense strand to SEQ ID NO: 2106284
guuuccaugcucauacagu

SEQ ID NO: 2106286 - RNA, 19 nt, Artificial Sequence
  Description of Artificial Sequence: Synthetic oligonucleotide
  Sense strand starting at position 184 of SEQ ID NO: 1882249
cuguaugagcauggaaaca

SEQ ID NO: 2106287 - RNA, 19 nt, Artificial Sequence
  Description of Artificial Sequence: Synthetic oligonucleotide
  Antisense strand to SEQ ID NO: 2106286
uguuuccaugcucauacag

SEQ ID NO: 2106288 - RNA, 19 nt, Artificial Sequence
  Description of Artificial Sequence: Synthetic oligonucleotide
  Sense strand starting at position 274 of SEQ ID NO: 1882249
ccuuucucacuccagagua

SEQ ID NO: 2106289 - RNA, 19 nt, Artificial Sequence
  Description of Artificial Sequence: Synthetic oligonucleotide
  Antisense strand to SEQ ID NO: 2106288
uacucuggagugagaaagg

SEQ ID NO: 2106290 - RNA, 19 nt, Artificial Sequence
  Description of Artificial Sequence: Synthetic oligonucleotide
  Sense strand starting at position 394 of SEQ ID NO: 1882249
gaucgaucagccugggcaa

SEQ ID NO: 2106291 - RNA, 19 nt, Artificial Sequence
  Description of Artificial Sequence: Synthetic oligonucleotide
  Antisense strand to SEQ ID NO: 2106290
uugcccaggcugaucgauc

SEQ ID NO: 2106292 - RNA, 19 nt, Artificial Sequence
  Description of Artificial Sequence: Synthetic oligonucleotide
  Sense strand starting at position 546 of SEQ ID NO: 1882249
ccaagaucgcacuaguaca

SEQ ID NO: 2106293 - RNA, 19 nt, Artificial Sequence
  Description of Artificial Sequence: Synthetic oligonucleotide
  Antisense strand to SEQ ID NO: 2106292
uguacuagugcgaucuugg

SEQ ID NO: 2106294 - RNA, 19 nt, Artificial Sequence
  Description of Artificial Sequence: Synthetic oligonucleotide
  Sense strand starting at position 934 of SEQ ID NO: 1882249
gaaccaguaugugugaaca

SEQ ID NO: 2106295 - RNA, 19 nt, Artificial Sequence
  Description of Artificial Sequence: Synthetic oligonucleotide
  Antisense strand to SEQ ID NO: 2106294
uguucacacauacugguuc

SEQ ID NO: 2106296 - RNA, 19 nt, Artificial Sequence
  Description of Artificial Sequence: Synthetic oligonucleotide
  Sense strand starting at position 961 of SEQ ID NO: 1882249
ggccaauauguguaagucu

SEQ ID NO: 2106297 - RNA, 19 nt, Artificial Sequence
  Description of Artificial Sequence: Synthetic oligonucleotide
  Antisense strand to SEQ ID NO: 2106296
agacuuacacauauuggcc

SEQ ID NO: 2106298 - RNA, 19 nt, Artificial Sequence
  Description of Artificial Sequence: Synthetic oligonucleotide
  Sense strand starting at position 1003 of SEQ ID NO: 1882249
uuaauacacgcuggucaaa

SEQ ID NO: 2106299 - RNA, 19 nt, Artificial Sequence
  Description of Artificial Sequence: Synthetic oligonucleotide
  Antisense strand to SEQ ID NO: 2106298
uuugaccagcguguauuaa

SEQ ID NO: 2106300 - RNA, 19 nt, Artificial Sequence
  Description of Artificial Sequence: Synthetic oligonucleotide
  Sense strand starting at position 1190 of SEQ ID NO: 1882249
uaccuacucuguguuggua

SEQ ID NO: 2106301 - RNA, 19 nt, Artificial Sequence
  Description of Artificial Sequence: Synthetic oligonucleotide
  Antisense strand to SEQ ID NO: 2106300
uaccaacacagaguaggua

SEQ ID NO: 2106302 - RNA, 19 nt, Artificial Sequence
  Description of Artificial Sequence: Synthetic oligonucleotide
  Sense strand starting at position 1237 of SEQ ID NO: 1882249
uucuguuaacuuugguaua

SEQ ID NO: 2106303 - RNA, 19 nt, Artificial Sequence
  Description of Artificial Sequence: Synthetic oligonucleotide
  Antisense strand to SEQ ID NO: 2106302
uauaccaaaguuaacagaa

SEQ ID NO: 2106304 - RNA, 19 nt, Artificial Sequence
  Description of Artificial Sequence: Synthetic oligonucleotide
  Sense strand starting at position 1239 of SEQ ID NO: 1882249
cuguuaacuuugguauaac

SEQ ID NO: 2106305 - RNA, 19 nt, Artificial Sequence
  Description of Artificial Sequence: Synthetic oligonucleotide
  Antisense strand to SEQ ID NO: 2106304
guuauaccaaaguuaacag

SEQ ID NO: 2106306 - RNA, 19 nt, Artificial Sequence
  Description of Artificial Sequence: Synthetic oligonucleotide
  Sense strand starting at position 1279 of SEQ ID NO: 1882249
guauuacggcaguaagcau

SEQ ID NO: 2106307 - RNA, 19 nt, Artificial Sequence
  Description of Artificial Sequence: Synthetic oligonucleotide
  Antisense strand to SEQ ID NO: 2106306
augcuuacugccguaauac

SEQ ID NO: 2106308 - RNA, 19 nt, Artificial Sequence
  Description of Artificial Sequence: Synthetic oligonucleotide
  Sense strand starting at position 1286 of SEQ ID NO: 1882249
ggcaguaagcaucaagaag

SEQ ID NO: 2106309 - RNA, 19 nt, Artificial Sequence
  Description of Artificial Sequence: Synthetic oligonucleotide
  Antisense strand to SEQ ID NO: 2106308
cuucuugaugcuuacugcc

SEQ ID NO: 2106310 - RNA, 19 nt, Artificial Sequence
  Description of Artificial Sequence: Synthetic oligonucleotide
  Sense strand starting at position 1453 of SEQ ID NO: 1882249
agcauuauuggugacuuaa

SEQ ID NO: 2106311 - RNA, 19 nt, Artificial Sequence
  Description of Artificial Sequence: Synthetic oligonucleotide
  Antisense strand to SEQ ID NO: 2106310
uuaagucaccaauaaugcu

SEQ ID NO: 2106312 - RNA, 19 nt, Artificial Sequence
  Description of Artificial Sequence: Synthetic oligonucleotide
  Sense strand starting at position 1512 of SEQ ID NO: 1882249
ucauaacugucaccugagu

SEQ ID NO: 2106313 - RNA, 19 nt, Artificial Sequence
  Description of Artificial Sequence: Synthetic oligonucleotide
  Antisense strand to SEQ ID NO: 2106312
acucaggugacaguuauga

SEQ ID NO: 2106314 - RNA, 19 nt, Artificial Sequence
  Description of Artificial Sequence: Synthetic oligonucleotide
  Sense strand starting at position 1974 of SEQ ID NO: 1882249
gcaaaugcuggaggaagua

SEQ ID NO: 2106315 - RNA, 19 nt, Artificial Sequence
  Description of Artificial Sequence: Synthetic oligonucleotide
  Antisense strand to SEQ ID NO: 2106314
uacuuccuccagcauuugc

SEQ ID NO: 2106316 - RNA, 19 nt, Artificial Sequence
  Description of Artificial Sequence: Synthetic oligonucleotide
  Sense strand starting at position 2123 of SEQ ID NO: 1882249
cggaguaguaucuggaguu

SEQ ID NO: 2106317 - RNA, 19 nt, Artificial Sequence
  Description of Artificial Sequence: Synthetic oligonucleotide
  Antisense strand to SEQ ID NO: 2106316
aacuccagauacuacuccg

SEQ ID NO: 2106318 - RNA, 19 nt, Artificial Sequence
  Description of Artificial Sequence: Synthetic oligonucleotide
  Sense strand starting at position 2133 of SEQ ID NO: 1882249
ucuggaguuucuguaacau

SEQ ID NO: 2106319 - RNA, 19 nt, Artificial Sequence
  Description of Artificial Sequence: Synthetic oligonucleotide
  Antisense strand to SEQ ID NO: 2106318
auguuacagaaacuccaga

SEQ ID NO: 2106320 - RNA, 19 nt, Artificial Sequence
  Description of Artificial Sequence: Synthetic oligonucleotide
  Sense strand starting at position 2915 of SEQ ID NO: 1882249
aagcgugagccaucgcaaa

SEQ ID NO: 2106321 - RNA, 19 nt, Artificial Sequence
  Description of Artificial Sequence: Synthetic oligonucleotide
  Antisense strand to SEQ ID NO: 2106320
uuugcgauggcucacgcuu

SEQ ID NO: 2106322 - RNA, 19 nt, Artificial Sequence
  Description of Artificial Sequence: Synthetic oligonucleotide
  Sense strand starting at position 2917 of SEQ ID NO: 1882249
gcgugagccaucgcaaaua

SEQ ID NO: 2106323 - RNA, 19 nt, Artificial Sequence
  Description of Artificial Sequence: Synthetic oligonucleotide
  Antisense strand to SEQ ID NO: 2106322
uauuugcgauggcucacgc

SEQ ID NO: 2106324 - RNA, 19 nt, Artificial Sequence
  Description of Artificial Sequence: Synthetic oligonucleotide
  Sense strand starting at position 2959 of SEQ ID NO: 1882249
cugucuacuuacucuauga

SEQ ID NO: 2106325 - RNA, 19 nt, Artificial Sequence
  Description of Artificial Sequence: Synthetic oligonucleotide
  Antisense strand to SEQ ID NO: 2106324
ucauagaguaaguagacag

SEQ ID NO: 2106326 - RNA, 19 nt, Artificial Sequence
  Description of Artificial Sequence: Synthetic oligonucleotide
  Sense strand starting at position 3086 of SEQ ID NO: 1882249
uaauguuguuaguugagca

SEQ ID NO: 2106327 - RNA, 19 nt, Artificial Sequence
  Description of Artificial Sequence: Synthetic oligonucleotide
  Antisense strand to SEQ ID NO: 2106326
ugcucaacuaacaacauua

SEQ ID NO: 2106328 - RNA, 19 nt, Artificial Sequence
  Description of Artificial Sequence: Synthetic oligonucleotide
  Sense strand starting at position 3090 of SEQ ID NO: 1882249
guuguuaguugagcaaaca

SEQ ID NO: 2106329 - RNA, 19 nt, Artificial Sequence
  Description of Artificial Sequence: Synthetic oligonucleotide
  Antisense strand to SEQ ID NO: 2106328
uguuugcucaacuaacaac

SEQ ID NO: 2106330 - RNA, 19 nt, Artificial Sequence
  Description of Artificial Sequence: Synthetic oligonucleotide
  Sense strand starting at position 3132 of SEQ ID NO: 1882249
uuauaaaucuugguggcuu

SEQ ID NO: 2106331 - RNA, 19 nt, Artificial Sequence
  Description of Artificial Sequence: Synthetic oligonucleotide
  Antisense strand to SEQ ID NO: 2106330
aagccaccaagauuuauaa

SEQ ID NO: 2106332 - RNA, 19 nt, Artificial Sequence
  Description of Artificial Sequence: Synthetic oligonucleotide
  Sense strand starting at position 3134 of SEQ ID NO: 1882249
auaaaucuugguggcuuau

SEQ ID NO: 2106333 - RNA, 19 nt, Artificial Sequence
  Description of Artificial Sequence: Synthetic oligonucleotide
  Antisense strand to SEQ ID NO: 2106332
auaagccaccaagauuuau

SEQ ID NO: 2106334 - RNA, 19 nt, Artificial Sequence
  Description of Artificial Sequence: Synthetic oligonucleotide
  Sense strand starting at position 3400 of SEQ ID NO: 1882249
auuguaacguuguuagaau

SEQ ID NO: 2106335 - RNA, 19 nt, Artificial Sequence
  Description of Artificial Sequence: Synthetic oligonucleotide
  Antisense strand to SEQ ID NO: 2106334
auucuaacaacguuacaau

SEQ ID NO: 2106336 - RNA, 19 nt, Artificial Sequence
  Description of Artificial Sequence: Synthetic oligonucleotide
  Sense strand starting at position 3407 of SEQ ID NO: 1882249
cguuguuagaauuauguga

SEQ ID NO: 2106337 - RNA, 19 nt, Artificial Sequence
  Description of Artificial Sequence: Synthetic oligonucleotide
  Antisense strand to SEQ ID NO: 2106336
ucacauaauucuaacaacg

SEQ ID NO: 2106338 - RNA, 19 nt, Artificial Sequence
  Description of Artificial Sequence: Synthetic oligonucleotide
  Sense strand starting at position 3533 of SEQ ID NO: 1882249
uugguuugguugcuauuua

SEQ ID NO: 2106339 - RNA, 19 nt, Artificial Sequence
  Description of Artificial Sequence: Synthetic oligonucleotide
  Antisense strand to SEQ ID NO: 2106338
uaaauagcaaccaaaccaa

SEQ ID NO: 2106340 - RNA, 19 nt, Artificial Sequence
  Description of Artificial Sequence: Synthetic oligonucleotide
  Sense strand starting at position 3661 of SEQ ID NO: 1882249
acuccaucgcuugaguuua

SEQ ID NO: 2106341 - RNA, 19 nt, Artificial Sequence
  Description of Artificial Sequence: Synthetic oligonucleotide
  Antisense strand to SEQ ID NO: 2106340
uaaacucaagcgauggagu

SEQ ID NO: 2106342 - RNA, 19 nt, Artificial Sequence
  Description of Artificial Sequence: Synthetic oligonucleotide
  Sense strand starting at position 3663 of SEQ ID NO: 1882249
uccaucgcuugaguuuaaa

SEQ ID NO: 2106343 - RNA, 19 nt, Artificial Sequence
  Description of Artificial Sequence: Synthetic oligonucleotide
  Antisense strand to SEQ ID NO: 2106342
uuuaaacucaagcgaugga

SEQ ID NO: 2106344 - RNA, 19 nt, Artificial Sequence
  Description of Artificial Sequence: Synthetic oligonucleotide
  Sense strand starting at position 3666 of SEQ ID NO: 1882249
aucgcuugaguuuaaauaa

SEQ ID NO: 2106345 - RNA, 19 nt, Artificial Sequence
  Description of Artificial Sequence: Synthetic oligonucleotide
  Antisense strand to SEQ ID NO: 2106344
uuauuuaaacucaagcgau

SEQ ID NO: 2106346 - RNA, 19 nt, Artificial Sequence
  Description of Artificial Sequence: Synthetic oligonucleotide
  Sense strand starting at position 3851 of SEQ ID NO: 1882249
gaauaugaguccuucugag

SEQ ID NO: 2106347 - RNA, 19 nt, Artificial Sequence
  Description of Artificial Sequence: Synthetic oligonucleotide
  Antisense strand to SEQ ID NO: 2106346
cucagaaggacucauauuc

SEQ ID NO: 2106348 - RNA, 19 nt, Artificial Sequence
  Description of Artificial Sequence: Synthetic oligonucleotide
  Sense strand starting at position 3944 of SEQ ID NO: 1882249
ccuggaacuuugguaguau

SEQ ID NO: 2106349 - RNA, 19 nt, Artificial Sequence
  Description of Artificial Sequence: Synthetic oligonucleotide
  Antisense strand to SEQ ID NO: 2106348
auacuaccaaaguuccagg

SEQ ID NO: 2106350 - RNA, 19 nt, Artificial Sequence
  Description of Artificial Sequence: Synthetic oligonucleotide
  Sense strand starting at position 134 of SEQ ID NO: 1882250
ugguaacacuguuuauaac

SEQ ID NO: 2106351 - RNA, 19 nt, Artificial Sequence
  Description of Artificial Sequence: Synthetic oligonucleotide
  Antisense strand to SEQ ID NO: 2106350
guuauaaacaguguuacca

SEQ ID NO: 2106352 - RNA, 19 nt, Artificial Sequence
  Description of Artificial Sequence: Synthetic oligonucleotide
  Sense strand starting at position 135 of SEQ ID NO: 1882250
gguaacacuguuuauaacu

SEQ ID NO: 2106353 - RNA, 19 nt, Artificial Sequence
  Description of Artificial Sequence: Synthetic oligonucleotide
  Antisense strand to SEQ ID NO: 2106352
aguuauaaacaguguuacc

SEQ ID NO: 2106354 - RNA, 19 nt, Artificial Sequence
  Description of Artificial Sequence: Synthetic oligonucleotide
  Sense strand starting at position 145 of SEQ ID NO: 1882250
uuuauaacuggauggugaa

SEQ ID NO: 2106355 - RNA, 19 nt, Artificial Sequence
  Description of Artificial Sequence: Synthetic oligonucleotide
  Antisense strand to SEQ ID NO: 2106354
uucaccauccaguuauaaa

SEQ ID NO: 2106356 - RNA, 19 nt, Artificial Sequence
  Description of Artificial Sequence: Synthetic oligonucleotide
  Sense strand starting at position 382 of SEQ ID NO: 1882250
ggauucaaagguggaaguu

SEQ ID NO: 2106357 - RNA, 19 nt, Artificial Sequence
  Description of Artificial Sequence: Synthetic oligonucleotide
  Antisense strand to SEQ ID NO: 2106356
aacuuccaccuuugaaucc

SEQ ID NO: 2106358 - RNA, 19 nt, Artificial Sequence
  Description of Artificial Sequence: Synthetic oligonucleotide
  Sense strand starting at position 427 of SEQ ID NO: 1882250
gcuagaaucuaguuaccaa

SEQ ID NO: 2106359 - RNA, 19 nt, Artificial Sequence
  Description of Artificial Sequence: Synthetic oligonucleotide
  Antisense strand to SEQ ID NO: 2106358
uugguaacuagauucuagc

SEQ ID NO: 2106360 - RNA, 19 nt, Artificial Sequence
  Description of Artificial Sequence: Synthetic oligonucleotide
  Sense strand starting at position 685 of SEQ ID NO: 1882250
ggucuccuucccuauccua

SEQ ID NO: 2106361 - RNA, 19 nt, Artificial Sequence
  Description of Artificial Sequence: Synthetic oligonucleotide
  Antisense strand to SEQ ID NO: 2106360
uaggauagggaaggagacc

SEQ ID NO: 2106362 - RNA, 19 nt, Artificial Sequence
  Description of Artificial Sequence: Synthetic oligonucleotide
  Sense strand starting at position 806 of SEQ ID NO: 1882250
ucucucacuugggcauaaa

SEQ ID NO: 2106363 - RNA, 19 nt, Artificial Sequence
  Description of Artificial Sequence: Synthetic oligonucleotide
  Antisense strand to SEQ ID NO: 2106362
uuuaugcccaagugagaga

SEQ ID NO: 2106364 - RNA, 19 nt, Artificial Sequence
  Description of Artificial Sequence: Synthetic oligonucleotide
  Sense strand starting at position 1013 of SEQ ID NO: 1882250
ugcagaugcguccuaguua

SEQ ID NO: 2106365 - RNA, 19 nt, Artificial Sequence
  Description of Artificial Sequence: Synthetic oligonucleotide
  Antisense strand to SEQ ID NO: 2106364
uaacuaggacgcaucugca

SEQ ID NO: 2106366 - RNA, 19 nt, Artificial Sequence
  Description of Artificial Sequence: Synthetic oligonucleotide
  Sense strand starting at position 1043 of SEQ ID NO: 1882250
acucaauacuagucugaug

SEQ ID NO: 2106367 - RNA, 19 nt, Artificial Sequence
  Description of Artificial Sequence: Synthetic oligonucleotide
  Antisense strand to SEQ ID NO: 2106366
caucagacuaguauugagu

SEQ ID NO: 2106368 - RNA, 19 nt, Artificial Sequence
  Description of Artificial Sequence: Synthetic oligonucleotide
  Sense strand starting at position 1045 of SEQ ID NO: 1882250
ucaauacuagucugaugaa

SEQ ID NO: 2106369 - RNA, 19 nt, Artificial Sequence
  Description of Artificial Sequence: Synthetic oligonucleotide
  Antisense strand to SEQ ID NO: 2106368
uucaucagacuaguauuga

SEQ ID NO: 2106370 - RNA, 19 nt, Artificial Sequence
  Description of Artificial Sequence: Synthetic oligonucleotide
  Sense strand starting at position 1103 of SEQ ID NO: 1882250
auauauuguguuuacccau

SEQ ID NO: 2106371 - RNA, 19 nt, Artificial Sequence
  Description of Artificial Sequence: Synthetic oligonucleotide
  Antisense strand to SEQ ID NO: 2106370
auggguaaacacaauauau

SEQ ID NO: 2106372 - RNA, 19 nt, Artificial Sequence
  Description of Artificial Sequence: Synthetic oligonucleotide
  Sense strand starting at position 1109 of SEQ ID NO: 1882250
uguguuuacccauacagua

SEQ ID NO: 2106373 - RNA, 19 nt, Artificial Sequence
  Description of Artificial Sequence: Synthetic oligonucleotide
  Antisense strand to SEQ ID NO: 2106372
uacuguauggguaaacaca

SEQ ID NO: 2106374 - RNA, 19 nt, Artificial Sequence
  Description of Artificial Sequence: Synthetic oligonucleotide
  Sense strand starting at position 1125 of SEQ ID NO: 1882250
guacuuuaagaguaccugu

SEQ ID NO: 2106375 - RNA, 19 nt, Artificial Sequence
  Description of Artificial Sequence: Synthetic oligonucleotide
  Antisense strand to SEQ ID NO: 2106374
acagguacucuuaaaguac

SEQ ID NO: 2106376 - RNA, 19 nt, Artificial Sequence
  Description of Artificial Sequence: Synthetic oligonucleotide
  Sense strand starting at position 1132 of SEQ ID NO: 1882250
aagaguaccuguuugaugu

SEQ ID NO: 2106377 - RNA, 19 nt, Artificial Sequence
  Description of Artificial Sequence: Synthetic oligonucleotide
  Antisense strand to SEQ ID NO: 2106376
acaucaaacagguacucuu

SEQ ID NO: 2106378 - RNA, 19 nt, Artificial Sequence
  Description of Artificial Sequence: Synthetic oligonucleotide
  Sense strand starting at position 1139 of SEQ ID NO: 1882250
ccuguuugauguuugacaa

SEQ ID NO: 2106379 - RNA, 19 nt, Artificial Sequence
  Description of Artificial Sequence: Synthetic oligonucleotide
  Antisense strand to SEQ ID NO: 2106378
uugucaaacaucaaacagg

SEQ ID NO: 2106380 - RNA, 19 nt, Artificial Sequence
  Description of Artificial Sequence: Synthetic oligonucleotide
  Sense strand starting at position 1140 of SEQ ID NO: 1882250
cuguuugauguuugacaac

SEQ ID NO: 2106381 - RNA, 19 nt, Artificial Sequence
  Description of Artificial Sequence: Synthetic oligonucleotide
  Antisense strand to SEQ ID NO: 2106380
guugucaaacaucaaacag

SEQ ID NO: 2106382 - RNA, 19 nt, Artificial Sequence
  Description of Artificial Sequence: Synthetic oligonucleotide
  Sense strand starting at position 1292 of SEQ ID NO: 1882250
uuaaaugacccgcaauuau

SEQ ID NO: 2106383 - RNA, 19 nt, Artificial Sequence
  Description of Artificial Sequence: Synthetic oligonucleotide
  Antisense strand to SEQ ID NO: 2106382
auaauugcgggucauuuaa

SEQ ID NO: 2106384 - RNA, 19 nt, Artificial Sequence
  Description of Artificial Sequence: Synthetic oligonucleotide
  Sense strand starting at position 2188 of SEQ ID NO: 1882250
aggagcaguuuccuccaau

SEQ ID NO: 2106385 - RNA, 19 nt, Artificial Sequence
  Description of Artificial Sequence: Synthetic oligonucleotide
  Antisense strand to SEQ ID NO: 2106384
auuggaggaaacugcuccu

SEQ ID NO: 2106386 - RNA, 19 nt, Artificial Sequence
  Description of Artificial Sequence: Synthetic oligonucleotide
  Sense strand starting at position 2232 of SEQ ID NO: 1882250
uagaaauuggcacaauugu

SEQ ID NO: 2106387 - RNA, 19 nt, Artificial Sequence
  Description of Artificial Sequence: Synthetic oligonucleotide
  Antisense strand to SEQ ID NO: 2106386
acaauugugccaauuucua

SEQ ID NO: 2106388 - RNA, 19 nt, Artificial Sequence
  Description of Artificial Sequence: Synthetic oligonucleotide
  Sense strand starting at position 2238 of SEQ ID NO: 1882250
uuggcacaauuguucuuaa

SEQ ID NO: 2106389 - RNA, 19 nt, Artificial Sequence
  Description of Artificial Sequence: Synthetic oligonucleotide
  Antisense strand to SEQ ID NO: 2106388
uuaagaacaauugugccaa

SEQ ID NO: 2106390 - RNA, 19 nt, Artificial Sequence
  Description of Artificial Sequence: Synthetic oligonucleotide
  Sense strand starting at position 2239 of SEQ ID NO: 1882250
uggcacaauuguucuuaaa

SEQ ID NO: 2106391 - RNA, 19 nt, Artificial Sequence
  Description of Artificial Sequence: Synthetic oligonucleotide
  Antisense strand to SEQ ID NO: 2106390
uuuaagaacaauugugcca

SEQ ID NO: 2106392 - RNA, 19 nt, Artificial Sequence
  Description of Artificial Sequence: Synthetic oligonucleotide
  Sense strand starting at position 2270 of SEQ ID NO: 1882250
uuucuaguacuguauuagu

SEQ ID NO: 2106393 - RNA, 19 nt, Artificial Sequence
  Description of Artificial Sequence: Synthetic oligonucleotide
  Antisense strand to SEQ ID NO: 2106392
acuaauacaguacuagaaa

SEQ ID NO: 2106394 - RNA, 19 nt, Artificial Sequence
  Description of Artificial Sequence: Synthetic oligonucleotide
  Sense strand starting at position 2280 of SEQ ID NO: 1882250
uguauuagugccuuuguuu

SEQ ID NO: 2106395 - RNA, 19 nt, Artificial Sequence
  Description of Artificial Sequence: Synthetic oligonucleotide
  Antisense strand to SEQ ID NO: 2106394
aaacaaaggcacuaauaca

SEQ ID NO: 2106396 - RNA, 19 nt, Artificial Sequence
  Description of Artificial Sequence: Synthetic oligonucleotide
  Sense strand starting at position 2281 of SEQ ID NO: 1882250
guauuagugccuuuguuuc

SEQ ID NO: 2106397 - RNA, 19 nt, Artificial Sequence
  Description of Artificial Sequence: Synthetic oligonucleotide
  Antisense strand to SEQ ID NO: 2106396
gaaacaaaggcacuaauac

SEQ ID NO: 2106398 - RNA, 19 nt, Artificial Sequence
  Description of Artificial Sequence: Synthetic oligonucleotide
  Sense strand starting at position 2488 of SEQ ID NO: 1882250
guuguaucccuguacuuaa

SEQ ID NO: 2106399 - RNA, 19 nt, Artificial Sequence
  Description of Artificial Sequence: Synthetic oligonucleotide
  Antisense strand to SEQ ID NO: 2106398
uuaaguacagggauacaac

SEQ ID NO: 2106400 - RNA, 19 nt, Artificial Sequence
  Description of Artificial Sequence: Synthetic oligonucleotide
  Sense strand starting at position 2591 of SEQ ID NO: 1882250
ugcuaaagugucuauguga

SEQ ID NO: 2106401 - RNA, 19 nt, Artificial Sequence
  Description of Artificial Sequence: Synthetic oligonucleotide
  Antisense strand to SEQ ID NO: 2106400
ucacauagacacuuuagca

SEQ ID NO: 2106402 - RNA, 19 nt, Artificial Sequence
  Description of Artificial Sequence: Synthetic oligonucleotide
  Sense strand starting at position 2594 of SEQ ID NO: 1882250
uaaagugucuaugugauga

SEQ ID NO: 2106403 - RNA, 19 nt, Artificial Sequence
  Description of Artificial Sequence: Synthetic oligonucleotide
  Antisense strand to SEQ ID NO: 2106402
ucaucacauagacacuuua

SEQ ID NO: 2106404 - RNA, 19 nt, Artificial Sequence
  Description of Artificial Sequence: Synthetic oligonucleotide
  Sense strand starting at position 2640 of SEQ ID NO: 1882250
uugacuuuguaaguuacaa

SEQ ID NO: 2106405 - RNA, 19 nt, Artificial Sequence
  Description of Artificial Sequence: Synthetic oligonucleotide
  Antisense strand to SEQ ID NO: 2106404
uuguaacuuacaaagucaa

SEQ ID NO: 2106406 - RNA, 19 nt, Artificial Sequence
  Description of Artificial Sequence: Synthetic oligonucleotide
  Sense strand starting at position 2666 of SEQ ID NO: 1882250
ggauaccuacauuguggaa

SEQ ID NO: 2106407 - RNA, 19 nt, Artificial Sequence
  Description of Artificial Sequence: Synthetic oligonucleotide
  Antisense strand to SEQ ID NO: 2106406
uuccacaauguagguaucc

SEQ ID NO: 2106408 - RNA, 19 nt, Artificial Sequence
  Description of Artificial Sequence: Synthetic oligonucleotide
  Sense strand starting at position 2686 of SEQ ID NO: 1882250
aaaugaacucaguggcgaa

SEQ ID NO: 2106409 - RNA, 19 nt, Artificial Sequence
  Description of Artificial Sequence: Synthetic oligonucleotide
  Antisense strand to SEQ ID NO: 2106408
uucgccacugaguucauuu

SEQ ID NO: 2106410 - RNA, 19 nt, Artificial Sequence
  Description of Artificial Sequence: Synthetic oligonucleotide
  Sense strand starting at position 2714 of SEQ ID NO: 1882250
ucauaagcucugcacagaa

SEQ ID NO: 2106411 - RNA, 19 nt, Artificial Sequence
  Description of Artificial Sequence: Synthetic oligonucleotide
  Antisense strand to SEQ ID NO: 2106410
uucugugcagagcuuauga

SEQ ID NO: 2106412 - RNA, 19 nt, Artificial Sequence
  Description of Artificial Sequence: Synthetic oligonucleotide
  Sense strand starting at position 2888 of SEQ ID NO: 1882250
gcuucucuuccucaaagag

SEQ ID NO: 2106413 - RNA, 19 nt, Artificial Sequence
  Description of Artificial Sequence: Synthetic oligonucleotide
  Antisense strand to SEQ ID NO: 2106412
cucuuugaggaagagaagc

SEQ ID NO: 2106414 - RNA, 19 nt, Artificial Sequence
  Description of Artificial Sequence: Synthetic oligonucleotide
  Sense strand starting at position 2905 of SEQ ID NO: 1882250
agacaaagcuguuccugaa

SEQ ID NO: 2106415 - RNA, 19 nt, Artificial Sequence
  Description of Artificial Sequence: Synthetic oligonucleotide
  Antisense strand to SEQ ID NO: 2106414
uucaggaacagcuuugucu

SEQ ID NO: 2106416 - RNA, 19 nt, Artificial Sequence
  Description of Artificial Sequence: Synthetic oligonucleotide
  Sense strand starting at position 2909 of SEQ ID NO: 1882250
aaagcuguuccugaaauga

SEQ ID NO: 2106417 - RNA, 19 nt, Artificial Sequence
  Description of Artificial Sequence: Synthetic oligonucleotide
  Antisense strand to SEQ ID NO: 2106416
ucauuucaggaacagcuuu

SEQ ID NO: 2106418 - RNA, 19 nt, Artificial Sequence
  Description of Artificial Sequence: Synthetic oligonucleotide
  Sense strand starting at position 3035 of SEQ ID NO: 1882250
cugccagugccguccuaaa

SEQ ID NO: 2106419 - RNA, 19 nt, Artificial Sequence
  Description of Artificial Sequence: Synthetic oligonucleotide
  Antisense strand to SEQ ID NO: 2106418
uuuaggacggcacuggcag

SEQ ID NO: 2106420 - RNA, 19 nt, Artificial Sequence
  Description of Artificial Sequence: Synthetic oligonucleotide
  Sense strand starting at position 3155 of SEQ ID NO: 1882250
caaggugguagaggucaaa

SEQ ID NO: 2106421 - RNA, 19 nt, Artificial Sequence
  Description of Artificial Sequence: Synthetic oligonucleotide
  Antisense strand to SEQ ID NO: 2106420
uuugaccucuaccaccuug

SEQ ID NO: 2106422 - RNA, 19 nt, Artificial Sequence
  Description of Artificial Sequence: Synthetic oligonucleotide
  Sense strand starting at position 3158 of SEQ ID NO: 1882250
ggugguagaggucaaaguu

SEQ ID NO: 2106423 - RNA, 19 nt, Artificial Sequence
  Description of Artificial Sequence: Synthetic oligonucleotide
  Antisense strand to SEQ ID NO: 2106422
aacuuugaccucuaccacc

SEQ ID NO: 2106424 - RNA, 19 nt, Artificial Sequence
  Description of Artificial Sequence: Synthetic oligonucleotide
  Sense strand starting at position 3504 of SEQ ID NO: 1882250
agaaauaccagacguuaug

SEQ ID NO: 2106425 - RNA, 19 nt, Artificial Sequence
  Description of Artificial Sequence: Synthetic oligonucleotide
  Antisense strand to SEQ ID NO: 2106424
cauaacgucugguauuucu

SEQ ID NO: 2106426 - RNA, 19 nt, Artificial Sequence
  Description of Artificial Sequence: Synthetic oligonucleotide
  Sense strand starting at position 3514 of SEQ ID NO: 1882250
gacguuauggaccagucua

SEQ ID NO: 2106427 - RNA, 19 nt, Artificial Sequence
  Description of Artificial Sequence: Synthetic oligonucleotide
  Antisense strand to SEQ ID NO: 2106426
uagacugguccauaacguc

SEQ ID NO: 2106428 - RNA, 19 nt, Artificial Sequence
  Description of Artificial Sequence: Synthetic oligonucleotide
  Sense strand starting at position 3833 of SEQ ID NO: 1882250
acagguaaugcugauguga

SEQ ID NO: 2106429 - RNA, 19 nt, Artificial Sequence
  Description of Artificial Sequence: Synthetic oligonucleotide
  Antisense strand to SEQ ID NO: 2106428
ucacaucagcauuaccugu

SEQ ID NO: 2106430 - RNA, 19 nt, Artificial Sequence
  Description of Artificial Sequence: Synthetic oligonucleotide
  Sense strand starting at position 2080 of SEQ ID NO: 1882251
agaggagcccugcaguaau

SEQ ID NO: 2106431 - RNA, 19 nt, Artificial Sequence
  Description of Artificial Sequence: Synthetic oligonucleotide
  Antisense strand to SEQ ID NO: 2106430
auuacugcagggcuccucu

SEQ ID NO: 2106432 - RNA, 19 nt, Artificial Sequence
  Description of Artificial Sequence: Synthetic oligonucleotide
  Sense strand starting at position 2083 of SEQ ID NO: 1882251
ggagcccugcaguaaugua

SEQ ID NO: 2106433 - RNA, 19 nt, Artificial Sequence
  Description of Artificial Sequence: Synthetic oligonucleotide
  Antisense strand to SEQ ID NO: 2106432
uacauuacugcagggcucc

SEQ ID NO: 2106434 - RNA, 19 nt, Artificial Sequence
  Description of Artificial Sequence: Synthetic oligonucleotide
  Sense strand starting at position 2098 of SEQ ID NO: 1882251
uguaaugagccaugaacug

SEQ ID NO: 2106435 - RNA, 19 nt, Artificial Sequence
  Description of Artificial Sequence: Synthetic oligonucleotide
  Antisense strand to SEQ ID NO: 2106434
caguucauggcucauuaca

SEQ ID NO: 2106436 - RNA, 19 nt, Artificial Sequence
  Description of Artificial Sequence: Synthetic oligonucleotide
  Sense strand starting at position 2113 of SEQ ID NO: 1882251
acugaagaguaacauuuau

SEQ ID NO: 2106437 - RNA, 19 nt, Artificial Sequence
  Description of Artificial Sequence: Synthetic oligonucleotide
  Antisense strand to SEQ ID NO: 2106436
auaaauguuacucuucagu

SEQ ID NO: 2106438 - RNA, 19 nt, Artificial Sequence
  Description of Artificial Sequence: Synthetic oligonucleotide
  Sense strand starting at position 2133 of SEQ ID NO: 1882251
caacucugccugugaagga

SEQ ID NO: 2106439 - RNA, 19 nt, Artificial Sequence
  Description of Artificial Sequence: Synthetic oligonucleotide
  Antisense strand to SEQ ID NO: 2106438
uccuucacaggcagaguug

SEQ ID NO: 2106440 - RNA, 19 nt, Artificial Sequence
  Description of Artificial Sequence: Synthetic oligonucleotide
  Sense strand starting at position 2215 of SEQ ID NO: 1882251
ccgguagguucugaaauua

SEQ ID NO: 2106441 - RNA, 19 nt, Artificial Sequence
  Description of Artificial Sequence: Synthetic oligonucleotide
  Antisense strand to SEQ ID NO: 2106440
uaauuucagaaccuaccgg

SEQ ID NO: 2106442 - RNA, 19 nt, Artificial Sequence
  Description of Artificial Sequence: Synthetic oligonucleotide
  Sense strand starting at position 2381 of SEQ ID NO: 1882251
aaacucgauuugugucuaa

SEQ ID NO: 2106443 - RNA, 19 nt, Artificial Sequence
  Description of Artificial Sequence: Synthetic oligonucleotide
  Antisense strand to SEQ ID NO: 2106442
uuagacacaaaucgaguuu

SEQ ID NO: 2106444 - RNA, 19 nt, Artificial Sequence
  Description of Artificial Sequence: Synthetic oligonucleotide
  Sense strand starting at position 2384 of SEQ ID NO: 1882251
cucgauuugugucuaaaua

SEQ ID NO: 2106445 - RNA, 19 nt, Artificial Sequence
  Description of Artificial Sequence: Synthetic oligonucleotide
  Antisense strand to SEQ ID NO: 2106444
uauuuagacacaaaucgag

SEQ ID NO: 2106446 - RNA, 19 nt, Artificial Sequence
  Description of Artificial Sequence: Synthetic oligonucleotide
  Sense strand starting at position 2414 of SEQ ID NO: 1882251
aacugucaggagugggauu

SEQ ID NO: 2106447 - RNA, 19 nt, Artificial Sequence
  Description of Artificial Sequence: Synthetic oligonucleotide
  Antisense strand to SEQ ID NO: 2106446
aaucccacuccugacaguu

SEQ ID NO: 2106448 - RNA, 19 nt, Artificial Sequence
  Description of Artificial Sequence: Synthetic oligonucleotide
  Sense strand starting at position 2508 of SEQ ID NO: 1882251
gcuacauugugcucaggac

SEQ ID NO: 2106449 - RNA, 19 nt, Artificial Sequence
  Description of Artificial Sequence: Synthetic oligonucleotide
  Antisense strand to SEQ ID NO: 2106448
guccugagcacaauguagc

SEQ ID NO: 2106450 - RNA, 19 nt, Artificial Sequence
  Description of Artificial Sequence: Synthetic oligonucleotide
  Sense strand starting at position 2509 of SEQ ID NO: 1882251
cuacauugugcucaggacu

SEQ ID NO: 2106451 - RNA, 19 nt, Artificial Sequence
  Description of Artificial Sequence: Synthetic oligonucleotide
  Antisense strand to SEQ ID NO: 2106450
aguccugagcacaauguag

SEQ ID NO: 2106452 - RNA, 19 nt, Artificial Sequence
  Description of Artificial Sequence: Synthetic oligonucleotide
  Sense strand starting at position 2531 of SEQ ID NO: 1882251
uucugucucuugucuaaac

SEQ ID NO: 2106453 - RNA, 19 nt, Artificial Sequence
  Description of Artificial Sequence: Synthetic oligonucleotide
  Antisense strand to SEQ ID NO: 2106452
guuuagacaagagacagaa

SEQ ID NO: 2106454 - RNA, 19 nt, Artificial Sequence
  Description of Artificial Sequence: Synthetic oligonucleotide
  Sense strand starting at position 2540 of SEQ ID NO: 1882251
uugucuaaacgcuauuagu

SEQ ID NO: 2106455 - RNA, 19 nt, Artificial Sequence
  Description of Artificial Sequence: Synthetic oligonucleotide
  Antisense strand to SEQ ID NO: 2106454
acuaauagcguuuagacaa

SEQ ID NO: 2106456 - RNA, 19 nt, Artificial Sequence
  Description of Artificial Sequence: Synthetic oligonucleotide
  Sense strand starting at position 2627 of SEQ ID NO: 1882251
ucaagauaugggcauuccu

SEQ ID NO: 2106457 - RNA, 19 nt, Artificial Sequence
  Description of Artificial Sequence: Synthetic oligonucleotide
  Antisense strand to SEQ ID NO: 2106456
aggaaugcccauaucuuga

SEQ ID NO: 2106458 - RNA, 19 nt, Artificial Sequence
  Description of Artificial Sequence: Synthetic oligonucleotide
  Sense strand starting at position 2634 of SEQ ID NO: 1882251
augggcauuccuggguuaa

SEQ ID NO: 2106459 - RNA, 19 nt, Artificial Sequence
  Description of Artificial Sequence: Synthetic oligonucleotide
  Antisense strand to SEQ ID NO: 2106458
uuaacccaggaaugcccau

SEQ ID NO: 2106460 - RNA, 19 nt, Artificial Sequence
  Description of Artificial Sequence: Synthetic oligonucleotide
  Sense strand starting at position 2635 of SEQ ID NO: 1882251
ugggcauuccuggguuaaa

SEQ ID NO: 2106461 - RNA, 19 nt, Artificial Sequence
  Description of Artificial Sequence: Synthetic oligonucleotide
  Antisense strand to SEQ ID NO: 2106460
uuuaacccaggaaugccca

SEQ ID NO: 2106462 - RNA, 19 nt, Artificial Sequence
  Description of Artificial Sequence: Synthetic oligonucleotide
  Sense strand starting at position 2721 of SEQ ID NO: 1882251
gcggcgucucccgagugaa

SEQ ID NO: 2106463 - RNA, 19 nt, Artificial Sequence
  Description of Artificial Sequence: Synthetic oligonucleotide
  Antisense strand to SEQ ID NO: 2106462
uucacucgggagacgccgc

SEQ ID NO: 2106464 - RNA, 19 nt, Artificial Sequence
  Description of Artificial Sequence: Synthetic oligonucleotide
  Sense strand starting at position 2722 of SEQ ID NO: 1882251
cggcgucucccgagugaac

SEQ ID NO: 2106465 - RNA, 19 nt, Artificial Sequence
  Description of Artificial Sequence: Synthetic oligonucleotide
  Antisense strand to SEQ ID NO: 2106464
guucacucgggagacgccg

SEQ ID NO: 2106466 - RNA, 19 nt, Artificial Sequence
  Description of Artificial Sequence: Synthetic oligonucleotide
  Sense strand starting at position 2997 of SEQ ID NO: 1882251
acuagaauaccuggcuuaa

SEQ ID NO: 2106467 - RNA, 19 nt, Artificial Sequence
  Description of Artificial Sequence: Synthetic oligonucleotide
  Antisense strand to SEQ ID NO: 2106466
uuaagccagguauucuagu

SEQ ID NO: 2106468 - RNA, 19 nt, Artificial Sequence
  Description of Artificial Sequence: Synthetic oligonucleotide
  Sense strand starting at position 3020 of SEQ ID NO: 1882251
acacuuaauucccaggaag

SEQ ID NO: 2106469 - RNA, 19 nt, Artificial Sequence
  Description of Artificial Sequence: Synthetic oligonucleotide
  Antisense strand to SEQ ID NO: 2106468
cuuccugggaauuaagugu

SEQ ID NO: 2106470 - RNA, 19 nt, Artificial Sequence
  Description of Artificial Sequence: Synthetic oligonucleotide
  Sense strand starting at position 3022 of SEQ ID NO: 1882251
acuuaauucccaggaaguu

SEQ ID NO: 2106471 - RNA, 19 nt, Artificial Sequence
  Description of Artificial Sequence: Synthetic oligonucleotide
  Antisense strand to SEQ ID NO: 2106470
aacuuccugggaauuaagu

SEQ ID NO: 2106472 - RNA, 19 nt, Artificial Sequence
  Description of Artificial Sequence: Synthetic oligonucleotide
  Sense strand starting at position 3023 of SEQ ID NO: 1882251
cuuaauucccaggaaguuu

SEQ ID NO: 2106473 - RNA, 19 nt, Artificial Sequence
  Description of Artificial Sequence: Synthetic oligonucleotide
  Antisense strand to SEQ ID NO: 2106472
aaacuuccugggaauuaag

SEQ ID NO: 2106474 - RNA, 19 nt, Artificial Sequence
  Description of Artificial Sequence: Synthetic oligonucleotide
  Sense strand starting at position 3064 of SEQ ID NO: 1882251
ggaacaaggugcucgcuaa

SEQ ID NO: 2106475 - RNA, 19 nt, Artificial Sequence
  Description of Artificial Sequence: Synthetic oligonucleotide
  Antisense strand to SEQ ID NO: 2106474
uuagcgagcaccuuguucc

SEQ ID NO: 2106476 - RNA, 19 nt, Artificial Sequence
  Description of Artificial Sequence: Synthetic oligonucleotide
  Sense strand starting at position 3065 of SEQ ID NO: 1882251
gaacaaggugcucgcuaau

SEQ ID NO: 2106477 - RNA, 19 nt, Artificial Sequence
  Description of Artificial Sequence: Synthetic oligonucleotide
  Antisense strand to SEQ ID NO: 2106476
auuagcgagcaccuuguuc

SEQ ID NO: 2106478 - RNA, 19 nt, Artificial Sequence
  Description of Artificial Sequence: Synthetic oligonucleotide
  Sense strand starting at position 3093 of SEQ ID NO: 1882251
uugcguugugcugcaaauc

SEQ ID NO: 2106479 - RNA, 19 nt, Artificial Sequence
  Description of Artificial Sequence: Synthetic oligonucleotide
  Antisense strand to SEQ ID NO: 2106478
gauuugcagcacaacgcaa

SEQ ID NO: 2106480 - RNA, 19 nt, Artificial Sequence
  Description of Artificial Sequence: Synthetic oligonucleotide
  Sense strand starting at position 3094 of SEQ ID NO: 1882251
ugcguugugcugcaaaucu

SEQ ID NO: 2106481 - RNA, 19 nt, Artificial Sequence
  Description of Artificial Sequence: Synthetic oligonucleotide
  Antisense strand to SEQ ID NO: 2106480
agauuugcagcacaacgca

SEQ ID NO: 2106482 - RNA, 19 nt, Artificial Sequence
  Description of Artificial Sequence: Synthetic oligonucleotide
  Sense strand starting at position 3191 of SEQ ID NO: 1882251
cggaguuuauggaggauuu

SEQ ID NO: 2106483 - RNA, 19 nt, Artificial Sequence
  Description of Artificial Sequence: Synthetic oligonucleotide
  Antisense strand to SEQ ID NO: 2106482
aaauccuccauaaacuccg

SEQ ID NO: 2106484 - RNA, 19 nt, Artificial Sequence
  Description of Artificial Sequence: Synthetic oligonucleotide
  Sense strand starting at position 3287 of SEQ ID NO: 1882251
gggaguagcuuauguauuu

SEQ ID NO: 2106485 - RNA, 19 nt, Artificial Sequence
  Description of Artificial Sequence: Synthetic oligonucleotide
  Antisense strand to SEQ ID NO: 2106484
aaauacauaagcuacuccc

SEQ ID NO: 2106486 - RNA, 19 nt, Artificial Sequence
  Description of Artificial Sequence: Synthetic oligonucleotide
  Sense strand starting at position 3424 of SEQ ID NO: 1882251
ggaugccauggucggaaua

SEQ ID NO: 2106487 - RNA, 19 nt, Artificial Sequence
  Description of Artificial Sequence: Synthetic oligonucleotide
  Antisense strand to SEQ ID NO: 2106486
uauuccgaccauggcaucc

SEQ ID NO: 2106488 - RNA, 19 nt, Artificial Sequence
  Description of Artificial Sequence: Synthetic oligonucleotide
  Sense strand starting at position 3425 of SEQ ID NO: 1882251
gaugccauggucggaauau

SEQ ID NO: 2106489 - RNA, 19 nt, Artificial Sequence
  Description of Artificial Sequence: Synthetic oligonucleotide
  Antisense strand to SEQ ID NO: 2106488
auauuccgaccauggcauc

SEQ ID NO: 2106490 - RNA, 19 nt, Artificial Sequence
  Description of Artificial Sequence: Synthetic oligonucleotide
  Sense strand starting at position 3426 of SEQ ID NO: 1882251
augccauggucggaauauc

SEQ ID NO: 2106491 - RNA, 19 nt, Artificial Sequence
  Description of Artificial Sequence: Synthetic oligonucleotide
  Antisense strand to SEQ ID NO: 2106490
gauauuccgaccauggcau

SEQ ID NO: 2106492 - RNA, 19 nt, Artificial Sequence
  Description of Artificial Sequence: Synthetic oligonucleotide
  Sense strand starting at position 3495 of SEQ ID NO: 1882251
cuggucacuaccuggagaa

SEQ ID NO: 2106493 - RNA, 19 nt, Artificial Sequence
  Description of Artificial Sequence: Synthetic oligonucleotide
  Antisense strand to SEQ ID NO: 2106492
uucuccagguagugaccag

SEQ ID NO: 2106494 - RNA, 19 nt, Artificial Sequence
  Description of Artificial Sequence: Synthetic oligonucleotide
  Sense strand starting at position 3496 of SEQ ID NO: 1882251
uggucacuaccuggagaau

SEQ ID NO: 2106495 - RNA, 19 nt, Artificial Sequence
  Description of Artificial Sequence: Synthetic oligonucleotide
  Antisense strand to SEQ ID NO: 2106494
auucuccagguagugacca

SEQ ID NO: 2106496 - RNA, 19 nt, Artificial Sequence
  Description of Artificial Sequence: Synthetic oligonucleotide
  Sense strand starting at position 3505 of SEQ ID NO: 1882251
ccuggagaaucuuagauaa

SEQ ID NO: 2106497 - RNA, 19 nt, Artificial Sequence
  Description of Artificial Sequence: Synthetic oligonucleotide
  Antisense strand to SEQ ID NO: 2106496
uuaucuaagauucuccagg

SEQ ID NO: 2106498 - RNA, 19 nt, Artificial Sequence
  Description of Artificial Sequence: Synthetic oligonucleotide
  Sense strand starting at position 3507 of SEQ ID NO: 1882251
uggagaaucuuagauaagu

SEQ ID NO: 2106499 - RNA, 19 nt, Artificial Sequence
  Description of Artificial Sequence: Synthetic oligonucleotide
  Antisense strand to SEQ ID NO: 2106498
acuuaucuaagauucucca

SEQ ID NO: 2106500 - RNA, 19 nt, Artificial Sequence
  Description of Artificial Sequence: Synthetic oligonucleotide
  Sense strand starting at position 3529 of SEQ ID NO: 1882251
uuugcuucuguggacauua

SEQ ID NO: 2106501 - RNA, 19 nt, Artificial Sequence
  Description of Artificial Sequence: Synthetic oligonucleotide
  Antisense strand to SEQ ID NO: 2106500
uaauguccacagaagcaaa

SEQ ID NO: 2106502 - RNA, 19 nt, Artificial Sequence
  Description of Artificial Sequence: Synthetic oligonucleotide
  Sense strand starting at position 3531 of SEQ ID NO: 1882251
ugcuucuguggacauuaga

SEQ ID NO: 2106503 - RNA, 19 nt, Artificial Sequence
  Description of Artificial Sequence: Synthetic oligonucleotide
  Antisense strand to SEQ ID NO: 2106502
ucuaauguccacagaagca

SEQ ID NO: 2106504 - RNA, 19 nt, Artificial Sequence
  Description of Artificial Sequence: Synthetic oligonucleotide
  Sense strand starting at position 3662 of SEQ ID NO: 1882251
ggcaaauucuguucuucuc

SEQ ID NO: 2106505 - RNA, 19 nt, Artificial Sequence
  Description of Artificial Sequence: Synthetic oligonucleotide
  Antisense strand to SEQ ID NO: 2106504
gagaagaacagaauuugcc

SEQ ID NO: 2106506 - RNA, 19 nt, Artificial Sequence
  Description of Artificial Sequence: Synthetic oligonucleotide
  Sense strand starting at position 3737 of SEQ ID NO: 1882251
aacguuauugaauacuuga

SEQ ID NO: 2106507 - RNA, 19 nt, Artificial Sequence
  Description of Artificial Sequence: Synthetic oligonucleotide
  Antisense strand to SEQ ID NO: 2106506
ucaaguauucaauaacguu

SEQ ID NO: 2106508 - RNA, 19 nt, Artificial Sequence
  Description of Artificial Sequence: Synthetic oligonucleotide
  Sense strand starting at position 3957 of SEQ ID NO: 1882251
aggauagagucccacagua

SEQ ID NO: 2106509 - RNA, 19 nt, Artificial Sequence
  Description of Artificial Sequence: Synthetic oligonucleotide
  Antisense strand to SEQ ID NO: 2106508
uacugugggacucuauccu

SEQ ID NO: 2106510 - RNA, 19 nt, Artificial Sequence
  Description of Artificial Sequence: Synthetic oligonucleotide
  Sense strand starting at position 101 of SEQ ID NO: 1882252
cuggauaaacauugaugua

SEQ ID NO: 2106511 - RNA, 19 nt, Artificial Sequence
  Description of Artificial Sequence: Synthetic oligonucleotide
  Antisense strand to SEQ ID NO: 2106510
uacaucaauguuuauccag

SEQ ID NO: 2106512 - RNA, 19 nt, Artificial Sequence
  Description of Artificial Sequence: Synthetic oligonucleotide
  Sense strand starting at position 456 of SEQ ID NO: 1882252
ggaaauaaucguggauguu

SEQ ID NO: 2106513 - RNA, 19 nt, Artificial Sequence
  Description of Artificial Sequence: Synthetic oligonucleotide
  Antisense strand to SEQ ID NO: 2106512
aacauccacgauuauuucc

SEQ ID NO: 2106514 - RNA, 19 nt, Artificial Sequence
  Description of Artificial Sequence: Synthetic oligonucleotide
  Sense strand starting at position 457 of SEQ ID NO: 1882252
gaaauaaucguggauguuu

SEQ ID NO: 2106515 - RNA, 19 nt, Artificial Sequence
  Description of Artificial Sequence: Synthetic oligonucleotide
  Antisense strand to SEQ ID NO: 2106514
aaacauccacgauuauuuc

SEQ ID NO: 2106516 - RNA, 19 nt, Artificial Sequence
  Description of Artificial Sequence: Synthetic oligonucleotide
  Sense strand starting at position 459 of SEQ ID NO: 1882252
aauaaucguggauguuuga

SEQ ID NO: 2106517 - RNA, 19 nt, Artificial Sequence
  Description of Artificial Sequence: Synthetic oligonucleotide
  Antisense strand to SEQ ID NO: 2106516
ucaaacauccacgauuauu

SEQ ID NO: 2106518 - RNA, 19 nt, Artificial Sequence
  Description of Artificial Sequence: Synthetic oligonucleotide
  Sense strand starting at position 553 of SEQ ID NO: 1882252
auaccacuuugauauggaa

SEQ ID NO: 2106519 - RNA, 19 nt, Artificial Sequence
  Description of Artificial Sequence: Synthetic oligonucleotide
  Antisense strand to SEQ ID NO: 2106518
uuccauaucaaagugguau

SEQ ID NO: 2106520 - RNA, 19 nt, Artificial Sequence
  Description of Artificial Sequence: Synthetic oligonucleotide
  Sense strand starting at position 568 of SEQ ID NO: 1882252
ggaauaugugcaggaauua

SEQ ID NO: 2106521 - RNA, 19 nt, Artificial Sequence
  Description of Artificial Sequence: Synthetic oligonucleotide
  Antisense strand to SEQ ID NO: 2106520
uaauuccugcacauauucc

SEQ ID NO: 2106522 - RNA, 19 nt, Artificial Sequence
  Description of Artificial Sequence: Synthetic oligonucleotide
  Sense strand starting at position 723 of SEQ ID NO: 1882252
uguuaauaguuaccucuga

SEQ ID NO: 2106523 - RNA, 19 nt, Artificial Sequence
  Description of Artificial Sequence: Synthetic oligonucleotide
  Antisense strand to SEQ ID NO: 2106522
ucagagguaacuauuaaca

SEQ ID NO: 2106524 - RNA, 19 nt, Artificial Sequence
  Description of Artificial Sequence: Synthetic oligonucleotide
  Sense strand starting at position 775 of SEQ ID NO: 1882252
auguuuguauguucuacaa

SEQ ID NO: 2106525 - RNA, 19 nt, Artificial Sequence
  Description of Artificial Sequence: Synthetic oligonucleotide
  Antisense strand to SEQ ID NO: 2106524
uuguagaacauacaaacau

SEQ ID NO: 2106526 - RNA, 19 nt, Artificial Sequence
  Description of Artificial Sequence: Synthetic oligonucleotide
  Sense strand starting at position 785 of SEQ ID NO: 1882252
guucuacaauuugugugua

SEQ ID NO: 2106527 - RNA, 19 nt, Artificial Sequence
  Description of Artificial Sequence: Synthetic oligonucleotide
  Antisense strand to SEQ ID NO: 2106526
uacacacaaauuguagaac

SEQ ID NO: 2106528 - RNA, 19 nt, Artificial Sequence
  Description of Artificial Sequence: Synthetic oligonucleotide
  Sense strand starting at position 787 of SEQ ID NO: 1882252
ucuacaauuuguguguacu

SEQ ID NO: 2106529 - RNA, 19 nt, Artificial Sequence
  Description of Artificial Sequence: Synthetic oligonucleotide
  Antisense strand to SEQ ID NO: 2106528
aguacacacaaauuguaga

SEQ ID NO: 2106530 - RNA, 19 nt, Artificial Sequence
  Description of Artificial Sequence: Synthetic oligonucleotide
  Sense strand starting at position 788 of SEQ ID NO: 1882252
cuacaauuuguguguacuu

SEQ ID NO: 2106531 - RNA, 19 nt, Artificial Sequence
  Description of Artificial Sequence: Synthetic oligonucleotide
  Antisense strand to SEQ ID NO: 2106530
aaguacacacaaauuguag

SEQ ID NO: 2106532 - RNA, 19 nt, Artificial Sequence
  Description of Artificial Sequence: Synthetic oligonucleotide
  Sense strand starting at position 793 of SEQ ID NO: 1882252
auuuguguguacuuugcaa

SEQ ID NO: 2106533 - RNA, 19 nt, Artificial Sequence
  Description of Artificial Sequence: Synthetic oligonucleotide
  Antisense strand to SEQ ID NO: 2106532
uugcaaaguacacacaaau

SEQ ID NO: 2106534 - RNA, 19 nt, Artificial Sequence
  Description of Artificial Sequence: Synthetic oligonucleotide
  Sense strand starting at position 840 of SEQ ID NO: 1882252
agauuacaguugccauguu

SEQ ID NO: 2106535 - RNA, 19 nt, Artificial Sequence
  Description of Artificial Sequence: Synthetic oligonucleotide
  Antisense strand to SEQ ID NO: 2106534
aacauggcaacuguaaucu

SEQ ID NO: 2106536 - RNA, 19 nt, Artificial Sequence
  Description of Artificial Sequence: Synthetic oligonucleotide
  Sense strand starting at position 908 of SEQ ID NO: 1882252
aucucauguauuggaggga

SEQ ID NO: 2106537 - RNA, 19 nt, Artificial Sequence
  Description of Artificial Sequence: Synthetic oligonucleotide
  Antisense strand to SEQ ID NO: 2106536
ucccuccaauacaugagau

SEQ ID NO: 2106538 - RNA, 19 nt, Artificial Sequence
  Description of Artificial Sequence: Synthetic oligonucleotide
  Sense strand starting at position 912 of SEQ ID NO: 1882252
cauguauuggagggagacu

SEQ ID NO: 2106539 - RNA, 19 nt, Artificial Sequence
  Description of Artificial Sequence: Synthetic oligonucleotide
  Antisense strand to SEQ ID NO: 2106538
agucucccuccaauacaug

SEQ ID NO: 2106540 - RNA, 19 nt, Artificial Sequence
  Description of Artificial Sequence: Synthetic oligonucleotide
  Sense strand starting at position 997 of SEQ ID NO: 1882252
caaggaagucuguggaaau

SEQ ID NO: 2106541 - RNA, 19 nt, Artificial Sequence
  Description of Artificial Sequence: Synthetic oligonucleotide
  Antisense strand to SEQ ID NO: 2106540
auuuccacagacuuccuug

SEQ ID NO: 2106542 - RNA, 19 nt, Artificial Sequence
  Description of Artificial Sequence: Synthetic oligonucleotide
  Sense strand starting at position 1037 of SEQ ID NO: 1882252
ucaguuauuucuccaugca

SEQ ID NO: 2106543 - RNA, 19 nt, Artificial Sequence
  Description of Artificial Sequence: Synthetic oligonucleotide
  Antisense strand to SEQ ID NO: 2106542
ugcauggagaaauaacuga

SEQ ID NO: 2106544 - RNA, 19 nt, Artificial Sequence
  Description of Artificial Sequence: Synthetic oligonucleotide
  Sense strand starting at position 1198 of SEQ ID NO: 1882252
aguuaagacgguugaguua

SEQ ID NO: 2106545 - RNA, 19 nt, Artificial Sequence
  Description of Artificial Sequence: Synthetic oligonucleotide
  Antisense strand to SEQ ID NO: 2106544
uaacucaaccgucuuaacu

SEQ ID NO: 2106546 - RNA, 19 nt, Artificial Sequence
  Description of Artificial Sequence: Synthetic oligonucleotide
  Sense strand starting at position 1501 of SEQ ID NO: 1882252
ucacuuggagcccauuaau

SEQ ID NO: 2106547 - RNA, 19 nt, Artificial Sequence
  Description of Artificial Sequence: Synthetic oligonucleotide
  Antisense strand to SEQ ID NO: 2106546
auuaaugggcuccaaguga

SEQ ID NO: 2106548 - RNA, 19 nt, Artificial Sequence
  Description of Artificial Sequence: Synthetic oligonucleotide
  Sense strand starting at position 1703 of SEQ ID NO: 1882252
uggcaaggcagugacaaau

SEQ ID NO: 2106549 - RNA, 19 nt, Artificial Sequence
  Description of Artificial Sequence: Synthetic oligonucleotide
  Antisense strand to SEQ ID NO: 2106548
auuugucacugccuugcca

SEQ ID NO: 2106550 - RNA, 19 nt, Artificial Sequence
  Description of Artificial Sequence: Synthetic oligonucleotide
  Sense strand starting at position 1990 of SEQ ID NO: 1882252
aguuauaaggcccguaaga

SEQ ID NO: 2106551 - RNA, 19 nt, Artificial Sequence
  Description of Artificial Sequence: Synthetic oligonucleotide
  Antisense strand to SEQ ID NO: 2106550
ucuuacgggccuuauaacu

SEQ ID NO: 2106552 - RNA, 19 nt, Artificial Sequence
  Description of Artificial Sequence: Synthetic oligonucleotide
  Sense strand starting at position 1992 of SEQ ID NO: 1882252
uuauaaggcccguaagaga

SEQ ID NO: 2106553 - RNA, 19 nt, Artificial Sequence
  Description of Artificial Sequence: Synthetic oligonucleotide
  Antisense strand to SEQ ID NO: 2106552
ucucuuacgggccuuauaa

SEQ ID NO: 2106554 - RNA, 19 nt, Artificial Sequence
  Description of Artificial Sequence: Synthetic oligonucleotide
  Sense strand starting at position 2001 of SEQ ID NO: 1882252
ccguaagagacuugaucca

SEQ ID NO: 2106555 - RNA, 19 nt, Artificial Sequence
  Description of Artificial Sequence: Synthetic oligonucleotide
  Antisense strand to SEQ ID NO: 2106554
uggaucaagucucuuacgg

SEQ ID NO: 2106556 - RNA, 19 nt, Artificial Sequence
  Description of Artificial Sequence: Synthetic oligonucleotide
  Sense strand starting at position 2080 of SEQ ID NO: 1882252
gcuuucugcccuucuguua

SEQ ID NO: 2106557 - RNA, 19 nt, Artificial Sequence
  Description of Artificial Sequence: Synthetic oligonucleotide
  Antisense strand to SEQ ID NO: 2106556
uaacagaagggcagaaagc

SEQ ID NO: 2106558 - RNA, 19 nt, Artificial Sequence
  Description of Artificial Sequence: Synthetic oligonucleotide
  Sense strand starting at position 2144 of SEQ ID NO: 1882252
cagaaucauugcuuguuga

SEQ ID NO: 2106559 - RNA, 19 nt, Artificial Sequence
  Description of Artificial Sequence: Synthetic oligonucleotide
  Antisense strand to SEQ ID NO: 2106558
ucaacaagcaaugauucug

SEQ ID NO: 2106560 - RNA, 19 nt, Artificial Sequence
  Description of Artificial Sequence: Synthetic oligonucleotide
  Sense strand starting at position 2145 of SEQ ID NO: 1882252
agaaucauugcuuguugau

SEQ ID NO: 2106561 - RNA, 19 nt, Artificial Sequence
  Description of Artificial Sequence: Synthetic oligonucleotide
  Antisense strand to SEQ ID NO: 2106560
aucaacaagcaaugauucu

SEQ ID NO: 2106562 - RNA, 19 nt, Artificial Sequence
  Description of Artificial Sequence: Synthetic oligonucleotide
  Sense strand starting at position 2151 of SEQ ID NO: 1882252
auugcuuguugaucucuau

SEQ ID NO: 2106563 - RNA, 19 nt, Artificial Sequence
  Description of Artificial Sequence: Synthetic oligonucleotide
  Antisense strand to SEQ ID NO: 2106562
auagagaucaacaagcaau

SEQ ID NO: 2106564 - RNA, 19 nt, Artificial Sequence
  Description of Artificial Sequence: Synthetic oligonucleotide
  Sense strand starting at position 2339 of SEQ ID NO: 1882252
gagauauccugaucucagc

SEQ ID NO: 2106565 - RNA, 19 nt, Artificial Sequence
  Description of Artificial Sequence: Synthetic oligonucleotide
  Antisense strand to SEQ ID NO: 2106564
gcugagaucaggauaucuc

SEQ ID NO: 2106566 - RNA, 19 nt, Artificial Sequence
  Description of Artificial Sequence: Synthetic oligonucleotide
  Sense strand starting at position 2727 of SEQ ID NO: 1882252
ucucaaagggcuuguccaa

SEQ ID NO: 2106567 - RNA, 19 nt, Artificial Sequence
  Description of Artificial Sequence: Synthetic oligonucleotide
  Antisense strand to SEQ ID NO: 2106566
uuggacaagcccuuugaga

SEQ ID NO: 2106568 - RNA, 19 nt, Artificial Sequence
  Description of Artificial Sequence: Synthetic oligonucleotide
  Sense strand starting at position 2761 of SEQ ID NO: 1882252
agcggaagcaucgcgauau

SEQ ID NO: 2106569 - RNA, 19 nt, Artificial Sequence
  Description of Artificial Sequence: Synthetic oligonucleotide
  Antisense strand to SEQ ID NO: 2106568
auaucgcgaugcuuccgcu

SEQ ID NO: 2106570 - RNA, 19 nt, Artificial Sequence
  Description of Artificial Sequence: Synthetic oligonucleotide
  Sense strand starting at position 2782 of SEQ ID NO: 1882252
uuacgaagccgcgagauuu

SEQ ID NO: 2106571 - RNA, 19 nt, Artificial Sequence
  Description of Artificial Sequence: Synthetic oligonucleotide
  Antisense strand to SEQ ID NO: 2106570
aaaucucgcggcuucguaa

SEQ ID NO: 2106572 - RNA, 19 nt, Artificial Sequence
  Description of Artificial Sequence: Synthetic oligonucleotide
  Sense strand starting at position 2828 of SEQ ID NO: 1882252
gagguuacuagcgauuggu

SEQ ID NO: 2106573 - RNA, 19 nt, Artificial Sequence
  Description of Artificial Sequence: Synthetic oligonucleotide
  Antisense strand to SEQ ID NO: 2106572
accaaucgcuaguaaccuc

SEQ ID NO: 2106574 - RNA, 19 nt, Artificial Sequence
  Description of Artificial Sequence: Synthetic oligonucleotide
  Sense strand starting at position 3004 of SEQ ID NO: 1882252
cuagauauuuccuggagca

SEQ ID NO: 2106575 - RNA, 19 nt, Artificial Sequence
  Description of Artificial Sequence: Synthetic oligonucleotide
  Antisense strand to SEQ ID NO: 2106574
ugcuccaggaaauaucuag

SEQ ID NO: 2106576 - RNA, 19 nt, Artificial Sequence
  Description of Artificial Sequence: Synthetic oligonucleotide
  Sense strand starting at position 3141 of SEQ ID NO: 1882252
uucguaaauuaugcacauu

SEQ ID NO: 2106577 - RNA, 19 nt, Artificial Sequence
  Description of Artificial Sequence: Synthetic oligonucleotide
  Antisense strand to SEQ ID NO: 2106576
aaugugcauaauuuacgaa

SEQ ID NO: 2106578 - RNA, 19 nt, Artificial Sequence
  Description of Artificial Sequence: Synthetic oligonucleotide
  Sense strand starting at position 3173 of SEQ ID NO: 1882252
gcaucugaucauuaccguu

SEQ ID NO: 2106579 - RNA, 19 nt, Artificial Sequence
  Description of Artificial Sequence: Synthetic oligonucleotide
  Antisense strand to SEQ ID NO: 2106578
aacgguaaugaucagaugc

SEQ ID NO: 2106580 - RNA, 19 nt, Artificial Sequence
  Description of Artificial Sequence: Synthetic oligonucleotide
  Sense strand starting at position 3259 of SEQ ID NO: 1882252
aaauguaaucaccgugaaa

SEQ ID NO: 2106581 - RNA, 19 nt, Artificial Sequence
  Description of Artificial Sequence: Synthetic oligonucleotide
  Antisense strand to SEQ ID NO: 2106580
uuucacggugauuacauuu

SEQ ID NO: 2106582 - RNA, 19 nt, Artificial Sequence
  Description of Artificial Sequence: Synthetic oligonucleotide
  Sense strand starting at position 3352 of SEQ ID NO: 1882252
acagaaauguagucaugcu

SEQ ID NO: 2106583 - RNA, 19 nt, Artificial Sequence
  Description of Artificial Sequence: Synthetic oligonucleotide
  Antisense strand to SEQ ID NO: 2106582
agcaugacuacauuucugu

SEQ ID NO: 2106584 - RNA, 19 nt, Artificial Sequence
  Description of Artificial Sequence: Synthetic oligonucleotide
  Sense strand starting at position 3360 of SEQ ID NO: 1882252
guagucaugcuaugacauu

SEQ ID NO: 2106585 - RNA, 19 nt, Artificial Sequence
  Description of Artificial Sequence: Synthetic oligonucleotide
  Antisense strand to SEQ ID NO: 2106584
aaugucauagcaugacuac

SEQ ID NO: 2106586 - RNA, 19 nt, Artificial Sequence
  Description of Artificial Sequence: Synthetic oligonucleotide
  Sense strand starting at position 3385 of SEQ ID NO: 1882252
uuaauauaucuuggguucu

SEQ ID NO: 2106587 - RNA, 19 nt, Artificial Sequence
  Description of Artificial Sequence: Synthetic oligonucleotide
  Antisense strand to SEQ ID NO: 2106586
agaacccaagauauauuaa

SEQ ID NO: 2106588 - RNA, 19 nt, Artificial Sequence
  Description of Artificial Sequence: Synthetic oligonucleotide
  Sense strand starting at position 3397 of SEQ ID NO: 1882252
ggguucuuuccauguggaa

SEQ ID NO: 2106589 - RNA, 19 nt, Artificial Sequence
  Description of Artificial Sequence: Synthetic oligonucleotide
  Antisense strand to SEQ ID NO: 2106588
uuccacauggaaagaaccc

SEQ ID NO: 2106590 - RNA, 19 nt, Artificial Sequence
  Description of Artificial Sequence: Synthetic oligonucleotide
  Sense strand starting at position 46 of SEQ ID NO: 1882253
ugcauauuccuguguugaa

SEQ ID NO: 2106591 - RNA, 19 nt, Artificial Sequence
  Description of Artificial Sequence: Synthetic oligonucleotide
  Antisense strand to SEQ ID NO: 2106590
uucaacacaggaauaugca

SEQ ID NO: 2106592 - RNA, 19 nt, Artificial Sequence
  Description of Artificial Sequence: Synthetic oligonucleotide
  Sense strand starting at position 154 of SEQ ID NO: 1882253
uuguuuagagaauauacgu

SEQ ID NO: 2106593 - RNA, 19 nt, Artificial Sequence
  Description of Artificial Sequence: Synthetic oligonucleotide
  Antisense strand to SEQ ID NO: 2106592
acguauauucucuaaacaa

SEQ ID NO: 2106594 - RNA, 19 nt, Artificial Sequence
  Description of Artificial Sequence: Synthetic oligonucleotide
  Sense strand starting at position 159 of SEQ ID NO: 1882253
uagagaauauacguacauu

SEQ ID NO: 2106595 - RNA, 19 nt, Artificial Sequence
  Description of Artificial Sequence: Synthetic oligonucleotide
  Antisense strand to SEQ ID NO: 2106594
aauguacguauauucucua

SEQ ID NO: 2106596 - RNA, 19 nt, Artificial Sequence
  Description of Artificial Sequence: Synthetic oligonucleotide
  Sense strand starting at position 238 of SEQ ID NO: 1882253
uuauuauugugguaaacag

SEQ ID NO: 2106597 - RNA, 19 nt, Artificial Sequence
  Description of Artificial Sequence: Synthetic oligonucleotide
  Antisense strand to SEQ ID NO: 2106596
cuguuuaccacaauaauaa

SEQ ID NO: 2106598 - RNA, 19 nt, Artificial Sequence
  Description of Artificial Sequence: Synthetic oligonucleotide
  Sense strand starting at position 269 of SEQ ID NO: 1882253
aagagauuauagcuuguuu

SEQ ID NO: 2106599 - RNA, 19 nt, Artificial Sequence
  Description of Artificial Sequence: Synthetic oligonucleotide
  Antisense strand to SEQ ID NO: 2106598
aaacaagcuauaaucucuu

SEQ ID NO: 2106600 - RNA, 19 nt, Artificial Sequence
  Description of Artificial Sequence: Synthetic oligonucleotide
  Sense strand starting at position 334 of SEQ ID NO: 1882253
uuauuauccuguccggagu

SEQ ID NO: 2106601 - RNA, 19 nt, Artificial Sequence
  Description of Artificial Sequence: Synthetic oligonucleotide
  Antisense strand to SEQ ID NO: 2106600
acuccggacaggauaauaa

SEQ ID NO: 2106602 - RNA, 19 nt, Artificial Sequence
  Description of Artificial Sequence: Synthetic oligonucleotide
  Sense strand starting at position 366 of SEQ ID NO: 1882253
ucuacuaucugucuucgua

SEQ ID NO: 2106603 - RNA, 19 nt, Artificial Sequence
  Description of Artificial Sequence: Synthetic oligonucleotide
  Antisense strand to SEQ ID NO: 2106602
uacgaagacagauaguaga

SEQ ID NO: 2106604 - RNA, 19 nt, Artificial Sequence
  Description of Artificial Sequence: Synthetic oligonucleotide
  Sense strand starting at position 375 of SEQ ID NO: 1882253
ugucuucguauacgucaaa

SEQ ID NO: 2106605 - RNA, 19 nt, Artificial Sequence
  Description of Artificial Sequence: Synthetic oligonucleotide
  Antisense strand to SEQ ID NO: 2106604
uuugacguauacgaagaca

SEQ ID NO: 2106606 - RNA, 19 nt, Artificial Sequence
  Description of Artificial Sequence: Synthetic oligonucleotide
  Sense strand starting at position 451 of SEQ ID NO: 1882253
gggaguauuuaaugacacu

SEQ ID NO: 2106607 - RNA, 19 nt, Artificial Sequence
  Description of Artificial Sequence: Synthetic oligonucleotide
  Antisense strand to SEQ ID NO: 2106606
agugucauuaaauacuccc

SEQ ID NO: 2106608 - RNA, 19 nt, Artificial Sequence
  Description of Artificial Sequence: Synthetic oligonucleotide
  Sense strand starting at position 454 of SEQ ID NO: 1882253
aguauuuaaugacacuuga

SEQ ID NO: 2106609 - RNA, 19 nt, Artificial Sequence
  Description of Artificial Sequence: Synthetic oligonucleotide
  Antisense strand to SEQ ID NO: 2106608
ucaagugucauuaaauacu

SEQ ID NO: 2106610 - RNA, 19 nt, Artificial Sequence
  Description of Artificial Sequence: Synthetic oligonucleotide
  Sense strand starting at position 857 of SEQ ID NO: 1882253
uuuaguacugucuaaugau

SEQ ID NO: 2106611 - RNA, 19 nt, Artificial Sequence
  Description of Artificial Sequence: Synthetic oligonucleotide
  Antisense strand to SEQ ID NO: 2106610
aucauuagacaguacuaaa

SEQ ID NO: 2106612 - RNA, 19 nt, Artificial Sequence
  Description of Artificial Sequence: Synthetic oligonucleotide
  Sense strand starting at position 891 of SEQ ID NO: 1882253
ggagaaagcugaguaugga

SEQ ID NO: 2106613 - RNA, 19 nt, Artificial Sequence
  Description of Artificial Sequence: Synthetic oligonucleotide
  Antisense strand to SEQ ID NO: 2106612
uccauacucagcuuucucc

SEQ ID NO: 2106614 - RNA, 19 nt, Artificial Sequence
  Description of Artificial Sequence: Synthetic oligonucleotide
  Sense strand starting at position 937 of SEQ ID NO: 1882253
ggcucucuacagcaaagau

SEQ ID NO: 2106615 - RNA, 19 nt, Artificial Sequence
  Description of Artificial Sequence: Synthetic oligonucleotide
  Antisense strand to SEQ ID NO: 2106614
aucuuugcuguagagagcc

SEQ ID NO: 2106616 - RNA, 19 nt, Artificial Sequence
  Description of Artificial Sequence: Synthetic oligonucleotide
  Sense strand starting at position 965 of SEQ ID NO: 1882253
ccuguuauaugucauacua

SEQ ID NO: 2106617 - RNA, 19 nt, Artificial Sequence
  Description of Artificial Sequence: Synthetic oligonucleotide
  Antisense strand to SEQ ID NO: 2106616
uaguaugacauauaacagg

SEQ ID NO: 2106618 - RNA, 19 nt, Artificial Sequence
  Description of Artificial Sequence: Synthetic oligonucleotide
  Sense strand starting at position 967 of SEQ ID NO: 1882253
uguuauaugucauacuacu

SEQ ID NO: 2106619 - RNA, 19 nt, Artificial Sequence
  Description of Artificial Sequence: Synthetic oligonucleotide
  Antisense strand to SEQ ID NO: 2106618
aguaguaugacauauaaca

SEQ ID NO: 2106620 - RNA, 19 nt, Artificial Sequence
  Description of Artificial Sequence: Synthetic oligonucleotide
  Sense strand starting at position 1113 of SEQ ID NO: 1882253
ucuuguuaauuuccuuagu

SEQ ID NO: 2106621 - RNA, 19 nt, Artificial Sequence
  Description of Artificial Sequence: Synthetic oligonucleotide
  Antisense strand to SEQ ID NO: 2106620
acuaaggaaauuaacaaga

SEQ ID NO: 2106622 - RNA, 19 nt, Artificial Sequence
  Description of Artificial Sequence: Synthetic oligonucleotide
  Sense strand starting at position 1115 of SEQ ID NO: 1882253
uuguuaauuuccuuagucu

SEQ ID NO: 2106623 - RNA, 19 nt, Artificial Sequence
  Description of Artificial Sequence: Synthetic oligonucleotide
  Antisense strand to SEQ ID NO: 2106622
agacuaaggaaauuaacaa

SEQ ID NO: 2106624 - RNA, 19 nt, Artificial Sequence
  Description of Artificial Sequence: Synthetic oligonucleotide
  Sense strand starting at position 1191 of SEQ ID NO: 1882253
ucuuaagcgccacaaauua

SEQ ID NO: 2106625 - RNA, 19 nt, Artificial Sequence
  Description of Artificial Sequence: Synthetic oligonucleotide
  Antisense strand to SEQ ID NO: 2106624
uaauuuguggcgcuuaaga

SEQ ID NO: 2106626 - RNA, 19 nt, Artificial Sequence
  Description of Artificial Sequence: Synthetic oligonucleotide
  Sense strand starting at position 1300 of SEQ ID NO: 1882253
ugagacaucuugugaauua

SEQ ID NO: 2106627 - RNA, 19 nt, Artificial Sequence
  Description of Artificial Sequence: Synthetic oligonucleotide
  Antisense strand to SEQ ID NO: 2106626
uaauucacaagaugucuca

SEQ ID NO: 2106628 - RNA, 19 nt, Artificial Sequence
  Description of Artificial Sequence: Synthetic oligonucleotide
  Sense strand starting at position 1301 of SEQ ID NO: 1882253
gagacaucuugugaauuag

SEQ ID NO: 2106629 - RNA, 19 nt, Artificial Sequence
  Description of Artificial Sequence: Synthetic oligonucleotide
  Antisense strand to SEQ ID NO: 2106628
cuaauucacaagaugucuc

SEQ ID NO: 2106630 - RNA, 19 nt, Artificial Sequence
  Description of Artificial Sequence: Synthetic oligonucleotide
  Sense strand starting at position 1441 of SEQ ID NO: 1882253
agacaacuguaauuagcau

SEQ ID NO: 2106631 - RNA, 19 nt, Artificial Sequence
  Description of Artificial Sequence: Synthetic oligonucleotide
  Antisense strand to SEQ ID NO: 2106630
augcuaauuacaguugucu

SEQ ID NO: 2106632 - RNA, 19 nt, Artificial Sequence
  Description of Artificial Sequence: Synthetic oligonucleotide
  Sense strand starting at position 1447 of SEQ ID NO: 1882253
cuguaauuagcauguguga

SEQ ID NO: 2106633 - RNA, 19 nt, Artificial Sequence
  Description of Artificial Sequence: Synthetic oligonucleotide
  Antisense strand to SEQ ID NO: 2106632
ucacacaugcuaauuacag

SEQ ID NO: 2106634 - RNA, 19 nt, Artificial Sequence
  Description of Artificial Sequence: Synthetic oligonucleotide
  Sense strand starting at position 1449 of SEQ ID NO: 1882253
guaauuagcaugugugauc

SEQ ID NO: 2106635 - RNA, 19 nt, Artificial Sequence
  Description of Artificial Sequence: Synthetic oligonucleotide
  Antisense strand to SEQ ID NO: 2106634
gaucacacaugcuaauuac

SEQ ID NO: 2106636 - RNA, 19 nt, Artificial Sequence
  Description of Artificial Sequence: Synthetic oligonucleotide
  Sense strand starting at position 1454 of SEQ ID NO: 1882253
uagcaugugugaucccaaa

SEQ ID NO: 2106637 - RNA, 19 nt, Artificial Sequence
  Description of Artificial Sequence: Synthetic oligonucleotide
  Antisense strand to SEQ ID NO: 2106636
uuugggaucacacaugcua

SEQ ID NO: 2106638 - RNA, 19 nt, Artificial Sequence
  Description of Artificial Sequence: Synthetic oligonucleotide
  Sense strand starting at position 1542 of SEQ ID NO: 1882253
uaaauaaugcaggguguuu

SEQ ID NO: 2106639 - RNA, 19 nt, Artificial Sequence
  Description of Artificial Sequence: Synthetic oligonucleotide
  Antisense strand to SEQ ID NO: 2106638
aaacacccugcauuauuua

SEQ ID NO: 2106640 - RNA, 19 nt, Artificial Sequence
  Description of Artificial Sequence: Synthetic oligonucleotide
  Sense strand starting at position 1547 of SEQ ID NO: 1882253
aaugcaggguguuuguaaa

SEQ ID NO: 2106641 - RNA, 19 nt, Artificial Sequence
  Description of Artificial Sequence: Synthetic oligonucleotide
  Antisense strand to SEQ ID NO: 2106640
uuuacaaacacccugcauu

SEQ ID NO: 2106642 - RNA, 19 nt, Artificial Sequence
  Description of Artificial Sequence: Synthetic oligonucleotide
  Sense strand starting at position 1594 of SEQ ID NO: 1882253
ggcccuuucucaccgagga

SEQ ID NO: 2106643 - RNA, 19 nt, Artificial Sequence
  Description of Artificial Sequence: Synthetic oligonucleotide
  Antisense strand to SEQ ID NO: 2106642
uccucggugagaaagggcc

SEQ ID NO: 2106644 - RNA, 19 nt, Artificial Sequence
  Description of Artificial Sequence: Synthetic oligonucleotide
  Sense strand starting at position 1596 of SEQ ID NO: 1882253
cccuuucucaccgaggaga

SEQ ID NO: 2106645 - RNA, 19 nt, Artificial Sequence
  Description of Artificial Sequence: Synthetic oligonucleotide
  Antisense strand to SEQ ID NO: 2106644
ucuccucggugagaaaggg

SEQ ID NO: 2106646 - RNA, 19 nt, Artificial Sequence
  Description of Artificial Sequence: Synthetic oligonucleotide
  Sense strand starting at position 1679 of SEQ ID NO: 1882253
ggcggagcaagcuaucuuu

SEQ ID NO: 2106647 - RNA, 19 nt, Artificial Sequence
  Description of Artificial Sequence: Synthetic oligonucleotide
  Antisense strand to SEQ ID NO: 2106646
aaagauagcuugcuccgcc

SEQ ID NO: 2106648 - RNA, 19 nt, Artificial Sequence
  Description of Artificial Sequence: Synthetic oligonucleotide
  Sense strand starting at position 2135 of SEQ ID NO: 1882253
gcgggauagguagauaauu

SEQ ID NO: 2106649 - RNA, 19 nt, Artificial Sequence
  Description of Artificial Sequence: Synthetic oligonucleotide
  Antisense strand to SEQ ID NO: 2106648
aauuaucuaccuaucccgc

SEQ ID NO: 2106650 - RNA, 19 nt, Artificial Sequence
  Description of Artificial Sequence: Synthetic oligonucleotide
  Sense strand starting at position 2143 of SEQ ID NO: 1882253
gguagauaauuucgguaaa

SEQ ID NO: 2106651 - RNA, 19 nt, Artificial Sequence
  Description of Artificial Sequence: Synthetic oligonucleotide
  Antisense strand to SEQ ID NO: 2106650
uuuaccgaaauuaucuacc

SEQ ID NO: 2106652 - RNA, 19 nt, Artificial Sequence
  Description of Artificial Sequence: Synthetic oligonucleotide
  Sense strand starting at position 2144 of SEQ ID NO: 1882253
guagauaauuucgguaaau

SEQ ID NO: 2106653 - RNA, 19 nt, Artificial Sequence
  Description of Artificial Sequence: Synthetic oligonucleotide
  Antisense strand to SEQ ID NO: 2106652
auuuaccgaaauuaucuac

SEQ ID NO: 2106654 - RNA, 19 nt, Artificial Sequence
  Description of Artificial Sequence: Synthetic oligonucleotide
  Sense strand starting at position 2155 of SEQ ID NO: 1882253
cgguaaauuucgccaagca

SEQ ID NO: 2106655 - RNA, 19 nt, Artificial Sequence
  Description of Artificial Sequence: Synthetic oligonucleotide
  Antisense strand to SEQ ID NO: 2106654
ugcuuggcgaaauuuaccg

SEQ ID NO: 2106656 - RNA, 19 nt, Artificial Sequence
  Description of Artificial Sequence: Synthetic oligonucleotide
  Sense strand starting at position 2183 of SEQ ID NO: 1882253
caaagaguauuugaagucu

SEQ ID NO: 2106657 - RNA, 19 nt, Artificial Sequence
  Description of Artificial Sequence: Synthetic oligonucleotide
  Antisense strand to SEQ ID NO: 2106656
agacuucaaauacucuuug

SEQ ID NO: 2106658 - RNA, 19 nt, Artificial Sequence
  Description of Artificial Sequence: Synthetic oligonucleotide
  Sense strand starting at position 2285 of SEQ ID NO: 1882253
gcagguccgccacguaauu

SEQ ID NO: 2106659 - RNA, 19 nt, Artificial Sequence
  Description of Artificial Sequence: Synthetic oligonucleotide
  Antisense strand to SEQ ID NO: 2106658
aauuacguggcggaccugc

SEQ ID NO: 2106660 - RNA, 19 nt, Artificial Sequence
  Description of Artificial Sequence: Synthetic oligonucleotide
  Sense strand starting at position 2542 of SEQ ID NO: 1882253
ccuguaucuccagaggauu

SEQ ID NO: 2106661 - RNA, 19 nt, Artificial Sequence
  Description of Artificial Sequence: Synthetic oligonucleotide
  Antisense strand to SEQ ID NO: 2106660
aauccucuggagauacagg

SEQ ID NO: 2106662 - RNA, 19 nt, Artificial Sequence
  Description of Artificial Sequence: Synthetic oligonucleotide
  Sense strand starting at position 2553 of SEQ ID NO: 1882253
agaggauuccucgggucac

SEQ ID NO: 2106663 - RNA, 19 nt, Artificial Sequence
  Description of Artificial Sequence: Synthetic oligonucleotide
  Antisense strand to SEQ ID NO: 2106662
gugacccgaggaauccucu

SEQ ID NO: 2106664 - RNA, 19 nt, Artificial Sequence
  Description of Artificial Sequence: Synthetic oligonucleotide
  Sense strand starting at position 3662 of SEQ ID NO: 1882253
ucuccuauugcugacagaa

SEQ ID NO: 2106665 - RNA, 19 nt, Artificial Sequence
  Description of Artificial Sequence: Synthetic oligonucleotide
  Antisense strand to SEQ ID NO: 2106664
uucugucagcaauaggaga

SEQ ID NO: 2106666 - RNA, 19 nt, Artificial Sequence
  Description of Artificial Sequence: Synthetic oligonucleotide
  Sense strand starting at position 3664 of SEQ ID NO: 1882253
uccuauugcugacagaaga

SEQ ID NO: 2106667 - RNA, 19 nt, Artificial Sequence
  Description of Artificial Sequence: Synthetic oligonucleotide
  Antisense strand to SEQ ID NO: 2106666
ucuucugucagcaauagga

SEQ ID NO: 2106668 - RNA, 19 nt, Artificial Sequence
  Description of Artificial Sequence: Synthetic oligonucleotide
  Sense strand starting at position 3753 of SEQ ID NO: 1882253
caggaacaauuguuguuaa

SEQ ID NO: 2106669 - RNA, 19 nt, Artificial Sequence
  Description of Artificial Sequence: Synthetic oligonucleotide
  Antisense strand to SEQ ID NO: 2106668
uuaacaacaauuguuccug

SEQ ID NO: 2106670 - RNA, 19 nt, Artificial Sequence
  Description of Artificial Sequence: Synthetic oligonucleotide
  Sense strand starting at position 91 of SEQ ID NO: 1882254
ucuuguuaauuuccuuagu

SEQ ID NO: 2106671 - RNA, 19 nt, Artificial Sequence
  Description of Artificial Sequence: Synthetic oligonucleotide
  Antisense strand to SEQ ID NO: 2106670
acuaaggaaauuaacaaga

SEQ ID NO: 2106672 - RNA, 19 nt, Artificial Sequence
  Description of Artificial Sequence: Synthetic oligonucleotide
  Sense strand starting at position 93 of SEQ ID NO: 1882254
uuguuaauuuccuuagucu

SEQ ID NO: 2106673 - RNA, 19 nt, Artificial Sequence
  Description of Artificial Sequence: Synthetic oligonucleotide
  Antisense strand to SEQ ID NO: 2106672
agacuaaggaaauuaacaa

SEQ ID NO: 2106674 - RNA, 19 nt, Artificial Sequence
  Description of Artificial Sequence: Synthetic oligonucleotide
  Sense strand starting at position 169 of SEQ ID NO: 1882254
ucuuaagcgccacaaauua

SEQ ID NO: 2106675 - RNA, 19 nt, Artificial Sequence
  Description of Artificial Sequence: Synthetic oligonucleotide
  Antisense strand to SEQ ID NO: 2106674
uaauuuguggcgcuuaaga

SEQ ID NO: 2106676 - RNA, 19 nt, Artificial Sequence
  Description of Artificial Sequence: Synthetic oligonucleotide
  Sense strand starting at position 419 of SEQ ID NO: 1882254
agacaacuguaauuagcau

SEQ ID NO: 2106677 - RNA, 19 nt, Artificial Sequence
  Description of Artificial Sequence: Synthetic oligonucleotide
  Antisense strand to SEQ ID NO: 2106676
augcuaauuacaguugucu

SEQ ID NO: 2106678 - RNA, 19 nt, Artificial Sequence
  Description of Artificial Sequence: Synthetic oligonucleotide
  Sense strand starting at position 425 of SEQ ID NO: 1882254
cuguaauuagcauguguga

SEQ ID NO: 2106679 - RNA, 19 nt, Artificial Sequence
  Description of Artificial Sequence: Synthetic oligonucleotide
  Antisense strand to SEQ ID NO: 2106678
ucacacaugcuaauuacag

SEQ ID NO: 2106680 - RNA, 19 nt, Artificial Sequence
  Description of Artificial Sequence: Synthetic oligonucleotide
  Sense strand starting at position 432 of SEQ ID NO: 1882254
uagcaugugugaucccaaa

SEQ ID NO: 2106681 - RNA, 19 nt, Artificial Sequence
  Description of Artificial Sequence: Synthetic oligonucleotide
  Antisense strand to SEQ ID NO: 2106680
uuugggaucacacaugcua

SEQ ID NO: 2106682 - RNA, 19 nt, Artificial Sequence
  Description of Artificial Sequence: Synthetic oligonucleotide
  Sense strand starting at position 520 of SEQ ID NO: 1882254
uaaauaaugcaggguguuu

SEQ ID NO: 2106683 - RNA, 19 nt, Artificial Sequence
  Description of Artificial Sequence: Synthetic oligonucleotide
  Antisense strand to SEQ ID NO: 2106682
aaacacccugcauuauuua

SEQ ID NO: 2106684 - RNA, 19 nt, Artificial Sequence
  Description of Artificial Sequence: Synthetic oligonucleotide
  Sense strand starting at position 525 of SEQ ID NO: 1882254
aaugcaggguguuuguaaa

SEQ ID NO: 2106685 - RNA, 19 nt, Artificial Sequence
  Description of Artificial Sequence: Synthetic oligonucleotide
  Antisense strand to SEQ ID NO: 2106684
uuuacaaacacccugcauu

SEQ ID NO: 2106686 - RNA, 19 nt, Artificial Sequence
  Description of Artificial Sequence: Synthetic oligonucleotide
  Sense strand starting at position 572 of SEQ ID NO: 1882254
ggcccuuucucaccgagga

SEQ ID NO: 2106687 - RNA, 19 nt, Artificial Sequence
  Description of Artificial Sequence: Synthetic oligonucleotide
  Antisense strand to SEQ ID NO: 2106686
uccucggugagaaagggcc

SEQ ID NO: 2106688 - RNA, 19 nt, Artificial Sequence
  Description of Artificial Sequence: Synthetic oligonucleotide
  Sense strand starting at position 574 of SEQ ID NO: 1882254
cccuuucucaccgaggaga

SEQ ID NO: 2106689 - RNA, 19 nt, Artificial Sequence
  Description of Artificial Sequence: Synthetic oligonucleotide
  Antisense strand to SEQ ID NO: 2106688
ucuccucggugagaaaggg

SEQ ID NO: 2106690 - RNA, 19 nt, Artificial Sequence
  Description of Artificial Sequence: Synthetic oligonucleotide
  Sense strand starting at position 657 of SEQ ID NO: 1882254
ggcggagcaagcuaucuuu

SEQ ID NO: 2106691 - RNA, 19 nt, Artificial Sequence
  Description of Artificial Sequence: Synthetic oligonucleotide
  Antisense strand to SEQ ID NO: 2106690
aaagauagcuugcuccgcc

SEQ ID NO: 2106692 - RNA, 19 nt, Artificial Sequence
  Description of Artificial Sequence: Synthetic oligonucleotide
  Sense strand starting at position 1113 of SEQ ID NO: 1882254
gcgggauagguagauaauu

SEQ ID NO: 2106693 - RNA, 19 nt, Artificial Sequence
  Description of Artificial Sequence: Synthetic oligonucleotide
  Antisense strand to SEQ ID NO: 2106692
aauuaucuaccuaucccgc

SEQ ID NO: 2106694 - RNA, 19 nt, Artificial Sequence
  Description of Artificial Sequence: Synthetic oligonucleotide
  Sense strand starting at position 1133 of SEQ ID NO: 1882254
cgguaaauuucgccaagca

SEQ ID NO: 2106695 - RNA, 19 nt, Artificial Sequence
  Description of Artificial Sequence: Synthetic oligonucleotide
  Antisense strand to SEQ ID NO: 2106694
ugcuuggcgaaauuuaccg

SEQ ID NO: 2106696 - RNA, 19 nt, Artificial Sequence
  Description of Artificial Sequence: Synthetic oligonucleotide
  Sense strand starting at position 1161 of SEQ ID NO: 1882254
caaagaguauuugaagucu

SEQ ID NO: 2106697 - RNA, 19 nt, Artificial Sequence
  Description of Artificial Sequence: Synthetic oligonucleotide
  Antisense strand to SEQ ID NO: 2106696
agacuucaaauacucuuug

SEQ ID NO: 2106698 - RNA, 19 nt, Artificial Sequence
  Description of Artificial Sequence: Synthetic oligonucleotide
  Sense strand starting at position 1520 of SEQ ID NO: 1882254
ccuguaucuccagaggauu

SEQ ID NO: 2106699 - RNA, 19 nt, Artificial Sequence
  Description of Artificial Sequence: Synthetic oligonucleotide
  Antisense strand to SEQ ID NO: 2106698
aauccucuggagauacagg

SEQ ID NO: 2106700 - RNA, 19 nt, Artificial Sequence
  Description of Artificial Sequence: Synthetic oligonucleotide
  Sense strand starting at position 1531 of SEQ ID NO: 1882254
agaggauuccucgggucac

SEQ ID NO: 2106701 - RNA, 19 nt, Artificial Sequence
  Description of Artificial Sequence: Synthetic oligonucleotide
  Antisense strand to SEQ ID NO: 2106700
gugacccgaggaauccucu

SEQ ID NO: 2106702 - RNA, 19 nt, Artificial Sequence
  Description of Artificial Sequence: Synthetic oligonucleotide
  Sense strand starting at position 2640 of SEQ ID NO: 1882254
ucuccuauugcugacagaa

SEQ ID NO: 2106703 - RNA, 19 nt, Artificial Sequence
  Description of Artificial Sequence: Synthetic oligonucleotide
  Antisense strand to SEQ ID NO: 2106702
uucugucagcaauaggaga

SEQ ID NO: 2106704 - RNA, 19 nt, Artificial Sequence
  Description of Artificial Sequence: Synthetic oligonucleotide
  Sense strand starting at position 2731 of SEQ ID NO: 1882254
caggaacaauuguuguuaa

SEQ ID NO: 2106705 - RNA, 19 nt, Artificial Sequence
  Description of Artificial Sequence: Synthetic oligonucleotide
  Antisense strand to SEQ ID NO: 2106704
uuaacaacaauuguuccug

SEQ ID NO: 2106706 - RNA, 19 nt, Artificial Sequence
  Description of Artificial Sequence: Synthetic oligonucleotide
  Sense strand starting at position 2983 of SEQ ID NO: 1882254
gggagaucucauugccucu

SEQ ID NO: 2106707 - RNA, 19 nt, Artificial Sequence
  Description of Artificial Sequence: Synthetic oligonucleotide
  Antisense strand to SEQ ID NO: 2106706
agaggcaaugagaucuccc

SEQ ID NO: 2106708 - RNA, 19 nt, Artificial Sequence
  Description of Artificial Sequence: Synthetic oligonucleotide
  Sense strand starting at position 3007 of SEQ ID NO: 1882254
gucucuuaauucgcaacca

SEQ ID NO: 2106709 - RNA, 19 nt, Artificial Sequence
  Description of Artificial Sequence: Synthetic oligonucleotide
  Antisense strand to SEQ ID NO: 2106708
ugguugcgaauuaagagac

SEQ ID NO: 2106710 - RNA, 19 nt, Artificial Sequence
  Description of Artificial Sequence: Synthetic oligonucleotide
  Sense strand starting at position 3062 of SEQ ID NO: 1882254
ggguguuaguuaucaauag

SEQ ID NO: 2106711 - RNA, 19 nt, Artificial Sequence
  Description of Artificial Sequence: Synthetic oligonucleotide
  Antisense strand to SEQ ID NO: 2106710
cuauugauaacuaacaccc

SEQ ID NO: 2106712 - RNA, 19 nt, Artificial Sequence
  Description of Artificial Sequence: Synthetic oligonucleotide
  Sense strand starting at position 3066 of SEQ ID NO: 1882254
guuaguuaucaauagcuau

SEQ ID NO: 2106713 - RNA, 19 nt, Artificial Sequence
  Description of Artificial Sequence: Synthetic oligonucleotide
  Antisense strand to SEQ ID NO: 2106712
auagcuauugauaacuaac

SEQ ID NO: 2106714 - RNA, 19 nt, Artificial Sequence
  Description of Artificial Sequence: Synthetic oligonucleotide
  Sense strand starting at position 3106 of SEQ ID NO: 1882254
caaauagacucguugcucu

SEQ ID NO: 2106715 - RNA, 19 nt, Artificial Sequence
  Description of Artificial Sequence: Synthetic oligonucleotide
  Antisense strand to SEQ ID NO: 2106714
agagcaacgagucuauuug

SEQ ID NO: 2106716 - RNA, 19 nt, Artificial Sequence
  Description of Artificial Sequence: Synthetic oligonucleotide
  Sense strand starting at position 3161 of SEQ ID NO: 1882254
uuaauaugguugccauaau

SEQ ID NO: 2106717 - RNA, 19 nt, Artificial Sequence
  Description of Artificial Sequence: Synthetic oligonucleotide
  Antisense strand to SEQ ID NO: 2106716
auuauggcaaccauauuaa

SEQ ID NO: 2106718 - RNA, 19 nt, Artificial Sequence
  Description of Artificial Sequence: Synthetic oligonucleotide
  Sense strand starting at position 3226 of SEQ ID NO: 1882254
auggaauguugcgugaaau

SEQ ID NO: 2106719 - RNA, 19 nt, Artificial Sequence
  Description of Artificial Sequence: Synthetic oligonucleotide
  Antisense strand to SEQ ID NO: 2106718
auuucacgcaacauuccau

SEQ ID NO: 2106720 - RNA, 19 nt, Artificial Sequence
  Description of Artificial Sequence: Synthetic oligonucleotide
  Sense strand starting at position 3227 of SEQ ID NO: 1882254
uggaauguugcgugaaaug

SEQ ID NO: 2106721 - RNA, 19 nt, Artificial Sequence
  Description of Artificial Sequence: Synthetic oligonucleotide
  Antisense strand to SEQ ID NO: 2106720
cauuucacgcaacauucca

SEQ ID NO: 2106722 - RNA, 19 nt, Artificial Sequence
  Description of Artificial Sequence: Synthetic oligonucleotide
  Sense strand starting at position 3237 of SEQ ID NO: 1882254
cgugaaaugucauuccaag

SEQ ID NO: 2106723 - RNA, 19 nt, Artificial Sequence
  Description of Artificial Sequence: Synthetic oligonucleotide
  Antisense strand to SEQ ID NO: 2106722
cuuggaaugacauuucacg

SEQ ID NO: 2106724 - RNA, 19 nt, Artificial Sequence
  Description of Artificial Sequence: Synthetic oligonucleotide
  Sense strand starting at position 3350 of SEQ ID NO: 1882254
uuccauuuguuagccuuua

SEQ ID NO: 2106725 - RNA, 19 nt, Artificial Sequence
  Description of Artificial Sequence: Synthetic oligonucleotide
  Antisense strand to SEQ ID NO: 2106724
uaaaggcuaacaaauggaa

SEQ ID NO: 2106726 - RNA, 19 nt, Artificial Sequence
  Description of Artificial Sequence: Synthetic oligonucleotide
  Sense strand starting at position 3355 of SEQ ID NO: 1882254
uuuguuagccuuuagagca

SEQ ID NO: 2106727 - RNA, 19 nt, Artificial Sequence
  Description of Artificial Sequence: Synthetic oligonucleotide
  Antisense strand to SEQ ID NO: 2106726
ugcucuaaaggcuaacaaa

SEQ ID NO: 2106728 - RNA, 19 nt, Artificial Sequence
  Description of Artificial Sequence: Synthetic oligonucleotide
  Sense strand starting at position 3363 of SEQ ID NO: 1882254
ccuuuagagcagugguauc

SEQ ID NO: 2106729 - RNA, 19 nt, Artificial Sequence
  Description of Artificial Sequence: Synthetic oligonucleotide
  Antisense strand to SEQ ID NO: 2106728
gauaccacugcucuaaagg

SEQ ID NO: 2106730 - RNA, 19 nt, Artificial Sequence
  Description of Artificial Sequence: Synthetic oligonucleotide
  Sense strand starting at position 3396 of SEQ ID NO: 1882254
ugaggacucucuuugcuua

SEQ ID NO: 2106731 - RNA, 19 nt, Artificial Sequence
  Description of Artificial Sequence: Synthetic oligonucleotide
  Antisense strand to SEQ ID NO: 2106730
uaagcaaagagaguccuca

SEQ ID NO: 2106732 - RNA, 19 nt, Artificial Sequence
  Description of Artificial Sequence: Synthetic oligonucleotide
  Sense strand starting at position 3397 of SEQ ID NO: 1882254
gaggacucucuuugcuuau

SEQ ID NO: 2106733 - RNA, 19 nt, Artificial Sequence
  Description of Artificial Sequence: Synthetic oligonucleotide
  Antisense strand to SEQ ID NO: 2106732
auaagcaaagagaguccuc

SEQ ID NO: 2106734 - RNA, 19 nt, Artificial Sequence
  Description of Artificial Sequence: Synthetic oligonucleotide
  Sense strand starting at position 3414 of SEQ ID NO: 1882254
aucugugguggcugauaaa

SEQ ID NO: 2106735 - RNA, 19 nt, Artificial Sequence
  Description of Artificial Sequence: Synthetic oligonucleotide
  Antisense strand to SEQ ID NO: 2106734
uuuaucagccaccacagau

SEQ ID NO: 2106736 - RNA, 19 nt, Artificial Sequence
  Description of Artificial Sequence: Synthetic oligonucleotide
  Sense strand starting at position 3445 of SEQ ID NO: 1882254
accuucugugguggugaua

SEQ ID NO: 2106737 - RNA, 19 nt, Artificial Sequence
  Description of Artificial Sequence: Synthetic oligonucleotide
  Antisense strand to SEQ ID NO: 2106736
uaucaccaccacagaaggu

SEQ ID NO: 2106738 - RNA, 19 nt, Artificial Sequence
  Description of Artificial Sequence: Synthetic oligonucleotide
  Sense strand starting at position 3469 of SEQ ID NO: 1882254
aaaguuaugcauggacuuu

SEQ ID NO: 2106739 - RNA, 19 nt, Artificial Sequence
  Description of Artificial Sequence: Synthetic oligonucleotide
  Antisense strand to SEQ ID NO: 2106738
aaaguccaugcauaacuuu

SEQ ID NO: 2106740 - RNA, 19 nt, Artificial Sequence
  Description of Artificial Sequence: Synthetic oligonucleotide
  Sense strand starting at position 3580 of SEQ ID NO: 1882254
guuggauauugugauuuag

SEQ ID NO: 2106741 - RNA, 19 nt, Artificial Sequence
  Description of Artificial Sequence: Synthetic oligonucleotide
  Antisense strand to SEQ ID NO: 2106740
cuaaaucacaauauccaac

SEQ ID NO: 2106742 - RNA, 19 nt, Artificial Sequence
  Description of Artificial Sequence: Synthetic oligonucleotide
  Sense strand starting at position 3614 of SEQ ID NO: 1882254
gugucagagaaucaagcuu

SEQ ID NO: 2106743 - RNA, 19 nt, Artificial Sequence
  Description of Artificial Sequence: Synthetic oligonucleotide
  Antisense strand to SEQ ID NO: 2106742
aagcuugauucucugacac

SEQ ID NO: 2106744 - RNA, 19 nt, Artificial Sequence
  Description of Artificial Sequence: Synthetic oligonucleotide
  Sense strand starting at position 3630 of SEQ ID NO: 1882254
cuuagacuccaguggauua

SEQ ID NO: 2106745 - RNA, 19 nt, Artificial Sequence
  Description of Artificial Sequence: Synthetic oligonucleotide
  Antisense strand to SEQ ID NO: 2106744
uaauccacuggagucuaag

SEQ ID NO: 2106746 - RNA, 19 nt, Artificial Sequence
  Description of Artificial Sequence: Synthetic oligonucleotide
  Sense strand starting at position 3917 of SEQ ID NO: 1882254
ugugucaguuuacuaacaa

SEQ ID NO: 2106747 - RNA, 19 nt, Artificial Sequence
  Description of Artificial Sequence: Synthetic oligonucleotide
  Antisense strand to SEQ ID NO: 2106746
uuguuaguaaacugacaca

SEQ ID NO: 2106748 - RNA, 19 nt, Artificial Sequence
  Description of Artificial Sequence: Synthetic oligonucleotide
  Sense strand starting at position 3945 of SEQ ID NO: 1882254
gguugauggcugggaguca

SEQ ID NO: 2106749 - RNA, 19 nt, Artificial Sequence
  Description of Artificial Sequence: Synthetic oligonucleotide
  Antisense strand to SEQ ID NO: 2106748
ugacucccagccaucaacc

SEQ ID NO: 2106750 - RNA, 19 nt, Artificial Sequence
  Description of Artificial Sequence: Synthetic oligonucleotide
  Sense strand starting at position 274 of SEQ ID NO: 1882255
ucucaaguauuugggauua

SEQ ID NO: 2106751 - RNA, 19 nt, Artificial Sequence
  Description of Artificial Sequence: Synthetic oligonucleotide
  Antisense strand to SEQ ID NO: 2106750
uaaucccaaauacuugaga

SEQ ID NO: 2106752 - RNA, 19 nt, Artificial Sequence
  Description of Artificial Sequence: Synthetic oligonucleotide
  Sense strand starting at position 276 of SEQ ID NO: 1882255
ucaaguauuugggauuaca

SEQ ID NO: 2106753 - RNA, 19 nt, Artificial Sequence
  Description of Artificial Sequence: Synthetic oligonucleotide
  Antisense strand to SEQ ID NO: 2106752
uguaaucccaaauacuuga

SEQ ID NO: 2106754 - RNA, 19 nt, Artificial Sequence
  Description of Artificial Sequence: Synthetic oligonucleotide
  Sense strand starting at position 497 of SEQ ID NO: 1882255
gggucuuguucugugauuc

SEQ ID NO: 2106755 - RNA, 19 nt, Artificial Sequence
  Description of Artificial Sequence: Synthetic oligonucleotide
  Antisense strand to SEQ ID NO: 2106754
gaaucacagaacaagaccc

SEQ ID NO: 2106756 - RNA, 19 nt, Artificial Sequence
  Description of Artificial Sequence: Synthetic oligonucleotide
  Sense strand starting at position 508 of SEQ ID NO: 1882255
ugugauucaggcuagaguu

SEQ ID NO: 2106757 - RNA, 19 nt, Artificial Sequence
  Description of Artificial Sequence: Synthetic oligonucleotide
  Antisense strand to SEQ ID NO: 2106756
aacucuagccugaaucaca

SEQ ID NO: 2106758 - RNA, 19 nt, Artificial Sequence
  Description of Artificial Sequence: Synthetic oligonucleotide
  Sense strand starting at position 594 of SEQ ID NO: 1882255
ucccgaguagauuagacua

SEQ ID NO: 2106759 - RNA, 19 nt, Artificial Sequence
  Description of Artificial Sequence: Synthetic oligonucleotide
  Antisense strand to SEQ ID NO: 2106758
uagucuaaucuacucggga

SEQ ID NO: 2106760 - RNA, 19 nt, Artificial Sequence
  Description of Artificial Sequence: Synthetic oligonucleotide
  Sense strand starting at position 744 of SEQ ID NO: 1882255
ggauuagaggagugccaaa

SEQ ID NO: 2106761 - RNA, 19 nt, Artificial Sequence
  Description of Artificial Sequence: Synthetic oligonucleotide
  Antisense strand to SEQ ID NO: 2106760
uuuggcacuccucuaaucc

SEQ ID NO: 2106762 - RNA, 19 nt, Artificial Sequence
  Description of Artificial Sequence: Synthetic oligonucleotide
  Sense strand starting at position 883 of SEQ ID NO: 1882255
gcaggugauugaggguaga

SEQ ID NO: 2106763 - RNA, 19 nt, Artificial Sequence
  Description of Artificial Sequence: Synthetic oligonucleotide
  Antisense strand to SEQ ID NO: 2106762
ucuacccucaaucaccugc

SEQ ID NO: 2106764 - RNA, 19 nt, Artificial Sequence
  Description of Artificial Sequence: Synthetic oligonucleotide
  Sense strand starting at position 1485 of SEQ ID NO: 1882255
guguuucagugcucaggga

SEQ ID NO: 2106765 - RNA, 19 nt, Artificial Sequence
  Description of Artificial Sequence: Synthetic oligonucleotide
  Antisense strand to SEQ ID NO: 2106764
ucccugagcacugaaacac

SEQ ID NO: 2106766 - RNA, 19 nt, Artificial Sequence
  Description of Artificial Sequence: Synthetic oligonucleotide
  Sense strand starting at position 1600 of SEQ ID NO: 1882255
aggagagcugggugucaga

SEQ ID NO: 2106767 - RNA, 19 nt, Artificial Sequence
  Description of Artificial Sequence: Synthetic oligonucleotide
  Antisense strand to SEQ ID NO: 2106766
ucugacacccagcucuccu

SEQ ID NO: 2106768 - RNA, 19 nt, Artificial Sequence
  Description of Artificial Sequence: Synthetic oligonucleotide
  Sense strand starting at position 1627 of SEQ ID NO: 1882255
gacauuugguaaggaccaa

SEQ ID NO: 2106769 - RNA, 19 nt, Artificial Sequence
  Description of Artificial Sequence: Synthetic oligonucleotide
  Antisense strand to SEQ ID NO: 2106768
uugguccuuaccaaauguc

SEQ ID NO: 2106770 - RNA, 19 nt, Artificial Sequence
  Description of Artificial Sequence: Synthetic oligonucleotide
  Sense strand starting at position 2210 of SEQ ID NO: 1882255
ugaggucaggccugaauga

SEQ ID NO: 2106771 - RNA, 19 nt, Artificial Sequence
  Description of Artificial Sequence: Synthetic oligonucleotide
  Antisense strand to SEQ ID NO: 2106770
ucauucaggccugaccuca

SEQ ID NO: 2106772 - RNA, 19 nt, Artificial Sequence
  Description of Artificial Sequence: Synthetic oligonucleotide
  Sense strand starting at position 2273 of SEQ ID NO: 1882255
uugcccacucuuuagaaga

SEQ ID NO: 2106773 - RNA, 19 nt, Artificial Sequence
  Description of Artificial Sequence: Synthetic oligonucleotide
  Antisense strand to SEQ ID NO: 2106772
ucuucuaaagagugggcaa

SEQ ID NO: 2106774 - RNA, 19 nt, Artificial Sequence
  Description of Artificial Sequence: Synthetic oligonucleotide
  Sense strand starting at position 2281 of SEQ ID NO: 1882255
ucuuuagaagaucauuguu

SEQ ID NO: 2106775 - RNA, 19 nt, Artificial Sequence
  Description of Artificial Sequence: Synthetic oligonucleotide
  Antisense strand to SEQ ID NO: 2106774
aacaaugaucuucuaaaga

SEQ ID NO: 2106776 - RNA, 19 nt, Artificial Sequence
  Description of Artificial Sequence: Synthetic oligonucleotide
  Sense strand starting at position 2284 of SEQ ID NO: 1882255
uuagaagaucauuguuggu

SEQ ID NO: 2106777 - RNA, 19 nt, Artificial Sequence
  Description of Artificial Sequence: Synthetic oligonucleotide
  Antisense strand to SEQ ID NO: 2106776
accaacaaugaucuucuaa

SEQ ID NO: 2106778 - RNA, 19 nt, Artificial Sequence
  Description of Artificial Sequence: Synthetic oligonucleotide
  Sense strand starting at position 2290 of SEQ ID NO: 1882255
gaucauuguugguucccau

SEQ ID NO: 2106779 - RNA, 19 nt, Artificial Sequence
  Description of Artificial Sequence: Synthetic oligonucleotide
  Antisense strand to SEQ ID NO: 2106778
augggaaccaacaaugauc

SEQ ID NO: 2106780 - RNA, 19 nt, Artificial Sequence
  Description of Artificial Sequence: Synthetic oligonucleotide
  Sense strand starting at position 2317 of SEQ ID NO: 1882255
agagaugucucucaccauu

SEQ ID NO: 2106781 - RNA, 19 nt, Artificial Sequence
  Description of Artificial Sequence: Synthetic oligonucleotide
  Antisense strand to SEQ ID NO: 2106780
aauggugagagacaucucu

SEQ ID NO: 2106782 - RNA, 19 nt, Artificial Sequence
  Description of Artificial Sequence: Synthetic oligonucleotide
  Sense strand starting at position 2401 of SEQ ID NO: 1882255
cgggaauuguuccucucuu

SEQ ID NO: 2106783 - RNA, 19 nt, Artificial Sequence
  Description of Artificial Sequence: Synthetic oligonucleotide
  Antisense strand to SEQ ID NO: 2106782
aagagaggaacaauucccg

SEQ ID NO: 2106784 - RNA, 19 nt, Artificial Sequence
  Description of Artificial Sequence: Synthetic oligonucleotide
  Sense strand starting at position 2402 of SEQ ID NO: 1882255
gggaauuguuccucucuua

SEQ ID NO: 2106785 - RNA, 19 nt, Artificial Sequence
  Description of Artificial Sequence: Synthetic oligonucleotide
  Antisense strand to SEQ ID NO: 2106784
uaagagaggaacaauuccc

SEQ ID NO: 2106786 - RNA, 19 nt, Artificial Sequence
  Description of Artificial Sequence: Synthetic oligonucleotide
  Sense strand starting at position 2459 of SEQ ID NO: 1882255
gcuaguuuaccacauguaa

SEQ ID NO: 2106787 - RNA, 19 nt, Artificial Sequence
  Description of Artificial Sequence: Synthetic oligonucleotide
  Antisense strand to SEQ ID NO: 2106786
uuacaugugguaaacuagc

SEQ ID NO: 2106788 - RNA, 19 nt, Artificial Sequence
  Description of Artificial Sequence: Synthetic oligonucleotide
  Sense strand starting at position 2470 of SEQ ID NO: 1882255
acauguaacugacuauguu

SEQ ID NO: 2106789 - RNA, 19 nt, Artificial Sequence
  Description of Artificial Sequence: Synthetic oligonucleotide
  Antisense strand to SEQ ID NO: 2106788
aacauagucaguuacaugu

SEQ ID NO: 2106790 - RNA, 19 nt, Artificial Sequence
  Description of Artificial Sequence: Synthetic oligonucleotide
  Sense strand starting at position 2474 of SEQ ID NO: 1882255
guaacugacuauguuaacu

SEQ ID NO: 2106791 - RNA, 19 nt, Artificial Sequence
  Description of Artificial Sequence: Synthetic oligonucleotide
  Antisense strand to SEQ ID NO: 2106790
aguuaacauagucaguuac

SEQ ID NO: 2106792 - RNA, 19 nt, Artificial Sequence
  Description of Artificial Sequence: Synthetic oligonucleotide
  Sense strand starting at position 3022 of SEQ ID NO: 1882255
uuucuaagucaagagguau

SEQ ID NO: 2106793 - RNA, 19 nt, Artificial Sequence
  Description of Artificial Sequence: Synthetic oligonucleotide
  Antisense strand to SEQ ID NO: 2106792
auaccucuugacuuagaaa

SEQ ID NO: 2106794 - RNA, 19 nt, Artificial Sequence
  Description of Artificial Sequence: Synthetic oligonucleotide
  Sense strand starting at position 3172 of SEQ ID NO: 1882255
uuaacagaguucccguaua

SEQ ID NO: 2106795 - RNA, 19 nt, Artificial Sequence
  Description of Artificial Sequence: Synthetic oligonucleotide
  Antisense strand to SEQ ID NO: 2106794
uauacgggaacucuguuaa

SEQ ID NO: 2106796 - RNA, 19 nt, Artificial Sequence
  Description of Artificial Sequence: Synthetic oligonucleotide
  Sense strand starting at position 3277 of SEQ ID NO: 1882255
agaaguuauuguugguaca

SEQ ID NO: 2106797 - RNA, 19 nt, Artificial Sequence
  Description of Artificial Sequence: Synthetic oligonucleotide
  Antisense strand to SEQ ID NO: 2106796
uguaccaacaauaacuucu

SEQ ID NO: 2106798 - RNA, 19 nt, Artificial Sequence
  Description of Artificial Sequence: Synthetic oligonucleotide
  Sense strand starting at position 3278 of SEQ ID NO: 1882255
gaaguuauuguugguacaa

SEQ ID NO: 2106799 - RNA, 19 nt, Artificial Sequence
  Description of Artificial Sequence: Synthetic oligonucleotide
  Antisense strand to SEQ ID NO: 2106798
uuguaccaacaauaacuuc

SEQ ID NO: 2106800 - RNA, 19 nt, Artificial Sequence
  Description of Artificial Sequence: Synthetic oligonucleotide
  Sense strand starting at position 3279 of SEQ ID NO: 1882255
aaguuauuguugguacaau

SEQ ID NO: 2106801 - RNA, 19 nt, Artificial Sequence
  Description of Artificial Sequence: Synthetic oligonucleotide
  Antisense strand to SEQ ID NO: 2106800
auuguaccaacaauaacuu

SEQ ID NO: 2106802 - RNA, 19 nt, Artificial Sequence
  Description of Artificial Sequence: Synthetic oligonucleotide
  Sense strand starting at position 3280 of SEQ ID NO: 1882255
aguuauuguugguacaaua

SEQ ID NO: 2106803 - RNA, 19 nt, Artificial Sequence
  Description of Artificial Sequence: Synthetic oligonucleotide
  Antisense strand to SEQ ID NO: 2106802
uauuguaccaacaauaacu

SEQ ID NO: 2106804 - RNA, 19 nt, Artificial Sequence
  Description of Artificial Sequence: Synthetic oligonucleotide
  Sense strand starting at position 3437 of SEQ ID NO: 1882255
acagguguguaauccuaau

SEQ ID NO: 2106805 - RNA, 19 nt, Artificial Sequence
  Description of Artificial Sequence: Synthetic oligonucleotide
  Antisense strand to SEQ ID NO: 2106804
auuaggauuacacaccugu

SEQ ID NO: 2106806 - RNA, 19 nt, Artificial Sequence
  Description of Artificial Sequence: Synthetic oligonucleotide
  Sense strand starting at position 3446 of SEQ ID NO: 1882255
uaauccuaauggugauaga

SEQ ID NO: 2106807 - RNA, 19 nt, Artificial Sequence
  Description of Artificial Sequence: Synthetic oligonucleotide
  Antisense strand to SEQ ID NO: 2106806
ucuaucaccauuaggauua

SEQ ID NO: 2106808 - RNA, 19 nt, Artificial Sequence
  Description of Artificial Sequence: Synthetic oligonucleotide
  Sense strand starting at position 3449 of SEQ ID NO: 1882255
uccuaauggugauagauua

SEQ ID NO: 2106809 - RNA, 19 nt, Artificial Sequence
  Description of Artificial Sequence: Synthetic oligonucleotide
  Antisense strand to SEQ ID NO: 2106808
uaaucuaucaccauuagga

SEQ ID NO: 2106810 - RNA, 19 nt, Artificial Sequence
  Description of Artificial Sequence: Synthetic oligonucleotide
  Sense strand starting at position 3581 of SEQ ID NO: 1882255
uuuguucugugaguuauga

SEQ ID NO: 2106811 - RNA, 19 nt, Artificial Sequence
  Description of Artificial Sequence: Synthetic oligonucleotide
  Antisense strand to SEQ ID NO: 2106810
ucauaacucacagaacaaa

SEQ ID NO: 2106812 - RNA, 19 nt, Artificial Sequence
  Description of Artificial Sequence: Synthetic oligonucleotide
  Sense strand starting at position 3583 of SEQ ID NO: 1882255
uguucugugaguuaugauc

SEQ ID NO: 2106813 - RNA, 19 nt, Artificial Sequence
  Description of Artificial Sequence: Synthetic oligonucleotide
  Antisense strand to SEQ ID NO: 2106812
gaucauaacucacagaaca

SEQ ID NO: 2106814 - RNA, 19 nt, Artificial Sequence
  Description of Artificial Sequence: Synthetic oligonucleotide
  Sense strand starting at position 3730 of SEQ ID NO: 1882255
cugcguuuccuaggcugaa

SEQ ID NO: 2106815 - RNA, 19 nt, Artificial Sequence
  Description of Artificial Sequence: Synthetic oligonucleotide
  Antisense strand to SEQ ID NO: 2106814
uucagccuaggaaacgcag

SEQ ID NO: 2106816 - RNA, 19 nt, Artificial Sequence
  Description of Artificial Sequence: Synthetic oligonucleotide
  Sense strand starting at position 3731 of SEQ ID NO: 1882255
ugcguuuccuaggcugaau

SEQ ID NO: 2106817 - RNA, 19 nt, Artificial Sequence
  Description of Artificial Sequence: Synthetic oligonucleotide
  Antisense strand to SEQ ID NO: 2106816
auucagccuaggaaacgca

SEQ ID NO: 2106818 - RNA, 19 nt, Artificial Sequence
  Description of Artificial Sequence: Synthetic oligonucleotide
  Sense strand starting at position 3743 of SEQ ID NO: 1882255
gcugaauugcaguggcauc

SEQ ID NO: 2106819 - RNA, 19 nt, Artificial Sequence
  Description of Artificial Sequence: Synthetic oligonucleotide
  Antisense strand to SEQ ID NO: 2106818
gaugccacugcaauucagc

SEQ ID NO: 2106820 - RNA, 19 nt, Artificial Sequence
  Description of Artificial Sequence: Synthetic oligonucleotide
  Sense strand starting at position 3853 of SEQ ID NO: 1882255
agcugauaucuccauugcu

SEQ ID NO: 2106821 - RNA, 19 nt, Artificial Sequence
  Description of Artificial Sequence: Synthetic oligonucleotide
  Antisense strand to SEQ ID NO: 2106820
agcaauggagauaucagcu

SEQ ID NO: 2106822 - RNA, 19 nt, Artificial Sequence
  Description of Artificial Sequence: Synthetic oligonucleotide
  Sense strand starting at position 3945 of SEQ ID NO: 1882255
acuguaaucuccguauccu

SEQ ID NO: 2106823 - RNA, 19 nt, Artificial Sequence
  Description of Artificial Sequence: Synthetic oligonucleotide
  Antisense strand to SEQ ID NO: 2106822
aggauacggagauuacagu

SEQ ID NO: 2106824 - RNA, 19 nt, Artificial Sequence
  Description of Artificial Sequence: Synthetic oligonucleotide
  Sense strand starting at position 3946 of SEQ ID NO: 1882255
cuguaaucuccguauccug

SEQ ID NO: 2106825 - RNA, 19 nt, Artificial Sequence
  Description of Artificial Sequence: Synthetic oligonucleotide
  Antisense strand to SEQ ID NO: 2106824
caggauacggagauuacag

SEQ ID NO: 2106826 - RNA, 19 nt, Artificial Sequence
  Description of Artificial Sequence: Synthetic oligonucleotide
  Sense strand starting at position 3954 of SEQ ID NO: 1882255
uccguauccugagcucaac

SEQ ID NO: 2106827 - RNA, 19 nt, Artificial Sequence
  Description of Artificial Sequence: Synthetic oligonucleotide
  Antisense strand to SEQ ID NO: 2106826
guugagcucaggauacgga

SEQ ID NO: 2106828 - RNA, 19 nt, Artificial Sequence
  Description of Artificial Sequence: Synthetic oligonucleotide
  Sense strand starting at position 3957 of SEQ ID NO: 1882255
guauccugagcucaacuaa

SEQ ID NO: 2106829 - RNA, 19 nt, Artificial Sequence
  Description of Artificial Sequence: Synthetic oligonucleotide
  Antisense strand to SEQ ID NO: 2106828
uuaguugagcucaggauac

SEQ ID NO: 2106830 - RNA, 19 nt, Artificial Sequence
  Description of Artificial Sequence: Synthetic oligonucleotide
  Sense strand starting at position 301 of SEQ ID NO: 1882256
uauuuaagauggugacaau

SEQ ID NO: 2106831 - RNA, 19 nt, Artificial Sequence
  Description of Artificial Sequence: Synthetic oligonucleotide
  Antisense strand to SEQ ID NO: 2106830
auugucaccaucuuaaaua

SEQ ID NO: 2106832 - RNA, 19 nt, Artificial Sequence
  Description of Artificial Sequence: Synthetic oligonucleotide
  Sense strand starting at position 318 of SEQ ID NO: 1882256
auuaauuguccacauaggu

SEQ ID NO: 2106833 - RNA, 19 nt, Artificial Sequence
  Description of Artificial Sequence: Synthetic oligonucleotide
  Antisense strand to SEQ ID NO: 2106832
accuauguggacaauuaau

SEQ ID NO: 2106834 - RNA, 19 nt, Artificial Sequence
  Description of Artificial Sequence: Synthetic oligonucleotide
  Sense strand starting at position 550 of SEQ ID NO: 1882256
auguaucaucuauacgaac

SEQ ID NO: 2106835 - RNA, 19 nt, Artificial Sequence
  Description of Artificial Sequence: Synthetic oligonucleotide
  Antisense strand to SEQ ID NO: 2106834
guucguauagaugauacau

SEQ ID NO: 2106836 - RNA, 19 nt, Artificial Sequence
  Description of Artificial Sequence: Synthetic oligonucleotide
  Sense strand starting at position 1047 of SEQ ID NO: 1882256
ugugguauuguauauguga

SEQ ID NO: 2106837 - RNA, 19 nt, Artificial Sequence
  Description of Artificial Sequence: Synthetic oligonucleotide
  Antisense strand to SEQ ID NO: 2106836
ucacauauacaauaccaca

SEQ ID NO: 2106838 - RNA, 19 nt, Artificial Sequence
  Description of Artificial Sequence: Synthetic oligonucleotide
  Sense strand starting at position 1049 of SEQ ID NO: 1882256
ugguauuguauaugugaca

SEQ ID NO: 2106839 - RNA, 19 nt, Artificial Sequence
  Description of Artificial Sequence: Synthetic oligonucleotide
  Antisense strand to SEQ ID NO: 2106838
ugucacauauacaauacca

SEQ ID NO: 2106840 - RNA, 19 nt, Artificial Sequence
  Description of Artificial Sequence: Synthetic oligonucleotide
  Sense strand starting at position 1050 of SEQ ID NO: 1882256
gguauuguauaugugacau

SEQ ID NO: 2106841 - RNA, 19 nt, Artificial Sequence
  Description of Artificial Sequence: Synthetic oligonucleotide
  Antisense strand to SEQ ID NO: 2106840
augucacauauacaauacc

SEQ ID NO: 2106842 - RNA, 19 nt, Artificial Sequence
  Description of Artificial Sequence: Synthetic oligonucleotide
  Sense strand starting at position 1071 of SEQ ID NO: 1882256
cugugugaccaucaucauc

SEQ ID NO: 2106843 - RNA, 19 nt, Artificial Sequence
  Description of Artificial Sequence: Synthetic oligonucleotide
  Antisense strand to SEQ ID NO: 2106842
gaugaugauggucacacag

SEQ ID NO: 2106844 - RNA, 19 nt, Artificial Sequence
  Description of Artificial Sequence: Synthetic oligonucleotide
  Sense strand starting at position 1087 of SEQ ID NO: 1882256
aucacuuucuaguuccaga

SEQ ID NO: 2106845 - RNA, 19 nt, Artificial Sequence
  Description of Artificial Sequence: Synthetic oligonucleotide
  Antisense strand to SEQ ID NO: 2106844
ucuggaacuagaaagugau

SEQ ID NO: 2106846 - RNA, 19 nt, Artificial Sequence
  Description of Artificial Sequence: Synthetic oligonucleotide
  Sense strand starting at position 1238 of SEQ ID NO: 1882256
accauaaacuaucugugua

SEQ ID NO: 2106847 - RNA, 19 nt, Artificial Sequence
  Description of Artificial Sequence: Synthetic oligonucleotide
  Antisense strand to SEQ ID NO: 2106846
uacacagauaguuuauggu

SEQ ID NO: 2106848 - RNA, 19 nt, Artificial Sequence
  Description of Artificial Sequence: Synthetic oligonucleotide
  Sense strand starting at position 1241 of SEQ ID NO: 1882256
auaaacuaucuguguaugu

SEQ ID NO: 2106849 - RNA, 19 nt, Artificial Sequence
  Description of Artificial Sequence: Synthetic oligonucleotide
  Antisense strand to SEQ ID NO: 2106848
acauacacagauaguuuau

SEQ ID NO: 2106850 - RNA, 19 nt, Artificial Sequence
  Description of Artificial Sequence: Synthetic oligonucleotide
  Sense strand starting at position 1300 of SEQ ID NO: 1882256
agaguucuuccaugucaua

SEQ ID NO: 2106851 - RNA, 19 nt, Artificial Sequence
  Description of Artificial Sequence: Synthetic oligonucleotide
  Antisense strand to SEQ ID NO: 2106850
uaugacauggaagaacucu

SEQ ID NO: 2106852 - RNA, 19 nt, Artificial Sequence
  Description of Artificial Sequence: Synthetic oligonucleotide
  Sense strand starting at position 1566 of SEQ ID NO: 1882256
uuuauauaaucucuggagu

SEQ ID NO: 2106853 - RNA, 19 nt, Artificial Sequence
  Description of Artificial Sequence: Synthetic oligonucleotide
  Antisense strand to SEQ ID NO: 2106852
acuccagagauuauauaaa

SEQ ID NO: 2106854 - RNA, 19 nt, Artificial Sequence
  Description of Artificial Sequence: Synthetic oligonucleotide
  Sense strand starting at position 1655 of SEQ ID NO: 1882256
auacuagguuuaccugaaa

SEQ ID NO: 2106855 - RNA, 19 nt, Artificial Sequence
  Description of Artificial Sequence: Synthetic oligonucleotide
  Antisense strand to SEQ ID NO: 2106854
uuucagguaaaccuaguau

SEQ ID NO: 2106856 - RNA, 19 nt, Artificial Sequence
  Description of Artificial Sequence: Synthetic oligonucleotide
  Sense strand starting at position 1992 of SEQ ID NO: 1882256
gguugguggcauugaggau

SEQ ID NO: 2106857 - RNA, 19 nt, Artificial Sequence
  Description of Artificial Sequence: Synthetic oligonucleotide
  Antisense strand to SEQ ID NO: 2106856
auccucaaugccaccaacc

SEQ ID NO: 2106858 - RNA, 19 nt, Artificial Sequence
  Description of Artificial Sequence: Synthetic oligonucleotide
  Sense strand starting at position 2108 of SEQ ID NO: 1882256
ggguguagucauuaaagug

SEQ ID NO: 2106859 - RNA, 19 nt, Artificial Sequence
  Description of Artificial Sequence: Synthetic oligonucleotide
  Antisense strand to SEQ ID NO: 2106858
cacuuuaaugacuacaccc

SEQ ID NO: 2106860 - RNA, 19 nt, Artificial Sequence
  Description of Artificial Sequence: Synthetic oligonucleotide
  Sense strand starting at position 2137 of SEQ ID NO: 1882256
cagaauaaaugugcagauu

SEQ ID NO: 2106861 - RNA, 19 nt, Artificial Sequence
  Description of Artificial Sequence: Synthetic oligonucleotide
  Antisense strand to SEQ ID NO: 2106860
aaucugcacauuuauucug

SEQ ID NO: 2106862 - RNA, 19 nt, Artificial Sequence
  Description of Artificial Sequence: Synthetic oligonucleotide
  Sense strand starting at position 2149 of SEQ ID NO: 1882256
gcagauuggcuggaucuca

SEQ ID NO: 2106863 - RNA, 19 nt, Artificial Sequence
  Description of Artificial Sequence: Synthetic oligonucleotide
  Antisense strand to SEQ ID NO: 2106862
ugagauccagccaaucugc

SEQ ID NO: 2106864 - RNA, 19 nt, Artificial Sequence
  Description of Artificial Sequence: Synthetic oligonucleotide
  Sense strand starting at position 2229 of SEQ ID NO: 1882256
cuccuuugucaguacaauu

SEQ ID NO: 2106865 - RNA, 19 nt, Artificial Sequence
  Description of Artificial Sequence: Synthetic oligonucleotide
  Antisense strand to SEQ ID NO: 2106864
aauuguacugacaaaggag

SEQ ID NO: 2106866 - RNA, 19 nt, Artificial Sequence
  Description of Artificial Sequence: Synthetic oligonucleotide
  Sense strand starting at position 2341 of SEQ ID NO: 1882256
augcaugaauugucucaua

SEQ ID NO: 2106867 - RNA, 19 nt, Artificial Sequence
  Description of Artificial Sequence: Synthetic oligonucleotide
  Antisense strand to SEQ ID NO: 2106866
uaugagacaauucaugcau

SEQ ID NO: 2106868 - RNA, 19 nt, Artificial Sequence
  Description of Artificial Sequence: Synthetic oligonucleotide
  Sense strand starting at position 2373 of SEQ ID NO: 1882256
ugaauaucuuaccuguuga

SEQ ID NO: 2106869 - RNA, 19 nt, Artificial Sequence
  Description of Artificial Sequence: Synthetic oligonucleotide
  Antisense strand to SEQ ID NO: 2106868
ucaacagguaagauauuca

SEQ ID NO: 2106870 - RNA, 19 nt, Artificial Sequence
  Description of Artificial Sequence: Synthetic oligonucleotide
  Sense strand starting at position 2378 of SEQ ID NO: 1882256
aucuuaccuguugaaugua

SEQ ID NO: 2106871 - RNA, 19 nt, Artificial Sequence
  Description of Artificial Sequence: Synthetic oligonucleotide
  Antisense strand to SEQ ID NO: 2106870
uacauucaacagguaagau

SEQ ID NO: 2106872 - RNA, 19 nt, Artificial Sequence
  Description of Artificial Sequence: Synthetic oligonucleotide
  Sense strand starting at position 2381 of SEQ ID NO: 1882256
uuaccuguugaauguacua

SEQ ID NO: 2106873 - RNA, 19 nt, Artificial Sequence
  Description of Artificial Sequence: Synthetic oligonucleotide
  Antisense strand to SEQ ID NO: 2106872
uaguacauucaacagguaa

SEQ ID NO: 2106874 - RNA, 19 nt, Artificial Sequence
  Description of Artificial Sequence: Synthetic oligonucleotide
  Sense strand starting at position 2398 of SEQ ID NO: 1882256
uaugcuaaggccuagagau

SEQ ID NO: 2106875 - RNA, 19 nt, Artificial Sequence
  Description of Artificial Sequence: Synthetic oligonucleotide
  Antisense strand to SEQ ID NO: 2106874
aucucuaggccuuagcaua

SEQ ID NO: 2106876 - RNA, 19 nt, Artificial Sequence
  Description of Artificial Sequence: Synthetic oligonucleotide
  Sense strand starting at position 2523 of SEQ ID NO: 1882256
augggagugccagaguagu

SEQ ID NO: 2106877 - RNA, 19 nt, Artificial Sequence
  Description of Artificial Sequence: Synthetic oligonucleotide
  Antisense strand to SEQ ID NO: 2106876
acuacucuggcacucccau

SEQ ID NO: 2106878 - RNA, 19 nt, Artificial Sequence
  Description of Artificial Sequence: Synthetic oligonucleotide
  Sense strand starting at position 2531 of SEQ ID NO: 1882256
gccagaguaguccagcaau

SEQ ID NO: 2106879 - RNA, 19 nt, Artificial Sequence
  Description of Artificial Sequence: Synthetic oligonucleotide
  Antisense strand to SEQ ID NO: 2106878
auugcuggacuacucuggc

SEQ ID NO: 2106880 - RNA, 19 nt, Artificial Sequence
  Description of Artificial Sequence: Synthetic oligonucleotide
  Sense strand starting at position 2534 of SEQ ID NO: 1882256
agaguaguccagcaauaaa

SEQ ID NO: 2106881 - RNA, 19 nt, Artificial Sequence
  Description of Artificial Sequence: Synthetic oligonucleotide
  Antisense strand to SEQ ID NO: 2106880
uuuauugcuggacuacucu

SEQ ID NO: 2106882 - RNA, 19 nt, Artificial Sequence
  Description of Artificial Sequence: Synthetic oligonucleotide
  Sense strand starting at position 2537 of SEQ ID NO: 1882256
guaguccagcaauaaagaa

SEQ ID NO: 2106883 - RNA, 19 nt, Artificial Sequence
  Description of Artificial Sequence: Synthetic oligonucleotide
  Antisense strand to SEQ ID NO: 2106882
uucuuuauugcuggacuac

SEQ ID NO: 2106884 - RNA, 19 nt, Artificial Sequence
  Description of Artificial Sequence: Synthetic oligonucleotide
  Sense strand starting at position 2666 of SEQ ID NO: 1882256
cacuguuaucccugacagg

SEQ ID NO: 2106885 - RNA, 19 nt, Artificial Sequence
  Description of Artificial Sequence: Synthetic oligonucleotide
  Antisense strand to SEQ ID NO: 2106884
ccugucagggauaacagug

SEQ ID NO: 2106886 - RNA, 19 nt, Artificial Sequence
  Description of Artificial Sequence: Synthetic oligonucleotide
  Sense strand starting at position 2667 of SEQ ID NO: 1882256
acuguuaucccugacaggu

SEQ ID NO: 2106887 - RNA, 19 nt, Artificial Sequence
  Description of Artificial Sequence: Synthetic oligonucleotide
  Antisense strand to SEQ ID NO: 2106886
accugucagggauaacagu

SEQ ID NO: 2106888 - RNA, 19 nt, Artificial Sequence
  Description of Artificial Sequence: Synthetic oligonucleotide
  Sense strand starting at position 2675 of SEQ ID NO: 1882256
cccugacaggucuaaagcu

SEQ ID NO: 2106889 - RNA, 19 nt, Artificial Sequence
  Description of Artificial Sequence: Synthetic oligonucleotide
  Antisense strand to SEQ ID NO: 2106888
agcuuuagaccugucaggg

SEQ ID NO: 2106890 - RNA, 19 nt, Artificial Sequence
  Description of Artificial Sequence: Synthetic oligonucleotide
  Sense strand starting at position 2814 of SEQ ID NO: 1882256
uuaagaaucuuguuguaga

SEQ ID NO: 2106891 - RNA, 19 nt, Artificial Sequence
  Description of Artificial Sequence: Synthetic oligonucleotide
  Antisense strand to SEQ ID NO: 2106890
ucuacaacaagauucuuaa

SEQ ID NO: 2106892 - RNA, 19 nt, Artificial Sequence
  Description of Artificial Sequence: Synthetic oligonucleotide
  Sense strand starting at position 2945 of SEQ ID NO: 1882256
uuucguguucuauaccaca

SEQ ID NO: 2106893 - RNA, 19 nt, Artificial Sequence
  Description of Artificial Sequence: Synthetic oligonucleotide
  Antisense strand to SEQ ID NO: 2106892
ugugguauagaacacgaaa

SEQ ID NO: 2106894 - RNA, 19 nt, Artificial Sequence
  Description of Artificial Sequence: Synthetic oligonucleotide
  Sense strand starting at position 3041 of SEQ ID NO: 1882256
ccauguccauuugauuaua

SEQ ID NO: 2106895 - RNA, 19 nt, Artificial Sequence
  Description of Artificial Sequence: Synthetic oligonucleotide
  Antisense strand to SEQ ID NO: 2106894
uauaaucaaauggacaugg

SEQ ID NO: 2106896 - RNA, 19 nt, Artificial Sequence
  Description of Artificial Sequence: Synthetic oligonucleotide
  Sense strand starting at position 3092 of SEQ ID NO: 1882256
cuguccugccuugauuauu

SEQ ID NO: 2106897 - RNA, 19 nt, Artificial Sequence
  Description of Artificial Sequence: Synthetic oligonucleotide
  Antisense strand to SEQ ID NO: 2106896
aauaaucaaggcaggacag

SEQ ID NO: 2106898 - RNA, 19 nt, Artificial Sequence
  Description of Artificial Sequence: Synthetic oligonucleotide
  Sense strand starting at position 3132 of SEQ ID NO: 1882256
ucccuuuagggucagugaa

SEQ ID NO: 2106899 - RNA, 19 nt, Artificial Sequence
  Description of Artificial Sequence: Synthetic oligonucleotide
  Antisense strand to SEQ ID NO: 2106898
uucacugacccuaaaggga

SEQ ID NO: 2106900 - RNA, 19 nt, Artificial Sequence
  Description of Artificial Sequence: Synthetic oligonucleotide
  Sense strand starting at position 3194 of SEQ ID NO: 1882256
ugucuuugccacuuagugu

SEQ ID NO: 2106901 - RNA, 19 nt, Artificial Sequence
  Description of Artificial Sequence: Synthetic oligonucleotide
  Antisense strand to SEQ ID NO: 2106900
acacuaaguggcaaagaca

SEQ ID NO: 2106902 - RNA, 19 nt, Artificial Sequence
  Description of Artificial Sequence: Synthetic oligonucleotide
  Sense strand starting at position 3264 of SEQ ID NO: 1882256
gcacuugugguuuacagau

SEQ ID NO: 2106903 - RNA, 19 nt, Artificial Sequence
  Description of Artificial Sequence: Synthetic oligonucleotide
  Antisense strand to SEQ ID NO: 2106902
aucuguaaaccacaagugc

SEQ ID NO: 2106904 - RNA, 19 nt, Artificial Sequence
  Description of Artificial Sequence: Synthetic oligonucleotide
  Sense strand starting at position 3273 of SEQ ID NO: 1882256
guuuacagaucugcaaaua

SEQ ID NO: 2106905 - RNA, 19 nt, Artificial Sequence
  Description of Artificial Sequence: Synthetic oligonucleotide
  Antisense strand to SEQ ID NO: 2106904
uauuugcagaucuguaaac

SEQ ID NO: 2106906 - RNA, 19 nt, Artificial Sequence
  Description of Artificial Sequence: Synthetic oligonucleotide
  Sense strand starting at position 3556 of SEQ ID NO: 1882256
cugcgugggaauugaacaa

SEQ ID NO: 2106907 - RNA, 19 nt, Artificial Sequence
  Description of Artificial Sequence: Synthetic oligonucleotide
  Antisense strand to SEQ ID NO: 2106906
uuguucaauucccacgcag

SEQ ID NO: 2106908 - RNA, 19 nt, Artificial Sequence
  Description of Artificial Sequence: Synthetic oligonucleotide
  Sense strand starting at position 3870 of SEQ ID NO: 1882256
gcagguuacagugagcaga

SEQ ID NO: 2106909 - RNA, 19 nt, Artificial Sequence
  Description of Artificial Sequence: Synthetic oligonucleotide
  Antisense strand to SEQ ID NO: 2106908
ucugcucacuguaaccugc

SEQ ID NO: 2106910 - RNA, 19 nt, Artificial Sequence
  Description of Artificial Sequence: Synthetic oligonucleotide
  Sense strand starting at position 87 of SEQ ID NO: 1882257
ggcucagcaucaucuaagu

SEQ ID NO: 2106911 - RNA, 19 nt, Artificial Sequence
  Description of Artificial Sequence: Synthetic oligonucleotide
  Antisense strand to SEQ ID NO: 2106910
acuuagaugaugcugagcc

SEQ ID NO: 2106912 - RNA, 19 nt, Artificial Sequence
  Description of Artificial Sequence: Synthetic oligonucleotide
  Sense strand starting at position 100 of SEQ ID NO: 1882257
cuaagugacccuuggucuu

SEQ ID NO: 2106913 - RNA, 19 nt, Artificial Sequence
  Description of Artificial Sequence: Synthetic oligonucleotide
  Antisense strand to SEQ ID NO: 2106912
aagaccaagggucacuuag

SEQ ID NO: 2106914 - RNA, 19 nt, Artificial Sequence
  Description of Artificial Sequence: Synthetic oligonucleotide
  Sense strand starting at position 124 of SEQ ID NO: 1882257
acuagcugugcccaaaguu

SEQ ID NO: 2106915 - RNA, 19 nt, Artificial Sequence
  Description of Artificial Sequence: Synthetic oligonucleotide
  Antisense strand to SEQ ID NO: 2106914
aacuuugggcacagcuagu

SEQ ID NO: 2106916 - RNA, 19 nt, Artificial Sequence
  Description of Artificial Sequence: Synthetic oligonucleotide
  Sense strand starting at position 133 of SEQ ID NO: 1882257
gcccaaaguucuguaugag

SEQ ID NO: 2106917 - RNA, 19 nt, Artificial Sequence
  Description of Artificial Sequence: Synthetic oligonucleotide
  Antisense strand to SEQ ID NO: 2106916
cucauacagaacuuugggc

SEQ ID NO: 2106918 - RNA, 19 nt, Artificial Sequence
  Description of Artificial Sequence: Synthetic oligonucleotide
  Sense strand starting at position 139 of SEQ ID NO: 1882257
aguucuguaugagcccuaa

SEQ ID NO: 2106919 - RNA, 19 nt, Artificial Sequence
  Description of Artificial Sequence: Synthetic oligonucleotide
  Antisense strand to SEQ ID NO: 2106918
uuagggcucauacagaacu

SEQ ID NO: 2106920 - RNA, 19 nt, Artificial Sequence
  Description of Artificial Sequence: Synthetic oligonucleotide
  Sense strand starting at position 475 of SEQ ID NO: 1882257
cgccuaaccugauucuuaa

SEQ ID NO: 2106921 - RNA, 19 nt, Artificial Sequence
  Description of Artificial Sequence: Synthetic oligonucleotide
  Antisense strand to SEQ ID NO: 2106920
uuaagaaucagguuaggcg

SEQ ID NO: 2106922 - RNA, 19 nt, Artificial Sequence
  Description of Artificial Sequence: Synthetic oligonucleotide
  Sense strand starting at position 516 of SEQ ID NO: 1882257
acgguuugaucccucaaug

SEQ ID NO: 2106923 - RNA, 19 nt, Artificial Sequence
  Description of Artificial Sequence: Synthetic oligonucleotide
  Antisense strand to SEQ ID NO: 2106922
cauugagggaucaaaccgu

SEQ ID NO: 2106924 - RNA, 19 nt, Artificial Sequence
  Description of Artificial Sequence: Synthetic oligonucleotide
  Sense strand starting at position 534 of SEQ ID NO: 1882257
gacuuucuuugaccaggga

SEQ ID NO: 2106925 - RNA, 19 nt, Artificial Sequence
  Description of Artificial Sequence: Synthetic oligonucleotide
  Antisense strand to SEQ ID NO: 2106924
ucccuggucaaagaaaguc

SEQ ID NO: 2106926 - RNA, 19 nt, Artificial Sequence
  Description of Artificial Sequence: Synthetic oligonucleotide
  Sense strand starting at position 633 of SEQ ID NO: 1882257
ggcugagcucaucaacauu

SEQ ID NO: 2106927 - RNA, 19 nt, Artificial Sequence
  Description of Artificial Sequence: Synthetic oligonucleotide
  Antisense strand to SEQ ID NO: 2106926
aauguugaugagcucagcc

SEQ ID NO: 2106928 - RNA, 19 nt, Artificial Sequence
  Description of Artificial Sequence: Synthetic oligonucleotide
  Sense strand starting at position 663 of SEQ ID NO: 1882257
gguggagcucaagaagcau

SEQ ID NO: 2106929 - RNA, 19 nt, Artificial Sequence
  Description of Artificial Sequence: Synthetic oligonucleotide
  Antisense strand to SEQ ID NO: 2106928
augcuucuugagcuccacc

SEQ ID NO: 2106930 - RNA, 19 nt, Artificial Sequence
  Description of Artificial Sequence: Synthetic oligonucleotide
  Sense strand starting at position 724 of SEQ ID NO: 1882257
cggucaucuccauggacuu

SEQ ID NO: 2106931 - RNA, 19 nt, Artificial Sequence
  Description of Artificial Sequence: Synthetic oligonucleotide
  Antisense strand to SEQ ID NO: 2106930
aaguccauggagaugaccg

SEQ ID NO: 2106932 - RNA, 19 nt, Artificial Sequence
  Description of Artificial Sequence: Synthetic oligonucleotide
  Sense strand starting at position 1050 of SEQ ID NO: 1882257
ucaccauguccugaggcau

SEQ ID NO: 2106933 - RNA, 19 nt, Artificial Sequence
  Description of Artificial Sequence: Synthetic oligonucleotide
  Antisense strand to SEQ ID NO: 2106932
augccucaggacaugguga

SEQ ID NO: 2106934 - RNA, 19 nt, Artificial Sequence
  Description of Artificial Sequence: Synthetic oligonucleotide
  Sense strand starting at position 1103 of SEQ ID NO: 1882257
ggugacugccucugaguca

SEQ ID NO: 2106935 - RNA, 19 nt, Artificial Sequence
  Description of Artificial Sequence: Synthetic oligonucleotide
  Antisense strand to SEQ ID NO: 2106934
ugacucagaggcagucacc

SEQ ID NO: 2106936 - RNA, 19 nt, Artificial Sequence
  Description of Artificial Sequence: Synthetic oligonucleotide
  Sense strand starting at position 1336 of SEQ ID NO: 1882257
ugacuacuuccugggcuua

SEQ ID NO: 2106937 - RNA, 19 nt, Artificial Sequence
  Description of Artificial Sequence: Synthetic oligonucleotide
  Antisense strand to SEQ ID NO: 2106936
uaagcccaggaaguaguca

SEQ ID NO: 2106938 - RNA, 19 nt, Artificial Sequence
  Description of Artificial Sequence: Synthetic oligonucleotide
  Sense strand starting at position 1338 of SEQ ID NO: 1882257
acuacuuccugggcuuaca

SEQ ID NO: 2106939 - RNA, 19 nt, Artificial Sequence
  Description of Artificial Sequence: Synthetic oligonucleotide
  Antisense strand to SEQ ID NO: 2106938
uguaagcccaggaaguagu

SEQ ID NO: 2106940 - RNA, 19 nt, Artificial Sequence
  Description of Artificial Sequence: Synthetic oligonucleotide
  Sense strand starting at position 2100 of SEQ ID NO: 1882257
cucuaauuggcuugggaaa

SEQ ID NO: 2106941 - RNA, 19 nt, Artificial Sequence
  Description of Artificial Sequence: Synthetic oligonucleotide
  Antisense strand to SEQ ID NO: 2106940
uuucccaagccaauuagag

SEQ ID NO: 2106942 - RNA, 19 nt, Artificial Sequence
  Description of Artificial Sequence: Synthetic oligonucleotide
  Sense strand starting at position 2101 of SEQ ID NO: 1882257
ucuaauuggcuugggaaac

SEQ ID NO: 2106943 - RNA, 19 nt, Artificial Sequence
  Description of Artificial Sequence: Synthetic oligonucleotide
  Antisense strand to SEQ ID NO: 2106942
guuucccaagccaauuaga

SEQ ID NO: 2106944 - RNA, 19 nt, Artificial Sequence
  Description of Artificial Sequence: Synthetic oligonucleotide
  Sense strand starting at position 2196 of SEQ ID NO: 1882257
ggaggagaggcuuggugaa

SEQ ID NO: 2106945 - RNA, 19 nt, Artificial Sequence
  Description of Artificial Sequence: Synthetic oligonucleotide
  Antisense strand to SEQ ID NO: 2106944
uucaccaagccucuccucc

SEQ ID NO: 2106946 - RNA, 19 nt, Artificial Sequence
  Description of Artificial Sequence: Synthetic oligonucleotide
  Sense strand starting at position 2208 of SEQ ID NO: 1882257
uggugaaucagcgauuccu

SEQ ID NO: 2106947 - RNA, 19 nt, Artificial Sequence
  Description of Artificial Sequence: Synthetic oligonucleotide
  Antisense strand to SEQ ID NO: 2106946
aggaaucgcugauucacca

SEQ ID NO: 2106948 - RNA, 19 nt, Artificial Sequence
  Description of Artificial Sequence: Synthetic oligonucleotide
  Sense strand starting at position 2489 of SEQ ID NO: 1882257
ggugucacucuugggacau

SEQ ID NO: 2106949 - RNA, 19 nt, Artificial Sequence
  Description of Artificial Sequence: Synthetic oligonucleotide
  Antisense strand to SEQ ID NO: 2106948
augucccaagagugacacc

SEQ ID NO: 2106950 - RNA, 19 nt, Artificial Sequence
  Description of Artificial Sequence: Synthetic oligonucleotide
  Sense strand starting at position 2501 of SEQ ID NO: 1882257
gggacauccagauguucug

SEQ ID NO: 2106951 - RNA, 19 nt, Artificial Sequence
  Description of Artificial Sequence: Synthetic oligonucleotide
  Antisense strand to SEQ ID NO: 2106950
cagaacaucuggauguccc

SEQ ID NO: 2106952 - RNA, 19 nt, Artificial Sequence
  Description of Artificial Sequence: Synthetic oligonucleotide
  Sense strand starting at position 2507 of SEQ ID NO: 1882257
uccagauguucugacauuu

SEQ ID NO: 2106953 - RNA, 19 nt, Artificial Sequence
  Description of Artificial Sequence: Synthetic oligonucleotide
  Antisense strand to SEQ ID NO: 2106952
aaaugucagaacaucugga

SEQ ID NO: 2106954 - RNA, 19 nt, Artificial Sequence
  Description of Artificial Sequence: Synthetic oligonucleotide
  Sense strand starting at position 2561 of SEQ ID NO: 1882257
gggccaaggguaugagauu

SEQ ID NO: 2106955 - RNA, 19 nt, Artificial Sequence
  Description of Artificial Sequence: Synthetic oligonucleotide
  Antisense strand to SEQ ID NO: 2106954
aaucucauacccuuggccc

SEQ ID NO: 2106956 - RNA, 19 nt, Artificial Sequence
  Description of Artificial Sequence: Synthetic oligonucleotide
  Sense strand starting at position 2562 of SEQ ID NO: 1882257
ggccaaggguaugagauuu

SEQ ID NO: 2106957 - RNA, 19 nt, Artificial Sequence
  Description of Artificial Sequence: Synthetic oligonucleotide
  Antisense strand to SEQ ID NO: 2106956
aaaucucauacccuuggcc

SEQ ID NO: 2106958 - RNA, 19 nt, Artificial Sequence
  Description of Artificial Sequence: Synthetic oligonucleotide
  Sense strand starting at position 2592 of SEQ ID NO: 1882257
ggcauuggcuacucugaca

SEQ ID NO: 2106959 - RNA, 19 nt, Artificial Sequence
  Description of Artificial Sequence: Synthetic oligonucleotide
  Antisense strand to SEQ ID NO: 2106958
ugucagaguagccaaugcc

SEQ ID NO: 2106960 - RNA, 19 nt, Artificial Sequence
  Description of Artificial Sequence: Synthetic oligonucleotide
  Sense strand starting at position 2613 of SEQ ID NO: 1882257
gagcguggauucccaaaga

SEQ ID NO: 2106961 - RNA, 19 nt, Artificial Sequence
  Description of Artificial Sequence: Synthetic oligonucleotide
  Antisense strand to SEQ ID NO: 2106960
ucuuugggaauccacgcuc

SEQ ID NO: 2106962 - RNA, 19 nt, Artificial Sequence
  Description of Artificial Sequence: Synthetic oligonucleotide
  Sense strand starting at position 2671 of SEQ ID NO: 1882257
aggcgacuuuagccaacua

SEQ ID NO: 2106963 - RNA, 19 nt, Artificial Sequence
  Description of Artificial Sequence: Synthetic oligonucleotide
  Antisense strand to SEQ ID NO: 2106962
uaguuggcuaaagucgccu

SEQ ID NO: 2106964 - RNA, 19 nt, Artificial Sequence
  Description of Artificial Sequence: Synthetic oligonucleotide
  Sense strand starting at position 2871 of SEQ ID NO: 1882257
ggagacucgugauuccgga

SEQ ID NO: 2106965 - RNA, 19 nt, Artificial Sequence
  Description of Artificial Sequence: Synthetic oligonucleotide
  Antisense strand to SEQ ID NO: 2106964
uccggaaucacgagucucc

SEQ ID NO: 2106966 - RNA, 19 nt, Artificial Sequence
  Description of Artificial Sequence: Synthetic oligonucleotide
  Sense strand starting at position 3242 of SEQ ID NO: 1882257
ugcucuguggcuuaagauu

SEQ ID NO: 2106967 - RNA, 19 nt, Artificial Sequence
  Description of Artificial Sequence: Synthetic oligonucleotide
  Antisense strand to SEQ ID NO: 2106966
aaucuuaagccacagagca

SEQ ID NO: 2106968 - RNA, 19 nt, Artificial Sequence
  Description of Artificial Sequence: Synthetic oligonucleotide
  Sense strand starting at position 3253 of SEQ ID NO: 1882257
uuaagauucccaggcuuaa

SEQ ID NO: 2106969 - RNA, 19 nt, Artificial Sequence
  Description of Artificial Sequence: Synthetic oligonucleotide
  Antisense strand to SEQ ID NO: 2106968
uuaagccugggaaucuuaa

SEQ ID NO: 2106970 - RNA, 19 nt, Artificial Sequence
  Description of Artificial Sequence: Synthetic oligonucleotide
  Sense strand starting at position 3274 of SEQ ID NO: 1882257
ccauaacugcuagggucau

SEQ ID NO: 2106971 - RNA, 19 nt, Artificial Sequence
  Description of Artificial Sequence: Synthetic oligonucleotide
  Antisense strand to SEQ ID NO: 2106970
augacccuagcaguuaugg

SEQ ID NO: 2106972 - RNA, 19 nt, Artificial Sequence
  Description of Artificial Sequence: Synthetic oligonucleotide
  Sense strand starting at position 3364 of SEQ ID NO: 1882257
uggagucauuucgaaggac

SEQ ID NO: 2106973 - RNA, 19 nt, Artificial Sequence
  Description of Artificial Sequence: Synthetic oligonucleotide
  Antisense strand to SEQ ID NO: 2106972
guccuucgaaaugacucca

SEQ ID NO: 2106974 - RNA, 19 nt, Artificial Sequence
  Description of Artificial Sequence: Synthetic oligonucleotide
  Sense strand starting at position 3378 of SEQ ID NO: 1882257
aggacagaacuguggcaau

SEQ ID NO: 2106975 - RNA, 19 nt, Artificial Sequence
  Description of Artificial Sequence: Synthetic oligonucleotide
  Antisense strand to SEQ ID NO: 2106974
auugccacaguucuguccu

SEQ ID NO: 2106976 - RNA, 19 nt, Artificial Sequence
  Description of Artificial Sequence: Synthetic oligonucleotide
  Sense strand starting at position 3421 of SEQ ID NO: 1882257
ugagaacagugucuguaua

SEQ ID NO: 2106977 - RNA, 19 nt, Artificial Sequence
  Description of Artificial Sequence: Synthetic oligonucleotide
  Antisense strand to SEQ ID NO: 2106976
uauacagacacuguucuca

SEQ ID NO: 2106978 - RNA, 19 nt, Artificial Sequence
  Description of Artificial Sequence: Synthetic oligonucleotide
  Sense strand starting at position 3422 of SEQ ID NO: 1882257
gagaacagugucuguauau

SEQ ID NO: 2106979 - RNA, 19 nt, Artificial Sequence
  Description of Artificial Sequence: Synthetic oligonucleotide
  Antisense strand to SEQ ID NO: 2106978
auauacagacacuguucuc

SEQ ID NO: 2106980 - RNA, 19 nt, Artificial Sequence
  Description of Artificial Sequence: Synthetic oligonucleotide
  Sense strand starting at position 3423 of SEQ ID NO: 1882257
agaacagugucuguauaug

SEQ ID NO: 2106981 - RNA, 19 nt, Artificial Sequence
  Description of Artificial Sequence: Synthetic oligonucleotide
  Antisense strand to SEQ ID NO: 2106980
cauauacagacacuguucu

SEQ ID NO: 2106982 - RNA, 19 nt, Artificial Sequence
  Description of Artificial Sequence: Synthetic oligonucleotide
  Sense strand starting at position 3517 of SEQ ID NO: 1882257
agggaucucuguucuuuaa

SEQ ID NO: 2106983 - RNA, 19 nt, Artificial Sequence
  Description of Artificial Sequence: Synthetic oligonucleotide
  Antisense strand to SEQ ID NO: 2106982
uuaaagaacagagaucccu

SEQ ID NO: 2106984 - RNA, 19 nt, Artificial Sequence
  Description of Artificial Sequence: Synthetic oligonucleotide
  Sense strand starting at position 3519 of SEQ ID NO: 1882257
ggaucucuguucuuuaaag

SEQ ID NO: 2106985 - RNA, 19 nt, Artificial Sequence
  Description of Artificial Sequence: Synthetic oligonucleotide
  Antisense strand to SEQ ID NO: 2106984
cuuuaaagaacagagaucc

SEQ ID NO: 2106986 - RNA, 19 nt, Artificial Sequence
  Description of Artificial Sequence: Synthetic oligonucleotide
  Sense strand starting at position 3637 of SEQ ID NO: 1882257
cagcaaagucucggcauaa

SEQ ID NO: 2106987 - RNA, 19 nt, Artificial Sequence
  Description of Artificial Sequence: Synthetic oligonucleotide
  Antisense strand to SEQ ID NO: 2106986
uuaugccgagacuuugcug

SEQ ID NO: 2106988 - RNA, 19 nt, Artificial Sequence
  Description of Artificial Sequence: Synthetic oligonucleotide
  Sense strand starting at position 3638 of SEQ ID NO: 1882257
agcaaagucucggcauaag

SEQ ID NO: 2106989 - RNA, 19 nt, Artificial Sequence
  Description of Artificial Sequence: Synthetic oligonucleotide
  Antisense strand to SEQ ID NO: 2106988
cuuaugccgagacuuugcu

SEQ ID NO: 2106990 - RNA, 19 nt, Artificial Sequence
  Description of Artificial Sequence: Synthetic oligonucleotide
  Sense strand starting at position 43 of SEQ ID NO: 1882258
ucugaaguaugacuguaau

SEQ ID NO: 2106991 - RNA, 19 nt, Artificial Sequence
  Description of Artificial Sequence: Synthetic oligonucleotide
  Antisense strand to SEQ ID NO: 2106990
auuacagucauacuucaga

SEQ ID NO: 2106992 - RNA, 19 nt, Artificial Sequence
  Description of Artificial Sequence: Synthetic oligonucleotide
  Sense strand starting at position 162 of SEQ ID NO: 1882258
cuuuguaucccuuguaacu

SEQ ID NO: 2106993 - RNA, 19 nt, Artificial Sequence
  Description of Artificial Sequence: Synthetic oligonucleotide
  Antisense strand to SEQ ID NO: 2106992
aguuacaagggauacaaag

SEQ ID NO: 2106994 - RNA, 19 nt, Artificial Sequence
  Description of Artificial Sequence: Synthetic oligonucleotide
  Sense strand starting at position 286 of SEQ ID NO: 1882258
gcaugugugagccugugua

SEQ ID NO: 2106995 - RNA, 19 nt, Artificial Sequence
  Description of Artificial Sequence: Synthetic oligonucleotide
  Antisense strand to SEQ ID NO: 2106994
uacacaggcucacacaugc

SEQ ID NO: 2106996 - RNA, 19 nt, Artificial Sequence
  Description of Artificial Sequence: Synthetic oligonucleotide
  Sense strand starting at position 513 of SEQ ID NO: 1882258
gggacaucacucugcacua

SEQ ID NO: 2106997 - RNA, 19 nt, Artificial Sequence
  Description of Artificial Sequence: Synthetic oligonucleotide
  Antisense strand to SEQ ID NO: 2106996
uagugcagagugauguccc

SEQ ID NO: 2106998 - RNA, 19 nt, Artificial Sequence
  Description of Artificial Sequence: Synthetic oligonucleotide
  Sense strand starting at position 609 of SEQ ID NO: 1882258
cacaauugguagcuaaagu

SEQ ID NO: 2106999 - RNA, 19 nt, Artificial Sequence
  Description of Artificial Sequence: Synthetic oligonucleotide
  Antisense strand to SEQ ID NO: 2106998
acuuuagcuaccaauugug

SEQ ID NO: 2107000 - RNA, 19 nt, Artificial Sequence
  Description of Artificial Sequence: Synthetic oligonucleotide
  Sense strand starting at position 647 of SEQ ID NO: 1882258
ggccucauguuccucacua

SEQ ID NO: 2107001 - RNA, 19 nt, Artificial Sequence
  Description of Artificial Sequence: Synthetic oligonucleotide
  Antisense strand to SEQ ID NO: 2107000
uagugaggaacaugaggcc

SEQ ID NO: 2107002 - RNA, 19 nt, Artificial Sequence
  Description of Artificial Sequence: Synthetic oligonucleotide
  Sense strand starting at position 666 of SEQ ID NO: 1882258
gcugacuuguucccacuca

SEQ ID NO: 2107003 - RNA, 19 nt, Artificial Sequence
  Description of Artificial Sequence: Synthetic oligonucleotide
  Antisense strand to SEQ ID NO: 2107002
ugagugggaacaagucagc

SEQ ID NO: 2107004 - RNA, 19 nt, Artificial Sequence
  Description of Artificial Sequence: Synthetic oligonucleotide
  Sense strand starting at position 725 of SEQ ID NO: 1882258
gagguacuuucccucuuga

SEQ ID NO: 2107005 - RNA, 19 nt, Artificial Sequence
  Description of Artificial Sequence: Synthetic oligonucleotide
  Antisense strand to SEQ ID NO: 2107004
ucaagagggaaaguaccuc

SEQ ID NO: 2107006 - RNA, 19 nt, Artificial Sequence
  Description of Artificial Sequence: Synthetic oligonucleotide
  Sense strand starting at position 744 of SEQ ID NO: 1882258
cucuuagugcuaggguuau

SEQ ID NO: 2107007 - RNA, 19 nt, Artificial Sequence
  Description of Artificial Sequence: Synthetic oligonucleotide
  Antisense strand to SEQ ID NO: 2107006
auaacccuagcacuaagag

SEQ ID NO: 2107008 - RNA, 19 nt, Artificial Sequence
  Description of Artificial Sequence: Synthetic oligonucleotide
  Sense strand starting at position 754 of SEQ ID NO: 1882258
uaggguuaugcaugacgca

SEQ ID NO: 2107009 - RNA, 19 nt, Artificial Sequence
  Description of Artificial Sequence: Synthetic oligonucleotide
  Antisense strand to SEQ ID NO: 2107008
ugcgucaugcauaacccua

SEQ ID NO: 2107010 - RNA, 19 nt, Artificial Sequence
  Description of Artificial Sequence: Synthetic oligonucleotide
  Sense strand starting at position 755 of SEQ ID NO: 1882258
aggguuaugcaugacgcau

SEQ ID NO: 2107011 - RNA, 19 nt, Artificial Sequence
  Description of Artificial Sequence: Synthetic oligonucleotide
  Antisense strand to SEQ ID NO: 2107010
augcgucaugcauaacccu

SEQ ID NO: 2107012 - RNA, 19 nt, Artificial Sequence
  Description of Artificial Sequence: Synthetic oligonucleotide
  Sense strand starting at position 770 of SEQ ID NO: 1882258
gcauacuugcauugcaaug

SEQ ID NO: 2107013 - RNA, 19 nt, Artificial Sequence
  Description of Artificial Sequence: Synthetic oligonucleotide
  Antisense strand to SEQ ID NO: 2107012
cauugcaaugcaaguaugc

SEQ ID NO: 2107014 - RNA, 19 nt, Artificial Sequence
  Description of Artificial Sequence: Synthetic oligonucleotide
  Sense strand starting at position 2056 of SEQ ID NO: 1882258
cugugugggcccgaucaaa

SEQ ID NO: 2107015 - RNA, 19 nt, Artificial Sequence
  Description of Artificial Sequence: Synthetic oligonucleotide
  Antisense strand to SEQ ID NO: 2107014
uuugaucgggcccacacag

SEQ ID NO: 2107016 - RNA, 19 nt, Artificial Sequence
  Description of Artificial Sequence: Synthetic oligonucleotide
  Sense strand starting at position 2184 of SEQ ID NO: 1882258
gaggauuggauauguugca

SEQ ID NO: 2107017 - RNA, 19 nt, Artificial Sequence
  Description of Artificial Sequence: Synthetic oligonucleotide
  Antisense strand to SEQ ID NO: 2107016
ugcaacauauccaauccuc

SEQ ID NO: 2107018 - RNA, 19 nt, Artificial Sequence
  Description of Artificial Sequence: Synthetic oligonucleotide
  Sense strand starting at position 2191 of SEQ ID NO: 1882258
ggauauguugcaugggaua

SEQ ID NO: 2107019 - RNA, 19 nt, Artificial Sequence
  Description of Artificial Sequence: Synthetic oligonucleotide
  Antisense strand to SEQ ID NO: 2107018
uaucccaugcaacauaucc

SEQ ID NO: 2107020 - RNA, 19 nt, Artificial Sequence
  Description of Artificial Sequence: Synthetic oligonucleotide
  Sense strand starting at position 2286 of SEQ ID NO: 1882258
caguccuaucugcaaggaa

SEQ ID NO: 2107021 - RNA, 19 nt, Artificial Sequence
  Description of Artificial Sequence: Synthetic oligonucleotide
  Antisense strand to SEQ ID NO: 2107020
uuccuugcagauaggacug

SEQ ID NO: 2107022 - RNA, 19 nt, Artificial Sequence
  Description of Artificial Sequence: Synthetic oligonucleotide
  Sense strand starting at position 2322 of SEQ ID NO: 1882258
ccugaaugagcuugacagu

SEQ ID NO: 2107023 - RNA, 19 nt, Artificial Sequence
  Description of Artificial Sequence: Synthetic oligonucleotide
  Antisense strand to SEQ ID NO: 2107022
acugucaagcucauucagg

SEQ ID NO: 2107024 - RNA, 19 nt, Artificial Sequence
  Description of Artificial Sequence: Synthetic oligonucleotide
  Sense strand starting at position 2323 of SEQ ID NO: 1882258
cugaaugagcuugacagua

SEQ ID NO: 2107025 - RNA, 19 nt, Artificial Sequence
  Description of Artificial Sequence: Synthetic oligonucleotide
  Antisense strand to SEQ ID NO: 2107024
uacugucaagcucauucag

SEQ ID NO: 2107026 - RNA, 19 nt, Artificial Sequence
  Description of Artificial Sequence: Synthetic oligonucleotide
  Sense strand starting at position 2420 of SEQ ID NO: 1882258
cacacaugacugugacaug

SEQ ID NO: 2107027 - RNA, 19 nt, Artificial Sequence
  Description of Artificial Sequence: Synthetic oligonucleotide
  Antisense strand to SEQ ID NO: 2107026
caugucacagucaugugug

SEQ ID NO: 2107028 - RNA, 19 nt, Artificial Sequence
  Description of Artificial Sequence: Synthetic oligonucleotide
  Sense strand starting at position 2436 of SEQ ID NO: 1882258
augauaaagagaugcuguu

SEQ ID NO: 2107029 - RNA, 19 nt, Artificial Sequence
  Description of Artificial Sequence: Synthetic oligonucleotide
  Antisense strand to SEQ ID NO: 2107028
aacagcaucucuuuaucau

SEQ ID NO: 2107030 - RNA, 19 nt, Artificial Sequence
  Description of Artificial Sequence: Synthetic oligonucleotide
  Sense strand starting at position 2442 of SEQ ID NO: 1882258
aagagaugcuguuuaaagc

SEQ ID NO: 2107031 - RNA, 19 nt, Artificial Sequence
  Description of Artificial Sequence: Synthetic oligonucleotide
  Antisense strand to SEQ ID NO: 2107030
gcuuuaaacagcaucucuu

SEQ ID NO: 2107032 - RNA, 19 nt, Artificial Sequence
  Description of Artificial Sequence: Synthetic oligonucleotide
  Sense strand starting at position 2586 of SEQ ID NO: 1882258
aucucaugcccuugucaua

SEQ ID NO: 2107033 - RNA, 19 nt, Artificial Sequence
  Description of Artificial Sequence: Synthetic oligonucleotide
  Antisense strand to SEQ ID NO: 2107032
uaugacaagggcaugagau

SEQ ID NO: 2107034 - RNA, 19 nt, Artificial Sequence
  Description of Artificial Sequence: Synthetic oligonucleotide
  Sense strand starting at position 2699 of SEQ ID NO: 1882258
uaaagaguccuaggucuca

SEQ ID NO: 2107035 - RNA, 19 nt, Artificial Sequence
  Description of Artificial Sequence: Synthetic oligonucleotide
  Antisense strand to SEQ ID NO: 2107034
ugagaccuaggacucuuua

SEQ ID NO: 2107036 - RNA, 19 nt, Artificial Sequence
  Description of Artificial Sequence: Synthetic oligonucleotide
  Sense strand starting at position 2712 of SEQ ID NO: 1882258
gucucaucauggccaagaa

SEQ ID NO: 2107037 - RNA, 19 nt, Artificial Sequence
  Description of Artificial Sequence: Synthetic oligonucleotide
  Antisense strand to SEQ ID NO: 2107036
uucuuggccaugaugagac

SEQ ID NO: 2107038 - RNA, 19 nt, Artificial Sequence
  Description of Artificial Sequence: Synthetic oligonucleotide
  Sense strand starting at position 2814 of SEQ ID NO: 1882258
cucugaggauacuuauacu

SEQ ID NO: 2107039 - RNA, 19 nt, Artificial Sequence
  Description of Artificial Sequence: Synthetic oligonucleotide
  Antisense strand to SEQ ID NO: 2107038
aguauaaguauccucagag

SEQ ID NO: 2107040 - RNA, 19 nt, Artificial Sequence
  Description of Artificial Sequence: Synthetic oligonucleotide
  Sense strand starting at position 2817 of SEQ ID NO: 1882258
ugaggauacuuauacuauc

SEQ ID NO: 2107041 - RNA, 19 nt, Artificial Sequence
  Description of Artificial Sequence: Synthetic oligonucleotide
  Antisense strand to SEQ ID NO: 2107040
gauaguauaaguauccuca

SEQ ID NO: 2107042 - RNA, 19 nt, Artificial Sequence
  Description of Artificial Sequence: Synthetic oligonucleotide
  Sense strand starting at position 2854 of SEQ ID NO: 1882258
acguaauaucagugaacca

SEQ ID NO: 2107043 - RNA, 19 nt, Artificial Sequence
  Description of Artificial Sequence: Synthetic oligonucleotide
  Antisense strand to SEQ ID NO: 2107042
ugguucacugauauuacgu

SEQ ID NO: 2107044 - RNA, 19 nt, Artificial Sequence
  Description of Artificial Sequence: Synthetic oligonucleotide
  Sense strand starting at position 2905 of SEQ ID NO: 1882258
gagucugcccuguaguaca

SEQ ID NO: 2107045 - RNA, 19 nt, Artificial Sequence
  Description of Artificial Sequence: Synthetic oligonucleotide
  Antisense strand to SEQ ID NO: 2107044
uguacuacagggcagacuc

SEQ ID NO: 2107046 - RNA, 19 nt, Artificial Sequence
  Description of Artificial Sequence: Synthetic oligonucleotide
  Sense strand starting at position 2910 of SEQ ID NO: 1882258
ugcccuguaguacaucaau

SEQ ID NO: 2107047 - RNA, 19 nt, Artificial Sequence
  Description of Artificial Sequence: Synthetic oligonucleotide
  Antisense strand to SEQ ID NO: 2107046
auugauguacuacagggca

SEQ ID NO: 2107048 - RNA, 19 nt, Artificial Sequence
  Description of Artificial Sequence: Synthetic oligonucleotide
  Sense strand starting at position 3082 of SEQ ID NO: 1882258
ugccauacuuguuuggcaa

SEQ ID NO: 2107049 - RNA, 19 nt, Artificial Sequence
  Description of Artificial Sequence: Synthetic oligonucleotide
  Antisense strand to SEQ ID NO: 2107048
uugccaaacaaguauggca

SEQ ID NO: 2107050 - RNA, 19 nt, Artificial Sequence
  Description of Artificial Sequence: Synthetic oligonucleotide
  Sense strand starting at position 3083 of SEQ ID NO: 1882258
gccauacuuguuuggcaaa

SEQ ID NO: 2107051 - RNA, 19 nt, Artificial Sequence
  Description of Artificial Sequence: Synthetic oligonucleotide
  Antisense strand to SEQ ID NO: 2107050
uuugccaaacaaguauggc

SEQ ID NO: 2107052 - RNA, 19 nt, Artificial Sequence
  Description of Artificial Sequence: Synthetic oligonucleotide
  Sense strand starting at position 3459 of SEQ ID NO: 1882258
ggucuucuaccacauggau

SEQ ID NO: 2107053 - RNA, 19 nt, Artificial Sequence
  Description of Artificial Sequence: Synthetic oligonucleotide
  Antisense strand to SEQ ID NO: 2107052
auccaugugguagaagacc

SEQ ID NO: 2107054 - RNA, 19 nt, Artificial Sequence
  Description of Artificial Sequence: Synthetic oligonucleotide
  Sense strand starting at position 3479 of SEQ ID NO: 1882258
guuguuguggguuaaccuu

SEQ ID NO: 2107055 - RNA, 19 nt, Artificial Sequence
  Description of Artificial Sequence: Synthetic oligonucleotide
  Antisense strand to SEQ ID NO: 2107054
aagguuaacccacaacaac

SEQ ID NO: 2107056 - RNA, 19 nt, Artificial Sequence
  Description of Artificial Sequence: Synthetic oligonucleotide
  Sense strand starting at position 3638 of SEQ ID NO: 1882258
uguggcagucuugagaaug

SEQ ID NO: 2107057 - RNA, 19 nt, Artificial Sequence
  Description of Artificial Sequence: Synthetic oligonucleotide
  Antisense strand to SEQ ID NO: 2107056
cauucucaagacugccaca

SEQ ID NO: 2107058 - RNA, 19 nt, Artificial Sequence
  Description of Artificial Sequence: Synthetic oligonucleotide
  Sense strand starting at position 3643 of SEQ ID NO: 1882258
cagucuugagaaugcacau

SEQ ID NO: 2107059 - RNA, 19 nt, Artificial Sequence
  Description of Artificial Sequence: Synthetic oligonucleotide
  Antisense strand to SEQ ID NO: 2107058
augugcauucucaagacug

SEQ ID NO: 2107060 - RNA, 19 nt, Artificial Sequence
  Description of Artificial Sequence: Synthetic oligonucleotide
  Sense strand starting at position 3703 of SEQ ID NO: 1882258
agcuguugccgccugaaau

SEQ ID NO: 2107061 - RNA, 19 nt, Artificial Sequence
  Description of Artificial Sequence: Synthetic oligonucleotide
  Antisense strand to SEQ ID NO: 2107060
auuucaggcggcaacagcu

SEQ ID NO: 2107062 - RNA, 19 nt, Artificial Sequence
  Description of Artificial Sequence: Synthetic oligonucleotide
  Sense strand starting at position 3716 of SEQ ID NO: 1882258
ugaaaucuauugcuacguu

SEQ ID NO: 2107063 - RNA, 19 nt, Artificial Sequence
  Description of Artificial Sequence: Synthetic oligonucleotide
  Antisense strand to SEQ ID NO: 2107062
aacguagcaauagauuuca

SEQ ID NO: 2107064 - RNA, 19 nt, Artificial Sequence
  Description of Artificial Sequence: Synthetic oligonucleotide
  Sense strand starting at position 3801 of SEQ ID NO: 1882258
acaggauugucucuccuuu

SEQ ID NO: 2107065 - RNA, 19 nt, Artificial Sequence
  Description of Artificial Sequence: Synthetic oligonucleotide
  Antisense strand to SEQ ID NO: 2107064
aaaggagagacaauccugu

SEQ ID NO: 2107066 - RNA, 19 nt, Artificial Sequence
  Description of Artificial Sequence: Synthetic oligonucleotide
  Sense strand starting at position 3803 of SEQ ID NO: 1882258
aggauugucucuccuuuaa

SEQ ID NO: 2107067 - RNA, 19 nt, Artificial Sequence
  Description of Artificial Sequence: Synthetic oligonucleotide
  Antisense strand to SEQ ID NO: 2107066
uuaaaggagagacaauccu

SEQ ID NO: 2107068 - RNA, 19 nt, Artificial Sequence
  Description of Artificial Sequence: Synthetic oligonucleotide
  Sense strand starting at position 3869 of SEQ ID NO: 1882258
cugcacugggucuaggaua

SEQ ID NO: 2107069 - RNA, 19 nt, Artificial Sequence
  Description of Artificial Sequence: Synthetic oligonucleotide
  Antisense strand to SEQ ID NO: 2107068
uauccuagacccagugcag

SEQ ID NO: 2107070 - RNA, 19 nt, Artificial Sequence
  Description of Artificial Sequence: Synthetic oligonucleotide
  Sense strand starting at position 25 of SEQ ID NO: 1882259
cuuugaggcugagauaaac

SEQ ID NO: 2107071 - RNA, 19 nt, Artificial Sequence
  Description of Artificial Sequence: Synthetic oligonucleotide
  Antisense strand to SEQ ID NO: 2107070
guuuaucucagccucaaag

SEQ ID NO: 2107072 - RNA, 19 nt, Artificial Sequence
  Description of Artificial Sequence: Synthetic oligonucleotide
  Sense strand starting at position 80 of SEQ ID NO: 1882259
auccaaauggccugcaaau

SEQ ID NO: 2107073 - RNA, 19 nt, Artificial Sequence
  Description of Artificial Sequence: Synthetic oligonucleotide
  Antisense strand to SEQ ID NO: 2107072
auuugcaggccauuuggau

SEQ ID NO: 2107074 - RNA, 19 nt, Artificial Sequence
  Description of Artificial Sequence: Synthetic oligonucleotide
  Sense strand starting at position 104 of SEQ ID NO: 1882259
aacagucgcucaguugauu

SEQ ID NO: 2107075 - RNA, 19 nt, Artificial Sequence
  Description of Artificial Sequence: Synthetic oligonucleotide
  Antisense strand to SEQ ID NO: 2107074
aaucaacugagcgacuguu

SEQ ID NO: 2107076 - RNA, 19 nt, Artificial Sequence
  Description of Artificial Sequence: Synthetic oligonucleotide
  Sense strand starting at position 112 of SEQ ID NO: 1882259
cucaguugauuagccagaa

SEQ ID NO: 2107077 - RNA, 19 nt, Artificial Sequence
  Description of Artificial Sequence: Synthetic oligonucleotide
  Antisense strand to SEQ ID NO: 2107076
uucuggcuaaucaacugag

SEQ ID NO: 2107078 - RNA, 19 nt, Artificial Sequence
  Description of Artificial Sequence: Synthetic oligonucleotide
  Sense strand starting at position 116 of SEQ ID NO: 1882259
guugauuagccagaacauu

SEQ ID NO: 2107079 - RNA, 19 nt, Artificial Sequence
  Description of Artificial Sequence: Synthetic oligonucleotide
  Antisense strand to SEQ ID NO: 2107078
aauguucuggcuaaucaac

SEQ ID NO: 2107080 - RNA, 19 nt, Artificial Sequence
  Description of Artificial Sequence: Synthetic oligonucleotide
  Sense strand starting at position 129 of SEQ ID NO: 1882259
aacauugaggacuguuaau

SEQ ID NO: 2107081 - RNA, 19 nt, Artificial Sequence
  Description of Artificial Sequence: Synthetic oligonucleotide
  Antisense strand to SEQ ID NO: 2107080
auuaacaguccucaauguu

SEQ ID NO: 2107082 - RNA, 19 nt, Artificial Sequence
  Description of Artificial Sequence: Synthetic oligonucleotide
  Sense strand starting at position 135 of SEQ ID NO: 1882259
gaggacuguuaaugauaca

SEQ ID NO: 2107083 - RNA, 19 nt, Artificial Sequence
  Description of Artificial Sequence: Synthetic oligonucleotide
  Antisense strand to SEQ ID NO: 2107082
uguaucauuaacaguccuc

SEQ ID NO: 2107084 - RNA, 19 nt, Artificial Sequence
  Description of Artificial Sequence: Synthetic oligonucleotide
  Sense strand starting at position 138 of SEQ ID NO: 1882259
gacuguuaaugauacagga

SEQ ID NO: 2107085 - RNA, 19 nt, Artificial Sequence
  Description of Artificial Sequence: Synthetic oligonucleotide
  Antisense strand to SEQ ID NO: 2107084
uccuguaucauuaacaguc

SEQ ID NO: 2107086 - RNA, 19 nt, Artificial Sequence
  Description of Artificial Sequence: Synthetic oligonucleotide
  Sense strand starting at position 189 of SEQ ID NO: 1882259
gccugaaacuguuuccauu

SEQ ID NO: 2107087 - RNA, 19 nt, Artificial Sequence
  Description of Artificial Sequence: Synthetic oligonucleotide
  Antisense strand to SEQ ID NO: 2107086
aauggaaacaguuucaggc

SEQ ID NO: 2107088 - RNA, 19 nt, Artificial Sequence
  Description of Artificial Sequence: Synthetic oligonucleotide
  Sense strand starting at position 197 of SEQ ID NO: 1882259
cuguuuccauuguuuauga

SEQ ID NO: 2107089 - RNA, 19 nt, Artificial Sequence
  Description of Artificial Sequence: Synthetic oligonucleotide
  Antisense strand to SEQ ID NO: 2107088
ucauaaacaauggaaacag

SEQ ID NO: 2107090 - RNA, 19 nt, Artificial Sequence
  Description of Artificial Sequence: Synthetic oligonucleotide
  Sense strand starting at position 198 of SEQ ID NO: 1882259
uguuuccauuguuuaugaa

SEQ ID NO: 2107091 - RNA, 19 nt, Artificial Sequence
  Description of Artificial Sequence: Synthetic oligonucleotide
  Antisense strand to SEQ ID NO: 2107090
uucauaaacaauggaaaca

SEQ ID NO: 2107092 - RNA, 19 nt, Artificial Sequence
  Description of Artificial Sequence: Synthetic oligonucleotide
  Sense strand starting at position 199 of SEQ ID NO: 1882259
guuuccauuguuuaugaaa

SEQ ID NO: 2107093 - RNA, 19 nt, Artificial Sequence
  Description of Artificial Sequence: Synthetic oligonucleotide
  Antisense strand to SEQ ID NO: 2107092
uuucauaaacaauggaaac

SEQ ID NO: 2107094 - RNA, 19 nt, Artificial Sequence
  Description of Artificial Sequence: Synthetic oligonucleotide
  Sense strand starting at position 202 of SEQ ID NO: 1882259
uccauuguuuaugaaagua

SEQ ID NO: 2107095 - RNA, 19 nt, Artificial Sequence
  Description of Artificial Sequence: Synthetic oligonucleotide
  Antisense strand to SEQ ID NO: 2107094
uacuuucauaaacaaugga

SEQ ID NO: 2107096 - RNA, 19 nt, Artificial Sequence
  Description of Artificial Sequence: Synthetic oligonucleotide
  Sense strand starting at position 222 of SEQ ID NO: 1882259
ucugacaauuaugaaugaa

SEQ ID NO: 2107097 - RNA, 19 nt, Artificial Sequence
  Description of Artificial Sequence: Synthetic oligonucleotide
  Antisense strand to SEQ ID NO: 2107096
uucauucauaauugucaga

SEQ ID NO: 2107098 - RNA, 19 nt, Artificial Sequence
  Description of Artificial Sequence: Synthetic oligonucleotide
  Sense strand starting at position 266 of SEQ ID NO: 1882259
aauccaaggugggaaauau

SEQ ID NO: 2107099 - RNA, 19 nt, Artificial Sequence
  Description of Artificial Sequence: Synthetic oligonucleotide
  Antisense strand to SEQ ID NO: 2107098
auauuucccaccuuggauu

SEQ ID NO: 2107100 - RNA, 19 nt, Artificial Sequence
  Description of Artificial Sequence: Synthetic oligonucleotide
  Sense strand starting at position 604 of SEQ ID NO: 1882259
aguccauugaauggaguau

SEQ ID NO: 2107101 - RNA, 19 nt, Artificial Sequence
  Description of Artificial Sequence: Synthetic oligonucleotide
  Antisense strand to SEQ ID NO: 2107100
auacuccauucaauggacu

SEQ ID NO: 2107102 - RNA, 19 nt, Artificial Sequence
  Description of Artificial Sequence: Synthetic oligonucleotide
  Sense strand starting at position 741 of SEQ ID NO: 1882259
agugcaguuguggguuaau

SEQ ID NO: 2107103 - RNA, 19 nt, Artificial Sequence
  Description of Artificial Sequence: Synthetic oligonucleotide
  Antisense strand to SEQ ID NO: 2107102
auuaacccacaacugcacu

SEQ ID NO: 2107104 - RNA, 19 nt, Artificial Sequence
  Description of Artificial Sequence: Synthetic oligonucleotide
  Sense strand starting at position 744 of SEQ ID NO: 1882259
gcaguuguggguuaaucau

SEQ ID NO: 2107105 - RNA, 19 nt, Artificial Sequence
  Description of Artificial Sequence: Synthetic oligonucleotide
  Antisense strand to SEQ ID NO: 2107104
augauuaacccacaacugc

SEQ ID NO: 2107106 - RNA, 19 nt, Artificial Sequence
  Description of Artificial Sequence: Synthetic oligonucleotide
  Sense strand starting at position 866 of SEQ ID NO: 1882259
uuguauuucugguggagaa

SEQ ID NO: 2107107 - RNA, 19 nt, Artificial Sequence
  Description of Artificial Sequence: Synthetic oligonucleotide
  Antisense strand to SEQ ID NO: 2107106
uucuccaccagaaauacaa

SEQ ID NO: 2107108 - RNA, 19 nt, Artificial Sequence
  Description of Artificial Sequence: Synthetic oligonucleotide
  Sense strand starting at position 997 of SEQ ID NO: 1882259
ugccuuuauuucuguaaga

SEQ ID NO: 2107109 - RNA, 19 nt, Artificial Sequence
  Description of Artificial Sequence: Synthetic oligonucleotide
  Antisense strand to SEQ ID NO: 2107108
ucuuacagaaauaaaggca

SEQ ID NO: 2107110 - RNA, 19 nt, Artificial Sequence
  Description of Artificial Sequence: Synthetic oligonucleotide
  Sense strand starting at position 1013 of SEQ ID NO: 1882259
agagauauuucccggccag

SEQ ID NO: 2107111 - RNA, 19 nt, Artificial Sequence
  Description of Artificial Sequence: Synthetic oligonucleotide
  Antisense strand to SEQ ID NO: 2107110
cuggccgggaaauaucucu

SEQ ID NO: 2107112 - RNA, 19 nt, Artificial Sequence
  Description of Artificial Sequence: Synthetic oligonucleotide
  Sense strand starting at position 1349 of SEQ ID NO: 1882259
uaagauuugucccacggca

SEQ ID NO: 2107113 - RNA, 19 nt, Artificial Sequence
  Description of Artificial Sequence: Synthetic oligonucleotide
  Antisense strand to SEQ ID NO: 2107112
ugccgugggacaaaucuua

SEQ ID NO: 2107114 - RNA, 19 nt, Artificial Sequence
  Description of Artificial Sequence: Synthetic oligonucleotide
  Sense strand starting at position 1351 of SEQ ID NO: 1882259
agauuugucccacggcauu

SEQ ID NO: 2107115 - RNA, 19 nt, Artificial Sequence
  Description of Artificial Sequence: Synthetic oligonucleotide
  Antisense strand to SEQ ID NO: 2107114
aaugccgugggacaaaucu

SEQ ID NO: 2107116 - RNA, 19 nt, Artificial Sequence
  Description of Artificial Sequence: Synthetic oligonucleotide
  Sense strand starting at position 1374 of SEQ ID NO: 1882259
ggugauggcaggcagaaau

SEQ ID NO: 2107117 - RNA, 19 nt, Artificial Sequence
  Description of Artificial Sequence: Synthetic oligonucleotide
  Antisense strand to SEQ ID NO: 2107116
auuucugccugccaucacc

SEQ ID NO: 2107118 - RNA, 19 nt, Artificial Sequence
  Description of Artificial Sequence: Synthetic oligonucleotide
  Sense strand starting at position 1777 of SEQ ID NO: 1882259
aaugacaaguguuuacuga

SEQ ID NO: 2107119 - RNA, 19 nt, Artificial Sequence
  Description of Artificial Sequence: Synthetic oligonucleotide
  Antisense strand to SEQ ID NO: 2107118
ucaguaaacacuugucauu

SEQ ID NO: 2107120 - RNA, 19 nt, Artificial Sequence
  Description of Artificial Sequence: Synthetic oligonucleotide
  Sense strand starting at position 1778 of SEQ ID NO: 1882259
augacaaguguuuacugau

SEQ ID NO: 2107121 - RNA, 19 nt, Artificial Sequence
  Description of Artificial Sequence: Synthetic oligonucleotide
  Antisense strand to SEQ ID NO: 2107120
aucaguaaacacuugucau

SEQ ID NO: 2107122 - RNA, 19 nt, Artificial Sequence
  Description of Artificial Sequence: Synthetic oligonucleotide
  Sense strand starting at position 1781 of SEQ ID NO: 1882259
acaaguguuuacugauaua

SEQ ID NO: 2107123 - RNA, 19 nt, Artificial Sequence
  Description of Artificial Sequence: Synthetic oligonucleotide
  Antisense strand to SEQ ID NO: 2107122
uauaucaguaaacacuugu

SEQ ID NO: 2107124 - RNA, 19 nt, Artificial Sequence
  Description of Artificial Sequence: Synthetic oligonucleotide
  Sense strand starting at position 2097 of SEQ ID NO: 1882259
ggcaguucugauggaaacu

SEQ ID NO: 2107125 - RNA, 19 nt, Artificial Sequence
  Description of Artificial Sequence: Synthetic oligonucleotide
  Antisense strand to SEQ ID NO: 2107124
aguuuccaucagaacugcc

SEQ ID NO: 2107126 - RNA, 19 nt, Artificial Sequence
  Description of Artificial Sequence: Synthetic oligonucleotide
  Sense strand starting at position 2098 of SEQ ID NO: 1882259
gcaguucugauggaaacug

SEQ ID NO: 2107127 - RNA, 19 nt, Artificial Sequence
  Description of Artificial Sequence: Synthetic oligonucleotide
  Antisense strand to SEQ ID NO: 2107126
caguuuccaucagaacugc

SEQ ID NO: 2107128 - RNA, 19 nt, Artificial Sequence
  Description of Artificial Sequence: Synthetic oligonucleotide
  Sense strand starting at position 2175 of SEQ ID NO: 1882259
ccgcccuuucagugaggau

SEQ ID NO: 2107129 - RNA, 19 nt, Artificial Sequence
  Description of Artificial Sequence: Synthetic oligonucleotide
  Antisense strand to SEQ ID NO: 2107128
auccucacugaaagggcgg

SEQ ID NO: 2107130 - RNA, 19 nt, Artificial Sequence
  Description of Artificial Sequence: Synthetic oligonucleotide
  Sense strand starting at position 2220 of SEQ ID NO: 1882259
ccaucaaagucugcaguga

SEQ ID NO: 2107131 - RNA, 19 nt, Artificial Sequence
  Description of Artificial Sequence: Synthetic oligonucleotide
  Antisense strand to SEQ ID NO: 2107130
ucacugcagacuuugaugg

SEQ ID NO: 2107132 - RNA, 19 nt, Artificial Sequence
  Description of Artificial Sequence: Synthetic oligonucleotide
  Sense strand starting at position 2726 of SEQ ID NO: 1882259
gggaggacguguugaagaa

SEQ ID NO: 2107133 - RNA, 19 nt, Artificial Sequence
  Description of Artificial Sequence: Synthetic oligonucleotide
  Antisense strand to SEQ ID NO: 2107132
uucuucaacacguccuccc

SEQ ID NO: 2107134 - RNA, 19 nt, Artificial Sequence
  Description of Artificial Sequence: Synthetic oligonucleotide
  Sense strand starting at position 2752 of SEQ ID NO: 1882259
aagagcuagcgcuaugguu

SEQ ID NO: 2107135 - RNA, 19 nt, Artificial Sequence
  Description of Artificial Sequence: Synthetic oligonucleotide
  Antisense strand to SEQ ID NO: 2107134
aaccauagcgcuagcucuu

SEQ ID NO: 2107136 - RNA, 19 nt, Artificial Sequence
  Description of Artificial Sequence: Synthetic oligonucleotide
  Sense strand starting at position 2917 of SEQ ID NO: 1882259
uucuguaauuaagcaaguu

SEQ ID NO: 2107137 - RNA, 19 nt, Artificial Sequence
  Description of Artificial Sequence: Synthetic oligonucleotide
  Antisense strand to SEQ ID NO: 2107136
aacuugcuuaauuacagaa

SEQ ID NO: 2107138 - RNA, 19 nt, Artificial Sequence
  Description of Artificial Sequence: Synthetic oligonucleotide
  Sense strand starting at position 3121 of SEQ ID NO: 1882259
agagcuuugcggucagugu

SEQ ID NO: 2107139 - RNA, 19 nt, Artificial Sequence
  Description of Artificial Sequence: Synthetic oligonucleotide
  Antisense strand to SEQ ID NO: 2107138
acacugaccgcaaagcucu

SEQ ID NO: 2107140 - RNA, 19 nt, Artificial Sequence
  Description of Artificial Sequence: Synthetic oligonucleotide
  Sense strand starting at position 3122 of SEQ ID NO: 1882259
gagcuuugcggucaguguu

SEQ ID NO: 2107141 - RNA, 19 nt, Artificial Sequence
  Description of Artificial Sequence: Synthetic oligonucleotide
  Antisense strand to SEQ ID NO: 2107140
aacacugaccgcaaagcuc

SEQ ID NO: 2107142 - RNA, 19 nt, Artificial Sequence
  Description of Artificial Sequence: Synthetic oligonucleotide
  Sense strand starting at position 3125 of SEQ ID NO: 1882259
cuuugcggucaguguuaua

SEQ ID NO: 2107143 - RNA, 19 nt, Artificial Sequence
  Description of Artificial Sequence: Synthetic oligonucleotide
  Antisense strand to SEQ ID NO: 2107142
uauaacacugaccgcaaag

SEQ ID NO: 2107144 - RNA, 19 nt, Artificial Sequence
  Description of Artificial Sequence: Synthetic oligonucleotide
  Sense strand starting at position 3306 of SEQ ID NO: 1882259
agaacaaagcuuuagcagu

SEQ ID NO: 2107145 - RNA, 19 nt, Artificial Sequence
  Description of Artificial Sequence: Synthetic oligonucleotide
  Antisense strand to SEQ ID NO: 2107144
acugcuaaagcuuuguucu

SEQ ID NO: 2107146 - RNA, 19 nt, Artificial Sequence
  Description of Artificial Sequence: Synthetic oligonucleotide
  Sense strand starting at position 3312 of SEQ ID NO: 1882259
aagcuuuagcaguguggaa

SEQ ID NO: 2107147 - RNA, 19 nt, Artificial Sequence
  Description of Artificial Sequence: Synthetic oligonucleotide
  Antisense strand to SEQ ID NO: 2107146
uuccacacugcuaaagcuu

SEQ ID NO: 2107148 - RNA, 19 nt, Artificial Sequence
  Description of Artificial Sequence: Synthetic oligonucleotide
  Sense strand starting at position 3314 of SEQ ID NO: 1882259
gcuuuagcaguguggaaga

SEQ ID NO: 2107149 - RNA, 19 nt, Artificial Sequence
  Description of Artificial Sequence: Synthetic oligonucleotide
  Antisense strand to SEQ ID NO: 2107148
ucuuccacacugcuaaagc

SEQ ID NO: 2107150 - RNA, 19 nt, Artificial Sequence
  Description of Artificial Sequence: Synthetic oligonucleotide
  Sense strand starting at position 198 of SEQ ID NO: 1882260
agugcuugccacugugaga

SEQ ID NO: 2107151 - RNA, 19 nt, Artificial Sequence
  Description of Artificial Sequence: Synthetic oligonucleotide
  Antisense strand to SEQ ID NO: 2107150
ucucacaguggcaagcacu

SEQ ID NO: 2107152 - RNA, 19 nt, Artificial Sequence
  Description of Artificial Sequence: Synthetic oligonucleotide
  Sense strand starting at position 205 of SEQ ID NO: 1882260
gccacugugagaugaauaa

SEQ ID NO: 2107153 - RNA, 19 nt, Artificial Sequence
  Description of Artificial Sequence: Synthetic oligonucleotide
  Antisense strand to SEQ ID NO: 2107152
uuauucaucucacaguggc

SEQ ID NO: 2107154 - RNA, 19 nt, Artificial Sequence
  Description of Artificial Sequence: Synthetic oligonucleotide
  Sense strand starting at position 386 of SEQ ID NO: 1882260
ggagcuuugugauuccugu

SEQ ID NO: 2107155 - RNA, 19 nt, Artificial Sequence
  Description of Artificial Sequence: Synthetic oligonucleotide
  Antisense strand to SEQ ID NO: 2107154
acaggaaucacaaagcucc

SEQ ID NO: 2107156 - RNA, 19 nt, Artificial Sequence
  Description of Artificial Sequence: Synthetic oligonucleotide
  Sense strand starting at position 421 of SEQ ID NO: 1882260
acauuuauaugucaaggga

SEQ ID NO: 2107157 - RNA, 19 nt, Artificial Sequence
  Description of Artificial Sequence: Synthetic oligonucleotide
  Antisense strand to SEQ ID NO: 2107156
ucccuugacauauaaaugu

SEQ ID NO: 2107158 - RNA, 19 nt, Artificial Sequence
  Description of Artificial Sequence: Synthetic oligonucleotide
  Sense strand starting at position 424 of SEQ ID NO: 1882260
uuuauaugucaagggacca

SEQ ID NO: 2107159 - RNA, 19 nt, Artificial Sequence
  Description of Artificial Sequence: Synthetic oligonucleotide
  Antisense strand to SEQ ID NO: 2107158
uggucccuugacauauaaa

SEQ ID NO: 2107160 - RNA, 19 nt, Artificial Sequence
  Description of Artificial Sequence: Synthetic oligonucleotide
  Sense strand starting at position 462 of SEQ ID NO: 1882260
uuagauuccugaucauuag

SEQ ID NO: 2107161 - RNA, 19 nt, Artificial Sequence
  Description of Artificial Sequence: Synthetic oligonucleotide
  Antisense strand to SEQ ID NO: 2107160
cuaaugaucaggaaucuaa

SEQ ID NO: 2107162 - RNA, 19 nt, Artificial Sequence
  Description of Artificial Sequence: Synthetic oligonucleotide
  Sense strand starting at position 1621 of SEQ ID NO: 1882260
cagagugaggccugugagu

SEQ ID NO: 2107163 - RNA, 19 nt, Artificial Sequence
  Description of Artificial Sequence: Synthetic oligonucleotide
  Antisense strand to SEQ ID NO: 2107162
acucacaggccucacucug

SEQ ID NO: 2107164 - RNA, 19 nt, Artificial Sequence
  Description of Artificial Sequence: Synthetic oligonucleotide
  Sense strand starting at position 1623 of SEQ ID NO: 1882260
gagugaggccugugaguga

SEQ ID NO: 2107165 - RNA, 19 nt, Artificial Sequence
  Description of Artificial Sequence: Synthetic oligonucleotide
  Antisense strand to SEQ ID NO: 2107164
ucacucacaggccucacuc

SEQ ID NO: 2107166 - RNA, 19 nt, Artificial Sequence
  Description of Artificial Sequence: Synthetic oligonucleotide
  Sense strand starting at position 1774 of SEQ ID NO: 1882260
agccguuacccgguuucau

SEQ ID NO: 2107167 - RNA, 19 nt, Artificial Sequence
  Description of Artificial Sequence: Synthetic oligonucleotide
  Antisense strand to SEQ ID NO: 2107166
augaaaccggguaacggcu

SEQ ID NO: 2107168 - RNA, 19 nt, Artificial Sequence
  Description of Artificial Sequence: Synthetic oligonucleotide
  Sense strand starting at position 1775 of SEQ ID NO: 1882260
gccguuacccgguuucauu

SEQ ID NO: 2107169 - RNA, 19 nt, Artificial Sequence
  Description of Artificial Sequence: Synthetic oligonucleotide
  Antisense strand to SEQ ID NO: 2107168
aaugaaaccggguaacggc

SEQ ID NO: 2107170 - RNA, 19 nt, Artificial Sequence
  Description of Artificial Sequence: Synthetic oligonucleotide
  Sense strand starting at position 2156 of SEQ ID NO: 1882260
gagccacuggcucagaauu

SEQ ID NO: 2107171 - RNA, 19 nt, Artificial Sequence
  Description of Artificial Sequence: Synthetic oligonucleotide
  Antisense strand to SEQ ID NO: 2107170
aauucugagccaguggcuc

SEQ ID NO: 2107172 - RNA, 19 nt, Artificial Sequence
  Description of Artificial Sequence: Synthetic oligonucleotide
  Sense strand starting at position 2196 of SEQ ID NO: 1882260
ggacacaccucagaggaaa

SEQ ID NO: 2107173 - RNA, 19 nt, Artificial Sequence
  Description of Artificial Sequence: Synthetic oligonucleotide
  Antisense strand to SEQ ID NO: 2107172
uuuccucugaggugugucc

SEQ ID NO: 2107174 - RNA, 19 nt, Artificial Sequence
  Description of Artificial Sequence: Synthetic oligonucleotide
  Sense strand starting at position 2216 of SEQ ID NO: 1882260
gggaugaagcgugguccau

SEQ ID NO: 2107175 - RNA, 19 nt, Artificial Sequence
  Description of Artificial Sequence: Synthetic oligonucleotide
  Antisense strand to SEQ ID NO: 2107174
auggaccacgcuucauccc

SEQ ID NO: 2107176 - RNA, 19 nt, Artificial Sequence
  Description of Artificial Sequence: Synthetic oligonucleotide
  Sense strand starting at position 2222 of SEQ ID NO: 1882260
aagcgugguccaugaccau

SEQ ID NO: 2107177 - RNA, 19 nt, Artificial Sequence
  Description of Artificial Sequence: Synthetic oligonucleotide
  Antisense strand to SEQ ID NO: 2107176
auggucauggaccacgcuu

SEQ ID NO: 2107178 - RNA, 19 nt, Artificial Sequence
  Description of Artificial Sequence: Synthetic oligonucleotide
  Sense strand starting at position 2295 of SEQ ID NO: 1882260
gagucauggacaggucucu

SEQ ID NO: 2107179 - RNA, 19 nt, Artificial Sequence
  Description of Artificial Sequence: Synthetic oligonucleotide
  Antisense strand to SEQ ID NO: 2107178
agagaccuguccaugacuc

SEQ ID NO: 2107180 - RNA, 19 nt, Artificial Sequence
  Description of Artificial Sequence: Synthetic oligonucleotide
  Sense strand starting at position 2300 of SEQ ID NO: 1882260
auggacaggucucuacaga

SEQ ID NO: 2107181 - RNA, 19 nt, Artificial Sequence
  Description of Artificial Sequence: Synthetic oligonucleotide
  Antisense strand to SEQ ID NO: 2107180
ucuguagagaccuguccau

SEQ ID NO: 2107182 - RNA, 19 nt, Artificial Sequence
  Description of Artificial Sequence: Synthetic oligonucleotide
  Sense strand starting at position 2380 of SEQ ID NO: 1882260
ggugcauguauugaaucaa

SEQ ID NO: 2107183 - RNA, 19 nt, Artificial Sequence
  Description of Artificial Sequence: Synthetic oligonucleotide
  Antisense strand to SEQ ID NO: 2107182
uugauucaauacaugcacc

SEQ ID NO: 2107184 - RNA, 19 nt, Artificial Sequence
  Description of Artificial Sequence: Synthetic oligonucleotide
  Sense strand starting at position 2396 of SEQ ID NO: 1882260
caaagaugucucuauagug

SEQ ID NO: 2107185 - RNA, 19 nt, Artificial Sequence
  Description of Artificial Sequence: Synthetic oligonucleotide
  Antisense strand to SEQ ID NO: 2107184
cacuauagagacaucuuug

SEQ ID NO: 2107186 - RNA, 19 nt, Artificial Sequence
  Description of Artificial Sequence: Synthetic oligonucleotide
  Sense strand starting at position 2410 of SEQ ID NO: 1882260
uagugcuguguuuacagaa

SEQ ID NO: 2107187 - RNA, 19 nt, Artificial Sequence
  Description of Artificial Sequence: Synthetic oligonucleotide
  Antisense strand to SEQ ID NO: 2107186
uucuguaaacacagcacua

SEQ ID NO: 2107188 - RNA, 19 nt, Artificial Sequence
  Description of Artificial Sequence: Synthetic oligonucleotide
  Sense strand starting at position 2430 of SEQ ID NO: 1882260
gaagaauacguggguccaa

SEQ ID NO: 2107189 - RNA, 19 nt, Artificial Sequence
  Description of Artificial Sequence: Synthetic oligonucleotide
  Antisense strand to SEQ ID NO: 2107188
uuggacccacguauucuuc

SEQ ID NO: 2107190 - RNA, 19 nt, Artificial Sequence
  Description of Artificial Sequence: Synthetic oligonucleotide
  Sense strand starting at position 2431 of SEQ ID NO: 1882260
aagaauacguggguccaaa

SEQ ID NO: 2107191 - RNA, 19 nt, Artificial Sequence
  Description of Artificial Sequence: Synthetic oligonucleotide
  Antisense strand to SEQ ID NO: 2107190
uuuggacccacguauucuu

SEQ ID NO: 2107192 - RNA, 19 nt, Artificial Sequence
  Description of Artificial Sequence: Synthetic oligonucleotide
  Sense strand starting at position 2593 of SEQ ID NO: 1882260
acauuuaaaugagagucca

SEQ ID NO: 2107193 - RNA, 19 nt, Artificial Sequence
  Description of Artificial Sequence: Synthetic oligonucleotide
  Antisense strand to SEQ ID NO: 2107192
uggacucucauuuaaaugu

SEQ ID NO: 2107194 - RNA, 19 nt, Artificial Sequence
  Description of Artificial Sequence: Synthetic oligonucleotide
  Sense strand starting at position 2647 of SEQ ID NO: 1882260
ugaauaguauguguccaga

SEQ ID NO: 2107195 - RNA, 19 nt, Artificial Sequence
  Description of Artificial Sequence: Synthetic oligonucleotide
  Antisense strand to SEQ ID NO: 2107194
ucuggacacauacuauuca

SEQ ID NO: 2107196 - RNA, 19 nt, Artificial Sequence
  Description of Artificial Sequence: Synthetic oligonucleotide
  Sense strand starting at position 2649 of SEQ ID NO: 1882260
aauaguauguguccagaua

SEQ ID NO: 2107197 - RNA, 19 nt, Artificial Sequence
  Description of Artificial Sequence: Synthetic oligonucleotide
  Antisense strand to SEQ ID NO: 2107196
uaucuggacacauacuauu

SEQ ID NO: 2107198 - RNA, 19 nt, Artificial Sequence
  Description of Artificial Sequence: Synthetic oligonucleotide
  Sense strand starting at position 2650 of SEQ ID NO: 1882260
auaguauguguccagauac

SEQ ID NO: 2107199 - RNA, 19 nt, Artificial Sequence
  Description of Artificial Sequence: Synthetic oligonucleotide
  Antisense strand to SEQ ID NO: 2107198
guaucuggacacauacuau

SEQ ID NO: 2107200 - RNA, 19 nt, Artificial Sequence
  Description of Artificial Sequence: Synthetic oligonucleotide
  Sense strand starting at position 2862 of SEQ ID NO: 1882260
uugagugauacucacaggu

SEQ ID NO: 2107201 - RNA, 19 nt, Artificial Sequence
  Description of Artificial Sequence: Synthetic oligonucleotide
  Antisense strand to SEQ ID NO: 2107200
accugugaguaucacucaa

SEQ ID NO: 2107202 - RNA, 19 nt, Artificial Sequence
  Description of Artificial Sequence: Synthetic oligonucleotide
  Sense strand starting at position 2866 of SEQ ID NO: 1882260
gugauacucacagguaaug

SEQ ID NO: 2107203 - RNA, 19 nt, Artificial Sequence
  Description of Artificial Sequence: Synthetic oligonucleotide
  Antisense strand to SEQ ID NO: 2107202
cauuaccugugaguaucac

SEQ ID NO: 2107204 - RNA, 19 nt, Artificial Sequence
  Description of Artificial Sequence: Synthetic oligonucleotide
  Sense strand starting at position 2993 of SEQ ID NO: 1882260
aagccauuccugggagaca

SEQ ID NO: 2107205 - RNA, 19 nt, Artificial Sequence
  Description of Artificial Sequence: Synthetic oligonucleotide
  Antisense strand to SEQ ID NO: 2107204
ugucucccaggaauggcuu

SEQ ID NO: 2107206 - RNA, 19 nt, Artificial Sequence
  Description of Artificial Sequence: Synthetic oligonucleotide
  Sense strand starting at position 3028 of SEQ ID NO: 1882260
gcuaacuguagcuggaaga

SEQ ID NO: 2107207 - RNA, 19 nt, Artificial Sequence
  Description of Artificial Sequence: Synthetic oligonucleotide
  Antisense strand to SEQ ID NO: 2107206
ucuuccagcuacaguuagc

SEQ ID NO: 2107208 - RNA, 19 nt, Artificial Sequence
  Description of Artificial Sequence: Synthetic oligonucleotide
  Sense strand starting at position 3074 of SEQ ID NO: 1882260
uuagauugccugugcucua

SEQ ID NO: 2107209 - RNA, 19 nt, Artificial Sequence
  Description of Artificial Sequence: Synthetic oligonucleotide
  Antisense strand to SEQ ID NO: 2107208
uagagcacaggcaaucuaa

SEQ ID NO: 2107210 - RNA, 19 nt, Artificial Sequence
  Description of Artificial Sequence: Synthetic oligonucleotide
  Sense strand starting at position 3086 of SEQ ID NO: 1882260
ugcucuaggaugcgucaaa

SEQ ID NO: 2107211 - RNA, 19 nt, Artificial Sequence
  Description of Artificial Sequence: Synthetic oligonucleotide
  Antisense strand to SEQ ID NO: 2107210
uuugacgcauccuagagca

SEQ ID NO: 2107212 - RNA, 19 nt, Artificial Sequence
  Description of Artificial Sequence: Synthetic oligonucleotide
  Sense strand starting at position 3093 of SEQ ID NO: 1882260
ggaugcgucaaacaaacuu

SEQ ID NO: 2107213 - RNA, 19 nt, Artificial Sequence
  Description of Artificial Sequence: Synthetic oligonucleotide
  Antisense strand to SEQ ID NO: 2107212
aaguuuguuugacgcaucc

SEQ ID NO: 2107214 - RNA, 19 nt, Artificial Sequence
  Description of Artificial Sequence: Synthetic oligonucleotide
  Sense strand starting at position 3250 of SEQ ID NO: 1882260
gcaucugcuccuugaagga

SEQ ID NO: 2107215 - RNA, 19 nt, Artificial Sequence
  Description of Artificial Sequence: Synthetic oligonucleotide
  Antisense strand to SEQ ID NO: 2107214
uccuucaaggagcagaugc

SEQ ID NO: 2107216 - RNA, 19 nt, Artificial Sequence
  Description of Artificial Sequence: Synthetic oligonucleotide
  Sense strand starting at position 3379 of SEQ ID NO: 1882260
uguguaguaucucuuugag

SEQ ID NO: 2107217 - RNA, 19 nt, Artificial Sequence
  Description of Artificial Sequence: Synthetic oligonucleotide
  Antisense strand to SEQ ID NO: 2107216
cucaaagagauacuacaca

SEQ ID NO: 2107218 - RNA, 19 nt, Artificial Sequence
  Description of Artificial Sequence: Synthetic oligonucleotide
  Sense strand starting at position 3381 of SEQ ID NO: 1882260
uguaguaucucuuugaguu

SEQ ID NO: 2107219 - RNA, 19 nt, Artificial Sequence
  Description of Artificial Sequence: Synthetic oligonucleotide
  Antisense strand to SEQ ID NO: 2107218
aacucaaagagauacuaca

SEQ ID NO: 2107220 - RNA, 19 nt, Artificial Sequence
  Description of Artificial Sequence: Synthetic oligonucleotide
  Sense strand starting at position 3382 of SEQ ID NO: 1882260
guaguaucucuuugaguua

SEQ ID NO: 2107221 - RNA, 19 nt, Artificial Sequence
  Description of Artificial Sequence: Synthetic oligonucleotide
  Antisense strand to SEQ ID NO: 2107220
uaacucaaagagauacuac

SEQ ID NO: 2107222 - RNA, 19 nt, Artificial Sequence
  Description of Artificial Sequence: Synthetic oligonucleotide
  Sense strand starting at position 3385 of SEQ ID NO: 1882260
guaucucuuugaguuaaca

SEQ ID NO: 2107223 - RNA, 19 nt, Artificial Sequence
  Description of Artificial Sequence: Synthetic oligonucleotide
  Antisense strand to SEQ ID NO: 2107222
uguuaacucaaagagauac

SEQ ID NO: 2107224 - RNA, 19 nt, Artificial Sequence
  Description of Artificial Sequence: Synthetic oligonucleotide
  Sense strand starting at position 3791 of SEQ ID NO: 1882260
ugccuagggugauucuaua

SEQ ID NO: 2107225 - RNA, 19 nt, Artificial Sequence
  Description of Artificial Sequence: Synthetic oligonucleotide
  Antisense strand to SEQ ID NO: 2107224
uauagaaucacccuaggca

SEQ ID NO: 2107226 - RNA, 19 nt, Artificial Sequence
  Description of Artificial Sequence: Synthetic oligonucleotide
  Sense strand starting at position 3898 of SEQ ID NO: 1882260
gguacaagcacuugagaaa

SEQ ID NO: 2107227 - RNA, 19 nt, Artificial Sequence
  Description of Artificial Sequence: Synthetic oligonucleotide
  Antisense strand to SEQ ID NO: 2107226
uuucucaagugcuuguacc

SEQ ID NO: 2107228 - RNA, 19 nt, Artificial Sequence
  Description of Artificial Sequence: Synthetic oligonucleotide
  Sense strand starting at position 3901 of SEQ ID NO: 1882260
acaagcacuugagaaauca

SEQ ID NO: 2107229 - RNA, 19 nt, Artificial Sequence
  Description of Artificial Sequence: Synthetic oligonucleotide
  Antisense strand to SEQ ID NO: 2107228
ugauuucucaagugcuugu

SEQ ID NO: 2107230 - RNA, 19 nt, Artificial Sequence
  Description of Artificial Sequence: Synthetic oligonucleotide
  Sense strand starting at position 167 of SEQ ID NO: 1882261
ccacuuagacgugaauacu

SEQ ID NO: 2107231 - RNA, 19 nt, Artificial Sequence
  Description of Artificial Sequence: Synthetic oligonucleotide
  Antisense strand to SEQ ID NO: 2107230
aguauucacgucuaagugg

SEQ ID NO: 2107232 - RNA, 19 nt, Artificial Sequence
  Description of Artificial Sequence: Synthetic oligonucleotide
  Sense strand starting at position 173 of SEQ ID NO: 1882261
agacgugaauacuuccuaa

SEQ ID NO: 2107233 - RNA, 19 nt, Artificial Sequence
  Description of Artificial Sequence: Synthetic oligonucleotide
  Antisense strand to SEQ ID NO: 2107232
uuaggaaguauucacgucu

SEQ ID NO: 2107234 - RNA, 19 nt, Artificial Sequence
  Description of Artificial Sequence: Synthetic oligonucleotide
  Sense strand starting at position 246 of SEQ ID NO: 1882261
gcaacugugaggugaauaa

SEQ ID NO: 2107235 - RNA, 19 nt, Artificial Sequence
  Description of Artificial Sequence: Synthetic oligonucleotide
  Antisense strand to SEQ ID NO: 2107234
uuauucaccucacaguugc

SEQ ID NO: 2107236 - RNA, 19 nt, Artificial Sequence
  Description of Artificial Sequence: Synthetic oligonucleotide
  Sense strand starting at position 257 of SEQ ID NO: 1882261
gugaauaaagucuguacug

SEQ ID NO: 2107237 - RNA, 19 nt, Artificial Sequence
  Description of Artificial Sequence: Synthetic oligonucleotide
  Antisense strand to SEQ ID NO: 2107236
caguacagacuuuauucac

SEQ ID NO: 2107238 - RNA, 19 nt, Artificial Sequence
  Description of Artificial Sequence: Synthetic oligonucleotide
  Sense strand starting at position 280 of SEQ ID NO: 1882261
ccgguugcaacauauagua

SEQ ID NO: 2107239 - RNA, 19 nt, Artificial Sequence
  Description of Artificial Sequence: Synthetic oligonucleotide
  Antisense strand to SEQ ID NO: 2107238
uacuauauguugcaaccgg

SEQ ID NO: 2107240 - RNA, 19 nt, Artificial Sequence
  Description of Artificial Sequence: Synthetic oligonucleotide
  Sense strand starting at position 293 of SEQ ID NO: 1882261
auaguaacgcagugugcua

SEQ ID NO: 2107241 - RNA, 19 nt, Artificial Sequence
  Description of Artificial Sequence: Synthetic oligonucleotide
  Antisense strand to SEQ ID NO: 2107240
uagcacacugcguuacuau

SEQ ID NO: 2107242 - RNA, 19 nt, Artificial Sequence
  Description of Artificial Sequence: Synthetic oligonucleotide
  Sense strand starting at position 300 of SEQ ID NO: 1882261
cgcagugugcuacuuuaua

SEQ ID NO: 2107243 - RNA, 19 nt, Artificial Sequence
  Description of Artificial Sequence: Synthetic oligonucleotide
  Antisense strand to SEQ ID NO: 2107242
uauaaaguagcacacugcg

SEQ ID NO: 2107244 - RNA, 19 nt, Artificial Sequence
  Description of Artificial Sequence: Synthetic oligonucleotide
  Sense strand starting at position 395 of SEQ ID NO: 1882261
acagauacauugucugcga

SEQ ID NO: 2107245 - RNA, 19 nt, Artificial Sequence
  Description of Artificial Sequence: Synthetic oligonucleotide
  Antisense strand to SEQ ID NO: 2107244
ucgcagacaauguaucugu

SEQ ID NO: 2107246 - RNA, 19 nt, Artificial Sequence
  Description of Artificial Sequence: Synthetic oligonucleotide
  Sense strand starting at position 396 of SEQ ID NO: 1882261
cagauacauugucugcgaa

SEQ ID NO: 2107247 - RNA, 19 nt, Artificial Sequence
  Description of Artificial Sequence: Synthetic oligonucleotide
  Antisense strand to SEQ ID NO: 2107246
uucgcagacaauguaucug

SEQ ID NO: 2107248 - RNA, 19 nt, Artificial Sequence
  Description of Artificial Sequence: Synthetic oligonucleotide
  Sense strand starting at position 397 of SEQ ID NO: 1882261
agauacauugucugcgaaa

SEQ ID NO: 2107249 - RNA, 19 nt, Artificial Sequence
  Description of Artificial Sequence: Synthetic oligonucleotide
  Antisense strand to SEQ ID NO: 2107248
uuucgcagacaauguaucu

SEQ ID NO: 2107250 - RNA, 19 nt, Artificial Sequence
  Description of Artificial Sequence: Synthetic oligonucleotide
  Sense strand starting at position 398 of SEQ ID NO: 1882261
gauacauugucugcgaaag

SEQ ID NO: 2107251 - RNA, 19 nt, Artificial Sequence
  Description of Artificial Sequence: Synthetic oligonucleotide
  Antisense strand to SEQ ID NO: 2107250
cuuucgcagacaauguauc

SEQ ID NO: 2107252 - RNA, 19 nt, Artificial Sequence
  Description of Artificial Sequence: Synthetic oligonucleotide
  Sense strand starting at position 399 of SEQ ID NO: 1882261
auacauugucugcgaaagu

SEQ ID NO: 2107253 - RNA, 19 nt, Artificial Sequence
  Description of Artificial Sequence: Synthetic oligonucleotide
  Antisense strand to SEQ ID NO: 2107252
acuuucgcagacaauguau

SEQ ID NO: 2107254 - RNA, 19 nt, Artificial Sequence
  Description of Artificial Sequence: Synthetic oligonucleotide
  Sense strand starting at position 499 of SEQ ID NO: 1882261
ccgauuagauaccugauca

SEQ ID NO: 2107255 - RNA, 19 nt, Artificial Sequence
  Description of Artificial Sequence: Synthetic oligonucleotide
  Antisense strand to SEQ ID NO: 2107254
ugaucagguaucuaaucgg

SEQ ID NO: 2107256 - RNA, 19 nt, Artificial Sequence
  Description of Artificial Sequence: Synthetic oligonucleotide
  Sense strand starting at position 1322 of SEQ ID NO: 1882261
gcgggauccggagggaaau

SEQ ID NO: 2107257 - RNA, 19 nt, Artificial Sequence
  Description of Artificial Sequence: Synthetic oligonucleotide
  Antisense strand to SEQ ID NO: 2107256
auuucccuccggaucccgc

SEQ ID NO: 2107258 - RNA, 19 nt, Artificial Sequence
  Description of Artificial Sequence: Synthetic oligonucleotide
  Sense strand starting at position 1445 of SEQ ID NO: 1882261
guacccacuccauaaggua

SEQ ID NO: 2107259 - RNA, 19 nt, Artificial Sequence
  Description of Artificial Sequence: Synthetic oligonucleotide
  Antisense strand to SEQ ID NO: 2107258
uaccuuauggaguggguac

SEQ ID NO: 2107260 - RNA, 19 nt, Artificial Sequence
  Description of Artificial Sequence: Synthetic oligonucleotide
  Sense strand starting at position 1562 of SEQ ID NO: 1882261
cggcgacuccgaggaugua

SEQ ID NO: 2107261 - RNA, 19 nt, Artificial Sequence
  Description of Artificial Sequence: Synthetic oligonucleotide
  Antisense strand to SEQ ID NO: 2107260
uacauccucggagucgccg

SEQ ID NO: 2107262 - RNA, 19 nt, Artificial Sequence
  Description of Artificial Sequence: Synthetic oligonucleotide
  Sense strand starting at position 1702 of SEQ ID NO: 1882261
cagagcuaggccggugaau

SEQ ID NO: 2107263 - RNA, 19 nt, Artificial Sequence
  Description of Artificial Sequence: Synthetic oligonucleotide
  Antisense strand to SEQ ID NO: 2107262
auucaccggccuagcucug

SEQ ID NO: 2107264 - RNA, 19 nt, Artificial Sequence
  Description of Artificial Sequence: Synthetic oligonucleotide
  Sense strand starting at position 1704 of SEQ ID NO: 1882261
gagcuaggccggugaauga

SEQ ID NO: 2107265 - RNA, 19 nt, Artificial Sequence
  Description of Artificial Sequence: Synthetic oligonucleotide
  Antisense strand to SEQ ID NO: 2107264
ucauucaccggccuagcuc

SEQ ID NO: 2107266 - RNA, 19 nt, Artificial Sequence
  Description of Artificial Sequence: Synthetic oligonucleotide
  Sense strand starting at position 2056 of SEQ ID NO: 1882261
auuacauagcccggaacua

SEQ ID NO: 2107267 - RNA, 19 nt, Artificial Sequence
  Description of Artificial Sequence: Synthetic oligonucleotide
  Antisense strand to SEQ ID NO: 2107266
uaguuccgggcuauguaau

SEQ ID NO: 2107268 - RNA, 19 nt, Artificial Sequence
  Description of Artificial Sequence: Synthetic oligonucleotide
  Sense strand starting at position 2412 of SEQ ID NO: 1882261
ugcccugcucucugauaca

SEQ ID NO: 2107269 - RNA, 19 nt, Artificial Sequence
  Description of Artificial Sequence: Synthetic oligonucleotide
  Antisense strand to SEQ ID NO: 2107268
uguaucagagagcagggca

SEQ ID NO: 2107270 - RNA, 19 nt, Artificial Sequence
  Description of Artificial Sequence: Synthetic oligonucleotide
  Sense strand starting at position 2438 of SEQ ID NO: 1882261
gaugaaaucucugaggaaa

SEQ ID NO: 2107271 - RNA, 19 nt, Artificial Sequence
  Description of Artificial Sequence: Synthetic oligonucleotide
  Antisense strand to SEQ ID NO: 2107270
uuuccucagagauuucauc

SEQ ID NO: 2107272 - RNA, 19 nt, Artificial Sequence
  Description of Artificial Sequence: Synthetic oligonucleotide
  Sense strand starting at position 2440 of SEQ ID NO: 1882261
ugaaaucucugaggaaaug

SEQ ID NO: 2107273 - RNA, 19 nt, Artificial Sequence
  Description of Artificial Sequence: Synthetic oligonucleotide
  Antisense strand to SEQ ID NO: 2107272
cauuuccucagagauuuca

SEQ ID NO: 2107274 - RNA, 19 nt, Artificial Sequence
  Description of Artificial Sequence: Synthetic oligonucleotide
  Sense strand starting at position 2673 of SEQ ID NO: 1882261
uucggagauuaucccagau

SEQ ID NO: 2107275 - RNA, 19 nt, Artificial Sequence
  Description of Artificial Sequence: Synthetic oligonucleotide
  Antisense strand to SEQ ID NO: 2107274
aucugggauaaucuccgaa

SEQ ID NO: 2107276 - RNA, 19 nt, Artificial Sequence
  Description of Artificial Sequence: Synthetic oligonucleotide
  Sense strand starting at position 2675 of SEQ ID NO: 1882261
cggagauuaucccagauac

SEQ ID NO: 2107277 - RNA, 19 nt, Artificial Sequence
  Description of Artificial Sequence: Synthetic oligonucleotide
  Antisense strand to SEQ ID NO: 2107276
guaucugggauaaucuccg

SEQ ID NO: 2107278 - RNA, 19 nt, Artificial Sequence
  Description of Artificial Sequence: Synthetic oligonucleotide
  Sense strand starting at position 2786 of SEQ ID NO: 1882261
ugucucaugagagaugcaa

SEQ ID NO: 2107279 - RNA, 19 nt, Artificial Sequence
  Description of Artificial Sequence: Synthetic oligonucleotide
  Antisense strand to SEQ ID NO: 2107278
uugcaucucucaugagaca

SEQ ID NO: 2107280 - RNA, 19 nt, Artificial Sequence
  Description of Artificial Sequence: Synthetic oligonucleotide
  Sense strand starting at position 2788 of SEQ ID NO: 1882261
ucucaugagagaugcaaag

SEQ ID NO: 2107281 - RNA, 19 nt, Artificial Sequence
  Description of Artificial Sequence: Synthetic oligonucleotide
  Antisense strand to SEQ ID NO: 2107280
cuuugcaucucucaugaga

SEQ ID NO: 2107282 - RNA, 19 nt, Artificial Sequence
  Description of Artificial Sequence: Synthetic oligonucleotide
  Sense strand starting at position 2798 of SEQ ID NO: 1882261
gaugcaaagugccugaauu

SEQ ID NO: 2107283 - RNA, 19 nt, Artificial Sequence
  Description of Artificial Sequence: Synthetic oligonucleotide
  Antisense strand to SEQ ID NO: 2107282
aauucaggcacuuugcauc

SEQ ID NO: 2107284 - RNA, 19 nt, Artificial Sequence
  Description of Artificial Sequence: Synthetic oligonucleotide
  Sense strand starting at position 2862 of SEQ ID NO: 1882261
accauuccgucucugacua

SEQ ID NO: 2107285 - RNA, 19 nt, Artificial Sequence
  Description of Artificial Sequence: Synthetic oligonucleotide
  Antisense strand to SEQ ID NO: 2107284
uagucagagacggaauggu

SEQ ID NO: 2107286 - RNA, 19 nt, Artificial Sequence
  Description of Artificial Sequence: Synthetic oligonucleotide
  Sense strand starting at position 3140 of SEQ ID NO: 1882261
ggucaugucucuuaggaaa

SEQ ID NO: 2107287 - RNA, 19 nt, Artificial Sequence
  Description of Artificial Sequence: Synthetic oligonucleotide
  Antisense strand to SEQ ID NO: 2107286
uuuccuaagagacaugacc

SEQ ID NO: 2107288 - RNA, 19 nt, Artificial Sequence
  Description of Artificial Sequence: Synthetic oligonucleotide
  Sense strand starting at position 3143 of SEQ ID NO: 1882261
caugucucuuaggaaagca

SEQ ID NO: 2107289 - RNA, 19 nt, Artificial Sequence
  Description of Artificial Sequence: Synthetic oligonucleotide
  Antisense strand to SEQ ID NO: 2107288
ugcuuuccuaagagacaug

SEQ ID NO: 2107290 - RNA, 19 nt, Artificial Sequence
  Description of Artificial Sequence: Synthetic oligonucleotide
  Sense strand starting at position 3162 of SEQ ID NO: 1882261
ggagccucucuggagaacu

SEQ ID NO: 2107291 - RNA, 19 nt, Artificial Sequence
  Description of Artificial Sequence: Synthetic oligonucleotide
  Antisense strand to SEQ ID NO: 2107290
aguucuccagagaggcucc

SEQ ID NO: 2107292 - RNA, 19 nt, Artificial Sequence
  Description of Artificial Sequence: Synthetic oligonucleotide
  Sense strand starting at position 3322 of SEQ ID NO: 1882261
gugguuucugcugugaugu

SEQ ID NO: 2107293 - RNA, 19 nt, Artificial Sequence
  Description of Artificial Sequence: Synthetic oligonucleotide
  Antisense strand to SEQ ID NO: 2107292
acaucacagcagaaaccac

SEQ ID NO: 2107294 - RNA, 19 nt, Artificial Sequence
  Description of Artificial Sequence: Synthetic oligonucleotide
  Sense strand starting at position 3547 of SEQ ID NO: 1882261
ucaccuugaugauuaugau

SEQ ID NO: 2107295 - RNA, 19 nt, Artificial Sequence
  Description of Artificial Sequence: Synthetic oligonucleotide
  Antisense strand to SEQ ID NO: 2107294
aucauaaucaucaagguga

SEQ ID NO: 2107296 - RNA, 19 nt, Artificial Sequence
  Description of Artificial Sequence: Synthetic oligonucleotide
  Sense strand starting at position 3550 of SEQ ID NO: 1882261
ccuugaugauuaugaugau

SEQ ID NO: 2107297 - RNA, 19 nt, Artificial Sequence
  Description of Artificial Sequence: Synthetic oligonucleotide
  Antisense strand to SEQ ID NO: 2107296
aucaucauaaucaucaagg

SEQ ID NO: 2107298 - RNA, 19 nt, Artificial Sequence
  Description of Artificial Sequence: Synthetic oligonucleotide
  Sense strand starting at position 3673 of SEQ ID NO: 1882261
uccugauccuguccuagau

SEQ ID NO: 2107299 - RNA, 19 nt, Artificial Sequence
  Description of Artificial Sequence: Synthetic oligonucleotide
  Antisense strand to SEQ ID NO: 2107298
aucuaggacaggaucagga

SEQ ID NO: 2107300 - RNA, 19 nt, Artificial Sequence
  Description of Artificial Sequence: Synthetic oligonucleotide
  Sense strand starting at position 3675 of SEQ ID NO: 1882261
cugauccuguccuagauca

SEQ ID NO: 2107301 - RNA, 19 nt, Artificial Sequence
  Description of Artificial Sequence: Synthetic oligonucleotide
  Antisense strand to SEQ ID NO: 2107300
ugaucuaggacaggaucag

SEQ ID NO: 2107302 - RNA, 19 nt, Artificial Sequence
  Description of Artificial Sequence: Synthetic oligonucleotide
  Sense strand starting at position 3820 of SEQ ID NO: 1882261
ugaagcugcaaguaaguau

SEQ ID NO: 2107303 - RNA, 19 nt, Artificial Sequence
  Description of Artificial Sequence: Synthetic oligonucleotide
  Antisense strand to SEQ ID NO: 2107302
auacuuacuugcagcuuca

SEQ ID NO: 2107304 - RNA, 19 nt, Artificial Sequence
  Description of Artificial Sequence: Synthetic oligonucleotide
  Sense strand starting at position 3849 of SEQ ID NO: 1882261
gaucccugauccuugggau

SEQ ID NO: 2107305 - RNA, 19 nt, Artificial Sequence
  Description of Artificial Sequence: Synthetic oligonucleotide
  Antisense strand to SEQ ID NO: 2107304
aucccaaggaucagggauc

SEQ ID NO: 2107306 - RNA, 19 nt, Artificial Sequence
  Description of Artificial Sequence: Synthetic oligonucleotide
  Sense strand starting at position 3850 of SEQ ID NO: 1882261
aucccugauccuugggaua

SEQ ID NO: 2107307 - RNA, 19 nt, Artificial Sequence
  Description of Artificial Sequence: Synthetic oligonucleotide
  Antisense strand to SEQ ID NO: 2107306
uaucccaaggaucagggau

SEQ ID NO: 2107308 - RNA, 19 nt, Artificial Sequence
  Description of Artificial Sequence: Synthetic oligonucleotide
  Sense strand starting at position 3863 of SEQ ID NO: 1882261
gggauauuguggucgggag

SEQ ID NO: 2107309 - RNA, 19 nt, Artificial Sequence
  Description of Artificial Sequence: Synthetic oligonucleotide
  Antisense strand to SEQ ID NO: 2107308
cucccgaccacaauauccc

SEQ ID NO: 2107310 - RNA, 19 nt, Artificial Sequence
  Description of Artificial Sequence: Synthetic oligonucleotide
  Sense strand starting at position 71 of SEQ ID NO: 1882262
gaaguuguggucugcuauu

SEQ ID NO: 2107311 - RNA, 19 nt, Artificial Sequence
  Description of Artificial Sequence: Synthetic oligonucleotide
  Antisense strand to SEQ ID NO: 2107310
aauagcagaccacaacuuc

SEQ ID NO: 2107312 - RNA, 19 nt, Artificial Sequence
  Description of Artificial Sequence: Synthetic oligonucleotide
  Sense strand starting at position 78 of SEQ ID NO: 1882262
uggucugcuauugguuaua

SEQ ID NO: 2107313 - RNA, 19 nt, Artificial Sequence
  Description of Artificial Sequence: Synthetic oligonucleotide
  Antisense strand to SEQ ID NO: 2107312
uauaaccaauagcagacca

SEQ ID NO: 2107314 - RNA, 19 nt, Artificial Sequence
  Description of Artificial Sequence: Synthetic oligonucleotide
  Sense strand starting at position 80 of SEQ ID NO: 1882262
gucugcuauugguuauaau

SEQ ID NO: 2107315 - RNA, 19 nt, Artificial Sequence
  Description of Artificial Sequence: Synthetic oligonucleotide
  Antisense strand to SEQ ID NO: 2107314
auuauaaccaauagcagac

SEQ ID NO: 2107316 - RNA, 19 nt, Artificial Sequence
  Description of Artificial Sequence: Synthetic oligonucleotide
  Sense strand starting at position 81 of SEQ ID NO: 1882262
ucugcuauugguuauaaua

SEQ ID NO: 2107317 - RNA, 19 nt, Artificial Sequence
  Description of Artificial Sequence: Synthetic oligonucleotide
  Antisense strand to SEQ ID NO: 2107316
uauuauaaccaauagcaga

SEQ ID NO: 2107318 - RNA, 19 nt, Artificial Sequence
  Description of Artificial Sequence: Synthetic oligonucleotide
  Sense strand starting at position 101 of SEQ ID NO: 1882262
gucacagaucauuaugcuu

SEQ ID NO: 2107319 - RNA, 19 nt, Artificial Sequence
  Description of Artificial Sequence: Synthetic oligonucleotide
  Antisense strand to SEQ ID NO: 2107318
aagcauaaugaucugugac

SEQ ID NO: 2107320 - RNA, 19 nt, Artificial Sequence
  Description of Artificial Sequence: Synthetic oligonucleotide
  Sense strand starting at position 145 of SEQ ID NO: 1882262
gagaauguguaauuaggac

SEQ ID NO: 2107321 - RNA, 19 nt, Artificial Sequence
  Description of Artificial Sequence: Synthetic oligonucleotide
  Antisense strand to SEQ ID NO: 2107320
guccuaauuacacauucuc

SEQ ID NO: 2107322 - RNA, 19 nt, Artificial Sequence
  Description of Artificial Sequence: Synthetic oligonucleotide
  Sense strand starting at position 157 of SEQ ID NO: 1882262
uuaggacacuuagaagacu

SEQ ID NO: 2107323 - RNA, 19 nt, Artificial Sequence
  Description of Artificial Sequence: Synthetic oligonucleotide
  Antisense strand to SEQ ID NO: 2107322
agucuucuaaguguccuaa

SEQ ID NO: 2107324 - RNA, 19 nt, Artificial Sequence
  Description of Artificial Sequence: Synthetic oligonucleotide
  Sense strand starting at position 241 of SEQ ID NO: 1882262
gagauaauauuagaaggca

SEQ ID NO: 2107325 - RNA, 19 nt, Artificial Sequence
  Description of Artificial Sequence: Synthetic oligonucleotide
  Antisense strand to SEQ ID NO: 2107324
ugccuucuaauauuaucuc

SEQ ID NO: 2107326 - RNA, 19 nt, Artificial Sequence
  Description of Artificial Sequence: Synthetic oligonucleotide
  Sense strand starting at position 290 of SEQ ID NO: 1882262
ugaggucaauaauuacauu

SEQ ID NO: 2107327 - RNA, 19 nt, Artificial Sequence
  Description of Artificial Sequence: Synthetic oligonucleotide
  Antisense strand to SEQ ID NO: 2107326
aauguaauuauugaccuca

SEQ ID NO: 2107328 - RNA, 19 nt, Artificial Sequence
  Description of Artificial Sequence: Synthetic oligonucleotide
  Sense strand starting at position 379 of SEQ ID NO: 1882262
aaauaaucaugggcuguuu

SEQ ID NO: 2107329 - RNA, 19 nt, Artificial Sequence
  Description of Artificial Sequence: Synthetic oligonucleotide
  Antisense strand to SEQ ID NO: 2107328
aaacagcccaugauuauuu

SEQ ID NO: 2107330 - RNA, 19 nt, Artificial Sequence
  Description of Artificial Sequence: Synthetic oligonucleotide
  Sense strand starting at position 511 of SEQ ID NO: 1882262
ggauaugagucuccugaga

SEQ ID NO: 2107331 - RNA, 19 nt, Artificial Sequence
  Description of Artificial Sequence: Synthetic oligonucleotide
  Antisense strand to SEQ ID NO: 2107330
ucucaggagacucauaucc

SEQ ID NO: 2107332 - RNA, 19 nt, Artificial Sequence
  Description of Artificial Sequence: Synthetic oligonucleotide
  Sense strand starting at position 612 of SEQ ID NO: 1882262
gugauaucauaccuuacug

SEQ ID NO: 2107333 - RNA, 19 nt, Artificial Sequence
  Description of Artificial Sequence: Synthetic oligonucleotide
  Antisense strand to SEQ ID NO: 2107332
caguaagguaugauaucac

SEQ ID NO: 2107334 - RNA, 19 nt, Artificial Sequence
  Description of Artificial Sequence: Synthetic oligonucleotide
  Sense strand starting at position 1187 of SEQ ID NO: 1882262
ucaagugucaggugggaaa

SEQ ID NO: 2107335 - RNA, 19 nt, Artificial Sequence
  Description of Artificial Sequence: Synthetic oligonucleotide
  Antisense strand to SEQ ID NO: 2107334
uuucccaccugacacuuga

SEQ ID NO: 2107336 - RNA, 19 nt, Artificial Sequence
  Description of Artificial Sequence: Synthetic oligonucleotide
  Sense strand starting at position 1400 of SEQ ID NO: 1882262
agguaaaugcuguaauguc

SEQ ID NO: 2107337 - RNA, 19 nt, Artificial Sequence
  Description of Artificial Sequence: Synthetic oligonucleotide
  Antisense strand to SEQ ID NO: 2107336
gacauuacagcauuuaccu

SEQ ID NO: 2107338 - RNA, 19 nt, Artificial Sequence
  Description of Artificial Sequence: Synthetic oligonucleotide
  Sense strand starting at position 1457 of SEQ ID NO: 1882262
ggagaagugucaguaagac

SEQ ID NO: 2107339 - RNA, 19 nt, Artificial Sequence
  Description of Artificial Sequence: Synthetic oligonucleotide
  Antisense strand to SEQ ID NO: 2107338
gucuuacugacacuucucc

SEQ ID NO: 2107340 - RNA, 19 nt, Artificial Sequence
  Description of Artificial Sequence: Synthetic oligonucleotide
  Sense strand starting at position 1965 of SEQ ID NO: 1882262
cuaugacacugcgugaaga

SEQ ID NO: 2107341 - RNA, 19 nt, Artificial Sequence
  Description of Artificial Sequence: Synthetic oligonucleotide
  Antisense strand to SEQ ID NO: 2107340
ucuucacgcagugucauag

SEQ ID NO: 2107342 - RNA, 19 nt, Artificial Sequence
  Description of Artificial Sequence: Synthetic oligonucleotide
  Sense strand starting at position 1966 of SEQ ID NO: 1882262
uaugacacugcgugaagaa

SEQ ID NO: 2107343 - RNA, 19 nt, Artificial Sequence
  Description of Artificial Sequence: Synthetic oligonucleotide
  Antisense strand to SEQ ID NO: 2107342
uucuucacgcagugucaua

SEQ ID NO: 2107344 - RNA, 19 nt, Artificial Sequence
  Description of Artificial Sequence: Synthetic oligonucleotide
  Sense strand starting at position 1975 of SEQ ID NO: 1882262
gcgugaagaagugauguua

SEQ ID NO: 2107345 - RNA, 19 nt, Artificial Sequence
  Description of Artificial Sequence: Synthetic oligonucleotide
  Antisense strand to SEQ ID NO: 2107344
uaacaucacuucuucacgc

SEQ ID NO: 2107346 - RNA, 19 nt, Artificial Sequence
  Description of Artificial Sequence: Synthetic oligonucleotide
  Sense strand starting at position 2153 of SEQ ID NO: 1882262
uagcgaagugcugagaaga

SEQ ID NO: 2107347 - RNA, 19 nt, Artificial Sequence
  Description of Artificial Sequence: Synthetic oligonucleotide
  Antisense strand to SEQ ID NO: 2107346
ucuucucagcacuucgcua

SEQ ID NO: 2107348 - RNA, 19 nt, Artificial Sequence
  Description of Artificial Sequence: Synthetic oligonucleotide
  Sense strand starting at position 2329 of SEQ ID NO: 1882262
aaucuuggcccaggugaaa

SEQ ID NO: 2107349 - RNA, 19 nt, Artificial Sequence
  Description of Artificial Sequence: Synthetic oligonucleotide
  Antisense strand to SEQ ID NO: 2107348
uuucaccugggccaagauu

SEQ ID NO: 2107350 - RNA, 19 nt, Artificial Sequence
  Description of Artificial Sequence: Synthetic oligonucleotide
  Sense strand starting at position 2340 of SEQ ID NO: 1882262
aggugaaaucauugaagcu

SEQ ID NO: 2107351 - RNA, 19 nt, Artificial Sequence
  Description of Artificial Sequence: Synthetic oligonucleotide
  Antisense strand to SEQ ID NO: 2107350
agcuucaaugauuucaccu

SEQ ID NO: 2107352 - RNA, 19 nt, Artificial Sequence
  Description of Artificial Sequence: Synthetic oligonucleotide
  Sense strand starting at position 2365 of SEQ ID NO: 1882262
cuuugugagaccuguaguu

SEQ ID NO: 2107353 - RNA, 19 nt, Artificial Sequence
  Description of Artificial Sequence: Synthetic oligonucleotide
  Antisense strand to SEQ ID NO: 2107352
aacuacaggucucacaaag

SEQ ID NO: 2107354 - RNA, 19 nt, Artificial Sequence
  Description of Artificial Sequence: Synthetic oligonucleotide
  Sense strand starting at position 2367 of SEQ ID NO: 1882262
uugugagaccuguaguuag

SEQ ID NO: 2107355 - RNA, 19 nt, Artificial Sequence
  Description of Artificial Sequence: Synthetic oligonucleotide
  Antisense strand to SEQ ID NO: 2107354
cuaacuacaggucucacaa

SEQ ID NO: 2107356 - RNA, 19 nt, Artificial Sequence
  Description of Artificial Sequence: Synthetic oligonucleotide
  Sense strand starting at position 2370 of SEQ ID NO: 1882262
ugagaccuguaguuagaga

SEQ ID NO: 2107357 - RNA, 19 nt, Artificial Sequence
  Description of Artificial Sequence: Synthetic oligonucleotide
  Antisense strand to SEQ ID NO: 2107356
ucucuaacuacaggucuca

SEQ ID NO: 2107358 - RNA, 19 nt, Artificial Sequence
  Description of Artificial Sequence: Synthetic oligonucleotide
  Sense strand starting at position 2430 of SEQ ID NO: 1882262
aucauauuguguucuucuu

SEQ ID NO: 2107359 - RNA, 19 nt, Artificial Sequence
  Description of Artificial Sequence: Synthetic oligonucleotide
  Antisense strand to SEQ ID NO: 2107358
aagaagaacacaauaugau

SEQ ID NO: 2107360 - RNA, 19 nt, Artificial Sequence
  Description of Artificial Sequence: Synthetic oligonucleotide
  Sense strand starting at position 2498 of SEQ ID NO: 1882262
gaggccauuuccgugcaaa

SEQ ID NO: 2107361 - RNA, 19 nt, Artificial Sequence
  Description of Artificial Sequence: Synthetic oligonucleotide
  Antisense strand to SEQ ID NO: 2107360
uuugcacggaaauggccuc

SEQ ID NO: 2107362 - RNA, 19 nt, Artificial Sequence
  Description of Artificial Sequence: Synthetic oligonucleotide
  Sense strand starting at position 2520 of SEQ ID NO: 1882262
auagaaucuccugggauuc

SEQ ID NO: 2107363 - RNA, 19 nt, Artificial Sequence
  Description of Artificial Sequence: Synthetic oligonucleotide
  Antisense strand to SEQ ID NO: 2107362
gaaucccaggagauucuau

SEQ ID NO: 2107364 - RNA, 19 nt, Artificial Sequence
  Description of Artificial Sequence: Synthetic oligonucleotide
  Sense strand starting at position 2620 of SEQ ID NO: 1882262
ucugucuaagcagaauauu

SEQ ID NO: 2107365 - RNA, 19 nt, Artificial Sequence
  Description of Artificial Sequence: Synthetic oligonucleotide
  Antisense strand to SEQ ID NO: 2107364
aauauucugcuuagacaga

SEQ ID NO: 2107366 - RNA, 19 nt, Artificial Sequence
  Description of Artificial Sequence: Synthetic oligonucleotide
  Sense strand starting at position 2670 of SEQ ID NO: 1882262
cugguuaugugagcuauca

SEQ ID NO: 2107367 - RNA, 19 nt, Artificial Sequence
  Description of Artificial Sequence: Synthetic oligonucleotide
  Antisense strand to SEQ ID NO: 2107366
ugauagcucacauaaccag

SEQ ID NO: 2107368 - RNA, 19 nt, Artificial Sequence
  Description of Artificial Sequence: Synthetic oligonucleotide
  Sense strand starting at position 2672 of SEQ ID NO: 1882262
gguuaugugagcuaucacc

SEQ ID NO: 2107369 - RNA, 19 nt, Artificial Sequence
  Description of Artificial Sequence: Synthetic oligonucleotide
  Antisense strand to SEQ ID NO: 2107368
ggugauagcucacauaacc

SEQ ID NO: 2107370 - RNA, 19 nt, Artificial Sequence
  Description of Artificial Sequence: Synthetic oligonucleotide
  Sense strand starting at position 2699 of SEQ ID NO: 1882262
uggcucucuuaagcaauaa

SEQ ID NO: 2107371 - RNA, 19 nt, Artificial Sequence
  Description of Artificial Sequence: Synthetic oligonucleotide
  Antisense strand to SEQ ID NO: 2107370
uuauugcuuaagagagcca

SEQ ID NO: 2107372 - RNA, 19 nt, Artificial Sequence
  Description of Artificial Sequence: Synthetic oligonucleotide
  Sense strand starting at position 2739 of SEQ ID NO: 1882262
cagaauuuguagcaaggua

SEQ ID NO: 2107373 - RNA, 19 nt, Artificial Sequence
  Description of Artificial Sequence: Synthetic oligonucleotide
  Antisense strand to SEQ ID NO: 2107372
uaccuugcuacaaauucug

SEQ ID NO: 2107374 - RNA, 19 nt, Artificial Sequence
  Description of Artificial Sequence: Synthetic oligonucleotide
  Sense strand starting at position 2886 of SEQ ID NO: 1882262
uucuguugagucugucagu

SEQ ID NO: 2107375 - RNA, 19 nt, Artificial Sequence
  Description of Artificial Sequence: Synthetic oligonucleotide
  Antisense strand to SEQ ID NO: 2107374
acugacagacucaacagaa

SEQ ID NO: 2107376 - RNA, 19 nt, Artificial Sequence
  Description of Artificial Sequence: Synthetic oligonucleotide
  Sense strand starting at position 2891 of SEQ ID NO: 1882262
uugagucugucagugaaag

SEQ ID NO: 2107377 - RNA, 19 nt, Artificial Sequence
  Description of Artificial Sequence: Synthetic oligonucleotide
  Antisense strand to SEQ ID NO: 2107376
cuuucacugacagacucaa

SEQ ID NO: 2107378 - RNA, 19 nt, Artificial Sequence
  Description of Artificial Sequence: Synthetic oligonucleotide
  Sense strand starting at position 2965 of SEQ ID NO: 1882262
uguauuaaugcucacugca

SEQ ID NO: 2107379 - RNA, 19 nt, Artificial Sequence
  Description of Artificial Sequence: Synthetic oligonucleotide
  Antisense strand to SEQ ID NO: 2107378
ugcagugagcauuaauaca

SEQ ID NO: 2107380 - RNA, 19 nt, Artificial Sequence
  Description of Artificial Sequence: Synthetic oligonucleotide
  Sense strand starting at position 3194 of SEQ ID NO: 1882262
ggacauuagaauugguagu

SEQ ID NO: 2107381 - RNA, 19 nt, Artificial Sequence
  Description of Artificial Sequence: Synthetic oligonucleotide
  Antisense strand to SEQ ID NO: 2107380
acuaccaauucuaaugucc

SEQ ID NO: 2107382 - RNA, 19 nt, Artificial Sequence
  Description of Artificial Sequence: Synthetic oligonucleotide
  Sense strand starting at position 3222 of SEQ ID NO: 1882262
gcuggugaccaauaguaca

SEQ ID NO: 2107383 - RNA, 19 nt, Artificial Sequence
  Description of Artificial Sequence: Synthetic oligonucleotide
  Antisense strand to SEQ ID NO: 2107382
uguacuauuggucaccagc

SEQ ID NO: 2107384 - RNA, 19 nt, Artificial Sequence
  Description of Artificial Sequence: Synthetic oligonucleotide
  Sense strand starting at position 3345 of SEQ ID NO: 1882262
ggaaauauuugccaaucac

SEQ ID NO: 2107385 - RNA, 19 nt, Artificial Sequence
  Description of Artificial Sequence: Synthetic oligonucleotide
  Antisense strand to SEQ ID NO: 2107384
gugauuggcaaauauuucc

SEQ ID NO: 2107386 - RNA, 19 nt, Artificial Sequence
  Description of Artificial Sequence: Synthetic oligonucleotide
  Sense strand starting at position 3851 of SEQ ID NO: 1882262
ggccaaguguuggugaaga

SEQ ID NO: 2107387 - RNA, 19 nt, Artificial Sequence
  Description of Artificial Sequence: Synthetic oligonucleotide
  Antisense strand to SEQ ID NO: 2107386
ucuucaccaacacuuggcc

SEQ ID NO: 2107388 - RNA, 19 nt, Artificial Sequence
  Description of Artificial Sequence: Synthetic oligonucleotide
  Sense strand starting at position 3904 of SEQ ID NO: 1882262
gagaguauacaguggugca

SEQ ID NO: 2107389 - RNA, 19 nt, Artificial Sequence
  Description of Artificial Sequence: Synthetic oligonucleotide
  Antisense strand to SEQ ID NO: 2107388
ugcaccacuguauacucuc

SEQ ID NO: 2107390 - RNA, 19 nt, Artificial Sequence
  Description of Artificial Sequence: Synthetic oligonucleotide
  Sense strand starting at position 288 of SEQ ID NO: 1882263
guuucuauaucaguaaaca

SEQ ID NO: 2107391 - RNA, 19 nt, Artificial Sequence
  Description of Artificial Sequence: Synthetic oligonucleotide
  Antisense strand to SEQ ID NO: 2107390
uguuuacugauauagaaac

SEQ ID NO: 2107392 - RNA, 19 nt, Artificial Sequence
  Description of Artificial Sequence: Synthetic oligonucleotide
  Sense strand starting at position 409 of SEQ ID NO: 1882263
ccgcguccugaguuacaca

SEQ ID NO: 2107393 - RNA, 19 nt, Artificial Sequence
  Description of Artificial Sequence: Synthetic oligonucleotide
  Antisense strand to SEQ ID NO: 2107392
uguguaacucaggacgcgg

SEQ ID NO: 2107394 - RNA, 19 nt, Artificial Sequence
  Description of Artificial Sequence: Synthetic oligonucleotide
  Sense strand starting at position 480 of SEQ ID NO: 1882263
uacagucugcgaggagaaa

SEQ ID NO: 2107395 - RNA, 19 nt, Artificial Sequence
  Description of Artificial Sequence: Synthetic oligonucleotide
  Antisense strand to SEQ ID NO: 2107394
uuucuccucgcagacugua

SEQ ID NO: 2107396 - RNA, 19 nt, Artificial Sequence
  Description of Artificial Sequence: Synthetic oligonucleotide
  Sense strand starting at position 511 of SEQ ID NO: 1882263
cugguaaguccaggaaucu

SEQ ID NO: 2107397 - RNA, 19 nt, Artificial Sequence
  Description of Artificial Sequence: Synthetic oligonucleotide
  Antisense strand to SEQ ID NO: 2107396
agauuccuggacuuaccag

SEQ ID NO: 2107398 - RNA, 19 nt, Artificial Sequence
  Description of Artificial Sequence: Synthetic oligonucleotide
  Sense strand starting at position 533 of SEQ ID NO: 1882263
gcgagugcugagggagaaa

SEQ ID NO: 2107399 - RNA, 19 nt, Artificial Sequence
  Description of Artificial Sequence: Synthetic oligonucleotide
  Antisense strand to SEQ ID NO: 2107398
uuucucccucagcacucgc

SEQ ID NO: 2107400 - RNA, 19 nt, Artificial Sequence
  Description of Artificial Sequence: Synthetic oligonucleotide
  Sense strand starting at position 722 of SEQ ID NO: 1882263
agggauuggcuucaugucu

SEQ ID NO: 2107401 - RNA, 19 nt, Artificial Sequence
  Description of Artificial Sequence: Synthetic oligonucleotide
  Antisense strand to SEQ ID NO: 2107400
agacaugaagccaaucccu

SEQ ID NO: 2107402 - RNA, 19 nt, Artificial Sequence
  Description of Artificial Sequence: Synthetic oligonucleotide
  Sense strand starting at position 730 of SEQ ID NO: 1882263
gcuucaugucuugucgcga

SEQ ID NO: 2107403 - RNA, 19 nt, Artificial Sequence
  Description of Artificial Sequence: Synthetic oligonucleotide
  Antisense strand to SEQ ID NO: 2107402
ucgcgacaagacaugaagc

SEQ ID NO: 2107404 - RNA, 19 nt, Artificial Sequence
  Description of Artificial Sequence: Synthetic oligonucleotide
  Sense strand starting at position 733 of SEQ ID NO: 1882263
ucaugucuugucgcgauca

SEQ ID NO: 2107405 - RNA, 19 nt, Artificial Sequence
  Description of Artificial Sequence: Synthetic oligonucleotide
  Antisense strand to SEQ ID NO: 2107404
ugaucgcgacaagacauga

SEQ ID NO: 2107406 - RNA, 19 nt, Artificial Sequence
  Description of Artificial Sequence: Synthetic oligonucleotide
  Sense strand starting at position 751 of SEQ ID NO: 1882263
accucuaaaugcguuggaa

SEQ ID NO: 2107407 - RNA, 19 nt, Artificial Sequence
  Description of Artificial Sequence: Synthetic oligonucleotide
  Antisense strand to SEQ ID NO: 2107406
uuccaacgcauuuagaggu

SEQ ID NO: 2107408 - RNA, 19 nt, Artificial Sequence
  Description of Artificial Sequence: Synthetic oligonucleotide
  Sense strand starting at position 754 of SEQ ID NO: 1882263
ucuaaaugcguuggaacaa

SEQ ID NO: 2107409 - RNA, 19 nt, Artificial Sequence
  Description of Artificial Sequence: Synthetic oligonucleotide
  Antisense strand to SEQ ID NO: 2107408
uuguuccaacgcauuuaga

SEQ ID NO: 2107410 - RNA, 19 nt, Artificial Sequence
  Description of Artificial Sequence: Synthetic oligonucleotide
  Sense strand starting at position 765 of SEQ ID NO: 1882263
uggaacaaacuuugcauau

SEQ ID NO: 2107411 - RNA, 19 nt, Artificial Sequence
  Description of Artificial Sequence: Synthetic oligonucleotide
  Antisense strand to SEQ ID NO: 2107410
auaugcaaaguuuguucca

SEQ ID NO: 2107412 - RNA, 19 nt, Artificial Sequence
  Description of Artificial Sequence: Synthetic oligonucleotide
  Sense strand starting at position 766 of SEQ ID NO: 1882263
ggaacaaacuuugcauauu

SEQ ID NO: 2107413 - RNA, 19 nt, Artificial Sequence
  Description of Artificial Sequence: Synthetic oligonucleotide
  Antisense strand to SEQ ID NO: 2107412
aauaugcaaaguuuguucc

SEQ ID NO: 2107414 - RNA, 19 nt, Artificial Sequence
  Description of Artificial Sequence: Synthetic oligonucleotide
  Sense strand starting at position 790 of SEQ ID NO: 1882263
uaguaucaucgucauugaa

SEQ ID NO: 2107415 - RNA, 19 nt, Artificial Sequence
  Description of Artificial Sequence: Synthetic oligonucleotide
  Antisense strand to SEQ ID NO: 2107414
uucaaugacgaugauacua

SEQ ID NO: 2107416 - RNA, 19 nt, Artificial Sequence
  Description of Artificial Sequence: Synthetic oligonucleotide
  Sense strand starting at position 793 of SEQ ID NO: 1882263
uaucaucgucauugaagua

SEQ ID NO: 2107417 - RNA, 19 nt, Artificial Sequence
  Description of Artificial Sequence: Synthetic oligonucleotide
  Antisense strand to SEQ ID NO: 2107416
uacuucaaugacgaugaua

SEQ ID NO: 2107418 - RNA, 19 nt, Artificial Sequence
  Description of Artificial Sequence: Synthetic oligonucleotide
  Sense strand starting at position 828 of SEQ ID NO: 1882263
gggugagcugaaugagauc

SEQ ID NO: 2107419 - RNA, 19 nt, Artificial Sequence
  Description of Artificial Sequence: Synthetic oligonucleotide
  Antisense strand to SEQ ID NO: 2107418
gaucucauucagcucaccc

SEQ ID NO: 2107420 - RNA, 19 nt, Artificial Sequence
  Description of Artificial Sequence: Synthetic oligonucleotide
  Sense strand starting at position 974 of SEQ ID NO: 1882263
ccuuuagcaguguaaauaa

SEQ ID NO: 2107421 - RNA, 19 nt, Artificial Sequence
  Description of Artificial Sequence: Synthetic oligonucleotide
  Antisense strand to SEQ ID NO: 2107420
uuauuuacacugcuaaagg

SEQ ID NO: 2107422 - RNA, 19 nt, Artificial Sequence
  Description of Artificial Sequence: Synthetic oligonucleotide
  Sense strand starting at position 1020 of SEQ ID NO: 1882263
gucccugcugugcucaaua

SEQ ID NO: 2107423 - RNA, 19 nt, Artificial Sequence
  Description of Artificial Sequence: Synthetic oligonucleotide
  Antisense strand to SEQ ID NO: 2107422
uauugagcacagcagggac

SEQ ID NO: 2107424 - RNA, 19 nt, Artificial Sequence
  Description of Artificial Sequence: Synthetic oligonucleotide
  Sense strand starting at position 1022 of SEQ ID NO: 1882263
cccugcugugcucaauaaa

SEQ ID NO: 2107425 - RNA, 19 nt, Artificial Sequence
  Description of Artificial Sequence: Synthetic oligonucleotide
  Antisense strand to SEQ ID NO: 2107424
uuuauugagcacagcaggg

SEQ ID NO: 2107426 - RNA, 19 nt, Artificial Sequence
  Description of Artificial Sequence: Synthetic oligonucleotide
  Sense strand starting at position 1025 of SEQ ID NO: 1882263
ugcugugcucaauaaauga

SEQ ID NO: 2107427 - RNA, 19 nt, Artificial Sequence
  Description of Artificial Sequence: Synthetic oligonucleotide
  Antisense strand to SEQ ID NO: 2107426
ucauuuauugagcacagca

SEQ ID NO: 2107428 - RNA, 19 nt, Artificial Sequence
  Description of Artificial Sequence: Synthetic oligonucleotide
  Sense strand starting at position 1100 of SEQ ID NO: 1882263
aacucugugguguaugaca

SEQ ID NO: 2107429 - RNA, 19 nt, Artificial Sequence
  Description of Artificial Sequence: Synthetic oligonucleotide
  Antisense strand to SEQ ID NO: 2107428
ugucauacaccacagaguu

SEQ ID NO: 2107430 - RNA, 19 nt, Artificial Sequence
  Description of Artificial Sequence: Synthetic oligonucleotide
  Sense strand starting at position 1159 of SEQ ID NO: 1882263
augguuaguaaucauaggu

SEQ ID NO: 2107431 - RNA, 19 nt, Artificial Sequence
  Description of Artificial Sequence: Synthetic oligonucleotide
  Antisense strand to SEQ ID NO: 2107430
accuaugauuacuaaccau

SEQ ID NO: 2107432 - RNA, 19 nt, Artificial Sequence
  Description of Artificial Sequence: Synthetic oligonucleotide
  Sense strand starting at position 1163 of SEQ ID NO: 1882263
uuaguaaucauagguggag

SEQ ID NO: 2107433 - RNA, 19 nt, Artificial Sequence
  Description of Artificial Sequence: Synthetic oligonucleotide
  Antisense strand to SEQ ID NO: 2107432
cuccaccuaugauuacuaa

SEQ ID NO: 2107434 - RNA, 19 nt, Artificial Sequence
  Description of Artificial Sequence: Synthetic oligonucleotide
  Sense strand starting at position 1164 of SEQ ID NO: 1882263
uaguaaucauagguggagu

SEQ ID NO: 2107435 - RNA, 19 nt, Artificial Sequence
  Description of Artificial Sequence: Synthetic oligonucleotide
  Antisense strand to SEQ ID NO: 2107434
acuccaccuaugauuacua

SEQ ID NO: 2107436 - RNA, 19 nt, Artificial Sequence
  Description of Artificial Sequence: Synthetic oligonucleotide
  Sense strand starting at position 1165 of SEQ ID NO: 1882263
aguaaucauagguggaguu

SEQ ID NO: 2107437 - RNA, 19 nt, Artificial Sequence
  Description of Artificial Sequence: Synthetic oligonucleotide
  Antisense strand to SEQ ID NO: 2107436
aacuccaccuaugauuacu

SEQ ID NO: 2107438 - RNA, 19 nt, Artificial Sequence
  Description of Artificial Sequence: Synthetic oligonucleotide
  Sense strand starting at position 1228 of SEQ ID NO: 1882263
gacacaguucgugaucaug

SEQ ID NO: 2107439 - RNA, 19 nt, Artificial Sequence
  Description of Artificial Sequence: Synthetic oligonucleotide
  Antisense strand to SEQ ID NO: 2107438
caugaucacgaacuguguc

SEQ ID NO: 2107440 - RNA, 19 nt, Artificial Sequence
  Description of Artificial Sequence: Synthetic oligonucleotide
  Sense strand starting at position 1230 of SEQ ID NO: 1882263
cacaguucgugaucaugga

SEQ ID NO: 2107441 - RNA, 19 nt, Artificial Sequence
  Description of Artificial Sequence: Synthetic oligonucleotide
  Antisense strand to SEQ ID NO: 2107440
uccaugaucacgaacugug

SEQ ID NO: 2107442 - RNA, 19 nt, Artificial Sequence
  Description of Artificial Sequence: Synthetic oligonucleotide
  Sense strand starting at position 1231 of SEQ ID NO: 1882263
acaguucgugaucauggau

SEQ ID NO: 2107443 - RNA, 19 nt, Artificial Sequence
  Description of Artificial Sequence: Synthetic oligonucleotide
  Antisense strand to SEQ ID NO: 2107442
auccaugaucacgaacugu

SEQ ID NO: 2107444 - RNA, 19 nt, Artificial Sequence
  Description of Artificial Sequence: Synthetic oligonucleotide
  Sense strand starting at position 1237 of SEQ ID NO: 1882263
cgugaucauggaugguuca

SEQ ID NO: 2107445 - RNA, 19 nt, Artificial Sequence
  Description of Artificial Sequence: Synthetic oligonucleotide
  Antisense strand to SEQ ID NO: 2107444
ugaaccauccaugaucacg

SEQ ID NO: 2107446 - RNA, 19 nt, Artificial Sequence
  Description of Artificial Sequence: Synthetic oligonucleotide
  Sense strand starting at position 1238 of SEQ ID NO: 1882263
gugaucauggaugguucau

SEQ ID NO: 2107447 - RNA, 19 nt, Artificial Sequence
  Description of Artificial Sequence: Synthetic oligonucleotide
  Antisense strand to SEQ ID NO: 2107446
augaaccauccaugaucac

SEQ ID NO: 2107448 - RNA, 19 nt, Artificial Sequence
  Description of Artificial Sequence: Synthetic oligonucleotide
  Sense strand starting at position 1269 of SEQ ID NO: 1882263
guugguaccagaugguaaa

SEQ ID NO: 2107449 - RNA, 19 nt, Artificial Sequence
  Description of Artificial Sequence: Synthetic oligonucleotide
  Antisense strand to SEQ ID NO: 2107448
uuuaccaucugguaccaac

SEQ ID NO: 2107450 - RNA, 19 nt, Artificial Sequence
  Description of Artificial Sequence: Synthetic oligonucleotide
  Sense strand starting at position 1270 of SEQ ID NO: 1882263
uugguaccagaugguaaau

SEQ ID NO: 2107451 - RNA, 19 nt, Artificial Sequence
  Description of Artificial Sequence: Synthetic oligonucleotide
  Antisense strand to SEQ ID NO: 2107450
auuuaccaucugguaccaa

SEQ ID NO: 2107452 - RNA, 19 nt, Artificial Sequence
  Description of Artificial Sequence: Synthetic oligonucleotide
  Sense strand starting at position 2135 of SEQ ID NO: 1882263
gcaguucucugauccauuu

SEQ ID NO: 2107453 - RNA, 19 nt, Artificial Sequence
  Description of Artificial Sequence: Synthetic oligonucleotide
  Antisense strand to SEQ ID NO: 2107452
aaauggaucagagaacugc

SEQ ID NO: 2107454 - RNA, 19 nt, Artificial Sequence
  Description of Artificial Sequence: Synthetic oligonucleotide
  Sense strand starting at position 2353 of SEQ ID NO: 1882263
ccuggugcuaaugaaaguu

SEQ ID NO: 2107455 - RNA, 19 nt, Artificial Sequence
  Description of Artificial Sequence: Synthetic oligonucleotide
  Antisense strand to SEQ ID NO: 2107454
aacuuucauuagcaccagg

SEQ ID NO: 2107456 - RNA, 19 nt, Artificial Sequence
  Description of Artificial Sequence: Synthetic oligonucleotide
  Sense strand starting at position 3071 of SEQ ID NO: 1882263
guuugguacgcggugacaa

SEQ ID NO: 2107457 - RNA, 19 nt, Artificial Sequence
  Description of Artificial Sequence: Synthetic oligonucleotide
  Antisense strand to SEQ ID NO: 2107456
uugucaccgcguaccaaac

SEQ ID NO: 2107458 - RNA, 19 nt, Artificial Sequence
  Description of Artificial Sequence: Synthetic oligonucleotide
  Sense strand starting at position 3288 of SEQ ID NO: 1882263
gaauuugguuauugggaau

SEQ ID NO: 2107459 - RNA, 19 nt, Artificial Sequence
  Description of Artificial Sequence: Synthetic oligonucleotide
  Antisense strand to SEQ ID NO: 2107458
auucccaauaaccaaauuc

SEQ ID NO: 2107460 - RNA, 19 nt, Artificial Sequence
  Description of Artificial Sequence: Synthetic oligonucleotide
  Sense strand starting at position 3576 of SEQ ID NO: 1882263
guguguauuugauuauagc

SEQ ID NO: 2107461 - RNA, 19 nt, Artificial Sequence
  Description of Artificial Sequence: Synthetic oligonucleotide
  Antisense strand to SEQ ID NO: 2107460
gcuauaaucaaauacacac

SEQ ID NO: 2107462 - RNA, 19 nt, Artificial Sequence
  Description of Artificial Sequence: Synthetic oligonucleotide
  Sense strand starting at position 3594 of SEQ ID NO: 1882263
ccauccuaauuggugugaa

SEQ ID NO: 2107463 - RNA, 19 nt, Artificial Sequence
  Description of Artificial Sequence: Synthetic oligonucleotide
  Antisense strand to SEQ ID NO: 2107462
uucacaccaauuaggaugg

SEQ ID NO: 2107464 - RNA, 19 nt, Artificial Sequence
  Description of Artificial Sequence: Synthetic oligonucleotide
  Sense strand starting at position 3597 of SEQ ID NO: 1882263
uccuaauuggugugaagua

SEQ ID NO: 2107465 - RNA, 19 nt, Artificial Sequence
  Description of Artificial Sequence: Synthetic oligonucleotide
  Antisense strand to SEQ ID NO: 2107464
uacuucacaccaauuagga

SEQ ID NO: 2107466 - RNA, 19 nt, Artificial Sequence
  Description of Artificial Sequence: Synthetic oligonucleotide
  Sense strand starting at position 3727 of SEQ ID NO: 1882263
auucuuugccuacauaguu

SEQ ID NO: 2107467 - RNA, 19 nt, Artificial Sequence
  Description of Artificial Sequence: Synthetic oligonucleotide
  Antisense strand to SEQ ID NO: 2107466
aacuauguaggcaaagaau

SEQ ID NO: 2107468 - RNA, 19 nt, Artificial Sequence
  Description of Artificial Sequence: Synthetic oligonucleotide
  Sense strand starting at position 3983 of SEQ ID NO: 1882263
ugaagauuauucccaaugu

SEQ ID NO: 2107469 - RNA, 19 nt, Artificial Sequence
  Description of Artificial Sequence: Synthetic oligonucleotide
  Antisense strand to SEQ ID NO: 2107468
acauugggaauaaucuuca

SEQ ID NO: 2107470 - RNA, 19 nt, Artificial Sequence
  Description of Artificial Sequence: Synthetic oligonucleotide
  Sense strand starting at position 2044 of SEQ ID NO: 1882264
cacugauuggcugaucuag

SEQ ID NO: 2107471 - RNA, 19 nt, Artificial Sequence
  Description of Artificial Sequence: Synthetic oligonucleotide
  Antisense strand to SEQ ID NO: 2107470
cuagaucagccaaucagug

SEQ ID NO: 2107472 - RNA, 19 nt, Artificial Sequence
  Description of Artificial Sequence: Synthetic oligonucleotide
  Sense strand starting at position 2046 of SEQ ID NO: 1882264
cugauuggcugaucuagga

SEQ ID NO: 2107473 - RNA, 19 nt, Artificial Sequence
  Description of Artificial Sequence: Synthetic oligonucleotide
  Antisense strand to SEQ ID NO: 2107472
uccuagaucagccaaucag

SEQ ID NO: 2107474 - RNA, 19 nt, Artificial Sequence
  Description of Artificial Sequence: Synthetic oligonucleotide
  Sense strand starting at position 2099 of SEQ ID NO: 1882264
caucaugaguauccaggua

SEQ ID NO: 2107475 - RNA, 19 nt, Artificial Sequence
  Description of Artificial Sequence: Synthetic oligonucleotide
  Antisense strand to SEQ ID NO: 2107474
uaccuggauacucaugaug

SEQ ID NO: 2107476 - RNA, 19 nt, Artificial Sequence
  Description of Artificial Sequence: Synthetic oligonucleotide
  Sense strand starting at position 2314 of SEQ ID NO: 1882264
cccggagcugucugagaaa

SEQ ID NO: 2107477 - RNA, 19 nt, Artificial Sequence
  Description of Artificial Sequence: Synthetic oligonucleotide
  Antisense strand to SEQ ID NO: 2107476
uuucucagacagcuccggg

SEQ ID NO: 2107478 - RNA, 19 nt, Artificial Sequence
  Description of Artificial Sequence: Synthetic oligonucleotide
  Sense strand starting at position 2486 of SEQ ID NO: 1882264
gagugagcuucuccuggga

SEQ ID NO: 2107479 - RNA, 19 nt, Artificial Sequence
  Description of Artificial Sequence: Synthetic oligonucleotide
  Antisense strand to SEQ ID NO: 2107478
ucccaggagaagcucacuc

SEQ ID NO: 2107480 - RNA, 19 nt, Artificial Sequence
  Description of Artificial Sequence: Synthetic oligonucleotide
  Sense strand starting at position 2489 of SEQ ID NO: 1882264
ugagcuucuccugggaaug

SEQ ID NO: 2107481 - RNA, 19 nt, Artificial Sequence
  Description of Artificial Sequence: Synthetic oligonucleotide
  Antisense strand to SEQ ID NO: 2107480
cauucccaggagaagcuca

SEQ ID NO: 2107482 - RNA, 19 nt, Artificial Sequence
  Description of Artificial Sequence: Synthetic oligonucleotide
  Sense strand starting at position 2577 of SEQ ID NO: 1882264
uuugucuuugcagguauuu

SEQ ID NO: 2107483 - RNA, 19 nt, Artificial Sequence
  Description of Artificial Sequence: Synthetic oligonucleotide
  Antisense strand to SEQ ID NO: 2107482
aaauaccugcaaagacaaa

SEQ ID NO: 2107484 - RNA, 19 nt, Artificial Sequence
  Description of Artificial Sequence: Synthetic oligonucleotide
  Sense strand starting at position 2589 of SEQ ID NO: 1882264
gguauuuguuuagaaacaa

SEQ ID NO: 2107485 - RNA, 19 nt, Artificial Sequence
  Description of Artificial Sequence: Synthetic oligonucleotide
  Antisense strand to SEQ ID NO: 2107484
uuguuucuaaacaaauacc

SEQ ID NO: 2107486 - RNA, 19 nt, Artificial Sequence
  Description of Artificial Sequence: Synthetic oligonucleotide
  Sense strand starting at position 2631 of SEQ ID NO: 1882264
ucagauuaaucuggagcaa

SEQ ID NO: 2107487 - RNA, 19 nt, Artificial Sequence
  Description of Artificial Sequence: Synthetic oligonucleotide
  Antisense strand to SEQ ID NO: 2107486
uugcuccagauuaaucuga

SEQ ID NO: 2107488 - RNA, 19 nt, Artificial Sequence
  Description of Artificial Sequence: Synthetic oligonucleotide
  Sense strand starting at position 2643 of SEQ ID NO: 1882264
ggagcaaaucccuggaaca

SEQ ID NO: 2107489 - RNA, 19 nt, Artificial Sequence
  Description of Artificial Sequence: Synthetic oligonucleotide
  Antisense strand to SEQ ID NO: 2107488
uguuccagggauuugcucc

SEQ ID NO: 2107490 - RNA, 19 nt, Artificial Sequence
  Description of Artificial Sequence: Synthetic oligonucleotide
  Sense strand starting at position 2722 of SEQ ID NO: 1882264
ggccuuguucucugacuca

SEQ ID NO: 2107491 - RNA, 19 nt, Artificial Sequence
  Description of Artificial Sequence: Synthetic oligonucleotide
  Antisense strand to SEQ ID NO: 2107490
ugagucagagaacaaggcc

SEQ ID NO: 2107492 - RNA, 19 nt, Artificial Sequence
  Description of Artificial Sequence: Synthetic oligonucleotide
  Sense strand starting at position 2725 of SEQ ID NO: 1882264
cuuguucucugacucauac

SEQ ID NO: 2107493 - RNA, 19 nt, Artificial Sequence
  Description of Artificial Sequence: Synthetic oligonucleotide
  Antisense strand to SEQ ID NO: 2107492
guaugagucagagaacaag

SEQ ID NO: 2107494 - RNA, 19 nt, Artificial Sequence
  Description of Artificial Sequence: Synthetic oligonucleotide
  Sense strand starting at position 2763 of SEQ ID NO: 1882264
gauuccagcucuucugagu

SEQ ID NO: 2107495 - RNA, 19 nt, Artificial Sequence
  Description of Artificial Sequence: Synthetic oligonucleotide
  Antisense strand to SEQ ID NO: 2107494
acucagaagagcuggaauc

SEQ ID NO: 2107496 - RNA, 19 nt, Artificial Sequence
  Description of Artificial Sequence: Synthetic oligonucleotide
  Sense strand starting at position 2806 of SEQ ID NO: 1882264
accagaagucacuguuccu

SEQ ID NO: 2107497 - RNA, 19 nt, Artificial Sequence
  Description of Artificial Sequence: Synthetic oligonucleotide
  Antisense strand to SEQ ID NO: 2107496
aggaacagugacuucuggu

SEQ ID NO: 2107498 - RNA, 19 nt, Artificial Sequence
  Description of Artificial Sequence: Synthetic oligonucleotide
  Sense strand starting at position 2834 of SEQ ID NO: 1882264
acuggaacuuuccaaggaa

SEQ ID NO: 2107499 - RNA, 19 nt, Artificial Sequence
  Description of Artificial Sequence: Synthetic oligonucleotide
  Antisense strand to SEQ ID NO: 2107498
uuccuuggaaaguuccagu

SEQ ID NO: 2107500 - RNA, 19 nt, Artificial Sequence
  Description of Artificial Sequence: Synthetic oligonucleotide
  Sense strand starting at position 2947 of SEQ ID NO: 1882264
acgugagugcugcuggagu

SEQ ID NO: 2107501 - RNA, 19 nt, Artificial Sequence
  Description of Artificial Sequence: Synthetic oligonucleotide
  Antisense strand to SEQ ID NO: 2107500
acuccagcagcacucacgu

SEQ ID NO: 2107502 - RNA, 19 nt, Artificial Sequence
  Description of Artificial Sequence: Synthetic oligonucleotide
  Sense strand starting at position 2960 of SEQ ID NO: 1882264
uggagugucccaugaggag

SEQ ID NO: 2107503 - RNA, 19 nt, Artificial Sequence
  Description of Artificial Sequence: Synthetic oligonucleotide
  Antisense strand to SEQ ID NO: 2107502
cuccucaugggacacucca

SEQ ID NO: 2107504 - RNA, 19 nt, Artificial Sequence
  Description of Artificial Sequence: Synthetic oligonucleotide
  Sense strand starting at position 2977 of SEQ ID NO: 1882264
agugcaaagugccugaauu

SEQ ID NO: 2107505 - RNA, 19 nt, Artificial Sequence
  Description of Artificial Sequence: Synthetic oligonucleotide
  Antisense strand to SEQ ID NO: 2107504
aauucaggcacuuugcacu

SEQ ID NO: 2107506 - RNA, 19 nt, Artificial Sequence
  Description of Artificial Sequence: Synthetic oligonucleotide
  Sense strand starting at position 2978 of SEQ ID NO: 1882264
gugcaaagugccugaauuu

SEQ ID NO: 2107507 - RNA, 19 nt, Artificial Sequence
  Description of Artificial Sequence: Synthetic oligonucleotide
  Antisense strand to SEQ ID NO: 2107506
aaauucaggcacuuugcac

SEQ ID NO: 2107508 - RNA, 19 nt, Artificial Sequence
  Description of Artificial Sequence: Synthetic oligonucleotide
  Sense strand starting at position 3046 of SEQ ID NO: 1882264
cuaggucccuccuagaaac

SEQ ID NO: 2107509 - RNA, 19 nt, Artificial Sequence
  Description of Artificial Sequence: Synthetic oligonucleotide
  Antisense strand to SEQ ID NO: 2107508
guuucuaggagggaccuag

SEQ ID NO: 2107510 - RNA, 19 nt, Artificial Sequence
  Description of Artificial Sequence: Synthetic oligonucleotide
  Sense strand starting at position 3067 of SEQ ID NO: 1882264
gggugucugccuuacagaa

SEQ ID NO: 2107511 - RNA, 19 nt, Artificial Sequence
  Description of Artificial Sequence: Synthetic oligonucleotide
  Antisense strand to SEQ ID NO: 2107510
uucuguaaggcagacaccc

SEQ ID NO: 2107512 - RNA, 19 nt, Artificial Sequence
  Description of Artificial Sequence: Synthetic oligonucleotide
  Sense strand starting at position 3096 of SEQ ID NO: 1882264
gcagaagccucugucucua

SEQ ID NO: 2107513 - RNA, 19 nt, Artificial Sequence
  Description of Artificial Sequence: Synthetic oligonucleotide
  Antisense strand to SEQ ID NO: 2107512
uagagacagaggcuucugc

SEQ ID NO: 2107514 - RNA, 19 nt, Artificial Sequence
  Description of Artificial Sequence: Synthetic oligonucleotide
  Sense strand starting at position 3191 of SEQ ID NO: 1882264
acugucuagaggugucuau

SEQ ID NO: 2107515 - RNA, 19 nt, Artificial Sequence
  Description of Artificial Sequence: Synthetic oligonucleotide
  Antisense strand to SEQ ID NO: 2107514
auagacaccucuagacagu

SEQ ID NO: 2107516 - RNA, 19 nt, Artificial Sequence
  Description of Artificial Sequence: Synthetic oligonucleotide
  Sense strand starting at position 3195 of SEQ ID NO: 1882264
ucuagaggugucuauggaa

SEQ ID NO: 2107517 - RNA, 19 nt, Artificial Sequence
  Description of Artificial Sequence: Synthetic oligonucleotide
  Antisense strand to SEQ ID NO: 2107516
uuccauagacaccucuaga

SEQ ID NO: 2107518 - RNA, 19 nt, Artificial Sequence
  Description of Artificial Sequence: Synthetic oligonucleotide
  Sense strand starting at position 3224 of SEQ ID NO: 1882264
guaggcaagauuggugaaa

SEQ ID NO: 2107519 - RNA, 19 nt, Artificial Sequence
  Description of Artificial Sequence: Synthetic oligonucleotide
  Antisense strand to SEQ ID NO: 2107518
uuucaccaaucuugccuac

SEQ ID NO: 2107520 - RNA, 19 nt, Artificial Sequence
  Description of Artificial Sequence: Synthetic oligonucleotide
  Sense strand starting at position 3225 of SEQ ID NO: 1882264
uaggcaagauuggugaaau

SEQ ID NO: 2107521 - RNA, 19 nt, Artificial Sequence
  Description of Artificial Sequence: Synthetic oligonucleotide
  Antisense strand to SEQ ID NO: 2107520
auuucaccaaucuugccua

SEQ ID NO: 2107522 - RNA, 19 nt, Artificial Sequence
  Description of Artificial Sequence: Synthetic oligonucleotide
  Sense strand starting at position 3235 of SEQ ID NO: 1882264
uggugaaaucauuggccau

SEQ ID NO: 2107523 - RNA, 19 nt, Artificial Sequence
  Description of Artificial Sequence: Synthetic oligonucleotide
  Antisense strand to SEQ ID NO: 2107522
auggccaaugauuucacca

SEQ ID NO: 2107524 - RNA, 19 nt, Artificial Sequence
  Description of Artificial Sequence: Synthetic oligonucleotide
  Sense strand starting at position 3236 of SEQ ID NO: 1882264
ggugaaaucauuggccauu

SEQ ID NO: 2107525 - RNA, 19 nt, Artificial Sequence
  Description of Artificial Sequence: Synthetic oligonucleotide
  Antisense strand to SEQ ID NO: 2107524
aauggccaaugauuucacc

SEQ ID NO: 2107526 - RNA, 19 nt, Artificial Sequence
  Description of Artificial Sequence: Synthetic oligonucleotide
  Sense strand starting at position 3237 of SEQ ID NO: 1882264
gugaaaucauuggccauug

SEQ ID NO: 2107527 - RNA, 19 nt, Artificial Sequence
  Description of Artificial Sequence: Synthetic oligonucleotide
  Antisense strand to SEQ ID NO: 2107526
caauggccaaugauuucac

SEQ ID NO: 2107528 - RNA, 19 nt, Artificial Sequence
  Description of Artificial Sequence: Synthetic oligonucleotide
  Sense strand starting at position 3396 of SEQ ID NO: 1882264
gucaucucauugccauauu

SEQ ID NO: 2107529 - RNA, 19 nt, Artificial Sequence
  Description of Artificial Sequence: Synthetic oligonucleotide
  Antisense strand to SEQ ID NO: 2107528
aauauggcaaugagaugac

SEQ ID NO: 2107530 - RNA, 19 nt, Artificial Sequence
  Description of Artificial Sequence: Synthetic oligonucleotide
  Sense strand starting at position 3420 of SEQ ID NO: 1882264
caugcuuaucacugaggga

SEQ ID NO: 2107531 - RNA, 19 nt, Artificial Sequence
  Description of Artificial Sequence: Synthetic oligonucleotide
  Antisense strand to SEQ ID NO: 2107530
ucccucagugauaagcaug

SEQ ID NO: 2107532 - RNA, 19 nt, Artificial Sequence
  Description of Artificial Sequence: Synthetic oligonucleotide
  Sense strand starting at position 3493 of SEQ ID NO: 1882264
uuuauuggaucacagauca

SEQ ID NO: 2107533 - RNA, 19 nt, Artificial Sequence
  Description of Artificial Sequence: Synthetic oligonucleotide
  Antisense strand to SEQ ID NO: 2107532
ugaucugugauccaauaaa

SEQ ID NO: 2107534 - RNA, 19 nt, Artificial Sequence
  Description of Artificial Sequence: Synthetic oligonucleotide
  Sense strand starting at position 3780 of SEQ ID NO: 1882264
ugcaacuguuggccucaaa

SEQ ID NO: 2107535 - RNA, 19 nt, Artificial Sequence
  Description of Artificial Sequence: Synthetic oligonucleotide
  Antisense strand to SEQ ID NO: 2107534
uuugaggccaacaguugca

SEQ ID NO: 2107536 - RNA, 19 nt, Artificial Sequence
  Description of Artificial Sequence: Synthetic oligonucleotide
  Sense strand starting at position 3816 of SEQ ID NO: 1882264
ggccucucaaaguggugaa

SEQ ID NO: 2107537 - RNA, 19 nt, Artificial Sequence
  Description of Artificial Sequence: Synthetic oligonucleotide
  Antisense strand to SEQ ID NO: 2107536
uucaccacuuugagaggcc

SEQ ID NO: 2107538 - RNA, 19 nt, Artificial Sequence
  Description of Artificial Sequence: Synthetic oligonucleotide
  Sense strand starting at position 3817 of SEQ ID NO: 1882264
gccucucaaaguggugaaa

SEQ ID NO: 2107539 - RNA, 19 nt, Artificial Sequence
  Description of Artificial Sequence: Synthetic oligonucleotide
  Antisense strand to SEQ ID NO: 2107538
uuucaccacuuugagaggc

SEQ ID NO: 2107540 - RNA, 19 nt, Artificial Sequence
  Description of Artificial Sequence: Synthetic oligonucleotide
  Sense strand starting at position 3922 of SEQ ID NO: 1882264
cagaguccuguuuagucau

SEQ ID NO: 2107541 - RNA, 19 nt, Artificial Sequence
  Description of Artificial Sequence: Synthetic oligonucleotide
  Antisense strand to SEQ ID NO: 2107540
augacuaaacaggacucug

SEQ ID NO: 2107542 - RNA, 19 nt, Artificial Sequence
  Description of Artificial Sequence: Synthetic oligonucleotide
  Sense strand starting at position 3924 of SEQ ID NO: 1882264
gaguccuguuuagucauua

SEQ ID NO: 2107543 - RNA, 19 nt, Artificial Sequence
  Description of Artificial Sequence: Synthetic oligonucleotide
  Antisense strand to SEQ ID NO: 2107542
uaaugacuaaacaggacuc

SEQ ID NO: 2107544 - RNA, 19 nt, Artificial Sequence
  Description of Artificial Sequence: Synthetic oligonucleotide
  Sense strand starting at position 3925 of SEQ ID NO: 1882264
aguccuguuuagucauuau

SEQ ID NO: 2107545 - RNA, 19 nt, Artificial Sequence
  Description of Artificial Sequence: Synthetic oligonucleotide
  Antisense strand to SEQ ID NO: 2107544
auaaugacuaaacaggacu

SEQ ID NO: 2107546 - RNA, 19 nt, Artificial Sequence
  Description of Artificial Sequence: Synthetic oligonucleotide
  Sense strand starting at position 3928 of SEQ ID NO: 1882264
ccuguuuagucauuaucaa

SEQ ID NO: 2107547 - RNA, 19 nt, Artificial Sequence
  Description of Artificial Sequence: Synthetic oligonucleotide
  Antisense strand to SEQ ID NO: 2107546
uugauaaugacuaaacagg

SEQ ID NO: 2107548 - RNA, 19 nt, Artificial Sequence
  Description of Artificial Sequence: Synthetic oligonucleotide
  Sense strand starting at position 3929 of SEQ ID NO: 1882264
cuguuuagucauuaucaau

SEQ ID NO: 2107549 - RNA, 19 nt, Artificial Sequence
  Description of Artificial Sequence: Synthetic oligonucleotide
  Antisense strand to SEQ ID NO: 2107548
auugauaaugacuaaacag

SEQ ID NO: 2107550 - RNA, 19 nt, Artificial Sequence
  Description of Artificial Sequence: Synthetic oligonucleotide
  Sense strand starting at position 80 of SEQ ID NO: 1882266
cuagcuaucgcagaucaau

SEQ ID NO: 2107551 - RNA, 19 nt, Artificial Sequence
  Description of Artificial Sequence: Synthetic oligonucleotide
  Antisense strand to SEQ ID NO: 2107550
auugaucugcgauagcuag

SEQ ID NO: 2107552 - RNA, 19 nt, Artificial Sequence
  Description of Artificial Sequence: Synthetic oligonucleotide
  Sense strand starting at position 365 of SEQ ID NO: 1882266
uaggauagauucucuguua

SEQ ID NO: 2107553 - RNA, 19 nt, Artificial Sequence
  Description of Artificial Sequence: Synthetic oligonucleotide
  Antisense strand to SEQ ID NO: 2107552
uaacagagaaucuauccua

SEQ ID NO: 2107554 - RNA, 19 nt, Artificial Sequence
  Description of Artificial Sequence: Synthetic oligonucleotide
  Sense strand starting at position 366 of SEQ ID NO: 1882266
aggauagauucucuguuaa

SEQ ID NO: 2107555 - RNA, 19 nt, Artificial Sequence
  Description of Artificial Sequence: Synthetic oligonucleotide
  Antisense strand to SEQ ID NO: 2107554
uuaacagagaaucuauccu

SEQ ID NO: 2107556 - RNA, 19 nt, Artificial Sequence
  Description of Artificial Sequence: Synthetic oligonucleotide
  Sense strand starting at position 390 of SEQ ID NO: 1882266
ggaaucccuucucucaaga

SEQ ID NO: 2107557 - RNA, 19 nt, Artificial Sequence
  Description of Artificial Sequence: Synthetic oligonucleotide
  Antisense strand to SEQ ID NO: 2107556
ucuugagagaagggauucc

SEQ ID NO: 2107558 - RNA, 19 nt, Artificial Sequence
  Description of Artificial Sequence: Synthetic oligonucleotide
  Sense strand starting at position 428 of SEQ ID NO: 1882266
uuaccaagccuuugugaaa

SEQ ID NO: 2107559 - RNA, 19 nt, Artificial Sequence
  Description of Artificial Sequence: Synthetic oligonucleotide
  Antisense strand to SEQ ID NO: 2107558
uuucacaaaggcuugguaa

SEQ ID NO: 2107560 - RNA, 19 nt, Artificial Sequence
  Description of Artificial Sequence: Synthetic oligonucleotide
  Sense strand starting at position 439 of SEQ ID NO: 1882266
uugugaaaucuguauaaca

SEQ ID NO: 2107561 - RNA, 19 nt, Artificial Sequence
  Description of Artificial Sequence: Synthetic oligonucleotide
  Antisense strand to SEQ ID NO: 2107560
uguuauacagauuucacaa

SEQ ID NO: 2107562 - RNA, 19 nt, Artificial Sequence
  Description of Artificial Sequence: Synthetic oligonucleotide
  Sense strand starting at position 677 of SEQ ID NO: 1882266
ggaacagccuuugcaagau

SEQ ID NO: 2107563 - RNA, 19 nt, Artificial Sequence
  Description of Artificial Sequence: Synthetic oligonucleotide
  Antisense strand to SEQ ID NO: 2107562
aucuugcaaaggcuguucc

SEQ ID NO: 2107564 - RNA, 19 nt, Artificial Sequence
  Description of Artificial Sequence: Synthetic oligonucleotide
  Sense strand starting at position 689 of SEQ ID NO: 1882266
gcaagauaccaaugcucuc

SEQ ID NO: 2107565 - RNA, 19 nt, Artificial Sequence
  Description of Artificial Sequence: Synthetic oligonucleotide
  Antisense strand to SEQ ID NO: 2107564
gagagcauugguaucuugc

SEQ ID NO: 2107566 - RNA, 19 nt, Artificial Sequence
  Description of Artificial Sequence: Synthetic oligonucleotide
  Sense strand starting at position 794 of SEQ ID NO: 1882266
acccauggagucugaucua

SEQ ID NO: 2107567 - RNA, 19 nt, Artificial Sequence
  Description of Artificial Sequence: Synthetic oligonucleotide
  Antisense strand to SEQ ID NO: 2107566
uagaucagacuccaugggu

SEQ ID NO: 2107568 - RNA, 19 nt, Artificial Sequence
  Description of Artificial Sequence: Synthetic oligonucleotide
  Sense strand starting at position 797 of SEQ ID NO: 1882266
cauggagucugaucuacaa

SEQ ID NO: 2107569 - RNA, 19 nt, Artificial Sequence
  Description of Artificial Sequence: Synthetic oligonucleotide
  Antisense strand to SEQ ID NO: 2107568
uuguagaucagacuccaug

SEQ ID NO: 2107570 - RNA, 19 nt, Artificial Sequence
  Description of Artificial Sequence: Synthetic oligonucleotide
  Sense strand starting at position 851 of SEQ ID NO: 1882266
ucuuauuuccuacgaaguc

SEQ ID NO: 2107571 - RNA, 19 nt, Artificial Sequence
  Description of Artificial Sequence: Synthetic oligonucleotide
  Antisense strand to SEQ ID NO: 2107570
gacuucguaggaaauaaga

SEQ ID NO: 2107572 - RNA, 19 nt, Artificial Sequence
  Description of Artificial Sequence: Synthetic oligonucleotide
  Sense strand starting at position 922 of SEQ ID NO: 1882266
ccauuugaauccugagaaa

SEQ ID NO: 2107573 - RNA, 19 nt, Artificial Sequence
  Description of Artificial Sequence: Synthetic oligonucleotide
  Antisense strand to SEQ ID NO: 2107572
uuucucaggauucaaaugg

SEQ ID NO: 2107574 - RNA, 19 nt, Artificial Sequence
  Description of Artificial Sequence: Synthetic oligonucleotide
  Sense strand starting at position 937 of SEQ ID NO: 1882266
gaaagacgcgcucaaagaa

SEQ ID NO: 2107575 - RNA, 19 nt, Artificial Sequence
  Description of Artificial Sequence: Synthetic oligonucleotide
  Antisense strand to SEQ ID NO: 2107574
uucuuugagcgcgucuuuc

SEQ ID NO: 2107576 - RNA, 19 nt, Artificial Sequence
  Description of Artificial Sequence: Synthetic oligonucleotide
  Sense strand starting at position 1194 of SEQ ID NO: 1882266
gggcuuuguguagagucaa

SEQ ID NO: 2107577 - RNA, 19 nt, Artificial Sequence
  Description of Artificial Sequence: Synthetic oligonucleotide
  Antisense strand to SEQ ID NO: 2107576
uugacucuacacaaagccc

SEQ ID NO: 2107578 - RNA, 19 nt, Artificial Sequence
  Description of Artificial Sequence: Synthetic oligonucleotide
  Sense strand starting at position 1206 of SEQ ID NO: 1882266
gagucaaggccgggauaga

SEQ ID NO: 2107579 - RNA, 19 nt, Artificial Sequence
  Description of Artificial Sequence: Synthetic oligonucleotide
  Antisense strand to SEQ ID NO: 2107578
ucuaucccggccuugacuc

SEQ ID NO: 2107580 - RNA, 19 nt, Artificial Sequence
  Description of Artificial Sequence: Synthetic oligonucleotide
  Sense strand starting at position 1533 of SEQ ID NO: 1882266
uuaagaugcggccaaaugu

SEQ ID NO: 2107581 - RNA, 19 nt, Artificial Sequence
  Description of Artificial Sequence: Synthetic oligonucleotide
  Antisense strand to SEQ ID NO: 2107580
acauuuggccgcaucuuaa

SEQ ID NO: 2107582 - RNA, 19 nt, Artificial Sequence
  Description of Artificial Sequence: Synthetic oligonucleotide
  Sense strand starting at position 2434 of SEQ ID NO: 1882266
cucguuugucguuuguuca

SEQ ID NO: 2107583 - RNA, 19 nt, Artificial Sequence
  Description of Artificial Sequence: Synthetic oligonucleotide
  Antisense strand to SEQ ID NO: 2107582
ugaacaaacgacaaacgag

SEQ ID NO: 2107584 - RNA, 19 nt, Artificial Sequence
  Description of Artificial Sequence: Synthetic oligonucleotide
  Sense strand starting at position 2507 of SEQ ID NO: 1882266
gggccuauuacggauguua

SEQ ID NO: 2107585 - RNA, 19 nt, Artificial Sequence
  Description of Artificial Sequence: Synthetic oligonucleotide
  Antisense strand to SEQ ID NO: 2107584
uaacauccguaauaggccc

SEQ ID NO: 2107586 - RNA, 19 nt, Artificial Sequence
  Description of Artificial Sequence: Synthetic oligonucleotide
  Sense strand starting at position 2509 of SEQ ID NO: 1882266
gccuauuacggauguuaag

SEQ ID NO: 2107587 - RNA, 19 nt, Artificial Sequence
  Description of Artificial Sequence: Synthetic oligonucleotide
  Antisense strand to SEQ ID NO: 2107586
cuuaacauccguaauaggc

SEQ ID NO: 2107588 - RNA, 19 nt, Artificial Sequence
  Description of Artificial Sequence: Synthetic oligonucleotide
  Sense strand starting at position 2565 of SEQ ID NO: 1882266
ggagcucauuuauaaggua

SEQ ID NO: 2107589 - RNA, 19 nt, Artificial Sequence
  Description of Artificial Sequence: Synthetic oligonucleotide
  Antisense strand to SEQ ID NO: 2107588
uaccuuauaaaugagcucc

SEQ ID NO: 2107590 - RNA, 19 nt, Artificial Sequence
  Description of Artificial Sequence: Synthetic oligonucleotide
  Sense strand starting at position 2658 of SEQ ID NO: 1882266
ucaacaacucuaggaggua

SEQ ID NO: 2107591 - RNA, 19 nt, Artificial Sequence
  Description of Artificial Sequence: Synthetic oligonucleotide
  Antisense strand to SEQ ID NO: 2107590
uaccuccuagaguuguuga

SEQ ID NO: 2107592 - RNA, 19 nt, Artificial Sequence
  Description of Artificial Sequence: Synthetic oligonucleotide
  Sense strand starting at position 2738 of SEQ ID NO: 1882266
aacugauaagucuggaggu

SEQ ID NO: 2107593 - RNA, 19 nt, Artificial Sequence
  Description of Artificial Sequence: Synthetic oligonucleotide
  Antisense strand to SEQ ID NO: 2107592
accuccagacuuaucaguu

SEQ ID NO: 2107594 - RNA, 19 nt, Artificial Sequence
  Description of Artificial Sequence: Synthetic oligonucleotide
  Sense strand starting at position 2740 of SEQ ID NO: 1882266
cugauaagucuggagguuu

SEQ ID NO: 2107595 - RNA, 19 nt, Artificial Sequence
  Description of Artificial Sequence: Synthetic oligonucleotide
  Antisense strand to SEQ ID NO: 2107594
aaaccuccagacuuaucag

SEQ ID NO: 2107596 - RNA, 19 nt, Artificial Sequence
  Description of Artificial Sequence: Synthetic oligonucleotide
  Sense strand starting at position 2815 of SEQ ID NO: 1882266
uggcuagacacuggaagau

SEQ ID NO: 2107597 - RNA, 19 nt, Artificial Sequence
  Description of Artificial Sequence: Synthetic oligonucleotide
  Antisense strand to SEQ ID NO: 2107596
aucuuccagugucuagcca

SEQ ID NO: 2107598 - RNA, 19 nt, Artificial Sequence
  Description of Artificial Sequence: Synthetic oligonucleotide
  Sense strand starting at position 2849 of SEQ ID NO: 1882266
uucgaaacucuuggagguu

SEQ ID NO: 2107599 - RNA, 19 nt, Artificial Sequence
  Description of Artificial Sequence: Synthetic oligonucleotide
  Antisense strand to SEQ ID NO: 2107598
aaccuccaagaguuucgaa

SEQ ID NO: 2107600 - RNA, 19 nt, Artificial Sequence
  Description of Artificial Sequence: Synthetic oligonucleotide
  Sense strand starting at position 2863 of SEQ ID NO: 1882266
agguuaugaauacaagugu

SEQ ID NO: 2107601 - RNA, 19 nt, Artificial Sequence
  Description of Artificial Sequence: Synthetic oligonucleotide
  Antisense strand to SEQ ID NO: 2107600
acacuuguauucauaaccu

SEQ ID NO: 2107602 - RNA, 19 nt, Artificial Sequence
  Description of Artificial Sequence: Synthetic oligonucleotide
  Sense strand starting at position 3091 of SEQ ID NO: 1882266
uuaauuugcuguuugacuu

SEQ ID NO: 2107603 - RNA, 19 nt, Artificial Sequence
  Description of Artificial Sequence: Synthetic oligonucleotide
  Antisense strand to SEQ ID NO: 2107602
aagucaaacagcaaauuaa

SEQ ID NO: 2107604 - RNA, 19 nt, Artificial Sequence
  Description of Artificial Sequence: Synthetic oligonucleotide
  Sense strand starting at position 3265 of SEQ ID NO: 1882266
gagaaauuacggugaguga

SEQ ID NO: 2107605 - RNA, 19 nt, Artificial Sequence
  Description of Artificial Sequence: Synthetic oligonucleotide
  Antisense strand to SEQ ID NO: 2107604
ucacucaccguaauuucuc

SEQ ID NO: 2107606 - RNA, 19 nt, Artificial Sequence
  Description of Artificial Sequence: Synthetic oligonucleotide
  Sense strand starting at position 3288 of SEQ ID NO: 1882266
cuggccuagagguaaaguu

SEQ ID NO: 2107607 - RNA, 19 nt, Artificial Sequence
  Description of Artificial Sequence: Synthetic oligonucleotide
  Antisense strand to SEQ ID NO: 2107606
aacuuuaccucuaggccag

SEQ ID NO: 2107608 - RNA, 19 nt, Artificial Sequence
  Description of Artificial Sequence: Synthetic oligonucleotide
  Sense strand starting at position 3318 of SEQ ID NO: 1882266
uaaguugugcucuaucaag

SEQ ID NO: 2107609 - RNA, 19 nt, Artificial Sequence
  Description of Artificial Sequence: Synthetic oligonucleotide
  Antisense strand to SEQ ID NO: 2107608
cuugauagagcacaacuua

SEQ ID NO: 2107610 - RNA, 19 nt, Artificial Sequence
  Description of Artificial Sequence: Synthetic oligonucleotide
  Sense strand starting at position 3372 of SEQ ID NO: 1882266
aagugaauuuaguagaagu

SEQ ID NO: 2107611 - RNA, 19 nt, Artificial Sequence
  Description of Artificial Sequence: Synthetic oligonucleotide
  Antisense strand to SEQ ID NO: 2107610
acuucuacuaaauucacuu

SEQ ID NO: 2107612 - RNA, 19 nt, Artificial Sequence
  Description of Artificial Sequence: Synthetic oligonucleotide
  Sense strand starting at position 3382 of SEQ ID NO: 1882266
aguagaagugaauguucuu

SEQ ID NO: 2107613 - RNA, 19 nt, Artificial Sequence
  Description of Artificial Sequence: Synthetic oligonucleotide
  Antisense strand to SEQ ID NO: 2107612
aagaacauucacuucuacu

SEQ ID NO: 2107614 - RNA, 19 nt, Artificial Sequence
  Description of Artificial Sequence: Synthetic oligonucleotide
  Sense strand starting at position 3508 of SEQ ID NO: 1882266
gcuguagcucaacacuuaa

SEQ ID NO: 2107615 - RNA, 19 nt, Artificial Sequence
  Description of Artificial Sequence: Synthetic oligonucleotide
  Antisense strand to SEQ ID NO: 2107614
uuaaguguugagcuacagc

SEQ ID NO: 2107616 - RNA, 19 nt, Artificial Sequence
  Description of Artificial Sequence: Synthetic oligonucleotide
  Sense strand starting at position 3565 of SEQ ID NO: 1882266
cuaugaauggagugucaua

SEQ ID NO: 2107617 - RNA, 19 nt, Artificial Sequence
  Description of Artificial Sequence: Synthetic oligonucleotide
  Antisense strand to SEQ ID NO: 2107616
uaugacacuccauucauag

SEQ ID NO: 2107618 - RNA, 19 nt, Artificial Sequence
  Description of Artificial Sequence: Synthetic oligonucleotide
  Sense strand starting at position 3661 of SEQ ID NO: 1882266
uuugaauugccuuaucugu

SEQ ID NO: 2107619 - RNA, 19 nt, Artificial Sequence
  Description of Artificial Sequence: Synthetic oligonucleotide
  Antisense strand to SEQ ID NO: 2107618
acagauaaggcaauucaaa

SEQ ID NO: 2107620 - RNA, 19 nt, Artificial Sequence
  Description of Artificial Sequence: Synthetic oligonucleotide
  Sense strand starting at position 3663 of SEQ ID NO: 1882266
ugaauugccuuaucuguaa

SEQ ID NO: 2107621 - RNA, 19 nt, Artificial Sequence
  Description of Artificial Sequence: Synthetic oligonucleotide
  Antisense strand to SEQ ID NO: 2107620
uuacagauaaggcaauuca

SEQ ID NO: 2107622 - RNA, 19 nt, Artificial Sequence
  Description of Artificial Sequence: Synthetic oligonucleotide
  Sense strand starting at position 3687 of SEQ ID NO: 1882266
ggcaguauuacuuggagag

SEQ ID NO: 2107623 - RNA, 19 nt, Artificial Sequence
  Description of Artificial Sequence: Synthetic oligonucleotide
  Antisense strand to SEQ ID NO: 2107622
cucuccaaguaauacugcc

SEQ ID NO: 2107624 - RNA, 19 nt, Artificial Sequence
  Description of Artificial Sequence: Synthetic oligonucleotide
  Sense strand starting at position 3688 of SEQ ID NO: 1882266
gcaguauuacuuggagagu

SEQ ID NO: 2107625 - RNA, 19 nt, Artificial Sequence
  Description of Artificial Sequence: Synthetic oligonucleotide
  Antisense strand to SEQ ID NO: 2107624
acucuccaaguaauacugc

SEQ ID NO: 2107626 - RNA, 19 nt, Artificial Sequence
  Description of Artificial Sequence: Synthetic oligonucleotide
  Sense strand starting at position 3758 of SEQ ID NO: 1882266
gaagaauuaugugaauaag

SEQ ID NO: 2107627 - RNA, 19 nt, Artificial Sequence
  Description of Artificial Sequence: Synthetic oligonucleotide
  Antisense strand to SEQ ID NO: 2107626
cuuauucacauaauucuuc

SEQ ID NO: 2107628 - RNA, 19 nt, Artificial Sequence
  Description of Artificial Sequence: Synthetic oligonucleotide
  Sense strand starting at position 3854 of SEQ ID NO: 1882266
gugagaagagccuggacau

SEQ ID NO: 2107629 - RNA, 19 nt, Artificial Sequence
  Description of Artificial Sequence: Synthetic oligonucleotide
  Antisense strand to SEQ ID NO: 2107628
auguccaggcucuucucac

SEQ ID NO: 2107630 - RNA, 19 nt, Artificial Sequence
  Description of Artificial Sequence: Synthetic oligonucleotide
  Sense strand starting at position 160 of SEQ ID NO: 1882265
uuccauuguggugacaaca

SEQ ID NO: 2107631 - RNA, 19 nt, Artificial Sequence
  Description of Artificial Sequence: Synthetic oligonucleotide
  Antisense strand to SEQ ID NO: 2107630
uguugucaccacaauggaa

SEQ ID NO: 2107632 - RNA, 19 nt, Artificial Sequence
  Description of Artificial Sequence: Synthetic oligonucleotide
  Sense strand starting at position 354 of SEQ ID NO: 1882265
aggguuacuuccuuuccaa

SEQ ID NO: 2107633 - RNA, 19 nt, Artificial Sequence
  Description of Artificial Sequence: Synthetic oligonucleotide
  Antisense strand to SEQ ID NO: 2107632
uuggaaaggaaguaacccu

SEQ ID NO: 2107634 - RNA, 19 nt, Artificial Sequence
  Description of Artificial Sequence: Synthetic oligonucleotide
  Sense strand starting at position 369 of SEQ ID NO: 1882265
ccaauuugaucagggaaug

SEQ ID NO: 2107635 - RNA, 19 nt, Artificial Sequence
  Description of Artificial Sequence: Synthetic oligonucleotide
  Antisense strand to SEQ ID NO: 2107634
cauucccugaucaaauugg

SEQ ID NO: 2107636 - RNA, 19 nt, Artificial Sequence
  Description of Artificial Sequence: Synthetic oligonucleotide
  Sense strand starting at position 551 of SEQ ID NO: 1882265
cuagcuaucgcagaucaau

SEQ ID NO: 2107637 - RNA, 19 nt, Artificial Sequence
  Description of Artificial Sequence: Synthetic oligonucleotide
  Antisense strand to SEQ ID NO: 2107636
auugaucugcgauagcuag

SEQ ID NO: 2107638 - RNA, 19 nt, Artificial Sequence
  Description of Artificial Sequence: Synthetic oligonucleotide
  Sense strand starting at position 836 of SEQ ID NO: 1882265
uaggauagauucucuguua

SEQ ID NO: 2107639 - RNA, 19 nt, Artificial Sequence
  Description of Artificial Sequence: Synthetic oligonucleotide
  Antisense strand to SEQ ID NO: 2107638
uaacagagaaucuauccua

SEQ ID NO: 2107640 - RNA, 19 nt, Artificial Sequence
  Description of Artificial Sequence: Synthetic oligonucleotide
  Sense strand starting at position 837 of SEQ ID NO: 1882265
aggauagauucucuguuaa

SEQ ID NO: 2107641 - RNA, 19 nt, Artificial Sequence
  Description of Artificial Sequence: Synthetic oligonucleotide
  Antisense strand to SEQ ID NO: 2107640
uuaacagagaaucuauccu

SEQ ID NO: 2107642 - RNA, 19 nt, Artificial Sequence
  Description of Artificial Sequence: Synthetic oligonucleotide
  Sense strand starting at position 861 of SEQ ID NO: 1882265
ggaaucccuucucucaaga

SEQ ID NO: 2107643 - RNA, 19 nt, Artificial Sequence
  Description of Artificial Sequence: Synthetic oligonucleotide
  Antisense strand to SEQ ID NO: 2107642
ucuugagagaagggauucc

SEQ ID NO: 2107644 - RNA, 19 nt, Artificial Sequence
  Description of Artificial Sequence: Synthetic oligonucleotide
  Sense strand starting at position 899 of SEQ ID NO: 1882265
uuaccaagccuuugugaaa

SEQ ID NO: 2107645 - RNA, 19 nt, Artificial Sequence
  Description of Artificial Sequence: Synthetic oligonucleotide
  Antisense strand to SEQ ID NO: 2107644
uuucacaaaggcuugguaa

SEQ ID NO: 2107646 - RNA, 19 nt, Artificial Sequence
  Description of Artificial Sequence: Synthetic oligonucleotide
  Sense strand starting at position 910 of SEQ ID NO: 1882265
uugugaaaucuguauaaca

SEQ ID NO: 2107647 - RNA, 19 nt, Artificial Sequence
  Description of Artificial Sequence: Synthetic oligonucleotide
  Antisense strand to SEQ ID NO: 2107646
uguuauacagauuucacaa

SEQ ID NO: 2107648 - RNA, 19 nt, Artificial Sequence
  Description of Artificial Sequence: Synthetic oligonucleotide
  Sense strand starting at position 1148 of SEQ ID NO: 1882265
ggaacagccuuugcaagau

SEQ ID NO: 2107649 - RNA, 19 nt, Artificial Sequence
  Description of Artificial Sequence: Synthetic oligonucleotide
  Antisense strand to SEQ ID NO: 2107648
aucuugcaaaggcuguucc

SEQ ID NO: 2107650 - RNA, 19 nt, Artificial Sequence
  Description of Artificial Sequence: Synthetic oligonucleotide
  Sense strand starting at position 1160 of SEQ ID NO: 1882265
gcaagauaccaaugcucuc

SEQ ID NO: 2107651 - RNA, 19 nt, Artificial Sequence
  Description of Artificial Sequence: Synthetic oligonucleotide
  Antisense strand to SEQ ID NO: 2107650
gagagcauugguaucuugc

SEQ ID NO: 2107652 - RNA, 19 nt, Artificial Sequence
  Description of Artificial Sequence: Synthetic oligonucleotide
  Sense strand starting at position 1265 of SEQ ID NO: 1882265
acccauggagucugaucua

SEQ ID NO: 2107653 - RNA, 19 nt, Artificial Sequence
  Description of Artificial Sequence: Synthetic oligonucleotide
  Antisense strand to SEQ ID NO: 2107652
uagaucagacuccaugggu

SEQ ID NO: 2107654 - RNA, 19 nt, Artificial Sequence
  Description of Artificial Sequence: Synthetic oligonucleotide
  Sense strand starting at position 1268 of SEQ ID NO: 1882265
cauggagucugaucuacaa

SEQ ID NO: 2107655 - RNA, 19 nt, Artificial Sequence
  Description of Artificial Sequence: Synthetic oligonucleotide
  Antisense strand to SEQ ID NO: 2107654
uuguagaucagacuccaug

SEQ ID NO: 2107656 - RNA, 19 nt, Artificial Sequence
  Description of Artificial Sequence: Synthetic oligonucleotide
  Sense strand starting at position 1320 of SEQ ID NO: 1882265
ccucuuauuuccuacgaag

SEQ ID NO: 2107657 - RNA, 19 nt, Artificial Sequence
  Description of Artificial Sequence: Synthetic oligonucleotide
  Antisense strand to SEQ ID NO: 2107656
cuucguaggaaauaagagg

SEQ ID NO: 2107658 - RNA, 19 nt, Artificial Sequence
  Description of Artificial Sequence: Synthetic oligonucleotide
  Sense strand starting at position 1322 of SEQ ID NO: 1882265
ucuuauuuccuacgaaguc

SEQ ID NO: 2107659 - RNA, 19 nt, Artificial Sequence
  Description of Artificial Sequence: Synthetic oligonucleotide
  Antisense strand to SEQ ID NO: 2107658
gacuucguaggaaauaaga

SEQ ID NO: 2107660 - RNA, 19 nt, Artificial Sequence
  Description of Artificial Sequence: Synthetic oligonucleotide
  Sense strand starting at position 1393 of SEQ ID NO: 1882265
ccauuugaauccugagaaa

SEQ ID NO: 2107661 - RNA, 19 nt, Artificial Sequence
  Description of Artificial Sequence: Synthetic oligonucleotide
  Antisense strand to SEQ ID NO: 2107660
uuucucaggauucaaaugg

SEQ ID NO: 2107662 - RNA, 19 nt, Artificial Sequence
  Description of Artificial Sequence: Synthetic oligonucleotide
  Sense strand starting at position 1396 of SEQ ID NO: 1882265
uuugaauccugagaaagac

SEQ ID NO: 2107663 - RNA, 19 nt, Artificial Sequence
  Description of Artificial Sequence: Synthetic oligonucleotide
  Antisense strand to SEQ ID NO: 2107662
gucuuucucaggauucaaa

SEQ ID NO: 2107664 - RNA, 19 nt, Artificial Sequence
  Description of Artificial Sequence: Synthetic oligonucleotide
  Sense strand starting at position 1408 of SEQ ID NO: 1882265
gaaagacgcgcucaaagaa

SEQ ID NO: 2107665 - RNA, 19 nt, Artificial Sequence
  Description of Artificial Sequence: Synthetic oligonucleotide
  Antisense strand to SEQ ID NO: 2107664
uucuuugagcgcgucuuuc

SEQ ID NO: 2107666 - RNA, 19 nt, Artificial Sequence
  Description of Artificial Sequence: Synthetic oligonucleotide
  Sense strand starting at position 1665 of SEQ ID NO: 1882265
gggcuuuguguagagucaa

SEQ ID NO: 2107667 - RNA, 19 nt, Artificial Sequence
  Description of Artificial Sequence: Synthetic oligonucleotide
  Antisense strand to SEQ ID NO: 2107666
uugacucuacacaaagccc

SEQ ID NO: 2107668 - RNA, 19 nt, Artificial Sequence
  Description of Artificial Sequence: Synthetic oligonucleotide
  Sense strand starting at position 1677 of SEQ ID NO: 1882265
gagucaaggccgggauaga

SEQ ID NO: 2107669 - RNA, 19 nt, Artificial Sequence
  Description of Artificial Sequence: Synthetic oligonucleotide
  Antisense strand to SEQ ID NO: 2107668
ucuaucccggccuugacuc

SEQ ID NO: 2107670 - RNA, 19 nt, Artificial Sequence
  Description of Artificial Sequence: Synthetic oligonucleotide
  Sense strand starting at position 2004 of SEQ ID NO: 1882265
uuaagaugcggccaaaugu

SEQ ID NO: 2107671 - RNA, 19 nt, Artificial Sequence
  Description of Artificial Sequence: Synthetic oligonucleotide
  Antisense strand to SEQ ID NO: 2107670
acauuuggccgcaucuuaa

SEQ ID NO: 2107672 - RNA, 19 nt, Artificial Sequence
  Description of Artificial Sequence: Synthetic oligonucleotide
  Sense strand starting at position 2905 of SEQ ID NO: 1882265
cucguuugucguuuguuca

SEQ ID NO: 2107673 - RNA, 19 nt, Artificial Sequence
  Description of Artificial Sequence: Synthetic oligonucleotide
  Antisense strand to SEQ ID NO: 2107672
ugaacaaacgacaaacgag

SEQ ID NO: 2107674 - RNA, 19 nt, Artificial Sequence
  Description of Artificial Sequence: Synthetic oligonucleotide
  Sense strand starting at position 2978 of SEQ ID NO: 1882265
gggccuauuacggauguua

SEQ ID NO: 2107675 - RNA, 19 nt, Artificial Sequence
  Description of Artificial Sequence: Synthetic oligonucleotide
  Antisense strand to SEQ ID NO: 2107674
uaacauccguaauaggccc

SEQ ID NO: 2107676 - RNA, 19 nt, Artificial Sequence
  Description of Artificial Sequence: Synthetic oligonucleotide
  Sense strand starting at position 2980 of SEQ ID NO: 1882265
gccuauuacggauguuaag

SEQ ID NO: 2107677 - RNA, 19 nt, Artificial Sequence
  Description of Artificial Sequence: Synthetic oligonucleotide
  Antisense strand to SEQ ID NO: 2107676
cuuaacauccguaauaggc

SEQ ID NO: 2107678 - RNA, 19 nt, Artificial Sequence
  Description of Artificial Sequence: Synthetic oligonucleotide
  Sense strand starting at position 3036 of SEQ ID NO: 1882265
ggagcucauuuauaaggua

SEQ ID NO: 2107679 - RNA, 19 nt, Artificial Sequence
  Description of Artificial Sequence: Synthetic oligonucleotide
  Antisense strand to SEQ ID NO: 2107678
uaccuuauaaaugagcucc

SEQ ID NO: 2107680 - RNA, 19 nt, Artificial Sequence
  Description of Artificial Sequence: Synthetic oligonucleotide
  Sense strand starting at position 3129 of SEQ ID NO: 1882265
ucaacaacucuaggaggua

SEQ ID NO: 2107681 - RNA, 19 nt, Artificial Sequence
  Description of Artificial Sequence: Synthetic oligonucleotide
  Antisense strand to SEQ ID NO: 2107680
uaccuccuagaguuguuga

SEQ ID NO: 2107682 - RNA, 19 nt, Artificial Sequence
  Description of Artificial Sequence: Synthetic oligonucleotide
  Sense strand starting at position 3209 of SEQ ID NO: 1882265
aacugauaagucuggaggu

SEQ ID NO: 2107683 - RNA, 19 nt, Artificial Sequence
  Description of Artificial Sequence: Synthetic oligonucleotide
  Antisense strand to SEQ ID NO: 2107682
accuccagacuuaucaguu

SEQ ID NO: 2107684 - RNA, 19 nt, Artificial Sequence
  Description of Artificial Sequence: Synthetic oligonucleotide
  Sense strand starting at position 3211 of SEQ ID NO: 1882265
cugauaagucuggagguuu

SEQ ID NO: 2107685 - RNA, 19 nt, Artificial Sequence
  Description of Artificial Sequence: Synthetic oligonucleotide
  Antisense strand to SEQ ID NO: 2107684
aaaccuccagacuuaucag

SEQ ID NO: 2107686 - RNA, 19 nt, Artificial Sequence
  Description of Artificial Sequence: Synthetic oligonucleotide
  Sense strand starting at position 3286 of SEQ ID NO: 1882265
uggcuagacacuggaagau

SEQ ID NO: 2107687 - RNA, 19 nt, Artificial Sequence
  Description of Artificial Sequence: Synthetic oligonucleotide
  Antisense strand to SEQ ID NO: 2107686
aucuuccagugucuagcca

SEQ ID NO: 2107688 - RNA, 19 nt, Artificial Sequence
  Description of Artificial Sequence: Synthetic oligonucleotide
  Sense strand starting at position 3320 of SEQ ID NO: 1882265
uucgaaacucuuggagguu

SEQ ID NO: 2107689 - RNA, 19 nt, Artificial Sequence
  Description of Artificial Sequence: Synthetic oligonucleotide
  Antisense strand to SEQ ID NO: 2107688
aaccuccaagaguuucgaa

SEQ ID NO: 2107690 - RNA, 19 nt, Artificial Sequence
  Description of Artificial Sequence: Synthetic oligonucleotide
  Sense strand starting at position 3334 of SEQ ID NO: 1882265
agguuaugaauacaagugu

SEQ ID NO: 2107691 - RNA, 19 nt, Artificial Sequence
  Description of Artificial Sequence: Synthetic oligonucleotide
  Antisense strand to SEQ ID NO: 2107690
acacuuguauucauaaccu

SEQ ID NO: 2107692 - RNA, 19 nt, Artificial Sequence
  Description of Artificial Sequence: Synthetic oligonucleotide
  Sense strand starting at position 3562 of SEQ ID NO: 1882265
uuaauuugcuguuugacuu

SEQ ID NO: 2107693 - RNA, 19 nt, Artificial Sequence
  Description of Artificial Sequence: Synthetic oligonucleotide
  Antisense strand to SEQ ID NO: 2107692
aagucaaacagcaaauuaa

SEQ ID NO: 2107694 - RNA, 19 nt, Artificial Sequence
  Description of Artificial Sequence: Synthetic oligonucleotide
  Sense strand starting at position 3736 of SEQ ID NO: 1882265
gagaaauuacggugaguga

SEQ ID NO: 2107695 - RNA, 19 nt, Artificial Sequence
  Description of Artificial Sequence: Synthetic oligonucleotide
  Antisense strand to SEQ ID NO: 2107694
ucacucaccguaauuucuc

SEQ ID NO: 2107696 - RNA, 19 nt, Artificial Sequence
  Description of Artificial Sequence: Synthetic oligonucleotide
  Sense strand starting at position 3759 of SEQ ID NO: 1882265
cuggccuagagguaaaguu

SEQ ID NO: 2107697 - RNA, 19 nt, Artificial Sequence
  Description of Artificial Sequence: Synthetic oligonucleotide
  Antisense strand to SEQ ID NO: 2107696
aacuuuaccucuaggccag

SEQ ID NO: 2107698 - RNA, 19 nt, Artificial Sequence
  Description of Artificial Sequence: Synthetic oligonucleotide
  Sense strand starting at position 3789 of SEQ ID NO: 1882265
uaaguugugcucuaucaag

SEQ ID NO: 2107699 - RNA, 19 nt, Artificial Sequence
  Description of Artificial Sequence: Synthetic oligonucleotide
  Antisense strand to SEQ ID NO: 2107698
cuugauagagcacaacuua

SEQ ID NO: 2107700 - RNA, 19 nt, Artificial Sequence
  Description of Artificial Sequence: Synthetic oligonucleotide
  Sense strand starting at position 3820 of SEQ ID NO: 1882265
uuggaagauucugagaaca

SEQ ID NO: 2107701 - RNA, 19 nt, Artificial Sequence
  Description of Artificial Sequence: Synthetic oligonucleotide
  Antisense strand to SEQ ID NO: 2107700
uguucucagaaucuuccaa

SEQ ID NO: 2107702 - RNA, 19 nt, Artificial Sequence
  Description of Artificial Sequence: Synthetic oligonucleotide
  Sense strand starting at position 3843 of SEQ ID NO: 1882265
aagugaauuuaguagaagu

SEQ ID NO: 2107703 - RNA, 19 nt, Artificial Sequence
  Description of Artificial Sequence: Synthetic oligonucleotide
  Antisense strand to SEQ ID NO: 2107702
acuucuacuaaauucacuu

SEQ ID NO: 2107704 - RNA, 19 nt, Artificial Sequence
  Description of Artificial Sequence: Synthetic oligonucleotide
  Sense strand starting at position 3853 of SEQ ID NO: 1882265
aguagaagugaauguucuu

SEQ ID NO: 2107705 - RNA, 19 nt, Artificial Sequence
  Description of Artificial Sequence: Synthetic oligonucleotide
  Antisense strand to SEQ ID NO: 2107704
aagaacauucacuucuacu

SEQ ID NO: 2107706 - RNA, 19 nt, Artificial Sequence
  Description of Artificial Sequence: Synthetic oligonucleotide
  Sense strand starting at position 3950 of SEQ ID NO: 1882265
gacuguucuccaugccaug

SEQ ID NO: 2107707 - RNA, 19 nt, Artificial Sequence
  Description of Artificial Sequence: Synthetic oligonucleotide
  Antisense strand to SEQ ID NO: 2107706
cauggcauggagaacaguc

SEQ ID NO: 2107708 - RNA, 19 nt, Artificial Sequence
  Description of Artificial Sequence: Synthetic oligonucleotide
  Sense strand starting at position 3979 of SEQ ID NO: 1882265
gcuguagcucaacacuuaa

SEQ ID NO: 2107709 - RNA, 19 nt, Artificial Sequence
  Description of Artificial Sequence: Synthetic oligonucleotide
  Antisense strand to SEQ ID NO: 2107708
uuaaguguugagcuacagc

SEQ ID NO: 2107710 - RNA, 19 nt, Artificial Sequence
  Description of Artificial Sequence: Synthetic oligonucleotide
  Sense strand starting at position 202 of SEQ ID NO: 1882267
uuaaguucccaggagguuu

SEQ ID NO: 2107711 - RNA, 19 nt, Artificial Sequence
  Description of Artificial Sequence: Synthetic oligonucleotide
  Antisense strand to SEQ ID NO: 2107710
aaaccuccugggaacuuaa

SEQ ID NO: 2107712 - RNA, 19 nt, Artificial Sequence
  Description of Artificial Sequence: Synthetic oligonucleotide
  Sense strand starting at position 259 of SEQ ID NO: 1882267
auucuauagguuuagggua

SEQ ID NO: 2107713 - RNA, 19 nt, Artificial Sequence
  Description of Artificial Sequence: Synthetic oligonucleotide
  Antisense strand to SEQ ID NO: 2107712
uacccuaaaccuauagaau

SEQ ID NO: 2107714 - RNA, 19 nt, Artificial Sequence
  Description of Artificial Sequence: Synthetic oligonucleotide
  Sense strand starting at position 928 of SEQ ID NO: 1882267
uacggucuucuagacauau

SEQ ID NO: 2107715 - RNA, 19 nt, Artificial Sequence
  Description of Artificial Sequence: Synthetic oligonucleotide
  Antisense strand to SEQ ID NO: 2107714
auaugucuagaagaccgua

SEQ ID NO: 2107716 - RNA, 19 nt, Artificial Sequence
  Description of Artificial Sequence: Synthetic oligonucleotide
  Sense strand starting at position 951 of SEQ ID NO: 1882267
auccuagaauucucggaag

SEQ ID NO: 2107717 - RNA, 19 nt, Artificial Sequence
  Description of Artificial Sequence: Synthetic oligonucleotide
  Antisense strand to SEQ ID NO: 2107716
cuuccgagaauucuaggau

SEQ ID NO: 2107718 - RNA, 19 nt, Artificial Sequence
  Description of Artificial Sequence: Synthetic oligonucleotide
  Sense strand starting at position 957 of SEQ ID NO: 1882267
gaauucucggaagguaauu

SEQ ID NO: 2107719 - RNA, 19 nt, Artificial Sequence
  Description of Artificial Sequence: Synthetic oligonucleotide
  Antisense strand to SEQ ID NO: 2107718
aauuaccuuccgagaauuc

SEQ ID NO: 2107720 - RNA, 19 nt, Artificial Sequence
  Description of Artificial Sequence: Synthetic oligonucleotide
  Sense strand starting at position 1000 of SEQ ID NO: 1882267
cuaggaguauguuuagaua

SEQ ID NO: 2107721 - RNA, 19 nt, Artificial Sequence
  Description of Artificial Sequence: Synthetic oligonucleotide
  Antisense strand to SEQ ID NO: 2107720
uaucuaaacauacuccuag

SEQ ID NO: 2107722 - RNA, 19 nt, Artificial Sequence
  Description of Artificial Sequence: Synthetic oligonucleotide
  Sense strand starting at position 1019 of SEQ ID NO: 1882267
ugcccauuccuugacugau

SEQ ID NO: 2107723 - RNA, 19 nt, Artificial Sequence
  Description of Artificial Sequence: Synthetic oligonucleotide
  Antisense strand to SEQ ID NO: 2107722
aucagucaaggaaugggca

SEQ ID NO: 2107724 - RNA, 19 nt, Artificial Sequence
  Description of Artificial Sequence: Synthetic oligonucleotide
  Sense strand starting at position 1028 of SEQ ID NO: 1882267
cuugacugauguccauaca

SEQ ID NO: 2107725 - RNA, 19 nt, Artificial Sequence
  Description of Artificial Sequence: Synthetic oligonucleotide
  Antisense strand to SEQ ID NO: 2107724
uguauggacaucagucaag

SEQ ID NO: 2107726 - RNA, 19 nt, Artificial Sequence
  Description of Artificial Sequence: Synthetic oligonucleotide
  Sense strand starting at position 1031 of SEQ ID NO: 1882267
gacugauguccauacaguc

SEQ ID NO: 2107727 - RNA, 19 nt, Artificial Sequence
  Description of Artificial Sequence: Synthetic oligonucleotide
  Antisense strand to SEQ ID NO: 2107726
gacuguauggacaucaguc

SEQ ID NO: 2107728 - RNA, 19 nt, Artificial Sequence
  Description of Artificial Sequence: Synthetic oligonucleotide
  Sense strand starting at position 1050 of SEQ ID NO: 1882267
augcucucccaacaagagu

SEQ ID NO: 2107729 - RNA, 19 nt, Artificial Sequence
  Description of Artificial Sequence: Synthetic oligonucleotide
  Antisense strand to SEQ ID NO: 2107728
acucuuguugggagagcau

SEQ ID NO: 2107730 - RNA, 19 nt, Artificial Sequence
  Description of Artificial Sequence: Synthetic oligonucleotide
  Sense strand starting at position 1118 of SEQ ID NO: 1882267
agucuaauucgacacucua

SEQ ID NO: 2107731 - RNA, 19 nt, Artificial Sequence
  Description of Artificial Sequence: Synthetic oligonucleotide
  Antisense strand to SEQ ID NO: 2107730
uagagugucgaauuagacu

SEQ ID NO: 2107732 - RNA, 19 nt, Artificial Sequence
  Description of Artificial Sequence: Synthetic oligonucleotide
  Sense strand starting at position 1190 of SEQ ID NO: 1882267
ggaauuacauagguuguca

SEQ ID NO: 2107733 - RNA, 19 nt, Artificial Sequence
  Description of Artificial Sequence: Synthetic oligonucleotide
  Antisense strand to SEQ ID NO: 2107732
ugacaaccuauguaauucc

SEQ ID NO: 2107734 - RNA, 19 nt, Artificial Sequence
  Description of Artificial Sequence: Synthetic oligonucleotide
  Sense strand starting at position 1355 of SEQ ID NO: 1882267
ccgaguauuaaaggaaacu

SEQ ID NO: 2107735 - RNA, 19 nt, Artificial Sequence
  Description of Artificial Sequence: Synthetic oligonucleotide
  Antisense strand to SEQ ID NO: 2107734
aguuuccuuuaauacucgg

SEQ ID NO: 2107736 - RNA, 19 nt, Artificial Sequence
  Description of Artificial Sequence: Synthetic oligonucleotide
  Sense strand starting at position 1364 of SEQ ID NO: 1882267
aaaggaaacugcuucggau

SEQ ID NO: 2107737 - RNA, 19 nt, Artificial Sequence
  Description of Artificial Sequence: Synthetic oligonucleotide
  Antisense strand to SEQ ID NO: 2107736
auccgaagcaguuuccuuu

SEQ ID NO: 2107738 - RNA, 19 nt, Artificial Sequence
  Description of Artificial Sequence: Synthetic oligonucleotide
  Sense strand starting at position 1425 of SEQ ID NO: 1882267
uguagucuuauugacgaaa

SEQ ID NO: 2107739 - RNA, 19 nt, Artificial Sequence
  Description of Artificial Sequence: Synthetic oligonucleotide
  Antisense strand to SEQ ID NO: 2107738
uuucgucaauaagacuaca

SEQ ID NO: 2107740 - RNA, 19 nt, Artificial Sequence
  Description of Artificial Sequence: Synthetic oligonucleotide
  Sense strand starting at position 1483 of SEQ ID NO: 1882267
gaaauugaguggcucugaa

SEQ ID NO: 2107741 - RNA, 19 nt, Artificial Sequence
  Description of Artificial Sequence: Synthetic oligonucleotide
  Antisense strand to SEQ ID NO: 2107740
uucagagccacucaauuuc

SEQ ID NO: 2107742 - RNA, 19 nt, Artificial Sequence
  Description of Artificial Sequence: Synthetic oligonucleotide
  Sense strand starting at position 1549 of SEQ ID NO: 1882267
uuguuucuucuagacauua

SEQ ID NO: 2107743 - RNA, 19 nt, Artificial Sequence
  Description of Artificial Sequence: Synthetic oligonucleotide
  Antisense strand to SEQ ID NO: 2107742
uaaugucuagaagaaacaa

SEQ ID NO: 2107744 - RNA, 19 nt, Artificial Sequence
  Description of Artificial Sequence: Synthetic oligonucleotide
  Sense strand starting at position 2045 of SEQ ID NO: 1882267
gcguauuucuagucugaca

SEQ ID NO: 2107745 - RNA, 19 nt, Artificial Sequence
  Description of Artificial Sequence: Synthetic oligonucleotide
  Antisense strand to SEQ ID NO: 2107744
ugucagacuagaaauacgc

SEQ ID NO: 2107746 - RNA, 19 nt, Artificial Sequence
  Description of Artificial Sequence: Synthetic oligonucleotide
  Sense strand starting at position 2067 of SEQ ID NO: 1882267
gauuguggauuaucugauu

SEQ ID NO: 2107747 - RNA, 19 nt, Artificial Sequence
  Description of Artificial Sequence: Synthetic oligonucleotide
  Antisense strand to SEQ ID NO: 2107746
aaucagauaauccacaauc

SEQ ID NO: 2107748 - RNA, 19 nt, Artificial Sequence
  Description of Artificial Sequence: Synthetic oligonucleotide
  Sense strand starting at position 2072 of SEQ ID NO: 1882267
uggauuaucugauugauug

SEQ ID NO: 2107749 - RNA, 19 nt, Artificial Sequence
  Description of Artificial Sequence: Synthetic oligonucleotide
  Antisense strand to SEQ ID NO: 2107748
caaucaaucagauaaucca

SEQ ID NO: 2107750 - RNA, 19 nt, Artificial Sequence
  Description of Artificial Sequence: Synthetic oligonucleotide
  Sense strand starting at position 2079 of SEQ ID NO: 1882267
ucugauugauuggcugaua

SEQ ID NO: 2107751 - RNA, 19 nt, Artificial Sequence
  Description of Artificial Sequence: Synthetic oligonucleotide
  Antisense strand to SEQ ID NO: 2107750
uaucagccaaucaaucaga

SEQ ID NO: 2107752 - RNA, 19 nt, Artificial Sequence
  Description of Artificial Sequence: Synthetic oligonucleotide
  Sense strand starting at position 2163 of SEQ ID NO: 1882267
ucagauguuggaugcaaau

SEQ ID NO: 2107753 - RNA, 19 nt, Artificial Sequence
  Description of Artificial Sequence: Synthetic oligonucleotide
  Antisense strand to SEQ ID NO: 2107752
auuugcauccaacaucuga

SEQ ID NO: 2107754 - RNA, 19 nt, Artificial Sequence
  Description of Artificial Sequence: Synthetic oligonucleotide
  Sense strand starting at position 2192 of SEQ ID NO: 1882267
gagggccaugccuauaaau

SEQ ID NO: 2107755 - RNA, 19 nt, Artificial Sequence
  Description of Artificial Sequence: Synthetic oligonucleotide
  Antisense strand to SEQ ID NO: 2107754
auuuauaggcauggcccuc

SEQ ID NO: 2107756 - RNA, 19 nt, Artificial Sequence
  Description of Artificial Sequence: Synthetic oligonucleotide
  Sense strand starting at position 2194 of SEQ ID NO: 1882267
gggccaugccuauaaauau

SEQ ID NO: 2107757 - RNA, 19 nt, Artificial Sequence
  Description of Artificial Sequence: Synthetic oligonucleotide
  Antisense strand to SEQ ID NO: 2107756
auauuuauaggcauggccc

SEQ ID NO: 2107758 - RNA, 19 nt, Artificial Sequence
  Description of Artificial Sequence: Synthetic oligonucleotide
  Sense strand starting at position 2249 of SEQ ID NO: 1882267
cccugugaacuuggaagau

SEQ ID NO: 2107759 - RNA, 19 nt, Artificial Sequence
  Description of Artificial Sequence: Synthetic oligonucleotide
  Antisense strand to SEQ ID NO: 2107758
aucuuccaaguucacaggg

SEQ ID NO: 2107760 - RNA, 19 nt, Artificial Sequence
  Description of Artificial Sequence: Synthetic oligonucleotide
  Sense strand starting at position 2370 of SEQ ID NO: 1882267
cgcaaagagagcuauucua

SEQ ID NO: 2107761 - RNA, 19 nt, Artificial Sequence
  Description of Artificial Sequence: Synthetic oligonucleotide
  Antisense strand to SEQ ID NO: 2107760
uagaauagcucucuuugcg

SEQ ID NO: 2107762 - RNA, 19 nt, Artificial Sequence
  Description of Artificial Sequence: Synthetic oligonucleotide
  Sense strand starting at position 2633 of SEQ ID NO: 1882267
guacacuagcuccaaguaa

SEQ ID NO: 2107763 - RNA, 19 nt, Artificial Sequence
  Description of Artificial Sequence: Synthetic oligonucleotide
  Antisense strand to SEQ ID NO: 2107762
uuacuuggagcuaguguac

SEQ ID NO: 2107764 - RNA, 19 nt, Artificial Sequence
  Description of Artificial Sequence: Synthetic oligonucleotide
  Sense strand starting at position 2715 of SEQ ID NO: 1882267
uucuaauagggcuguagaa

SEQ ID NO: 2107765 - RNA, 19 nt, Artificial Sequence
  Description of Artificial Sequence: Synthetic oligonucleotide
  Antisense strand to SEQ ID NO: 2107764
uucuacagcccuauuagaa

SEQ ID NO: 2107766 - RNA, 19 nt, Artificial Sequence
  Description of Artificial Sequence: Synthetic oligonucleotide
  Sense strand starting at position 2749 of SEQ ID NO: 1882267
agaguaugccucguugcca

SEQ ID NO: 2107767 - RNA, 19 nt, Artificial Sequence
  Description of Artificial Sequence: Synthetic oligonucleotide
  Antisense strand to SEQ ID NO: 2107766
uggcaacgaggcauacucu

SEQ ID NO: 2107768 - RNA, 19 nt, Artificial Sequence
  Description of Artificial Sequence: Synthetic oligonucleotide
  Sense strand starting at position 2793 of SEQ ID NO: 1882267
gcauaacaugguuaucuuu

SEQ ID NO: 2107769 - RNA, 19 nt, Artificial Sequence
  Description of Artificial Sequence: Synthetic oligonucleotide
  Antisense strand to SEQ ID NO: 2107768
aaagauaaccauguuaugc

SEQ ID NO: 2107770 - RNA, 19 nt, Artificial Sequence
  Description of Artificial Sequence: Synthetic oligonucleotide
  Sense strand starting at position 2919 of SEQ ID NO: 1882267
gggauauucuuucugugga

SEQ ID NO: 2107771 - RNA, 19 nt, Artificial Sequence
  Description of Artificial Sequence: Synthetic oligonucleotide
  Antisense strand to SEQ ID NO: 2107770
uccacagaaagaauauccc

SEQ ID NO: 2107772 - RNA, 19 nt, Artificial Sequence
  Description of Artificial Sequence: Synthetic oligonucleotide
  Sense strand starting at position 3073 of SEQ ID NO: 1882267
ugacuuuggccauaaugug

SEQ ID NO: 2107773 - RNA, 19 nt, Artificial Sequence
  Description of Artificial Sequence: Synthetic oligonucleotide
  Antisense strand to SEQ ID NO: 2107772
cacauuauggccaaaguca

SEQ ID NO: 2107774 - RNA, 19 nt, Artificial Sequence
  Description of Artificial Sequence: Synthetic oligonucleotide
  Sense strand starting at position 3275 of SEQ ID NO: 1882267
cucugugaacuccaguaaa

SEQ ID NO: 2107775 - RNA, 19 nt, Artificial Sequence
  Description of Artificial Sequence: Synthetic oligonucleotide
  Antisense strand to SEQ ID NO: 2107774
uuuacuggaguucacagag

SEQ ID NO: 2107776 - RNA, 19 nt, Artificial Sequence
  Description of Artificial Sequence: Synthetic oligonucleotide
  Sense strand starting at position 3278 of SEQ ID NO: 1882267
ugugaacuccaguaaacug

SEQ ID NO: 2107777 - RNA, 19 nt, Artificial Sequence
  Description of Artificial Sequence: Synthetic oligonucleotide
  Antisense strand to SEQ ID NO: 2107776
caguuuacuggaguucaca

SEQ ID NO: 2107778 - RNA, 19 nt, Artificial Sequence
  Description of Artificial Sequence: Synthetic oligonucleotide
  Sense strand starting at position 3321 of SEQ ID NO: 1882267
guugcuuagccgcuuaaga

SEQ ID NO: 2107779 - RNA, 19 nt, Artificial Sequence
  Description of Artificial Sequence: Synthetic oligonucleotide
  Antisense strand to SEQ ID NO: 2107778
ucuuaagcggcuaagcaac

SEQ ID NO: 2107780 - RNA, 19 nt, Artificial Sequence
  Description of Artificial Sequence: Synthetic oligonucleotide
  Sense strand starting at position 3372 of SEQ ID NO: 1882267
acagaacuguuccugaacu

SEQ ID NO: 2107781 - RNA, 19 nt, Artificial Sequence
  Description of Artificial Sequence: Synthetic oligonucleotide
  Antisense strand to SEQ ID NO: 2107780
aguucaggaacaguucugu

SEQ ID NO: 2107782 - RNA, 19 nt, Artificial Sequence
  Description of Artificial Sequence: Synthetic oligonucleotide
  Sense strand starting at position 3431 of SEQ ID NO: 1882267
gguuguccaagccagaaau

SEQ ID NO: 2107783 - RNA, 19 nt, Artificial Sequence
  Description of Artificial Sequence: Synthetic oligonucleotide
  Antisense strand to SEQ ID NO: 2107782
auuucuggcuuggacaacc

SEQ ID NO: 2107784 - RNA, 19 nt, Artificial Sequence
  Description of Artificial Sequence: Synthetic oligonucleotide
  Sense strand starting at position 3526 of SEQ ID NO: 1882267
auauuucuguugucugauu

SEQ ID NO: 2107785 - RNA, 19 nt, Artificial Sequence
  Description of Artificial Sequence: Synthetic oligonucleotide
  Antisense strand to SEQ ID NO: 2107784
aaucagacaacagaaauau

SEQ ID NO: 2107786 - RNA, 19 nt, Artificial Sequence
  Description of Artificial Sequence: Synthetic oligonucleotide
  Sense strand starting at position 3528 of SEQ ID NO: 1882267
auuucuguugucugauuau

SEQ ID NO: 2107787 - RNA, 19 nt, Artificial Sequence
  Description of Artificial Sequence: Synthetic oligonucleotide
  Antisense strand to SEQ ID NO: 2107786
auaaucagacaacagaaau

SEQ ID NO: 2107788 - RNA, 19 nt, Artificial Sequence
  Description of Artificial Sequence: Synthetic oligonucleotide
  Sense strand starting at position 3694 of SEQ ID NO: 1882267
guguauuuacuguguacaa

SEQ ID NO: 2107789 - RNA, 19 nt, Artificial Sequence
  Description of Artificial Sequence: Synthetic oligonucleotide
  Antisense strand to SEQ ID NO: 2107788
uuguacacaguaaauacac

SEQ ID NO: 2107790 - RNA, 19 nt, Artificial Sequence
  Description of Artificial Sequence: Synthetic oligonucleotide
  Sense strand starting at position 41 of SEQ ID NO: 1882268
gaguuagauuaacagaaga

SEQ ID NO: 2107791 - RNA, 19 nt, Artificial Sequence
  Description of Artificial Sequence: Synthetic oligonucleotide
  Antisense strand to SEQ ID NO: 2107790
ucuucuguuaaucuaacuc

SEQ ID NO: 2107792 - RNA, 19 nt, Artificial Sequence
  Description of Artificial Sequence: Synthetic oligonucleotide
  Sense strand starting at position 170 of SEQ ID NO: 1882268
guaagaaacucagcuguaa

SEQ ID NO: 2107793 - RNA, 19 nt, Artificial Sequence
  Description of Artificial Sequence: Synthetic oligonucleotide
  Antisense strand to SEQ ID NO: 2107792
uuacagcugaguuucuuac

SEQ ID NO: 2107794 - RNA, 19 nt, Artificial Sequence
  Description of Artificial Sequence: Synthetic oligonucleotide
  Sense strand starting at position 221 of SEQ ID NO: 1882268
ggguguugccuccaggagu

SEQ ID NO: 2107795 - RNA, 19 nt, Artificial Sequence
  Description of Artificial Sequence: Synthetic oligonucleotide
  Antisense strand to SEQ ID NO: 2107794
acuccuggaggcaacaccc

SEQ ID NO: 2107796 - RNA, 19 nt, Artificial Sequence
  Description of Artificial Sequence: Synthetic oligonucleotide
  Sense strand starting at position 359 of SEQ ID NO: 1882268
gugcucugaggauggagau

SEQ ID NO: 2107797 - RNA, 19 nt, Artificial Sequence
  Description of Artificial Sequence: Synthetic oligonucleotide
  Antisense strand to SEQ ID NO: 2107796
aucuccauccucagagcac

SEQ ID NO: 2107798 - RNA, 19 nt, Artificial Sequence
  Description of Artificial Sequence: Synthetic oligonucleotide
  Sense strand starting at position 814 of SEQ ID NO: 1882268
gccauucugcugguuaguu

SEQ ID NO: 2107799 - RNA, 19 nt, Artificial Sequence
  Description of Artificial Sequence: Synthetic oligonucleotide
  Antisense strand to SEQ ID NO: 2107798
aacuaaccagcagaauggc

SEQ ID NO: 2107800 - RNA, 19 nt, Artificial Sequence
  Description of Artificial Sequence: Synthetic oligonucleotide
  Sense strand starting at position 866 of SEQ ID NO: 1882268
ccacccuuucccggacaau

SEQ ID NO: 2107801 - RNA, 19 nt, Artificial Sequence
  Description of Artificial Sequence: Synthetic oligonucleotide
  Antisense strand to SEQ ID NO: 2107800
auuguccgggaaagggugg

SEQ ID NO: 2107802 - RNA, 19 nt, Artificial Sequence
  Description of Artificial Sequence: Synthetic oligonucleotide
  Sense strand starting at position 869 of SEQ ID NO: 1882268
cccuuucccggacaaugaa

SEQ ID NO: 2107803 - RNA, 19 nt, Artificial Sequence
  Description of Artificial Sequence: Synthetic oligonucleotide
  Antisense strand to SEQ ID NO: 2107802
uucauuguccgggaaaggg

SEQ ID NO: 2107804 - RNA, 19 nt, Artificial Sequence
  Description of Artificial Sequence: Synthetic oligonucleotide
  Sense strand starting at position 943 of SEQ ID NO: 1882268
gaauacuguuacccuggaa

SEQ ID NO: 2107805 - RNA, 19 nt, Artificial Sequence
  Description of Artificial Sequence: Synthetic oligonucleotide
  Antisense strand to SEQ ID NO: 2107804
uuccaggguaacaguauuc

SEQ ID NO: 2107806 - RNA, 19 nt, Artificial Sequence
  Description of Artificial Sequence: Synthetic oligonucleotide
  Sense strand starting at position 1106 of SEQ ID NO: 1882268
gguguaaauuuggaccaga

SEQ ID NO: 2107807 - RNA, 19 nt, Artificial Sequence
  Description of Artificial Sequence: Synthetic oligonucleotide
  Antisense strand to SEQ ID NO: 2107806
ucugguccaaauuuacacc

SEQ ID NO: 2107808 - RNA, 19 nt, Artificial Sequence
  Description of Artificial Sequence: Synthetic oligonucleotide
  Sense strand starting at position 1230 of SEQ ID NO: 1882268
uuucuuggcugucugauaa

SEQ ID NO: 2107809 - RNA, 19 nt, Artificial Sequence
  Description of Artificial Sequence: Synthetic oligonucleotide
  Antisense strand to SEQ ID NO: 2107808
uuaucagacagccaagaaa

SEQ ID NO: 2107810 - RNA, 19 nt, Artificial Sequence
  Description of Artificial Sequence: Synthetic oligonucleotide
  Sense strand starting at position 1478 of SEQ ID NO: 1882268
acugaauccucagugauac

SEQ ID NO: 2107811 - RNA, 19 nt, Artificial Sequence
  Description of Artificial Sequence: Synthetic oligonucleotide
  Antisense strand to SEQ ID NO: 2107810
guaucacugaggauucagu

SEQ ID NO: 2107812 - RNA, 19 nt, Artificial Sequence
  Description of Artificial Sequence: Synthetic oligonucleotide
  Sense strand starting at position 1479 of SEQ ID NO: 1882268
cugaauccucagugauacu

SEQ ID NO: 2107813 - RNA, 19 nt, Artificial Sequence
  Description of Artificial Sequence: Synthetic oligonucleotide
  Antisense strand to SEQ ID NO: 2107812
aguaucacugaggauucag

SEQ ID NO: 2107814 - RNA, 19 nt, Artificial Sequence
  Description of Artificial Sequence: Synthetic oligonucleotide
  Sense strand starting at position 1601 of SEQ ID NO: 1882268
ugaaaccuugucuguccaa

SEQ ID NO: 2107815 - RNA, 19 nt, Artificial Sequence
  Description of Artificial Sequence: Synthetic oligonucleotide
  Antisense strand to SEQ ID NO: 2107814
uuggacagacaagguuuca

SEQ ID NO: 2107816 - RNA, 19 nt, Artificial Sequence
  Description of Artificial Sequence: Synthetic oligonucleotide
  Sense strand starting at position 1613 of SEQ ID NO: 1882268
uguccaagguuauccugaa

SEQ ID NO: 2107817 - RNA, 19 nt, Artificial Sequence
  Description of Artificial Sequence: Synthetic oligonucleotide
  Antisense strand to SEQ ID NO: 2107816
uucaggauaaccuuggaca

SEQ ID NO: 2107818 - RNA, 19 nt, Artificial Sequence
  Description of Artificial Sequence: Synthetic oligonucleotide
  Sense strand starting at position 1684 of SEQ ID NO: 1882268
ccuuauuuacuguguccau

SEQ ID NO: 2107819 - RNA, 19 nt, Artificial Sequence
  Description of Artificial Sequence: Synthetic oligonucleotide
  Antisense strand to SEQ ID NO: 2107818
auggacacaguaaauaagg

SEQ ID NO: 2107820 - RNA, 19 nt, Artificial Sequence
  Description of Artificial Sequence: Synthetic oligonucleotide
  Sense strand starting at position 1695 of SEQ ID NO: 1882268
guguccauguuccuggaga

SEQ ID NO: 2107821 - RNA, 19 nt, Artificial Sequence
  Description of Artificial Sequence: Synthetic oligonucleotide
  Antisense strand to SEQ ID NO: 2107820
ucuccaggaacauggacac

SEQ ID NO: 2107822 - RNA, 19 nt, Artificial Sequence
  Description of Artificial Sequence: Synthetic oligonucleotide
  Sense strand starting at position 1697 of SEQ ID NO: 1882268
guccauguuccuggagaga

SEQ ID NO: 2107823 - RNA, 19 nt, Artificial Sequence
  Description of Artificial Sequence: Synthetic oligonucleotide
  Antisense strand to SEQ ID NO: 2107822
ucucuccaggaacauggac

SEQ ID NO: 2107824 - RNA, 19 nt, Artificial Sequence
  Description of Artificial Sequence: Synthetic oligonucleotide
  Sense strand starting at position 1742 of SEQ ID NO: 1882268
uccuauaggaggugaguuu

SEQ ID NO: 2107825 - RNA, 19 nt, Artificial Sequence
  Description of Artificial Sequence: Synthetic oligonucleotide
  Antisense strand to SEQ ID NO: 2107824
aaacucaccuccuauagga

SEQ ID NO: 2107826 - RNA, 19 nt, Artificial Sequence
  Description of Artificial Sequence: Synthetic oligonucleotide
  Sense strand starting at position 1751 of SEQ ID NO: 1882268
aggugaguuugauucucca

SEQ ID NO: 2107827 - RNA, 19 nt, Artificial Sequence
  Description of Artificial Sequence: Synthetic oligonucleotide
  Antisense strand to SEQ ID NO: 2107826
uggagaaucaaacucaccu

SEQ ID NO: 2107828 - RNA, 19 nt, Artificial Sequence
  Description of Artificial Sequence: Synthetic oligonucleotide
  Sense strand starting at position 1754 of SEQ ID NO: 1882268
ugaguuugauucuccagcu

SEQ ID NO: 2107829 - RNA, 19 nt, Artificial Sequence
  Description of Artificial Sequence: Synthetic oligonucleotide
  Antisense strand to SEQ ID NO: 2107828
agcuggagaaucaaacuca

SEQ ID NO: 2107830 - RNA, 19 nt, Artificial Sequence
  Description of Artificial Sequence: Synthetic oligonucleotide
  Sense strand starting at position 1762 of SEQ ID NO: 1882268
auucuccagcugugauaga

SEQ ID NO: 2107831 - RNA, 19 nt, Artificial Sequence
  Description of Artificial Sequence: Synthetic oligonucleotide
  Antisense strand to SEQ ID NO: 2107830
ucuaucacagcuggagaau

SEQ ID NO: 2107832 - RNA, 19 nt, Artificial Sequence
  Description of Artificial Sequence: Synthetic oligonucleotide
  Sense strand starting at position 1817 of SEQ ID NO: 1882268
cucagagucugguuccaua

SEQ ID NO: 2107833 - RNA, 19 nt, Artificial Sequence
  Description of Artificial Sequence: Synthetic oligonucleotide
  Antisense strand to SEQ ID NO: 2107832
uauggaaccagacucugag

SEQ ID NO: 2107834 - RNA, 19 nt, Artificial Sequence
  Description of Artificial Sequence: Synthetic oligonucleotide
  Sense strand starting at position 2176 of SEQ ID NO: 1882268
auugcucacugggcagaaa

SEQ ID NO: 2107835 - RNA, 19 nt, Artificial Sequence
  Description of Artificial Sequence: Synthetic oligonucleotide
  Antisense strand to SEQ ID NO: 2107834
uuucugcccagugagcaau

SEQ ID NO: 2107836 - RNA, 19 nt, Artificial Sequence
  Description of Artificial Sequence: Synthetic oligonucleotide
  Sense strand starting at position 2187 of SEQ ID NO: 1882268
ggcagaaaguuaguauuaa

SEQ ID NO: 2107837 - RNA, 19 nt, Artificial Sequence
  Description of Artificial Sequence: Synthetic oligonucleotide
  Antisense strand to SEQ ID NO: 2107836
uuaauacuaacuuucugcc

SEQ ID NO: 2107838 - RNA, 19 nt, Artificial Sequence
  Description of Artificial Sequence: Synthetic oligonucleotide
  Sense strand starting at position 2231 of SEQ ID NO: 1882268
ugcuguuacgaggacagau

SEQ ID NO: 2107839 - RNA, 19 nt, Artificial Sequence
  Description of Artificial Sequence: Synthetic oligonucleotide
  Antisense strand to SEQ ID NO: 2107838
aucuguccucguaacagca

SEQ ID NO: 2107840 - RNA, 19 nt, Artificial Sequence
  Description of Artificial Sequence: Synthetic oligonucleotide
  Sense strand starting at position 2273 of SEQ ID NO: 1882268
accagucagagucaugagu

SEQ ID NO: 2107841 - RNA, 19 nt, Artificial Sequence
  Description of Artificial Sequence: Synthetic oligonucleotide
  Antisense strand to SEQ ID NO: 2107840
acucaugacucugacuggu

SEQ ID NO: 2107842 - RNA, 19 nt, Artificial Sequence
  Description of Artificial Sequence: Synthetic oligonucleotide
  Sense strand starting at position 2318 of SEQ ID NO: 1882268
cucugaaggugaucucaga

SEQ ID NO: 2107843 - RNA, 19 nt, Artificial Sequence
  Description of Artificial Sequence: Synthetic oligonucleotide
  Antisense strand to SEQ ID NO: 2107842
ucugagaucaccuucagag

SEQ ID NO: 2107844 - RNA, 19 nt, Artificial Sequence
  Description of Artificial Sequence: Synthetic oligonucleotide
  Sense strand starting at position 2425 of SEQ ID NO: 1882268
augcuaucucaauguguaa

SEQ ID NO: 2107845 - RNA, 19 nt, Artificial Sequence
  Description of Artificial Sequence: Synthetic oligonucleotide
  Antisense strand to SEQ ID NO: 2107844
uuacacauugagauagcau

SEQ ID NO: 2107846 - RNA, 19 nt, Artificial Sequence
  Description of Artificial Sequence: Synthetic oligonucleotide
  Sense strand starting at position 2456 of SEQ ID NO: 1882268
uggcaugauuuagagagau

SEQ ID NO: 2107847 - RNA, 19 nt, Artificial Sequence
  Description of Artificial Sequence: Synthetic oligonucleotide
  Antisense strand to SEQ ID NO: 2107846
aucucucuaaaucaugcca

SEQ ID NO: 2107848 - RNA, 19 nt, Artificial Sequence
  Description of Artificial Sequence: Synthetic oligonucleotide
  Sense strand starting at position 2576 of SEQ ID NO: 1882268
acaugucugugaguccuga

SEQ ID NO: 2107849 - RNA, 19 nt, Artificial Sequence
  Description of Artificial Sequence: Synthetic oligonucleotide
  Antisense strand to SEQ ID NO: 2107848
ucaggacucacagacaugu

SEQ ID NO: 2107850 - RNA, 19 nt, Artificial Sequence
  Description of Artificial Sequence: Synthetic oligonucleotide
  Sense strand starting at position 2661 of SEQ ID NO: 1882268
gccuuacaccugggagcau

SEQ ID NO: 2107851 - RNA, 19 nt, Artificial Sequence
  Description of Artificial Sequence: Synthetic oligonucleotide
  Antisense strand to SEQ ID NO: 2107850
augcucccagguguaaggc

SEQ ID NO: 2107852 - RNA, 19 nt, Artificial Sequence
  Description of Artificial Sequence: Synthetic oligonucleotide
  Sense strand starting at position 2792 of SEQ ID NO: 1882268
ggcucuuaaggucaaauua

SEQ ID NO: 2107853 - RNA, 19 nt, Artificial Sequence
  Description of Artificial Sequence: Synthetic oligonucleotide
  Antisense strand to SEQ ID NO: 2107852
uaauuugaccuuaagagcc

SEQ ID NO: 2107854 - RNA, 19 nt, Artificial Sequence
  Description of Artificial Sequence: Synthetic oligonucleotide
  Sense strand starting at position 2820 of SEQ ID NO: 1882268
aucuguaauugcuuuggaa

SEQ ID NO: 2107855 - RNA, 19 nt, Artificial Sequence
  Description of Artificial Sequence: Synthetic oligonucleotide
  Antisense strand to SEQ ID NO: 2107854
uuccaaagcaauuacagau

SEQ ID NO: 2107856 - RNA, 19 nt, Artificial Sequence
  Description of Artificial Sequence: Synthetic oligonucleotide
  Sense strand starting at position 2927 of SEQ ID NO: 1882268
gguguuuauacugaauagu

SEQ ID NO: 2107857 - RNA, 19 nt, Artificial Sequence
  Description of Artificial Sequence: Synthetic oligonucleotide
  Antisense strand to SEQ ID NO: 2107856
acuauucaguauaaacacc

SEQ ID NO: 2107858 - RNA, 19 nt, Artificial Sequence
  Description of Artificial Sequence: Synthetic oligonucleotide
  Sense strand starting at position 2987 of SEQ ID NO: 1882268
cuauaaaugugauccugua

SEQ ID NO: 2107859 - RNA, 19 nt, Artificial Sequence
  Description of Artificial Sequence: Synthetic oligonucleotide
  Antisense strand to SEQ ID NO: 2107858
uacaggaucacauuuauag

SEQ ID NO: 2107860 - RNA, 19 nt, Artificial Sequence
  Description of Artificial Sequence: Synthetic oligonucleotide
  Sense strand starting at position 3038 of SEQ ID NO: 1882268
guggcaucauuuguuuaua

SEQ ID NO: 2107861 - RNA, 19 nt, Artificial Sequence
  Description of Artificial Sequence: Synthetic oligonucleotide
  Antisense strand to SEQ ID NO: 2107860
uauaaacaaaugaugccac

SEQ ID NO: 2107862 - RNA, 19 nt, Artificial Sequence
  Description of Artificial Sequence: Synthetic oligonucleotide
  Sense strand starting at position 3039 of SEQ ID NO: 1882268
uggcaucauuuguuuauau

SEQ ID NO: 2107863 - RNA, 19 nt, Artificial Sequence
  Description of Artificial Sequence: Synthetic oligonucleotide
  Antisense strand to SEQ ID NO: 2107862
auauaaacaaaugaugcca

SEQ ID NO: 2107864 - RNA, 19 nt, Artificial Sequence
  Description of Artificial Sequence: Synthetic oligonucleotide
  Sense strand starting at position 3166 of SEQ ID NO: 1882268
ugccauagucaccaagaca

SEQ ID NO: 2107865 - RNA, 19 nt, Artificial Sequence
  Description of Artificial Sequence: Synthetic oligonucleotide
  Antisense strand to SEQ ID NO: 2107864
ugucuuggugacuauggca

SEQ ID NO: 2107866 - RNA, 19 nt, Artificial Sequence
  Description of Artificial Sequence: Synthetic oligonucleotide
  Sense strand starting at position 3343 of SEQ ID NO: 1882268
uggcuauccacauguagga

SEQ ID NO: 2107867 - RNA, 19 nt, Artificial Sequence
  Description of Artificial Sequence: Synthetic oligonucleotide
  Antisense strand to SEQ ID NO: 2107866
uccuacauguggauagcca

SEQ ID NO: 2107868 - RNA, 19 nt, Artificial Sequence
  Description of Artificial Sequence: Synthetic oligonucleotide
  Sense strand starting at position 3622 of SEQ ID NO: 1882268
cccacagaguagucacaau

SEQ ID NO: 2107869 - RNA, 19 nt, Artificial Sequence
  Description of Artificial Sequence: Synthetic oligonucleotide
  Antisense strand to SEQ ID NO: 2107868
auugugacuacucuguggg

SEQ ID NO: 2107870 - RNA, 19 nt, Artificial Sequence
  Description of Artificial Sequence: Synthetic oligonucleotide
  Sense strand starting at position 104 of SEQ ID NO: 1882269
ggauguaucuguucaggua

SEQ ID NO: 2107871 - RNA, 19 nt, Artificial Sequence
  Description of Artificial Sequence: Synthetic oligonucleotide
  Antisense strand to SEQ ID NO: 2107870
uaccugaacagauacaucc

SEQ ID NO: 2107872 - RNA, 19 nt, Artificial Sequence
  Description of Artificial Sequence: Synthetic oligonucleotide
  Sense strand starting at position 162 of SEQ ID NO: 1882269
cuuagccugcuccaagaaa

SEQ ID NO: 2107873 - RNA, 19 nt, Artificial Sequence
  Description of Artificial Sequence: Synthetic oligonucleotide
  Antisense strand to SEQ ID NO: 2107872
uuucuuggagcaggcuaag

SEQ ID NO: 2107874 - RNA, 19 nt, Artificial Sequence
  Description of Artificial Sequence: Synthetic oligonucleotide
  Sense strand starting at position 212 of SEQ ID NO: 1882269
agggauggccucugaggaa

SEQ ID NO: 2107875 - RNA, 19 nt, Artificial Sequence
  Description of Artificial Sequence: Synthetic oligonucleotide
  Antisense strand to SEQ ID NO: 2107874
uuccucagaggccaucccu

SEQ ID NO: 2107876 - RNA, 19 nt, Artificial Sequence
  Description of Artificial Sequence: Synthetic oligonucleotide
  Sense strand starting at position 701 of SEQ ID NO: 1882269
cagugaaagcuauggccaa

SEQ ID NO: 2107877 - RNA, 19 nt, Artificial Sequence
  Description of Artificial Sequence: Synthetic oligonucleotide
  Antisense strand to SEQ ID NO: 2107876
uuggccauagcuuucacug

SEQ ID NO: 2107878 - RNA, 19 nt, Artificial Sequence
  Description of Artificial Sequence: Synthetic oligonucleotide
  Sense strand starting at position 758 of SEQ ID NO: 1882269
gucagaaguguggaguucu

SEQ ID NO: 2107879 - RNA, 19 nt, Artificial Sequence
  Description of Artificial Sequence: Synthetic oligonucleotide
  Antisense strand to SEQ ID NO: 2107878
agaacuccacacuucugac

SEQ ID NO: 2107880 - RNA, 19 nt, Artificial Sequence
  Description of Artificial Sequence: Synthetic oligonucleotide
  Sense strand starting at position 819 of SEQ ID NO: 1882269
cagagaaggacccguugaa

SEQ ID NO: 2107881 - RNA, 19 nt, Artificial Sequence
  Description of Artificial Sequence: Synthetic oligonucleotide
  Antisense strand to SEQ ID NO: 2107880
uucaacggguccuucucug

SEQ ID NO: 2107882 - RNA, 19 nt, Artificial Sequence
  Description of Artificial Sequence: Synthetic oligonucleotide
  Sense strand starting at position 853 of SEQ ID NO: 1882269
ugugacuugacagguuaag

SEQ ID NO: 2107883 - RNA, 19 nt, Artificial Sequence
  Description of Artificial Sequence: Synthetic oligonucleotide
  Antisense strand to SEQ ID NO: 2107882
cuuaaccugucaagucaca

SEQ ID NO: 2107884 - RNA, 19 nt, Artificial Sequence
  Description of Artificial Sequence: Synthetic oligonucleotide
  Sense strand starting at position 1106 of SEQ ID NO: 1882269
cuggauuuauacuaaagac

SEQ ID NO: 2107885 - RNA, 19 nt, Artificial Sequence
  Description of Artificial Sequence: Synthetic oligonucleotide
  Antisense strand to SEQ ID NO: 2107884
gucuuuaguauaaauccag

SEQ ID NO: 2107886 - RNA, 19 nt, Artificial Sequence
  Description of Artificial Sequence: Synthetic oligonucleotide
  Sense strand starting at position 1257 of SEQ ID NO: 1882269
uggcaaaugucaucugaua

SEQ ID NO: 2107887 - RNA, 19 nt, Artificial Sequence
  Description of Artificial Sequence: Synthetic oligonucleotide
  Antisense strand to SEQ ID NO: 2107886
uaucagaugacauuugcca

SEQ ID NO: 2107888 - RNA, 19 nt, Artificial Sequence
  Description of Artificial Sequence: Synthetic oligonucleotide
  Sense strand starting at position 1266 of SEQ ID NO: 1882269
ucaucugauaaggguaagu

SEQ ID NO: 2107889 - RNA, 19 nt, Artificial Sequence
  Description of Artificial Sequence: Synthetic oligonucleotide
  Antisense strand to SEQ ID NO: 2107888
acuuacccuuaucagauga

SEQ ID NO: 2107890 - RNA, 19 nt, Artificial Sequence
  Description of Artificial Sequence: Synthetic oligonucleotide
  Sense strand starting at position 1276 of SEQ ID NO: 1882269
aggguaaguggucaaaggu

SEQ ID NO: 2107891 - RNA, 19 nt, Artificial Sequence
  Description of Artificial Sequence: Synthetic oligonucleotide
  Antisense strand to SEQ ID NO: 2107890
accuuugaccacuuacccu

SEQ ID NO: 2107892 - RNA, 19 nt, Artificial Sequence
  Description of Artificial Sequence: Synthetic oligonucleotide
  Sense strand starting at position 1303 of SEQ ID NO: 1882269
gcucuuauuggugacaugu

SEQ ID NO: 2107893 - RNA, 19 nt, Artificial Sequence
  Description of Artificial Sequence: Synthetic oligonucleotide
  Antisense strand to SEQ ID NO: 2107892
acaugucaccaauaagagc

SEQ ID NO: 2107894 - RNA, 19 nt, Artificial Sequence
  Description of Artificial Sequence: Synthetic oligonucleotide
  Sense strand starting at position 1504 of SEQ ID NO: 1882269
uuacauugugaaugguauc

SEQ ID NO: 2107895 - RNA, 19 nt, Artificial Sequence
  Description of Artificial Sequence: Synthetic oligonucleotide
  Antisense strand to SEQ ID NO: 2107894
gauaccauucacaauguaa

SEQ ID NO: 2107896 - RNA, 19 nt, Artificial Sequence
  Description of Artificial Sequence: Synthetic oligonucleotide
  Sense strand starting at position 1542 of SEQ ID NO: 1882269
aaaucugaggcauguuagu

SEQ ID NO: 2107897 - RNA, 19 nt, Artificial Sequence
  Description of Artificial Sequence: Synthetic oligonucleotide
  Antisense strand to SEQ ID NO: 2107896
acuaacaugccucagauuu

SEQ ID NO: 2107898 - RNA, 19 nt, Artificial Sequence
  Description of Artificial Sequence: Synthetic oligonucleotide
  Sense strand starting at position 1601 of SEQ ID NO: 1882269
gagcaaacuguugaaaguu

SEQ ID NO: 2107899 - RNA, 19 nt, Artificial Sequence
  Description of Artificial Sequence: Synthetic oligonucleotide
  Antisense strand to SEQ ID NO: 2107898
aacuuucaacaguuugcuc

SEQ ID NO: 2107900 - RNA, 19 nt, Artificial Sequence
  Description of Artificial Sequence: Synthetic oligonucleotide
  Sense strand starting at position 1697 of SEQ ID NO: 1882269
cugaacuugcauugacuaa

SEQ ID NO: 2107901 - RNA, 19 nt, Artificial Sequence
  Description of Artificial Sequence: Synthetic oligonucleotide
  Antisense strand to SEQ ID NO: 2107900
uuagucaaugcaaguucag

SEQ ID NO: 2107902 - RNA, 19 nt, Artificial Sequence
  Description of Artificial Sequence: Synthetic oligonucleotide
  Sense strand starting at position 2024 of SEQ ID NO: 1882269
ucauauagccucuguggaa

SEQ ID NO: 2107903 - RNA, 19 nt, Artificial Sequence
  Description of Artificial Sequence: Synthetic oligonucleotide
  Antisense strand to SEQ ID NO: 2107902
uuccacagaggcuauauga

SEQ ID NO: 2107904 - RNA, 19 nt, Artificial Sequence
  Description of Artificial Sequence: Synthetic oligonucleotide
  Sense strand starting at position 2025 of SEQ ID NO: 1882269
cauauagccucuguggaau

SEQ ID NO: 2107905 - RNA, 19 nt, Artificial Sequence
  Description of Artificial Sequence: Synthetic oligonucleotide
  Antisense strand to SEQ ID NO: 2107904
auuccacagaggcuauaug

SEQ ID NO: 2107906 - RNA, 19 nt, Artificial Sequence
  Description of Artificial Sequence: Synthetic oligonucleotide
  Sense strand starting at position 2043 of SEQ ID NO: 1882269
ugcugaauuggugacaauu

SEQ ID NO: 2107907 - RNA, 19 nt, Artificial Sequence
  Description of Artificial Sequence: Synthetic oligonucleotide
  Antisense strand to SEQ ID NO: 2107906
aauugucaccaauucagca

SEQ ID NO: 2107908 - RNA, 19 nt, Artificial Sequence
  Description of Artificial Sequence: Synthetic oligonucleotide
  Sense strand starting at position 2645 of SEQ ID NO: 1882269
uaaugagcuguuugaauag

SEQ ID NO: 2107909 - RNA, 19 nt, Artificial Sequence
  Description of Artificial Sequence: Synthetic oligonucleotide
  Antisense strand to SEQ ID NO: 2107908
cuauucaaacagcucauua

SEQ ID NO: 2107910 - RNA, 19 nt, Artificial Sequence
  Description of Artificial Sequence: Synthetic oligonucleotide
  Sense strand starting at position 2704 of SEQ ID NO: 1882269
uagugugaccaaggaaacu

SEQ ID NO: 2107911 - RNA, 19 nt, Artificial Sequence
  Description of Artificial Sequence: Synthetic oligonucleotide
  Antisense strand to SEQ ID NO: 2107910
aguuuccuuggucacacua

SEQ ID NO: 2107912 - RNA, 19 nt, Artificial Sequence
  Description of Artificial Sequence: Synthetic oligonucleotide
  Sense strand starting at position 2747 of SEQ ID NO: 1882269
gcucuauggccaugaugag

SEQ ID NO: 2107913 - RNA, 19 nt, Artificial Sequence
  Description of Artificial Sequence: Synthetic oligonucleotide
  Antisense strand to SEQ ID NO: 2107912
cucaucauggccauagagc

SEQ ID NO: 2107914 - RNA, 19 nt, Artificial Sequence
  Description of Artificial Sequence: Synthetic oligonucleotide
  Sense strand starting at position 2748 of SEQ ID NO: 1882269
cucuauggccaugaugagu

SEQ ID NO: 2107915 - RNA, 19 nt, Artificial Sequence
  Description of Artificial Sequence: Synthetic oligonucleotide
  Antisense strand to SEQ ID NO: 2107914
acucaucauggccauagag

SEQ ID NO: 2107916 - RNA, 19 nt, Artificial Sequence
  Description of Artificial Sequence: Synthetic oligonucleotide
  Sense strand starting at position 2823 of SEQ ID NO: 1882269
uggaaagauuaacaggaau

SEQ ID NO: 2107917 - RNA, 19 nt, Artificial Sequence
  Description of Artificial Sequence: Synthetic oligonucleotide
  Antisense strand to SEQ ID NO: 2107916
auuccuguuaaucuuucca

SEQ ID NO: 2107918 - RNA, 19 nt, Artificial Sequence
  Description of Artificial Sequence: Synthetic oligonucleotide
  Sense strand starting at position 2927 of SEQ ID NO: 1882269
uggcaagauuuacaggcaa

SEQ ID NO: 2107919 - RNA, 19 nt, Artificial Sequence
  Description of Artificial Sequence: Synthetic oligonucleotide
  Antisense strand to SEQ ID NO: 2107918
uugccuguaaaucuugcca

SEQ ID NO: 2107920 - RNA, 19 nt, Artificial Sequence
  Description of Artificial Sequence: Synthetic oligonucleotide
  Sense strand starting at position 2967 of SEQ ID NO: 1882269
uggugauauuccuuacaaa

SEQ ID NO: 2107921 - RNA, 19 nt, Artificial Sequence
  Description of Artificial Sequence: Synthetic oligonucleotide
  Antisense strand to SEQ ID NO: 2107920
uuuguaaggaauaucacca

SEQ ID NO: 2107922 - RNA, 19 nt, Artificial Sequence
  Description of Artificial Sequence: Synthetic oligonucleotide
  Sense strand starting at position 3016 of SEQ ID NO: 1882269
gcuauuauuggaugauauc

SEQ ID NO: 2107923 - RNA, 19 nt, Artificial Sequence
  Description of Artificial Sequence: Synthetic oligonucleotide
  Antisense strand to SEQ ID NO: 2107922
gauaucauccaauaauagc

SEQ ID NO: 2107924 - RNA, 19 nt, Artificial Sequence
  Description of Artificial Sequence: Synthetic oligonucleotide
  Sense strand starting at position 3159 of SEQ ID NO: 1882269
caaucugggcagcagaaua

SEQ ID NO: 2107925 - RNA, 19 nt, Artificial Sequence
  Description of Artificial Sequence: Synthetic oligonucleotide
  Antisense strand to SEQ ID NO: 2107924
uauucugcugcccagauug

SEQ ID NO: 2107926 - RNA, 19 nt, Artificial Sequence
  Description of Artificial Sequence: Synthetic oligonucleotide
  Sense strand starting at position 3231 of SEQ ID NO: 1882269
gccagugaaauuugugcca

SEQ ID NO: 2107927 - RNA, 19 nt, Artificial Sequence
  Description of Artificial Sequence: Synthetic oligonucleotide
  Antisense strand to SEQ ID NO: 2107926
uggcacaaauuucacuggc

SEQ ID NO: 2107928 - RNA, 19 nt, Artificial Sequence
  Description of Artificial Sequence: Synthetic oligonucleotide
  Sense strand starting at position 3416 of SEQ ID NO: 1882269
gggcaauuggccugggaau

SEQ ID NO: 2107929 - RNA, 19 nt, Artificial Sequence
  Description of Artificial Sequence: Synthetic oligonucleotide
  Antisense strand to SEQ ID NO: 2107928
auucccaggccaauugccc

SEQ ID NO: 2107930 - RNA, 19 nt, Artificial Sequence
  Description of Artificial Sequence: Synthetic oligonucleotide
  Sense strand starting at position 3417 of SEQ ID NO: 1882269
ggcaauuggccugggaaug

SEQ ID NO: 2107931 - RNA, 19 nt, Artificial Sequence
  Description of Artificial Sequence: Synthetic oligonucleotide
  Antisense strand to SEQ ID NO: 2107930
cauucccaggccaauugcc

SEQ ID NO: 2107932 - RNA, 19 nt, Artificial Sequence
  Description of Artificial Sequence: Synthetic oligonucleotide
  Sense strand starting at position 3549 of SEQ ID NO: 1882269
acgucuuugaggugauaca

SEQ ID NO: 2107933 - RNA, 19 nt, Artificial Sequence
  Description of Artificial Sequence: Synthetic oligonucleotide
  Antisense strand to SEQ ID NO: 2107932
uguaucaccucaaagacgu

SEQ ID NO: 2107934 - RNA, 19 nt, Artificial Sequence
  Description of Artificial Sequence: Synthetic oligonucleotide
  Sense strand starting at position 3589 of SEQ ID NO: 1882269
agcgguauaauugaugaca

SEQ ID NO: 2107935 - RNA, 19 nt, Artificial Sequence
  Description of Artificial Sequence: Synthetic oligonucleotide
  Antisense strand to SEQ ID NO: 2107934
ugucaucaauuauaccgcu

SEQ ID NO: 2107936 - RNA, 19 nt, Artificial Sequence
  Description of Artificial Sequence: Synthetic oligonucleotide
  Sense strand starting at position 3694 of SEQ ID NO: 1882269
agugucacuccagaguaua

SEQ ID NO: 2107937 - RNA, 19 nt, Artificial Sequence
  Description of Artificial Sequence: Synthetic oligonucleotide
  Antisense strand to SEQ ID NO: 2107936
uauacucuggagugacacu

SEQ ID NO: 2107938 - RNA, 19 nt, Artificial Sequence
  Description of Artificial Sequence: Synthetic oligonucleotide
  Sense strand starting at position 3787 of SEQ ID NO: 1882269
aagacauuauggguaucuu

SEQ ID NO: 2107939 - RNA, 19 nt, Artificial Sequence
  Description of Artificial Sequence: Synthetic oligonucleotide
  Antisense strand to SEQ ID NO: 2107938
aagauacccauaaugucuu

SEQ ID NO: 2107940 - RNA, 19 nt, Artificial Sequence
  Description of Artificial Sequence: Synthetic oligonucleotide
  Sense strand starting at position 3795 of SEQ ID NO: 1882269
auggguaucuuagccaaga

SEQ ID NO: 2107941 - RNA, 19 nt, Artificial Sequence
  Description of Artificial Sequence: Synthetic oligonucleotide
  Antisense strand to SEQ ID NO: 2107940
ucuuggcuaagauacccau

SEQ ID NO: 2107942 - RNA, 19 nt, Artificial Sequence
  Description of Artificial Sequence: Synthetic oligonucleotide
  Sense strand starting at position 3796 of SEQ ID NO: 1882269
uggguaucuuagccaagaa

SEQ ID NO: 2107943 - RNA, 19 nt, Artificial Sequence
  Description of Artificial Sequence: Synthetic oligonucleotide
  Antisense strand to SEQ ID NO: 2107942
uucuuggcuaagauaccca

SEQ ID NO: 2107944 - RNA, 19 nt, Artificial Sequence
  Description of Artificial Sequence: Synthetic oligonucleotide
  Sense strand starting at position 3797 of SEQ ID NO: 1882269
ggguaucuuagccaagaac

SEQ ID NO: 2107945 - RNA, 19 nt, Artificial Sequence
  Description of Artificial Sequence: Synthetic oligonucleotide
  Antisense strand to SEQ ID NO: 2107944
guucuuggcuaagauaccc

SEQ ID NO: 2107946 - RNA, 19 nt, Artificial Sequence
  Description of Artificial Sequence: Synthetic oligonucleotide
  Sense strand starting at position 3896 of SEQ ID NO: 1882269
guuuaugagguuugauauu

SEQ ID NO: 2107947 - RNA, 19 nt, Artificial Sequence
  Description of Artificial Sequence: Synthetic oligonucleotide
  Antisense strand to SEQ ID NO: 2107946
aauaucaaaccucauaaac

SEQ ID NO: 2107948 - RNA, 19 nt, Artificial Sequence
  Description of Artificial Sequence: Synthetic oligonucleotide
  Sense strand starting at position 3907 of SEQ ID NO: 1882269
uugauauugccaugacucu

SEQ ID NO: 2107949 - RNA, 19 nt, Artificial Sequence
  Description of Artificial Sequence: Synthetic oligonucleotide
  Antisense strand to SEQ ID NO: 2107948
agagucauggcaauaucaa

SEQ ID NO: 2107950 - RNA, 19 nt, Artificial Sequence
  Description of Artificial Sequence: Synthetic oligonucleotide
  Sense strand starting at position 2 of SEQ ID NO: 1882270
acuggaaccuuuguguaau

SEQ ID NO: 2107951 - RNA, 19 nt, Artificial Sequence
  Description of Artificial Sequence: Synthetic oligonucleotide
  Antisense strand to SEQ ID NO: 2107950
auuacacaaagguuccagu

SEQ ID NO: 2107952 - RNA, 19 nt, Artificial Sequence
  Description of Artificial Sequence: Synthetic oligonucleotide
  Sense strand starting at position 5 of SEQ ID NO: 1882270
ggaaccuuuguguaaugca

SEQ ID NO: 2107953 - RNA, 19 nt, Artificial Sequence
  Description of Artificial Sequence: Synthetic oligonucleotide
  Antisense strand to SEQ ID NO: 2107952
ugcauuacacaaagguucc

SEQ ID NO: 2107954 - RNA, 19 nt, Artificial Sequence
  Description of Artificial Sequence: Synthetic oligonucleotide
  Sense strand starting at position 15 of SEQ ID NO: 1882270
uguaaugcauuuggaaaua

SEQ ID NO: 2107955 - RNA, 19 nt, Artificial Sequence
  Description of Artificial Sequence: Synthetic oligonucleotide
  Antisense strand to SEQ ID NO: 2107954
uauuuccaaaugcauuaca

SEQ ID NO: 2107956 - RNA, 19 nt, Artificial Sequence
  Description of Artificial Sequence: Synthetic oligonucleotide
  Sense strand starting at position 62 of SEQ ID NO: 1882270
guguguugauuccuccaaa

SEQ ID NO: 2107957 - RNA, 19 nt, Artificial Sequence
  Description of Artificial Sequence: Synthetic oligonucleotide
  Antisense strand to SEQ ID NO: 2107956
uuuggaggaaucaacacac

SEQ ID NO: 2107958 - RNA, 19 nt, Artificial Sequence
  Description of Artificial Sequence: Synthetic oligonucleotide
  Sense strand starting at position 91 of SEQ ID NO: 1882270
ugaauuaccagcuaggugu

SEQ ID NO: 2107959 - RNA, 19 nt, Artificial Sequence
  Description of Artificial Sequence: Synthetic oligonucleotide
  Antisense strand to SEQ ID NO: 2107958
acaccuagcugguaauuca

SEQ ID NO: 2107960 - RNA, 19 nt, Artificial Sequence
  Description of Artificial Sequence: Synthetic oligonucleotide
  Sense strand starting at position 541 of SEQ ID NO: 1882270
gggagggugcucugaguga

SEQ ID NO: 2107961 - RNA, 19 nt, Artificial Sequence
  Description of Artificial Sequence: Synthetic oligonucleotide
  Antisense strand to SEQ ID NO: 2107960
ucacucagagcacccuccc

SEQ ID NO: 2107962 - RNA, 19 nt, Artificial Sequence
  Description of Artificial Sequence: Synthetic oligonucleotide
  Sense strand starting at position 1049 of SEQ ID NO: 1882270
cuagaaauguaucagagaa

SEQ ID NO: 2107963 - RNA, 19 nt, Artificial Sequence
  Description of Artificial Sequence: Synthetic oligonucleotide
  Antisense strand to SEQ ID NO: 2107962
uucucugauacauuucuag

SEQ ID NO: 2107964 - RNA, 19 nt, Artificial Sequence
  Description of Artificial Sequence: Synthetic oligonucleotide
  Sense strand starting at position 1051 of SEQ ID NO: 1882270
agaaauguaucagagaacu

SEQ ID NO: 2107965 - RNA, 19 nt, Artificial Sequence
  Description of Artificial Sequence: Synthetic oligonucleotide
  Antisense strand to SEQ ID NO: 2107964
aguucucugauacauuucu

SEQ ID NO: 2107966 - RNA, 19 nt, Artificial Sequence
  Description of Artificial Sequence: Synthetic oligonucleotide
  Sense strand starting at position 1057 of SEQ ID NO: 1882270
guaucagagaacugcagau

SEQ ID NO: 2107967 - RNA, 19 nt, Artificial Sequence
  Description of Artificial Sequence: Synthetic oligonucleotide
  Antisense strand to SEQ ID NO: 2107966
aucugcaguucucugauac

SEQ ID NO: 2107968 - RNA, 19 nt, Artificial Sequence
  Description of Artificial Sequence: Synthetic oligonucleotide
  Sense strand starting at position 1148 of SEQ ID NO: 1882270
ggaaucugguguccuuaga

SEQ ID NO: 2107969 - RNA, 19 nt, Artificial Sequence
  Description of Artificial Sequence: Synthetic oligonucleotide
  Antisense strand to SEQ ID NO: 2107968
ucuaaggacaccagauucc

SEQ ID NO: 2107970 - RNA, 19 nt, Artificial Sequence
  Description of Artificial Sequence: Synthetic oligonucleotide
  Sense strand starting at position 1158 of SEQ ID NO: 1882270
guccuuagaucacuggagu

SEQ ID NO: 2107971 - RNA, 19 nt, Artificial Sequence
  Description of Artificial Sequence: Synthetic oligonucleotide
  Antisense strand to SEQ ID NO: 2107970
acuccagugaucuaaggac

SEQ ID NO: 2107972 - RNA, 19 nt, Artificial Sequence
  Description of Artificial Sequence: Synthetic oligonucleotide
  Sense strand starting at position 1159 of SEQ ID NO: 1882270
uccuuagaucacuggaguu

SEQ ID NO: 2107973 - RNA, 19 nt, Artificial Sequence
  Description of Artificial Sequence: Synthetic oligonucleotide
  Antisense strand to SEQ ID NO: 2107972
aacuccagugaucuaagga

SEQ ID NO: 2107974 - RNA, 19 nt, Artificial Sequence
  Description of Artificial Sequence: Synthetic oligonucleotide
  Sense strand starting at position 1254 of SEQ ID NO: 1882270
agagaagucgcaggaagaa

SEQ ID NO: 2107975 - RNA, 19 nt, Artificial Sequence
  Description of Artificial Sequence: Synthetic oligonucleotide
  Antisense strand to SEQ ID NO: 2107974
uucuuccugcgacuucucu

SEQ ID NO: 2107976 - RNA, 19 nt, Artificial Sequence
  Description of Artificial Sequence: Synthetic oligonucleotide
  Sense strand starting at position 1553 of SEQ ID NO: 1882270
cucagaaagacugguuugu

SEQ ID NO: 2107977 - RNA, 19 nt, Artificial Sequence
  Description of Artificial Sequence: Synthetic oligonucleotide
  Antisense strand to SEQ ID NO: 2107976
acaaaccagucuuucugag

SEQ ID NO: 2107978 - RNA, 19 nt, Artificial Sequence
  Description of Artificial Sequence: Synthetic oligonucleotide
  Sense strand starting at position 1557 of SEQ ID NO: 1882270
gaaagacugguuuguccga

SEQ ID NO: 2107979 - RNA, 19 nt, Artificial Sequence
  Description of Artificial Sequence: Synthetic oligonucleotide
  Antisense strand to SEQ ID NO: 2107978
ucggacaaaccagucuuuc

SEQ ID NO: 2107980 - RNA, 19 nt, Artificial Sequence
  Description of Artificial Sequence: Synthetic oligonucleotide
  Sense strand starting at position 1559 of SEQ ID NO: 1882270
aagacugguuuguccgaaa

SEQ ID NO: 2107981 - RNA, 19 nt, Artificial Sequence
  Description of Artificial Sequence: Synthetic oligonucleotide
  Antisense strand to SEQ ID NO: 2107980
uuucggacaaaccagucuu

SEQ ID NO: 2107982 - RNA, 19 nt, Artificial Sequence
  Description of Artificial Sequence: Synthetic oligonucleotide
  Sense strand starting at position 1902 of SEQ ID NO: 1882270
ggacuaggcucaucuccau

SEQ ID NO: 2107983 - RNA, 19 nt, Artificial Sequence
  Description of Artificial Sequence: Synthetic oligonucleotide
  Antisense strand to SEQ ID NO: 2107982
auggagaugagccuagucc

SEQ ID NO: 2107984 - RNA, 19 nt, Artificial Sequence
  Description of Artificial Sequence: Synthetic oligonucleotide
  Sense strand starting at position 2619 of SEQ ID NO: 1882270
ggucacuuccuguaagugu

SEQ ID NO: 2107985 - RNA, 19 nt, Artificial Sequence
  Description of Artificial Sequence: Synthetic oligonucleotide
  Antisense strand to SEQ ID NO: 2107984
acacuuacaggaagugacc

SEQ ID NO: 2107986 - RNA, 19 nt, Artificial Sequence
  Description of Artificial Sequence: Synthetic oligonucleotide
  Sense strand starting at position 2785 of SEQ ID NO: 1882270
aguagcuuccaaugugaca

SEQ ID NO: 2107987 - RNA, 19 nt, Artificial Sequence
  Description of Artificial Sequence: Synthetic oligonucleotide
  Antisense strand to SEQ ID NO: 2107986
ugucacauuggaagcuacu

SEQ ID NO: 2107988 - RNA, 19 nt, Artificial Sequence
  Description of Artificial Sequence: Synthetic oligonucleotide
  Sense strand starting at position 2967 of SEQ ID NO: 1882270
agccuagaucacugcacaa

SEQ ID NO: 2107989 - RNA, 19 nt, Artificial Sequence
  Description of Artificial Sequence: Synthetic oligonucleotide
  Antisense strand to SEQ ID NO: 2107988
uugugcagugaucuaggcu

SEQ ID NO: 2107990 - RNA, 19 nt, Artificial Sequence
  Description of Artificial Sequence: Synthetic oligonucleotide
  Sense strand starting at position 3003 of SEQ ID NO: 1882270
uguacaggcuuccuaaaca

SEQ ID NO: 2107991 - RNA, 19 nt, Artificial Sequence
  Description of Artificial Sequence: Synthetic oligonucleotide
  Antisense strand to SEQ ID NO: 2107990
uguuuaggaagccuguaca

SEQ ID NO: 2107992 - RNA, 19 nt, Artificial Sequence
  Description of Artificial Sequence: Synthetic oligonucleotide
  Sense strand starting at position 3040 of SEQ ID NO: 1882270
uagucagagugcucuaaga

SEQ ID NO: 2107993 - RNA, 19 nt, Artificial Sequence
  Description of Artificial Sequence: Synthetic oligonucleotide
  Antisense strand to SEQ ID NO: 2107992
ucuuagagcacucugacua

SEQ ID NO: 2107994 - RNA, 19 nt, Artificial Sequence
  Description of Artificial Sequence: Synthetic oligonucleotide
  Sense strand starting at position 3042 of SEQ ID NO: 1882270
gucagagugcucuaagacc

SEQ ID NO: 2107995 - RNA, 19 nt, Artificial Sequence
  Description of Artificial Sequence: Synthetic oligonucleotide
  Antisense strand to SEQ ID NO: 2107994
ggucuuagagcacucugac

SEQ ID NO: 2107996 - RNA, 19 nt, Artificial Sequence
  Description of Artificial Sequence: Synthetic oligonucleotide
  Sense strand starting at position 3090 of SEQ ID NO: 1882270
acgugaggucucuaccaug

SEQ ID NO: 2107997 - RNA, 19 nt, Artificial Sequence
  Description of Artificial Sequence: Synthetic oligonucleotide
  Antisense strand to SEQ ID NO: 2107996
caugguagagaccucacgu

SEQ ID NO: 2107998 - RNA, 19 nt, Artificial Sequence
  Description of Artificial Sequence: Synthetic oligonucleotide
  Sense strand starting at position 3093 of SEQ ID NO: 1882270
ugaggucucuaccauggaa

SEQ ID NO: 2107999 - RNA, 19 nt, Artificial Sequence
  Description of Artificial Sequence: Synthetic oligonucleotide
  Antisense strand to SEQ ID NO: 2107998
uuccaugguagagaccuca

SEQ ID NO: 2108000 - RNA, 19 nt, Artificial Sequence
  Description of Artificial Sequence: Synthetic oligonucleotide
  Sense strand starting at position 3283 of SEQ ID NO: 1882270
cccauuagaccgugucaca

SEQ ID NO: 2108001 - RNA, 19 nt, Artificial Sequence
  Description of Artificial Sequence: Synthetic oligonucleotide
  Antisense strand to SEQ ID NO: 2108000
ugugacacggucuaauggg

SEQ ID NO: 2108002 - RNA, 19 nt, Artificial Sequence
  Description of Artificial Sequence: Synthetic oligonucleotide
  Sense strand starting at position 3293 of SEQ ID NO: 1882270
cgugucacauccuuaaauc

SEQ ID NO: 2108003 - RNA, 19 nt, Artificial Sequence
  Description of Artificial Sequence: Synthetic oligonucleotide
  Antisense strand to SEQ ID NO: 2108002
gauuuaaggaugugacacg

SEQ ID NO: 2108004 - RNA, 19 nt, Artificial Sequence
  Description of Artificial Sequence: Synthetic oligonucleotide
  Sense strand starting at position 3294 of SEQ ID NO: 1882270
gugucacauccuuaaaucu

SEQ ID NO: 2108005 - RNA, 19 nt, Artificial Sequence
  Description of Artificial Sequence: Synthetic oligonucleotide
  Antisense strand to SEQ ID NO: 2108004
agauuuaaggaugugacac

SEQ ID NO: 2108006 - RNA, 19 nt, Artificial Sequence
  Description of Artificial Sequence: Synthetic oligonucleotide
  Sense strand starting at position 3314 of SEQ ID NO: 1882270
cccaauuaggcuggucaga

SEQ ID NO: 2108007 - RNA, 19 nt, Artificial Sequence
  Description of Artificial Sequence: Synthetic oligonucleotide
  Antisense strand to SEQ ID NO: 2108006
ucugaccagccuaauuggg

SEQ ID NO: 2108008 - RNA, 19 nt, Artificial Sequence
  Description of Artificial Sequence: Synthetic oligonucleotide
  Sense strand starting at position 3316 of SEQ ID NO: 1882270
caauuaggcuggucagagu

SEQ ID NO: 2108009 - RNA, 19 nt, Artificial Sequence
  Description of Artificial Sequence: Synthetic oligonucleotide
  Antisense strand to SEQ ID NO: 2108008
acucugaccagccuaauug

SEQ ID NO: 2108010 - RNA, 19 nt, Artificial Sequence
  Description of Artificial Sequence: Synthetic oligonucleotide
  Sense strand starting at position 3466 of SEQ ID NO: 1882270
cgauguugugauuaugcua

SEQ ID NO: 2108011 - RNA, 19 nt, Artificial Sequence
  Description of Artificial Sequence: Synthetic oligonucleotide
  Antisense strand to SEQ ID NO: 2108010
uagcauaaucacaacaucg

SEQ ID NO: 2108012 - RNA, 19 nt, Artificial Sequence
  Description of Artificial Sequence: Synthetic oligonucleotide
  Sense strand starting at position 3553 of SEQ ID NO: 1882270
agaagagugugugaggaua

SEQ ID NO: 2108013 - RNA, 19 nt, Artificial Sequence
  Description of Artificial Sequence: Synthetic oligonucleotide
  Antisense strand to SEQ ID NO: 2108012
uauccucacacacucuucu

SEQ ID NO: 2108014 - RNA, 19 nt, Artificial Sequence
  Description of Artificial Sequence: Synthetic oligonucleotide
  Sense strand starting at position 3566 of SEQ ID NO: 1882270
aggauaaagcgcugauaca

SEQ ID NO: 2108015 - RNA, 19 nt, Artificial Sequence
  Description of Artificial Sequence: Synthetic oligonucleotide
  Antisense strand to SEQ ID NO: 2108014
uguaucagcgcuuuauccu

SEQ ID NO: 2108016 - RNA, 19 nt, Artificial Sequence
  Description of Artificial Sequence: Synthetic oligonucleotide
  Sense strand starting at position 3616 of SEQ ID NO: 1882270
gaaguuggaguauguggaa

SEQ ID NO: 2108017 - RNA, 19 nt, Artificial Sequence
  Description of Artificial Sequence: Synthetic oligonucleotide
  Antisense strand to SEQ ID NO: 2108016
uuccacauacuccaacuuc

SEQ ID NO: 2108018 - RNA, 19 nt, Artificial Sequence
  Description of Artificial Sequence: Synthetic oligonucleotide
  Sense strand starting at position 3675 of SEQ ID NO: 1882270
cugaucuaucgacagacuu

SEQ ID NO: 2108019 - RNA, 19 nt, Artificial Sequence
  Description of Artificial Sequence: Synthetic oligonucleotide
  Antisense strand to SEQ ID NO: 2108018
aagucugucgauagaucag

SEQ ID NO: 2108020 - RNA, 19 nt, Artificial Sequence
  Description of Artificial Sequence: Synthetic oligonucleotide
  Sense strand starting at position 3718 of SEQ ID NO: 1882270
cggugagcagaauggucau

SEQ ID NO: 2108021 - RNA, 19 nt, Artificial Sequence
  Description of Artificial Sequence: Synthetic oligonucleotide
  Antisense strand to SEQ ID NO: 2108020
augaccauucugcucaccg

SEQ ID NO: 2108022 - RNA, 19 nt, Artificial Sequence
  Description of Artificial Sequence: Synthetic oligonucleotide
  Sense strand starting at position 3721 of SEQ ID NO: 1882270
ugagcagaauggucaugau

SEQ ID NO: 2108023 - RNA, 19 nt, Artificial Sequence
  Description of Artificial Sequence: Synthetic oligonucleotide
  Antisense strand to SEQ ID NO: 2108022
aucaugaccauucugcuca

SEQ ID NO: 2108024 - RNA, 19 nt, Artificial Sequence
  Description of Artificial Sequence: Synthetic oligonucleotide
  Sense strand starting at position 3754 of SEQ ID NO: 1882270
gggcucagauguucaggua

SEQ ID NO: 2108025 - RNA, 19 nt, Artificial Sequence
  Description of Artificial Sequence: Synthetic oligonucleotide
  Antisense strand to SEQ ID NO: 2108024
uaccugaacaucugagccc

SEQ ID NO: 2108026 - RNA, 19 nt, Artificial Sequence
  Description of Artificial Sequence: Synthetic oligonucleotide
  Sense strand starting at position 3927 of SEQ ID NO: 1882270
gaggucucgcugcagauau

SEQ ID NO: 2108027 - RNA, 19 nt, Artificial Sequence
  Description of Artificial Sequence: Synthetic oligonucleotide
  Antisense strand to SEQ ID NO: 2108026
auaucugcagcgagaccuc

SEQ ID NO: 2108028 - RNA, 19 nt, Artificial Sequence
  Description of Artificial Sequence: Synthetic oligonucleotide
  Sense strand starting at position 3944 of SEQ ID NO: 1882270
auggaucaugguggacauu

SEQ ID NO: 2108029 - RNA, 19 nt, Artificial Sequence
  Description of Artificial Sequence: Synthetic oligonucleotide
  Antisense strand to SEQ ID NO: 2108028
aauguccaccaugauccau

SEQ ID NO: 2108030 - RNA, 19 nt, Artificial Sequence
  Description of Artificial Sequence: Synthetic oligonucleotide
  Sense strand starting at position 90 of SEQ ID NO: 1882271
ugcuaaagcucuccagaga

SEQ ID NO: 2108031 - RNA, 19 nt, Artificial Sequence
  Description of Artificial Sequence: Synthetic oligonucleotide
  Antisense strand to SEQ ID NO: 2108030
ucucuggagagcuuuagca

SEQ ID NO: 2108032 - RNA, 19 nt, Artificial Sequence
  Description of Artificial Sequence: Synthetic oligonucleotide
  Sense strand starting at position 112 of SEQ ID NO: 1882271
uccggcuuucccuaagaga

SEQ ID NO: 2108033 - RNA, 19 nt, Artificial Sequence
  Description of Artificial Sequence: Synthetic oligonucleotide
  Antisense strand to SEQ ID NO: 2108032
ucucuuagggaaagccgga

SEQ ID NO: 2108034 - RNA, 19 nt, Artificial Sequence
  Description of Artificial Sequence: Synthetic oligonucleotide
  Sense strand starting at position 588 of SEQ ID NO: 1882271
aucuccuauuccguggaaa

SEQ ID NO: 2108035 - RNA, 19 nt, Artificial Sequence
  Description of Artificial Sequence: Synthetic oligonucleotide
  Antisense strand to SEQ ID NO: 2108034
uuuccacggaauaggagau

SEQ ID NO: 2108036 - RNA, 19 nt, Artificial Sequence
  Description of Artificial Sequence: Synthetic oligonucleotide
  Sense strand starting at position 606 of SEQ ID NO: 1882271
aauucuagucccugaagag

SEQ ID NO: 2108037 - RNA, 19 nt, Artificial Sequence
  Description of Artificial Sequence: Synthetic oligonucleotide
  Antisense strand to SEQ ID NO: 2108036
cucuucagggacuagaauu

SEQ ID NO: 2108038 - RNA, 19 nt, Artificial Sequence
  Description of Artificial Sequence: Synthetic oligonucleotide
  Sense strand starting at position 696 of SEQ ID NO: 1882271
gcacauugagugugaagca

SEQ ID NO: 2108039 - RNA, 19 nt, Artificial Sequence
  Description of Artificial Sequence: Synthetic oligonucleotide
  Antisense strand to SEQ ID NO: 2108038
ugcuucacacucaaugugc

SEQ ID NO: 2108040 - RNA, 19 nt, Artificial Sequence
  Description of Artificial Sequence: Synthetic oligonucleotide
  Sense strand starting at position 863 of SEQ ID NO: 1882271
cagagucacucucuggaaa

SEQ ID NO: 2108041 - RNA, 19 nt, Artificial Sequence
  Description of Artificial Sequence: Synthetic oligonucleotide
  Antisense strand to SEQ ID NO: 2108040
uuuccagagagugacucug

SEQ ID NO: 2108042 - RNA, 19 nt, Artificial Sequence
  Description of Artificial Sequence: Synthetic oligonucleotide
  Sense strand starting at position 889 of SEQ ID NO: 1882271
ggauucuucucccucaaga

SEQ ID NO: 2108043 - RNA, 19 nt, Artificial Sequence
  Description of Artificial Sequence: Synthetic oligonucleotide
  Antisense strand to SEQ ID NO: 2108042
ucuugagggagaagaaucc

SEQ ID NO: 2108044 - RNA, 19 nt, Artificial Sequence
  Description of Artificial Sequence: Synthetic oligonucleotide
  Sense strand starting at position 1901 of SEQ ID NO: 1882271
cgaccauuucccugcagac

SEQ ID NO: 2108045 - RNA, 19 nt, Artificial Sequence
  Description of Artificial Sequence: Synthetic oligonucleotide
  Antisense strand to SEQ ID NO: 2108044
gucugcagggaaauggucg

SEQ ID NO: 2108046 - RNA, 19 nt, Artificial Sequence
  Description of Artificial Sequence: Synthetic oligonucleotide
  Sense strand starting at position 2122 of SEQ ID NO: 1882271
aacuguguccgcuucguga

SEQ ID NO: 2108047 - RNA, 19 nt, Artificial Sequence
  Description of Artificial Sequence: Synthetic oligonucleotide
  Antisense strand to SEQ ID NO: 2108046
ucacgaagcggacacaguu

SEQ ID NO: 2108048 - RNA, 19 nt, Artificial Sequence
  Description of Artificial Sequence: Synthetic oligonucleotide
  Sense strand starting at position 2128 of SEQ ID NO: 1882271
guccgcuucgugaguauca

SEQ ID NO: 2108049 - RNA, 19 nt, Artificial Sequence
  Description of Artificial Sequence: Synthetic oligonucleotide
  Antisense strand to SEQ ID NO: 2108048
ugauacucacgaagcggac

SEQ ID NO: 2108050 - RNA, 19 nt, Artificial Sequence
  Description of Artificial Sequence: Synthetic oligonucleotide
  Sense strand starting at position 2130 of SEQ ID NO: 1882271
ccgcuucgugaguaucaag

SEQ ID NO: 2108051 - RNA, 19 nt, Artificial Sequence
  Description of Artificial Sequence: Synthetic oligonucleotide
  Antisense strand to SEQ ID NO: 2108050
cuugauacucacgaagcgg

SEQ ID NO: 2108052 - RNA, 19 nt, Artificial Sequence
  Description of Artificial Sequence: Synthetic oligonucleotide
  Sense strand starting at position 2322 of SEQ ID NO: 1882271
cucaguguuucccugaguc

SEQ ID NO: 2108053 - RNA, 19 nt, Artificial Sequence
  Description of Artificial Sequence: Synthetic oligonucleotide
  Antisense strand to SEQ ID NO: 2108052
gacucagggaaacacugag

SEQ ID NO: 2108054 - RNA, 19 nt, Artificial Sequence
  Description of Artificial Sequence: Synthetic oligonucleotide
  Sense strand starting at position 2324 of SEQ ID NO: 1882271
caguguuucccugagucuu

SEQ ID NO: 2108055 - RNA, 19 nt, Artificial Sequence
  Description of Artificial Sequence: Synthetic oligonucleotide
  Antisense strand to SEQ ID NO: 2108054
aagacucagggaaacacug

SEQ ID NO: 2108056 - RNA, 19 nt, Artificial Sequence
  Description of Artificial Sequence: Synthetic oligonucleotide
  Sense strand starting at position 2484 of SEQ ID NO: 1882271
ggaguuuggugacagagag

SEQ ID NO: 2108057 - RNA, 19 nt, Artificial Sequence
  Description of Artificial Sequence: Synthetic oligonucleotide
  Antisense strand to SEQ ID NO: 2108056
cucucugucaccaaacucc

SEQ ID NO: 2108058 - RNA, 19 nt, Artificial Sequence
  Description of Artificial Sequence: Synthetic oligonucleotide
  Sense strand starting at position 2500 of SEQ ID NO: 1882271
gagugagcuugcucuggga

SEQ ID NO: 2108059 - RNA, 19 nt, Artificial Sequence
  Description of Artificial Sequence: Synthetic oligonucleotide
  Antisense strand to SEQ ID NO: 2108058
ucccagagcaagcucacuc

SEQ ID NO: 2108060 - RNA, 19 nt, Artificial Sequence
  Description of Artificial Sequence: Synthetic oligonucleotide
  Sense strand starting at position 2502 of SEQ ID NO: 1882271
gugagcuugcucugggaau

SEQ ID NO: 2108061 - RNA, 19 nt, Artificial Sequence
  Description of Artificial Sequence: Synthetic oligonucleotide
  Antisense strand to SEQ ID NO: 2108060
auucccagagcaagcucac

SEQ ID NO: 2108062 - RNA, 19 nt, Artificial Sequence
  Description of Artificial Sequence: Synthetic oligonucleotide
  Sense strand starting at position 2717 of SEQ ID NO: 1882271
auguauaaaugugcccaaa

SEQ ID NO: 2108063 - RNA, 19 nt, Artificial Sequence
  Description of Artificial Sequence: Synthetic oligonucleotide
  Antisense strand to SEQ ID NO: 2108062
uuugggcacauuuauacau

SEQ ID NO: 2108064 - RNA, 19 nt, Artificial Sequence
  Description of Artificial Sequence: Synthetic oligonucleotide
  Sense strand starting at position 2789 of SEQ ID NO: 1882271
gugacucccgcuugucaua

SEQ ID NO: 2108065 - RNA, 19 nt, Artificial Sequence
  Description of Artificial Sequence: Synthetic oligonucleotide
  Antisense strand to SEQ ID NO: 2108064
uaugacaagcgggagucac

SEQ ID NO: 2108066 - RNA, 19 nt, Artificial Sequence
  Description of Artificial Sequence: Synthetic oligonucleotide
  Sense strand starting at position 2791 of SEQ ID NO: 1882271
gacucccgcuugucauauu

SEQ ID NO: 2108067 - RNA, 19 nt, Artificial Sequence
  Description of Artificial Sequence: Synthetic oligonucleotide
  Antisense strand to SEQ ID NO: 2108066
aauaugacaagcgggaguc

SEQ ID NO: 2108068 - RNA, 19 nt, Artificial Sequence
  Description of Artificial Sequence: Synthetic oligonucleotide
  Sense strand starting at position 2824 of SEQ ID NO: 1882271
auuccauagcuuugaguuu

SEQ ID NO: 2108069 - RNA, 19 nt, Artificial Sequence
  Description of Artificial Sequence: Synthetic oligonucleotide
  Antisense strand to SEQ ID NO: 2108068
aaacucaaagcuauggaau

SEQ ID NO: 2108070 - RNA, 19 nt, Artificial Sequence
  Description of Artificial Sequence: Synthetic oligonucleotide
  Sense strand starting at position 2833 of SEQ ID NO: 1882271
cuuugaguuucugugugag

SEQ ID NO: 2108071 - RNA, 19 nt, Artificial Sequence
  Description of Artificial Sequence: Synthetic oligonucleotide
  Antisense strand to SEQ ID NO: 2108070
cucacacagaaacucaaag

SEQ ID NO: 2108072 - RNA, 19 nt, Artificial Sequence
  Description of Artificial Sequence: Synthetic oligonucleotide
  Sense strand starting at position 2835 of SEQ ID NO: 1882271
uugaguuucugugugaguc

SEQ ID NO: 2108073 - RNA, 19 nt, Artificial Sequence
  Description of Artificial Sequence: Synthetic oligonucleotide
  Antisense strand to SEQ ID NO: 2108072
gacucacacagaaacucaa

SEQ ID NO: 2108074 - RNA, 19 nt, Artificial Sequence
  Description of Artificial Sequence: Synthetic oligonucleotide
  Sense strand starting at position 2903 of SEQ ID NO: 1882271
guacguuacaaccaggagu

SEQ ID NO: 2108075 - RNA, 19 nt, Artificial Sequence
  Description of Artificial Sequence: Synthetic oligonucleotide
  Antisense strand to SEQ ID NO: 2108074
acuccugguuguaacguac

SEQ ID NO: 2108076 - RNA, 19 nt, Artificial Sequence
  Description of Artificial Sequence: Synthetic oligonucleotide
  Sense strand starting at position 2917 of SEQ ID NO: 1882271
ggagucaguacaggcuuua

SEQ ID NO: 2108077 - RNA, 19 nt, Artificial Sequence
  Description of Artificial Sequence: Synthetic oligonucleotide
  Antisense strand to SEQ ID NO: 2108076
uaaagccuguacugacucc

SEQ ID NO: 2108078 - RNA, 19 nt, Artificial Sequence
  Description of Artificial Sequence: Synthetic oligonucleotide
  Sense strand starting at position 3009 of SEQ ID NO: 1882271
ggaaguauccacugcuaag

SEQ ID NO: 2108079 - RNA, 19 nt, Artificial Sequence
  Description of Artificial Sequence: Synthetic oligonucleotide
  Antisense strand to SEQ ID NO: 2108078
cuuagcaguggauacuucc

SEQ ID NO: 2108080 - RNA, 19 nt, Artificial Sequence
  Description of Artificial Sequence: Synthetic oligonucleotide
  Sense strand starting at position 3140 of SEQ ID NO: 1882271
ccugcagggcucuguagau

SEQ ID NO: 2108081 - RNA, 19 nt, Artificial Sequence
  Description of Artificial Sequence: Synthetic oligonucleotide
  Antisense strand to SEQ ID NO: 2108080
aucuacagagcccugcagg

SEQ ID NO: 2108082 - RNA, 19 nt, Artificial Sequence
  Description of Artificial Sequence: Synthetic oligonucleotide
  Sense strand starting at position 3199 of SEQ ID NO: 1882271
gaauucugcugcuuucgaa

SEQ ID NO: 2108083 - RNA, 19 nt, Artificial Sequence
  Description of Artificial Sequence: Synthetic oligonucleotide
  Antisense strand to SEQ ID NO: 2108082
uucgaaagcagcagaauuc

SEQ ID NO: 2108084 - RNA, 19 nt, Artificial Sequence
  Description of Artificial Sequence: Synthetic oligonucleotide
  Sense strand starting at position 3353 of SEQ ID NO: 1882271
ugaccuguuacgugacugu

SEQ ID NO: 2108085 - RNA, 19 nt, Artificial Sequence
  Description of Artificial Sequence: Synthetic oligonucleotide
  Antisense strand to SEQ ID NO: 2108084
acagucacguaacagguca

SEQ ID NO: 2108086 - RNA, 19 nt, Artificial Sequence
  Description of Artificial Sequence: Synthetic oligonucleotide
  Sense strand starting at position 3357 of SEQ ID NO: 1882271
cuguuacgugacuguucuu

SEQ ID NO: 2108087 - RNA, 19 nt, Artificial Sequence
  Description of Artificial Sequence: Synthetic oligonucleotide
  Antisense strand to SEQ ID NO: 2108086
aagaacagucacguaacag

SEQ ID NO: 2108088 - RNA, 19 nt, Artificial Sequence
  Description of Artificial Sequence: Synthetic oligonucleotide
  Sense strand starting at position 3398 of SEQ ID NO: 1882271
gagucagaaugugucaucu

SEQ ID NO: 2108089 - RNA, 19 nt, Artificial Sequence
  Description of Artificial Sequence: Synthetic oligonucleotide
  Antisense strand to SEQ ID NO: 2108088
agaugacacauucugacuc

SEQ ID NO: 2108090 - RNA, 19 nt, Artificial Sequence
  Description of Artificial Sequence: Synthetic oligonucleotide
  Sense strand starting at position 3407 of SEQ ID NO: 1882271
ugugucaucucuccacuua

SEQ ID NO: 2108091 - RNA, 19 nt, Artificial Sequence
  Description of Artificial Sequence: Synthetic oligonucleotide
  Antisense strand to SEQ ID NO: 2108090
uaaguggagagaugacaca

SEQ ID NO: 2108092 - RNA, 19 nt, Artificial Sequence
  Description of Artificial Sequence: Synthetic oligonucleotide
  Sense strand starting at position 3408 of SEQ ID NO: 1882271
gugucaucucuccacuuaa

SEQ ID NO: 2108093 - RNA, 19 nt, Artificial Sequence
  Description of Artificial Sequence: Synthetic oligonucleotide
  Antisense strand to SEQ ID NO: 2108092
uuaaguggagagaugacac

SEQ ID NO: 2108094 - RNA, 19 nt, Artificial Sequence
  Description of Artificial Sequence: Synthetic oligonucleotide
  Sense strand starting at position 3494 of SEQ ID NO: 1882271
ggauaucugguuuaucgua

SEQ ID NO: 2108095 - RNA, 19 nt, Artificial Sequence
  Description of Artificial Sequence: Synthetic oligonucleotide
  Antisense strand to SEQ ID NO: 2108094
uacgauaaaccagauaucc

SEQ ID NO: 2108096 - RNA, 19 nt, Artificial Sequence
  Description of Artificial Sequence: Synthetic oligonucleotide
  Sense strand starting at position 3501 of SEQ ID NO: 1882271
ugguuuaucguagggacua

SEQ ID NO: 2108097 - RNA, 19 nt, Artificial Sequence
  Description of Artificial Sequence: Synthetic oligonucleotide
  Antisense strand to SEQ ID NO: 2108096
uagucccuacgauaaacca

SEQ ID NO: 2108098 - RNA, 19 nt, Artificial Sequence
  Description of Artificial Sequence: Synthetic oligonucleotide
  Sense strand starting at position 3503 of SEQ ID NO: 1882271
guuuaucguagggacuaaa

SEQ ID NO: 2108099 - RNA, 19 nt, Artificial Sequence
  Description of Artificial Sequence: Synthetic oligonucleotide
  Antisense strand to SEQ ID NO: 2108098
uuuagucccuacgauaaac

SEQ ID NO: 2108100 - RNA, 19 nt, Artificial Sequence
  Description of Artificial Sequence: Synthetic oligonucleotide
  Sense strand starting at position 3691 of SEQ ID NO: 1882271
ccauuuaucugcuuauagu

SEQ ID NO: 2108101 - RNA, 19 nt, Artificial Sequence
  Description of Artificial Sequence: Synthetic oligonucleotide
  Antisense strand to SEQ ID NO: 2108100
acuauaagcagauaaaugg

SEQ ID NO: 2108102 - RNA, 19 nt, Artificial Sequence
  Description of Artificial Sequence: Synthetic oligonucleotide
  Sense strand starting at position 3700 of SEQ ID NO: 1882271
ugcuuauaguuccuugauc

SEQ ID NO: 2108103 - RNA, 19 nt, Artificial Sequence
  Description of Artificial Sequence: Synthetic oligonucleotide
  Antisense strand to SEQ ID NO: 2108102
gaucaaggaacuauaagca

SEQ ID NO: 2108104 - RNA, 19 nt, Artificial Sequence
  Description of Artificial Sequence: Synthetic oligonucleotide
  Sense strand starting at position 3701 of SEQ ID NO: 1882271
gcuuauaguuccuugauca

SEQ ID NO: 2108105 - RNA, 19 nt, Artificial Sequence
  Description of Artificial Sequence: Synthetic oligonucleotide
  Antisense strand to SEQ ID NO: 2108104
ugaucaaggaacuauaagc

SEQ ID NO: 2108106 - RNA, 19 nt, Artificial Sequence
  Description of Artificial Sequence: Synthetic oligonucleotide
  Sense strand starting at position 3702 of SEQ ID NO: 1882271
cuuauaguuccuugaucag

SEQ ID NO: 2108107 - RNA, 19 nt, Artificial Sequence
  Description of Artificial Sequence: Synthetic oligonucleotide
  Antisense strand to SEQ ID NO: 2108106
cugaucaaggaacuauaag

SEQ ID NO: 2108108 - RNA, 19 nt, Artificial Sequence
  Description of Artificial Sequence: Synthetic oligonucleotide
  Sense strand starting at position 3705 of SEQ ID NO: 1882271
auaguuccuugaucagaaa

SEQ ID NO: 2108109 - RNA, 19 nt, Artificial Sequence
  Description of Artificial Sequence: Synthetic oligonucleotide
  Antisense strand to SEQ ID NO: 2108108
uuucugaucaaggaacuau

SEQ ID NO: 2108110 - RNA, 19 nt, Artificial Sequence
  Description of Artificial Sequence: Synthetic oligonucleotide
  Sense strand starting at position 175 of SEQ ID NO: 1882272
ucccuuaauugucccagga

SEQ ID NO: 2108111 - RNA, 19 nt, Artificial Sequence
  Description of Artificial Sequence: Synthetic oligonucleotide
  Antisense strand to SEQ ID NO: 2108110
uccugggacaauuaaggga

SEQ ID NO: 2108112 - RNA, 19 nt, Artificial Sequence
  Description of Artificial Sequence: Synthetic oligonucleotide
  Sense strand starting at position 179 of SEQ ID NO: 1882272
uuaauugucccaggaagag

SEQ ID NO: 2108113 - RNA, 19 nt, Artificial Sequence
  Description of Artificial Sequence: Synthetic oligonucleotide
  Antisense strand to SEQ ID NO: 2108112
cucuuccugggacaauuaa

SEQ ID NO: 2108114 - RNA, 19 nt, Artificial Sequence
  Description of Artificial Sequence: Synthetic oligonucleotide
  Sense strand starting at position 212 of SEQ ID NO: 1882272
agagucaaucucugauaca

SEQ ID NO: 2108115 - RNA, 19 nt, Artificial Sequence
  Description of Artificial Sequence: Synthetic oligonucleotide
  Antisense strand to SEQ ID NO: 2108114
uguaucagagauugacucu

SEQ ID NO: 2108116 - RNA, 19 nt, Artificial Sequence
  Description of Artificial Sequence: Synthetic oligonucleotide
  Sense strand starting at position 247 of SEQ ID NO: 1882272
gaggauuccucuccgucag

SEQ ID NO: 2108117 - RNA, 19 nt, Artificial Sequence
  Description of Artificial Sequence: Synthetic oligonucleotide
  Antisense strand to SEQ ID NO: 2108116
cugacggagaggaauccuc

SEQ ID NO: 2108118 - RNA, 19 nt, Artificial Sequence
  Description of Artificial Sequence: Synthetic oligonucleotide
  Sense strand starting at position 249 of SEQ ID NO: 1882272
ggauuccucuccgucagga

SEQ ID NO: 2108119 - RNA, 19 nt, Artificial Sequence
  Description of Artificial Sequence: Synthetic oligonucleotide
  Antisense strand to SEQ ID NO: 2108118
uccugacggagaggaaucc

SEQ ID NO: 2108120 - RNA, 19 nt, Artificial Sequence
  Description of Artificial Sequence: Synthetic oligonucleotide
  Sense strand starting at position 634 of SEQ ID NO: 1882272
uucccuggaggaugugaua

SEQ ID NO: 2108121 - RNA, 19 nt, Artificial Sequence
  Description of Artificial Sequence: Synthetic oligonucleotide
  Antisense strand to SEQ ID NO: 2108120
uaucacauccuccagggaa

SEQ ID NO: 2108122 - RNA, 19 nt, Artificial Sequence
  Description of Artificial Sequence: Synthetic oligonucleotide
  Sense strand starting at position 1546 of SEQ ID NO: 1882272
aagagaaacucugcggaga

SEQ ID NO: 2108123 - RNA, 19 nt, Artificial Sequence
  Description of Artificial Sequence: Synthetic oligonucleotide
  Antisense strand to SEQ ID NO: 2108122
ucuccgcagaguuucucuu

SEQ ID NO: 2108124 - RNA, 19 nt, Artificial Sequence
  Description of Artificial Sequence: Synthetic oligonucleotide
  Sense strand starting at position 1547 of SEQ ID NO: 1882272
agagaaacucugcggagau

SEQ ID NO: 2108125 - RNA, 19 nt, Artificial Sequence
  Description of Artificial Sequence: Synthetic oligonucleotide
  Antisense strand to SEQ ID NO: 2108124
aucuccgcagaguuucucu

SEQ ID NO: 2108126 - RNA, 19 nt, Artificial Sequence
  Description of Artificial Sequence: Synthetic oligonucleotide
  Sense strand starting at position 1664 of SEQ ID NO: 1882272
ccgcuccuccugugacaaa

SEQ ID NO: 2108127 - RNA, 19 nt, Artificial Sequence
  Description of Artificial Sequence: Synthetic oligonucleotide
  Antisense strand to SEQ ID NO: 2108126
uuugucacaggaggagcgg

SEQ ID NO: 2108128 - RNA, 19 nt, Artificial Sequence
  Description of Artificial Sequence: Synthetic oligonucleotide
  Sense strand starting at position 1676 of SEQ ID NO: 1882272
ugacaaacgcucugucuca

SEQ ID NO: 2108129 - RNA, 19 nt, Artificial Sequence
  Description of Artificial Sequence: Synthetic oligonucleotide
  Antisense strand to SEQ ID NO: 2108128
ugagacagagcguuuguca

SEQ ID NO: 2108130 - RNA, 19 nt, Artificial Sequence
  Description of Artificial Sequence: Synthetic oligonucleotide
  Sense strand starting at position 1677 of SEQ ID NO: 1882272
gacaaacgcucugucucaa

SEQ ID NO: 2108131 - RNA, 19 nt, Artificial Sequence
  Description of Artificial Sequence: Synthetic oligonucleotide
  Antisense strand to SEQ ID NO: 2108130
uugagacagagcguuuguc

SEQ ID NO: 2108132 - RNA, 19 nt, Artificial Sequence
  Description of Artificial Sequence: Synthetic oligonucleotide
  Sense strand starting at position 1689 of SEQ ID NO: 1882272
gucucaauguucccugagu

SEQ ID NO: 2108133 - RNA, 19 nt, Artificial Sequence
  Description of Artificial Sequence: Synthetic oligonucleotide
  Antisense strand to SEQ ID NO: 2108132
acucagggaacauugagac

SEQ ID NO: 2108134 - RNA, 19 nt, Artificial Sequence
  Description of Artificial Sequence: Synthetic oligonucleotide
  Sense strand starting at position 1690 of SEQ ID NO: 1882272
ucucaauguucccugaguc

SEQ ID NO: 2108135 - RNA, 19 nt, Artificial Sequence
  Description of Artificial Sequence: Synthetic oligonucleotide
  Antisense strand to SEQ ID NO: 2108134
gacucagggaacauugaga

SEQ ID NO: 2108136 - RNA, 19 nt, Artificial Sequence
  Description of Artificial Sequence: Synthetic oligonucleotide
  Sense strand starting at position 1691 of SEQ ID NO: 1882272
cucaauguucccugagucu

SEQ ID NO: 2108137 - RNA, 19 nt, Artificial Sequence
  Description of Artificial Sequence: Synthetic oligonucleotide
  Antisense strand to SEQ ID NO: 2108136
agacucagggaacauugag

SEQ ID NO: 2108138 - RNA, 19 nt, Artificial Sequence
  Description of Artificial Sequence: Synthetic oligonucleotide
  Sense strand starting at position 1714 of SEQ ID NO: 1882272
ccaggagcuguccgagaaa

SEQ ID NO: 2108139 - RNA, 19 nt, Artificial Sequence
  Description of Artificial Sequence: Synthetic oligonucleotide
  Antisense strand to SEQ ID NO: 2108138
uuucucggacagcuccugg

SEQ ID NO: 2108140 - RNA, 19 nt, Artificial Sequence
  Description of Artificial Sequence: Synthetic oligonucleotide
  Sense strand starting at position 1717 of SEQ ID NO: 1882272
ggagcuguccgagaaacca

SEQ ID NO: 2108141 - RNA, 19 nt, Artificial Sequence
  Description of Artificial Sequence: Synthetic oligonucleotide
  Antisense strand to SEQ ID NO: 2108140
ugguuucucggacagcucc

SEQ ID NO: 2108142 - RNA, 19 nt, Artificial Sequence
  Description of Artificial Sequence: Synthetic oligonucleotide
  Sense strand starting at position 1786 of SEQ ID NO: 1882272
gggaauuccugucccugaa

SEQ ID NO: 2108143 - RNA, 19 nt, Artificial Sequence
  Description of Artificial Sequence: Synthetic oligonucleotide
  Antisense strand to SEQ ID NO: 2108142
uucagggacaggaauuccc

SEQ ID NO: 2108144 - RNA, 19 nt, Artificial Sequence
  Description of Artificial Sequence: Synthetic oligonucleotide
  Sense strand starting at position 2227 of SEQ ID NO: 1882272
cccugaguuucugugaguc

SEQ ID NO: 2108145 - RNA, 19 nt, Artificial Sequence
  Description of Artificial Sequence: Synthetic oligonucleotide
  Antisense strand to SEQ ID NO: 2108144
gacucacagaaacucaggg

SEQ ID NO: 2108146 - RNA, 19 nt, Artificial Sequence
  Description of Artificial Sequence: Synthetic oligonucleotide
  Sense strand starting at position 2285 of SEQ ID NO: 1882272
auguguugcaaccaggagu

SEQ ID NO: 2108147 - RNA, 19 nt, Artificial Sequence
  Description of Artificial Sequence: Synthetic oligonucleotide
  Antisense strand to SEQ ID NO: 2108146
acuccugguugcaacacau

SEQ ID NO: 2108148 - RNA, 19 nt, Artificial Sequence
  Description of Artificial Sequence: Synthetic oligonucleotide
  Sense strand starting at position 2338 of SEQ ID NO: 1882272
gcucgaugcagucacaaug

SEQ ID NO: 2108149 - RNA, 19 nt, Artificial Sequence
  Description of Artificial Sequence: Synthetic oligonucleotide
  Antisense strand to SEQ ID NO: 2108148
cauugugacugcaucgagc

SEQ ID NO: 2108150 - RNA, 19 nt, Artificial Sequence
  Description of Artificial Sequence: Synthetic oligonucleotide
  Sense strand starting at position 2403 of SEQ ID NO: 1882272
aucuaagugguguguauau

SEQ ID NO: 2108151 - RNA, 19 nt, Artificial Sequence
  Description of Artificial Sequence: Synthetic oligonucleotide
  Antisense strand to SEQ ID NO: 2108150
auauacacaccacuuagau

SEQ ID NO: 2108152 - RNA, 19 nt, Artificial Sequence
  Description of Artificial Sequence: Synthetic oligonucleotide
  Sense strand starting at position 2414 of SEQ ID NO: 1882272
guguauauuucuuaggaac

SEQ ID NO: 2108153 - RNA, 19 nt, Artificial Sequence
  Description of Artificial Sequence: Synthetic oligonucleotide
  Antisense strand to SEQ ID NO: 2108152
guuccuaagaaauauacac

SEQ ID NO: 2108154 - RNA, 19 nt, Artificial Sequence
  Description of Artificial Sequence: Synthetic oligonucleotide
  Sense strand starting at position 2416 of SEQ ID NO: 1882272
guauauuucuuaggaacac

SEQ ID NO: 2108155 - RNA, 19 nt, Artificial Sequence
  Description of Artificial Sequence: Synthetic oligonucleotide
  Antisense strand to SEQ ID NO: 2108154
guguuccuaagaaauauac

SEQ ID NO: 2108156 - RNA, 19 nt, Artificial Sequence
  Description of Artificial Sequence: Synthetic oligonucleotide
  Sense strand starting at position 2530 of SEQ ID NO: 1882272
ggcucuguagauggaucua

SEQ ID NO: 2108157 - RNA, 19 nt, Artificial Sequence
  Description of Artificial Sequence: Synthetic oligonucleotide
  Antisense strand to SEQ ID NO: 2108156
uagauccaucuacagagcc

SEQ ID NO: 2108158 - RNA, 19 nt, Artificial Sequence
  Description of Artificial Sequence: Synthetic oligonucleotide
  Sense strand starting at position 2701 of SEQ ID NO: 1882272
acugucacuccugaauugu

SEQ ID NO: 2108159 - RNA, 19 nt, Artificial Sequence
  Description of Artificial Sequence: Synthetic oligonucleotide
  Antisense strand to SEQ ID NO: 2108158
acaauucaggagugacagu

SEQ ID NO: 2108160 - RNA, 19 nt, Artificial Sequence
  Description of Artificial Sequence: Synthetic oligonucleotide
  Sense strand starting at position 2773 of SEQ ID NO: 1882272
cugcuaaugugagucaaag

SEQ ID NO: 2108161 - RNA, 19 nt, Artificial Sequence
  Description of Artificial Sequence: Synthetic oligonucleotide
  Antisense strand to SEQ ID NO: 2108160
cuuugacucacauuagcag

SEQ ID NO: 2108162 - RNA, 19 nt, Artificial Sequence
  Description of Artificial Sequence: Synthetic oligonucleotide
  Sense strand starting at position 2775 of SEQ ID NO: 1882272
gcuaaugugagucaaagug

SEQ ID NO: 2108163 - RNA, 19 nt, Artificial Sequence
  Description of Artificial Sequence: Synthetic oligonucleotide
  Antisense strand to SEQ ID NO: 2108162
cacuuugacucacauuagc

SEQ ID NO: 2108164 - RNA, 19 nt, Artificial Sequence
  Description of Artificial Sequence: Synthetic oligonucleotide
  Sense strand starting at position 2782 of SEQ ID NO: 1882272
ugagucaaagugugucauu

SEQ ID NO: 2108165 - RNA, 19 nt, Artificial Sequence
  Description of Artificial Sequence: Synthetic oligonucleotide
  Antisense strand to SEQ ID NO: 2108164
aaugacacacuuugacuca

SEQ ID NO: 2108166 - RNA, 19 nt, Artificial Sequence
  Description of Artificial Sequence: Synthetic oligonucleotide
  Sense strand starting at position 2783 of SEQ ID NO: 1882272
gagucaaagugugucauuu

SEQ ID NO: 2108167 - RNA, 19 nt, Artificial Sequence
  Description of Artificial Sequence: Synthetic oligonucleotide
  Antisense strand to SEQ ID NO: 2108166
aaaugacacacuuugacuc

SEQ ID NO: 2108168 - RNA, 19 nt, Artificial Sequence
  Description of Artificial Sequence: Synthetic oligonucleotide
  Sense strand starting at position 3200 of SEQ ID NO: 1882272
acugucauccagcgugaag

SEQ ID NO: 2108169 - RNA, 19 nt, Artificial Sequence
  Description of Artificial Sequence: Synthetic oligonucleotide
  Antisense strand to SEQ ID NO: 2108168
cuucacgcuggaugacagu

SEQ ID NO: 2108170 - RNA, 19 nt, Artificial Sequence
  Description of Artificial Sequence: Synthetic oligonucleotide
  Sense strand starting at position 3211 of SEQ ID NO: 1882272
gcgugaagugcagucacau

SEQ ID NO: 2108171 - RNA, 19 nt, Artificial Sequence
  Description of Artificial Sequence: Synthetic oligonucleotide
  Antisense strand to SEQ ID NO: 2108170
augugacugcacuucacgc

SEQ ID NO: 2108172 - RNA, 19 nt, Artificial Sequence
  Description of Artificial Sequence: Synthetic oligonucleotide
  Sense strand starting at position 3354 of SEQ ID NO: 1882272
acgagugucucacuguauu

SEQ ID NO: 2108173 - RNA, 19 nt, Artificial Sequence
  Description of Artificial Sequence: Synthetic oligonucleotide
  Antisense strand to SEQ ID NO: 2108172
aauacagugagacacucgu

SEQ ID NO: 2108174 - RNA, 19 nt, Artificial Sequence
  Description of Artificial Sequence: Synthetic oligonucleotide
  Sense strand starting at position 3425 of SEQ ID NO: 1882272
cucaaauguuaggauuaca

SEQ ID NO: 2108175 - RNA, 19 nt, Artificial Sequence
  Description of Artificial Sequence: Synthetic oligonucleotide
  Antisense strand to SEQ ID NO: 2108174
uguaauccuaacauuugag

SEQ ID NO: 2108176 - RNA, 19 nt, Artificial Sequence
  Description of Artificial Sequence: Synthetic oligonucleotide
  Sense strand starting at position 3505 of SEQ ID NO: 1882272
gaaaucugggcaugaugua

SEQ ID NO: 2108177 - RNA, 19 nt, Artificial Sequence
  Description of Artificial Sequence: Synthetic oligonucleotide
  Antisense strand to SEQ ID NO: 2108176
uacaucaugcccagauuuc

SEQ ID NO: 2108178 - RNA, 19 nt, Artificial Sequence
  Description of Artificial Sequence: Synthetic oligonucleotide
  Sense strand starting at position 3514 of SEQ ID NO: 1882272
gcaugauguagauggaauc

SEQ ID NO: 2108179 - RNA, 19 nt, Artificial Sequence
  Description of Artificial Sequence: Synthetic oligonucleotide
  Antisense strand to SEQ ID NO: 2108178
gauuccaucuacaucaugc

SEQ ID NO: 2108180 - RNA, 19 nt, Artificial Sequence
  Description of Artificial Sequence: Synthetic oligonucleotide
  Sense strand starting at position 3524 of SEQ ID NO: 1882272
gauggaaucucuguuccag

SEQ ID NO: 2108181 - RNA, 19 nt, Artificial Sequence
  Description of Artificial Sequence: Synthetic oligonucleotide
  Antisense strand to SEQ ID NO: 2108180
cuggaacagagauuccauc

SEQ ID NO: 2108182 - RNA, 19 nt, Artificial Sequence
  Description of Artificial Sequence: Synthetic oligonucleotide
  Sense strand starting at position 3597 of SEQ ID NO: 1882272
ggcagaaugugcuuucuug

SEQ ID NO: 2108183 - RNA, 19 nt, Artificial Sequence
  Description of Artificial Sequence: Synthetic oligonucleotide
  Antisense strand to SEQ ID NO: 2108182
caagaaagcacauucugcc

SEQ ID NO: 2108184 - RNA, 19 nt, Artificial Sequence
  Description of Artificial Sequence: Synthetic oligonucleotide
  Sense strand starting at position 3695 of SEQ ID NO: 1882272
ccaccaguguuguuuccua

SEQ ID NO: 2108185 - RNA, 19 nt, Artificial Sequence
  Description of Artificial Sequence: Synthetic oligonucleotide
  Antisense strand to SEQ ID NO: 2108184
uaggaaacaacacuggugg

SEQ ID NO: 2108186 - RNA, 19 nt, Artificial Sequence
  Description of Artificial Sequence: Synthetic oligonucleotide
  Sense strand starting at position 3699 of SEQ ID NO: 1882272
caguguuguuuccuacaca

SEQ ID NO: 2108187 - RNA, 19 nt, Artificial Sequence
  Description of Artificial Sequence: Synthetic oligonucleotide
  Antisense strand to SEQ ID NO: 2108186
uguguaggaaacaacacug

SEQ ID NO: 2108188 - RNA, 19 nt, Artificial Sequence
  Description of Artificial Sequence: Synthetic oligonucleotide
  Sense strand starting at position 3817 of SEQ ID NO: 1882272
ggacucuccugauuaggac

SEQ ID NO: 2108189 - RNA, 19 nt, Artificial Sequence
  Description of Artificial Sequence: Synthetic oligonucleotide
  Antisense strand to SEQ ID NO: 2108188
guccuaaucaggagagucc

SEQ ID NO: 2108190 - RNA, 19 nt, Artificial Sequence
  Description of Artificial Sequence: Synthetic oligonucleotide
  Sense strand starting at position 389 of SEQ ID NO: 1882273
cuuugcauuccucauagga

SEQ ID NO: 2108191 - RNA, 19 nt, Artificial Sequence
  Description of Artificial Sequence: Synthetic oligonucleotide
  Antisense strand to SEQ ID NO: 2108190
uccuaugaggaaugcaaag

SEQ ID NO: 2108192 - RNA, 19 nt, Artificial Sequence
  Description of Artificial Sequence: Synthetic oligonucleotide
  Sense strand starting at position 498 of SEQ ID NO: 1882273
acaggaaucugggauaauc

SEQ ID NO: 2108193 - RNA, 19 nt, Artificial Sequence
  Description of Artificial Sequence: Synthetic oligonucleotide
  Antisense strand to SEQ ID NO: 2108192
gauuaucccagauuccugu

SEQ ID NO: 2108194 - RNA, 19 nt, Artificial Sequence
  Description of Artificial Sequence: Synthetic oligonucleotide
  Sense strand starting at position 708 of SEQ ID NO: 1882273
aucaguauuccagggacug

SEQ ID NO: 2108195 - RNA, 19 nt, Artificial Sequence
  Description of Artificial Sequence: Synthetic oligonucleotide
  Antisense strand to SEQ ID NO: 2108194
cagucccuggaauacugau

SEQ ID NO: 2108196 - RNA, 19 nt, Artificial Sequence
  Description of Artificial Sequence: Synthetic oligonucleotide
  Sense strand starting at position 709 of SEQ ID NO: 1882273
ucaguauuccagggacugu

SEQ ID NO: 2108197 - RNA, 19 nt, Artificial Sequence
  Description of Artificial Sequence: Synthetic oligonucleotide
  Antisense strand to SEQ ID NO: 2108196
acagucccuggaauacuga

SEQ ID NO: 2108198 - RNA, 19 nt, Artificial Sequence
  Description of Artificial Sequence: Synthetic oligonucleotide
  Sense strand starting at position 735 of SEQ ID NO: 1882273
uccauuuccucagggacuu

SEQ ID NO: 2108199 - RNA, 19 nt, Artificial Sequence
  Description of Artificial Sequence: Synthetic oligonucleotide
  Antisense strand to SEQ ID NO: 2108198
aagucccugaggaaaugga

SEQ ID NO: 2108200 - RNA, 19 nt, Artificial Sequence
  Description of Artificial Sequence: Synthetic oligonucleotide
  Sense strand starting at position 790 of SEQ ID NO: 1882273
cagaguuacucucugguac

SEQ ID NO: 2108201 - RNA, 19 nt, Artificial Sequence
  Description of Artificial Sequence: Synthetic oligonucleotide
  Antisense strand to SEQ ID NO: 2108200
guaccagagaguaacucug

SEQ ID NO: 2108202 - RNA, 19 nt, Artificial Sequence
  Description of Artificial Sequence: Synthetic oligonucleotide
  Sense strand starting at position 791 of SEQ ID NO: 1882273
agaguuacucucugguaca

SEQ ID NO: 2108203 - RNA, 19 nt, Artificial Sequence
  Description of Artificial Sequence: Synthetic oligonucleotide
  Antisense strand to SEQ ID NO: 2108202
uguaccagagaguaacucu

SEQ ID NO: 2108204 - RNA, 19 nt, Artificial Sequence
  Description of Artificial Sequence: Synthetic oligonucleotide
  Sense strand starting at position 813 of SEQ ID NO: 1882273
ucuggaaacccaggauucu

SEQ ID NO: 2108205 - RNA, 19 nt, Artificial Sequence
  Description of Artificial Sequence: Synthetic oligonucleotide
  Antisense strand to SEQ ID NO: 2108204
agaauccuggguuuccaga

SEQ ID NO: 2108206 - RNA, 19 nt, Artificial Sequence
  Description of Artificial Sequence: Synthetic oligonucleotide
  Sense strand starting at position 847 of SEQ ID NO: 1882273
gugggagggcgauauucua

SEQ ID NO: 2108207 - RNA, 19 nt, Artificial Sequence
  Description of Artificial Sequence: Synthetic oligonucleotide
  Antisense strand to SEQ ID NO: 2108206
uagaauaucgcccucccac

SEQ ID NO: 2108208 - RNA, 19 nt, Artificial Sequence
  Description of Artificial Sequence: Synthetic oligonucleotide
  Sense strand starting at position 1200 of SEQ ID NO: 1882273
agccaugcuuccucuggau

SEQ ID NO: 2108209 - RNA, 19 nt, Artificial Sequence
  Description of Artificial Sequence: Synthetic oligonucleotide
  Antisense strand to SEQ ID NO: 2108208
auccagaggaagcauggcu

SEQ ID NO: 2108210 - RNA, 19 nt, Artificial Sequence
  Description of Artificial Sequence: Synthetic oligonucleotide
  Sense strand starting at position 1310 of SEQ ID NO: 1882273
cugaaauuaaaccggguaa

SEQ ID NO: 2108211 - RNA, 19 nt, Artificial Sequence
  Description of Artificial Sequence: Synthetic oligonucleotide
  Antisense strand to SEQ ID NO: 2108210
uuacccgguuuaauuucag

SEQ ID NO: 2108212 - RNA, 19 nt, Artificial Sequence
  Description of Artificial Sequence: Synthetic oligonucleotide
  Sense strand starting at position 1311 of SEQ ID NO: 1882273
ugaaauuaaaccggguaaa

SEQ ID NO: 2108213 - RNA, 19 nt, Artificial Sequence
  Description of Artificial Sequence: Synthetic oligonucleotide
  Antisense strand to SEQ ID NO: 2108212
uuuacccgguuuaauuuca

SEQ ID NO: 2108214 - RNA, 19 nt, Artificial Sequence
  Description of Artificial Sequence: Synthetic oligonucleotide
  Sense strand starting at position 1337 of SEQ ID NO: 1882273
gaguuucuucccuggucga

SEQ ID NO: 2108215 - RNA, 19 nt, Artificial Sequence
  Description of Artificial Sequence: Synthetic oligonucleotide
  Antisense strand to SEQ ID NO: 2108214
ucgaccagggaagaaacuc

SEQ ID NO: 2108216 - RNA, 19 nt, Artificial Sequence
  Description of Artificial Sequence: Synthetic oligonucleotide
  Sense strand starting at position 2056 of SEQ ID NO: 1882273
gggagugagaagugggauu

SEQ ID NO: 2108217 - RNA, 19 nt, Artificial Sequence
  Description of Artificial Sequence: Synthetic oligonucleotide
  Antisense strand to SEQ ID NO: 2108216
aaucccacuucucacuccc

SEQ ID NO: 2108218 - RNA, 19 nt, Artificial Sequence
  Description of Artificial Sequence: Synthetic oligonucleotide
  Sense strand starting at position 2058 of SEQ ID NO: 1882273
gagugagaagugggauuau

SEQ ID NO: 2108219 - RNA, 19 nt, Artificial Sequence
  Description of Artificial Sequence: Synthetic oligonucleotide
  Antisense strand to SEQ ID NO: 2108218
auaaucccacuucucacuc

SEQ ID NO: 2108220 - RNA, 19 nt, Artificial Sequence
  Description of Artificial Sequence: Synthetic oligonucleotide
  Sense strand starting at position 2262 of SEQ ID NO: 1882273
cugaguccuggucaaggau

SEQ ID NO: 2108221 - RNA, 19 nt, Artificial Sequence
  Description of Artificial Sequence: Synthetic oligonucleotide
  Antisense strand to SEQ ID NO: 2108220
auccuugaccaggacucag

SEQ ID NO: 2108222 - RNA, 19 nt, Artificial Sequence
  Description of Artificial Sequence: Synthetic oligonucleotide
  Sense strand starting at position 2274 of SEQ ID NO: 1882273
caaggaucugucuguggaa

SEQ ID NO: 2108223 - RNA, 19 nt, Artificial Sequence
  Description of Artificial Sequence: Synthetic oligonucleotide
  Antisense strand to SEQ ID NO: 2108222
uuccacagacagauccuug

SEQ ID NO: 2108224 - RNA, 19 nt, Artificial Sequence
  Description of Artificial Sequence: Synthetic oligonucleotide
  Sense strand starting at position 2275 of SEQ ID NO: 1882273
aaggaucugucuguggaaa

SEQ ID NO: 2108225 - RNA, 19 nt, Artificial Sequence
  Description of Artificial Sequence: Synthetic oligonucleotide
  Antisense strand to SEQ ID NO: 2108224
uuuccacagacagauccuu

SEQ ID NO: 2108226 - RNA, 19 nt, Artificial Sequence
  Description of Artificial Sequence: Synthetic oligonucleotide
  Sense strand starting at position 2276 of SEQ ID NO: 1882273
aggaucugucuguggaaac

SEQ ID NO: 2108227 - RNA, 19 nt, Artificial Sequence
  Description of Artificial Sequence: Synthetic oligonucleotide
  Antisense strand to SEQ ID NO: 2108226
guuuccacagacagauccu

SEQ ID NO: 2108228 - RNA, 19 nt, Artificial Sequence
  Description of Artificial Sequence: Synthetic oligonucleotide
  Sense strand starting at position 2346 of SEQ ID NO: 1882273
cuggaauccucgucccuga

SEQ ID NO: 2108229 - RNA, 19 nt, Artificial Sequence
  Description of Artificial Sequence: Synthetic oligonucleotide
  Antisense strand to SEQ ID NO: 2108228
ucagggacgaggauuccag

SEQ ID NO: 2108230 - RNA, 19 nt, Artificial Sequence
  Description of Artificial Sequence: Synthetic oligonucleotide
  Sense strand starting at position 2349 of SEQ ID NO: 1882273
gaauccucgucccugaacu

SEQ ID NO: 2108231 - RNA, 19 nt, Artificial Sequence
  Description of Artificial Sequence: Synthetic oligonucleotide
  Antisense strand to SEQ ID NO: 2108230
aguucagggacgaggauuc

SEQ ID NO: 2108232 - RNA, 19 nt, Artificial Sequence
  Description of Artificial Sequence: Synthetic oligonucleotide
  Sense strand starting at position 2393 of SEQ ID NO: 1882273
cuuggacuauccuagaaga

SEQ ID NO: 2108233 - RNA, 19 nt, Artificial Sequence
  Description of Artificial Sequence: Synthetic oligonucleotide
  Antisense strand to SEQ ID NO: 2108232
ucuucuaggauaguccaag

SEQ ID NO: 2108234 - RNA, 19 nt, Artificial Sequence
  Description of Artificial Sequence: Synthetic oligonucleotide
  Sense strand starting at position 2486 of SEQ ID NO: 1882273
cucuuuaaaccuggugaag

SEQ ID NO: 2108235 - RNA, 19 nt, Artificial Sequence
  Description of Artificial Sequence: Synthetic oligonucleotide
  Antisense strand to SEQ ID NO: 2108234
cuucaccagguuuaaagag

SEQ ID NO: 2108236 - RNA, 19 nt, Artificial Sequence
  Description of Artificial Sequence: Synthetic oligonucleotide
  Sense strand starting at position 2565 of SEQ ID NO: 1882273
uuauuaauacagugguuag

SEQ ID NO: 2108237 - RNA, 19 nt, Artificial Sequence
  Description of Artificial Sequence: Synthetic oligonucleotide
  Antisense strand to SEQ ID NO: 2108236
cuaaccacuguauuaauaa

SEQ ID NO: 2108238 - RNA, 19 nt, Artificial Sequence
  Description of Artificial Sequence: Synthetic oligonucleotide
  Sense strand starting at position 2605 of SEQ ID NO: 1882273
ucaggauucuaaucuguaa

SEQ ID NO: 2108239 - RNA, 19 nt, Artificial Sequence
  Description of Artificial Sequence: Synthetic oligonucleotide
  Antisense strand to SEQ ID NO: 2108238
uuacagauuagaauccuga

SEQ ID NO: 2108240 - RNA, 19 nt, Artificial Sequence
  Description of Artificial Sequence: Synthetic oligonucleotide
  Sense strand starting at position 2648 of SEQ ID NO: 1882273
auauaaguguauccaaaca

SEQ ID NO: 2108241 - RNA, 19 nt, Artificial Sequence
  Description of Artificial Sequence: Synthetic oligonucleotide
  Antisense strand to SEQ ID NO: 2108240
uguuuggauacacuuauau

SEQ ID NO: 2108242 - RNA, 19 nt, Artificial Sequence
  Description of Artificial Sequence: Synthetic oligonucleotide
  Sense strand starting at position 2811 of SEQ ID NO: 1882273
aggauuuguuacuguauau

SEQ ID NO: 2108243 - RNA, 19 nt, Artificial Sequence
  Description of Artificial Sequence: Synthetic oligonucleotide
  Antisense strand to SEQ ID NO: 2108242
auauacaguaacaaauccu

SEQ ID NO: 2108244 - RNA, 19 nt, Artificial Sequence
  Description of Artificial Sequence: Synthetic oligonucleotide
  Sense strand starting at position 3065 of SEQ ID NO: 1882273
gcuuuagaguccuuucccu

SEQ ID NO: 2108245 - RNA, 19 nt, Artificial Sequence
  Description of Artificial Sequence: Synthetic oligonucleotide
  Antisense strand to SEQ ID NO: 2108244
agggaaaggacucuaaagc

SEQ ID NO: 2108246 - RNA, 19 nt, Artificial Sequence
  Description of Artificial Sequence: Synthetic oligonucleotide
  Sense strand starting at position 3369 of SEQ ID NO: 1882273
cuacuuucuuauguguuaa

SEQ ID NO: 2108247 - RNA, 19 nt, Artificial Sequence
  Description of Artificial Sequence: Synthetic oligonucleotide
  Antisense strand to SEQ ID NO: 2108246
uuaacacauaagaaaguag

SEQ ID NO: 2108248 - RNA, 19 nt, Artificial Sequence
  Description of Artificial Sequence: Synthetic oligonucleotide
  Sense strand starting at position 3371 of SEQ ID NO: 1882273
acuuucuuauguguuaagu

SEQ ID NO: 2108249 - RNA, 19 nt, Artificial Sequence
  Description of Artificial Sequence: Synthetic oligonucleotide
  Antisense strand to SEQ ID NO: 2108248
acuuaacacauaagaaagu

SEQ ID NO: 2108250 - RNA, 19 nt, Artificial Sequence
  Description of Artificial Sequence: Synthetic oligonucleotide
  Sense strand starting at position 3507 of SEQ ID NO: 1882273
agguaauauuaagcugcau

SEQ ID NO: 2108251 - RNA, 19 nt, Artificial Sequence
  Description of Artificial Sequence: Synthetic oligonucleotide
  Antisense strand to SEQ ID NO: 2108250
augcagcuuaauauuaccu

SEQ ID NO: 2108252 - RNA, 19 nt, Artificial Sequence
  Description of Artificial Sequence: Synthetic oligonucleotide
  Sense strand starting at position 3536 of SEQ ID NO: 1882273
aaaggacacuuguaagagu

SEQ ID NO: 2108253 - RNA, 19 nt, Artificial Sequence
  Description of Artificial Sequence: Synthetic oligonucleotide
  Antisense strand to SEQ ID NO: 2108252
acucuuacaaguguccuuu

SEQ ID NO: 2108254 - RNA, 19 nt, Artificial Sequence
  Description of Artificial Sequence: Synthetic oligonucleotide
  Sense strand starting at position 3547 of SEQ ID NO: 1882273
guaagaguguaguuucaug

SEQ ID NO: 2108255 - RNA, 19 nt, Artificial Sequence
  Description of Artificial Sequence: Synthetic oligonucleotide
  Antisense strand to SEQ ID NO: 2108254
caugaaacuacacucuuac

SEQ ID NO: 2108256 - RNA, 19 nt, Artificial Sequence
  Description of Artificial Sequence: Synthetic oligonucleotide
  Sense strand starting at position 3565 of SEQ ID NO: 1882273
guaaccuaccauugugcua

SEQ ID NO: 2108257 - RNA, 19 nt, Artificial Sequence
  Description of Artificial Sequence: Synthetic oligonucleotide
  Antisense strand to SEQ ID NO: 2108256
uagcacaaugguagguuac

SEQ ID NO: 2108258 - RNA, 19 nt, Artificial Sequence
  Description of Artificial Sequence: Synthetic oligonucleotide
  Sense strand starting at position 3577 of SEQ ID NO: 1882273
ugugcuauucuuguuguau

SEQ ID NO: 2108259 - RNA, 19 nt, Artificial Sequence
  Description of Artificial Sequence: Synthetic oligonucleotide
  Antisense strand to SEQ ID NO: 2108258
auacaacaagaauagcaca

SEQ ID NO: 2108260 - RNA, 19 nt, Artificial Sequence
  Description of Artificial Sequence: Synthetic oligonucleotide
  Sense strand starting at position 3688 of SEQ ID NO: 1882273
ugaucuguguaugugcaua

SEQ ID NO: 2108261 - RNA, 19 nt, Artificial Sequence
  Description of Artificial Sequence: Synthetic oligonucleotide
  Antisense strand to SEQ ID NO: 2108260
uaugcacauacacagauca

SEQ ID NO: 2108262 - RNA, 19 nt, Artificial Sequence
  Description of Artificial Sequence: Synthetic oligonucleotide
  Sense strand starting at position 3690 of SEQ ID NO: 1882273
aucuguguaugugcauaau

SEQ ID NO: 2108263 - RNA, 19 nt, Artificial Sequence
  Description of Artificial Sequence: Synthetic oligonucleotide
  Antisense strand to SEQ ID NO: 2108262
auuaugcacauacacagau

SEQ ID NO: 2108264 - RNA, 19 nt, Artificial Sequence
  Description of Artificial Sequence: Synthetic oligonucleotide
  Sense strand starting at position 3701 of SEQ ID NO: 1882273
ugcauaauuucuguuguua

SEQ ID NO: 2108265 - RNA, 19 nt, Artificial Sequence
  Description of Artificial Sequence: Synthetic oligonucleotide
  Antisense strand to SEQ ID NO: 2108264
uaacaacagaaauuaugca

SEQ ID NO: 2108266 - RNA, 19 nt, Artificial Sequence
  Description of Artificial Sequence: Synthetic oligonucleotide
  Sense strand starting at position 3731 of SEQ ID NO: 1882273
cuauauaucuaggucacca

SEQ ID NO: 2108267 - RNA, 19 nt, Artificial Sequence
  Description of Artificial Sequence: Synthetic oligonucleotide
  Antisense strand to SEQ ID NO: 2108266
uggugaccuagauauauag

SEQ ID NO: 2108268 - RNA, 19 nt, Artificial Sequence
  Description of Artificial Sequence: Synthetic oligonucleotide
  Sense strand starting at position 3896 of SEQ ID NO: 1882273
ggcguuuguguauaauaaa

SEQ ID NO: 2108269 - RNA, 19 nt, Artificial Sequence
  Description of Artificial Sequence: Synthetic oligonucleotide
  Antisense strand to SEQ ID NO: 2108268
uuuauuauacacaaacgcc

SEQ ID NO: 2108270 - RNA, 19 nt, Artificial Sequence
  Description of Artificial Sequence: Synthetic oligonucleotide
  Sense strand starting at position 108 of SEQ ID NO: 1882274
ccuuucuguggucacacaa

SEQ ID NO: 2108271 - RNA, 19 nt, Artificial Sequence
  Description of Artificial Sequence: Synthetic oligonucleotide
  Antisense strand to SEQ ID NO: 2108270
uugugugaccacagaaagg

SEQ ID NO: 2108272 - RNA, 19 nt, Artificial Sequence
  Description of Artificial Sequence: Synthetic oligonucleotide
  Sense strand starting at position 196 of SEQ ID NO: 1882274
gacaauauccagcaguuga

SEQ ID NO: 2108273 - RNA, 19 nt, Artificial Sequence
  Description of Artificial Sequence: Synthetic oligonucleotide
  Antisense strand to SEQ ID NO: 2108272
ucaacugcuggauauuguc

SEQ ID NO: 2108274 - RNA, 19 nt, Artificial Sequence
  Description of Artificial Sequence: Synthetic oligonucleotide
  Sense strand starting at position 252 of SEQ ID NO: 1882274
ggcgcaagcgccuucagau

SEQ ID NO: 2108275 - RNA, 19 nt, Artificial Sequence
  Description of Artificial Sequence: Synthetic oligonucleotide
  Antisense strand to SEQ ID NO: 2108274
aucugaaggcgcuugcgcc

SEQ ID NO: 2108276 - RNA, 19 nt, Artificial Sequence
  Description of Artificial Sequence: Synthetic oligonucleotide
  Sense strand starting at position 1125 of SEQ ID NO: 1882274
accugaaaguuaccaugau

SEQ ID NO: 2108277 - RNA, 19 nt, Artificial Sequence
  Description of Artificial Sequence: Synthetic oligonucleotide
  Antisense strand to SEQ ID NO: 2108276
aucaugguaacuuucaggu

SEQ ID NO: 2108278 - RNA, 19 nt, Artificial Sequence
  Description of Artificial Sequence: Synthetic oligonucleotide
  Sense strand starting at position 1149 of SEQ ID NO: 1882274
aggaaaugucaugagcugu

SEQ ID NO: 2108279 - RNA, 19 nt, Artificial Sequence
  Description of Artificial Sequence: Synthetic oligonucleotide
  Antisense strand to SEQ ID NO: 2108278
acagcucaugacauuuccu

SEQ ID NO: 2108280 - RNA, 19 nt, Artificial Sequence
  Description of Artificial Sequence: Synthetic oligonucleotide
  Sense strand starting at position 1254 of SEQ ID NO: 1882274
gguuaaugauaccuaccuu

SEQ ID NO: 2108281 - RNA, 19 nt, Artificial Sequence
  Description of Artificial Sequence: Synthetic oligonucleotide
  Antisense strand to SEQ ID NO: 2108280
aagguagguaucauuaacc

SEQ ID NO: 2108282 - RNA, 19 nt, Artificial Sequence
  Description of Artificial Sequence: Synthetic oligonucleotide
  Sense strand starting at position 1360 of SEQ ID NO: 1882274
uaaagaaacgauggucaua

SEQ ID NO: 2108283 - RNA, 19 nt, Artificial Sequence
  Description of Artificial Sequence: Synthetic oligonucleotide
  Antisense strand to SEQ ID NO: 2108282
uaugaccaucguuucuuua

SEQ ID NO: 2108284 - RNA, 19 nt, Artificial Sequence
  Description of Artificial Sequence: Synthetic oligonucleotide
  Sense strand starting at position 1362 of SEQ ID NO: 1882274
aagaaacgauggucauauu

SEQ ID NO: 2108285 - RNA, 19 nt, Artificial Sequence
  Description of Artificial Sequence: Synthetic oligonucleotide
  Antisense strand to SEQ ID NO: 2108284
aauaugaccaucguuucuu

SEQ ID NO: 2108286 - RNA, 19 nt, Artificial Sequence
  Description of Artificial Sequence: Synthetic oligonucleotide
  Sense strand starting at position 1409 of SEQ ID NO: 1882274
gcacguugagaguaugaaa

SEQ ID NO: 2108287 - RNA, 19 nt, Artificial Sequence
  Description of Artificial Sequence: Synthetic oligonucleotide
  Antisense strand to SEQ ID NO: 2108286
uuucauacucucaacgugc

SEQ ID NO: 2108288 - RNA, 19 nt, Artificial Sequence
  Description of Artificial Sequence: Synthetic oligonucleotide
  Sense strand starting at position 1417 of SEQ ID NO: 1882274
agaguaugaaauugcuaag

SEQ ID NO: 2108289 - RNA, 19 nt, Artificial Sequence
  Description of Artificial Sequence: Synthetic oligonucleotide
  Antisense strand to SEQ ID NO: 2108288
cuuagcaauuucauacucu

SEQ ID NO: 2108290 - RNA, 19 nt, Artificial Sequence
  Description of Artificial Sequence: Synthetic oligonucleotide
  Sense strand starting at position 1482 of SEQ ID NO: 1882274
guaauauaacuacagucuu

SEQ ID NO: 2108291 - RNA, 19 nt, Artificial Sequence
  Description of Artificial Sequence: Synthetic oligonucleotide
  Antisense strand to SEQ ID NO: 2108290
aagacuguaguuauauuac

SEQ ID NO: 2108292 - RNA, 19 nt, Artificial Sequence
  Description of Artificial Sequence: Synthetic oligonucleotide
  Sense strand starting at position 1528 of SEQ ID NO: 1882274
aauaguacugcuuagaguu

SEQ ID NO: 2108293 - RNA, 19 nt, Artificial Sequence
  Description of Artificial Sequence: Synthetic oligonucleotide
  Antisense strand to SEQ ID NO: 2108292
aacucuaagcaguacuauu

SEQ ID NO: 2108294 - RNA, 19 nt, Artificial Sequence
  Description of Artificial Sequence: Synthetic oligonucleotide
  Sense strand starting at position 1708 of SEQ ID NO: 1882274
guaauagauggcgacauaa

SEQ ID NO: 2108295 - RNA, 19 nt, Artificial Sequence
  Description of Artificial Sequence: Synthetic oligonucleotide
  Antisense strand to SEQ ID NO: 2108294
uuaugucgccaucuauuac

SEQ ID NO: 2108296 - RNA, 19 nt, Artificial Sequence
  Description of Artificial Sequence: Synthetic oligonucleotide
  Sense strand starting at position 1760 of SEQ ID NO: 1882274
gagagacauuuagaaaugu

SEQ ID NO: 2108297 - RNA, 19 nt, Artificial Sequence
  Description of Artificial Sequence: Synthetic oligonucleotide
  Antisense strand to SEQ ID NO: 2108296
acauuucuaaaugucucuc

SEQ ID NO: 2108298 - RNA, 19 nt, Artificial Sequence
  Description of Artificial Sequence: Synthetic oligonucleotide
  Sense strand starting at position 1805 of SEQ ID NO: 1882274
aaagaauugcuguaagcag

SEQ ID NO: 2108299 - RNA, 19 nt, Artificial Sequence
  Description of Artificial Sequence: Synthetic oligonucleotide
  Antisense strand to SEQ ID NO: 2108298
cugcuuacagcaauucuuu

SEQ ID NO: 2108300 - RNA, 19 nt, Artificial Sequence
  Description of Artificial Sequence: Synthetic oligonucleotide
  Sense strand starting at position 1832 of SEQ ID NO: 1882274
aggcacagaaucugugaau

SEQ ID NO: 2108301 - RNA, 19 nt, Artificial Sequence
  Description of Artificial Sequence: Synthetic oligonucleotide
  Antisense strand to SEQ ID NO: 2108300
auucacagauucugugccu

SEQ ID NO: 2108302 - RNA, 19 nt, Artificial Sequence
  Description of Artificial Sequence: Synthetic oligonucleotide
  Sense strand starting at position 1833 of SEQ ID NO: 1882274
ggcacagaaucugugaaua

SEQ ID NO: 2108303 - RNA, 19 nt, Artificial Sequence
  Description of Artificial Sequence: Synthetic oligonucleotide
  Antisense strand to SEQ ID NO: 2108302
uauucacagauucugugcc

SEQ ID NO: 2108304 - RNA, 19 nt, Artificial Sequence
  Description of Artificial Sequence: Synthetic oligonucleotide
  Sense strand starting at position 2050 of SEQ ID NO: 1882274
augacuucuuucucuggga

SEQ ID NO: 2108305 - RNA, 19 nt, Artificial Sequence
  Description of Artificial Sequence: Synthetic oligonucleotide
  Antisense strand to SEQ ID NO: 2108304
ucccagagaaagaagucau

SEQ ID NO: 2108306 - RNA, 19 nt, Artificial Sequence
  Description of Artificial Sequence: Synthetic oligonucleotide
  Sense strand starting at position 2051 of SEQ ID NO: 1882274
ugacuucuuucucugggaa

SEQ ID NO: 2108307 - RNA, 19 nt, Artificial Sequence
  Description of Artificial Sequence: Synthetic oligonucleotide
  Antisense strand to SEQ ID NO: 2108306
uucccagagaaagaaguca

SEQ ID NO: 2108308 - RNA, 19 nt, Artificial Sequence
  Description of Artificial Sequence: Synthetic oligonucleotide
  Sense strand starting at position 2337 of SEQ ID NO: 1882274
agcaucucuuuauuuguau

SEQ ID NO: 2108309 - RNA, 19 nt, Artificial Sequence
  Description of Artificial Sequence: Synthetic oligonucleotide
  Antisense strand to SEQ ID NO: 2108308
auacaaauaaagagaugcu

SEQ ID NO: 2108310 - RNA, 19 nt, Artificial Sequence
  Description of Artificial Sequence: Synthetic oligonucleotide
  Sense strand starting at position 2338 of SEQ ID NO: 1882274
gcaucucuuuauuuguaua

SEQ ID NO: 2108311 - RNA, 19 nt, Artificial Sequence
  Description of Artificial Sequence: Synthetic oligonucleotide
  Antisense strand to SEQ ID NO: 2108310
uauacaaauaaagagaugc

SEQ ID NO: 2108312 - RNA, 19 nt, Artificial Sequence
  Description of Artificial Sequence: Synthetic oligonucleotide
  Sense strand starting at position 2351 of SEQ ID NO: 1882274
uguauaacacuuuaugguu

SEQ ID NO: 2108313 - RNA, 19 nt, Artificial Sequence
  Description of Artificial Sequence: Synthetic oligonucleotide
  Antisense strand to SEQ ID NO: 2108312
aaccauaaaguguuauaca

SEQ ID NO: 2108314 - RNA, 19 nt, Artificial Sequence
  Description of Artificial Sequence: Synthetic oligonucleotide
  Sense strand starting at position 2383 of SEQ ID NO: 1882274
ugcuauuguuaucucauuu

SEQ ID NO: 2108315 - RNA, 19 nt, Artificial Sequence
  Description of Artificial Sequence: Synthetic oligonucleotide
  Antisense strand to SEQ ID NO: 2108314
aaaugagauaacaauagca

SEQ ID NO: 2108316 - RNA, 19 nt, Artificial Sequence
  Description of Artificial Sequence: Synthetic oligonucleotide
  Sense strand starting at position 2442 of SEQ ID NO: 1882274
ggaacagauuccucuucua

SEQ ID NO: 2108317 - RNA, 19 nt, Artificial Sequence
  Description of Artificial Sequence: Synthetic oligonucleotide
  Antisense strand to SEQ ID NO: 2108316
uagaagaggaaucuguucc

SEQ ID NO: 2108318 - RNA, 19 nt, Artificial Sequence
  Description of Artificial Sequence: Synthetic oligonucleotide
  Sense strand starting at position 2522 of SEQ ID NO: 1882274
caggaaguuguguauuaca

SEQ ID NO: 2108319 - RNA, 19 nt, Artificial Sequence
  Description of Artificial Sequence: Synthetic oligonucleotide
  Antisense strand to SEQ ID NO: 2108318
uguaauacacaacuuccug

SEQ ID NO: 2108320 - RNA, 19 nt, Artificial Sequence
  Description of Artificial Sequence: Synthetic oligonucleotide
  Sense strand starting at position 2639 of SEQ ID NO: 1882274
cacuuuauaguggauguaa

SEQ ID NO: 2108321 - RNA, 19 nt, Artificial Sequence
  Description of Artificial Sequence: Synthetic oligonucleotide
  Antisense strand to SEQ ID NO: 2108320
uuacauccacuauaaagug

SEQ ID NO: 2108322 - RNA, 19 nt, Artificial Sequence
  Description of Artificial Sequence: Synthetic oligonucleotide
  Sense strand starting at position 2762 of SEQ ID NO: 1882274
aacaauagguguguuagga

SEQ ID NO: 2108323 - RNA, 19 nt, Artificial Sequence
  Description of Artificial Sequence: Synthetic oligonucleotide
  Antisense strand to SEQ ID NO: 2108322
uccuaacacaccuauuguu

SEQ ID NO: 2108324 - RNA, 19 nt, Artificial Sequence
  Description of Artificial Sequence: Synthetic oligonucleotide
  Sense strand starting at position 2819 of SEQ ID NO: 1882274
uaguuauagacguagacug

SEQ ID NO: 2108325 - RNA, 19 nt, Artificial Sequence
  Description of Artificial Sequence: Synthetic oligonucleotide
  Antisense strand to SEQ ID NO: 2108324
cagucuacgucuauaacua

SEQ ID NO: 2108326 - RNA, 19 nt, Artificial Sequence
  Description of Artificial Sequence: Synthetic oligonucleotide
  Sense strand starting at position 2821 of SEQ ID NO: 1882274
guuauagacguagacugau

SEQ ID NO: 2108327 - RNA, 19 nt, Artificial Sequence
  Description of Artificial Sequence: Synthetic oligonucleotide
  Antisense strand to SEQ ID NO: 2108326
aucagucuacgucuauaac

SEQ ID NO: 2108328 - RNA, 19 nt, Artificial Sequence
  Description of Artificial Sequence: Synthetic oligonucleotide
  Sense strand starting at position 2847 of SEQ ID NO: 1882274
auagauguauggccagaua

SEQ ID NO: 2108329 - RNA, 19 nt, Artificial Sequence
  Description of Artificial Sequence: Synthetic oligonucleotide
  Antisense strand to SEQ ID NO: 2108328
uaucuggccauacaucuau

SEQ ID NO: 2108330 - RNA, 19 nt, Artificial Sequence
  Description of Artificial Sequence: Synthetic oligonucleotide
  Sense strand starting at position 3193 of SEQ ID NO: 1882274
gggagauuggugcaugcaa

SEQ ID NO: 2108331 - RNA, 19 nt, Artificial Sequence
  Description of Artificial Sequence: Synthetic oligonucleotide
  Antisense strand to SEQ ID NO: 2108330
uugcaugcaccaaucuccc

SEQ ID NO: 2108332 - RNA, 19 nt, Artificial Sequence
  Description of Artificial Sequence: Synthetic oligonucleotide
  Sense strand starting at position 3272 of SEQ ID NO: 1882274
gucuccagacucugauaau

SEQ ID NO: 2108333 - RNA, 19 nt, Artificial Sequence
  Description of Artificial Sequence: Synthetic oligonucleotide
  Antisense strand to SEQ ID NO: 2108332
auuaucagagucuggagac

SEQ ID NO: 2108334 - RNA, 19 nt, Artificial Sequence
  Description of Artificial Sequence: Synthetic oligonucleotide
  Sense strand starting at position 3362 of SEQ ID NO: 1882274
gccugagaaccugaggguu

SEQ ID NO: 2108335 - RNA, 19 nt, Artificial Sequence
  Description of Artificial Sequence: Synthetic oligonucleotide
  Antisense strand to SEQ ID NO: 2108334
aacccucagguucucaggc

SEQ ID NO: 2108336 - RNA, 19 nt, Artificial Sequence
  Description of Artificial Sequence: Synthetic oligonucleotide
  Sense strand starting at position 3393 of SEQ ID NO: 1882274
gguauaaguccugaaaucc

SEQ ID NO: 2108337 - RNA, 19 nt, Artificial Sequence
  Description of Artificial Sequence: Synthetic oligonucleotide
  Antisense strand to SEQ ID NO: 2108336
ggauuucaggacuuauacc

SEQ ID NO: 2108338 - RNA, 19 nt, Artificial Sequence
  Description of Artificial Sequence: Synthetic oligonucleotide
  Sense strand starting at position 3428 of SEQ ID NO: 1882274
ggagcuguuauccaaggac

SEQ ID NO: 2108339 - RNA, 19 nt, Artificial Sequence
  Description of Artificial Sequence: Synthetic oligonucleotide
  Antisense strand to SEQ ID NO: 2108338
guccuuggauaacagcucc

SEQ ID NO: 2108340 - RNA, 19 nt, Artificial Sequence
  Description of Artificial Sequence: Synthetic oligonucleotide
  Sense strand starting at position 3455 of SEQ ID NO: 1882274
agaagaguguaucccaacu

SEQ ID NO: 2108341 - RNA, 19 nt, Artificial Sequence
  Description of Artificial Sequence: Synthetic oligonucleotide
  Antisense strand to SEQ ID NO: 2108340
aguugggauacacucuucu

SEQ ID NO: 2108342 - RNA, 19 nt, Artificial Sequence
  Description of Artificial Sequence: Synthetic oligonucleotide
  Sense strand starting at position 3605 of SEQ ID NO: 1882274
gcuaaucuacucuggaaac

SEQ ID NO: 2108343 - RNA, 19 nt, Artificial Sequence
  Description of Artificial Sequence: Synthetic oligonucleotide
  Antisense strand to SEQ ID NO: 2108342
guuuccagaguagauuagc

SEQ ID NO: 2108344 - RNA, 19 nt, Artificial Sequence
  Description of Artificial Sequence: Synthetic oligonucleotide
  Sense strand starting at position 3717 of SEQ ID NO: 1882274
agguuauauggucaacucu

SEQ ID NO: 2108345 - RNA, 19 nt, Artificial Sequence
  Description of Artificial Sequence: Synthetic oligonucleotide
  Antisense strand to SEQ ID NO: 2108344
agaguugaccauauaaccu

SEQ ID NO: 2108346 - RNA, 19 nt, Artificial Sequence
  Description of Artificial Sequence: Synthetic oligonucleotide
  Sense strand starting at position 3956 of SEQ ID NO: 1882274
cugaguaaaugaguccauu

SEQ ID NO: 2108347 - RNA, 19 nt, Artificial Sequence
  Description of Artificial Sequence: Synthetic oligonucleotide
  Antisense strand to SEQ ID NO: 2108346
aauggacucauuuacucag

SEQ ID NO: 2108348 - RNA, 19 nt, Artificial Sequence
  Description of Artificial Sequence: Synthetic oligonucleotide
  Sense strand starting at position 3959 of SEQ ID NO: 1882274
aguaaaugaguccauugca

SEQ ID NO: 2108349 - RNA, 19 nt, Artificial Sequence
  Description of Artificial Sequence: Synthetic oligonucleotide
  Antisense strand to SEQ ID NO: 2108348
ugcaauggacucauuuacu

SEQ ID NO: 2108350 - RNA, 19 nt, Artificial Sequence
  Description of Artificial Sequence: Synthetic oligonucleotide
  Sense strand starting at position 332 of SEQ ID NO: 1882275
auaucuuagcagggcaaau

SEQ ID NO: 2108351 - RNA, 19 nt, Artificial Sequence
  Description of Artificial Sequence: Synthetic oligonucleotide
  Antisense strand to SEQ ID NO: 2108350
auuugcccugcuaagauau

SEQ ID NO: 2108352 - RNA, 19 nt, Artificial Sequence
  Description of Artificial Sequence: Synthetic oligonucleotide
  Sense strand starting at position 491 of SEQ ID NO: 1882275
auaaguuaaugguuccuga

SEQ ID NO: 2108353 - RNA, 19 nt, Artificial Sequence
  Description of Artificial Sequence: Synthetic oligonucleotide
  Antisense strand to SEQ ID NO: 2108352
ucaggaaccauuaacuuau

SEQ ID NO: 2108354 - RNA, 19 nt, Artificial Sequence
  Description of Artificial Sequence: Synthetic oligonucleotide
  Sense strand starting at position 494 of SEQ ID NO: 1882275
aguuaaugguuccugauua

SEQ ID NO: 2108355 - RNA, 19 nt, Artificial Sequence
  Description of Artificial Sequence: Synthetic oligonucleotide
  Antisense strand to SEQ ID NO: 2108354
uaaucaggaaccauuaacu

SEQ ID NO: 2108356 - RNA, 19 nt, Artificial Sequence
  Description of Artificial Sequence: Synthetic oligonucleotide
  Sense strand starting at position 667 of SEQ ID NO: 1882275
guuagaugaccauggccau

SEQ ID NO: 2108357 - RNA, 19 nt, Artificial Sequence
  Description of Artificial Sequence: Synthetic oligonucleotide
  Antisense strand to SEQ ID NO: 2108356
auggccauggucaucuaac

SEQ ID NO: 2108358 - RNA, 19 nt, Artificial Sequence
  Description of Artificial Sequence: Synthetic oligonucleotide
  Sense strand starting at position 843 of SEQ ID NO: 1882275
ugguacaauuaugcuuaau

SEQ ID NO: 2108359 - RNA, 19 nt, Artificial Sequence
  Description of Artificial Sequence: Synthetic oligonucleotide
  Antisense strand to SEQ ID NO: 2108358
auuaagcauaauuguacca

SEQ ID NO: 2108360 - RNA, 19 nt, Artificial Sequence
  Description of Artificial Sequence: Synthetic oligonucleotide
  Sense strand starting at position 845 of SEQ ID NO: 1882275
guacaauuaugcuuaauga

SEQ ID NO: 2108361 - RNA, 19 nt, Artificial Sequence
  Description of Artificial Sequence: Synthetic oligonucleotide
  Antisense strand to SEQ ID NO: 2108360
ucauuaagcauaauuguac

SEQ ID NO: 2108362 - RNA, 19 nt, Artificial Sequence
  Description of Artificial Sequence: Synthetic oligonucleotide
  Sense strand starting at position 932 of SEQ ID NO: 1882275
ccuguaauuuaacaagaag

SEQ ID NO: 2108363 - RNA, 19 nt, Artificial Sequence
  Description of Artificial Sequence: Synthetic oligonucleotide
  Antisense strand to SEQ ID NO: 2108362
cuucuuguuaaauuacagg

SEQ ID NO: 2108364 - RNA, 19 nt, Artificial Sequence
  Description of Artificial Sequence: Synthetic oligonucleotide
  Sense strand starting at position 1082 of SEQ ID NO: 1882275
uuauuuaucugacacuggu

SEQ ID NO: 2108365 - RNA, 19 nt, Artificial Sequence
  Description of Artificial Sequence: Synthetic oligonucleotide
  Antisense strand to SEQ ID NO: 2108364
accagugucagauaaauaa

SEQ ID NO: 2108366 - RNA, 19 nt, Artificial Sequence
  Description of Artificial Sequence: Synthetic oligonucleotide
  Sense strand starting at position 1085 of SEQ ID NO: 1882275
uuuaucugacacugguuaa

SEQ ID NO: 2108367 - RNA, 19 nt, Artificial Sequence
  Description of Artificial Sequence: Synthetic oligonucleotide
  Antisense strand to SEQ ID NO: 2108366
uuaaccagugucagauaaa

SEQ ID NO: 2108368 - RNA, 19 nt, Artificial Sequence
  Description of Artificial Sequence: Synthetic oligonucleotide
  Sense strand starting at position 1095 of SEQ ID NO: 1882275
acugguuaagagugcauua

SEQ ID NO: 2108369 - RNA, 19 nt, Artificial Sequence
  Description of Artificial Sequence: Synthetic oligonucleotide
  Antisense strand to SEQ ID NO: 2108368
uaaugcacucuuaaccagu

SEQ ID NO: 2108370 - RNA, 19 nt, Artificial Sequence
  Description of Artificial Sequence: Synthetic oligonucleotide
  Sense strand starting at position 1097 of SEQ ID NO: 1882275
ugguuaagagugcauuaaa

SEQ ID NO: 2108371 - RNA, 19 nt, Artificial Sequence
  Description of Artificial Sequence: Synthetic oligonucleotide
  Antisense strand to SEQ ID NO: 2108370
uuuaaugcacucuuaacca

SEQ ID NO: 2108372 - RNA, 19 nt, Artificial Sequence
  Description of Artificial Sequence: Synthetic oligonucleotide
  Sense strand starting at position 1169 of SEQ ID NO: 1882275
ggaacaaugugggaauaaa

SEQ ID NO: 2108373 - RNA, 19 nt, Artificial Sequence
  Description of Artificial Sequence: Synthetic oligonucleotide
  Antisense strand to SEQ ID NO: 2108372
uuuauucccacauuguucc

SEQ ID NO: 2108374 - RNA, 19 nt, Artificial Sequence
  Description of Artificial Sequence: Synthetic oligonucleotide
  Sense strand starting at position 1253 of SEQ ID NO: 1882275
gauaauuaauguucugaug

SEQ ID NO: 2108375 - RNA, 19 nt, Artificial Sequence
  Description of Artificial Sequence: Synthetic oligonucleotide
  Antisense strand to SEQ ID NO: 2108374
caucagaacauuaauuauc

SEQ ID NO: 2108376 - RNA, 19 nt, Artificial Sequence
  Description of Artificial Sequence: Synthetic oligonucleotide
  Sense strand starting at position 1259 of SEQ ID NO: 1882275
uaauguucugauggauuau

SEQ ID NO: 2108377 - RNA, 19 nt, Artificial Sequence
  Description of Artificial Sequence: Synthetic oligonucleotide
  Antisense strand to SEQ ID NO: 2108376
auaauccaucagaacauua

SEQ ID NO: 2108378 - RNA, 19 nt, Artificial Sequence
  Description of Artificial Sequence: Synthetic oligonucleotide
  Sense strand starting at position 1341 of SEQ ID NO: 1882275
acaaauuuguagucuuugu

SEQ ID NO: 2108379 - RNA, 19 nt, Artificial Sequence
  Description of Artificial Sequence: Synthetic oligonucleotide
  Antisense strand to SEQ ID NO: 2108378
acaaagacuacaaauuugu

SEQ ID NO: 2108380 - RNA, 19 nt, Artificial Sequence
  Description of Artificial Sequence: Synthetic oligonucleotide
  Sense strand starting at position 1345 of SEQ ID NO: 1882275
auuuguagucuuuguuaca

SEQ ID NO: 2108381 - RNA, 19 nt, Artificial Sequence
  Description of Artificial Sequence: Synthetic oligonucleotide
  Antisense strand to SEQ ID NO: 2108380
uguaacaaagacuacaaau

SEQ ID NO: 2108382 - RNA, 19 nt, Artificial Sequence
  Description of Artificial Sequence: Synthetic oligonucleotide
  Sense strand starting at position 1382 of SEQ ID NO: 1882275
gaauaagggcgguauccuu

SEQ ID NO: 2108383 - RNA, 19 nt, Artificial Sequence
  Description of Artificial Sequence: Synthetic oligonucleotide
  Antisense strand to SEQ ID NO: 2108382
aaggauaccgcccuuauuc

SEQ ID NO: 2108384 - RNA, 19 nt, Artificial Sequence
  Description of Artificial Sequence: Synthetic oligonucleotide
  Sense strand starting at position 1389 of SEQ ID NO: 1882275
ggcgguauccuugaaggaa

SEQ ID NO: 2108385 - RNA, 19 nt, Artificial Sequence
  Description of Artificial Sequence: Synthetic oligonucleotide
  Antisense strand to SEQ ID NO: 2108384
uuccuucaaggauaccgcc

SEQ ID NO: 2108386 - RNA, 19 nt, Artificial Sequence
  Description of Artificial Sequence: Synthetic oligonucleotide
  Sense strand starting at position 1403 of SEQ ID NO: 1882275
aggaauaccuaugaauaca

SEQ ID NO: 2108387 - RNA, 19 nt, Artificial Sequence
  Description of Artificial Sequence: Synthetic oligonucleotide
  Antisense strand to SEQ ID NO: 2108386
uguauucauagguauuccu

SEQ ID NO: 2108388 - RNA, 19 nt, Artificial Sequence
  Description of Artificial Sequence: Synthetic oligonucleotide
  Sense strand starting at position 1775 of SEQ ID NO: 1882275
agagaugcucccggagaag

SEQ ID NO: 2108389 - RNA, 19 nt, Artificial Sequence
  Description of Artificial Sequence: Synthetic oligonucleotide
  Antisense strand to SEQ ID NO: 2108388
cuucuccgggagcaucucu

SEQ ID NO: 2108390 - RNA, 19 nt, Artificial Sequence
  Description of Artificial Sequence: Synthetic oligonucleotide
  Sense strand starting at position 2159 of SEQ ID NO: 1882275
cagggcugacuguaucuua

SEQ ID NO: 2108391 - RNA, 19 nt, Artificial Sequence
  Description of Artificial Sequence: Synthetic oligonucleotide
  Antisense strand to SEQ ID NO: 2108390
uaagauacagucagcccug

SEQ ID NO: 2108392 - RNA, 19 nt, Artificial Sequence
  Description of Artificial Sequence: Synthetic oligonucleotide
  Sense strand starting at position 2249 of SEQ ID NO: 1882275
gcgugaguguuuauguuga

SEQ ID NO: 2108393 - RNA, 19 nt, Artificial Sequence
  Description of Artificial Sequence: Synthetic oligonucleotide
  Antisense strand to SEQ ID NO: 2108392
ucaacauaaacacucacgc

SEQ ID NO: 2108394 - RNA, 19 nt, Artificial Sequence
  Description of Artificial Sequence: Synthetic oligonucleotide
  Sense strand starting at position 2254 of SEQ ID NO: 1882275
aguguuuauguugaugagu

SEQ ID NO: 2108395 - RNA, 19 nt, Artificial Sequence
  Description of Artificial Sequence: Synthetic oligonucleotide
  Antisense strand to SEQ ID NO: 2108394
acucaucaacauaaacacu

SEQ ID NO: 2108396 - RNA, 19 nt, Artificial Sequence
  Description of Artificial Sequence: Synthetic oligonucleotide
  Sense strand starting at position 2308 of SEQ ID NO: 1882275
uguagauuugccuaccguu

SEQ ID NO: 2108397 - RNA, 19 nt, Artificial Sequence
  Description of Artificial Sequence: Synthetic oligonucleotide
  Antisense strand to SEQ ID NO: 2108396
aacgguaggcaaaucuaca

SEQ ID NO: 2108398 - RNA, 19 nt, Artificial Sequence
  Description of Artificial Sequence: Synthetic oligonucleotide
  Sense strand starting at position 2382 of SEQ ID NO: 1882275
ggcaaucagcaagguuaaa

SEQ ID NO: 2108399 - RNA, 19 nt, Artificial Sequence
  Description of Artificial Sequence: Synthetic oligonucleotide
  Antisense strand to SEQ ID NO: 2108398
uuuaaccuugcugauugcc

SEQ ID NO: 2108400 - RNA, 19 nt, Artificial Sequence
  Description of Artificial Sequence: Synthetic oligonucleotide
  Sense strand starting at position 2435 of SEQ ID NO: 1882275
gucuuaaauuagguuacau

SEQ ID NO: 2108401 - RNA, 19 nt, Artificial Sequence
  Description of Artificial Sequence: Synthetic oligonucleotide
  Antisense strand to SEQ ID NO: 2108400
auguaaccuaauuuaagac

SEQ ID NO: 2108402 - RNA, 19 nt, Artificial Sequence
  Description of Artificial Sequence: Synthetic oligonucleotide
  Sense strand starting at position 2469 of SEQ ID NO: 1882275
agagguacguuccuaaaug

SEQ ID NO: 2108403 - RNA, 19 nt, Artificial Sequence
  Description of Artificial Sequence: Synthetic oligonucleotide
  Antisense strand to SEQ ID NO: 2108402
cauuuaggaacguaccucu

SEQ ID NO: 2108404 - RNA, 19 nt, Artificial Sequence
  Description of Artificial Sequence: Synthetic oligonucleotide
  Sense strand starting at position 2511 of SEQ ID NO: 1882275
ugcgguuaagcgcugaaau

SEQ ID NO: 2108405 - RNA, 19 nt, Artificial Sequence
  Description of Artificial Sequence: Synthetic oligonucleotide
  Antisense strand to SEQ ID NO: 2108404
auuucagcgcuuaaccgca

SEQ ID NO: 2108406 - RNA, 19 nt, Artificial Sequence
  Description of Artificial Sequence: Synthetic oligonucleotide
  Sense strand starting at position 2606 of SEQ ID NO: 1882275
cuauacaaguucuuaggau

SEQ ID NO: 2108407 - RNA, 19 nt, Artificial Sequence
  Description of Artificial Sequence: Synthetic oligonucleotide
  Antisense strand to SEQ ID NO: 2108406
auccuaagaacuuguauag

SEQ ID NO: 2108408 - RNA, 19 nt, Artificial Sequence
  Description of Artificial Sequence: Synthetic oligonucleotide
  Sense strand starting at position 2801 of SEQ ID NO: 1882275
aauagucucgugcaggaua

SEQ ID NO: 2108409 - RNA, 19 nt, Artificial Sequence
  Description of Artificial Sequence: Synthetic oligonucleotide
  Antisense strand to SEQ ID NO: 2108408
uauccugcacgagacuauu

SEQ ID NO: 2108410 - RNA, 19 nt, Artificial Sequence
  Description of Artificial Sequence: Synthetic oligonucleotide
  Sense strand starting at position 2812 of SEQ ID NO: 1882275
gcaggauaccuagggucuu

SEQ ID NO: 2108411 - RNA, 19 nt, Artificial Sequence
  Description of Artificial Sequence: Synthetic oligonucleotide
  Antisense strand to SEQ ID NO: 2108410
aagacccuagguauccugc

SEQ ID NO: 2108412 - RNA, 19 nt, Artificial Sequence
  Description of Artificial Sequence: Synthetic oligonucleotide
  Sense strand starting at position 3079 of SEQ ID NO: 1882275
agagaaaucguguagaucc

SEQ ID NO: 2108413 - RNA, 19 nt, Artificial Sequence
  Description of Artificial Sequence: Synthetic oligonucleotide
  Antisense strand to SEQ ID NO: 2108412
ggaucuacacgauuucucu

SEQ ID NO: 2108414 - RNA, 19 nt, Artificial Sequence
  Description of Artificial Sequence: Synthetic oligonucleotide
  Sense strand starting at position 3081 of SEQ ID NO: 1882275
agaaaucguguagauccuu

SEQ ID NO: 2108415 - RNA, 19 nt, Artificial Sequence
  Description of Artificial Sequence: Synthetic oligonucleotide
  Antisense strand to SEQ ID NO: 2108414
aaggaucuacacgauuucu

SEQ ID NO: 2108416 - RNA, 19 nt, Artificial Sequence
  Description of Artificial Sequence: Synthetic oligonucleotide
  Sense strand starting at position 3587 of SEQ ID NO: 1882275
aaacuccgguuguuauuua

SEQ ID NO: 2108417 - RNA, 19 nt, Artificial Sequence
  Description of Artificial Sequence: Synthetic oligonucleotide
  Antisense strand to SEQ ID NO: 2108416
uaaauaacaaccggaguuu

SEQ ID NO: 2108418 - RNA, 19 nt, Artificial Sequence
  Description of Artificial Sequence: Synthetic oligonucleotide
  Sense strand starting at position 3591 of SEQ ID NO: 1882275
uccgguuguuauuuaccua

SEQ ID NO: 2108419 - RNA, 19 nt, Artificial Sequence
  Description of Artificial Sequence: Synthetic oligonucleotide
  Antisense strand to SEQ ID NO: 2108418
uagguaaauaacaaccgga

SEQ ID NO: 2108420 - RNA, 19 nt, Artificial Sequence
  Description of Artificial Sequence: Synthetic oligonucleotide
  Sense strand starting at position 3595 of SEQ ID NO: 1882275
guuguuauuuaccuaagca

SEQ ID NO: 2108421 - RNA, 19 nt, Artificial Sequence
  Description of Artificial Sequence: Synthetic oligonucleotide
  Antisense strand to SEQ ID NO: 2108420
ugcuuagguaaauaacaac

SEQ ID NO: 2108422 - RNA, 19 nt, Artificial Sequence
  Description of Artificial Sequence: Synthetic oligonucleotide
  Sense strand starting at position 3705 of SEQ ID NO: 1882275
auggacgguacugguuaua

SEQ ID NO: 2108423 - RNA, 19 nt, Artificial Sequence
  Description of Artificial Sequence: Synthetic oligonucleotide
  Antisense strand to SEQ ID NO: 2108422
uauaaccaguaccguccau

SEQ ID NO: 2108424 - RNA, 19 nt, Artificial Sequence
  Description of Artificial Sequence: Synthetic oligonucleotide
  Sense strand starting at position 3708 of SEQ ID NO: 1882275
gacgguacugguuauaucu

SEQ ID NO: 2108425 - RNA, 19 nt, Artificial Sequence
  Description of Artificial Sequence: Synthetic oligonucleotide
  Antisense strand to SEQ ID NO: 2108424
agauauaaccaguaccguc

SEQ ID NO: 2108426 - RNA, 19 nt, Artificial Sequence
  Description of Artificial Sequence: Synthetic oligonucleotide
  Sense strand starting at position 3920 of SEQ ID NO: 1882275
ccucuaagauaagucagau

SEQ ID NO: 2108427 - RNA, 19 nt, Artificial Sequence
  Description of Artificial Sequence: Synthetic oligonucleotide
  Antisense strand to SEQ ID NO: 2108426
aucugacuuaucuuagagg

SEQ ID NO: 2108428 - RNA, 19 nt, Artificial Sequence
  Description of Artificial Sequence: Synthetic oligonucleotide
  Sense strand starting at position 3939 of SEQ ID NO: 1882275
augauaugaucuucugcua

SEQ ID NO: 2108429 - RNA, 19 nt, Artificial Sequence
  Description of Artificial Sequence: Synthetic oligonucleotide
  Antisense strand to SEQ ID NO: 2108428
uagcagaagaucauaucau

SEQ ID NO: 2108430 - RNA, 19 nt, Artificial Sequence
  Description of Artificial Sequence: Synthetic oligonucleotide
  Sense strand starting at position 2067 of SEQ ID NO: 1882276
guuuccuccucccugagaa

SEQ ID NO: 2108431 - RNA, 19 nt, Artificial Sequence
  Description of Artificial Sequence: Synthetic oligonucleotide
  Antisense strand to SEQ ID NO: 2108430
uucucagggaggaggaaac

SEQ ID NO: 2108432 - RNA, 19 nt, Artificial Sequence
  Description of Artificial Sequence: Synthetic oligonucleotide
  Sense strand starting at position 2082 of SEQ ID NO: 1882276
agaaaucagugaggauuuc

SEQ ID NO: 2108433 - RNA, 19 nt, Artificial Sequence
  Description of Artificial Sequence: Synthetic oligonucleotide
  Antisense strand to SEQ ID NO: 2108432
gaaauccucacugauuucu

SEQ ID NO: 2108434 - RNA, 19 nt, Artificial Sequence
  Description of Artificial Sequence: Synthetic oligonucleotide
  Sense strand starting at position 2166 of SEQ ID NO: 1882276
caacgaguguggguauuaa

SEQ ID NO: 2108435 - RNA, 19 nt, Artificial Sequence
  Description of Artificial Sequence: Synthetic oligonucleotide
  Antisense strand to SEQ ID NO: 2108434
uuaauacccacacucguug

SEQ ID NO: 2108436 - RNA, 19 nt, Artificial Sequence
  Description of Artificial Sequence: Synthetic oligonucleotide
  Sense strand starting at position 2170 of SEQ ID NO: 1882276
gaguguggguauuaaauuu

SEQ ID NO: 2108437 - RNA, 19 nt, Artificial Sequence
  Description of Artificial Sequence: Synthetic oligonucleotide
  Antisense strand to SEQ ID NO: 2108436
aaauuuaauacccacacuc

SEQ ID NO: 2108438 - RNA, 19 nt, Artificial Sequence
  Description of Artificial Sequence: Synthetic oligonucleotide
  Sense strand starting at position 2177 of SEQ ID NO: 1882276
gguauuaaauuugaagcaa

SEQ ID NO: 2108439 - RNA, 19 nt, Artificial Sequence
  Description of Artificial Sequence: Synthetic oligonucleotide
  Antisense strand to SEQ ID NO: 2108438
uugcuucaaauuuaauacc

SEQ ID NO: 2108440 - RNA, 19 nt, Artificial Sequence
  Description of Artificial Sequence: Synthetic oligonucleotide
  Sense strand starting at position 2208 of SEQ ID NO: 1882276
ugucuugcuuuaucaaaga

SEQ ID NO: 2108441 - RNA, 19 nt, Artificial Sequence
  Description of Artificial Sequence: Synthetic oligonucleotide
  Antisense strand to SEQ ID NO: 2108440
ucuuugauaaagcaagaca

SEQ ID NO: 2108442 - RNA, 19 nt, Artificial Sequence
  Description of Artificial Sequence: Synthetic oligonucleotide
  Sense strand starting at position 2243 of SEQ ID NO: 1882276
gugugagagugacugcauu

SEQ ID NO: 2108443 - RNA, 19 nt, Artificial Sequence
  Description of Artificial Sequence: Synthetic oligonucleotide
  Antisense strand to SEQ ID NO: 2108442
aaugcagucacucucacac

SEQ ID NO: 2108444 - RNA, 19 nt, Artificial Sequence
  Description of Artificial Sequence: Synthetic oligonucleotide
  Sense strand starting at position 2330 of SEQ ID NO: 1882276
gguagaaacuugucuccua

SEQ ID NO: 2108445 - RNA, 19 nt, Artificial Sequence
  Description of Artificial Sequence: Synthetic oligonucleotide
  Antisense strand to SEQ ID NO: 2108444
uaggagacaaguuucuacc

SEQ ID NO: 2108446 - RNA, 19 nt, Artificial Sequence
  Description of Artificial Sequence: Synthetic oligonucleotide
  Sense strand starting at position 2331 of SEQ ID NO: 1882276
guagaaacuugucuccuac

SEQ ID NO: 2108447 - RNA, 19 nt, Artificial Sequence
  Description of Artificial Sequence: Synthetic oligonucleotide
  Antisense strand to SEQ ID NO: 2108446
guaggagacaaguuucuac

SEQ ID NO: 2108448 - RNA, 19 nt, Artificial Sequence
  Description of Artificial Sequence: Synthetic oligonucleotide
  Sense strand starting at position 2504 of SEQ ID NO: 1882276
agacauaaauuguccugca

SEQ ID NO: 2108449 - RNA, 19 nt, Artificial Sequence
  Description of Artificial Sequence: Synthetic oligonucleotide
  Antisense strand to SEQ ID NO: 2108448
ugcaggacaauuuaugucu

SEQ ID NO: 2108450 - RNA, 19 nt, Artificial Sequence
  Description of Artificial Sequence: Synthetic oligonucleotide
  Sense strand starting at position 2590 of SEQ ID NO: 1882276
cccauuucguacucacuua

SEQ ID NO: 2108451 - RNA, 19 nt, Artificial Sequence
  Description of Artificial Sequence: Synthetic oligonucleotide
  Antisense strand to SEQ ID NO: 2108450
uaagugaguacgaaauggg

SEQ ID NO: 2108452 - RNA, 19 nt, Artificial Sequence
  Description of Artificial Sequence: Synthetic oligonucleotide
  Sense strand starting at position 2673 of SEQ ID NO: 1882276
gcauauuaagagcacuaau

SEQ ID NO: 2108453 - RNA, 19 nt, Artificial Sequence
  Description of Artificial Sequence: Synthetic oligonucleotide
  Antisense strand to SEQ ID NO: 2108452
auuagugcucuuaauaugc

SEQ ID NO: 2108454 - RNA, 19 nt, Artificial Sequence
  Description of Artificial Sequence: Synthetic oligonucleotide
  Sense strand starting at position 2752 of SEQ ID NO: 1882276
gaauuaggauauuaaguga

SEQ ID NO: 2108455 - RNA, 19 nt, Artificial Sequence
  Description of Artificial Sequence: Synthetic oligonucleotide
  Antisense strand to SEQ ID NO: 2108454
ucacuuaauauccuaauuc

SEQ ID NO: 2108456 - RNA, 19 nt, Artificial Sequence
  Description of Artificial Sequence: Synthetic oligonucleotide
  Sense strand starting at position 2854 of SEQ ID NO: 1882276
cggguuacagaguaaguga

SEQ ID NO: 2108457 - RNA, 19 nt, Artificial Sequence
  Description of Artificial Sequence: Synthetic oligonucleotide
  Antisense strand to SEQ ID NO: 2108456
ucacuuacucuguaacccg

SEQ ID NO: 2108458 - RNA, 19 nt, Artificial Sequence
  Description of Artificial Sequence: Synthetic oligonucleotide
  Sense strand starting at position 2895 of SEQ ID NO: 1882276
ugggaauuauaaccauugu

SEQ ID NO: 2108459 - RNA, 19 nt, Artificial Sequence
  Description of Artificial Sequence: Synthetic oligonucleotide
  Antisense strand to SEQ ID NO: 2108458
acaaugguuauaauuccca

SEQ ID NO: 2108460 - RNA, 19 nt, Artificial Sequence
  Description of Artificial Sequence: Synthetic oligonucleotide
  Sense strand starting at position 2934 of SEQ ID NO: 1882276
gugugcacacuuuauguau

SEQ ID NO: 2108461 - RNA, 19 nt, Artificial Sequence
  Description of Artificial Sequence: Synthetic oligonucleotide
  Antisense strand to SEQ ID NO: 2108460
auacauaaagugugcacac

SEQ ID NO: 2108462 - RNA, 19 nt, Artificial Sequence
  Description of Artificial Sequence: Synthetic oligonucleotide
  Sense strand starting at position 2950 of SEQ ID NO: 1882276
uauaauggacccugacgau

SEQ ID NO: 2108463 - RNA, 19 nt, Artificial Sequence
  Description of Artificial Sequence: Synthetic oligonucleotide
  Antisense strand to SEQ ID NO: 2108462
aucgucaggguccauuaua

SEQ ID NO: 2108464 - RNA, 19 nt, Artificial Sequence
  Description of Artificial Sequence: Synthetic oligonucleotide
  Sense strand starting at position 3145 of SEQ ID NO: 1882276
gccaaugguccugagacua

SEQ ID NO: 2108465 - RNA, 19 nt, Artificial Sequence
  Description of Artificial Sequence: Synthetic oligonucleotide
  Antisense strand to SEQ ID NO: 2108464
uagucucaggaccauuggc

SEQ ID NO: 2108466 - RNA, 19 nt, Artificial Sequence
  Description of Artificial Sequence: Synthetic oligonucleotide
  Sense strand starting at position 3185 of SEQ ID NO: 1882276
accugugugucauuccuga

SEQ ID NO: 2108467 - RNA, 19 nt, Artificial Sequence
  Description of Artificial Sequence: Synthetic oligonucleotide
  Antisense strand to SEQ ID NO: 2108466
ucaggaaugacacacaggu

SEQ ID NO: 2108468 - RNA, 19 nt, Artificial Sequence
  Description of Artificial Sequence: Synthetic oligonucleotide
  Sense strand starting at position 3190 of SEQ ID NO: 1882276
ugugucauuccugaggaca

SEQ ID NO: 2108469 - RNA, 19 nt, Artificial Sequence
  Description of Artificial Sequence: Synthetic oligonucleotide
  Antisense strand to SEQ ID NO: 2108468
uguccucaggaaugacaca

SEQ ID NO: 2108470 - RNA, 19 nt, Artificial Sequence
  Description of Artificial Sequence: Synthetic oligonucleotide
  Sense strand starting at position 3214 of SEQ ID NO: 1882276
guguucuccggugauggaa

SEQ ID NO: 2108471 - RNA, 19 nt, Artificial Sequence
  Description of Artificial Sequence: Synthetic oligonucleotide
  Antisense strand to SEQ ID NO: 2108470
uuccaucaccggagaacac

SEQ ID NO: 2108472 - RNA, 19 nt, Artificial Sequence
  Description of Artificial Sequence: Synthetic oligonucleotide
  Sense strand starting at position 3306 of SEQ ID NO: 1882276
ggaacaaccucagauuaaa

SEQ ID NO: 2108473 - RNA, 19 nt, Artificial Sequence
  Description of Artificial Sequence: Synthetic oligonucleotide
  Antisense strand to SEQ ID NO: 2108472
uuuaaucugagguuguucc

SEQ ID NO: 2108474 - RNA, 19 nt, Artificial Sequence
  Description of Artificial Sequence: Synthetic oligonucleotide
  Sense strand starting at position 3318 of SEQ ID NO: 1882276
gauuaaacacggcgaucau

SEQ ID NO: 2108475 - RNA, 19 nt, Artificial Sequence
  Description of Artificial Sequence: Synthetic oligonucleotide
  Antisense strand to SEQ ID NO: 2108474
augaucgccguguuuaauc

SEQ ID NO: 2108476 - RNA, 19 nt, Artificial Sequence
  Description of Artificial Sequence: Synthetic oligonucleotide
  Sense strand starting at position 3341 of SEQ ID NO: 1882276
auccaucuaucagucaagu

SEQ ID NO: 2108477 - RNA, 19 nt, Artificial Sequence
  Description of Artificial Sequence: Synthetic oligonucleotide
  Antisense strand to SEQ ID NO: 2108476
acuugacugauagauggau

SEQ ID NO: 2108478 - RNA, 19 nt, Artificial Sequence
  Description of Artificial Sequence: Synthetic oligonucleotide
  Sense strand starting at position 3408 of SEQ ID NO: 1882276
gaaccacugucauuaggua

SEQ ID NO: 2108479 - RNA, 19 nt, Artificial Sequence
  Description of Artificial Sequence: Synthetic oligonucleotide
  Antisense strand to SEQ ID NO: 2108478
uaccuaaugacagugguuc

SEQ ID NO: 2108480 - RNA, 19 nt, Artificial Sequence
  Description of Artificial Sequence: Synthetic oligonucleotide
  Sense strand starting at position 3423 of SEQ ID NO: 1882276
gguaaagccugcuuagaua

SEQ ID NO: 2108481 - RNA, 19 nt, Artificial Sequence
  Description of Artificial Sequence: Synthetic oligonucleotide
  Antisense strand to SEQ ID NO: 2108480
uaucuaagcaggcuuuacc

SEQ ID NO: 2108482 - RNA, 19 nt, Artificial Sequence
  Description of Artificial Sequence: Synthetic oligonucleotide
  Sense strand starting at position 3454 of SEQ ID NO: 1882276
ggagacaauccaugcauag

SEQ ID NO: 2108483 - RNA, 19 nt, Artificial Sequence
  Description of Artificial Sequence: Synthetic oligonucleotide
  Antisense strand to SEQ ID NO: 2108482
cuaugcauggauugucucc

SEQ ID NO: 2108484 - RNA, 19 nt, Artificial Sequence
  Description of Artificial Sequence: Synthetic oligonucleotide
  Sense strand starting at position 3544 of SEQ ID NO: 1882276
agaauugucugcucuacaa

SEQ ID NO: 2108485 - RNA, 19 nt, Artificial Sequence
  Description of Artificial Sequence: Synthetic oligonucleotide
  Antisense strand to SEQ ID NO: 2108484
uuguagagcagacaauucu

SEQ ID NO: 2108486 - RNA, 19 nt, Artificial Sequence
  Description of Artificial Sequence: Synthetic oligonucleotide
  Sense strand starting at position 3654 of SEQ ID NO: 1882276
augaacaucugaguaaguu

SEQ ID NO: 2108487 - RNA, 19 nt, Artificial Sequence
  Description of Artificial Sequence: Synthetic oligonucleotide
  Antisense strand to SEQ ID NO: 2108486
aacuuacucagauguucau

SEQ ID NO: 2108488 - RNA, 19 nt, Artificial Sequence
  Description of Artificial Sequence: Synthetic oligonucleotide
  Sense strand starting at position 3667 of SEQ ID NO: 1882276
uaaguuguucugcagagca

SEQ ID NO: 2108489 - RNA, 19 nt, Artificial Sequence
  Description of Artificial Sequence: Synthetic oligonucleotide
  Antisense strand to SEQ ID NO: 2108488
ugcucugcagaacaacuua

SEQ ID NO: 2108490 - RNA, 19 nt, Artificial Sequence
  Description of Artificial Sequence: Synthetic oligonucleotide
  Sense strand starting at position 3669 of SEQ ID NO: 1882276
aguuguucugcagagcaag

SEQ ID NO: 2108491 - RNA, 19 nt, Artificial Sequence
  Description of Artificial Sequence: Synthetic oligonucleotide
  Antisense strand to SEQ ID NO: 2108490
cuugcucugcagaacaacu

SEQ ID NO: 2108492 - RNA, 19 nt, Artificial Sequence
  Description of Artificial Sequence: Synthetic oligonucleotide
  Sense strand starting at position 3734 of SEQ ID NO: 1882276
guuguaaugcuguagggac

SEQ ID NO: 2108493 - RNA, 19 nt, Artificial Sequence
  Description of Artificial Sequence: Synthetic oligonucleotide
  Antisense strand to SEQ ID NO: 2108492
gucccuacagcauuacaac

SEQ ID NO: 2108494 - RNA, 19 nt, Artificial Sequence
  Description of Artificial Sequence: Synthetic oligonucleotide
  Sense strand starting at position 3736 of SEQ ID NO: 1882276
uguaaugcuguagggacau

SEQ ID NO: 2108495 - RNA, 19 nt, Artificial Sequence
  Description of Artificial Sequence: Synthetic oligonucleotide
  Antisense strand to SEQ ID NO: 2108494
augucccuacagcauuaca

SEQ ID NO: 2108496 - RNA, 19 nt, Artificial Sequence
  Description of Artificial Sequence: Synthetic oligonucleotide
  Sense strand starting at position 3769 of SEQ ID NO: 1882276
cuuggaacuuguguuuaau

SEQ ID NO: 2108497 - RNA, 19 nt, Artificial Sequence
  Description of Artificial Sequence: Synthetic oligonucleotide
  Antisense strand to SEQ ID NO: 2108496
auuaaacacaaguuccaag

SEQ ID NO: 2108498 - RNA, 19 nt, Artificial Sequence
  Description of Artificial Sequence: Synthetic oligonucleotide
  Sense strand starting at position 3771 of SEQ ID NO: 1882276
uggaacuuguguuuaauuc

SEQ ID NO: 2108499 - RNA, 19 nt, Artificial Sequence
  Description of Artificial Sequence: Synthetic oligonucleotide
  Antisense strand to SEQ ID NO: 2108498
gaauuaaacacaaguucca

SEQ ID NO: 2108500 - RNA, 19 nt, Artificial Sequence
  Description of Artificial Sequence: Synthetic oligonucleotide
  Sense strand starting at position 3842 of SEQ ID NO: 1882276
guauguguuccagaaugug

SEQ ID NO: 2108501 - RNA, 19 nt, Artificial Sequence
  Description of Artificial Sequence: Synthetic oligonucleotide
  Antisense strand to SEQ ID NO: 2108500
cacauucuggaacacauac

SEQ ID NO: 2108502 - RNA, 19 nt, Artificial Sequence
  Description of Artificial Sequence: Synthetic oligonucleotide
  Sense strand starting at position 3848 of SEQ ID NO: 1882276
guuccagaauguguaguua

SEQ ID NO: 2108503 - RNA, 19 nt, Artificial Sequence
  Description of Artificial Sequence: Synthetic oligonucleotide
  Antisense strand to SEQ ID NO: 2108502
uaacuacacauucuggaac

SEQ ID NO: 2108504 - RNA, 19 nt, Artificial Sequence
  Description of Artificial Sequence: Synthetic oligonucleotide
  Sense strand starting at position 3902 of SEQ ID NO: 1882276
uaacuuuaggcuggucuua

SEQ ID NO: 2108505 - RNA, 19 nt, Artificial Sequence
  Description of Artificial Sequence: Synthetic oligonucleotide
  Antisense strand to SEQ ID NO: 2108504
uaagaccagccuaaaguua

SEQ ID NO: 2108506 - RNA, 19 nt, Artificial Sequence
  Description of Artificial Sequence: Synthetic oligonucleotide
  Sense strand starting at position 3904 of SEQ ID NO: 1882276
acuuuaggcuggucuuaaa

SEQ ID NO: 2108507 - RNA, 19 nt, Artificial Sequence
  Description of Artificial Sequence: Synthetic oligonucleotide
  Antisense strand to SEQ ID NO: 2108506
uuuaagaccagccuaaagu

SEQ ID NO: 2108508 - RNA, 19 nt, Artificial Sequence
  Description of Artificial Sequence: Synthetic oligonucleotide
  Sense strand starting at position 3981 of SEQ ID NO: 1882276
ucaagugugucuccugauu

SEQ ID NO: 2108509 - RNA, 19 nt, Artificial Sequence
  Description of Artificial Sequence: Synthetic oligonucleotide
  Antisense strand to SEQ ID NO: 2108508
aaucaggagacacacuuga

SEQ ID NO: 2108510 - RNA, 19 nt, Artificial Sequence
  Description of Artificial Sequence: Synthetic oligonucleotide
  Sense strand starting at position 380 of SEQ ID NO: 1882277
ccaucaaagguuugaauac

SEQ ID NO: 2108511 - RNA, 19 nt, Artificial Sequence
  Description of Artificial Sequence: Synthetic oligonucleotide
  Antisense strand to SEQ ID NO: 2108510
guauucaaaccuuugaugg

SEQ ID NO: 2108512 - RNA, 19 nt, Artificial Sequence
  Description of Artificial Sequence: Synthetic oligonucleotide
  Sense strand starting at position 415 of SEQ ID NO: 1882277
ugcauuccuccaggacaca

SEQ ID NO: 2108513 - RNA, 19 nt, Artificial Sequence
  Description of Artificial Sequence: Synthetic oligonucleotide
  Antisense strand to SEQ ID NO: 2108512
uguguccuggaggaaugca

SEQ ID NO: 2108514 - RNA, 19 nt, Artificial Sequence
  Description of Artificial Sequence: Synthetic oligonucleotide
  Sense strand starting at position 448 of SEQ ID NO: 1882277
gugucugucaaagacaaug

SEQ ID NO: 2108515 - RNA, 19 nt, Artificial Sequence
  Description of Artificial Sequence: Synthetic oligonucleotide
  Antisense strand to SEQ ID NO: 2108514
cauugucuuugacagacac

SEQ ID NO: 2108516 - RNA, 19 nt, Artificial Sequence
  Description of Artificial Sequence: Synthetic oligonucleotide
  Sense strand starting at position 487 of SEQ ID NO: 1882277
cuugacucuccuugaaggu

SEQ ID NO: 2108517 - RNA, 19 nt, Artificial Sequence
  Description of Artificial Sequence: Synthetic oligonucleotide
  Antisense strand to SEQ ID NO: 2108516
accuucaaggagagucaag

SEQ ID NO: 2108518 - RNA, 19 nt, Artificial Sequence
  Description of Artificial Sequence: Synthetic oligonucleotide
  Sense strand starting at position 531 of SEQ ID NO: 1882277
caggaugaaauguguucga

SEQ ID NO: 2108519 - RNA, 19 nt, Artificial Sequence
  Description of Artificial Sequence: Synthetic oligonucleotide
  Antisense strand to SEQ ID NO: 2108518
ucgaacacauuucauccug

SEQ ID NO: 2108520 - RNA, 19 nt, Artificial Sequence
  Description of Artificial Sequence: Synthetic oligonucleotide
  Sense strand starting at position 534 of SEQ ID NO: 1882277
gaugaaauguguucgauga

SEQ ID NO: 2108521 - RNA, 19 nt, Artificial Sequence
  Description of Artificial Sequence: Synthetic oligonucleotide
  Antisense strand to SEQ ID NO: 2108520
ucaucgaacacauuucauc

SEQ ID NO: 2108522 - RNA, 19 nt, Artificial Sequence
  Description of Artificial Sequence: Synthetic oligonucleotide
  Sense strand starting at position 535 of SEQ ID NO: 1882277
augaaauguguucgaugag

SEQ ID NO: 2108523 - RNA, 19 nt, Artificial Sequence
  Description of Artificial Sequence: Synthetic oligonucleotide
  Antisense strand to SEQ ID NO: 2108522
cucaucgaacacauuucau

SEQ ID NO: 2108524 - RNA, 19 nt, Artificial Sequence
  Description of Artificial Sequence: Synthetic oligonucleotide
  Sense strand starting at position 538 of SEQ ID NO: 1882277
aaauguguucgaugaggac

SEQ ID NO: 2108525 - RNA, 19 nt, Artificial Sequence
  Description of Artificial Sequence: Synthetic oligonucleotide
  Antisense strand to SEQ ID NO: 2108524
guccucaucgaacacauuu

SEQ ID NO: 2108526 - RNA, 19 nt, Artificial Sequence
  Description of Artificial Sequence: Synthetic oligonucleotide
  Sense strand starting at position 597 of SEQ ID NO: 1882277
gccgcuucugccguagaga

SEQ ID NO: 2108527 - RNA, 19 nt, Artificial Sequence
  Description of Artificial Sequence: Synthetic oligonucleotide
  Antisense strand to SEQ ID NO: 2108526
ucucuacggcagaagcggc

SEQ ID NO: 2108528 - RNA, 19 nt, Artificial Sequence
  Description of Artificial Sequence: Synthetic oligonucleotide
  Sense strand starting at position 663 of SEQ ID NO: 1882277
ucccauuccguugauacuu

SEQ ID NO: 2108529 - RNA, 19 nt, Artificial Sequence
  Description of Artificial Sequence: Synthetic oligonucleotide
  Antisense strand to SEQ ID NO: 2108528
aaguaucaacggaauggga

SEQ ID NO: 2108530 - RNA, 19 nt, Artificial Sequence
  Description of Artificial Sequence: Synthetic oligonucleotide
  Sense strand starting at position 777 of SEQ ID NO: 1882277
gccugucuccuuuaagaug

SEQ ID NO: 2108531 - RNA, 19 nt, Artificial Sequence
  Description of Artificial Sequence: Synthetic oligonucleotide
  Antisense strand to SEQ ID NO: 2108530
caucuuaaaggagacaggc

SEQ ID NO: 2108532 - RNA, 19 nt, Artificial Sequence
  Description of Artificial Sequence: Synthetic oligonucleotide
  Sense strand starting at position 1107 of SEQ ID NO: 1882277
cuggcucuugauugggauu

SEQ ID NO: 2108533 - RNA, 19 nt, Artificial Sequence
  Description of Artificial Sequence: Synthetic oligonucleotide
  Antisense strand to SEQ ID NO: 2108532
aaucccaaucaagagccag

SEQ ID NO: 2108534 - RNA, 19 nt, Artificial Sequence
  Description of Artificial Sequence: Synthetic oligonucleotide
  Sense strand starting at position 1340 of SEQ ID NO: 1882277
cucagaucacugugaggca

SEQ ID NO: 2108535 - RNA, 19 nt, Artificial Sequence
  Description of Artificial Sequence: Synthetic oligonucleotide
  Antisense strand to SEQ ID NO: 2108534
ugccucacagugaucugag

SEQ ID NO: 2108536 - RNA, 19 nt, Artificial Sequence
  Description of Artificial Sequence: Synthetic oligonucleotide
  Sense strand starting at position 2095 of SEQ ID NO: 1882277
cagaaagacuucuuugguu

SEQ ID NO: 2108537 - RNA, 19 nt, Artificial Sequence
  Description of Artificial Sequence: Synthetic oligonucleotide
  Antisense strand to SEQ ID NO: 2108536
aaccaaagaagucuuucug

SEQ ID NO: 2108538 - RNA, 19 nt, Artificial Sequence
  Description of Artificial Sequence: Synthetic oligonucleotide
  Sense strand starting at position 2097 of SEQ ID NO: 1882277
gaaagacuucuuugguugu

SEQ ID NO: 2108539 - RNA, 19 nt, Artificial Sequence
  Description of Artificial Sequence: Synthetic oligonucleotide
  Antisense strand to SEQ ID NO: 2108538
acaaccaaagaagucuuuc

SEQ ID NO: 2108540 - RNA, 19 nt, Artificial Sequence
  Description of Artificial Sequence: Synthetic oligonucleotide
  Sense strand starting at position 2280 of SEQ ID NO: 1882277
uuucuuucucaagacggaa

SEQ ID NO: 2108541 - RNA, 19 nt, Artificial Sequence
  Description of Artificial Sequence: Synthetic oligonucleotide
  Antisense strand to SEQ ID NO: 2108540
uuccgucuugagaaagaaa

SEQ ID NO: 2108542 - RNA, 19 nt, Artificial Sequence
  Description of Artificial Sequence: Synthetic oligonucleotide
  Sense strand starting at position 2419 of SEQ ID NO: 1882277
augcucaagugauuucguu

SEQ ID NO: 2108543 - RNA, 19 nt, Artificial Sequence
  Description of Artificial Sequence: Synthetic oligonucleotide
  Antisense strand to SEQ ID NO: 2108542
aacgaaaucacuugagcau

SEQ ID NO: 2108544 - RNA, 19 nt, Artificial Sequence
  Description of Artificial Sequence: Synthetic oligonucleotide
  Sense strand starting at position 2425 of SEQ ID NO: 1882277
aagugauuucguuggcccu

SEQ ID NO: 2108545 - RNA, 19 nt, Artificial Sequence
  Description of Artificial Sequence: Synthetic oligonucleotide
  Antisense strand to SEQ ID NO: 2108544
agggccaacgaaaucacuu

SEQ ID NO: 2108546 - RNA, 19 nt, Artificial Sequence
  Description of Artificial Sequence: Synthetic oligonucleotide
  Sense strand starting at position 2426 of SEQ ID NO: 1882277
agugauuucguuggcccuu

SEQ ID NO: 2108547 - RNA, 19 nt, Artificial Sequence
  Description of Artificial Sequence: Synthetic oligonucleotide
  Antisense strand to SEQ ID NO: 2108546
aagggccaacgaaaucacu

SEQ ID NO: 2108548 - RNA, 19 nt, Artificial Sequence
  Description of Artificial Sequence: Synthetic oligonucleotide
  Sense strand starting at position 2427 of SEQ ID NO: 1882277
gugauuucguuggcccuua

SEQ ID NO: 2108549 - RNA, 19 nt, Artificial Sequence
  Description of Artificial Sequence: Synthetic oligonucleotide
  Antisense strand to SEQ ID NO: 2108548
uaagggccaacgaaaucac

SEQ ID NO: 2108550 - RNA, 19 nt, Artificial Sequence
  Description of Artificial Sequence: Synthetic oligonucleotide
  Sense strand starting at position 2428 of SEQ ID NO: 1882277
ugauuucguuggcccuuaa

SEQ ID NO: 2108551 - RNA, 19 nt, Artificial Sequence
  Description of Artificial Sequence: Synthetic oligonucleotide
  Antisense strand to SEQ ID NO: 2108550
uuaagggccaacgaaauca

SEQ ID NO: 2108552 - RNA, 19 nt, Artificial Sequence
  Description of Artificial Sequence: Synthetic oligonucleotide
  Sense strand starting at position 2447 of SEQ ID NO: 1882277
aggaaaguguuauuccauc

SEQ ID NO: 2108553 - RNA, 19 nt, Artificial Sequence
  Description of Artificial Sequence: Synthetic oligonucleotide
  Antisense strand to SEQ ID NO: 2108552
gauggaauaacacuuuccu

SEQ ID NO: 2108554 - RNA, 19 nt, Artificial Sequence
  Description of Artificial Sequence: Synthetic oligonucleotide
  Sense strand starting at position 2808 of SEQ ID NO: 1882277
gguuccucucuggaagcaa

SEQ ID NO: 2108555 - RNA, 19 nt, Artificial Sequence
  Description of Artificial Sequence: Synthetic oligonucleotide
  Antisense strand to SEQ ID NO: 2108554
uugcuuccagagaggaacc

SEQ ID NO: 2108556 - RNA, 19 nt, Artificial Sequence
  Description of Artificial Sequence: Synthetic oligonucleotide
  Sense strand starting at position 2880 of SEQ ID NO: 1882277
agaugcugugaagagucau

SEQ ID NO: 2108557 - RNA, 19 nt, Artificial Sequence
  Description of Artificial Sequence: Synthetic oligonucleotide
  Antisense strand to SEQ ID NO: 2108556
augacucuucacagcaucu

SEQ ID NO: 2108558 - RNA, 19 nt, Artificial Sequence
  Description of Artificial Sequence: Synthetic oligonucleotide
  Sense strand starting at position 3045 of SEQ ID NO: 1882277
agcccugacugaucacagu

SEQ ID NO: 2108559 - RNA, 19 nt, Artificial Sequence
  Description of Artificial Sequence: Synthetic oligonucleotide
  Antisense strand to SEQ ID NO: 2108558
acugugaucagucagggcu

SEQ ID NO: 2108560 - RNA, 19 nt, Artificial Sequence
  Description of Artificial Sequence: Synthetic oligonucleotide
  Sense strand starting at position 3136 of SEQ ID NO: 1882277
gagagaccuuucuuguuuc

SEQ ID NO: 2108561 - RNA, 19 nt, Artificial Sequence
  Description of Artificial Sequence: Synthetic oligonucleotide
  Antisense strand to SEQ ID NO: 2108560
gaaacaagaaaggucucuc

SEQ ID NO: 2108562 - RNA, 19 nt, Artificial Sequence
  Description of Artificial Sequence: Synthetic oligonucleotide
  Sense strand starting at position 3140 of SEQ ID NO: 1882277
gaccuuucuuguuucugga

SEQ ID NO: 2108563 - RNA, 19 nt, Artificial Sequence
  Description of Artificial Sequence: Synthetic oligonucleotide
  Antisense strand to SEQ ID NO: 2108562
uccagaaacaagaaagguc

SEQ ID NO: 2108564 - RNA, 19 nt, Artificial Sequence
  Description of Artificial Sequence: Synthetic oligonucleotide
  Sense strand starting at position 3161 of SEQ ID NO: 1882277
uggagcugugaugaaguaa

SEQ ID NO: 2108565 - RNA, 19 nt, Artificial Sequence
  Description of Artificial Sequence: Synthetic oligonucleotide
  Antisense strand to SEQ ID NO: 2108564
uuacuucaucacagcucca

SEQ ID NO: 2108566 - RNA, 19 nt, Artificial Sequence
  Description of Artificial Sequence: Synthetic oligonucleotide
  Sense strand starting at position 3260 of SEQ ID NO: 1882277
agagacaacuuccuaguga

SEQ ID NO: 2108567 - RNA, 19 nt, Artificial Sequence
  Description of Artificial Sequence: Synthetic oligonucleotide
  Antisense strand to SEQ ID NO: 2108566
ucacuaggaaguugucucu

SEQ ID NO: 2108568 - RNA, 19 nt, Artificial Sequence
  Description of Artificial Sequence: Synthetic oligonucleotide
  Sense strand starting at position 3340 of SEQ ID NO: 1882277
aguuaugugaggcaagaug

SEQ ID NO: 2108569 - RNA, 19 nt, Artificial Sequence
  Description of Artificial Sequence: Synthetic oligonucleotide
  Antisense strand to SEQ ID NO: 2108568
caucuugccucacauaacu

SEQ ID NO: 2108570 - RNA, 19 nt, Artificial Sequence
  Description of Artificial Sequence: Synthetic oligonucleotide
  Sense strand starting at position 3429 of SEQ ID NO: 1882277
caagcauggugacuaucua

SEQ ID NO: 2108571 - RNA, 19 nt, Artificial Sequence
  Description of Artificial Sequence: Synthetic oligonucleotide
  Antisense strand to SEQ ID NO: 2108570
uagauagucaccaugcuug

SEQ ID NO: 2108572 - RNA, 19 nt, Artificial Sequence
  Description of Artificial Sequence: Synthetic oligonucleotide
  Sense strand starting at position 3451 of SEQ ID NO: 1882277
gggaauaugcaguacucca

SEQ ID NO: 2108573 - RNA, 19 nt, Artificial Sequence
  Description of Artificial Sequence: Synthetic oligonucleotide
  Antisense strand to SEQ ID NO: 2108572
uggaguacugcauauuccc

SEQ ID NO: 2108574 - RNA, 19 nt, Artificial Sequence
  Description of Artificial Sequence: Synthetic oligonucleotide
  Sense strand starting at position 3456 of SEQ ID NO: 1882277
uaugcaguacuccagugaa

SEQ ID NO: 2108575 - RNA, 19 nt, Artificial Sequence
  Description of Artificial Sequence: Synthetic oligonucleotide
  Antisense strand to SEQ ID NO: 2108574
uucacuggaguacugcaua

SEQ ID NO: 2108576 - RNA, 19 nt, Artificial Sequence
  Description of Artificial Sequence: Synthetic oligonucleotide
  Sense strand starting at position 3563 of SEQ ID NO: 1882277
agcauaucuccucaugaag

SEQ ID NO: 2108577 - RNA, 19 nt, Artificial Sequence
  Description of Artificial Sequence: Synthetic oligonucleotide
  Antisense strand to SEQ ID NO: 2108576
cuucaugaggagauaugcu

SEQ ID NO: 2108578 - RNA, 19 nt, Artificial Sequence
  Description of Artificial Sequence: Synthetic oligonucleotide
  Sense strand starting at position 3583 of SEQ ID NO: 1882277
agguuaaguguauacacaa

SEQ ID NO: 2108579 - RNA, 19 nt, Artificial Sequence
  Description of Artificial Sequence: Synthetic oligonucleotide
  Antisense strand to SEQ ID NO: 2108578
uuguguauacacuuaaccu

SEQ ID NO: 2108580 - RNA, 19 nt, Artificial Sequence
  Description of Artificial Sequence: Synthetic oligonucleotide
  Sense strand starting at position 3623 of SEQ ID NO: 1882277
gaaagaaucugcccuugug

SEQ ID NO: 2108581 - RNA, 19 nt, Artificial Sequence
  Description of Artificial Sequence: Synthetic oligonucleotide
  Antisense strand to SEQ ID NO: 2108580
cacaagggcagauucuuuc

SEQ ID NO: 2108582 - RNA, 19 nt, Artificial Sequence
  Description of Artificial Sequence: Synthetic oligonucleotide
  Sense strand starting at position 3767 of SEQ ID NO: 1882277
aagggagucuagcuuccau

SEQ ID NO: 2108583 - RNA, 19 nt, Artificial Sequence
  Description of Artificial Sequence: Synthetic oligonucleotide
  Antisense strand to SEQ ID NO: 2108582
auggaagcuagacucccuu

SEQ ID NO: 2108584 - RNA, 19 nt, Artificial Sequence
  Description of Artificial Sequence: Synthetic oligonucleotide
  Sense strand starting at position 3859 of SEQ ID NO: 1882277
ccaggaggagcuugaaauc

SEQ ID NO: 2108585 - RNA, 19 nt, Artificial Sequence
  Description of Artificial Sequence: Synthetic oligonucleotide
  Antisense strand to SEQ ID NO: 2108584
gauuucaagcuccuccugg

SEQ ID NO: 2108586 - RNA, 19 nt, Artificial Sequence
  Description of Artificial Sequence: Synthetic oligonucleotide
  Sense strand starting at position 3870 of SEQ ID NO: 1882277
uugaaauccugucugggau

SEQ ID NO: 2108587 - RNA, 19 nt, Artificial Sequence
  Description of Artificial Sequence: Synthetic oligonucleotide
  Antisense strand to SEQ ID NO: 2108586
aucccagacaggauuucaa

SEQ ID NO: 2108588 - RNA, 19 nt, Artificial Sequence
  Description of Artificial Sequence: Synthetic oligonucleotide
  Sense strand starting at position 3871 of SEQ ID NO: 1882277
ugaaauccugucugggauc

SEQ ID NO: 2108589 - RNA, 19 nt, Artificial Sequence
  Description of Artificial Sequence: Synthetic oligonucleotide
  Antisense strand to SEQ ID NO: 2108588
gaucccagacaggauuuca

SEQ ID NO: 2108590 - RNA, 19 nt, Artificial Sequence
  Description of Artificial Sequence: Synthetic oligonucleotide
  Sense strand starting at position 57 of SEQ ID NO: 1882278
uuaugaucauugcucuaga

SEQ ID NO: 2108591 - RNA, 19 nt, Artificial Sequence
  Description of Artificial Sequence: Synthetic oligonucleotide
  Antisense strand to SEQ ID NO: 2108590
ucuagagcaaugaucauaa

SEQ ID NO: 2108592 - RNA, 19 nt, Artificial Sequence
  Description of Artificial Sequence: Synthetic oligonucleotide
  Sense strand starting at position 60 of SEQ ID NO: 1882278
ugaucauugcucuagacuu

SEQ ID NO: 2108593 - RNA, 19 nt, Artificial Sequence
  Description of Artificial Sequence: Synthetic oligonucleotide
  Antisense strand to SEQ ID NO: 2108592
aagucuagagcaaugauca

SEQ ID NO: 2108594 - RNA, 19 nt, Artificial Sequence
  Description of Artificial Sequence: Synthetic oligonucleotide
  Sense strand starting at position 68 of SEQ ID NO: 1882278
gcucuagacuuacuggauu

SEQ ID NO: 2108595 - RNA, 19 nt, Artificial Sequence
  Description of Artificial Sequence: Synthetic oligonucleotide
  Antisense strand to SEQ ID NO: 2108594
aauccaguaagucuagagc

SEQ ID NO: 2108596 - RNA, 19 nt, Artificial Sequence
  Description of Artificial Sequence: Synthetic oligonucleotide
  Sense strand starting at position 346 of SEQ ID NO: 1882278
cccaguugugaggaugaau

SEQ ID NO: 2108597 - RNA, 19 nt, Artificial Sequence
  Description of Artificial Sequence: Synthetic oligonucleotide
  Antisense strand to SEQ ID NO: 2108596
auucauccucacaacuggg

SEQ ID NO: 2108598 - RNA, 19 nt, Artificial Sequence
  Description of Artificial Sequence: Synthetic oligonucleotide
  Sense strand starting at position 772 of SEQ ID NO: 1882278
agaccauauuguucuacau

SEQ ID NO: 2108599 - RNA, 19 nt, Artificial Sequence
  Description of Artificial Sequence: Synthetic oligonucleotide
  Antisense strand to SEQ ID NO: 2108598
auguagaacaauauggucu

SEQ ID NO: 2108600 - RNA, 19 nt, Artificial Sequence
  Description of Artificial Sequence: Synthetic oligonucleotide
  Sense strand starting at position 782 of SEQ ID NO: 1882278
guucuacaucuguauguaa

SEQ ID NO: 2108601 - RNA, 19 nt, Artificial Sequence
  Description of Artificial Sequence: Synthetic oligonucleotide
  Antisense strand to SEQ ID NO: 2108600
uuacauacagauguagaac

SEQ ID NO: 2108602 - RNA, 19 nt, Artificial Sequence
  Description of Artificial Sequence: Synthetic oligonucleotide
  Sense strand starting at position 784 of SEQ ID NO: 1882278
ucuacaucuguauguaaga

SEQ ID NO: 2108603 - RNA, 19 nt, Artificial Sequence
  Description of Artificial Sequence: Synthetic oligonucleotide
  Antisense strand to SEQ ID NO: 2108602
ucuuacauacagauguaga

SEQ ID NO: 2108604 - RNA, 19 nt, Artificial Sequence
  Description of Artificial Sequence: Synthetic oligonucleotide
  Sense strand starting at position 795 of SEQ ID NO: 1882278
auguaagagcucugaugua

SEQ ID NO: 2108605 - RNA, 19 nt, Artificial Sequence
  Description of Artificial Sequence: Synthetic oligonucleotide
  Antisense strand to SEQ ID NO: 2108604
uacaucagagcucuuacau

SEQ ID NO: 2108606 - RNA, 19 nt, Artificial Sequence
  Description of Artificial Sequence: Synthetic oligonucleotide
  Sense strand starting at position 822 of SEQ ID NO: 1882278
uuguaagcuguccagcaaa

SEQ ID NO: 2108607 - RNA, 19 nt, Artificial Sequence
  Description of Artificial Sequence: Synthetic oligonucleotide
  Antisense strand to SEQ ID NO: 2108606
uuugcuggacagcuuacaa

SEQ ID NO: 2108608 - RNA, 19 nt, Artificial Sequence
  Description of Artificial Sequence: Synthetic oligonucleotide
  Sense strand starting at position 984 of SEQ ID NO: 1882278
gaacaaguugguugaucuu

SEQ ID NO: 2108609 - RNA, 19 nt, Artificial Sequence
  Description of Artificial Sequence: Synthetic oligonucleotide
  Antisense strand to SEQ ID NO: 2108608
aagaucaaccaacuuguuc

SEQ ID NO: 2108610 - RNA, 19 nt, Artificial Sequence
  Description of Artificial Sequence: Synthetic oligonucleotide
  Sense strand starting at position 991 of SEQ ID NO: 1882278
uugguugaucuuuagcaag

SEQ ID NO: 2108611 - RNA, 19 nt, Artificial Sequence
  Description of Artificial Sequence: Synthetic oligonucleotide
  Antisense strand to SEQ ID NO: 2108610
cuugcuaaagaucaaccaa

SEQ ID NO: 2108612 - RNA, 19 nt, Artificial Sequence
  Description of Artificial Sequence: Synthetic oligonucleotide
  Sense strand starting at position 1009 of SEQ ID NO: 1882278
gugaauacauuguucccua

SEQ ID NO: 2108613 - RNA, 19 nt, Artificial Sequence
  Description of Artificial Sequence: Synthetic oligonucleotide
  Antisense strand to SEQ ID NO: 2108612
uagggaacaauguauucac

SEQ ID NO: 2108614 - RNA, 19 nt, Artificial Sequence
  Description of Artificial Sequence: Synthetic oligonucleotide
  Sense strand starting at position 1043 of SEQ ID NO: 1882278
acagguuagcucuguggga

SEQ ID NO: 2108615 - RNA, 19 nt, Artificial Sequence
  Description of Artificial Sequence: Synthetic oligonucleotide
  Antisense strand to SEQ ID NO: 2108614
ucccacagagcuaaccugu

SEQ ID NO: 2108616 - RNA, 19 nt, Artificial Sequence
  Description of Artificial Sequence: Synthetic oligonucleotide
  Sense strand starting at position 1088 of SEQ ID NO: 1882278
gagacuacaugguuucuga

SEQ ID NO: 2108617 - RNA, 19 nt, Artificial Sequence
  Description of Artificial Sequence: Synthetic oligonucleotide
  Antisense strand to SEQ ID NO: 2108616
ucagaaaccauguagucuc

SEQ ID NO: 2108618 - RNA, 19 nt, Artificial Sequence
  Description of Artificial Sequence: Synthetic oligonucleotide
  Sense strand starting at position 1091 of SEQ ID NO: 1882278
acuacaugguuucugagaa

SEQ ID NO: 2108619 - RNA, 19 nt, Artificial Sequence
  Description of Artificial Sequence: Synthetic oligonucleotide
  Antisense strand to SEQ ID NO: 2108618
uucucagaaaccauguagu

SEQ ID NO: 2108620 - RNA, 19 nt, Artificial Sequence
  Description of Artificial Sequence: Synthetic oligonucleotide
  Sense strand starting at position 1128 of SEQ ID NO: 1882278
acugaaacaggucgaauau

SEQ ID NO: 2108621 - RNA, 19 nt, Artificial Sequence
  Description of Artificial Sequence: Synthetic oligonucleotide
  Antisense strand to SEQ ID NO: 2108620
auauucgaccuguuucagu

SEQ ID NO: 2108622 - RNA, 19 nt, Artificial Sequence
  Description of Artificial Sequence: Synthetic oligonucleotide
  Sense strand starting at position 1256 of SEQ ID NO: 1882278
gguggagcauaagugaauu

SEQ ID NO: 2108623 - RNA, 19 nt, Artificial Sequence
  Description of Artificial Sequence: Synthetic oligonucleotide
  Antisense strand to SEQ ID NO: 2108622
aauucacuuaugcuccacc

SEQ ID NO: 2108624 - RNA, 19 nt, Artificial Sequence
  Description of Artificial Sequence: Synthetic oligonucleotide
  Sense strand starting at position 1317 of SEQ ID NO: 1882278
cuuugcauucuauaaaggu

SEQ ID NO: 2108625 - RNA, 19 nt, Artificial Sequence
  Description of Artificial Sequence: Synthetic oligonucleotide
  Antisense strand to SEQ ID NO: 2108624
accuuuauagaaugcaaag

SEQ ID NO: 2108626 - RNA, 19 nt, Artificial Sequence
  Description of Artificial Sequence: Synthetic oligonucleotide
  Sense strand starting at position 1523 of SEQ ID NO: 1882278
ucgauuccauaaucaaaga

SEQ ID NO: 2108627 - RNA, 19 nt, Artificial Sequence
  Description of Artificial Sequence: Synthetic oligonucleotide
  Antisense strand to SEQ ID NO: 2108626
ucuuugauuauggaaucga

SEQ ID NO: 2108628 - RNA, 19 nt, Artificial Sequence
  Description of Artificial Sequence: Synthetic oligonucleotide
  Sense strand starting at position 1609 of SEQ ID NO: 1882278
ucaagaguuccagauuguu

SEQ ID NO: 2108629 - RNA, 19 nt, Artificial Sequence
  Description of Artificial Sequence: Synthetic oligonucleotide
  Antisense strand to SEQ ID NO: 2108628
aacaaucuggaacucuuga

SEQ ID NO: 2108630 - RNA, 19 nt, Artificial Sequence
  Description of Artificial Sequence: Synthetic oligonucleotide
  Sense strand starting at position 2188 of SEQ ID NO: 1882278
ucaugacuguucuuaugug

SEQ ID NO: 2108631 - RNA, 19 nt, Artificial Sequence
  Description of Artificial Sequence: Synthetic oligonucleotide
  Antisense strand to SEQ ID NO: 2108630
cacauaagaacagucauga

SEQ ID NO: 2108632 - RNA, 19 nt, Artificial Sequence
  Description of Artificial Sequence: Synthetic oligonucleotide
  Sense strand starting at position 2195 of SEQ ID NO: 1882278
uguucuuaugugcuguuua

SEQ ID NO: 2108633 - RNA, 19 nt, Artificial Sequence
  Description of Artificial Sequence: Synthetic oligonucleotide
  Antisense strand to SEQ ID NO: 2108632
uaaacagcacauaagaaca

SEQ ID NO: 2108634 - RNA, 19 nt, Artificial Sequence
  Description of Artificial Sequence: Synthetic oligonucleotide
  Sense strand starting at position 2291 of SEQ ID NO: 1882278
ugaagucuucccugauauu

SEQ ID NO: 2108635 - RNA, 19 nt, Artificial Sequence
  Description of Artificial Sequence: Synthetic oligonucleotide
  Antisense strand to SEQ ID NO: 2108634
aauaucagggaagacuuca

SEQ ID NO: 2108636 - RNA, 19 nt, Artificial Sequence
  Description of Artificial Sequence: Synthetic oligonucleotide
  Sense strand starting at position 2443 of SEQ ID NO: 1882278
gcagaaugaugucucacuc

SEQ ID NO: 2108637 - RNA, 19 nt, Artificial Sequence
  Description of Artificial Sequence: Synthetic oligonucleotide
  Antisense strand to SEQ ID NO: 2108636
gagugagacaucauucugc

SEQ ID NO: 2108638 - RNA, 19 nt, Artificial Sequence
  Description of Artificial Sequence: Synthetic oligonucleotide
  Sense strand starting at position 2514 of SEQ ID NO: 1882278
ucaauaaaugucuguugac

SEQ ID NO: 2108639 - RNA, 19 nt, Artificial Sequence
  Description of Artificial Sequence: Synthetic oligonucleotide
  Antisense strand to SEQ ID NO: 2108638
gucaacagacauuuauuga

SEQ ID NO: 2108640 - RNA, 19 nt, Artificial Sequence
  Description of Artificial Sequence: Synthetic oligonucleotide
  Sense strand starting at position 2523 of SEQ ID NO: 1882278
gucuguugacuugaagucu

SEQ ID NO: 2108641 - RNA, 19 nt, Artificial Sequence
  Description of Artificial Sequence: Synthetic oligonucleotide
  Antisense strand to SEQ ID NO: 2108640
agacuucaagucaacagac

SEQ ID NO: 2108642 - RNA, 19 nt, Artificial Sequence
  Description of Artificial Sequence: Synthetic oligonucleotide
  Sense strand starting at position 2572 of SEQ ID NO: 1882278
uuggguugucaccaugacu

SEQ ID NO: 2108643 - RNA, 19 nt, Artificial Sequence
  Description of Artificial Sequence: Synthetic oligonucleotide
  Antisense strand to SEQ ID NO: 2108642
agucauggugacaacccaa

SEQ ID NO: 2108644 - RNA, 19 nt, Artificial Sequence
  Description of Artificial Sequence: Synthetic oligonucleotide
  Sense strand starting at position 2575 of SEQ ID NO: 1882278
gguugucaccaugacugua

SEQ ID NO: 2108645 - RNA, 19 nt, Artificial Sequence
  Description of Artificial Sequence: Synthetic oligonucleotide
  Antisense strand to SEQ ID NO: 2108644
uacagucauggugacaacc

SEQ ID NO: 2108646 - RNA, 19 nt, Artificial Sequence
  Description of Artificial Sequence: Synthetic oligonucleotide
  Sense strand starting at position 2689 of SEQ ID NO: 1882278
aagcacuuuggugauacau

SEQ ID NO: 2108647 - RNA, 19 nt, Artificial Sequence
  Description of Artificial Sequence: Synthetic oligonucleotide
  Antisense strand to SEQ ID NO: 2108646
auguaucaccaaagugcuu

SEQ ID NO: 2108648 - RNA, 19 nt, Artificial Sequence
  Description of Artificial Sequence: Synthetic oligonucleotide
  Sense strand starting at position 2715 of SEQ ID NO: 1882278
cagguuaaauguuuggcau

SEQ ID NO: 2108649 - RNA, 19 nt, Artificial Sequence
  Description of Artificial Sequence: Synthetic oligonucleotide
  Antisense strand to SEQ ID NO: 2108648
augccaaacauuuaaccug

SEQ ID NO: 2108650 - RNA, 19 nt, Artificial Sequence
  Description of Artificial Sequence: Synthetic oligonucleotide
  Sense strand starting at position 2956 of SEQ ID NO: 1882278
agccaucagguauauguau

SEQ ID NO: 2108651 - RNA, 19 nt, Artificial Sequence
  Description of Artificial Sequence: Synthetic oligonucleotide
  Antisense strand to SEQ ID NO: 2108650
auacauauaccugauggcu

SEQ ID NO: 2108652 - RNA, 19 nt, Artificial Sequence
  Description of Artificial Sequence: Synthetic oligonucleotide
  Sense strand starting at position 2962 of SEQ ID NO: 1882278
cagguauauguauaguacu

SEQ ID NO: 2108653 - RNA, 19 nt, Artificial Sequence
  Description of Artificial Sequence: Synthetic oligonucleotide
  Antisense strand to SEQ ID NO: 2108652
aguacuauacauauaccug

SEQ ID NO: 2108654 - RNA, 19 nt, Artificial Sequence
  Description of Artificial Sequence: Synthetic oligonucleotide
  Sense strand starting at position 3114 of SEQ ID NO: 1882278
ugcuauaagcuauaguuua

SEQ ID NO: 2108655 - RNA, 19 nt, Artificial Sequence
  Description of Artificial Sequence: Synthetic oligonucleotide
  Antisense strand to SEQ ID NO: 2108654
uaaacuauagcuuauagca

SEQ ID NO: 2108656 - RNA, 19 nt, Artificial Sequence
  Description of Artificial Sequence: Synthetic oligonucleotide
  Sense strand starting at position 3150 of SEQ ID NO: 1882278
ugguguauacaagauaggu

SEQ ID NO: 2108657 - RNA, 19 nt, Artificial Sequence
  Description of Artificial Sequence: Synthetic oligonucleotide
  Antisense strand to SEQ ID NO: 2108656
accuaucuuguauacacca

SEQ ID NO: 2108658 - RNA, 19 nt, Artificial Sequence
  Description of Artificial Sequence: Synthetic oligonucleotide
  Sense strand starting at position 3152 of SEQ ID NO: 1882278
guguauacaagauaggucu

SEQ ID NO: 2108659 - RNA, 19 nt, Artificial Sequence
  Description of Artificial Sequence: Synthetic oligonucleotide
  Antisense strand to SEQ ID NO: 2108658
agaccuaucuuguauacac

SEQ ID NO: 2108660 - RNA, 19 nt, Artificial Sequence
  Description of Artificial Sequence: Synthetic oligonucleotide
  Sense strand starting at position 3213 of SEQ ID NO: 1882278
gagcauagugucgaaggaa

SEQ ID NO: 2108661 - RNA, 19 nt, Artificial Sequence
  Description of Artificial Sequence: Synthetic oligonucleotide
  Antisense strand to SEQ ID NO: 2108660
uuccuucgacacuaugcuc

SEQ ID NO: 2108662 - RNA, 19 nt, Artificial Sequence
  Description of Artificial Sequence: Synthetic oligonucleotide
  Sense strand starting at position 3361 of SEQ ID NO: 1882278
ucccaucuuguauaugaga

SEQ ID NO: 2108663 - RNA, 19 nt, Artificial Sequence
  Description of Artificial Sequence: Synthetic oligonucleotide
  Antisense strand to SEQ ID NO: 2108662
ucucauauacaagauggga

SEQ ID NO: 2108664 - RNA, 19 nt, Artificial Sequence
  Description of Artificial Sequence: Synthetic oligonucleotide
  Sense strand starting at position 3391 of SEQ ID NO: 1882278
gcuauaaauugugcuagaa

SEQ ID NO: 2108665 - RNA, 19 nt, Artificial Sequence
  Description of Artificial Sequence: Synthetic oligonucleotide
  Antisense strand to SEQ ID NO: 2108664
uucuagcacaauuuauagc

SEQ ID NO: 2108666 - RNA, 19 nt, Artificial Sequence
  Description of Artificial Sequence: Synthetic oligonucleotide
  Sense strand starting at position 3537 of SEQ ID NO: 1882278
cuuaguaaaucaucaggau

SEQ ID NO: 2108667 - RNA, 19 nt, Artificial Sequence
  Description of Artificial Sequence: Synthetic oligonucleotide
  Antisense strand to SEQ ID NO: 2108666
auccugaugauuuacuaag

SEQ ID NO: 2108668 - RNA, 19 nt, Artificial Sequence
  Description of Artificial Sequence: Synthetic oligonucleotide
  Sense strand starting at position 3865 of SEQ ID NO: 1882278
acauuucuguugccucauu

SEQ ID NO: 2108669 - RNA, 19 nt, Artificial Sequence
  Description of Artificial Sequence: Synthetic oligonucleotide
  Antisense strand to SEQ ID NO: 2108668
aaugaggcaacagaaaugu

SEQ ID NO: 2108670 - RNA, 19 nt, Artificial Sequence
  Description of Artificial Sequence: Synthetic oligonucleotide
  Sense strand starting at position 22 of SEQ ID NO: 1882279
ucugcuuguggacauguau

SEQ ID NO: 2108671 - RNA, 19 nt, Artificial Sequence
  Description of Artificial Sequence: Synthetic oligonucleotide
  Antisense strand to SEQ ID NO: 2108670
auacauguccacaagcaga

SEQ ID NO: 2108672 - RNA, 19 nt, Artificial Sequence
  Description of Artificial Sequence: Synthetic oligonucleotide
  Sense strand starting at position 292 of SEQ ID NO: 1882279
uguucuuaaggaugaauac

SEQ ID NO: 2108673 - RNA, 19 nt, Artificial Sequence
  Description of Artificial Sequence: Synthetic oligonucleotide
  Antisense strand to SEQ ID NO: 2108672
guauucauccuuaagaaca

SEQ ID NO: 2108674 - RNA, 19 nt, Artificial Sequence
  Description of Artificial Sequence: Synthetic oligonucleotide
  Sense strand starting at position 377 of SEQ ID NO: 1882279
acuguuaaauguucuuauc

SEQ ID NO: 2108675 - RNA, 19 nt, Artificial Sequence
  Description of Artificial Sequence: Synthetic oligonucleotide
  Antisense strand to SEQ ID NO: 2108674
gauaagaacauuuaacagu

SEQ ID NO: 2108676 - RNA, 19 nt, Artificial Sequence
  Description of Artificial Sequence: Synthetic oligonucleotide
  Sense strand starting at position 390 of SEQ ID NO: 1882279
cuuaucuaagcgcauauaa

SEQ ID NO: 2108677 - RNA, 19 nt, Artificial Sequence
  Description of Artificial Sequence: Synthetic oligonucleotide
  Antisense strand to SEQ ID NO: 2108676
uuauaugcgcuuagauaag

SEQ ID NO: 2108678 - RNA, 19 nt, Artificial Sequence
  Description of Artificial Sequence: Synthetic oligonucleotide
  Sense strand starting at position 468 of SEQ ID NO: 1882279
uucccucggucauuaaaca

SEQ ID NO: 2108679 - RNA, 19 nt, Artificial Sequence
  Description of Artificial Sequence: Synthetic oligonucleotide
  Antisense strand to SEQ ID NO: 2108678
uguuuaaugaccgagggaa

SEQ ID NO: 2108680 - RNA, 19 nt, Artificial Sequence
  Description of Artificial Sequence: Synthetic oligonucleotide
  Sense strand starting at position 533 of SEQ ID NO: 1882279
cgagaccgguggguuaaua

SEQ ID NO: 2108681 - RNA, 19 nt, Artificial Sequence
  Description of Artificial Sequence: Synthetic oligonucleotide
  Antisense strand to SEQ ID NO: 2108680
uauuaacccaccggucucg

SEQ ID NO: 2108682 - RNA, 19 nt, Artificial Sequence
  Description of Artificial Sequence: Synthetic oligonucleotide
  Sense strand starting at position 682 of SEQ ID NO: 1882279
uaagcuggguguuucuauu

SEQ ID NO: 2108683 - RNA, 19 nt, Artificial Sequence
  Description of Artificial Sequence: Synthetic oligonucleotide
  Antisense strand to SEQ ID NO: 2108682
aauagaaacacccagcuua

SEQ ID NO: 2108684 - RNA, 19 nt, Artificial Sequence
  Description of Artificial Sequence: Synthetic oligonucleotide
  Sense strand starting at position 732 of SEQ ID NO: 1882279
aguaacacauuugaugaga

SEQ ID NO: 2108685 - RNA, 19 nt, Artificial Sequence
  Description of Artificial Sequence: Synthetic oligonucleotide
  Antisense strand to SEQ ID NO: 2108684
ucucaucaaauguguuacu

SEQ ID NO: 2108686 - RNA, 19 nt, Artificial Sequence
  Description of Artificial Sequence: Synthetic oligonucleotide
  Sense strand starting at position 799 of SEQ ID NO: 1882279
ccauuccgcccugaaaguu

SEQ ID NO: 2108687 - RNA, 19 nt, Artificial Sequence
  Description of Artificial Sequence: Synthetic oligonucleotide
  Antisense strand to SEQ ID NO: 2108686
aacuuucagggcggaaugg

SEQ ID NO: 2108688 - RNA, 19 nt, Artificial Sequence
  Description of Artificial Sequence: Synthetic oligonucleotide
  Sense strand starting at position 850 of SEQ ID NO: 1882279
gcugucccgaucuaggaaa

SEQ ID NO: 2108689 - RNA, 19 nt, Artificial Sequence
  Description of Artificial Sequence: Synthetic oligonucleotide
  Antisense strand to SEQ ID NO: 2108688
uuuccuagaucgggacagc

SEQ ID NO: 2108690 - RNA, 19 nt, Artificial Sequence
  Description of Artificial Sequence: Synthetic oligonucleotide
  Sense strand starting at position 852 of SEQ ID NO: 1882279
ugucccgaucuaggaaauu

SEQ ID NO: 2108691 - RNA, 19 nt, Artificial Sequence
  Description of Artificial Sequence: Synthetic oligonucleotide
  Antisense strand to SEQ ID NO: 2108690
aauuuccuagaucgggaca

SEQ ID NO: 2108692 - RNA, 19 nt, Artificial Sequence
  Description of Artificial Sequence: Synthetic oligonucleotide
  Sense strand starting at position 898 of SEQ ID NO: 1882279
uuaagaguaugucugauac

SEQ ID NO: 2108693 - RNA, 19 nt, Artificial Sequence
  Description of Artificial Sequence: Synthetic oligonucleotide
  Antisense strand to SEQ ID NO: 2108692
guaucagacauacucuuaa

SEQ ID NO: 2108694 - RNA, 19 nt, Artificial Sequence
  Description of Artificial Sequence: Synthetic oligonucleotide
  Sense strand starting at position 909 of SEQ ID NO: 1882279
ucugauacagucuguaaua

SEQ ID NO: 2108695 - RNA, 19 nt, Artificial Sequence
  Description of Artificial Sequence: Synthetic oligonucleotide
  Antisense strand to SEQ ID NO: 2108694
uauuacagacuguaucaga

SEQ ID NO: 2108696 - RNA, 19 nt, Artificial Sequence
  Description of Artificial Sequence: Synthetic oligonucleotide
  Sense strand starting at position 910 of SEQ ID NO: 1882279
cugauacagucuguaauac

SEQ ID NO: 2108697 - RNA, 19 nt, Artificial Sequence
  Description of Artificial Sequence: Synthetic oligonucleotide
  Antisense strand to SEQ ID NO: 2108696
guauuacagacuguaucag

SEQ ID NO: 2108698 - RNA, 19 nt, Artificial Sequence
  Description of Artificial Sequence: Synthetic oligonucleotide
  Sense strand starting at position 911 of SEQ ID NO: 1882279
ugauacagucuguaauacu

SEQ ID NO: 2108699 - RNA, 19 nt, Artificial Sequence
  Description of Artificial Sequence: Synthetic oligonucleotide
  Antisense strand to SEQ ID NO: 2108698
aguauuacagacuguauca

SEQ ID NO: 2108700 - RNA, 19 nt, Artificial Sequence
  Description of Artificial Sequence: Synthetic oligonucleotide
  Sense strand starting at position 989 of SEQ ID NO: 1882279
gucccauuauuacuuggaa

SEQ ID NO: 2108701 - RNA, 19 nt, Artificial Sequence
  Description of Artificial Sequence: Synthetic oligonucleotide
  Antisense strand to SEQ ID NO: 2108700
uuccaaguaauaaugggac

SEQ ID NO: 2108702 - RNA, 19 nt, Artificial Sequence
  Description of Artificial Sequence: Synthetic oligonucleotide
  Sense strand starting at position 992 of SEQ ID NO: 1882279
ccauuauuacuuggaacag

SEQ ID NO: 2108703 - RNA, 19 nt, Artificial Sequence
  Description of Artificial Sequence: Synthetic oligonucleotide
  Antisense strand to SEQ ID NO: 2108702
cuguuccaaguaauaaugg

SEQ ID NO: 2108704 - RNA, 19 nt, Artificial Sequence
  Description of Artificial Sequence: Synthetic oligonucleotide
  Sense strand starting at position 1072 of SEQ ID NO: 1882279
gguuguaagaaucgggucu

SEQ ID NO: 2108705 - RNA, 19 nt, Artificial Sequence
  Description of Artificial Sequence: Synthetic oligonucleotide
  Antisense strand to SEQ ID NO: 2108704
agacccgauucuuacaacc

SEQ ID NO: 2108706 - RNA, 19 nt, Artificial Sequence
  Description of Artificial Sequence: Synthetic oligonucleotide
  Sense strand starting at position 2075 of SEQ ID NO: 1882279
aagcacuuugcagguaaau

SEQ ID NO: 2108707 - RNA, 19 nt, Artificial Sequence
  Description of Artificial Sequence: Synthetic oligonucleotide
  Antisense strand to SEQ ID NO: 2108706
auuuaccugcaaagugcuu

SEQ ID NO: 2108708 - RNA, 19 nt, Artificial Sequence
  Description of Artificial Sequence: Synthetic oligonucleotide
  Sense strand starting at position 2084 of SEQ ID NO: 1882279
gcagguaaauacguguaau

SEQ ID NO: 2108709 - RNA, 19 nt, Artificial Sequence
  Description of Artificial Sequence: Synthetic oligonucleotide
  Antisense strand to SEQ ID NO: 2108708
auuacacguauuuaccugc

SEQ ID NO: 2108710 - RNA, 19 nt, Artificial Sequence
  Description of Artificial Sequence: Synthetic oligonucleotide
  Sense strand starting at position 2087 of SEQ ID NO: 1882279
gguaaauacguguaauccu

SEQ ID NO: 2108711 - RNA, 19 nt, Artificial Sequence
  Description of Artificial Sequence: Synthetic oligonucleotide
  Antisense strand to SEQ ID NO: 2108710
aggauuacacguauuuacc

SEQ ID NO: 2108712 - RNA, 19 nt, Artificial Sequence
  Description of Artificial Sequence: Synthetic oligonucleotide
  Sense strand starting at position 2094 of SEQ ID NO: 1882279
acguguaauccucacagca

SEQ ID NO: 2108713 - RNA, 19 nt, Artificial Sequence
  Description of Artificial Sequence: Synthetic oligonucleotide
  Antisense strand to SEQ ID NO: 2108712
ugcugugaggauuacacgu

SEQ ID NO: 2108714 - RNA, 19 nt, Artificial Sequence
  Description of Artificial Sequence: Synthetic oligonucleotide
  Sense strand starting at position 2108 of SEQ ID NO: 1882279
cagcaacacugggagaaau

SEQ ID NO: 2108715 - RNA, 19 nt, Artificial Sequence
  Description of Artificial Sequence: Synthetic oligonucleotide
  Antisense strand to SEQ ID NO: 2108714
auuucucccaguguugcug

SEQ ID NO: 2108716 - RNA, 19 nt, Artificial Sequence
  Description of Artificial Sequence: Synthetic oligonucleotide
  Sense strand starting at position 2118 of SEQ ID NO: 1882279
gggagaaauacccgucuca

SEQ ID NO: 2108717 - RNA, 19 nt, Artificial Sequence
  Description of Artificial Sequence: Synthetic oligonucleotide
  Antisense strand to SEQ ID NO: 2108716
ugagacggguauuucuccc

SEQ ID NO: 2108718 - RNA, 19 nt, Artificial Sequence
  Description of Artificial Sequence: Synthetic oligonucleotide
  Sense strand starting at position 2129 of SEQ ID NO: 1882279
ccgucucacagcugaagaa

SEQ ID NO: 2108719 - RNA, 19 nt, Artificial Sequence
  Description of Artificial Sequence: Synthetic oligonucleotide
  Antisense strand to SEQ ID NO: 2108718
uucuucagcugugagacgg

SEQ ID NO: 2108720 - RNA, 19 nt, Artificial Sequence
  Description of Artificial Sequence: Synthetic oligonucleotide
  Sense strand starting at position 2130 of SEQ ID NO: 1882279
cgucucacagcugaagaaa

SEQ ID NO: 2108721 - RNA, 19 nt, Artificial Sequence
  Description of Artificial Sequence: Synthetic oligonucleotide
  Antisense strand to SEQ ID NO: 2108720
uuucuucagcugugagacg

SEQ ID NO: 2108722 - RNA, 19 nt, Artificial Sequence
  Description of Artificial Sequence: Synthetic oligonucleotide
  Sense strand starting at position 2181 of SEQ ID NO: 1882279
uucuaauuacgguaucaca

SEQ ID NO: 2108723 - RNA, 19 nt, Artificial Sequence
  Description of Artificial Sequence: Synthetic oligonucleotide
  Antisense strand to SEQ ID NO: 2108722
ugugauaccguaauuagaa

SEQ ID NO: 2108724 - RNA, 19 nt, Artificial Sequence
  Description of Artificial Sequence: Synthetic oligonucleotide
  Sense strand starting at position 2310 of SEQ ID NO: 1882279
gccuauaagcauuacguaa

SEQ ID NO: 2108725 - RNA, 19 nt, Artificial Sequence
  Description of Artificial Sequence: Synthetic oligonucleotide
  Antisense strand to SEQ ID NO: 2108724
uuacguaaugcuuauaggc

SEQ ID NO: 2108726 - RNA, 19 nt, Artificial Sequence
  Description of Artificial Sequence: Synthetic oligonucleotide
  Sense strand starting at position 2360 of SEQ ID NO: 1882279
cauguucggguuuagaaag

SEQ ID NO: 2108727 - RNA, 19 nt, Artificial Sequence
  Description of Artificial Sequence: Synthetic oligonucleotide
  Antisense strand to SEQ ID NO: 2108726
cuuucuaaacccgaacaug

SEQ ID NO: 2108728 - RNA, 19 nt, Artificial Sequence
  Description of Artificial Sequence: Synthetic oligonucleotide
  Sense strand starting at position 2378 of SEQ ID NO: 1882279
gucucauagcucugaaaga

SEQ ID NO: 2108729 - RNA, 19 nt, Artificial Sequence
  Description of Artificial Sequence: Synthetic oligonucleotide
  Antisense strand to SEQ ID NO: 2108728
ucuuucagagcuaugagac

SEQ ID NO: 2108730 - RNA, 19 nt, Artificial Sequence
  Description of Artificial Sequence: Synthetic oligonucleotide
  Sense strand starting at position 2385 of SEQ ID NO: 1882279
agcucugaaagaugagguu

SEQ ID NO: 2108731 - RNA, 19 nt, Artificial Sequence
  Description of Artificial Sequence: Synthetic oligonucleotide
  Antisense strand to SEQ ID NO: 2108730
aaccucaucuuucagagcu

SEQ ID NO: 2108732 - RNA, 19 nt, Artificial Sequence
  Description of Artificial Sequence: Synthetic oligonucleotide
  Sense strand starting at position 2394 of SEQ ID NO: 1882279
agaugagguuaauuagcau

SEQ ID NO: 2108733 - RNA, 19 nt, Artificial Sequence
  Description of Artificial Sequence: Synthetic oligonucleotide
  Antisense strand to SEQ ID NO: 2108732
augcuaauuaaccucaucu

SEQ ID NO: 2108734 - RNA, 19 nt, Artificial Sequence
  Description of Artificial Sequence: Synthetic oligonucleotide
  Sense strand starting at position 2397 of SEQ ID NO: 1882279
ugagguuaauuagcaucau

SEQ ID NO: 2108735 - RNA, 19 nt, Artificial Sequence
  Description of Artificial Sequence: Synthetic oligonucleotide
  Antisense strand to SEQ ID NO: 2108734
augaugcuaauuaaccuca

SEQ ID NO: 2108736 - RNA, 19 nt, Artificial Sequence
  Description of Artificial Sequence: Synthetic oligonucleotide
  Sense strand starting at position 2458 of SEQ ID NO: 1882279
uccauuaguucuguuacuu

SEQ ID NO: 2108737 - RNA, 19 nt, Artificial Sequence
  Description of Artificial Sequence: Synthetic oligonucleotide
  Antisense strand to SEQ ID NO: 2108736
aaguaacagaacuaaugga

SEQ ID NO: 2108738 - RNA, 19 nt, Artificial Sequence
  Description of Artificial Sequence: Synthetic oligonucleotide
  Sense strand starting at position 2480 of SEQ ID NO: 1882279
gcuuccuagcaaugagaac

SEQ ID NO: 2108739 - RNA, 19 nt, Artificial Sequence
  Description of Artificial Sequence: Synthetic oligonucleotide
  Antisense strand to SEQ ID NO: 2108738
guucucauugcuaggaagc

SEQ ID NO: 2108740 - RNA, 19 nt, Artificial Sequence
  Description of Artificial Sequence: Synthetic oligonucleotide
  Sense strand starting at position 2499 of SEQ ID NO: 1882279
auuugcaauugcucugcaa

SEQ ID NO: 2108741 - RNA, 19 nt, Artificial Sequence
  Description of Artificial Sequence: Synthetic oligonucleotide
  Antisense strand to SEQ ID NO: 2108740
uugcagagcaauugcaaau

SEQ ID NO: 2108742 - RNA, 19 nt, Artificial Sequence
  Description of Artificial Sequence: Synthetic oligonucleotide
  Sense strand starting at position 2503 of SEQ ID NO: 1882279
gcaauugcucugcaacuuu

SEQ ID NO: 2108743 - RNA, 19 nt, Artificial Sequence
  Description of Artificial Sequence: Synthetic oligonucleotide
  Antisense strand to SEQ ID NO: 2108742
aaaguugcagagcaauugc

SEQ ID NO: 2108744 - RNA, 19 nt, Artificial Sequence
  Description of Artificial Sequence: Synthetic oligonucleotide
  Sense strand starting at position 2527 of SEQ ID NO: 1882279
uccagauguugucuuaauu

SEQ ID NO: 2108745 - RNA, 19 nt, Artificial Sequence
  Description of Artificial Sequence: Synthetic oligonucleotide
  Antisense strand to SEQ ID NO: 2108744
aauuaagacaacaucugga

SEQ ID NO: 2108746 - RNA, 19 nt, Artificial Sequence
  Description of Artificial Sequence: Synthetic oligonucleotide
  Sense strand starting at position 2715 of SEQ ID NO: 1882279
aagugaguuggguaaauau

SEQ ID NO: 2108747 - RNA, 19 nt, Artificial Sequence
  Description of Artificial Sequence: Synthetic oligonucleotide
  Antisense strand to SEQ ID NO: 2108746
auauuuacccaacucacuu

SEQ ID NO: 2108748 - RNA, 19 nt, Artificial Sequence
  Description of Artificial Sequence: Synthetic oligonucleotide
  Sense strand starting at position 3490 of SEQ ID NO: 1882279
augagauguuaccugauaa

SEQ ID NO: 2108749 - RNA, 19 nt, Artificial Sequence
  Description of Artificial Sequence: Synthetic oligonucleotide
  Antisense strand to SEQ ID NO: 2108748
uuaucagguaacaucucau

SEQ ID NO: 2108750 - RNA, 19 nt, Artificial Sequence
  Description of Artificial Sequence: Synthetic oligonucleotide
  Sense strand starting at position 520 of SEQ ID NO: 1882280
ggucacuuccuguaagugu

SEQ ID NO: 2108751 - RNA, 19 nt, Artificial Sequence
  Description of Artificial Sequence: Synthetic oligonucleotide
  Antisense strand to SEQ ID NO: 2108750
acacuuacaggaagugacc

SEQ ID NO: 2108752 - RNA, 19 nt, Artificial Sequence
  Description of Artificial Sequence: Synthetic oligonucleotide
  Sense strand starting at position 686 of SEQ ID NO: 1882280
aguagcuuccaaugugaca

SEQ ID NO: 2108753 - RNA, 19 nt, Artificial Sequence
  Description of Artificial Sequence: Synthetic oligonucleotide
  Antisense strand to SEQ ID NO: 2108752
ugucacauuggaagcuacu

SEQ ID NO: 2108754 - RNA, 19 nt, Artificial Sequence
  Description of Artificial Sequence: Synthetic oligonucleotide
  Sense strand starting at position 868 of SEQ ID NO: 1882280
agccuagaucacugcacaa

SEQ ID NO: 2108755 - RNA, 19 nt, Artificial Sequence
  Description of Artificial Sequence: Synthetic oligonucleotide
  Antisense strand to SEQ ID NO: 2108754
uugugcagugaucuaggcu

SEQ ID NO: 2108756 - RNA, 19 nt, Artificial Sequence
  Description of Artificial Sequence: Synthetic oligonucleotide
  Sense strand starting at position 904 of SEQ ID NO: 1882280
uguacaggcuuccuaaaca

SEQ ID NO: 2108757 - RNA, 19 nt, Artificial Sequence
  Description of Artificial Sequence: Synthetic oligonucleotide
  Antisense strand to SEQ ID NO: 2108756
uguuuaggaagccuguaca

SEQ ID NO: 2108758 - RNA, 19 nt, Artificial Sequence
  Description of Artificial Sequence: Synthetic oligonucleotide
  Sense strand starting at position 941 of SEQ ID NO: 1882280
uagucagagugcucuaaga

SEQ ID NO: 2108759 - RNA, 19 nt, Artificial Sequence
  Description of Artificial Sequence: Synthetic oligonucleotide
  Antisense strand to SEQ ID NO: 2108758
ucuuagagcacucugacua

SEQ ID NO: 2108760 - RNA, 19 nt, Artificial Sequence
  Description of Artificial Sequence: Synthetic oligonucleotide
  Sense strand starting at position 943 of SEQ ID NO: 1882280
gucagagugcucuaagacc

SEQ ID NO: 2108761 - RNA, 19 nt, Artificial Sequence
  Description of Artificial Sequence: Synthetic oligonucleotide
  Antisense strand to SEQ ID NO: 2108760
ggucuuagagcacucugac

SEQ ID NO: 2108762 - RNA, 19 nt, Artificial Sequence
  Description of Artificial Sequence: Synthetic oligonucleotide
  Sense strand starting at position 991 of SEQ ID NO: 1882280
acgugaggucucuaccaug

SEQ ID NO: 2108763 - RNA, 19 nt, Artificial Sequence
  Description of Artificial Sequence: Synthetic oligonucleotide
  Antisense strand to SEQ ID NO: 2108762
caugguagagaccucacgu

SEQ ID NO: 2108764 - RNA, 19 nt, Artificial Sequence
  Description of Artificial Sequence: Synthetic oligonucleotide
  Sense strand starting at position 1184 of SEQ ID NO: 1882280
cccauuagaccgugucaca

SEQ ID NO: 2108765 - RNA, 19 nt, Artificial Sequence
  Description of Artificial Sequence: Synthetic oligonucleotide
  Antisense strand to SEQ ID NO: 2108764
ugugacacggucuaauggg

SEQ ID NO: 2108766 - RNA, 19 nt, Artificial Sequence
  Description of Artificial Sequence: Synthetic oligonucleotide
  Sense strand starting at position 1194 of SEQ ID NO: 1882280
cgugucacauccuuaaauc

SEQ ID NO: 2108767 - RNA, 19 nt, Artificial Sequence
  Description of Artificial Sequence: Synthetic oligonucleotide
  Antisense strand to SEQ ID NO: 2108766
gauuuaaggaugugacacg

SEQ ID NO: 2108768 - RNA, 19 nt, Artificial Sequence
  Description of Artificial Sequence: Synthetic oligonucleotide
  Sense strand starting at position 1195 of SEQ ID NO: 1882280
gugucacauccuuaaaucu

SEQ ID NO: 2108769 - RNA, 19 nt, Artificial Sequence
  Description of Artificial Sequence: Synthetic oligonucleotide
  Antisense strand to SEQ ID NO: 2108768
agauuuaaggaugugacac

SEQ ID NO: 2108770 - RNA, 19 nt, Artificial Sequence
  Description of Artificial Sequence: Synthetic oligonucleotide
  Sense strand starting at position 1215 of SEQ ID NO: 1882280
cccaauuaggcuggucaga

SEQ ID NO: 2108771 - RNA, 19 nt, Artificial Sequence
  Description of Artificial Sequence: Synthetic oligonucleotide
  Antisense strand to SEQ ID NO: 2108770
ucugaccagccuaauuggg

SEQ ID NO: 2108772 - RNA, 19 nt, Artificial Sequence
  Description of Artificial Sequence: Synthetic oligonucleotide
  Sense strand starting at position 1217 of SEQ ID NO: 1882280
caauuaggcuggucagagu

SEQ ID NO: 2108773 - RNA, 19 nt, Artificial Sequence
  Description of Artificial Sequence: Synthetic oligonucleotide
  Antisense strand to SEQ ID NO: 2108772
acucugaccagccuaauug

SEQ ID NO: 2108774 - RNA, 19 nt, Artificial Sequence
  Description of Artificial Sequence: Synthetic oligonucleotide
  Sense strand starting at position 1367 of SEQ ID NO: 1882280
cgauguugugauuaugcua

SEQ ID NO: 2108775 - RNA, 19 nt, Artificial Sequence
  Description of Artificial Sequence: Synthetic oligonucleotide
  Antisense strand to SEQ ID NO: 2108774
uagcauaaucacaacaucg

SEQ ID NO: 2108776 - RNA, 19 nt, Artificial Sequence
  Description of Artificial Sequence: Synthetic oligonucleotide
  Sense strand starting at position 1467 of SEQ ID NO: 1882280
aggauaaagcgcugauaca

SEQ ID NO: 2108777 - RNA, 19 nt, Artificial Sequence
  Description of Artificial Sequence: Synthetic oligonucleotide
  Antisense strand to SEQ ID NO: 2108776
uguaucagcgcuuuauccu

SEQ ID NO: 2108778 - RNA, 19 nt, Artificial Sequence
  Description of Artificial Sequence: Synthetic oligonucleotide
  Sense strand starting at position 1517 of SEQ ID NO: 1882280
gaaguuggaguauguggaa

SEQ ID NO: 2108779 - RNA, 19 nt, Artificial Sequence
  Description of Artificial Sequence: Synthetic oligonucleotide
  Antisense strand to SEQ ID NO: 2108778
uuccacauacuccaacuuc

SEQ ID NO: 2108780 - RNA, 19 nt, Artificial Sequence
  Description of Artificial Sequence: Synthetic oligonucleotide
  Sense strand starting at position 1576 of SEQ ID NO: 1882280
cugaucuaucgacagacuu

SEQ ID NO: 2108781 - RNA, 19 nt, Artificial Sequence
  Description of Artificial Sequence: Synthetic oligonucleotide
  Antisense strand to SEQ ID NO: 2108780
aagucugucgauagaucag

SEQ ID NO: 2108782 - RNA, 19 nt, Artificial Sequence
  Description of Artificial Sequence: Synthetic oligonucleotide
  Sense strand starting at position 1619 of SEQ ID NO: 1882280
cggugagcagaauggucau

SEQ ID NO: 2108783 - RNA, 19 nt, Artificial Sequence
  Description of Artificial Sequence: Synthetic oligonucleotide
  Antisense strand to SEQ ID NO: 2108782
augaccauucugcucaccg

SEQ ID NO: 2108784 - RNA, 19 nt, Artificial Sequence
  Description of Artificial Sequence: Synthetic oligonucleotide
  Sense strand starting at position 1622 of SEQ ID NO: 1882280
ugagcagaauggucaugau

SEQ ID NO: 2108785 - RNA, 19 nt, Artificial Sequence
  Description of Artificial Sequence: Synthetic oligonucleotide
  Antisense strand to SEQ ID NO: 2108784
aucaugaccauucugcuca

SEQ ID NO: 2108786 - RNA, 19 nt, Artificial Sequence
  Description of Artificial Sequence: Synthetic oligonucleotide
  Sense strand starting at position 1655 of SEQ ID NO: 1882280
gggcucagauguucaggua

SEQ ID NO: 2108787 - RNA, 19 nt, Artificial Sequence
  Description of Artificial Sequence: Synthetic oligonucleotide
  Antisense strand to SEQ ID NO: 2108786
uaccugaacaucugagccc

SEQ ID NO: 2108788 - RNA, 19 nt, Artificial Sequence
  Description of Artificial Sequence: Synthetic oligonucleotide
  Sense strand starting at position 1828 of SEQ ID NO: 1882280
gaggucucgcugcagauau

SEQ ID NO: 2108789 - RNA, 19 nt, Artificial Sequence
  Description of Artificial Sequence: Synthetic oligonucleotide
  Antisense strand to SEQ ID NO: 2108788
auaucugcagcgagaccuc

SEQ ID NO: 2108790 - RNA, 19 nt, Artificial Sequence
  Description of Artificial Sequence: Synthetic oligonucleotide
  Sense strand starting at position 1845 of SEQ ID NO: 1882280
auggaucaugguggacauu

SEQ ID NO: 2108791 - RNA, 19 nt, Artificial Sequence
  Description of Artificial Sequence: Synthetic oligonucleotide
  Antisense strand to SEQ ID NO: 2108790
aauguccaccaugauccau

SEQ ID NO: 2108792 - RNA, 19 nt, Artificial Sequence
  Description of Artificial Sequence: Synthetic oligonucleotide
  Sense strand starting at position 2076 of SEQ ID NO: 1882280
ugguaaauuacguggcaca

SEQ ID NO: 2108793 - RNA, 19 nt, Artificial Sequence
  Description of Artificial Sequence: Synthetic oligonucleotide
  Antisense strand to SEQ ID NO: 2108792
ugugccacguaauuuacca

SEQ ID NO: 2108794 - RNA, 19 nt, Artificial Sequence
  Description of Artificial Sequence: Synthetic oligonucleotide
  Sense strand starting at position 2077 of SEQ ID NO: 1882280
gguaaauuacguggcacau

SEQ ID NO: 2108795 - RNA, 19 nt, Artificial Sequence
  Description of Artificial Sequence: Synthetic oligonucleotide
  Antisense strand to SEQ ID NO: 2108794
augugccacguaauuuacc

SEQ ID NO: 2108796 - RNA, 19 nt, Artificial Sequence
  Description of Artificial Sequence: Synthetic oligonucleotide
  Sense strand starting at position 2081 of SEQ ID NO: 1882280
aauuacguggcacauaaau

SEQ ID NO: 2108797 - RNA, 19 nt, Artificial Sequence
  Description of Artificial Sequence: Synthetic oligonucleotide
  Antisense strand to SEQ ID NO: 2108796
auuuaugugccacguaauu

SEQ ID NO: 2108798 - RNA, 19 nt, Artificial Sequence
  Description of Artificial Sequence: Synthetic oligonucleotide
  Sense strand starting at position 2172 of SEQ ID NO: 1882280
gucucuuacucuuuggaac

SEQ ID NO: 2108799 - RNA, 19 nt, Artificial Sequence
  Description of Artificial Sequence: Synthetic oligonucleotide
  Antisense strand to SEQ ID NO: 2108798
guuccaaagaguaagagac

SEQ ID NO: 2108800 - RNA, 19 nt, Artificial Sequence
  Description of Artificial Sequence: Synthetic oligonucleotide
  Sense strand starting at position 2196 of SEQ ID NO: 1882280
gccagugguccucaaaccu

SEQ ID NO: 2108801 - RNA, 19 nt, Artificial Sequence
  Description of Artificial Sequence: Synthetic oligonucleotide
  Antisense strand to SEQ ID NO: 2108800
agguuugaggaccacuggc

SEQ ID NO: 2108802 - RNA, 19 nt, Artificial Sequence
  Description of Artificial Sequence: Synthetic oligonucleotide
  Sense strand starting at position 2644 of SEQ ID NO: 1882280
cgaugaacaguccaugauc

SEQ ID NO: 2108803 - RNA, 19 nt, Artificial Sequence
  Description of Artificial Sequence: Synthetic oligonucleotide
  Antisense strand to SEQ ID NO: 2108802
gaucauggacuguucaucg

SEQ ID NO: 2108804 - RNA, 19 nt, Artificial Sequence
  Description of Artificial Sequence: Synthetic oligonucleotide
  Sense strand starting at position 2653 of SEQ ID NO: 1882280
guccaugaucuggaacugu

SEQ ID NO: 2108805 - RNA, 19 nt, Artificial Sequence
  Description of Artificial Sequence: Synthetic oligonucleotide
  Antisense strand to SEQ ID NO: 2108804
acaguuccagaucauggac

SEQ ID NO: 2108806 - RNA, 19 nt, Artificial Sequence
  Description of Artificial Sequence: Synthetic oligonucleotide
  Sense strand starting at position 2762 of SEQ ID NO: 1882280
acacauuucugugagugaa

SEQ ID NO: 2108807 - RNA, 19 nt, Artificial Sequence
  Description of Artificial Sequence: Synthetic oligonucleotide
  Antisense strand to SEQ ID NO: 2108806
uucacucacagaaaugugu

SEQ ID NO: 2108808 - RNA, 19 nt, Artificial Sequence
  Description of Artificial Sequence: Synthetic oligonucleotide
  Sense strand starting at position 2955 of SEQ ID NO: 1882280
ggucucagcucuccugaca

SEQ ID NO: 2108809 - RNA, 19 nt, Artificial Sequence
  Description of Artificial Sequence: Synthetic oligonucleotide
  Antisense strand to SEQ ID NO: 2108808
ugucaggagagcugagacc

SEQ ID NO: 2108810 - RNA, 19 nt, Artificial Sequence
  Description of Artificial Sequence: Synthetic oligonucleotide
  Sense strand starting at position 3358 of SEQ ID NO: 1882280
gccuuagaccucugaacuc

SEQ ID NO: 2108811 - RNA, 19 nt, Artificial Sequence
  Description of Artificial Sequence: Synthetic oligonucleotide
  Antisense strand to SEQ ID NO: 2108810
gaguucagaggucuaaggc

SEQ ID NO: 2108812 - RNA, 19 nt, Artificial Sequence
  Description of Artificial Sequence: Synthetic oligonucleotide
  Sense strand starting at position 3387 of SEQ ID NO: 1882280
aggcgacuuucuccucaca

SEQ ID NO: 2108813 - RNA, 19 nt, Artificial Sequence
  Description of Artificial Sequence: Synthetic oligonucleotide
  Antisense strand to SEQ ID NO: 2108812
ugugaggagaaagucgccu

SEQ ID NO: 2108814 - RNA, 19 nt, Artificial Sequence
  Description of Artificial Sequence: Synthetic oligonucleotide
  Sense strand starting at position 3389 of SEQ ID NO: 1882280
gcgacuuucuccucacaga

SEQ ID NO: 2108815 - RNA, 19 nt, Artificial Sequence
  Description of Artificial Sequence: Synthetic oligonucleotide
  Antisense strand to SEQ ID NO: 2108814
ucugugaggagaaagucgc

SEQ ID NO: 2108816 - RNA, 19 nt, Artificial Sequence
  Description of Artificial Sequence: Synthetic oligonucleotide
  Sense strand starting at position 3452 of SEQ ID NO: 1882280
cagugcggucgcuuacaga

SEQ ID NO: 2108817 - RNA, 19 nt, Artificial Sequence
  Description of Artificial Sequence: Synthetic oligonucleotide
  Antisense strand to SEQ ID NO: 2108816
ucuguaagcgaccgcacug

SEQ ID NO: 2108818 - RNA, 19 nt, Artificial Sequence
  Description of Artificial Sequence: Synthetic oligonucleotide
  Sense strand starting at position 3568 of SEQ ID NO: 1882280
ucuacaaguguuugcugau

SEQ ID NO: 2108819 - RNA, 19 nt, Artificial Sequence
  Description of Artificial Sequence: Synthetic oligonucleotide
  Antisense strand to SEQ ID NO: 2108818
aucagcaaacacuuguaga

SEQ ID NO: 2108820 - RNA, 19 nt, Artificial Sequence
  Description of Artificial Sequence: Synthetic oligonucleotide
  Sense strand starting at position 3569 of SEQ ID NO: 1882280
cuacaaguguuugcugaua

SEQ ID NO: 2108821 - RNA, 19 nt, Artificial Sequence
  Description of Artificial Sequence: Synthetic oligonucleotide
  Antisense strand to SEQ ID NO: 2108820
uaucagcaaacacuuguag

SEQ ID NO: 2108822 - RNA, 19 nt, Artificial Sequence
  Description of Artificial Sequence: Synthetic oligonucleotide
  Sense strand starting at position 3666 of SEQ ID NO: 1882280
cacagcugccgcuaugaaa

SEQ ID NO: 2108823 - RNA, 19 nt, Artificial Sequence
  Description of Artificial Sequence: Synthetic oligonucleotide
  Antisense strand to SEQ ID NO: 2108822
uuucauagcggcagcugug

SEQ ID NO: 2108824 - RNA, 19 nt, Artificial Sequence
  Description of Artificial Sequence: Synthetic oligonucleotide
  Sense strand starting at position 3731 of SEQ ID NO: 1882280
uguggaaucugacucgcuu

SEQ ID NO: 2108825 - RNA, 19 nt, Artificial Sequence
  Description of Artificial Sequence: Synthetic oligonucleotide
  Antisense strand to SEQ ID NO: 2108824
aagcgagucagauuccaca

SEQ ID NO: 2108826 - RNA, 19 nt, Artificial Sequence
  Description of Artificial Sequence: Synthetic oligonucleotide
  Sense strand starting at position 3889 of SEQ ID NO: 1882280
ggcgguucugacggaaacu

SEQ ID NO: 2108827 - RNA, 19 nt, Artificial Sequence
  Description of Artificial Sequence: Synthetic oligonucleotide
  Antisense strand to SEQ ID NO: 2108826
aguuuccgucagaaccgcc

SEQ ID NO: 2108828 - RNA, 19 nt, Artificial Sequence
  Description of Artificial Sequence: Synthetic oligonucleotide
  Sense strand starting at position 3977 of SEQ ID NO: 1882280
cagugaggauccuaaauuu

SEQ ID NO: 2108829 - RNA, 19 nt, Artificial Sequence
  Description of Artificial Sequence: Synthetic oligonucleotide
  Antisense strand to SEQ ID NO: 2108828
aaauuuaggauccucacug

SEQ ID NO: 2108830 - RNA, 19 nt, Artificial Sequence
  Description of Artificial Sequence: Synthetic oligonucleotide
  Sense strand starting at position 2007 of SEQ ID NO: 1882281
agaggaacuuuauagaacu

SEQ ID NO: 2108831 - RNA, 19 nt, Artificial Sequence
  Description of Artificial Sequence: Synthetic oligonucleotide
  Antisense strand to SEQ ID NO: 2108830
aguucuauaaaguuccucu

SEQ ID NO: 2108832 - RNA, 19 nt, Artificial Sequence
  Description of Artificial Sequence: Synthetic oligonucleotide
  Sense strand starting at position 2531 of SEQ ID NO: 1882281
cgcgguguuuagagaacau

SEQ ID NO: 2108833 - RNA, 19 nt, Artificial Sequence
  Description of Artificial Sequence: Synthetic oligonucleotide
  Antisense strand to SEQ ID NO: 2108832
auguucucuaaacaccgcg

SEQ ID NO: 2108834 - RNA, 19 nt, Artificial Sequence
  Description of Artificial Sequence: Synthetic oligonucleotide
  Sense strand starting at position 2590 of SEQ ID NO: 1882281
uugagcuauuaagcuugau

SEQ ID NO: 2108835 - RNA, 19 nt, Artificial Sequence
  Description of Artificial Sequence: Synthetic oligonucleotide
  Antisense strand to SEQ ID NO: 2108834
aucaagcuuaauagcucaa

SEQ ID NO: 2108836 - RNA, 19 nt, Artificial Sequence
  Description of Artificial Sequence: Synthetic oligonucleotide
  Sense strand starting at position 2624 of SEQ ID NO: 1882281
gcgugucugacaugcuuac

SEQ ID NO: 2108837 - RNA, 19 nt, Artificial Sequence
  Description of Artificial Sequence: Synthetic oligonucleotide
  Antisense strand to SEQ ID NO: 2108836
guaagcaugucagacacgc

SEQ ID NO: 2108838 - RNA, 19 nt, Artificial Sequence
  Description of Artificial Sequence: Synthetic oligonucleotide
  Sense strand starting at position 2652 of SEQ ID NO: 1882281
caucuauuaggcuggugaa

SEQ ID NO: 2108839 - RNA, 19 nt, Artificial Sequence
  Description of Artificial Sequence: Synthetic oligonucleotide
  Antisense strand to SEQ ID NO: 2108838
uucaccagccuaauagaug

SEQ ID NO: 2108840 - RNA, 19 nt, Artificial Sequence
  Description of Artificial Sequence: Synthetic oligonucleotide
  Sense strand starting at position 2653 of SEQ ID NO: 1882281
aucuauuaggcuggugaau

SEQ ID NO: 2108841 - RNA, 19 nt, Artificial Sequence
  Description of Artificial Sequence: Synthetic oligonucleotide
  Antisense strand to SEQ ID NO: 2108840
auucaccagccuaauagau

SEQ ID NO: 2108842 - RNA, 19 nt, Artificial Sequence
  Description of Artificial Sequence: Synthetic oligonucleotide
  Sense strand starting at position 2665 of SEQ ID NO: 1882281
ggugaauugaagugacuca

SEQ ID NO: 2108843 - RNA, 19 nt, Artificial Sequence
  Description of Artificial Sequence: Synthetic oligonucleotide
  Antisense strand to SEQ ID NO: 2108842
ugagucacuucaauucacc

SEQ ID NO: 2108844 - RNA, 19 nt, Artificial Sequence
  Description of Artificial Sequence: Synthetic oligonucleotide
  Sense strand starting at position 2672 of SEQ ID NO: 1882281
ugaagugacucagacaaug

SEQ ID NO: 2108845 - RNA, 19 nt, Artificial Sequence
  Description of Artificial Sequence: Synthetic oligonucleotide
  Antisense strand to SEQ ID NO: 2108844
cauugucugagucacuuca

SEQ ID NO: 2108846 - RNA, 19 nt, Artificial Sequence
  Description of Artificial Sequence: Synthetic oligonucleotide
  Sense strand starting at position 2710 of SEQ ID NO: 1882281
auuaucuuagcaugaaaga

SEQ ID NO: 2108847 - RNA, 19 nt, Artificial Sequence
  Description of Artificial Sequence: Synthetic oligonucleotide
  Antisense strand to SEQ ID NO: 2108846
ucuuucaugcuaagauaau

SEQ ID NO: 2108848 - RNA, 19 nt, Artificial Sequence
  Description of Artificial Sequence: Synthetic oligonucleotide
  Sense strand starting at position 2755 of SEQ ID NO: 1882281
ggauccaagugcuuaauca

SEQ ID NO: 2108849 - RNA, 19 nt, Artificial Sequence
  Description of Artificial Sequence: Synthetic oligonucleotide
  Antisense strand to SEQ ID NO: 2108848
ugauuaagcacuuggaucc

SEQ ID NO: 2108850 - RNA, 19 nt, Artificial Sequence
  Description of Artificial Sequence: Synthetic oligonucleotide
  Sense strand starting at position 3179 of SEQ ID NO: 1882281
agauguccuuaaucgcaaa

SEQ ID NO: 2108851 - RNA, 19 nt, Artificial Sequence
  Description of Artificial Sequence: Synthetic oligonucleotide
  Antisense strand to SEQ ID NO: 2108850
uuugcgauuaaggacaucu

SEQ ID NO: 2108852 - RNA, 19 nt, Artificial Sequence
  Description of Artificial Sequence: Synthetic oligonucleotide
  Sense strand starting at position 3223 of SEQ ID NO: 1882281
ugagcuuucgaucgucuga

SEQ ID NO: 2108853 - RNA, 19 nt, Artificial Sequence
  Description of Artificial Sequence: Synthetic oligonucleotide
  Antisense strand to SEQ ID NO: 2108852
ucagacgaucgaaagcuca

SEQ ID NO: 2108854 - RNA, 19 nt, Artificial Sequence
  Description of Artificial Sequence: Synthetic oligonucleotide
  Sense strand starting at position 3225 of SEQ ID NO: 1882281
agcuuucgaucgucugaga

SEQ ID NO: 2108855 - RNA, 19 nt, Artificial Sequence
  Description of Artificial Sequence: Synthetic oligonucleotide
  Antisense strand to SEQ ID NO: 2108854
ucucagacgaucgaaagcu

SEQ ID NO: 2108856 - RNA, 19 nt, Artificial Sequence
  Description of Artificial Sequence: Synthetic oligonucleotide
  Sense strand starting at position 3236 of SEQ ID NO: 1882281
gucugagaugcugaguaug

SEQ ID NO: 2108857 - RNA, 19 nt, Artificial Sequence
  Description of Artificial Sequence: Synthetic oligonucleotide
  Antisense strand to SEQ ID NO: 2108856
cauacucagcaucucagac

SEQ ID NO: 2108858 - RNA, 19 nt, Artificial Sequence
  Description of Artificial Sequence: Synthetic oligonucleotide
  Sense strand starting at position 3244 of SEQ ID NO: 1882281
ugcugaguaugugcauuua

SEQ ID NO: 2108859 - RNA, 19 nt, Artificial Sequence
  Description of Artificial Sequence: Synthetic oligonucleotide
  Antisense strand to SEQ ID NO: 2108858
uaaaugcacauacucagca

SEQ ID NO: 2108860 - RNA, 19 nt, Artificial Sequence
  Description of Artificial Sequence: Synthetic oligonucleotide
  Sense strand starting at position 3281 of SEQ ID NO: 1882281
accaucagaucucugguuu

SEQ ID NO: 2108861 - RNA, 19 nt, Artificial Sequence
  Description of Artificial Sequence: Synthetic oligonucleotide
  Antisense strand to SEQ ID NO: 2108860
aaaccagagaucugauggu

SEQ ID NO: 2108862 - RNA, 19 nt, Artificial Sequence
  Description of Artificial Sequence: Synthetic oligonucleotide
  Sense strand starting at position 3282 of SEQ ID NO: 1882281
ccaucagaucucugguuuc

SEQ ID NO: 2108863 - RNA, 19 nt, Artificial Sequence
  Description of Artificial Sequence: Synthetic oligonucleotide
  Antisense strand to SEQ ID NO: 2108862
gaaaccagagaucugaugg

SEQ ID NO: 2108864 - RNA, 19 nt, Artificial Sequence
  Description of Artificial Sequence: Synthetic oligonucleotide
  Sense strand starting at position 3285 of SEQ ID NO: 1882281
ucagaucucugguuucuau

SEQ ID NO: 2108865 - RNA, 19 nt, Artificial Sequence
  Description of Artificial Sequence: Synthetic oligonucleotide
  Antisense strand to SEQ ID NO: 2108864
auagaaaccagagaucuga

SEQ ID NO: 2108866 - RNA, 19 nt, Artificial Sequence
  Description of Artificial Sequence: Synthetic oligonucleotide
  Sense strand starting at position 3289 of SEQ ID NO: 1882281
aucucugguuucuauauga

SEQ ID NO: 2108867 - RNA, 19 nt, Artificial Sequence
  Description of Artificial Sequence: Synthetic oligonucleotide
  Antisense strand to SEQ ID NO: 2108866
ucauauagaaaccagagau

SEQ ID NO: 2108868 - RNA, 19 nt, Artificial Sequence
  Description of Artificial Sequence: Synthetic oligonucleotide
  Sense strand starting at position 3389 of SEQ ID NO: 1882281
ucuuauauauugggucaau

SEQ ID NO: 2108869 - RNA, 19 nt, Artificial Sequence
  Description of Artificial Sequence: Synthetic oligonucleotide
  Antisense strand to SEQ ID NO: 2108868
auugacccaauauauaaga

SEQ ID NO: 2108870 - RNA, 19 nt, Artificial Sequence
  Description of Artificial Sequence: Synthetic oligonucleotide
  Sense strand starting at position 3390 of SEQ ID NO: 1882281
cuuauauauugggucaaug

SEQ ID NO: 2108871 - RNA, 19 nt, Artificial Sequence
  Description of Artificial Sequence: Synthetic oligonucleotide
  Antisense strand to SEQ ID NO: 2108870
cauugacccaauauauaag

SEQ ID NO: 2108872 - RNA, 19 nt, Artificial Sequence
  Description of Artificial Sequence: Synthetic oligonucleotide
  Sense strand starting at position 3392 of SEQ ID NO: 1882281
uauauauugggucaauguc

SEQ ID NO: 2108873 - RNA, 19 nt, Artificial Sequence
  Description of Artificial Sequence: Synthetic oligonucleotide
  Antisense strand to SEQ ID NO: 2108872
gacauugacccaauauaua

SEQ ID NO: 2108874 - RNA, 19 nt, Artificial Sequence
  Description of Artificial Sequence: Synthetic oligonucleotide
  Sense strand starting at position 3424 of SEQ ID NO: 1882281
agaaucuauguuuaggcua

SEQ ID NO: 2108875 - RNA, 19 nt, Artificial Sequence
  Description of Artificial Sequence: Synthetic oligonucleotide
  Antisense strand to SEQ ID NO: 2108874
uagccuaaacauagauucu

SEQ ID NO: 2108876 - RNA, 19 nt, Artificial Sequence
  Description of Artificial Sequence: Synthetic oligonucleotide
  Sense strand starting at position 3426 of SEQ ID NO: 1882281
aaucuauguuuaggcuaga

SEQ ID NO: 2108877 - RNA, 19 nt, Artificial Sequence
  Description of Artificial Sequence: Synthetic oligonucleotide
  Antisense strand to SEQ ID NO: 2108876
ucuagccuaaacauagauu

SEQ ID NO: 2108878 - RNA, 19 nt, Artificial Sequence
  Description of Artificial Sequence: Synthetic oligonucleotide
  Sense strand starting at position 3429 of SEQ ID NO: 1882281
cuauguuuaggcuagagca

SEQ ID NO: 2108879 - RNA, 19 nt, Artificial Sequence
  Description of Artificial Sequence: Synthetic oligonucleotide
  Antisense strand to SEQ ID NO: 2108878
ugcucuagccuaaacauag

SEQ ID NO: 2108880 - RNA, 19 nt, Artificial Sequence
  Description of Artificial Sequence: Synthetic oligonucleotide
  Sense strand starting at position 3431 of SEQ ID NO: 1882281
auguuuaggcuagagcaaa

SEQ ID NO: 2108881 - RNA, 19 nt, Artificial Sequence
  Description of Artificial Sequence: Synthetic oligonucleotide
  Antisense strand to SEQ ID NO: 2108880
uuugcucuagccuaaacau

SEQ ID NO: 2108882 - RNA, 19 nt, Artificial Sequence
  Description of Artificial Sequence: Synthetic oligonucleotide
  Sense strand starting at position 3451 of SEQ ID NO: 1882281
cagguagugagguauggau

SEQ ID NO: 2108883 - RNA, 19 nt, Artificial Sequence
  Description of Artificial Sequence: Synthetic oligonucleotide
  Antisense strand to SEQ ID NO: 2108882
auccauaccucacuaccug

SEQ ID NO: 2108884 - RNA, 19 nt, Artificial Sequence
  Description of Artificial Sequence: Synthetic oligonucleotide
  Sense strand starting at position 3491 of SEQ ID NO: 1882281
aacagacguucucagaaau

SEQ ID NO: 2108885 - RNA, 19 nt, Artificial Sequence
  Description of Artificial Sequence: Synthetic oligonucleotide
  Antisense strand to SEQ ID NO: 2108884
auuucugagaacgucuguu

SEQ ID NO: 2108886 - RNA, 19 nt, Artificial Sequence
  Description of Artificial Sequence: Synthetic oligonucleotide
  Sense strand starting at position 3667 of SEQ ID NO: 1882281
accugcuacuugucaggaa

SEQ ID NO: 2108887 - RNA, 19 nt, Artificial Sequence
  Description of Artificial Sequence: Synthetic oligonucleotide
  Antisense strand to SEQ ID NO: 2108886
uuccugacaaguagcaggu

SEQ ID NO: 2108888 - RNA, 19 nt, Artificial Sequence
  Description of Artificial Sequence: Synthetic oligonucleotide
  Sense strand starting at position 3719 of SEQ ID NO: 1882281
aagcaaagaucguugccuu

SEQ ID NO: 2108889 - RNA, 19 nt, Artificial Sequence
  Description of Artificial Sequence: Synthetic oligonucleotide
  Antisense strand to SEQ ID NO: 2108888
aaggcaacgaucuuugcuu

SEQ ID NO: 2108890 - RNA, 19 nt, Artificial Sequence
  Description of Artificial Sequence: Synthetic oligonucleotide
  Sense strand starting at position 3722 of SEQ ID NO: 1882281
caaagaucguugccuucuu

SEQ ID NO: 2108891 - RNA, 19 nt, Artificial Sequence
  Description of Artificial Sequence: Synthetic oligonucleotide
  Antisense strand to SEQ ID NO: 2108890
aagaaggcaacgaucuuug

SEQ ID NO: 2108892 - RNA, 19 nt, Artificial Sequence
  Description of Artificial Sequence: Synthetic oligonucleotide
  Sense strand starting at position 3753 of SEQ ID NO: 1882281
uuuaaucaguguuaccuuu

SEQ ID NO: 2108893 - RNA, 19 nt, Artificial Sequence
  Description of Artificial Sequence: Synthetic oligonucleotide
  Antisense strand to SEQ ID NO: 2108892
aaagguaacacugauuaaa

SEQ ID NO: 2108894 - RNA, 19 nt, Artificial Sequence
  Description of Artificial Sequence: Synthetic oligonucleotide
  Sense strand starting at position 3760 of SEQ ID NO: 1882281
aguguuaccuuucccucaa

SEQ ID NO: 2108895 - RNA, 19 nt, Artificial Sequence
  Description of Artificial Sequence: Synthetic oligonucleotide
  Antisense strand to SEQ ID NO: 2108894
uugagggaaagguaacacu

SEQ ID NO: 2108896 - RNA, 19 nt, Artificial Sequence
  Description of Artificial Sequence: Synthetic oligonucleotide
  Sense strand starting at position 3761 of SEQ ID NO: 1882281
guguuaccuuucccucaaa

SEQ ID NO: 2108897 - RNA, 19 nt, Artificial Sequence
  Description of Artificial Sequence: Synthetic oligonucleotide
  Antisense strand to SEQ ID NO: 2108896
uuugagggaaagguaacac

SEQ ID NO: 2108898 - RNA, 19 nt, Artificial Sequence
  Description of Artificial Sequence: Synthetic oligonucleotide
  Sense strand starting at position 3798 of SEQ ID NO: 1882281
agaggaguuugcugaggac

SEQ ID NO: 2108899 - RNA, 19 nt, Artificial Sequence
  Description of Artificial Sequence: Synthetic oligonucleotide
  Antisense strand to SEQ ID NO: 2108898
guccucagcaaacuccucu

SEQ ID NO: 2108900 - RNA, 19 nt, Artificial Sequence
  Description of Artificial Sequence: Synthetic oligonucleotide
  Sense strand starting at position 3801 of SEQ ID NO: 1882281
ggaguuugcugaggacaaa

SEQ ID NO: 2108901 - RNA, 19 nt, Artificial Sequence
  Description of Artificial Sequence: Synthetic oligonucleotide
  Antisense strand to SEQ ID NO: 2108900
uuuguccucagcaaacucc

SEQ ID NO: 2108902 - RNA, 19 nt, Artificial Sequence
  Description of Artificial Sequence: Synthetic oligonucleotide
  Sense strand starting at position 3932 of SEQ ID NO: 1882281
aacaacagucguuguguga

SEQ ID NO: 2108903 - RNA, 19 nt, Artificial Sequence
  Description of Artificial Sequence: Synthetic oligonucleotide
  Antisense strand to SEQ ID NO: 2108902
ucacacaacgacuguuguu

SEQ ID NO: 2108904 - RNA, 19 nt, Artificial Sequence
  Description of Artificial Sequence: Synthetic oligonucleotide
  Sense strand starting at position 3935 of SEQ ID NO: 1882281
aacagucguugugugaaac

SEQ ID NO: 2108905 - RNA, 19 nt, Artificial Sequence
  Description of Artificial Sequence: Synthetic oligonucleotide
  Antisense strand to SEQ ID NO: 2108904
guuucacacaacgacuguu

SEQ ID NO: 2108906 - RNA, 19 nt, Artificial Sequence
  Description of Artificial Sequence: Synthetic oligonucleotide
  Sense strand starting at position 3936 of SEQ ID NO: 1882281
acagucguugugugaaacu

SEQ ID NO: 2108907 - RNA, 19 nt, Artificial Sequence
  Description of Artificial Sequence: Synthetic oligonucleotide
  Antisense strand to SEQ ID NO: 2108906
aguuucacacaacgacugu

SEQ ID NO: 2108908 - RNA, 19 nt, Artificial Sequence
  Description of Artificial Sequence: Synthetic oligonucleotide
  Sense strand starting at position 3945 of SEQ ID NO: 1882281
gugugaaacucugagccuu

SEQ ID NO: 2108909 - RNA, 19 nt, Artificial Sequence
  Description of Artificial Sequence: Synthetic oligonucleotide
  Antisense strand to SEQ ID NO: 2108908
aaggcucagaguuucacac

SEQ ID NO: 2108910 - RNA, 19 nt, Artificial Sequence
  Description of Artificial Sequence: Synthetic oligonucleotide
  Sense strand starting at position 178 of SEQ ID NO: 1882282
gguggcugcgguaauguaa

SEQ ID NO: 2108911 - RNA, 19 nt, Artificial Sequence
  Description of Artificial Sequence: Synthetic oligonucleotide
  Antisense strand to SEQ ID NO: 2108910
uuacauuaccgcagccacc

SEQ ID NO: 2108912 - RNA, 19 nt, Artificial Sequence
  Description of Artificial Sequence: Synthetic oligonucleotide
  Sense strand starting at position 203 of SEQ ID NO: 1882282
ugcauucucaagcggauuu

SEQ ID NO: 2108913 - RNA, 19 nt, Artificial Sequence
  Description of Artificial Sequence: Synthetic oligonucleotide
  Antisense strand to SEQ ID NO: 2108912
aaauccgcuugagaaugca

SEQ ID NO: 2108914 - RNA, 19 nt, Artificial Sequence
  Description of Artificial Sequence: Synthetic oligonucleotide
  Sense strand starting at position 225 of SEQ ID NO: 1882282
cccguauugcacuuugcau

SEQ ID NO: 2108915 - RNA, 19 nt, Artificial Sequence
  Description of Artificial Sequence: Synthetic oligonucleotide
  Antisense strand to SEQ ID NO: 2108914
augcaaagugcaauacggg

SEQ ID NO: 2108916 - RNA, 19 nt, Artificial Sequence
  Description of Artificial Sequence: Synthetic oligonucleotide
  Sense strand starting at position 401 of SEQ ID NO: 1882282
ucugguuugcaacauaaac

SEQ ID NO: 2108917 - RNA, 19 nt, Artificial Sequence
  Description of Artificial Sequence: Synthetic oligonucleotide
  Antisense strand to SEQ ID NO: 2108916
guuuauguugcaaaccaga

SEQ ID NO: 2108918 - RNA, 19 nt, Artificial Sequence
  Description of Artificial Sequence: Synthetic oligonucleotide
  Sense strand starting at position 419 of SEQ ID NO: 1882282
ccaguugggaaucauguua

SEQ ID NO: 2108919 - RNA, 19 nt, Artificial Sequence
  Description of Artificial Sequence: Synthetic oligonucleotide
  Antisense strand to SEQ ID NO: 2108918
uaacaugauucccaacugg

SEQ ID NO: 2108920 - RNA, 19 nt, Artificial Sequence
  Description of Artificial Sequence: Synthetic oligonucleotide
  Sense strand starting at position 550 of SEQ ID NO: 1882282
guguguacgugaaugcaua

SEQ ID NO: 2108921 - RNA, 19 nt, Artificial Sequence
  Description of Artificial Sequence: Synthetic oligonucleotide
  Antisense strand to SEQ ID NO: 2108920
uaugcauucacguacacac

SEQ ID NO: 2108922 - RNA, 19 nt, Artificial Sequence
  Description of Artificial Sequence: Synthetic oligonucleotide
  Sense strand starting at position 608 of SEQ ID NO: 1882282
uucugaaauugggugauua

SEQ ID NO: 2108923 - RNA, 19 nt, Artificial Sequence
  Description of Artificial Sequence: Synthetic oligonucleotide
  Antisense strand to SEQ ID NO: 2108922
uaaucacccaauuucagaa

SEQ ID NO: 2108924 - RNA, 19 nt, Artificial Sequence
  Description of Artificial Sequence: Synthetic oligonucleotide
  Sense strand starting at position 609 of SEQ ID NO: 1882282
ucugaaauugggugauuau

SEQ ID NO: 2108925 - RNA, 19 nt, Artificial Sequence
  Description of Artificial Sequence: Synthetic oligonucleotide
  Antisense strand to SEQ ID NO: 2108924
auaaucacccaauuucaga

SEQ ID NO: 2108926 - RNA, 19 nt, Artificial Sequence
  Description of Artificial Sequence: Synthetic oligonucleotide
  Sense strand starting at position 616 of SEQ ID NO: 1882282
uugggugauuauuccuaga

SEQ ID NO: 2108927 - RNA, 19 nt, Artificial Sequence
  Description of Artificial Sequence: Synthetic oligonucleotide
  Antisense strand to SEQ ID NO: 2108926
ucuaggaauaaucacccaa

SEQ ID NO: 2108928 - RNA, 19 nt, Artificial Sequence
  Description of Artificial Sequence: Synthetic oligonucleotide
  Sense strand starting at position 618 of SEQ ID NO: 1882282
gggugauuauuccuagauu

SEQ ID NO: 2108929 - RNA, 19 nt, Artificial Sequence
  Description of Artificial Sequence: Synthetic oligonucleotide
  Antisense strand to SEQ ID NO: 2108928
aaucuaggaauaaucaccc

SEQ ID NO: 2108930 - RNA, 19 nt, Artificial Sequence
  Description of Artificial Sequence: Synthetic oligonucleotide
  Sense strand starting at position 784 of SEQ ID NO: 1882282
aaauaugcacucgagugau

SEQ ID NO: 2108931 - RNA, 19 nt, Artificial Sequence
  Description of Artificial Sequence: Synthetic oligonucleotide
  Antisense strand to SEQ ID NO: 2108930
aucacucgagugcauauuu

SEQ ID NO: 2108932 - RNA, 19 nt, Artificial Sequence
  Description of Artificial Sequence: Synthetic oligonucleotide
  Sense strand starting at position 873 of SEQ ID NO: 1882282
uuaggaauaaugcaacgua

SEQ ID NO: 2108933 - RNA, 19 nt, Artificial Sequence
  Description of Artificial Sequence: Synthetic oligonucleotide
  Antisense strand to SEQ ID NO: 2108932
uacguugcauuauuccuaa

SEQ ID NO: 2108934 - RNA, 19 nt, Artificial Sequence
  Description of Artificial Sequence: Synthetic oligonucleotide
  Sense strand starting at position 876 of SEQ ID NO: 1882282
ggaauaaugcaacguaaga

SEQ ID NO: 2108935 - RNA, 19 nt, Artificial Sequence
  Description of Artificial Sequence: Synthetic oligonucleotide
  Antisense strand to SEQ ID NO: 2108934
ucuuacguugcauuauucc

SEQ ID NO: 2108936 - RNA, 19 nt, Artificial Sequence
  Description of Artificial Sequence: Synthetic oligonucleotide
  Sense strand starting at position 914 of SEQ ID NO: 1882282
gguagacaaauugguguua

SEQ ID NO: 2108937 - RNA, 19 nt, Artificial Sequence
  Description of Artificial Sequence: Synthetic oligonucleotide
  Antisense strand to SEQ ID NO: 2108936
uaacaccaauuugucuacc

SEQ ID NO: 2108938 - RNA, 19 nt, Artificial Sequence
  Description of Artificial Sequence: Synthetic oligonucleotide
  Sense strand starting at position 915 of SEQ ID NO: 1882282
guagacaaauugguguuaa

SEQ ID NO: 2108939 - RNA, 19 nt, Artificial Sequence
  Description of Artificial Sequence: Synthetic oligonucleotide
  Antisense strand to SEQ ID NO: 2108938
uuaacaccaauuugucuac

SEQ ID NO: 2108940 - RNA, 19 nt, Artificial Sequence
  Description of Artificial Sequence: Synthetic oligonucleotide
  Sense strand starting at position 963 of SEQ ID NO: 1882282
uguaaugagagaugaccuu

SEQ ID NO: 2108941 - RNA, 19 nt, Artificial Sequence
  Description of Artificial Sequence: Synthetic oligonucleotide
  Antisense strand to SEQ ID NO: 2108940
aaggucaucucucauuaca

SEQ ID NO: 2108942 - RNA, 19 nt, Artificial Sequence
  Description of Artificial Sequence: Synthetic oligonucleotide
  Sense strand starting at position 1039 of SEQ ID NO: 1882282
gagagcugauccuuaucua

SEQ ID NO: 2108943 - RNA, 19 nt, Artificial Sequence
  Description of Artificial Sequence: Synthetic oligonucleotide
  Antisense strand to SEQ ID NO: 2108942
uagauaaggaucagcucuc

SEQ ID NO: 2108944 - RNA, 19 nt, Artificial Sequence
  Description of Artificial Sequence: Synthetic oligonucleotide
  Sense strand starting at position 1040 of SEQ ID NO: 1882282
agagcugauccuuaucuag

SEQ ID NO: 2108945 - RNA, 19 nt, Artificial Sequence
  Description of Artificial Sequence: Synthetic oligonucleotide
  Antisense strand to SEQ ID NO: 2108944
cuagauaaggaucagcucu

SEQ ID NO: 2108946 - RNA, 19 nt, Artificial Sequence
  Description of Artificial Sequence: Synthetic oligonucleotide
  Sense strand starting at position 1042 of SEQ ID NO: 1882282
agcugauccuuaucuagac

SEQ ID NO: 2108947 - RNA, 19 nt, Artificial Sequence
  Description of Artificial Sequence: Synthetic oligonucleotide
  Antisense strand to SEQ ID NO: 2108946
gucuagauaaggaucagcu

SEQ ID NO: 2108948 - RNA, 19 nt, Artificial Sequence
  Description of Artificial Sequence: Synthetic oligonucleotide
  Sense strand starting at position 1043 of SEQ ID NO: 1882282
gcugauccuuaucuagaca

SEQ ID NO: 2108949 - RNA, 19 nt, Artificial Sequence
  Description of Artificial Sequence: Synthetic oligonucleotide
  Antisense strand to SEQ ID NO: 2108948
ugucuagauaaggaucagc

SEQ ID NO: 2108950 - RNA, 19 nt, Artificial Sequence
  Description of Artificial Sequence: Synthetic oligonucleotide
  Sense strand starting at position 1046 of SEQ ID NO: 1882282
gauccuuaucuagacacgu

SEQ ID NO: 2108951 - RNA, 19 nt, Artificial Sequence
  Description of Artificial Sequence: Synthetic oligonucleotide
  Antisense strand to SEQ ID NO: 2108950
acgugucuagauaaggauc

SEQ ID NO: 2108952 - RNA, 19 nt, Artificial Sequence
  Description of Artificial Sequence: Synthetic oligonucleotide
  Sense strand starting at position 1112 of SEQ ID NO: 1882282
uuagaaagcuguuccauaa

SEQ ID NO: 2108953 - RNA, 19 nt, Artificial Sequence
  Description of Artificial Sequence: Synthetic oligonucleotide
  Antisense strand to SEQ ID NO: 2108952
uuauggaacagcuuucuaa

SEQ ID NO: 2108954 - RNA, 19 nt, Artificial Sequence
  Description of Artificial Sequence: Synthetic oligonucleotide
  Sense strand starting at position 2707 of SEQ ID NO: 1882282
gaagacuugucauugauaa

SEQ ID NO: 2108955 - RNA, 19 nt, Artificial Sequence
  Description of Artificial Sequence: Synthetic oligonucleotide
  Antisense strand to SEQ ID NO: 2108954
uuaucaaugacaagucuuc

SEQ ID NO: 2108956 - RNA, 19 nt, Artificial Sequence
  Description of Artificial Sequence: Synthetic oligonucleotide
  Sense strand starting at position 2742 of SEQ ID NO: 1882282
acaggacuccuuuaagucu

SEQ ID NO: 2108957 - RNA, 19 nt, Artificial Sequence
  Description of Artificial Sequence: Synthetic oligonucleotide
  Antisense strand to SEQ ID NO: 2108956
agacuuaaaggaguccugu

SEQ ID NO: 2108958 - RNA, 19 nt, Artificial Sequence
  Description of Artificial Sequence: Synthetic oligonucleotide
  Sense strand starting at position 2778 of SEQ ID NO: 1882282
aguucuucugagcagggaa

SEQ ID NO: 2108959 - RNA, 19 nt, Artificial Sequence
  Description of Artificial Sequence: Synthetic oligonucleotide
  Antisense strand to SEQ ID NO: 2108958
uucccugcucagaagaacu

SEQ ID NO: 2108960 - RNA, 19 nt, Artificial Sequence
  Description of Artificial Sequence: Synthetic oligonucleotide
  Sense strand starting at position 2875 of SEQ ID NO: 1882282
agaucaugugcauggaaga

SEQ ID NO: 2108961 - RNA, 19 nt, Artificial Sequence
  Description of Artificial Sequence: Synthetic oligonucleotide
  Antisense strand to SEQ ID NO: 2108960
ucuuccaugcacaugaucu

SEQ ID NO: 2108962 - RNA, 19 nt, Artificial Sequence
  Description of Artificial Sequence: Synthetic oligonucleotide
  Sense strand starting at position 2876 of SEQ ID NO: 1882282
gaucaugugcauggaagau

SEQ ID NO: 2108963 - RNA, 19 nt, Artificial Sequence
  Description of Artificial Sequence: Synthetic oligonucleotide
  Antisense strand to SEQ ID NO: 2108962
aucuuccaugcacaugauc

SEQ ID NO: 2108964 - RNA, 19 nt, Artificial Sequence
  Description of Artificial Sequence: Synthetic oligonucleotide
  Sense strand starting at position 2932 of SEQ ID NO: 1882282
auuacuugagcugguggaa

SEQ ID NO: 2108965 - RNA, 19 nt, Artificial Sequence
  Description of Artificial Sequence: Synthetic oligonucleotide
  Antisense strand to SEQ ID NO: 2108964
uuccaccagcucaaguaau

SEQ ID NO: 2108966 - RNA, 19 nt, Artificial Sequence
  Description of Artificial Sequence: Synthetic oligonucleotide
  Sense strand starting at position 2992 of SEQ ID NO: 1882282
ccugcugaguugccauuua

SEQ ID NO: 2108967 - RNA, 19 nt, Artificial Sequence
  Description of Artificial Sequence: Synthetic oligonucleotide
  Antisense strand to SEQ ID NO: 2108966
uaaauggcaacucagcagg

SEQ ID NO: 2108968 - RNA, 19 nt, Artificial Sequence
  Description of Artificial Sequence: Synthetic oligonucleotide
  Sense strand starting at position 3000 of SEQ ID NO: 1882282
guugccauuuaguuuauua

SEQ ID NO: 2108969 - RNA, 19 nt, Artificial Sequence
  Description of Artificial Sequence: Synthetic oligonucleotide
  Antisense strand to SEQ ID NO: 2108968
uaauaaacuaaauggcaac

SEQ ID NO: 2108970 - RNA, 19 nt, Artificial Sequence
  Description of Artificial Sequence: Synthetic oligonucleotide
  Sense strand starting at position 3041 of SEQ ID NO: 1882282
gugcgauugucgauaguag

SEQ ID NO: 2108971 - RNA, 19 nt, Artificial Sequence
  Description of Artificial Sequence: Synthetic oligonucleotide
  Antisense strand to SEQ ID NO: 2108970
cuacuaucgacaaucgcac

SEQ ID NO: 2108972 - RNA, 19 nt, Artificial Sequence
  Description of Artificial Sequence: Synthetic oligonucleotide
  Sense strand starting at position 3052 of SEQ ID NO: 1882282
gauaguaggcuuugggaga

SEQ ID NO: 2108973 - RNA, 19 nt, Artificial Sequence
  Description of Artificial Sequence: Synthetic oligonucleotide
  Antisense strand to SEQ ID NO: 2108972
ucucccaaagccuacuauc

SEQ ID NO: 2108974 - RNA, 19 nt, Artificial Sequence
  Description of Artificial Sequence: Synthetic oligonucleotide
  Sense strand starting at position 3205 of SEQ ID NO: 1882282
cccaaucgacuuggacaau

SEQ ID NO: 2108975 - RNA, 19 nt, Artificial Sequence
  Description of Artificial Sequence: Synthetic oligonucleotide
  Antisense strand to SEQ ID NO: 2108974
auuguccaagucgauuggg

SEQ ID NO: 2108976 - RNA, 19 nt, Artificial Sequence
  Description of Artificial Sequence: Synthetic oligonucleotide
  Sense strand starting at position 3284 of SEQ ID NO: 1882282
ugguuauuccuagggagaa

SEQ ID NO: 2108977 - RNA, 19 nt, Artificial Sequence
  Description of Artificial Sequence: Synthetic oligonucleotide
  Antisense strand to SEQ ID NO: 2108976
uucucccuaggaauaacca

SEQ ID NO: 2108978 - RNA, 19 nt, Artificial Sequence
  Description of Artificial Sequence: Synthetic oligonucleotide
  Sense strand starting at position 3340 of SEQ ID NO: 1882282
cagguaucaguuugaaaua

SEQ ID NO: 2108979 - RNA, 19 nt, Artificial Sequence
  Description of Artificial Sequence: Synthetic oligonucleotide
  Antisense strand to SEQ ID NO: 2108978
uauuucaaacugauaccug

SEQ ID NO: 2108980 - RNA, 19 nt, Artificial Sequence
  Description of Artificial Sequence: Synthetic oligonucleotide
  Sense strand starting at position 3367 of SEQ ID NO: 1882282
cugccuuaugaagauagua

SEQ ID NO: 2108981 - RNA, 19 nt, Artificial Sequence
  Description of Artificial Sequence: Synthetic oligonucleotide
  Antisense strand to SEQ ID NO: 2108980
uacuaucuucauaaggcag

SEQ ID NO: 2108982 - RNA, 19 nt, Artificial Sequence
  Description of Artificial Sequence: Synthetic oligonucleotide
  Sense strand starting at position 3375 of SEQ ID NO: 1882282
ugaagauaguaauuccugu

SEQ ID NO: 2108983 - RNA, 19 nt, Artificial Sequence
  Description of Artificial Sequence: Synthetic oligonucleotide
  Antisense strand to SEQ ID NO: 2108982
acaggaauuacuaucuuca

SEQ ID NO: 2108984 - RNA, 19 nt, Artificial Sequence
  Description of Artificial Sequence: Synthetic oligonucleotide
  Sense strand starting at position 3381 of SEQ ID NO: 1882282
uaguaauuccuguaguuag

SEQ ID NO: 2108985 - RNA, 19 nt, Artificial Sequence
  Description of Artificial Sequence: Synthetic oligonucleotide
  Antisense strand to SEQ ID NO: 2108984
cuaacuacaggaauuacua

SEQ ID NO: 2108986 - RNA, 19 nt, Artificial Sequence
  Description of Artificial Sequence: Synthetic oligonucleotide
  Sense strand starting at position 3603 of SEQ ID NO: 1882282
aauauacagugguuggauu

SEQ ID NO: 2108987 - RNA, 19 nt, Artificial Sequence
  Description of Artificial Sequence: Synthetic oligonucleotide
  Antisense strand to SEQ ID NO: 2108986
aauccaaccacuguauauu

SEQ ID NO: 2108988 - RNA, 19 nt, Artificial Sequence
  Description of Artificial Sequence: Synthetic oligonucleotide
  Sense strand starting at position 3903 of SEQ ID NO: 1882282
aaauuaugucgacaaguaa

SEQ ID NO: 2108989 - RNA, 19 nt, Artificial Sequence
  Description of Artificial Sequence: Synthetic oligonucleotide
  Antisense strand to SEQ ID NO: 2108988
uuacuugucgacauaauuu

SEQ ID NO: 2108990 - RNA, 19 nt, Artificial Sequence
  Description of Artificial Sequence: Synthetic oligonucleotide
  Sense strand starting at position 207 of SEQ ID NO: 1882283
cauagauuauaguuggcaa

SEQ ID NO: 2108991 - RNA, 19 nt, Artificial Sequence
  Description of Artificial Sequence: Synthetic oligonucleotide
  Antisense strand to SEQ ID NO: 2108990
uugccaacuauaaucuaug

SEQ ID NO: 2108992 - RNA, 19 nt, Artificial Sequence
  Description of Artificial Sequence: Synthetic oligonucleotide
  Sense strand starting at position 209 of SEQ ID NO: 1882283
uagauuauaguuggcaaau

SEQ ID NO: 2108993 - RNA, 19 nt, Artificial Sequence
  Description of Artificial Sequence: Synthetic oligonucleotide
  Antisense strand to SEQ ID NO: 2108992
auuugccaacuauaaucua

SEQ ID NO: 2108994 - RNA, 19 nt, Artificial Sequence
  Description of Artificial Sequence: Synthetic oligonucleotide
  Sense strand starting at position 210 of SEQ ID NO: 1882283
agauuauaguuggcaaauu

SEQ ID NO: 2108995 - RNA, 19 nt, Artificial Sequence
  Description of Artificial Sequence: Synthetic oligonucleotide
  Antisense strand to SEQ ID NO: 2108994
aauuugccaacuauaaucu

SEQ ID NO: 2108996 - RNA, 19 nt, Artificial Sequence
  Description of Artificial Sequence: Synthetic oligonucleotide
  Sense strand starting at position 406 of SEQ ID NO: 1882283
ccucaaagaugggaagaau

SEQ ID NO: 2108997 - RNA, 19 nt, Artificial Sequence
  Description of Artificial Sequence: Synthetic oligonucleotide
  Antisense strand to SEQ ID NO: 2108996
auucuucccaucuuugagg

SEQ ID NO: 2108998 - RNA, 19 nt, Artificial Sequence
  Description of Artificial Sequence: Synthetic oligonucleotide
  Sense strand starting at position 473 of SEQ ID NO: 1882283
ggaugaagaucauauuaau

SEQ ID NO: 2108999 - RNA, 19 nt, Artificial Sequence
  Description of Artificial Sequence: Synthetic oligonucleotide
  Antisense strand to SEQ ID NO: 2108998
auuaauaugaucuucaucc

SEQ ID NO: 2109000 - RNA, 19 nt, Artificial Sequence
  Description of Artificial Sequence: Synthetic oligonucleotide
  Sense strand starting at position 511 of SEQ ID NO: 1882283
ccuaaacugucagugggaa

SEQ ID NO: 2109001 - RNA, 19 nt, Artificial Sequence
  Description of Artificial Sequence: Synthetic oligonucleotide
  Antisense strand to SEQ ID NO: 2109000
uucccacugacaguuuagg

SEQ ID NO: 2109002 - RNA, 19 nt, Artificial Sequence
  Description of Artificial Sequence: Synthetic oligonucleotide
  Sense strand starting at position 512 of SEQ ID NO: 1882283
cuaaacugucagugggaaa

SEQ ID NO: 2109003 - RNA, 19 nt, Artificial Sequence
  Description of Artificial Sequence: Synthetic oligonucleotide
  Antisense strand to SEQ ID NO: 2109002
uuucccacugacaguuuag

SEQ ID NO: 2109004 - RNA, 19 nt, Artificial Sequence
  Description of Artificial Sequence: Synthetic oligonucleotide
  Sense strand starting at position 796 of SEQ ID NO: 1882283
caaugugaagcagauuguu

SEQ ID NO: 2109005 - RNA, 19 nt, Artificial Sequence
  Description of Artificial Sequence: Synthetic oligonucleotide
  Antisense strand to SEQ ID NO: 2109004
aacaaucugcuucacauug

SEQ ID NO: 2109006 - RNA, 19 nt, Artificial Sequence
  Description of Artificial Sequence: Synthetic oligonucleotide
  Sense strand starting at position 1516 of SEQ ID NO: 1882283
accaaauauguucgacugu

SEQ ID NO: 2109007 - RNA, 19 nt, Artificial Sequence
  Description of Artificial Sequence: Synthetic oligonucleotide
  Antisense strand to SEQ ID NO: 2109006
acagucgaacauauuuggu

SEQ ID NO: 2109008 - RNA, 19 nt, Artificial Sequence
  Description of Artificial Sequence: Synthetic oligonucleotide
  Sense strand starting at position 1714 of SEQ ID NO: 1882283
uuguccaacuguucuauuu

SEQ ID NO: 2109009 - RNA, 19 nt, Artificial Sequence
  Description of Artificial Sequence: Synthetic oligonucleotide
  Antisense strand to SEQ ID NO: 2109008
aaauagaacaguuggacaa

SEQ ID NO: 2109010 - RNA, 19 nt, Artificial Sequence
  Description of Artificial Sequence: Synthetic oligonucleotide
  Sense strand starting at position 1723 of SEQ ID NO: 1882283
uguucuauuuauguaagca

SEQ ID NO: 2109011 - RNA, 19 nt, Artificial Sequence
  Description of Artificial Sequence: Synthetic oligonucleotide
  Antisense strand to SEQ ID NO: 2109010
ugcuuacauaaauagaaca

SEQ ID NO: 2109012 - RNA, 19 nt, Artificial Sequence
  Description of Artificial Sequence: Synthetic oligonucleotide
  Sense strand starting at position 1751 of SEQ ID NO: 1882283
uuuggagacuucuuaaccu

SEQ ID NO: 2109013 - RNA, 19 nt, Artificial Sequence
  Description of Artificial Sequence: Synthetic oligonucleotide
  Antisense strand to SEQ ID NO: 2109012
agguuaagaagucuccaaa

SEQ ID NO: 2109014 - RNA, 19 nt, Artificial Sequence
  Description of Artificial Sequence: Synthetic oligonucleotide
  Sense strand starting at position 1775 of SEQ ID NO: 1882283
auguucuuaucagugaaau

SEQ ID NO: 2109015 - RNA, 19 nt, Artificial Sequence
  Description of Artificial Sequence: Synthetic oligonucleotide
  Antisense strand to SEQ ID NO: 2109014
auuucacugauaagaacau

SEQ ID NO: 2109016 - RNA, 19 nt, Artificial Sequence
  Description of Artificial Sequence: Synthetic oligonucleotide
  Sense strand starting at position 1776 of SEQ ID NO: 1882283
uguucuuaucagugaaauu

SEQ ID NO: 2109017 - RNA, 19 nt, Artificial Sequence
  Description of Artificial Sequence: Synthetic oligonucleotide
  Antisense strand to SEQ ID NO: 2109016
aauuucacugauaagaaca

SEQ ID NO: 2109018 - RNA, 19 nt, Artificial Sequence
  Description of Artificial Sequence: Synthetic oligonucleotide
  Sense strand starting at position 2115 of SEQ ID NO: 1882283
gguggcagcagauauguua

SEQ ID NO: 2109019 - RNA, 19 nt, Artificial Sequence
  Description of Artificial Sequence: Synthetic oligonucleotide
  Antisense strand to SEQ ID NO: 2109018
uaacauaucugcugccacc

SEQ ID NO: 2109020 - RNA, 19 nt, Artificial Sequence
  Description of Artificial Sequence: Synthetic oligonucleotide
  Sense strand starting at position 2227 of SEQ ID NO: 1882283
gcauccagauuauugucau

SEQ ID NO: 2109021 - RNA, 19 nt, Artificial Sequence
  Description of Artificial Sequence: Synthetic oligonucleotide
  Antisense strand to SEQ ID NO: 2109020
augacaauaaucuggaugc

SEQ ID NO: 2109022 - RNA, 19 nt, Artificial Sequence
  Description of Artificial Sequence: Synthetic oligonucleotide
  Sense strand starting at position 2262 of SEQ ID NO: 1882283
aagaauagguguccuuuaa

SEQ ID NO: 2109023 - RNA, 19 nt, Artificial Sequence
  Description of Artificial Sequence: Synthetic oligonucleotide
  Antisense strand to SEQ ID NO: 2109022
uuaaaggacaccuauucuu

SEQ ID NO: 2109024 - RNA, 19 nt, Artificial Sequence
  Description of Artificial Sequence: Synthetic oligonucleotide
  Sense strand starting at position 2266 of SEQ ID NO: 1882283
auagguguccuuuaauuag

SEQ ID NO: 2109025 - RNA, 19 nt, Artificial Sequence
  Description of Artificial Sequence: Synthetic oligonucleotide
  Antisense strand to SEQ ID NO: 2109024
cuaauuaaaggacaccuau

SEQ ID NO: 2109026 - RNA, 19 nt, Artificial Sequence
  Description of Artificial Sequence: Synthetic oligonucleotide
  Sense strand starting at position 2269 of SEQ ID NO: 1882283
gguguccuuuaauuagaga

SEQ ID NO: 2109027 - RNA, 19 nt, Artificial Sequence
  Description of Artificial Sequence: Synthetic oligonucleotide
  Antisense strand to SEQ ID NO: 2109026
ucucuaauuaaaggacacc

SEQ ID NO: 2109028 - RNA, 19 nt, Artificial Sequence
  Description of Artificial Sequence: Synthetic oligonucleotide
  Sense strand starting at position 2308 of SEQ ID NO: 1882283
auuucuaaauuguggaaga

SEQ ID NO: 2109029 - RNA, 19 nt, Artificial Sequence
  Description of Artificial Sequence: Synthetic oligonucleotide
  Antisense strand to SEQ ID NO: 2109028
ucuuccacaauuuagaaau

SEQ ID NO: 2109030 - RNA, 19 nt, Artificial Sequence
  Description of Artificial Sequence: Synthetic oligonucleotide
  Sense strand starting at position 2524 of SEQ ID NO: 1882283
ccaguaauggcucauguga

SEQ ID NO: 2109031 - RNA, 19 nt, Artificial Sequence
  Description of Artificial Sequence: Synthetic oligonucleotide
  Antisense strand to SEQ ID NO: 2109030
ucacaugagccauuacugg

SEQ ID NO: 2109032 - RNA, 19 nt, Artificial Sequence
  Description of Artificial Sequence: Synthetic oligonucleotide
  Sense strand starting at position 2637 of SEQ ID NO: 1882283
cccaucucagcgcaaauau

SEQ ID NO: 2109033 - RNA, 19 nt, Artificial Sequence
  Description of Artificial Sequence: Synthetic oligonucleotide
  Antisense strand to SEQ ID NO: 2109032
auauuugcgcugagauggg

SEQ ID NO: 2109034 - RNA, 19 nt, Artificial Sequence
  Description of Artificial Sequence: Synthetic oligonucleotide
  Sense strand starting at position 2726 of SEQ ID NO: 1882283
uggagauaucuuugacuuc

SEQ ID NO: 2109035 - RNA, 19 nt, Artificial Sequence
  Description of Artificial Sequence: Synthetic oligonucleotide
  Antisense strand to SEQ ID NO: 2109034
gaagucaaagauaucucca

SEQ ID NO: 2109036 - RNA, 19 nt, Artificial Sequence
  Description of Artificial Sequence: Synthetic oligonucleotide
  Sense strand starting at position 2759 of SEQ ID NO: 1882283
ugcgaucaauugucagaac

SEQ ID NO: 2109037 - RNA, 19 nt, Artificial Sequence
  Description of Artificial Sequence: Synthetic oligonucleotide
  Antisense strand to SEQ ID NO: 2109036
guucugacaauugaucgca

SEQ ID NO: 2109038 - RNA, 19 nt, Artificial Sequence
  Description of Artificial Sequence: Synthetic oligonucleotide
  Sense strand starting at position 2779 of SEQ ID NO: 1882283
ucucgacucuaccuugaaa

SEQ ID NO: 2109039 - RNA, 19 nt, Artificial Sequence
  Description of Artificial Sequence: Synthetic oligonucleotide
  Antisense strand to SEQ ID NO: 2109038
uuucaagguagagucgaga

SEQ ID NO: 2109040 - RNA, 19 nt, Artificial Sequence
  Description of Artificial Sequence: Synthetic oligonucleotide
  Sense strand starting at position 2853 of SEQ ID NO: 1882283
agaggauugcuauagccca

SEQ ID NO: 2109041 - RNA, 19 nt, Artificial Sequence
  Description of Artificial Sequence: Synthetic oligonucleotide
  Antisense strand to SEQ ID NO: 2109040
ugggcuauagcaauccucu

SEQ ID NO: 2109042 - RNA, 19 nt, Artificial Sequence
  Description of Artificial Sequence: Synthetic oligonucleotide
  Sense strand starting at position 2990 of SEQ ID NO: 1882283
aucacaguggccuaacaua

SEQ ID NO: 2109043 - RNA, 19 nt, Artificial Sequence
  Description of Artificial Sequence: Synthetic oligonucleotide
  Antisense strand to SEQ ID NO: 2109042
uauguuaggccacugugau

SEQ ID NO: 2109044 - RNA, 19 nt, Artificial Sequence
  Description of Artificial Sequence: Synthetic oligonucleotide
  Sense strand starting at position 3002 of SEQ ID NO: 1882283
uaacauaguguuuggcaga

SEQ ID NO: 2109045 - RNA, 19 nt, Artificial Sequence
  Description of Artificial Sequence: Synthetic oligonucleotide
  Antisense strand to SEQ ID NO: 2109044
ucugccaaacacuauguua

SEQ ID NO: 2109046 - RNA, 19 nt, Artificial Sequence
  Description of Artificial Sequence: Synthetic oligonucleotide
  Sense strand starting at position 3007 of SEQ ID NO: 1882283
uaguguuuggcagacuuau

SEQ ID NO: 2109047 - RNA, 19 nt, Artificial Sequence
  Description of Artificial Sequence: Synthetic oligonucleotide
  Antisense strand to SEQ ID NO: 2109046
auaagucugccaaacacua

SEQ ID NO: 2109048 - RNA, 19 nt, Artificial Sequence
  Description of Artificial Sequence: Synthetic oligonucleotide
  Sense strand starting at position 3243 of SEQ ID NO: 1882283
guguccagugcgguucaau

SEQ ID NO: 2109049 - RNA, 19 nt, Artificial Sequence
  Description of Artificial Sequence: Synthetic oligonucleotide
  Antisense strand to SEQ ID NO: 2109048
auugaaccgcacuggacac

SEQ ID NO: 2109050 - RNA, 19 nt, Artificial Sequence
  Description of Artificial Sequence: Synthetic oligonucleotide
  Sense strand starting at position 3246 of SEQ ID NO: 1882283
uccagugcgguucaauaga

SEQ ID NO: 2109051 - RNA, 19 nt, Artificial Sequence
  Description of Artificial Sequence: Synthetic oligonucleotide
  Antisense strand to SEQ ID NO: 2109050
ucuauugaaccgcacugga

SEQ ID NO: 2109052 - RNA, 19 nt, Artificial Sequence
  Description of Artificial Sequence: Synthetic oligonucleotide
  Sense strand starting at position 3521 of SEQ ID NO: 1882283
gcauuucuguugucuaaac

SEQ ID NO: 2109053 - RNA, 19 nt, Artificial Sequence
  Description of Artificial Sequence: Synthetic oligonucleotide
  Antisense strand to SEQ ID NO: 2109052
guuuagacaacagaaaugc

SEQ ID NO: 2109054 - RNA, 19 nt, Artificial Sequence
  Description of Artificial Sequence: Synthetic oligonucleotide
  Sense strand starting at position 3595 of SEQ ID NO: 1882283
cuacgagguaccuggaaga

SEQ ID NO: 2109055 - RNA, 19 nt, Artificial Sequence
  Description of Artificial Sequence: Synthetic oligonucleotide
  Antisense strand to SEQ ID NO: 2109054
ucuuccagguaccucguag

SEQ ID NO: 2109056 - RNA, 19 nt, Artificial Sequence
  Description of Artificial Sequence: Synthetic oligonucleotide
  Sense strand starting at position 3629 of SEQ ID NO: 1882283
ugugaauuacacuaauggu

SEQ ID NO: 2109057 - RNA, 19 nt, Artificial Sequence
  Description of Artificial Sequence: Synthetic oligonucleotide
  Antisense strand to SEQ ID NO: 2109056
accauuaguguaauucaca

SEQ ID NO: 2109058 - RNA, 19 nt, Artificial Sequence
  Description of Artificial Sequence: Synthetic oligonucleotide
  Sense strand starting at position 3734 of SEQ ID NO: 1882283
gauuaugaccuccagagcu

SEQ ID NO: 2109059 - RNA, 19 nt, Artificial Sequence
  Description of Artificial Sequence: Synthetic oligonucleotide
  Antisense strand to SEQ ID NO: 2109058
agcucuggaggucauaauc

SEQ ID NO: 2109060 - RNA, 19 nt, Artificial Sequence
  Description of Artificial Sequence: Synthetic oligonucleotide
  Sense strand starting at position 3736 of SEQ ID NO: 1882283
uuaugaccuccagagcuuu

SEQ ID NO: 2109061 - RNA, 19 nt, Artificial Sequence
  Description of Artificial Sequence: Synthetic oligonucleotide
  Antisense strand to SEQ ID NO: 2109060
aaagcucuggaggucauaa

SEQ ID NO: 2109062 - RNA, 19 nt, Artificial Sequence
  Description of Artificial Sequence: Synthetic oligonucleotide
  Sense strand starting at position 3877 of SEQ ID NO: 1882283
caaaguguagaaugugaaa

SEQ ID NO: 2109063 - RNA, 19 nt, Artificial Sequence
  Description of Artificial Sequence: Synthetic oligonucleotide
  Antisense strand to SEQ ID NO: 2109062
uuucacauucuacacuuug

SEQ ID NO: 2109064 - RNA, 19 nt, Artificial Sequence
  Description of Artificial Sequence: Synthetic oligonucleotide
  Sense strand starting at position 3908 of SEQ ID NO: 1882283
gagaucucuuaucuagggu

SEQ ID NO: 2109065 - RNA, 19 nt, Artificial Sequence
  Description of Artificial Sequence: Synthetic oligonucleotide
  Antisense strand to SEQ ID NO: 2109064
acccuagauaagagaucuc

SEQ ID NO: 2109066 - RNA, 19 nt, Artificial Sequence
  Description of Artificial Sequence: Synthetic oligonucleotide
  Sense strand starting at position 3921 of SEQ ID NO: 1882283
uagggucacuuauuagaga

SEQ ID NO: 2109067 - RNA, 19 nt, Artificial Sequence
  Description of Artificial Sequence: Synthetic oligonucleotide
  Antisense strand to SEQ ID NO: 2109066
ucucuaauaagugacccua

SEQ ID NO: 2109068 - RNA, 19 nt, Artificial Sequence
  Description of Artificial Sequence: Synthetic oligonucleotide
  Sense strand starting at position 3982 of SEQ ID NO: 1882283
uuguguaaccgugccuagu

SEQ ID NO: 2109069 - RNA, 19 nt, Artificial Sequence
  Description of Artificial Sequence: Synthetic oligonucleotide
  Antisense strand to SEQ ID NO: 2109068
acuaggcacgguuacacaa

SEQ ID NO: 2109070 - RNA, 19 nt, Artificial Sequence
  Description of Artificial Sequence: Synthetic oligonucleotide
  Sense strand starting at position 33 of SEQ ID NO: 1882284
guuguuacucuacagugau

SEQ ID NO: 2109071 - RNA, 19 nt, Artificial Sequence
  Description of Artificial Sequence: Synthetic oligonucleotide
  Antisense strand to SEQ ID NO: 2109070
aucacuguagaguaacaac

SEQ ID NO: 2109072 - RNA, 19 nt, Artificial Sequence
  Description of Artificial Sequence: Synthetic oligonucleotide
  Sense strand starting at position 36 of SEQ ID NO: 1882284
guuacucuacagugauaag

SEQ ID NO: 2109073 - RNA, 19 nt, Artificial Sequence
  Description of Artificial Sequence: Synthetic oligonucleotide
  Antisense strand to SEQ ID NO: 2109072
cuuaucacuguagaguaac

SEQ ID NO: 2109074 - RNA, 19 nt, Artificial Sequence
  Description of Artificial Sequence: Synthetic oligonucleotide
  Sense strand starting at position 159 of SEQ ID NO: 1882284
cuucgagugcugccuuaac

SEQ ID NO: 2109075 - RNA, 19 nt, Artificial Sequence
  Description of Artificial Sequence: Synthetic oligonucleotide
  Antisense strand to SEQ ID NO: 2109074
guuaaggcagcacucgaag

SEQ ID NO: 2109076 - RNA, 19 nt, Artificial Sequence
  Description of Artificial Sequence: Synthetic oligonucleotide
  Sense strand starting at position 211 of SEQ ID NO: 1882284
uugagaaacccaggguuau

SEQ ID NO: 2109077 - RNA, 19 nt, Artificial Sequence
  Description of Artificial Sequence: Synthetic oligonucleotide
  Antisense strand to SEQ ID NO: 2109076
auaacccuggguuucucaa

SEQ ID NO: 2109078 - RNA, 19 nt, Artificial Sequence
  Description of Artificial Sequence: Synthetic oligonucleotide
  Sense strand starting at position 300 of SEQ ID NO: 1882284
aucugaaugcuguauuagu

SEQ ID NO: 2109079 - RNA, 19 nt, Artificial Sequence
  Description of Artificial Sequence: Synthetic oligonucleotide
  Antisense strand to SEQ ID NO: 2109078
acuaauacagcauucagau

SEQ ID NO: 2109080 - RNA, 19 nt, Artificial Sequence
  Description of Artificial Sequence: Synthetic oligonucleotide
  Sense strand starting at position 387 of SEQ ID NO: 1882284
aguuucuauggucagguau

SEQ ID NO: 2109081 - RNA, 19 nt, Artificial Sequence
  Description of Artificial Sequence: Synthetic oligonucleotide
  Antisense strand to SEQ ID NO: 2109080
auaccugaccauagaaacu

SEQ ID NO: 2109082 - RNA, 19 nt, Artificial Sequence
  Description of Artificial Sequence: Synthetic oligonucleotide
  Sense strand starting at position 662 of SEQ ID NO: 1882284
aguguuaugccaucgcuuc

SEQ ID NO: 2109083 - RNA, 19 nt, Artificial Sequence
  Description of Artificial Sequence: Synthetic oligonucleotide
  Antisense strand to SEQ ID NO: 2109082
gaagcgauggcauaacacu

SEQ ID NO: 2109084 - RNA, 19 nt, Artificial Sequence
  Description of Artificial Sequence: Synthetic oligonucleotide
  Sense strand starting at position 686 of SEQ ID NO: 1882284
uguguaaguggucacaaag

SEQ ID NO: 2109085 - RNA, 19 nt, Artificial Sequence
  Description of Artificial Sequence: Synthetic oligonucleotide
  Antisense strand to SEQ ID NO: 2109084
cuuugugaccacuuacaca

SEQ ID NO: 2109086 - RNA, 19 nt, Artificial Sequence
  Description of Artificial Sequence: Synthetic oligonucleotide
  Sense strand starting at position 774 of SEQ ID NO: 1882284
ccauguuagagucaggcua

SEQ ID NO: 2109087 - RNA, 19 nt, Artificial Sequence
  Description of Artificial Sequence: Synthetic oligonucleotide
  Antisense strand to SEQ ID NO: 2109086
uagccugacucuaacaugg

SEQ ID NO: 2109088 - RNA, 19 nt, Artificial Sequence
  Description of Artificial Sequence: Synthetic oligonucleotide
  Sense strand starting at position 847 of SEQ ID NO: 1882284
ccuauugucuuuccaggaa

SEQ ID NO: 2109089 - RNA, 19 nt, Artificial Sequence
  Description of Artificial Sequence: Synthetic oligonucleotide
  Antisense strand to SEQ ID NO: 2109088
uuccuggaaagacaauagg

SEQ ID NO: 2109090 - RNA, 19 nt, Artificial Sequence
  Description of Artificial Sequence: Synthetic oligonucleotide
  Sense strand starting at position 851 of SEQ ID NO: 1882284
uugucuuuccaggaaccca

SEQ ID NO: 2109091 - RNA, 19 nt, Artificial Sequence
  Description of Artificial Sequence: Synthetic oligonucleotide
  Antisense strand to SEQ ID NO: 2109090
uggguuccuggaaagacaa

SEQ ID NO: 2109092 - RNA, 19 nt, Artificial Sequence
  Description of Artificial Sequence: Synthetic oligonucleotide
  Sense strand starting at position 921 of SEQ ID NO: 1882284
acgacauggguuuauaacu

SEQ ID NO: 2109093 - RNA, 19 nt, Artificial Sequence
  Description of Artificial Sequence: Synthetic oligonucleotide
  Antisense strand to SEQ ID NO: 2109092
aguuauaaacccaugucgu

SEQ ID NO: 2109094 - RNA, 19 nt, Artificial Sequence
  Description of Artificial Sequence: Synthetic oligonucleotide
  Sense strand starting at position 1077 of SEQ ID NO: 1882284
ugaguaugugauuacugca

SEQ ID NO: 2109095 - RNA, 19 nt, Artificial Sequence
  Description of Artificial Sequence: Synthetic oligonucleotide
  Antisense strand to SEQ ID NO: 2109094
ugcaguaaucacauacuca

SEQ ID NO: 2109096 - RNA, 19 nt, Artificial Sequence
  Description of Artificial Sequence: Synthetic oligonucleotide
  Sense strand starting at position 1082 of SEQ ID NO: 1882284
augugauuacugcagcaac

SEQ ID NO: 2109097 - RNA, 19 nt, Artificial Sequence
  Description of Artificial Sequence: Synthetic oligonucleotide
  Antisense strand to SEQ ID NO: 2109096
guugcugcaguaaucacau

SEQ ID NO: 2109098 - RNA, 19 nt, Artificial Sequence
  Description of Artificial Sequence: Synthetic oligonucleotide
  Sense strand starting at position 1481 of SEQ ID NO: 1882284
cgcagcucucuuucuugua

SEQ ID NO: 2109099 - RNA, 19 nt, Artificial Sequence
  Description of Artificial Sequence: Synthetic oligonucleotide
  Antisense strand to SEQ ID NO: 2109098
uacaagaaagagagcugcg

SEQ ID NO: 2109100 - RNA, 19 nt, Artificial Sequence
  Description of Artificial Sequence: Synthetic oligonucleotide
  Sense strand starting at position 1488 of SEQ ID NO: 1882284
cucuuucuuguacaaugua

SEQ ID NO: 2109101 - RNA, 19 nt, Artificial Sequence
  Description of Artificial Sequence: Synthetic oligonucleotide
  Antisense strand to SEQ ID NO: 2109100
uacauuguacaagaaagag

SEQ ID NO: 2109102 - RNA, 19 nt, Artificial Sequence
  Description of Artificial Sequence: Synthetic oligonucleotide
  Sense strand starting at position 1535 of SEQ ID NO: 1882284
gaagauauguucuugguug

SEQ ID NO: 2109103 - RNA, 19 nt, Artificial Sequence
  Description of Artificial Sequence: Synthetic oligonucleotide
  Antisense strand to SEQ ID NO: 2109102
caaccaagaacauaucuuc

SEQ ID NO: 2109104 - RNA, 19 nt, Artificial Sequence
  Description of Artificial Sequence: Synthetic oligonucleotide
  Sense strand starting at position 1776 of SEQ ID NO: 1882284
ucugcucuucuggaccaau

SEQ ID NO: 2109105 - RNA, 19 nt, Artificial Sequence
  Description of Artificial Sequence: Synthetic oligonucleotide
  Antisense strand to SEQ ID NO: 2109104
auugguccagaagagcaga

SEQ ID NO: 2109106 - RNA, 19 nt, Artificial Sequence
  Description of Artificial Sequence: Synthetic oligonucleotide
  Sense strand starting at position 1878 of SEQ ID NO: 1882284
ugaggaaugccaggaguga

SEQ ID NO: 2109107 - RNA, 19 nt, Artificial Sequence
  Description of Artificial Sequence: Synthetic oligonucleotide
  Antisense strand to SEQ ID NO: 2109106
ucacuccuggcauuccuca

SEQ ID NO: 2109108 - RNA, 19 nt, Artificial Sequence
  Description of Artificial Sequence: Synthetic oligonucleotide
  Sense strand starting at position 2169 of SEQ ID NO: 1882284
gcauguuucugggcauuua

SEQ ID NO: 2109109 - RNA, 19 nt, Artificial Sequence
  Description of Artificial Sequence: Synthetic oligonucleotide
  Antisense strand to SEQ ID NO: 2109108
uaaaugcccagaaacaugc

SEQ ID NO: 2109110 - RNA, 19 nt, Artificial Sequence
  Description of Artificial Sequence: Synthetic oligonucleotide
  Sense strand starting at position 2274 of SEQ ID NO: 1882284
caguauugauuggcacuga

SEQ ID NO: 2109111 - RNA, 19 nt, Artificial Sequence
  Description of Artificial Sequence: Synthetic oligonucleotide
  Antisense strand to SEQ ID NO: 2109110
ucagugccaaucaauacug

SEQ ID NO: 2109112 - RNA, 19 nt, Artificial Sequence
  Description of Artificial Sequence: Synthetic oligonucleotide
  Sense strand starting at position 2337 of SEQ ID NO: 1882284
ucagaaauaaccugugggu

SEQ ID NO: 2109113 - RNA, 19 nt, Artificial Sequence
  Description of Artificial Sequence: Synthetic oligonucleotide
  Antisense strand to SEQ ID NO: 2109112
acccacagguuauuucuga

SEQ ID NO: 2109114 - RNA, 19 nt, Artificial Sequence
  Description of Artificial Sequence: Synthetic oligonucleotide
  Sense strand starting at position 2339 of SEQ ID NO: 1882284
agaaauaaccuguggguga

SEQ ID NO: 2109115 - RNA, 19 nt, Artificial Sequence
  Description of Artificial Sequence: Synthetic oligonucleotide
  Antisense strand to SEQ ID NO: 2109114
ucacccacagguuauuucu

SEQ ID NO: 2109116 - RNA, 19 nt, Artificial Sequence
  Description of Artificial Sequence: Synthetic oligonucleotide
  Sense strand starting at position 2498 of SEQ ID NO: 1882284
cuuaguugucugcugcaua

SEQ ID NO: 2109117 - RNA, 19 nt, Artificial Sequence
  Description of Artificial Sequence: Synthetic oligonucleotide
  Antisense strand to SEQ ID NO: 2109116
uaugcagcagacaacuaag

SEQ ID NO: 2109118 - RNA, 19 nt, Artificial Sequence
  Description of Artificial Sequence: Synthetic oligonucleotide
  Sense strand starting at position 2656 of SEQ ID NO: 1882284
agaugaguuacccaggcuu

SEQ ID NO: 2109119 - RNA, 19 nt, Artificial Sequence
  Description of Artificial Sequence: Synthetic oligonucleotide
  Antisense strand to SEQ ID NO: 2109118
aagccuggguaacucaucu

SEQ ID NO: 2109120 - RNA, 19 nt, Artificial Sequence
  Description of Artificial Sequence: Synthetic oligonucleotide
  Sense strand starting at position 2748 of SEQ ID NO: 1882284
caucuaauuuguucggcuu

SEQ ID NO: 2109121 - RNA, 19 nt, Artificial Sequence
  Description of Artificial Sequence: Synthetic oligonucleotide
  Antisense strand to SEQ ID NO: 2109120
aagccgaacaaauuagaug

SEQ ID NO: 2109122 - RNA, 19 nt, Artificial Sequence
  Description of Artificial Sequence: Synthetic oligonucleotide
  Sense strand starting at position 2749 of SEQ ID NO: 1882284
aucuaauuuguucggcuuu

SEQ ID NO: 2109123 - RNA, 19 nt, Artificial Sequence
  Description of Artificial Sequence: Synthetic oligonucleotide
  Antisense strand to SEQ ID NO: 2109122
aaagccgaacaaauuagau

SEQ ID NO: 2109124 - RNA, 19 nt, Artificial Sequence
  Description of Artificial Sequence: Synthetic oligonucleotide
  Sense strand starting at position 3056 of SEQ ID NO: 1882284
augucaugacccuauaucu

SEQ ID NO: 2109125 - RNA, 19 nt, Artificial Sequence
  Description of Artificial Sequence: Synthetic oligonucleotide
  Antisense strand to SEQ ID NO: 2109124
agauauagggucaugacau

SEQ ID NO: 2109126 - RNA, 19 nt, Artificial Sequence
  Description of Artificial Sequence: Synthetic oligonucleotide
  Sense strand starting at position 3241 of SEQ ID NO: 1882284
gguggucucaguuagaauu

SEQ ID NO: 2109127 - RNA, 19 nt, Artificial Sequence
  Description of Artificial Sequence: Synthetic oligonucleotide
  Antisense strand to SEQ ID NO: 2109126
aauucuaacugagaccacc

SEQ ID NO: 2109128 - RNA, 19 nt, Artificial Sequence
  Description of Artificial Sequence: Synthetic oligonucleotide
  Sense strand starting at position 3330 of SEQ ID NO: 1882284
ccaagagcaguacauugau

SEQ ID NO: 2109129 - RNA, 19 nt, Artificial Sequence
  Description of Artificial Sequence: Synthetic oligonucleotide
  Antisense strand to SEQ ID NO: 2109128
aucaauguacugcucuugg

SEQ ID NO: 2109130 - RNA, 19 nt, Artificial Sequence
  Description of Artificial Sequence: Synthetic oligonucleotide
  Sense strand starting at position 3333 of SEQ ID NO: 1882284
agagcaguacauugauauc

SEQ ID NO: 2109131 - RNA, 19 nt, Artificial Sequence
  Description of Artificial Sequence: Synthetic oligonucleotide
  Antisense strand to SEQ ID NO: 2109130
gauaucaauguacugcucu

SEQ ID NO: 2109132 - RNA, 19 nt, Artificial Sequence
  Description of Artificial Sequence: Synthetic oligonucleotide
  Sense strand starting at position 3385 of SEQ ID NO: 1882284
acaguauaauguccacuau

SEQ ID NO: 2109133 - RNA, 19 nt, Artificial Sequence
  Description of Artificial Sequence: Synthetic oligonucleotide
  Antisense strand to SEQ ID NO: 2109132
auaguggacauuauacugu

SEQ ID NO: 2109134 - RNA, 19 nt, Artificial Sequence
  Description of Artificial Sequence: Synthetic oligonucleotide
  Sense strand starting at position 3487 of SEQ ID NO: 1882284
gcaagugucguggccagua

SEQ ID NO: 2109135 - RNA, 19 nt, Artificial Sequence
  Description of Artificial Sequence: Synthetic oligonucleotide
  Antisense strand to SEQ ID NO: 2109134
uacuggccacgacacuugc

SEQ ID NO: 2109136 - RNA, 19 nt, Artificial Sequence
  Description of Artificial Sequence: Synthetic oligonucleotide
  Sense strand starting at position 3572 of SEQ ID NO: 1882284
cuaugaagacagugucagu

SEQ ID NO: 2109137 - RNA, 19 nt, Artificial Sequence
  Description of Artificial Sequence: Synthetic oligonucleotide
  Antisense strand to SEQ ID NO: 2109136
acugacacugucuucauag

SEQ ID NO: 2109138 - RNA, 19 nt, Artificial Sequence
  Description of Artificial Sequence: Synthetic oligonucleotide
  Sense strand starting at position 3605 of SEQ ID NO: 1882284
uuuauuucucccuguagua

SEQ ID NO: 2109139 - RNA, 19 nt, Artificial Sequence
  Description of Artificial Sequence: Synthetic oligonucleotide
  Antisense strand to SEQ ID NO: 2109138
uacuacagggagaaauaaa

SEQ ID NO: 2109140 - RNA, 19 nt, Artificial Sequence
  Description of Artificial Sequence: Synthetic oligonucleotide
  Sense strand starting at position 3673 of SEQ ID NO: 1882284
accucauguaucgaggcau

SEQ ID NO: 2109141 - RNA, 19 nt, Artificial Sequence
  Description of Artificial Sequence: Synthetic oligonucleotide
  Antisense strand to SEQ ID NO: 2109140
augccucgauacaugaggu

SEQ ID NO: 2109142 - RNA, 19 nt, Artificial Sequence
  Description of Artificial Sequence: Synthetic oligonucleotide
  Sense strand starting at position 3684 of SEQ ID NO: 1882284
cgaggcauuggcuagacau

SEQ ID NO: 2109143 - RNA, 19 nt, Artificial Sequence
  Description of Artificial Sequence: Synthetic oligonucleotide
  Antisense strand to SEQ ID NO: 2109142
augucuagccaaugccucg

SEQ ID NO: 2109144 - RNA, 19 nt, Artificial Sequence
  Description of Artificial Sequence: Synthetic oligonucleotide
  Sense strand starting at position 3704 of SEQ ID NO: 1882284
uucuaugaauuggcucauu

SEQ ID NO: 2109145 - RNA, 19 nt, Artificial Sequence
  Description of Artificial Sequence: Synthetic oligonucleotide
  Antisense strand to SEQ ID NO: 2109144
aaugagccaauucauagaa

SEQ ID NO: 2109146 - RNA, 19 nt, Artificial Sequence
  Description of Artificial Sequence: Synthetic oligonucleotide
  Sense strand starting at position 3922 of SEQ ID NO: 1882284
auaaaccagcuguauguua

SEQ ID NO: 2109147 - RNA, 19 nt, Artificial Sequence
  Description of Artificial Sequence: Synthetic oligonucleotide
  Antisense strand to SEQ ID NO: 2109146
uaacauacagcugguuuau

SEQ ID NO: 2109148 - RNA, 19 nt, Artificial Sequence
  Description of Artificial Sequence: Synthetic oligonucleotide
  Sense strand starting at position 3983 of SEQ ID NO: 1882284
uggcaagucugcucaauuu

SEQ ID NO: 2109149 - RNA, 19 nt, Artificial Sequence
  Description of Artificial Sequence: Synthetic oligonucleotide
  Antisense strand to SEQ ID NO: 2109148
aaauugagcagacuugcca

SEQ ID NO: 2109150 - RNA, 19 nt, Artificial Sequence
  Description of Artificial Sequence: Synthetic oligonucleotide
  Sense strand starting at position 410 of SEQ ID NO: 1882285
aaauauaguggcuaagcau

SEQ ID NO: 2109151 - RNA, 19 nt, Artificial Sequence
  Description of Artificial Sequence: Synthetic oligonucleotide
  Antisense strand to SEQ ID NO: 2109150
augcuuagccacuauauuu

SEQ ID NO: 2109152 - RNA, 19 nt, Artificial Sequence
  Description of Artificial Sequence: Synthetic oligonucleotide
  Sense strand starting at position 487 of SEQ ID NO: 1882285
gcugacuuuggacagguua

SEQ ID NO: 2109153 - RNA, 19 nt, Artificial Sequence
  Description of Artificial Sequence: Synthetic oligonucleotide
  Antisense strand to SEQ ID NO: 2109152
uaaccuguccaaagucagc

SEQ ID NO: 2109154 - RNA, 19 nt, Artificial Sequence
  Description of Artificial Sequence: Synthetic oligonucleotide
  Sense strand starting at position 545 of SEQ ID NO: 1882285
ggaagaugauaacacuaau

SEQ ID NO: 2109155 - RNA, 19 nt, Artificial Sequence
  Description of Artificial Sequence: Synthetic oligonucleotide
  Antisense strand to SEQ ID NO: 2109154
auuaguguuaucaucuucc

SEQ ID NO: 2109156 - RNA, 19 nt, Artificial Sequence
  Description of Artificial Sequence: Synthetic oligonucleotide
  Sense strand starting at position 575 of SEQ ID NO: 1882285
ggguuauucggaggaauaa

SEQ ID NO: 2109157 - RNA, 19 nt, Artificial Sequence
  Description of Artificial Sequence: Synthetic oligonucleotide
  Antisense strand to SEQ ID NO: 2109156
uuauuccuccgaauaaccc

SEQ ID NO: 2109158 - RNA, 19 nt, Artificial Sequence
  Description of Artificial Sequence: Synthetic oligonucleotide
  Sense strand starting at position 716 of SEQ ID NO: 1882285
cuuguauuuccuuguagcu

SEQ ID NO: 2109159 - RNA, 19 nt, Artificial Sequence
  Description of Artificial Sequence: Synthetic oligonucleotide
  Antisense strand to SEQ ID NO: 2109158
agcuacaaggaaauacaag

SEQ ID NO: 2109160 - RNA, 19 nt, Artificial Sequence
  Description of Artificial Sequence: Synthetic oligonucleotide
  Sense strand starting at position 770 of SEQ ID NO: 1882285
gugaacauauggccuaaau

SEQ ID NO: 2109161 - RNA, 19 nt, Artificial Sequence
  Description of Artificial Sequence: Synthetic oligonucleotide
  Antisense strand to SEQ ID NO: 2109160
auuuaggccauauguucac

SEQ ID NO: 2109162 - RNA, 19 nt, Artificial Sequence
  Description of Artificial Sequence: Synthetic oligonucleotide
  Sense strand starting at position 867 of SEQ ID NO: 1882285
guuaacacugaugaguuua

SEQ ID NO: 2109163 - RNA, 19 nt, Artificial Sequence
  Description of Artificial Sequence: Synthetic oligonucleotide
  Antisense strand to SEQ ID NO: 2109162
uaaacucaucaguguuaac

SEQ ID NO: 2109164 - RNA, 19 nt, Artificial Sequence
  Description of Artificial Sequence: Synthetic oligonucleotide
  Sense strand starting at position 898 of SEQ ID NO: 1882285
agaauuccacauugccaga

SEQ ID NO: 2109165 - RNA, 19 nt, Artificial Sequence
  Description of Artificial Sequence: Synthetic oligonucleotide
  Antisense strand to SEQ ID NO: 2109164
ucuggcaauguggaauucu

SEQ ID NO: 2109166 - RNA, 19 nt, Artificial Sequence
  Description of Artificial Sequence: Synthetic oligonucleotide
  Sense strand starting at position 920 of SEQ ID NO: 1882285
aaugguaauuucugaugga

SEQ ID NO: 2109167 - RNA, 19 nt, Artificial Sequence
  Description of Artificial Sequence: Synthetic oligonucleotide
  Antisense strand to SEQ ID NO: 2109166
uccaucagaaauuaccauu

SEQ ID NO: 2109168 - RNA, 19 nt, Artificial Sequence
  Description of Artificial Sequence: Synthetic oligonucleotide
  Sense strand starting at position 921 of SEQ ID NO: 1882285
augguaauuucugauggau

SEQ ID NO: 2109169 - RNA, 19 nt, Artificial Sequence
  Description of Artificial Sequence: Synthetic oligonucleotide
  Antisense strand to SEQ ID NO: 2109168
auccaucagaaauuaccau

SEQ ID NO: 2109170 - RNA, 19 nt, Artificial Sequence
  Description of Artificial Sequence: Synthetic oligonucleotide
  Sense strand starting at position 930 of SEQ ID NO: 1882285
ucugauggaucuuuaucuu

SEQ ID NO: 2109171 - RNA, 19 nt, Artificial Sequence
  Description of Artificial Sequence: Synthetic oligonucleotide
  Antisense strand to SEQ ID NO: 2109170
aagauaaagauccaucaga

SEQ ID NO: 2109172 - RNA, 19 nt, Artificial Sequence
  Description of Artificial Sequence: Synthetic oligonucleotide
  Sense strand starting at position 1162 of SEQ ID NO: 1882285
auuugccuuccucgugauu

SEQ ID NO: 2109173 - RNA, 19 nt, Artificial Sequence
  Description of Artificial Sequence: Synthetic oligonucleotide
  Antisense strand to SEQ ID NO: 2109172
aaucacgaggaaggcaaau

SEQ ID NO: 2109174 - RNA, 19 nt, Artificial Sequence
  Description of Artificial Sequence: Synthetic oligonucleotide
  Sense strand starting at position 1167 of SEQ ID NO: 1882285
ccuuccucgugauuauaac

SEQ ID NO: 2109175 - RNA, 19 nt, Artificial Sequence
  Description of Artificial Sequence: Synthetic oligonucleotide
  Antisense strand to SEQ ID NO: 2109174
guuauaaucacgaggaagg

SEQ ID NO: 2109176 - RNA, 19 nt, Artificial Sequence
  Description of Artificial Sequence: Synthetic oligonucleotide
  Sense strand starting at position 1168 of SEQ ID NO: 1882285
cuuccucgugauuauaacu

SEQ ID NO: 2109177 - RNA, 19 nt, Artificial Sequence
  Description of Artificial Sequence: Synthetic oligonucleotide
  Antisense strand to SEQ ID NO: 2109176
aguuauaaucacgaggaag

SEQ ID NO: 2109178 - RNA, 19 nt, Artificial Sequence
  Description of Artificial Sequence: Synthetic oligonucleotide
  Sense strand starting at position 1181 of SEQ ID NO: 1882285
auaacuccugucuguauuu

SEQ ID NO: 2109179 - RNA, 19 nt, Artificial Sequence
  Description of Artificial Sequence: Synthetic oligonucleotide
  Antisense strand to SEQ ID NO: 2109178
aaauacagacaggaguuau

SEQ ID NO: 2109180 - RNA, 19 nt, Artificial Sequence
  Description of Artificial Sequence: Synthetic oligonucleotide
  Sense strand starting at position 1323 of SEQ ID NO: 1882285
uuguuccaccucuauugau

SEQ ID NO: 2109181 - RNA, 19 nt, Artificial Sequence
  Description of Artificial Sequence: Synthetic oligonucleotide
  Antisense strand to SEQ ID NO: 2109180
aucaauagagguggaacaa

SEQ ID NO: 2109182 - RNA, 19 nt, Artificial Sequence
  Description of Artificial Sequence: Synthetic oligonucleotide
  Sense strand starting at position 1573 of SEQ ID NO: 1882285
ucaagccaucacugauaga

SEQ ID NO: 2109183 - RNA, 19 nt, Artificial Sequence
  Description of Artificial Sequence: Synthetic oligonucleotide
  Antisense strand to SEQ ID NO: 2109182
ucuaucagugauggcuuga

SEQ ID NO: 2109184 - RNA, 19 nt, Artificial Sequence
  Description of Artificial Sequence: Synthetic oligonucleotide
  Sense strand starting at position 1893 of SEQ ID NO: 1882285
agaaacugguaccuguaua

SEQ ID NO: 2109185 - RNA, 19 nt, Artificial Sequence
  Description of Artificial Sequence: Synthetic oligonucleotide
  Antisense strand to SEQ ID NO: 2109184
uauacagguaccaguuucu

SEQ ID NO: 2109186 - RNA, 19 nt, Artificial Sequence
  Description of Artificial Sequence: Synthetic oligonucleotide
  Sense strand starting at position 2029 of SEQ ID NO: 1882285
auacauaauggcuguuaag

SEQ ID NO: 2109187 - RNA, 19 nt, Artificial Sequence
  Description of Artificial Sequence: Synthetic oligonucleotide
  Antisense strand to SEQ ID NO: 2109186
cuuaacagccauuauguau

SEQ ID NO: 2109188 - RNA, 19 nt, Artificial Sequence
  Description of Artificial Sequence: Synthetic oligonucleotide
  Sense strand starting at position 2183 of SEQ ID NO: 1882285
gaccacuaugacugaguuu

SEQ ID NO: 2109189 - RNA, 19 nt, Artificial Sequence
  Description of Artificial Sequence: Synthetic oligonucleotide
  Antisense strand to SEQ ID NO: 2109188
aaacucagucauagugguc

SEQ ID NO: 2109190 - RNA, 19 nt, Artificial Sequence
  Description of Artificial Sequence: Synthetic oligonucleotide
  Sense strand starting at position 2186 of SEQ ID NO: 1882285
cacuaugacugaguuugua

SEQ ID NO: 2109191 - RNA, 19 nt, Artificial Sequence
  Description of Artificial Sequence: Synthetic oligonucleotide
  Antisense strand to SEQ ID NO: 2109190
uacaaacucagucauagug

SEQ ID NO: 2109192 - RNA, 19 nt, Artificial Sequence
  Description of Artificial Sequence: Synthetic oligonucleotide
  Sense strand starting at position 2262 of SEQ ID NO: 1882285
agcucuauauuaucaagag

SEQ ID NO: 2109193 - RNA, 19 nt, Artificial Sequence
  Description of Artificial Sequence: Synthetic oligonucleotide
  Antisense strand to SEQ ID NO: 2109192
cucuugauaauauagagcu

SEQ ID NO: 2109194 - RNA, 19 nt, Artificial Sequence
  Description of Artificial Sequence: Synthetic oligonucleotide
  Sense strand starting at position 2396 of SEQ ID NO: 1882285
aagauaacaguauguaugu

SEQ ID NO: 2109195 - RNA, 19 nt, Artificial Sequence
  Description of Artificial Sequence: Synthetic oligonucleotide
  Antisense strand to SEQ ID NO: 2109194
acauacauacuguuaucuu

SEQ ID NO: 2109196 - RNA, 19 nt, Artificial Sequence
  Description of Artificial Sequence: Synthetic oligonucleotide
  Sense strand starting at position 2417 of SEQ ID NO: 1882285
uuauguugcauguguauuu

SEQ ID NO: 2109197 - RNA, 19 nt, Artificial Sequence
  Description of Artificial Sequence: Synthetic oligonucleotide
  Antisense strand to SEQ ID NO: 2109196
aaauacacaugcaacauaa

SEQ ID NO: 2109198 - RNA, 19 nt, Artificial Sequence
  Description of Artificial Sequence: Synthetic oligonucleotide
  Sense strand starting at position 2424 of SEQ ID NO: 1882285
gcauguguauuuguaugag

SEQ ID NO: 2109199 - RNA, 19 nt, Artificial Sequence
  Description of Artificial Sequence: Synthetic oligonucleotide
  Antisense strand to SEQ ID NO: 2109198
cucauacaaauacacaugc

SEQ ID NO: 2109200 - RNA, 19 nt, Artificial Sequence
  Description of Artificial Sequence: Synthetic oligonucleotide
  Sense strand starting at position 2794 of SEQ ID NO: 1882285
accauugggcuaggauaaa

SEQ ID NO: 2109201 - RNA, 19 nt, Artificial Sequence
  Description of Artificial Sequence: Synthetic oligonucleotide
  Antisense strand to SEQ ID NO: 2109200
uuuauccuagcccaauggu

SEQ ID NO: 2109202 - RNA, 19 nt, Artificial Sequence
  Description of Artificial Sequence: Synthetic oligonucleotide
  Sense strand starting at position 2913 of SEQ ID NO: 1882285
cuaucuuucuuguuuauag

SEQ ID NO: 2109203 - RNA, 19 nt, Artificial Sequence
  Description of Artificial Sequence: Synthetic oligonucleotide
  Antisense strand to SEQ ID NO: 2109202
cuauaaacaagaaagauag

SEQ ID NO: 2109204 - RNA, 19 nt, Artificial Sequence
  Description of Artificial Sequence: Synthetic oligonucleotide
  Sense strand starting at position 3061 of SEQ ID NO: 1882285
guacaauagcauuguuuag

SEQ ID NO: 2109205 - RNA, 19 nt, Artificial Sequence
  Description of Artificial Sequence: Synthetic oligonucleotide
  Antisense strand to SEQ ID NO: 2109204
cuaaacaaugcuauuguac

SEQ ID NO: 2109206 - RNA, 19 nt, Artificial Sequence
  Description of Artificial Sequence: Synthetic oligonucleotide
  Sense strand starting at position 3063 of SEQ ID NO: 1882285
acaauagcauuguuuagau

SEQ ID NO: 2109207 - RNA, 19 nt, Artificial Sequence
  Description of Artificial Sequence: Synthetic oligonucleotide
  Antisense strand to SEQ ID NO: 2109206
aucuaaacaaugcuauugu

SEQ ID NO: 2109208 - RNA, 19 nt, Artificial Sequence
  Description of Artificial Sequence: Synthetic oligonucleotide
  Sense strand starting at position 3114 of SEQ ID NO: 1882285
uuuauauaucagcacagua

SEQ ID NO: 2109209 - RNA, 19 nt, Artificial Sequence
  Description of Artificial Sequence: Synthetic oligonucleotide
  Antisense strand to SEQ ID NO: 2109208
uacugugcugauauauaaa

SEQ ID NO: 2109210 - RNA, 19 nt, Artificial Sequence
  Description of Artificial Sequence: Synthetic oligonucleotide
  Sense strand starting at position 3129 of SEQ ID NO: 1882285
aguauaaagcaguauaacu

SEQ ID NO: 2109211 - RNA, 19 nt, Artificial Sequence
  Description of Artificial Sequence: Synthetic oligonucleotide
  Antisense strand to SEQ ID NO: 2109210
aguuauacugcuuuauacu

SEQ ID NO: 2109212 - RNA, 19 nt, Artificial Sequence
  Description of Artificial Sequence: Synthetic oligonucleotide
  Sense strand starting at position 3216 of SEQ ID NO: 1882285
auguaaacaucagucucua

SEQ ID NO: 2109213 - RNA, 19 nt, Artificial Sequence
  Description of Artificial Sequence: Synthetic oligonucleotide
  Antisense strand to SEQ ID NO: 2109212
uagagacugauguuuacau

SEQ ID NO: 2109214 - RNA, 19 nt, Artificial Sequence
  Description of Artificial Sequence: Synthetic oligonucleotide
  Sense strand starting at position 3294 of SEQ ID NO: 1882285
ucuaauugagucugacaca

SEQ ID NO: 2109215 - RNA, 19 nt, Artificial Sequence
  Description of Artificial Sequence: Synthetic oligonucleotide
  Antisense strand to SEQ ID NO: 2109214
ugugucagacucaauuaga

SEQ ID NO: 2109216 - RNA, 19 nt, Artificial Sequence
  Description of Artificial Sequence: Synthetic oligonucleotide
  Sense strand starting at position 3380 of SEQ ID NO: 1882285
ggugucaguaaaugaauca

SEQ ID NO: 2109217 - RNA, 19 nt, Artificial Sequence
  Description of Artificial Sequence: Synthetic oligonucleotide
  Antisense strand to SEQ ID NO: 2109216
ugauucauuuacugacacc

SEQ ID NO: 2109218 - RNA, 19 nt, Artificial Sequence
  Description of Artificial Sequence: Synthetic oligonucleotide
  Sense strand starting at position 3387 of SEQ ID NO: 1882285
guaaaugaaucaguaugua

SEQ ID NO: 2109219 - RNA, 19 nt, Artificial Sequence
  Description of Artificial Sequence: Synthetic oligonucleotide
  Antisense strand to SEQ ID NO: 2109218
uacauacugauucauuuac

SEQ ID NO: 2109220 - RNA, 19 nt, Artificial Sequence
  Description of Artificial Sequence: Synthetic oligonucleotide
  Sense strand starting at position 3540 of SEQ ID NO: 1882285
ggaggagugauguguucug

SEQ ID NO: 2109221 - RNA, 19 nt, Artificial Sequence
  Description of Artificial Sequence: Synthetic oligonucleotide
  Antisense strand to SEQ ID NO: 2109220
cagaacacaucacuccucc

SEQ ID NO: 2109222 - RNA, 19 nt, Artificial Sequence
  Description of Artificial Sequence: Synthetic oligonucleotide
  Sense strand starting at position 3555 of SEQ ID NO: 1882285
ucuguuaagucuuuaggaa

SEQ ID NO: 2109223 - RNA, 19 nt, Artificial Sequence
  Description of Artificial Sequence: Synthetic oligonucleotide
  Antisense strand to SEQ ID NO: 2109222
uuccuaaagacuuaacaga

SEQ ID NO: 2109224 - RNA, 19 nt, Artificial Sequence
  Description of Artificial Sequence: Synthetic oligonucleotide
  Sense strand starting at position 3556 of SEQ ID NO: 1882285
cuguuaagucuuuaggaag

SEQ ID NO: 2109225 - RNA, 19 nt, Artificial Sequence
  Description of Artificial Sequence: Synthetic oligonucleotide
  Antisense strand to SEQ ID NO: 2109224
cuuccuaaagacuuaacag

SEQ ID NO: 2109226 - RNA, 19 nt, Artificial Sequence
  Description of Artificial Sequence: Synthetic oligonucleotide
  Sense strand starting at position 3570 of SEQ ID NO: 1882285
ggaagaucacuuugggcca

SEQ ID NO: 2109227 - RNA, 19 nt, Artificial Sequence
  Description of Artificial Sequence: Synthetic oligonucleotide
  Antisense strand to SEQ ID NO: 2109226
uggcccaaagugaucuucc

SEQ ID NO: 2109228 - RNA, 19 nt, Artificial Sequence
  Description of Artificial Sequence: Synthetic oligonucleotide
  Sense strand starting at position 3893 of SEQ ID NO: 1882285
agauaacuuuggcuacuau

SEQ ID NO: 2109229 - RNA, 19 nt, Artificial Sequence
  Description of Artificial Sequence: Synthetic oligonucleotide
  Antisense strand to SEQ ID NO: 2109228
auaguagccaaaguuaucu

SEQ ID NO: 2109230 - RNA, 19 nt, Artificial Sequence
  Description of Artificial Sequence: Synthetic oligonucleotide
  Sense strand starting at position 4 of SEQ ID NO: 1882286
ccagaaauaugugucuaua

SEQ ID NO: 2109231 - RNA, 19 nt, Artificial Sequence
  Description of Artificial Sequence: Synthetic oligonucleotide
  Antisense strand to SEQ ID NO: 2109230
uauagacacauauuucugg

SEQ ID NO: 2109232 - RNA, 19 nt, Artificial Sequence
  Description of Artificial Sequence: Synthetic oligonucleotide
  Sense strand starting at position 7 of SEQ ID NO: 1882286
gaaauaugugucuauauug

SEQ ID NO: 2109233 - RNA, 19 nt, Artificial Sequence
  Description of Artificial Sequence: Synthetic oligonucleotide
  Antisense strand to SEQ ID NO: 2109232
caauauagacacauauuuc

SEQ ID NO: 2109234 - RNA, 19 nt, Artificial Sequence
  Description of Artificial Sequence: Synthetic oligonucleotide
  Sense strand starting at position 71 of SEQ ID NO: 1882286
aggcauuacgcagguauuu

SEQ ID NO: 2109235 - RNA, 19 nt, Artificial Sequence
  Description of Artificial Sequence: Synthetic oligonucleotide
  Antisense strand to SEQ ID NO: 2109234
aaauaccugcguaaugccu

SEQ ID NO: 2109236 - RNA, 19 nt, Artificial Sequence
  Description of Artificial Sequence: Synthetic oligonucleotide
  Sense strand starting at position 96 of SEQ ID NO: 1882286
uaaauuaacguccagcuga

SEQ ID NO: 2109237 - RNA, 19 nt, Artificial Sequence
  Description of Artificial Sequence: Synthetic oligonucleotide
  Antisense strand to SEQ ID NO: 2109236
ucagcuggacguuaauuua

SEQ ID NO: 2109238 - RNA, 19 nt, Artificial Sequence
  Description of Artificial Sequence: Synthetic oligonucleotide
  Sense strand starting at position 166 of SEQ ID NO: 1882286
cagucaaggccaugggaau

SEQ ID NO: 2109239 - RNA, 19 nt, Artificial Sequence
  Description of Artificial Sequence: Synthetic oligonucleotide
  Antisense strand to SEQ ID NO: 2109238
auucccauggccuugacug

SEQ ID NO: 2109240 - RNA, 19 nt, Artificial Sequence
  Description of Artificial Sequence: Synthetic oligonucleotide
  Sense strand starting at position 167 of SEQ ID NO: 1882286
agucaaggccaugggaauu

SEQ ID NO: 2109241 - RNA, 19 nt, Artificial Sequence
  Description of Artificial Sequence: Synthetic oligonucleotide
  Antisense strand to SEQ ID NO: 2109240
aauucccauggccuugacu

SEQ ID NO: 2109242 - RNA, 19 nt, Artificial Sequence
  Description of Artificial Sequence: Synthetic oligonucleotide
  Sense strand starting at position 177 of SEQ ID NO: 1882286
augggaauuauauggcauu

SEQ ID NO: 2109243 - RNA, 19 nt, Artificial Sequence
  Description of Artificial Sequence: Synthetic oligonucleotide
  Antisense strand to SEQ ID NO: 2109242
aaugccauauaauucccau

SEQ ID NO: 2109244 - RNA, 19 nt, Artificial Sequence
  Description of Artificial Sequence: Synthetic oligonucleotide
  Sense strand starting at position 259 of SEQ ID NO: 1882286
uuaagcucugaugauacua

SEQ ID NO: 2109245 - RNA, 19 nt, Artificial Sequence
  Description of Artificial Sequence: Synthetic oligonucleotide
  Antisense strand to SEQ ID NO: 2109244
uaguaucaucagagcuuaa

SEQ ID NO: 2109246 - RNA, 19 nt, Artificial Sequence
  Description of Artificial Sequence: Synthetic oligonucleotide
  Sense strand starting at position 299 of SEQ ID NO: 1882286
agauuaaugggcuaucucu

SEQ ID NO: 2109247 - RNA, 19 nt, Artificial Sequence
  Description of Artificial Sequence: Synthetic oligonucleotide
  Antisense strand to SEQ ID NO: 2109246
agagauagcccauuaaucu

SEQ ID NO: 2109248 - RNA, 19 nt, Artificial Sequence
  Description of Artificial Sequence: Synthetic oligonucleotide
  Sense strand starting at position 305 of SEQ ID NO: 1882286
augggcuaucucuaaacca

SEQ ID NO: 2109249 - RNA, 19 nt, Artificial Sequence
  Description of Artificial Sequence: Synthetic oligonucleotide
  Antisense strand to SEQ ID NO: 2109248
ugguuuagagauagcccau

SEQ ID NO: 2109250 - RNA, 19 nt, Artificial Sequence
  Description of Artificial Sequence: Synthetic oligonucleotide
  Sense strand starting at position 321 of SEQ ID NO: 1882286
ccaucagagcaauaucgga

SEQ ID NO: 2109251 - RNA, 19 nt, Artificial Sequence
  Description of Artificial Sequence: Synthetic oligonucleotide
  Antisense strand to SEQ ID NO: 2109250
uccgauauugcucugaugg

SEQ ID NO: 2109252 - RNA, 19 nt, Artificial Sequence
  Description of Artificial Sequence: Synthetic oligonucleotide
  Sense strand starting at position 329 of SEQ ID NO: 1882286
gcaauaucggaauaugcau

SEQ ID NO: 2109253 - RNA, 19 nt, Artificial Sequence
  Description of Artificial Sequence: Synthetic oligonucleotide
  Antisense strand to SEQ ID NO: 2109252
augcauauuccgauauugc

SEQ ID NO: 2109254 - RNA, 19 nt, Artificial Sequence
  Description of Artificial Sequence: Synthetic oligonucleotide
  Sense strand starting at position 519 of SEQ ID NO: 1882286
agguggugucugucaacgu

SEQ ID NO: 2109255 - RNA, 19 nt, Artificial Sequence
  Description of Artificial Sequence: Synthetic oligonucleotide
  Antisense strand to SEQ ID NO: 2109254
acguugacagacaccaccu

SEQ ID NO: 2109256 - RNA, 19 nt, Artificial Sequence
  Description of Artificial Sequence: Synthetic oligonucleotide
  Sense strand starting at position 545 of SEQ ID NO: 1882286
gucccuggaucaucaguaa

SEQ ID NO: 2109257 - RNA, 19 nt, Artificial Sequence
  Description of Artificial Sequence: Synthetic oligonucleotide
  Antisense strand to SEQ ID NO: 2109256
uuacugaugauccagggac

SEQ ID NO: 2109258 - RNA, 19 nt, Artificial Sequence
  Description of Artificial Sequence: Synthetic oligonucleotide
  Sense strand starting at position 586 of SEQ ID NO: 1882286
gcuuaaaucccagacucag

SEQ ID NO: 2109259 - RNA, 19 nt, Artificial Sequence
  Description of Artificial Sequence: Synthetic oligonucleotide
  Antisense strand to SEQ ID NO: 2109258
cugagucugggauuuaagc

SEQ ID NO: 2109260 - RNA, 19 nt, Artificial Sequence
  Description of Artificial Sequence: Synthetic oligonucleotide
  Sense strand starting at position 1033 of SEQ ID NO: 1882286
accugaagacacugcuaua

SEQ ID NO: 2109261 - RNA, 19 nt, Artificial Sequence
  Description of Artificial Sequence: Synthetic oligonucleotide
  Antisense strand to SEQ ID NO: 2109260
uauagcagugucuucaggu

SEQ ID NO: 2109262 - RNA, 19 nt, Artificial Sequence
  Description of Artificial Sequence: Synthetic oligonucleotide
  Sense strand starting at position 1253 of SEQ ID NO: 1882286
gccaauuaauugccagaaa

SEQ ID NO: 2109263 - RNA, 19 nt, Artificial Sequence
  Description of Artificial Sequence: Synthetic oligonucleotide
  Antisense strand to SEQ ID NO: 2109262
uuucuggcaauuaauuggc

SEQ ID NO: 2109264 - RNA, 19 nt, Artificial Sequence
  Description of Artificial Sequence: Synthetic oligonucleotide
  Sense strand starting at position 2016 of SEQ ID NO: 1882286
uguagaauacgcucgugca

SEQ ID NO: 2109265 - RNA, 19 nt, Artificial Sequence
  Description of Artificial Sequence: Synthetic oligonucleotide
  Antisense strand to SEQ ID NO: 2109264
ugcacgagcguauucuaca

SEQ ID NO: 2109266 - RNA, 19 nt, Artificial Sequence
  Description of Artificial Sequence: Synthetic oligonucleotide
  Sense strand starting at position 2135 of SEQ ID NO: 1882286
aaacgcauuugcucgaaag

SEQ ID NO: 2109267 - RNA, 19 nt, Artificial Sequence
  Description of Artificial Sequence: Synthetic oligonucleotide
  Antisense strand to SEQ ID NO: 2109266
cuuucgagcaaaugcguuu

SEQ ID NO: 2109268 - RNA, 19 nt, Artificial Sequence
  Description of Artificial Sequence: Synthetic oligonucleotide
  Sense strand starting at position 2136 of SEQ ID NO: 1882286
aacgcauuugcucgaaagu

SEQ ID NO: 2109269 - RNA, 19 nt, Artificial Sequence
  Description of Artificial Sequence: Synthetic oligonucleotide
  Antisense strand to SEQ ID NO: 2109268
acuuucgagcaaaugcguu

SEQ ID NO: 2109270 - RNA, 19 nt, Artificial Sequence
  Description of Artificial Sequence: Synthetic oligonucleotide
  Sense strand starting at position 2137 of SEQ ID NO: 1882286
acgcauuugcucgaaaguc

SEQ ID NO: 2109271 - RNA, 19 nt, Artificial Sequence
  Description of Artificial Sequence: Synthetic oligonucleotide
  Antisense strand to SEQ ID NO: 2109270
gacuuucgagcaaaugcgu

SEQ ID NO: 2109272 - RNA, 19 nt, Artificial Sequence
  Description of Artificial Sequence: Synthetic oligonucleotide
  Sense strand starting at position 2152 of SEQ ID NO: 1882286
agucacuacccuggauaua

SEQ ID NO: 2109273 - RNA, 19 nt, Artificial Sequence
  Description of Artificial Sequence: Synthetic oligonucleotide
  Antisense strand to SEQ ID NO: 2109272
uauauccaggguagugacu

SEQ ID NO: 2109274 - RNA, 19 nt, Artificial Sequence
  Description of Artificial Sequence: Synthetic oligonucleotide
  Sense strand starting at position 2741 of SEQ ID NO: 1882286
uuguaaauuguugaaagcu

SEQ ID NO: 2109275 - RNA, 19 nt, Artificial Sequence
  Description of Artificial Sequence: Synthetic oligonucleotide
  Antisense strand to SEQ ID NO: 2109274
agcuuucaacaauuuacaa

SEQ ID NO: 2109276 - RNA, 19 nt, Artificial Sequence
  Description of Artificial Sequence: Synthetic oligonucleotide
  Sense strand starting at position 2749 of SEQ ID NO: 1882286
uguugaaagcucuauaaac

SEQ ID NO: 2109277 - RNA, 19 nt, Artificial Sequence
  Description of Artificial Sequence: Synthetic oligonucleotide
  Antisense strand to SEQ ID NO: 2109276
guuuauagagcuuucaaca

SEQ ID NO: 2109278 - RNA, 19 nt, Artificial Sequence
  Description of Artificial Sequence: Synthetic oligonucleotide
  Sense strand starting at position 2848 of SEQ ID NO: 1882286
ggauuagaauugguguuga

SEQ ID NO: 2109279 - RNA, 19 nt, Artificial Sequence
  Description of Artificial Sequence: Synthetic oligonucleotide
  Antisense strand to SEQ ID NO: 2109278
ucaacaccaauucuaaucc

SEQ ID NO: 2109280 - RNA, 19 nt, Artificial Sequence
  Description of Artificial Sequence: Synthetic oligonucleotide
  Sense strand starting at position 2919 of SEQ ID NO: 1882286
cggauacuuguauagcaaa

SEQ ID NO: 2109281 - RNA, 19 nt, Artificial Sequence
  Description of Artificial Sequence: Synthetic oligonucleotide
  Antisense strand to SEQ ID NO: 2109280
uuugcuauacaaguauccg

SEQ ID NO: 2109282 - RNA, 19 nt, Artificial Sequence
  Description of Artificial Sequence: Synthetic oligonucleotide
  Sense strand starting at position 3046 of SEQ ID NO: 1882286
ccucguuuaugacuauaaa

SEQ ID NO: 2109283 - RNA, 19 nt, Artificial Sequence
  Description of Artificial Sequence: Synthetic oligonucleotide
  Antisense strand to SEQ ID NO: 2109282
uuuauagucauaaacgagg

SEQ ID NO: 2109284 - RNA, 19 nt, Artificial Sequence
  Description of Artificial Sequence: Synthetic oligonucleotide
  Sense strand starting at position 3047 of SEQ ID NO: 1882286
cucguuuaugacuauaaag

SEQ ID NO: 2109285 - RNA, 19 nt, Artificial Sequence
  Description of Artificial Sequence: Synthetic oligonucleotide
  Antisense strand to SEQ ID NO: 2109284
cuuuauagucauaaacgag

SEQ ID NO: 2109286 - RNA, 19 nt, Artificial Sequence
  Description of Artificial Sequence: Synthetic oligonucleotide
  Sense strand starting at position 3049 of SEQ ID NO: 1882286
cguuuaugacuauaaagua

SEQ ID NO: 2109287 - RNA, 19 nt, Artificial Sequence
  Description of Artificial Sequence: Synthetic oligonucleotide
  Antisense strand to SEQ ID NO: 2109286
uacuuuauagucauaaacg

SEQ ID NO: 2109288 - RNA, 19 nt, Artificial Sequence
  Description of Artificial Sequence: Synthetic oligonucleotide
  Sense strand starting at position 3061 of SEQ ID NO: 1882286
uaaaguaugcaggacugua

SEQ ID NO: 2109289 - RNA, 19 nt, Artificial Sequence
  Description of Artificial Sequence: Synthetic oligonucleotide
  Antisense strand to SEQ ID NO: 2109288
uacaguccugcauacuuua

SEQ ID NO: 2109290 - RNA, 19 nt, Artificial Sequence
  Description of Artificial Sequence: Synthetic oligonucleotide
  Sense strand starting at position 3337 of SEQ ID NO: 1882286
cucuaagaaggcugugaga

SEQ ID NO: 2109291 - RNA, 19 nt, Artificial Sequence
  Description of Artificial Sequence: Synthetic oligonucleotide
  Antisense strand to SEQ ID NO: 2109290
ucucacagccuucuuagag

SEQ ID NO: 2109292 - RNA, 19 nt, Artificial Sequence
  Description of Artificial Sequence: Synthetic oligonucleotide
  Sense strand starting at position 3339 of SEQ ID NO: 1882286
cuaagaaggcugugagaua

SEQ ID NO: 2109293 - RNA, 19 nt, Artificial Sequence
  Description of Artificial Sequence: Synthetic oligonucleotide
  Antisense strand to SEQ ID NO: 2109292
uaucucacagccuucuuag

SEQ ID NO: 2109294 - RNA, 19 nt, Artificial Sequence
  Description of Artificial Sequence: Synthetic oligonucleotide
  Sense strand starting at position 3346 of SEQ ID NO: 1882286
ggcugugagauauaaauuc

SEQ ID NO: 2109295 - RNA, 19 nt, Artificial Sequence
  Description of Artificial Sequence: Synthetic oligonucleotide
  Antisense strand to SEQ ID NO: 2109294
gaauuuauaucucacagcc

SEQ ID NO: 2109296 - RNA, 19 nt, Artificial Sequence
  Description of Artificial Sequence: Synthetic oligonucleotide
  Sense strand starting at position 3353 of SEQ ID NO: 1882286
agauauaaauuccuguaug

SEQ ID NO: 2109297 - RNA, 19 nt, Artificial Sequence
  Description of Artificial Sequence: Synthetic oligonucleotide
  Antisense strand to SEQ ID NO: 2109296
cauacaggaauuuauaucu

SEQ ID NO: 2109298 - RNA, 19 nt, Artificial Sequence
  Description of Artificial Sequence: Synthetic oligonucleotide
  Sense strand starting at position 3363 of SEQ ID NO: 1882286
uccuguaugccuggagaaa

SEQ ID NO: 2109299 - RNA, 19 nt, Artificial Sequence
  Description of Artificial Sequence: Synthetic oligonucleotide
  Antisense strand to SEQ ID NO: 2109298
uuucuccaggcauacagga

SEQ ID NO: 2109300 - RNA, 19 nt, Artificial Sequence
  Description of Artificial Sequence: Synthetic oligonucleotide
  Sense strand starting at position 3403 of SEQ ID NO: 1882286
guaaacacauggcuauaaa

SEQ ID NO: 2109301 - RNA, 19 nt, Artificial Sequence
  Description of Artificial Sequence: Synthetic oligonucleotide
  Antisense strand to SEQ ID NO: 2109300
uuuauagccauguguuuac

SEQ ID NO: 2109302 - RNA, 19 nt, Artificial Sequence
  Description of Artificial Sequence: Synthetic oligonucleotide
  Sense strand starting at position 3434 of SEQ ID NO: 1882286
aguuauaggcuccaaacuu

SEQ ID NO: 2109303 - RNA, 19 nt, Artificial Sequence
  Description of Artificial Sequence: Synthetic oligonucleotide
  Antisense strand to SEQ ID NO: 2109302
aaguuuggagccuauaacu

SEQ ID NO: 2109304 - RNA, 19 nt, Artificial Sequence
  Description of Artificial Sequence: Synthetic oligonucleotide
  Sense strand starting at position 3604 of SEQ ID NO: 1882286
aaagauuccuucccguaga

SEQ ID NO: 2109305 - RNA, 19 nt, Artificial Sequence
  Description of Artificial Sequence: Synthetic oligonucleotide
  Antisense strand to SEQ ID NO: 2109304
ucuacgggaaggaaucuuu

SEQ ID NO: 2109306 - RNA, 19 nt, Artificial Sequence
  Description of Artificial Sequence: Synthetic oligonucleotide
  Sense strand starting at position 3614 of SEQ ID NO: 1882286
ucccguagauuuguauauu

SEQ ID NO: 2109307 - RNA, 19 nt, Artificial Sequence
  Description of Artificial Sequence: Synthetic oligonucleotide
  Antisense strand to SEQ ID NO: 2109306
aauauacaaaucuacggga

SEQ ID NO: 2109308 - RNA, 19 nt, Artificial Sequence
  Description of Artificial Sequence: Synthetic oligonucleotide
  Sense strand starting at position 3807 of SEQ ID NO: 1882286
uggccugaaguuuggagaa

SEQ ID NO: 2109309 - RNA, 19 nt, Artificial Sequence
  Description of Artificial Sequence: Synthetic oligonucleotide
  Antisense strand to SEQ ID NO: 2109308
uucuccaaacuucaggcca

SEQ ID NO: 2109310 - RNA, 19 nt, Artificial Sequence
  Description of Artificial Sequence: Synthetic oligonucleotide
  Sense strand starting at position 347 of SEQ ID NO: 1882287
cugugacuucugggcucaa

SEQ ID NO: 2109311 - RNA, 19 nt, Artificial Sequence
  Description of Artificial Sequence: Synthetic oligonucleotide
  Antisense strand to SEQ ID NO: 2109310
uugagcccagaagucacag

SEQ ID NO: 2109312 - RNA, 19 nt, Artificial Sequence
  Description of Artificial Sequence: Synthetic oligonucleotide
  Sense strand starting at position 348 of SEQ ID NO: 1882287
ugugacuucugggcucaag

SEQ ID NO: 2109313 - RNA, 19 nt, Artificial Sequence
  Description of Artificial Sequence: Synthetic oligonucleotide
  Antisense strand to SEQ ID NO: 2109312
cuugagcccagaagucaca

SEQ ID NO: 2109314 - RNA, 19 nt, Artificial Sequence
  Description of Artificial Sequence: Synthetic oligonucleotide
  Sense strand starting at position 804 of SEQ ID NO: 1882287
gggacuccgcuuugagauc

SEQ ID NO: 2109315 - RNA, 19 nt, Artificial Sequence
  Description of Artificial Sequence: Synthetic oligonucleotide
  Antisense strand to SEQ ID NO: 2109314
gaucucaaagcggaguccc

SEQ ID NO: 2109316 - RNA, 19 nt, Artificial Sequence
  Description of Artificial Sequence: Synthetic oligonucleotide
  Sense strand starting at position 902 of SEQ ID NO: 1882287
cugggauuccugggacuuc

SEQ ID NO: 2109317 - RNA, 19 nt, Artificial Sequence
  Description of Artificial Sequence: Synthetic oligonucleotide
  Antisense strand to SEQ ID NO: 2109316
gaagucccaggaaucccag

SEQ ID NO: 2109318 - RNA, 19 nt, Artificial Sequence
  Description of Artificial Sequence: Synthetic oligonucleotide
  Sense strand starting at position 931 of SEQ ID NO: 1882287
gugcacaaauguccuagau

SEQ ID NO: 2109319 - RNA, 19 nt, Artificial Sequence
  Description of Artificial Sequence: Synthetic oligonucleotide
  Antisense strand to SEQ ID NO: 2109318
aucuaggacauuugugcac

SEQ ID NO: 2109320 - RNA, 19 nt, Artificial Sequence
  Description of Artificial Sequence: Synthetic oligonucleotide
  Sense strand starting at position 933 of SEQ ID NO: 1882287
gcacaaauguccuagauuu

SEQ ID NO: 2109321 - RNA, 19 nt, Artificial Sequence
  Description of Artificial Sequence: Synthetic oligonucleotide
  Antisense strand to SEQ ID NO: 2109320
aaaucuaggacauuugugc

SEQ ID NO: 2109322 - RNA, 19 nt, Artificial Sequence
  Description of Artificial Sequence: Synthetic oligonucleotide
  Sense strand starting at position 961 of SEQ ID NO: 1882287
gguugcuucuagccacaau

SEQ ID NO: 2109323 - RNA, 19 nt, Artificial Sequence
  Description of Artificial Sequence: Synthetic oligonucleotide
  Antisense strand to SEQ ID NO: 2109322
auuguggcuagaagcaacc

SEQ ID NO: 2109324 - RNA, 19 nt, Artificial Sequence
  Description of Artificial Sequence: Synthetic oligonucleotide
  Sense strand starting at position 1048 of SEQ ID NO: 1882287
cauggugauuugcagaacu

SEQ ID NO: 2109325 - RNA, 19 nt, Artificial Sequence
  Description of Artificial Sequence: Synthetic oligonucleotide
  Antisense strand to SEQ ID NO: 2109324
aguucugcaaaucaccaug

SEQ ID NO: 2109326 - RNA, 19 nt, Artificial Sequence
  Description of Artificial Sequence: Synthetic oligonucleotide
  Sense strand starting at position 1187 of SEQ ID NO: 1882287
cucgauuucugcggaucca

SEQ ID NO: 2109327 - RNA, 19 nt, Artificial Sequence
  Description of Artificial Sequence: Synthetic oligonucleotide
  Antisense strand to SEQ ID NO: 2109326
uggauccgcagaaaucgag

SEQ ID NO: 2109328 - RNA, 19 nt, Artificial Sequence
  Description of Artificial Sequence: Synthetic oligonucleotide
  Sense strand starting at position 1238 of SEQ ID NO: 1882287
ucgcaagggucuggagaaa

SEQ ID NO: 2109329 - RNA, 19 nt, Artificial Sequence
  Description of Artificial Sequence: Synthetic oligonucleotide
  Antisense strand to SEQ ID NO: 2109328
uuucuccagacccuugcga

SEQ ID NO: 2109330 - RNA, 19 nt, Artificial Sequence
  Description of Artificial Sequence: Synthetic oligonucleotide
  Sense strand starting at position 1279 of SEQ ID NO: 1882287
aggacuccguauucugaga

SEQ ID NO: 2109331 - RNA, 19 nt, Artificial Sequence
  Description of Artificial Sequence: Synthetic oligonucleotide
  Antisense strand to SEQ ID NO: 2109330
ucucagaauacggaguccu

SEQ ID NO: 2109332 - RNA, 19 nt, Artificial Sequence
  Description of Artificial Sequence: Synthetic oligonucleotide
  Sense strand starting at position 1281 of SEQ ID NO: 1882287
gacuccguauucugagacu

SEQ ID NO: 2109333 - RNA, 19 nt, Artificial Sequence
  Description of Artificial Sequence: Synthetic oligonucleotide
  Antisense strand to SEQ ID NO: 2109332
agucucagaauacggaguc

SEQ ID NO: 2109334 - RNA, 19 nt, Artificial Sequence
  Description of Artificial Sequence: Synthetic oligonucleotide
  Sense strand starting at position 1284 of SEQ ID NO: 1882287
uccguauucugagacuguu

SEQ ID NO: 2109335 - RNA, 19 nt, Artificial Sequence
  Description of Artificial Sequence: Synthetic oligonucleotide
  Antisense strand to SEQ ID NO: 2109334
aacagucucagaauacgga

SEQ ID NO: 2109336 - RNA, 19 nt, Artificial Sequence
  Description of Artificial Sequence: Synthetic oligonucleotide
  Sense strand starting at position 1352 of SEQ ID NO: 1882287
cgcguuucuggccugggaa

SEQ ID NO: 2109337 - RNA, 19 nt, Artificial Sequence
  Description of Artificial Sequence: Synthetic oligonucleotide
  Antisense strand to SEQ ID NO: 2109336
uucccaggccagaaacgcg

SEQ ID NO: 2109338 - RNA, 19 nt, Artificial Sequence
  Description of Artificial Sequence: Synthetic oligonucleotide
  Sense strand starting at position 1353 of SEQ ID NO: 1882287
gcguuucuggccugggaaa

SEQ ID NO: 2109339 - RNA, 19 nt, Artificial Sequence
  Description of Artificial Sequence: Synthetic oligonucleotide
  Antisense strand to SEQ ID NO: 2109338
uuucccaggccagaaacgc

SEQ ID NO: 2109340 - RNA, 19 nt, Artificial Sequence
  Description of Artificial Sequence: Synthetic oligonucleotide
  Sense strand starting at position 1355 of SEQ ID NO: 1882287
guuucuggccugggaaagu

SEQ ID NO: 2109341 - RNA, 19 nt, Artificial Sequence
  Description of Artificial Sequence: Synthetic oligonucleotide
  Antisense strand to SEQ ID NO: 2109340
acuuucccaggccagaaac

SEQ ID NO: 2109342 - RNA, 19 nt, Artificial Sequence
  Description of Artificial Sequence: Synthetic oligonucleotide
  Sense strand starting at position 1521 of SEQ ID NO: 1882287
ugcacagucuagguggauu

SEQ ID NO: 2109343 - RNA, 19 nt, Artificial Sequence
  Description of Artificial Sequence: Synthetic oligonucleotide
  Antisense strand to SEQ ID NO: 2109342
aauccaccuagacugugca

SEQ ID NO: 2109344 - RNA, 19 nt, Artificial Sequence
  Description of Artificial Sequence: Synthetic oligonucleotide
  Sense strand starting at position 1523 of SEQ ID NO: 1882287
cacagucuagguggauuaa

SEQ ID NO: 2109345 - RNA, 19 nt, Artificial Sequence
  Description of Artificial Sequence: Synthetic oligonucleotide
  Antisense strand to SEQ ID NO: 2109344
uuaauccaccuagacugug

SEQ ID NO: 2109346 - RNA, 19 nt, Artificial Sequence
  Description of Artificial Sequence: Synthetic oligonucleotide
  Sense strand starting at position 1805 of SEQ ID NO: 1882287
gggcuccgcgccuuaauua

SEQ ID NO: 2109347 - RNA, 19 nt, Artificial Sequence
  Description of Artificial Sequence: Synthetic oligonucleotide
  Antisense strand to SEQ ID NO: 2109346
uaauuaaggcgcggagccc

SEQ ID NO: 2109348 - RNA, 19 nt, Artificial Sequence
  Description of Artificial Sequence: Synthetic oligonucleotide
  Sense strand starting at position 1918 of SEQ ID NO: 1882287
cgauccuuuagacgacuuu

SEQ ID NO: 2109349 - RNA, 19 nt, Artificial Sequence
  Description of Artificial Sequence: Synthetic oligonucleotide
  Antisense strand to SEQ ID NO: 2109348
aaagucgucuaaaggaucg

SEQ ID NO: 2109350 - RNA, 19 nt, Artificial Sequence
  Description of Artificial Sequence: Synthetic oligonucleotide
  Sense strand starting at position 2137 of SEQ ID NO: 1882287
gggcuggguguguaagaau

SEQ ID NO: 2109351 - RNA, 19 nt, Artificial Sequence
  Description of Artificial Sequence: Synthetic oligonucleotide
  Antisense strand to SEQ ID NO: 2109350
auucuuacacacccagccc

SEQ ID NO: 2109352 - RNA, 19 nt, Artificial Sequence
  Description of Artificial Sequence: Synthetic oligonucleotide
  Sense strand starting at position 161 of SEQ ID NO: 1882288
acgccuguguucuuauaag

SEQ ID NO: 2109353 - RNA, 19 nt, Artificial Sequence
  Description of Artificial Sequence: Synthetic oligonucleotide
  Antisense strand to SEQ ID NO: 2109352
cuuauaagaacacaggcgu

SEQ ID NO: 2109354 - RNA, 19 nt, Artificial Sequence
  Description of Artificial Sequence: Synthetic oligonucleotide
  Sense strand starting at position 178 of SEQ ID NO: 1882288
agccaugugcuccagggaa

SEQ ID NO: 2109355 - RNA, 19 nt, Artificial Sequence
  Description of Artificial Sequence: Synthetic oligonucleotide
  Antisense strand to SEQ ID NO: 2109354
uucccuggagcacauggcu

SEQ ID NO: 2109356 - RNA, 19 nt, Artificial Sequence
  Description of Artificial Sequence: Synthetic oligonucleotide
  Sense strand starting at position 180 of SEQ ID NO: 1882288
ccaugugcuccagggaaag

SEQ ID NO: 2109357 - RNA, 19 nt, Artificial Sequence
  Description of Artificial Sequence: Synthetic oligonucleotide
  Antisense strand to SEQ ID NO: 2109356
cuuucccuggagcacaugg

SEQ ID NO: 2109358 - RNA, 19 nt, Artificial Sequence
  Description of Artificial Sequence: Synthetic oligonucleotide
  Sense strand starting at position 225 of SEQ ID NO: 1882288
caguguacuuaagcuuuga

SEQ ID NO: 2109359 - RNA, 19 nt, Artificial Sequence
  Description of Artificial Sequence: Synthetic oligonucleotide
  Antisense strand to SEQ ID NO: 2109358
ucaaagcuuaaguacacug

SEQ ID NO: 2109360 - RNA, 19 nt, Artificial Sequence
  Description of Artificial Sequence: Synthetic oligonucleotide
  Sense strand starting at position 467 of SEQ ID NO: 1882288
cgaguuccaugcuccucaa

SEQ ID NO: 2109361 - RNA, 19 nt, Artificial Sequence
  Description of Artificial Sequence: Synthetic oligonucleotide
  Antisense strand to SEQ ID NO: 2109360
uugaggagcauggaacucg

SEQ ID NO: 2109362 - RNA, 19 nt, Artificial Sequence
  Description of Artificial Sequence: Synthetic oligonucleotide
  Sense strand starting at position 470 of SEQ ID NO: 1882288
guuccaugcuccucaaaga

SEQ ID NO: 2109363 - RNA, 19 nt, Artificial Sequence
  Description of Artificial Sequence: Synthetic oligonucleotide
  Antisense strand to SEQ ID NO: 2109362
ucuuugaggagcauggaac

SEQ ID NO: 2109364 - RNA, 19 nt, Artificial Sequence
  Description of Artificial Sequence: Synthetic oligonucleotide
  Sense strand starting at position 680 of SEQ ID NO: 1882288
acggguguuucuuucagaa

SEQ ID NO: 2109365 - RNA, 19 nt, Artificial Sequence
  Description of Artificial Sequence: Synthetic oligonucleotide
  Antisense strand to SEQ ID NO: 2109364
uucugaaagaaacacccgu

SEQ ID NO: 2109366 - RNA, 19 nt, Artificial Sequence
  Description of Artificial Sequence: Synthetic oligonucleotide
  Sense strand starting at position 731 of SEQ ID NO: 1882288
gguuucaggccucaugaga

SEQ ID NO: 2109367 - RNA, 19 nt, Artificial Sequence
  Description of Artificial Sequence: Synthetic oligonucleotide
  Antisense strand to SEQ ID NO: 2109366
ucucaugaggccugaaacc

SEQ ID NO: 2109368 - RNA, 19 nt, Artificial Sequence
  Description of Artificial Sequence: Synthetic oligonucleotide
  Sense strand starting at position 818 of SEQ ID NO: 1882288
ggcugcauccuuuggcuaa

SEQ ID NO: 2109369 - RNA, 19 nt, Artificial Sequence
  Description of Artificial Sequence: Synthetic oligonucleotide
  Antisense strand to SEQ ID NO: 2109368
uuagccaaaggaugcagcc

SEQ ID NO: 2109370 - RNA, 19 nt, Artificial Sequence
  Description of Artificial Sequence: Synthetic oligonucleotide
  Sense strand starting at position 822 of SEQ ID NO: 1882288
gcauccuuuggcuaaguga

SEQ ID NO: 2109371 - RNA, 19 nt, Artificial Sequence
  Description of Artificial Sequence: Synthetic oligonucleotide
  Antisense strand to SEQ ID NO: 2109370
ucacuuagccaaaggaugc

SEQ ID NO: 2109372 - RNA, 19 nt, Artificial Sequence
  Description of Artificial Sequence: Synthetic oligonucleotide
  Sense strand starting at position 825 of SEQ ID NO: 1882288
uccuuuggcuaagugacau

SEQ ID NO: 2109373 - RNA, 19 nt, Artificial Sequence
  Description of Artificial Sequence: Synthetic oligonucleotide
  Antisense strand to SEQ ID NO: 2109372
augucacuuagccaaagga

SEQ ID NO: 2109374 - RNA, 19 nt, Artificial Sequence
  Description of Artificial Sequence: Synthetic oligonucleotide
  Sense strand starting at position 831 of SEQ ID NO: 1882288
ggcuaagugacauguggag

SEQ ID NO: 2109375 - RNA, 19 nt, Artificial Sequence
  Description of Artificial Sequence: Synthetic oligonucleotide
  Antisense strand to SEQ ID NO: 2109374
cuccacaugucacuuagcc

SEQ ID NO: 2109376 - RNA, 19 nt, Artificial Sequence
  Description of Artificial Sequence: Synthetic oligonucleotide
  Sense strand starting at position 1376 of SEQ ID NO: 1882288
cucccauacuuagagaaag

SEQ ID NO: 2109377 - RNA, 19 nt, Artificial Sequence
  Description of Artificial Sequence: Synthetic oligonucleotide
  Antisense strand to SEQ ID NO: 2109376
cuuucucuaaguaugggag

SEQ ID NO: 2109378 - RNA, 19 nt, Artificial Sequence
  Description of Artificial Sequence: Synthetic oligonucleotide
  Sense strand starting at position 1418 of SEQ ID NO: 1882288
ggauguccucuccgguaaa

SEQ ID NO: 2109379 - RNA, 19 nt, Artificial Sequence
  Description of Artificial Sequence: Synthetic oligonucleotide
  Antisense strand to SEQ ID NO: 2109378
uuuaccggagaggacaucc

SEQ ID NO: 2109380 - RNA, 19 nt, Artificial Sequence
  Description of Artificial Sequence: Synthetic oligonucleotide
  Sense strand starting at position 2601 of SEQ ID NO: 1882288
gcuuucuuggucgaaggua

SEQ ID NO: 2109381 - RNA, 19 nt, Artificial Sequence
  Description of Artificial Sequence: Synthetic oligonucleotide
  Antisense strand to SEQ ID NO: 2109380
uaccuucgaccaagaaagc

SEQ ID NO: 2109382 - RNA, 19 nt, Artificial Sequence
  Description of Artificial Sequence: Synthetic oligonucleotide
  Sense strand starting at position 2606 of SEQ ID NO: 1882288
cuuggucgaagguaugaga

SEQ ID NO: 2109383 - RNA, 19 nt, Artificial Sequence
  Description of Artificial Sequence: Synthetic oligonucleotide
  Antisense strand to SEQ ID NO: 2109382
ucucauaccuucgaccaag

SEQ ID NO: 2109384 - RNA, 19 nt, Artificial Sequence
  Description of Artificial Sequence: Synthetic oligonucleotide
  Sense strand starting at position 2691 of SEQ ID NO: 1882288
uggaugauugaguggguga

SEQ ID NO: 2109385 - RNA, 19 nt, Artificial Sequence
  Description of Artificial Sequence: Synthetic oligonucleotide
  Antisense strand to SEQ ID NO: 2109384
ucacccacucaaucaucca

SEQ ID NO: 2109386 - RNA, 19 nt, Artificial Sequence
  Description of Artificial Sequence: Synthetic oligonucleotide
  Sense strand starting at position 2749 of SEQ ID NO: 1882288
uggccaguuucuccgaauu

SEQ ID NO: 2109387 - RNA, 19 nt, Artificial Sequence
  Description of Artificial Sequence: Synthetic oligonucleotide
  Antisense strand to SEQ ID NO: 2109386
aauucggagaaacuggcca

SEQ ID NO: 2109388 - RNA, 19 nt, Artificial Sequence
  Description of Artificial Sequence: Synthetic oligonucleotide
  Sense strand starting at position 2832 of SEQ ID NO: 1882288
agguucuccagcuguuaga

SEQ ID NO: 2109389 - RNA, 19 nt, Artificial Sequence
  Description of Artificial Sequence: Synthetic oligonucleotide
  Antisense strand to SEQ ID NO: 2109388
ucuaacagcuggagaaccu

SEQ ID NO: 2109390 - RNA, 19 nt, Artificial Sequence
  Description of Artificial Sequence: Synthetic oligonucleotide
  Sense strand starting at position 2839 of SEQ ID NO: 1882288
ccagcuguuagauguguca

SEQ ID NO: 2109391 - RNA, 19 nt, Artificial Sequence
  Description of Artificial Sequence: Synthetic oligonucleotide
  Antisense strand to SEQ ID NO: 2109390
ugacacaucuaacagcugg

SEQ ID NO: 2109392 - RNA, 19 nt, Artificial Sequence
  Description of Artificial Sequence: Synthetic oligonucleotide
  Sense strand starting at position 2841 of SEQ ID NO: 1882288
agcuguuagaugugucaaa

SEQ ID NO: 2109393 - RNA, 19 nt, Artificial Sequence
  Description of Artificial Sequence: Synthetic oligonucleotide
  Antisense strand to SEQ ID NO: 2109392
uuugacacaucuaacagcu

SEQ ID NO: 2109394 - RNA, 19 nt, Artificial Sequence
  Description of Artificial Sequence: Synthetic oligonucleotide
  Sense strand starting at position 2842 of SEQ ID NO: 1882288
gcuguuagaugugucaaag

SEQ ID NO: 2109395 - RNA, 19 nt, Artificial Sequence
  Description of Artificial Sequence: Synthetic oligonucleotide
  Antisense strand to SEQ ID NO: 2109394
cuuugacacaucuaacagc

SEQ ID NO: 2109396 - RNA, 19 nt, Artificial Sequence
  Description of Artificial Sequence: Synthetic oligonucleotide
  Sense strand starting at position 2933 of SEQ ID NO: 1882288
agugcuuccuguguaccaa

SEQ ID NO: 2109397 - RNA, 19 nt, Artificial Sequence
  Description of Artificial Sequence: Synthetic oligonucleotide
  Antisense strand to SEQ ID NO: 2109396
uugguacacaggaagcacu

SEQ ID NO: 2109398 - RNA, 19 nt, Artificial Sequence
  Description of Artificial Sequence: Synthetic oligonucleotide
  Sense strand starting at position 2960 of SEQ ID NO: 1882288
gaaaccauuugguguauuu

SEQ ID NO: 2109399 - RNA, 19 nt, Artificial Sequence
  Description of Artificial Sequence: Synthetic oligonucleotide
  Antisense strand to SEQ ID NO: 2109398
aaauacaccaaaugguuuc

SEQ ID NO: 2109400 - RNA, 19 nt, Artificial Sequence
  Description of Artificial Sequence: Synthetic oligonucleotide
  Sense strand starting at position 3005 of SEQ ID NO: 1882288
accucucuggguugcuaua

SEQ ID NO: 2109401 - RNA, 19 nt, Artificial Sequence
  Description of Artificial Sequence: Synthetic oligonucleotide
  Antisense strand to SEQ ID NO: 2109400
uauagcaacccagagaggu

SEQ ID NO: 2109402 - RNA, 19 nt, Artificial Sequence
  Description of Artificial Sequence: Synthetic oligonucleotide
  Sense strand starting at position 3007 of SEQ ID NO: 1882288
cucucuggguugcuauaaa

SEQ ID NO: 2109403 - RNA, 19 nt, Artificial Sequence
  Description of Artificial Sequence: Synthetic oligonucleotide
  Antisense strand to SEQ ID NO: 2109402
uuuauagcaacccagagag

SEQ ID NO: 2109404 - RNA, 19 nt, Artificial Sequence
  Description of Artificial Sequence: Synthetic oligonucleotide
  Sense strand starting at position 3032 of SEQ ID NO: 1882288
gggagauaucagugaagca

SEQ ID NO: 2109405 - RNA, 19 nt, Artificial Sequence
  Description of Artificial Sequence: Synthetic oligonucleotide
  Antisense strand to SEQ ID NO: 2109404
ugcuucacugauaucuccc

SEQ ID NO: 2109406 - RNA, 19 nt, Artificial Sequence
  Description of Artificial Sequence: Synthetic oligonucleotide
  Sense strand starting at position 3156 of SEQ ID NO: 1882288
ggaagaauugguuguggaa

SEQ ID NO: 2109407 - RNA, 19 nt, Artificial Sequence
  Description of Artificial Sequence: Synthetic oligonucleotide
  Antisense strand to SEQ ID NO: 2109406
uuccacaaccaauucuucc

SEQ ID NO: 2109408 - RNA, 19 nt, Artificial Sequence
  Description of Artificial Sequence: Synthetic oligonucleotide
  Sense strand starting at position 3172 of SEQ ID NO: 1882288
gaaguuucugaguguucca

SEQ ID NO: 2109409 - RNA, 19 nt, Artificial Sequence
  Description of Artificial Sequence: Synthetic oligonucleotide
  Antisense strand to SEQ ID NO: 2109408
uggaacacucagaaacuuc

SEQ ID NO: 2109410 - RNA, 19 nt, Artificial Sequence
  Description of Artificial Sequence: Synthetic oligonucleotide
  Sense strand starting at position 3306 of SEQ ID NO: 1882288
guaaaucauuggccuauga

SEQ ID NO: 2109411 - RNA, 19 nt, Artificial Sequence
  Description of Artificial Sequence: Synthetic oligonucleotide
  Antisense strand to SEQ ID NO: 2109410
ucauaggccaaugauuuac

SEQ ID NO: 2109412 - RNA, 19 nt, Artificial Sequence
  Description of Artificial Sequence: Synthetic oligonucleotide
  Sense strand starting at position 3374 of SEQ ID NO: 1882288
uggauaaacuugcugugga

SEQ ID NO: 2109413 - RNA, 19 nt, Artificial Sequence
  Description of Artificial Sequence: Synthetic oligonucleotide
  Antisense strand to SEQ ID NO: 2109412
uccacagcaaguuuaucca

SEQ ID NO: 2109414 - RNA, 19 nt, Artificial Sequence
  Description of Artificial Sequence: Synthetic oligonucleotide
  Sense strand starting at position 3445 of SEQ ID NO: 1882288
agauguguugcucacugga

SEQ ID NO: 2109415 - RNA, 19 nt, Artificial Sequence
  Description of Artificial Sequence: Synthetic oligonucleotide
  Antisense strand to SEQ ID NO: 2109414
uccagugagcaacacaucu

SEQ ID NO: 2109416 - RNA, 19 nt, Artificial Sequence
  Description of Artificial Sequence: Synthetic oligonucleotide
  Sense strand starting at position 3447 of SEQ ID NO: 1882288
auguguugcucacuggaaa

SEQ ID NO: 2109417 - RNA, 19 nt, Artificial Sequence
  Description of Artificial Sequence: Synthetic oligonucleotide
  Antisense strand to SEQ ID NO: 2109416
uuuccagugagcaacacau

SEQ ID NO: 2109418 - RNA, 19 nt, Artificial Sequence
  Description of Artificial Sequence: Synthetic oligonucleotide
  Sense strand starting at position 3448 of SEQ ID NO: 1882288
uguguugcucacuggaaac

SEQ ID NO: 2109419 - RNA, 19 nt, Artificial Sequence
  Description of Artificial Sequence: Synthetic oligonucleotide
  Antisense strand to SEQ ID NO: 2109418
guuuccagugagcaacaca

SEQ ID NO: 2109420 - RNA, 19 nt, Artificial Sequence
  Description of Artificial Sequence: Synthetic oligonucleotide
  Sense strand starting at position 3458 of SEQ ID NO: 1882288
acuggaaaccaguggaguu

SEQ ID NO: 2109421 - RNA, 19 nt, Artificial Sequence
  Description of Artificial Sequence: Synthetic oligonucleotide
  Antisense strand to SEQ ID NO: 2109420
aacuccacugguuuccagu

SEQ ID NO: 2109422 - RNA, 19 nt, Artificial Sequence
  Description of Artificial Sequence: Synthetic oligonucleotide
  Sense strand starting at position 3459 of SEQ ID NO: 1882288
cuggaaaccaguggaguuu

SEQ ID NO: 2109423 - RNA, 19 nt, Artificial Sequence
  Description of Artificial Sequence: Synthetic oligonucleotide
  Antisense strand to SEQ ID NO: 2109422
aaacuccacugguuuccag

SEQ ID NO: 2109424 - RNA, 19 nt, Artificial Sequence
  Description of Artificial Sequence: Synthetic oligonucleotide
  Sense strand starting at position 3468 of SEQ ID NO: 1882288
aguggaguuuaugagaaua

SEQ ID NO: 2109425 - RNA, 19 nt, Artificial Sequence
  Description of Artificial Sequence: Synthetic oligonucleotide
  Antisense strand to SEQ ID NO: 2109424
uauucucauaaacuccacu

SEQ ID NO: 2109426 - RNA, 19 nt, Artificial Sequence
  Description of Artificial Sequence: Synthetic oligonucleotide
  Sense strand starting at position 3470 of SEQ ID NO: 1882288
uggaguuuaugagaauaaa

SEQ ID NO: 2109427 - RNA, 19 nt, Artificial Sequence
  Description of Artificial Sequence: Synthetic oligonucleotide
  Antisense strand to SEQ ID NO: 2109426
uuuauucucauaaacucca

SEQ ID NO: 2109428 - RNA, 19 nt, Artificial Sequence
  Description of Artificial Sequence: Synthetic oligonucleotide
  Sense strand starting at position 3610 of SEQ ID NO: 1882288
gguacuuauuaccaaggga

SEQ ID NO: 2109429 - RNA, 19 nt, Artificial Sequence
  Description of Artificial Sequence: Synthetic oligonucleotide
  Antisense strand to SEQ ID NO: 2109428
ucccuugguaauaaguacc

SEQ ID NO: 2109430 - RNA, 19 nt, Artificial Sequence
  Description of Artificial Sequence: Synthetic oligonucleotide
  Sense strand starting at position 3645 of SEQ ID NO: 1882288
gaacacauuugugaaguau

SEQ ID NO: 2109431 - RNA, 19 nt, Artificial Sequence
  Description of Artificial Sequence: Synthetic oligonucleotide
  Antisense strand to SEQ ID NO: 2109430
auacuucacaaauguguuc

SEQ ID NO: 2109432 - RNA, 19 nt, Artificial Sequence
  Description of Artificial Sequence: Synthetic oligonucleotide
  Sense strand starting at position 215 of SEQ ID NO: 1882289
augagaagucauggucuuu

SEQ ID NO: 2109433 - RNA, 19 nt, Artificial Sequence
  Description of Artificial Sequence: Synthetic oligonucleotide
  Antisense strand to SEQ ID NO: 2109432
aaagaccaugacuucucau

SEQ ID NO: 2109434 - RNA, 19 nt, Artificial Sequence
  Description of Artificial Sequence: Synthetic oligonucleotide
  Sense strand starting at position 536 of SEQ ID NO: 1882289
uggucauggucucuuaaac

SEQ ID NO: 2109435 - RNA, 19 nt, Artificial Sequence
  Description of Artificial Sequence: Synthetic oligonucleotide
  Antisense strand to SEQ ID NO: 2109434
guuuaagagaccaugacca

SEQ ID NO: 2109436 - RNA, 19 nt, Artificial Sequence
  Description of Artificial Sequence: Synthetic oligonucleotide
  Sense strand starting at position 584 of SEQ ID NO: 1882289
cuggguacaucugagguuu

SEQ ID NO: 2109437 - RNA, 19 nt, Artificial Sequence
  Description of Artificial Sequence: Synthetic oligonucleotide
  Antisense strand to SEQ ID NO: 2109436
aaaccucagauguacccag

SEQ ID NO: 2109438 - RNA, 19 nt, Artificial Sequence
  Description of Artificial Sequence: Synthetic oligonucleotide
  Sense strand starting at position 608 of SEQ ID NO: 1882289
ggcaaauccuugcaacuga

SEQ ID NO: 2109439 - RNA, 19 nt, Artificial Sequence
  Description of Artificial Sequence: Synthetic oligonucleotide
  Antisense strand to SEQ ID NO: 2109438
ucaguugcaaggauuugcc

SEQ ID NO: 2109440 - RNA, 19 nt, Artificial Sequence
  Description of Artificial Sequence: Synthetic oligonucleotide
  Sense strand starting at position 641 of SEQ ID NO: 1882289
gcaagcaucuccugaguuu

SEQ ID NO: 2109441 - RNA, 19 nt, Artificial Sequence
  Description of Artificial Sequence: Synthetic oligonucleotide
  Antisense strand to SEQ ID NO: 2109440
aaacucaggagaugcuugc

SEQ ID NO: 2109442 - RNA, 19 nt, Artificial Sequence
  Description of Artificial Sequence: Synthetic oligonucleotide
  Sense strand starting at position 642 of SEQ ID NO: 1882289
caagcaucuccugaguuug

SEQ ID NO: 2109443 - RNA, 19 nt, Artificial Sequence
  Description of Artificial Sequence: Synthetic oligonucleotide
  Antisense strand to SEQ ID NO: 2109442
caaacucaggagaugcuug

SEQ ID NO: 2109444 - RNA, 19 nt, Artificial Sequence
  Description of Artificial Sequence: Synthetic oligonucleotide
  Sense strand starting at position 653 of SEQ ID NO: 1882289
ugaguuuggguguaucauc

SEQ ID NO: 2109445 - RNA, 19 nt, Artificial Sequence
  Description of Artificial Sequence: Synthetic oligonucleotide
  Antisense strand to SEQ ID NO: 2109444
gaugauacacccaaacuca

SEQ ID NO: 2109446 - RNA, 19 nt, Artificial Sequence
  Description of Artificial Sequence: Synthetic oligonucleotide
  Sense strand starting at position 833 of SEQ ID NO: 1882289
gcuuuaaauagccauggga

SEQ ID NO: 2109447 - RNA, 19 nt, Artificial Sequence
  Description of Artificial Sequence: Synthetic oligonucleotide
  Antisense strand to SEQ ID NO: 2109446
ucccauggcuauuuaaagc

SEQ ID NO: 2109448 - RNA, 19 nt, Artificial Sequence
  Description of Artificial Sequence: Synthetic oligonucleotide
  Sense strand starting at position 847 of SEQ ID NO: 1882289
ugggacccauccugaaaua

SEQ ID NO: 2109449 - RNA, 19 nt, Artificial Sequence
  Description of Artificial Sequence: Synthetic oligonucleotide
  Antisense strand to SEQ ID NO: 2109448
uauuucaggauggguccca

SEQ ID NO: 2109450 - RNA, 19 nt, Artificial Sequence
  Description of Artificial Sequence: Synthetic oligonucleotide
  Sense strand starting at position 947 of SEQ ID NO: 1882289
ggucgaugggcuuaagaau

SEQ ID NO: 2109451 - RNA, 19 nt, Artificial Sequence
  Description of Artificial Sequence: Synthetic oligonucleotide
  Antisense strand to SEQ ID NO: 2109450
auucuuaagcccaucgacc

SEQ ID NO: 2109452 - RNA, 19 nt, Artificial Sequence
  Description of Artificial Sequence: Synthetic oligonucleotide
  Sense strand starting at position 953 of SEQ ID NO: 1882289
ugggcuuaagaauggaagu

SEQ ID NO: 2109453 - RNA, 19 nt, Artificial Sequence
  Description of Artificial Sequence: Synthetic oligonucleotide
  Antisense strand to SEQ ID NO: 2109452
acuuccauucuuaagccca

SEQ ID NO: 2109454 - RNA, 19 nt, Artificial Sequence
  Description of Artificial Sequence: Synthetic oligonucleotide
  Sense strand starting at position 1007 of SEQ ID NO: 1882289
cagauaugucaagguaaag

SEQ ID NO: 2109455 - RNA, 19 nt, Artificial Sequence
  Description of Artificial Sequence: Synthetic oligonucleotide
  Antisense strand to SEQ ID NO: 2109454
cuuuaccuugacauaucug

SEQ ID NO: 2109456 - RNA, 19 nt, Artificial Sequence
  Description of Artificial Sequence: Synthetic oligonucleotide
  Sense strand starting at position 1083 of SEQ ID NO: 1882289
uuuaguuucucugccauau

SEQ ID NO: 2109457 - RNA, 19 nt, Artificial Sequence
  Description of Artificial Sequence: Synthetic oligonucleotide
  Antisense strand to SEQ ID NO: 2109456
auauggcagagaaacuaaa

SEQ ID NO: 2109458 - RNA, 19 nt, Artificial Sequence
  Description of Artificial Sequence: Synthetic oligonucleotide
  Sense strand starting at position 1267 of SEQ ID NO: 1882289
ccuucuugaucucgugaga

SEQ ID NO: 2109459 - RNA, 19 nt, Artificial Sequence
  Description of Artificial Sequence: Synthetic oligonucleotide
  Antisense strand to SEQ ID NO: 2109458
ucucacgagaucaagaagg

SEQ ID NO: 2109460 - RNA, 19 nt, Artificial Sequence
  Description of Artificial Sequence: Synthetic oligonucleotide
  Sense strand starting at position 1270 of SEQ ID NO: 1882289
ucuugaucucgugagagcu

SEQ ID NO: 2109461 - RNA, 19 nt, Artificial Sequence
  Description of Artificial Sequence: Synthetic oligonucleotide
  Antisense strand to SEQ ID NO: 2109460
agcucucacgagaucaaga

SEQ ID NO: 2109462 - RNA, 19 nt, Artificial Sequence
  Description of Artificial Sequence: Synthetic oligonucleotide
  Sense strand starting at position 1272 of SEQ ID NO: 1882289
uugaucucgugagagcuuu

SEQ ID NO: 2109463 - RNA, 19 nt, Artificial Sequence
  Description of Artificial Sequence: Synthetic oligonucleotide
  Antisense strand to SEQ ID NO: 2109462
aaagcucucacgagaucaa

SEQ ID NO: 2109464 - RNA, 19 nt, Artificial Sequence
  Description of Artificial Sequence: Synthetic oligonucleotide
  Sense strand starting at position 1278 of SEQ ID NO: 1882289
ucgugagagcuuugcaguu

SEQ ID NO: 2109465 - RNA, 19 nt, Artificial Sequence
  Description of Artificial Sequence: Synthetic oligonucleotide
  Antisense strand to SEQ ID NO: 2109464
aacugcaaagcucucacga

SEQ ID NO: 2109466 - RNA, 19 nt, Artificial Sequence
  Description of Artificial Sequence: Synthetic oligonucleotide
  Sense strand starting at position 1423 of SEQ ID NO: 1882289
ccugucuucuuccagacau

SEQ ID NO: 2109467 - RNA, 19 nt, Artificial Sequence
  Description of Artificial Sequence: Synthetic oligonucleotide
  Antisense strand to SEQ ID NO: 2109466
augucuggaagaagacagg

SEQ ID NO: 2109468 - RNA, 19 nt, Artificial Sequence
  Description of Artificial Sequence: Synthetic oligonucleotide
  Sense strand starting at position 1425 of SEQ ID NO: 1882289
ugucuucuuccagacauuc

SEQ ID NO: 2109469 - RNA, 19 nt, Artificial Sequence
  Description of Artificial Sequence: Synthetic oligonucleotide
  Antisense strand to SEQ ID NO: 2109468
gaaugucuggaagaagaca

SEQ ID NO: 2109470 - RNA, 19 nt, Artificial Sequence
  Description of Artificial Sequence: Synthetic oligonucleotide
  Sense strand starting at position 1990 of SEQ ID NO: 1882289
aggagagauucugcgcaug

SEQ ID NO: 2109471 - RNA, 19 nt, Artificial Sequence
  Description of Artificial Sequence: Synthetic oligonucleotide
  Antisense strand to SEQ ID NO: 2109470
caugcgcagaaucucuccu

SEQ ID NO: 2109472 - RNA, 19 nt, Artificial Sequence
  Description of Artificial Sequence: Synthetic oligonucleotide
  Sense strand starting at position 1992 of SEQ ID NO: 1882289
gagagauucugcgcaugug

SEQ ID NO: 2109473 - RNA, 19 nt, Artificial Sequence
  Description of Artificial Sequence: Synthetic oligonucleotide
  Antisense strand to SEQ ID NO: 2109472
cacaugcgcagaaucucuc

SEQ ID NO: 2109474 - RNA, 19 nt, Artificial Sequence
  Description of Artificial Sequence: Synthetic oligonucleotide
  Sense strand starting at position 1995 of SEQ ID NO: 1882289
agauucugcgcaugugcaa

SEQ ID NO: 2109475 - RNA, 19 nt, Artificial Sequence
  Description of Artificial Sequence: Synthetic oligonucleotide
  Antisense strand to SEQ ID NO: 2109474
uugcacaugcgcagaaucu

SEQ ID NO: 2109476 - RNA, 19 nt, Artificial Sequence
  Description of Artificial Sequence: Synthetic oligonucleotide
  Sense strand starting at position 2008 of SEQ ID NO: 1882289
gugcaaauaugugucgaga

SEQ ID NO: 2109477 - RNA, 19 nt, Artificial Sequence
  Description of Artificial Sequence: Synthetic oligonucleotide
  Antisense strand to SEQ ID NO: 2109476
ucucgacacauauuugcac

SEQ ID NO: 2109478 - RNA, 19 nt, Artificial Sequence
  Description of Artificial Sequence: Synthetic oligonucleotide
  Sense strand starting at position 2114 of SEQ ID NO: 1882289
cagcgucaaucauggauau

SEQ ID NO: 2109479 - RNA, 19 nt, Artificial Sequence
  Description of Artificial Sequence: Synthetic oligonucleotide
  Antisense strand to SEQ ID NO: 2109478
auauccaugauugacgcug

SEQ ID NO: 2109480 - RNA, 19 nt, Artificial Sequence
  Description of Artificial Sequence: Synthetic oligonucleotide
  Sense strand starting at position 2305 of SEQ ID NO: 1882289
gcaucugucaggcgguaca

SEQ ID NO: 2109481 - RNA, 19 nt, Artificial Sequence
  Description of Artificial Sequence: Synthetic oligonucleotide
  Antisense strand to SEQ ID NO: 2109480
uguaccgccugacagaugc

SEQ ID NO: 2109482 - RNA, 19 nt, Artificial Sequence
  Description of Artificial Sequence: Synthetic oligonucleotide
  Sense strand starting at position 2735 of SEQ ID NO: 1882289
guaguucuaggaggagaca

SEQ ID NO: 2109483 - RNA, 19 nt, Artificial Sequence
  Description of Artificial Sequence: Synthetic oligonucleotide
  Antisense strand to SEQ ID NO: 2109482
ugucuccuccuagaacuac

SEQ ID NO: 2109484 - RNA, 19 nt, Artificial Sequence
  Description of Artificial Sequence: Synthetic oligonucleotide
  Sense strand starting at position 2956 of SEQ ID NO: 1882289
agauguaguugcugacauc

SEQ ID NO: 2109485 - RNA, 19 nt, Artificial Sequence
  Description of Artificial Sequence: Synthetic oligonucleotide
  Antisense strand to SEQ ID NO: 2109484
gaugucagcaacuacaucu

SEQ ID NO: 2109486 - RNA, 19 nt, Artificial Sequence
  Description of Artificial Sequence: Synthetic oligonucleotide
  Sense strand starting at position 3002 of SEQ ID NO: 1882289
agggaugguuccugaacag

SEQ ID NO: 2109487 - RNA, 19 nt, Artificial Sequence
  Description of Artificial Sequence: Synthetic oligonucleotide
  Antisense strand to SEQ ID NO: 2109486
cuguucaggaaccaucccu

SEQ ID NO: 2109488 - RNA, 19 nt, Artificial Sequence
  Description of Artificial Sequence: Synthetic oligonucleotide
  Sense strand starting at position 3134 of SEQ ID NO: 1882289
gagcuacagcguugaacaa

SEQ ID NO: 2109489 - RNA, 19 nt, Artificial Sequence
  Description of Artificial Sequence: Synthetic oligonucleotide
  Antisense strand to SEQ ID NO: 2109488
uuguucaacgcuguagcuc

SEQ ID NO: 2109490 - RNA, 19 nt, Artificial Sequence
  Description of Artificial Sequence: Synthetic oligonucleotide
  Sense strand starting at position 3201 of SEQ ID NO: 1882289
uggaauaauuacuaaggaa

SEQ ID NO: 2109491 - RNA, 19 nt, Artificial Sequence
  Description of Artificial Sequence: Synthetic oligonucleotide
  Antisense strand to SEQ ID NO: 2109490
uuccuuaguaauuauucca

SEQ ID NO: 2109492 - RNA, 19 nt, Artificial Sequence
  Description of Artificial Sequence: Synthetic oligonucleotide
  Sense strand starting at position 3226 of SEQ ID NO: 1882289
uggcaugagucaguagaag

SEQ ID NO: 2109493 - RNA, 19 nt, Artificial Sequence
  Description of Artificial Sequence: Synthetic oligonucleotide
  Antisense strand to SEQ ID NO: 2109492
cuucuacugacucaugcca

SEQ ID NO: 2109494 - RNA, 19 nt, Artificial Sequence
  Description of Artificial Sequence: Synthetic oligonucleotide
  Sense strand starting at position 3346 of SEQ ID NO: 1882289
ugggcaggcuugccuuaaa

SEQ ID NO: 2109495 - RNA, 19 nt, Artificial Sequence
  Description of Artificial Sequence: Synthetic oligonucleotide
  Antisense strand to SEQ ID NO: 2109494
uuuaaggcaagccugccca

SEQ ID NO: 2109496 - RNA, 19 nt, Artificial Sequence
  Description of Artificial Sequence: Synthetic oligonucleotide
  Sense strand starting at position 3349 of SEQ ID NO: 1882289
gcaggcuugccuuaaagua

SEQ ID NO: 2109497 - RNA, 19 nt, Artificial Sequence
  Description of Artificial Sequence: Synthetic oligonucleotide
  Antisense strand to SEQ ID NO: 2109496
uacuuuaaggcaagccugc

SEQ ID NO: 2109498 - RNA, 19 nt, Artificial Sequence
  Description of Artificial Sequence: Synthetic oligonucleotide
  Sense strand starting at position 3430 of SEQ ID NO: 1882289
gggagcuggucccauuauu

SEQ ID NO: 2109499 - RNA, 19 nt, Artificial Sequence
  Description of Artificial Sequence: Synthetic oligonucleotide
  Antisense strand to SEQ ID NO: 2109498
aauaaugggaccagcuccc

SEQ ID NO: 2109500 - RNA, 19 nt, Artificial Sequence
  Description of Artificial Sequence: Synthetic oligonucleotide
  Sense strand starting at position 3484 of SEQ ID NO: 1882289
acauguagagcuggugaaa

SEQ ID NO: 2109501 - RNA, 19 nt, Artificial Sequence
  Description of Artificial Sequence: Synthetic oligonucleotide
  Antisense strand to SEQ ID NO: 2109500
uuucaccagcucuacaugu

SEQ ID NO: 2109502 - RNA, 19 nt, Artificial Sequence
  Description of Artificial Sequence: Synthetic oligonucleotide
  Sense strand starting at position 3503 of SEQ ID NO: 1882289
aggacaauggcuggaguaa

SEQ ID NO: 2109503 - RNA, 19 nt, Artificial Sequence
  Description of Artificial Sequence: Synthetic oligonucleotide
  Antisense strand to SEQ ID NO: 2109502
uuacuccagccauuguccu

SEQ ID NO: 2109504 - RNA, 19 nt, Artificial Sequence
  Description of Artificial Sequence: Synthetic oligonucleotide
  Sense strand starting at position 3556 of SEQ ID NO: 1882289
ggagauaucggaugcccag

SEQ ID NO: 2109505 - RNA, 19 nt, Artificial Sequence
  Description of Artificial Sequence: Synthetic oligonucleotide
  Antisense strand to SEQ ID NO: 2109504
cugggcauccgauaucucc

SEQ ID NO: 2109506 - RNA, 19 nt, Artificial Sequence
  Description of Artificial Sequence: Synthetic oligonucleotide
  Sense strand starting at position 3691 of SEQ ID NO: 1882289
gaacacaucccugguugua

SEQ ID NO: 2109507 - RNA, 19 nt, Artificial Sequence
  Description of Artificial Sequence: Synthetic oligonucleotide
  Antisense strand to SEQ ID NO: 2109506
uacaaccagggauguguuc

SEQ ID NO: 2109508 - RNA, 19 nt, Artificial Sequence
  Description of Artificial Sequence: Synthetic oligonucleotide
  Sense strand starting at position 3693 of SEQ ID NO: 1882289
acacaucccugguuguaau

SEQ ID NO: 2109509 - RNA, 19 nt, Artificial Sequence
  Description of Artificial Sequence: Synthetic oligonucleotide
  Antisense strand to SEQ ID NO: 2109508
auuacaaccagggaugugu

SEQ ID NO: 2109510 - RNA, 19 nt, Artificial Sequence
  Description of Artificial Sequence: Synthetic oligonucleotide
  Sense strand starting at position 123 of SEQ ID NO: 1882290
cuuuaaauggaagguaauu

SEQ ID NO: 2109511 - RNA, 19 nt, Artificial Sequence
  Description of Artificial Sequence: Synthetic oligonucleotide
  Antisense strand to SEQ ID NO: 2109510
aauuaccuuccauuuaaag

SEQ ID NO: 2109512 - RNA, 19 nt, Artificial Sequence
  Description of Artificial Sequence: Synthetic oligonucleotide
  Sense strand starting at position 195 of SEQ ID NO: 1882290
cuuucuacacuguaaugua

SEQ ID NO: 2109513 - RNA, 19 nt, Artificial Sequence
  Description of Artificial Sequence: Synthetic oligonucleotide
  Antisense strand to SEQ ID NO: 2109512
uacauuacaguguagaaag

SEQ ID NO: 2109514 - RNA, 19 nt, Artificial Sequence
  Description of Artificial Sequence: Synthetic oligonucleotide
  Sense strand starting at position 278 of SEQ ID NO: 1882290
ugucauuauuuggcuuacu

SEQ ID NO: 2109515 - RNA, 19 nt, Artificial Sequence
  Description of Artificial Sequence: Synthetic oligonucleotide
  Antisense strand to SEQ ID NO: 2109514
aguaagccaaauaaugaca

SEQ ID NO: 2109516 - RNA, 19 nt, Artificial Sequence
  Description of Artificial Sequence: Synthetic oligonucleotide
  Sense strand starting at position 279 of SEQ ID NO: 1882290
gucauuauuuggcuuacuu

SEQ ID NO: 2109517 - RNA, 19 nt, Artificial Sequence
  Description of Artificial Sequence: Synthetic oligonucleotide
  Antisense strand to SEQ ID NO: 2109516
aaguaagccaaauaaugac

SEQ ID NO: 2109518 - RNA, 19 nt, Artificial Sequence
  Description of Artificial Sequence: Synthetic oligonucleotide
  Sense strand starting at position 445 of SEQ ID NO: 1882290
ggaucuuuacugggccauu

SEQ ID NO: 2109519 - RNA, 19 nt, Artificial Sequence
  Description of Artificial Sequence: Synthetic oligonucleotide
  Antisense strand to SEQ ID NO: 2109518
aauggcccaguaaagaucc

SEQ ID NO: 2109520 - RNA, 19 nt, Artificial Sequence
  Description of Artificial Sequence: Synthetic oligonucleotide
  Sense strand starting at position 455 of SEQ ID NO: 1882290
ugggccauuuguuugugau

SEQ ID NO: 2109521 - RNA, 19 nt, Artificial Sequence
  Description of Artificial Sequence: Synthetic oligonucleotide
  Antisense strand to SEQ ID NO: 2109520
aucacaaacaaauggccca

SEQ ID NO: 2109522 - RNA, 19 nt, Artificial Sequence
  Description of Artificial Sequence: Synthetic oligonucleotide
  Sense strand starting at position 456 of SEQ ID NO: 1882290
gggccauuuguuugugaug

SEQ ID NO: 2109523 - RNA, 19 nt, Artificial Sequence
  Description of Artificial Sequence: Synthetic oligonucleotide
  Antisense strand to SEQ ID NO: 2109522
caucacaaacaaauggccc

SEQ ID NO: 2109524 - RNA, 19 nt, Artificial Sequence
  Description of Artificial Sequence: Synthetic oligonucleotide
  Sense strand starting at position 463 of SEQ ID NO: 1882290
uuguuugugauggaggcau

SEQ ID NO: 2109525 - RNA, 19 nt, Artificial Sequence
  Description of Artificial Sequence: Synthetic oligonucleotide
  Antisense strand to SEQ ID NO: 2109524
augccuccaucacaaacaa

SEQ ID NO: 2109526 - RNA, 19 nt, Artificial Sequence
  Description of Artificial Sequence: Synthetic oligonucleotide
  Sense strand starting at position 480 of SEQ ID NO: 1882290
augaaauucgugcaaagug

SEQ ID NO: 2109527 - RNA, 19 nt, Artificial Sequence
  Description of Artificial Sequence: Synthetic oligonucleotide
  Antisense strand to SEQ ID NO: 2109526
cacuuugcacgaauuucau

SEQ ID NO: 2109528 - RNA, 19 nt, Artificial Sequence
  Description of Artificial Sequence: Synthetic oligonucleotide
  Sense strand starting at position 496 of SEQ ID NO: 1882290
guguaauuacuggauugcu

SEQ ID NO: 2109529 - RNA, 19 nt, Artificial Sequence
  Description of Artificial Sequence: Synthetic oligonucleotide
  Antisense strand to SEQ ID NO: 2109528
agcaauccaguaauuacac

SEQ ID NO: 2109530 - RNA, 19 nt, Artificial Sequence
  Description of Artificial Sequence: Synthetic oligonucleotide
  Sense strand starting at position 580 of SEQ ID NO: 1882290
acugacagcccagguauua

SEQ ID NO: 2109531 - RNA, 19 nt, Artificial Sequence
  Description of Artificial Sequence: Synthetic oligonucleotide
  Antisense strand to SEQ ID NO: 2109530
uaauaccugggcugucagu

SEQ ID NO: 2109532 - RNA, 19 nt, Artificial Sequence
  Description of Artificial Sequence: Synthetic oligonucleotide
  Sense strand starting at position 687 of SEQ ID NO: 1882290
ucauauaagcucuaguaag

SEQ ID NO: 2109533 - RNA, 19 nt, Artificial Sequence
  Description of Artificial Sequence: Synthetic oligonucleotide
  Antisense strand to SEQ ID NO: 2109532
cuuacuagagcuuauauga

SEQ ID NO: 2109534 - RNA, 19 nt, Artificial Sequence
  Description of Artificial Sequence: Synthetic oligonucleotide
  Sense strand starting at position 728 of SEQ ID NO: 1882290
aucucuaucuguguauaga

SEQ ID NO: 2109535 - RNA, 19 nt, Artificial Sequence
  Description of Artificial Sequence: Synthetic oligonucleotide
  Antisense strand to SEQ ID NO: 2109534
ucuauacacagauagagau

SEQ ID NO: 2109536 - RNA, 19 nt, Artificial Sequence
  Description of Artificial Sequence: Synthetic oligonucleotide
  Sense strand starting at position 729 of SEQ ID NO: 1882290
ucucuaucuguguauagag

SEQ ID NO: 2109537 - RNA, 19 nt, Artificial Sequence
  Description of Artificial Sequence: Synthetic oligonucleotide
  Antisense strand to SEQ ID NO: 2109536
cucuauacacagauagaga

SEQ ID NO: 2109538 - RNA, 19 nt, Artificial Sequence
  Description of Artificial Sequence: Synthetic oligonucleotide
  Sense strand starting at position 731 of SEQ ID NO: 1882290
ucuaucuguguauagagau

SEQ ID NO: 2109539 - RNA, 19 nt, Artificial Sequence
  Description of Artificial Sequence: Synthetic oligonucleotide
  Antisense strand to SEQ ID NO: 2109538
aucucuauacacagauaga

SEQ ID NO: 2109540 - RNA, 19 nt, Artificial Sequence
  Description of Artificial Sequence: Synthetic oligonucleotide
  Sense strand starting at position 867 of SEQ ID NO: 1882290
gauguaugucaugaaugcu

SEQ ID NO: 2109541 - RNA, 19 nt, Artificial Sequence
  Description of Artificial Sequence: Synthetic oligonucleotide
  Antisense strand to SEQ ID NO: 2109540
agcauucaugacauacauc

SEQ ID NO: 2109542 - RNA, 19 nt, Artificial Sequence
  Description of Artificial Sequence: Synthetic oligonucleotide
  Sense strand starting at position 886 of SEQ ID NO: 1882290
accuucuuacguuacgaau

SEQ ID NO: 2109543 - RNA, 19 nt, Artificial Sequence
  Description of Artificial Sequence: Synthetic oligonucleotide
  Antisense strand to SEQ ID NO: 2109542
auucguaacguaagaaggu

SEQ ID NO: 2109544 - RNA, 19 nt, Artificial Sequence
  Description of Artificial Sequence: Synthetic oligonucleotide
  Sense strand starting at position 924 of SEQ ID NO: 1882290
cuggucaauuuacaauaga

SEQ ID NO: 2109545 - RNA, 19 nt, Artificial Sequence
  Description of Artificial Sequence: Synthetic oligonucleotide
  Antisense strand to SEQ ID NO: 2109544
ucuauuguaaauugaccag

SEQ ID NO: 2109546 - RNA, 19 nt, Artificial Sequence
  Description of Artificial Sequence: Synthetic oligonucleotide
  Sense strand starting at position 1048 of SEQ ID NO: 1882290
ggaucuaaacugcagucau

SEQ ID NO: 2109547 - RNA, 19 nt, Artificial Sequence
  Description of Artificial Sequence: Synthetic oligonucleotide
  Antisense strand to SEQ ID NO: 2109546
augacugcaguuuagaucc

SEQ ID NO: 2109548 - RNA, 19 nt, Artificial Sequence
  Description of Artificial Sequence: Synthetic oligonucleotide
  Sense strand starting at position 1235 of SEQ ID NO: 1882290
acgaaagguccucagugua

SEQ ID NO: 2109549 - RNA, 19 nt, Artificial Sequence
  Description of Artificial Sequence: Synthetic oligonucleotide
  Antisense strand to SEQ ID NO: 2109548
uacacugaggaccuuucgu

SEQ ID NO: 2109550 - RNA, 19 nt, Artificial Sequence
  Description of Artificial Sequence: Synthetic oligonucleotide
  Sense strand starting at position 1284 of SEQ ID NO: 1882290
ggcaucauuuaagaaacca

SEQ ID NO: 2109551 - RNA, 19 nt, Artificial Sequence
  Description of Artificial Sequence: Synthetic oligonucleotide
  Antisense strand to SEQ ID NO: 2109550
ugguuucuuaaaugaugcc

SEQ ID NO: 2109552 - RNA, 19 nt, Artificial Sequence
  Description of Artificial Sequence: Synthetic oligonucleotide
  Sense strand starting at position 1422 of SEQ ID NO: 1882290
gcauaaguaaccugaguag

SEQ ID NO: 2109553 - RNA, 19 nt, Artificial Sequence
  Description of Artificial Sequence: Synthetic oligonucleotide
  Antisense strand to SEQ ID NO: 2109552
cuacucagguuacuuaugc

SEQ ID NO: 2109554 - RNA, 19 nt, Artificial Sequence
  Description of Artificial Sequence: Synthetic oligonucleotide
  Sense strand starting at position 2342 of SEQ ID NO: 1882290
cgggcaaucugagcaaaca

SEQ ID NO: 2109555 - RNA, 19 nt, Artificial Sequence
  Description of Artificial Sequence: Synthetic oligonucleotide
  Antisense strand to SEQ ID NO: 2109554
uguuugcucagauugcccg

SEQ ID NO: 2109556 - RNA, 19 nt, Artificial Sequence
  Description of Artificial Sequence: Synthetic oligonucleotide
  Sense strand starting at position 2449 of SEQ ID NO: 1882290
aguggcccuccuuaggaua

SEQ ID NO: 2109557 - RNA, 19 nt, Artificial Sequence
  Description of Artificial Sequence: Synthetic oligonucleotide
  Antisense strand to SEQ ID NO: 2109556
uauccuaaggagggccacu

SEQ ID NO: 2109558 - RNA, 19 nt, Artificial Sequence
  Description of Artificial Sequence: Synthetic oligonucleotide
  Sense strand starting at position 2569 of SEQ ID NO: 1882290
ugagaaagggugugauuac

SEQ ID NO: 2109559 - RNA, 19 nt, Artificial Sequence
  Description of Artificial Sequence: Synthetic oligonucleotide
  Antisense strand to SEQ ID NO: 2109558
guaaucacacccuuucuca

SEQ ID NO: 2109560 - RNA, 19 nt, Artificial Sequence
  Description of Artificial Sequence: Synthetic oligonucleotide
  Sense strand starting at position 2581 of SEQ ID NO: 1882290
ugauuacugugguuacuac

SEQ ID NO: 2109561 - RNA, 19 nt, Artificial Sequence
  Description of Artificial Sequence: Synthetic oligonucleotide
  Antisense strand to SEQ ID NO: 2109560
guaguaaccacaguaauca

SEQ ID NO: 2109562 - RNA, 19 nt, Artificial Sequence
  Description of Artificial Sequence: Synthetic oligonucleotide
  Sense strand starting at position 2822 of SEQ ID NO: 1882290
ggaagaguguaacuaaauu

SEQ ID NO: 2109563 - RNA, 19 nt, Artificial Sequence
  Description of Artificial Sequence: Synthetic oligonucleotide
  Antisense strand to SEQ ID NO: 2109562
aauuuaguuacacucuucc

SEQ ID NO: 2109564 - RNA, 19 nt, Artificial Sequence
  Description of Artificial Sequence: Synthetic oligonucleotide
  Sense strand starting at position 2828 of SEQ ID NO: 1882290
guguaacuaaauuggagua

SEQ ID NO: 2109565 - RNA, 19 nt, Artificial Sequence
  Description of Artificial Sequence: Synthetic oligonucleotide
  Antisense strand to SEQ ID NO: 2109564
uacuccaauuuaguuacac

SEQ ID NO: 2109566 - RNA, 19 nt, Artificial Sequence
  Description of Artificial Sequence: Synthetic oligonucleotide
  Sense strand starting at position 2903 of SEQ ID NO: 1882290
cuauuucuugcagguuuau

SEQ ID NO: 2109567 - RNA, 19 nt, Artificial Sequence
  Description of Artificial Sequence: Synthetic oligonucleotide
  Antisense strand to SEQ ID NO: 2109566
auaaaccugcaagaaauag

SEQ ID NO: 2109568 - RNA, 19 nt, Artificial Sequence
  Description of Artificial Sequence: Synthetic oligonucleotide
  Sense strand starting at position 2944 of SEQ ID NO: 1882290
ggaacagugcccugaucua

SEQ ID NO: 2109569 - RNA, 19 nt, Artificial Sequence
  Description of Artificial Sequence: Synthetic oligonucleotide
  Antisense strand to SEQ ID NO: 2109568
uagaucagggcacuguucc

SEQ ID NO: 2109570 - RNA, 19 nt, Artificial Sequence
  Description of Artificial Sequence: Synthetic oligonucleotide
  Sense strand starting at position 3133 of SEQ ID NO: 1882290
cuggguaccuacuuaucua

SEQ ID NO: 2109571 - RNA, 19 nt, Artificial Sequence
  Description of Artificial Sequence: Synthetic oligonucleotide
  Antisense strand to SEQ ID NO: 2109570
uagauaaguagguacccag

SEQ ID NO: 2109572 - RNA, 19 nt, Artificial Sequence
  Description of Artificial Sequence: Synthetic oligonucleotide
  Sense strand starting at position 3178 of SEQ ID NO: 1882290
gggaaagaaugacaaacaa

SEQ ID NO: 2109573 - RNA, 19 nt, Artificial Sequence
  Description of Artificial Sequence: Synthetic oligonucleotide
  Antisense strand to SEQ ID NO: 2109572
uuguuugucauucuuuccc

SEQ ID NO: 2109574 - RNA, 19 nt, Artificial Sequence
  Description of Artificial Sequence: Synthetic oligonucleotide
  Sense strand starting at position 3317 of SEQ ID NO: 1882290
uugacagugacugguauca

SEQ ID NO: 2109575 - RNA, 19 nt, Artificial Sequence
  Description of Artificial Sequence: Synthetic oligonucleotide
  Antisense strand to SEQ ID NO: 2109574
ugauaccagucacugucaa

SEQ ID NO: 2109576 - RNA, 19 nt, Artificial Sequence
  Description of Artificial Sequence: Synthetic oligonucleotide
  Sense strand starting at position 3413 of SEQ ID NO: 1882290
uauugauuggauuaucugu

SEQ ID NO: 2109577 - RNA, 19 nt, Artificial Sequence
  Description of Artificial Sequence: Synthetic oligonucleotide
  Antisense strand to SEQ ID NO: 2109576
acagauaauccaaucaaua

SEQ ID NO: 2109578 - RNA, 19 nt, Artificial Sequence
  Description of Artificial Sequence: Synthetic oligonucleotide
  Sense strand starting at position 3418 of SEQ ID NO: 1882290
auuggauuaucuguuuaga

SEQ ID NO: 2109579 - RNA, 19 nt, Artificial Sequence
  Description of Artificial Sequence: Synthetic oligonucleotide
  Antisense strand to SEQ ID NO: 2109578
ucuaaacagauaauccaau

SEQ ID NO: 2109580 - RNA, 19 nt, Artificial Sequence
  Description of Artificial Sequence: Synthetic oligonucleotide
  Sense strand starting at position 3420 of SEQ ID NO: 1882290
uggauuaucuguuuagaau

SEQ ID NO: 2109581 - RNA, 19 nt, Artificial Sequence
  Description of Artificial Sequence: Synthetic oligonucleotide
  Antisense strand to SEQ ID NO: 2109580
auucuaaacagauaaucca

SEQ ID NO: 2109582 - RNA, 19 nt, Artificial Sequence
  Description of Artificial Sequence: Synthetic oligonucleotide
  Sense strand starting at position 3528 of SEQ ID NO: 1882290
ccaucugugugacuaugga

SEQ ID NO: 2109583 - RNA, 19 nt, Artificial Sequence
  Description of Artificial Sequence: Synthetic oligonucleotide
  Antisense strand to SEQ ID NO: 2109582
uccauagucacacagaugg

SEQ ID NO: 2109584 - RNA, 19 nt, Artificial Sequence
  Description of Artificial Sequence: Synthetic oligonucleotide
  Sense strand starting at position 3613 of SEQ ID NO: 1882290
auaguaucggcucacuaaa

SEQ ID NO: 2109585 - RNA, 19 nt, Artificial Sequence
  Description of Artificial Sequence: Synthetic oligonucleotide
  Antisense strand to SEQ ID NO: 2109584
uuuagugagccgauacuau

SEQ ID NO: 2109586 - RNA, 19 nt, Artificial Sequence
  Description of Artificial Sequence: Synthetic oligonucleotide
  Sense strand starting at position 3664 of SEQ ID NO: 1882290
aaugguaaaugccuaguaa

SEQ ID NO: 2109587 - RNA, 19 nt, Artificial Sequence
  Description of Artificial Sequence: Synthetic oligonucleotide
  Antisense strand to SEQ ID NO: 2109586
uuacuaggcauuuaccauu

SEQ ID NO: 2109588 - RNA, 19 nt, Artificial Sequence
  Description of Artificial Sequence: Synthetic oligonucleotide
  Sense strand starting at position 3859 of SEQ ID NO: 1882290
cuagguguuaggcaccauu

SEQ ID NO: 2109589 - RNA, 19 nt, Artificial Sequence
  Description of Artificial Sequence: Synthetic oligonucleotide
  Antisense strand to SEQ ID NO: 2109588
aauggugccuaacaccuag

SEQ ID NO: 2109590 - RNA, 19 nt, Artificial Sequence
  Description of Artificial Sequence: Synthetic oligonucleotide
  Sense strand starting at position 136 of SEQ ID NO: 1882291
ggugcuuugcaguuaugca

SEQ ID NO: 2109591 - RNA, 19 nt, Artificial Sequence
  Description of Artificial Sequence: Synthetic oligonucleotide
  Antisense strand to SEQ ID NO: 2109590
ugcauaacugcaaagcacc

SEQ ID NO: 2109592 - RNA, 19 nt, Artificial Sequence
  Description of Artificial Sequence: Synthetic oligonucleotide
  Sense strand starting at position 151 of SEQ ID NO: 1882291
ugcaguccugucuaaauga

SEQ ID NO: 2109593 - RNA, 19 nt, Artificial Sequence
  Description of Artificial Sequence: Synthetic oligonucleotide
  Antisense strand to SEQ ID NO: 2109592
ucauuuagacaggacugca

SEQ ID NO: 2109594 - RNA, 19 nt, Artificial Sequence
  Description of Artificial Sequence: Synthetic oligonucleotide
  Sense strand starting at position 159 of SEQ ID NO: 1882291
ugucuaaaugagugcucca

SEQ ID NO: 2109595 - RNA, 19 nt, Artificial Sequence
  Description of Artificial Sequence: Synthetic oligonucleotide
  Antisense strand to SEQ ID NO: 2109594
uggagcacucauuuagaca

SEQ ID NO: 2109596 - RNA, 19 nt, Artificial Sequence
  Description of Artificial Sequence: Synthetic oligonucleotide
  Sense strand starting at position 164 of SEQ ID NO: 1882291
aaaugagugcuccagugga

SEQ ID NO: 2109597 - RNA, 19 nt, Artificial Sequence
  Description of Artificial Sequence: Synthetic oligonucleotide
  Antisense strand to SEQ ID NO: 2109596
uccacuggagcacucauuu

SEQ ID NO: 2109598 - RNA, 19 nt, Artificial Sequence
  Description of Artificial Sequence: Synthetic oligonucleotide
  Sense strand starting at position 201 of SEQ ID NO: 1882291
caaagauguuaaccuggau

SEQ ID NO: 2109599 - RNA, 19 nt, Artificial Sequence
  Description of Artificial Sequence: Synthetic oligonucleotide
  Antisense strand to SEQ ID NO: 2109598
auccagguuaacaucuuug

SEQ ID NO: 2109600 - RNA, 19 nt, Artificial Sequence
  Description of Artificial Sequence: Synthetic oligonucleotide
  Sense strand starting at position 204 of SEQ ID NO: 1882291
agauguuaaccuggaugca

SEQ ID NO: 2109601 - RNA, 19 nt, Artificial Sequence
  Description of Artificial Sequence: Synthetic oligonucleotide
  Antisense strand to SEQ ID NO: 2109600
ugcauccagguuaacaucu

SEQ ID NO: 2109602 - RNA, 19 nt, Artificial Sequence
  Description of Artificial Sequence: Synthetic oligonucleotide
  Sense strand starting at position 205 of SEQ ID NO: 1882291
gauguuaaccuggaugcau

SEQ ID NO: 2109603 - RNA, 19 nt, Artificial Sequence
  Description of Artificial Sequence: Synthetic oligonucleotide
  Antisense strand to SEQ ID NO: 2109602
augcauccagguuaacauc

SEQ ID NO: 2109604 - RNA, 19 nt, Artificial Sequence
  Description of Artificial Sequence: Synthetic oligonucleotide
  Sense strand starting at position 363 of SEQ ID NO: 1882291
uagaaaugguaccuugacu

SEQ ID NO: 2109605 - RNA, 19 nt, Artificial Sequence
  Description of Artificial Sequence: Synthetic oligonucleotide
  Antisense strand to SEQ ID NO: 2109604
agucaagguaccauuucua

SEQ ID NO: 2109606 - RNA, 19 nt, Artificial Sequence
  Description of Artificial Sequence: Synthetic oligonucleotide
  Sense strand starting at position 538 of SEQ ID NO: 1882291
ggcagugggugaucucauu

SEQ ID NO: 2109607 - RNA, 19 nt, Artificial Sequence
  Description of Artificial Sequence: Synthetic oligonucleotide
  Antisense strand to SEQ ID NO: 2109606
aaugagaucacccacugcc

SEQ ID NO: 2109608 - RNA, 19 nt, Artificial Sequence
  Description of Artificial Sequence: Synthetic oligonucleotide
  Sense strand starting at position 625 of SEQ ID NO: 1882291
ugcuucugugcuuggagaa

SEQ ID NO: 2109609 - RNA, 19 nt, Artificial Sequence
  Description of Artificial Sequence: Synthetic oligonucleotide
  Antisense strand to SEQ ID NO: 2109608
uucuccaagcacagaagca

SEQ ID NO: 2109610 - RNA, 19 nt, Artificial Sequence
  Description of Artificial Sequence: Synthetic oligonucleotide
  Sense strand starting at position 638 of SEQ ID NO: 1882291
ggagaauaaucccacuuua

SEQ ID NO: 2109611 - RNA, 19 nt, Artificial Sequence
  Description of Artificial Sequence: Synthetic oligonucleotide
  Antisense strand to SEQ ID NO: 2109610
uaaagugggauuauucucc

SEQ ID NO: 2109612 - RNA, 19 nt, Artificial Sequence
  Description of Artificial Sequence: Synthetic oligonucleotide
  Sense strand starting at position 2057 of SEQ ID NO: 1882291
gucacauggacuugugguu

SEQ ID NO: 2109613 - RNA, 19 nt, Artificial Sequence
  Description of Artificial Sequence: Synthetic oligonucleotide
  Antisense strand to SEQ ID NO: 2109612
aaccacaaguccaugugac

SEQ ID NO: 2109614 - RNA, 19 nt, Artificial Sequence
  Description of Artificial Sequence: Synthetic oligonucleotide
  Sense strand starting at position 2062 of SEQ ID NO: 1882291
auggacuugugguuacuca

SEQ ID NO: 2109615 - RNA, 19 nt, Artificial Sequence
  Description of Artificial Sequence: Synthetic oligonucleotide
  Antisense strand to SEQ ID NO: 2109614
ugaguaaccacaaguccau

SEQ ID NO: 2109616 - RNA, 19 nt, Artificial Sequence
  Description of Artificial Sequence: Synthetic oligonucleotide
  Sense strand starting at position 2071 of SEQ ID NO: 1882291
ugguuacucacccguggaa

SEQ ID NO: 2109617 - RNA, 19 nt, Artificial Sequence
  Description of Artificial Sequence: Synthetic oligonucleotide
  Antisense strand to SEQ ID NO: 2109616
uuccacgggugaguaacca

SEQ ID NO: 2109618 - RNA, 19 nt, Artificial Sequence
  Description of Artificial Sequence: Synthetic oligonucleotide
  Sense strand starting at position 2158 of SEQ ID NO: 1882291
ucaugauccugguuuccau

SEQ ID NO: 2109619 - RNA, 19 nt, Artificial Sequence
  Description of Artificial Sequence: Synthetic oligonucleotide
  Antisense strand to SEQ ID NO: 2109618
auggaaaccaggaucauga

SEQ ID NO: 2109620 - RNA, 19 nt, Artificial Sequence
  Description of Artificial Sequence: Synthetic oligonucleotide
  Sense strand starting at position 2299 of SEQ ID NO: 1882291
aggcacauccugugacaaa

SEQ ID NO: 2109621 - RNA, 19 nt, Artificial Sequence
  Description of Artificial Sequence: Synthetic oligonucleotide
  Antisense strand to SEQ ID NO: 2109620
uuugucacaggaugugccu

SEQ ID NO: 2109622 - RNA, 19 nt, Artificial Sequence
  Description of Artificial Sequence: Synthetic oligonucleotide
  Sense strand starting at position 2318 of SEQ ID NO: 1882291
uugagcauccauuguguga

SEQ ID NO: 2109623 - RNA, 19 nt, Artificial Sequence
  Description of Artificial Sequence: Synthetic oligonucleotide
  Antisense strand to SEQ ID NO: 2109622
ucacacaauggaugcucaa

SEQ ID NO: 2109624 - RNA, 19 nt, Artificial Sequence
  Description of Artificial Sequence: Synthetic oligonucleotide
  Sense strand starting at position 2322 of SEQ ID NO: 1882291
gcauccauugugugaggaa

SEQ ID NO: 2109625 - RNA, 19 nt, Artificial Sequence
  Description of Artificial Sequence: Synthetic oligonucleotide
  Antisense strand to SEQ ID NO: 2109624
uuccucacacaauggaugc

SEQ ID NO: 2109626 - RNA, 19 nt, Artificial Sequence
  Description of Artificial Sequence: Synthetic oligonucleotide
  Sense strand starting at position 2365 of SEQ ID NO: 1882291
aaaucaaagccuuguaggu

SEQ ID NO: 2109627 - RNA, 19 nt, Artificial Sequence
  Description of Artificial Sequence: Synthetic oligonucleotide
  Antisense strand to SEQ ID NO: 2109626
accuacaaggcuuugauuu

SEQ ID NO: 2109628 - RNA, 19 nt, Artificial Sequence
  Description of Artificial Sequence: Synthetic oligonucleotide
  Sense strand starting at position 2507 of SEQ ID NO: 1882291
aggaauagcugcuuuccua

SEQ ID NO: 2109629 - RNA, 19 nt, Artificial Sequence
  Description of Artificial Sequence: Synthetic oligonucleotide
  Antisense strand to SEQ ID NO: 2109628
uaggaaagcagcuauuccu

SEQ ID NO: 2109630 - RNA, 19 nt, Artificial Sequence
  Description of Artificial Sequence: Synthetic oligonucleotide
  Sense strand starting at position 2511 of SEQ ID NO: 1882291
auagcugcuuuccuagaga

SEQ ID NO: 2109631 - RNA, 19 nt, Artificial Sequence
  Description of Artificial Sequence: Synthetic oligonucleotide
  Antisense strand to SEQ ID NO: 2109630
ucucuaggaaagcagcuau

SEQ ID NO: 2109632 - RNA, 19 nt, Artificial Sequence
  Description of Artificial Sequence: Synthetic oligonucleotide
  Sense strand starting at position 2514 of SEQ ID NO: 1882291
gcugcuuuccuagagaaag

SEQ ID NO: 2109633 - RNA, 19 nt, Artificial Sequence
  Description of Artificial Sequence: Synthetic oligonucleotide
  Antisense strand to SEQ ID NO: 2109632
cuuucucuaggaaagcagc

SEQ ID NO: 2109634 - RNA, 19 nt, Artificial Sequence
  Description of Artificial Sequence: Synthetic oligonucleotide
  Sense strand starting at position 2524 of SEQ ID NO: 1882291
uagagaaaguuuccaguug

SEQ ID NO: 2109635 - RNA, 19 nt, Artificial Sequence
  Description of Artificial Sequence: Synthetic oligonucleotide
  Antisense strand to SEQ ID NO: 2109634
caacuggaaacuuucucua

SEQ ID NO: 2109636 - RNA, 19 nt, Artificial Sequence
  Description of Artificial Sequence: Synthetic oligonucleotide
  Sense strand starting at position 2997 of SEQ ID NO: 1882291
cuuccuuggucucugaaag

SEQ ID NO: 2109637 - RNA, 19 nt, Artificial Sequence
  Description of Artificial Sequence: Synthetic oligonucleotide
  Antisense strand to SEQ ID NO: 2109636
cuuucagagaccaaggaag

SEQ ID NO: 2109638 - RNA, 19 nt, Artificial Sequence
  Description of Artificial Sequence: Synthetic oligonucleotide
  Sense strand starting at position 2998 of SEQ ID NO: 1882291
uuccuuggucucugaaagu

SEQ ID NO: 2109639 - RNA, 19 nt, Artificial Sequence
  Description of Artificial Sequence: Synthetic oligonucleotide
  Antisense strand to SEQ ID NO: 2109638
acuuucagagaccaaggaa

SEQ ID NO: 2109640 - RNA, 19 nt, Artificial Sequence
  Description of Artificial Sequence: Synthetic oligonucleotide
  Sense strand starting at position 3162 of SEQ ID NO: 1882291
ucucuacgaguuugacuaa

SEQ ID NO: 2109641 - RNA, 19 nt, Artificial Sequence
  Description of Artificial Sequence: Synthetic oligonucleotide
  Antisense strand to SEQ ID NO: 2109640
uuagucaaacucguagaga

SEQ ID NO: 2109642 - RNA, 19 nt, Artificial Sequence
  Description of Artificial Sequence: Synthetic oligonucleotide
  Sense strand starting at position 3165 of SEQ ID NO: 1882291
cuacgaguuugacuaaucu

SEQ ID NO: 2109643 - RNA, 19 nt, Artificial Sequence
  Description of Artificial Sequence: Synthetic oligonucleotide
  Antisense strand to SEQ ID NO: 2109642
agauuagucaaacucguag

SEQ ID NO: 2109644 - RNA, 19 nt, Artificial Sequence
  Description of Artificial Sequence: Synthetic oligonucleotide
  Sense strand starting at position 3169 of SEQ ID NO: 1882291
gaguuugacuaaucuagga

SEQ ID NO: 2109645 - RNA, 19 nt, Artificial Sequence
  Description of Artificial Sequence: Synthetic oligonucleotide
  Antisense strand to SEQ ID NO: 2109644
uccuagauuagucaaacuc

SEQ ID NO: 2109646 - RNA, 19 nt, Artificial Sequence
  Description of Artificial Sequence: Synthetic oligonucleotide
  Sense strand starting at position 3173 of SEQ ID NO: 1882291
uugacuaaucuaggaccuu

SEQ ID NO: 2109647 - RNA, 19 nt, Artificial Sequence
  Description of Artificial Sequence: Synthetic oligonucleotide
  Antisense strand to SEQ ID NO: 2109646
aagguccuagauuagucaa

SEQ ID NO: 2109648 - RNA, 19 nt, Artificial Sequence
  Description of Artificial Sequence: Synthetic oligonucleotide
  Sense strand starting at position 3244 of SEQ ID NO: 1882291
agcauaauguccucauaga

SEQ ID NO: 2109649 - RNA, 19 nt, Artificial Sequence
  Description of Artificial Sequence: Synthetic oligonucleotide
  Antisense strand to SEQ ID NO: 2109648
ucuaugaggacauuaugcu

SEQ ID NO: 2109650 - RNA, 19 nt, Artificial Sequence
  Description of Artificial Sequence: Synthetic oligonucleotide
  Sense strand starting at position 3245 of SEQ ID NO: 1882291
gcauaauguccucauagau

SEQ ID NO: 2109651 - RNA, 19 nt, Artificial Sequence
  Description of Artificial Sequence: Synthetic oligonucleotide
  Antisense strand to SEQ ID NO: 2109650
aucuaugaggacauuaugc

SEQ ID NO: 2109652 - RNA, 19 nt, Artificial Sequence
  Description of Artificial Sequence: Synthetic oligonucleotide
  Sense strand starting at position 3325 of SEQ ID NO: 1882291
auuuaaacuuuggaaaggu

SEQ ID NO: 2109653 - RNA, 19 nt, Artificial Sequence
  Description of Artificial Sequence: Synthetic oligonucleotide
  Antisense strand to SEQ ID NO: 2109652
accuuuccaaaguuuaaau

SEQ ID NO: 2109654 - RNA, 19 nt, Artificial Sequence
  Description of Artificial Sequence: Synthetic oligonucleotide
  Sense strand starting at position 3365 of SEQ ID NO: 1882291
uuuccuaagccuggaaauu

SEQ ID NO: 2109655 - RNA, 19 nt, Artificial Sequence
  Description of Artificial Sequence: Synthetic oligonucleotide
  Antisense strand to SEQ ID NO: 2109654
aauuuccaggcuuaggaaa

SEQ ID NO: 2109656 - RNA, 19 nt, Artificial Sequence
  Description of Artificial Sequence: Synthetic oligonucleotide
  Sense strand starting at position 3392 of SEQ ID NO: 1882291
aaguauggaucugugaaac

SEQ ID NO: 2109657 - RNA, 19 nt, Artificial Sequence
  Description of Artificial Sequence: Synthetic oligonucleotide
  Antisense strand to SEQ ID NO: 2109656
guuucacagauccauacuu

SEQ ID NO: 2109658 - RNA, 19 nt, Artificial Sequence
  Description of Artificial Sequence: Synthetic oligonucleotide
  Sense strand starting at position 3461 of SEQ ID NO: 1882291
gaagaagaggcucguguua

SEQ ID NO: 2109659 - RNA, 19 nt, Artificial Sequence
  Description of Artificial Sequence: Synthetic oligonucleotide
  Antisense strand to SEQ ID NO: 2109658
uaacacgagccucuucuuc

SEQ ID NO: 2109660 - RNA, 19 nt, Artificial Sequence
  Description of Artificial Sequence: Synthetic oligonucleotide
  Sense strand starting at position 3493 of SEQ ID NO: 1882291
gggaacguccuguacagua

SEQ ID NO: 2109661 - RNA, 19 nt, Artificial Sequence
  Description of Artificial Sequence: Synthetic oligonucleotide
  Antisense strand to SEQ ID NO: 2109660
uacuguacaggacguuccc

SEQ ID NO: 2109662 - RNA, 19 nt, Artificial Sequence
  Description of Artificial Sequence: Synthetic oligonucleotide
  Sense strand starting at position 3617 of SEQ ID NO: 1882291
gacagcuguccauggagua

SEQ ID NO: 2109663 - RNA, 19 nt, Artificial Sequence
  Description of Artificial Sequence: Synthetic oligonucleotide
  Antisense strand to SEQ ID NO: 2109662
uacuccauggacagcuguc

SEQ ID NO: 2109664 - RNA, 19 nt, Artificial Sequence
  Description of Artificial Sequence: Synthetic oligonucleotide
  Sense strand starting at position 3671 of SEQ ID NO: 1882291
gggcugucaccggagugaa

SEQ ID NO: 2109665 - RNA, 19 nt, Artificial Sequence
  Description of Artificial Sequence: Synthetic oligonucleotide
  Antisense strand to SEQ ID NO: 2109664
uucacuccggugacagccc

SEQ ID NO: 2109666 - RNA, 19 nt, Artificial Sequence
  Description of Artificial Sequence: Synthetic oligonucleotide
  Sense strand starting at position 3867 of SEQ ID NO: 1882291
ggcagucuguucuuggaca

SEQ ID NO: 2109667 - RNA, 19 nt, Artificial Sequence
  Description of Artificial Sequence: Synthetic oligonucleotide
  Antisense strand to SEQ ID NO: 2109666
uguccaagaacagacugcc

SEQ ID NO: 2109668 - RNA, 19 nt, Artificial Sequence
  Description of Artificial Sequence: Synthetic oligonucleotide
  Sense strand starting at position 3869 of SEQ ID NO: 1882291
cagucuguucuuggacaga

SEQ ID NO: 2109669 - RNA, 19 nt, Artificial Sequence
  Description of Artificial Sequence: Synthetic oligonucleotide
  Antisense strand to SEQ ID NO: 2109668
ucuguccaagaacagacug

SEQ ID NO: 2109670 - RNA, 19 nt, Artificial Sequence
  Description of Artificial Sequence: Synthetic oligonucleotide
  Sense strand starting at position 149 of SEQ ID NO: 1882292
gcuguuuaauuuccagcaa

SEQ ID NO: 2109671 - RNA, 19 nt, Artificial Sequence
  Description of Artificial Sequence: Synthetic oligonucleotide
  Antisense strand to SEQ ID NO: 2109670
uugcuggaaauuaaacagc

SEQ ID NO: 2109672 - RNA, 19 nt, Artificial Sequence
  Description of Artificial Sequence: Synthetic oligonucleotide
  Sense strand starting at position 320 of SEQ ID NO: 1882292
gccuguuaucaugauguug

SEQ ID NO: 2109673 - RNA, 19 nt, Artificial Sequence
  Description of Artificial Sequence: Synthetic oligonucleotide
  Antisense strand to SEQ ID NO: 2109672
caacaucaugauaacaggc

SEQ ID NO: 2109674 - RNA, 19 nt, Artificial Sequence
  Description of Artificial Sequence: Synthetic oligonucleotide
  Sense strand starting at position 337 of SEQ ID NO: 1882292
ugcauuaacuaaccgaagu

SEQ ID NO: 2109675 - RNA, 19 nt, Artificial Sequence
  Description of Artificial Sequence: Synthetic oligonucleotide
  Antisense strand to SEQ ID NO: 2109674
acuucgguuaguuaaugca

SEQ ID NO: 2109676 - RNA, 19 nt, Artificial Sequence
  Description of Artificial Sequence: Synthetic oligonucleotide
  Sense strand starting at position 370 of SEQ ID NO: 1882292
cuagauucugaaugugaau

SEQ ID NO: 2109677 - RNA, 19 nt, Artificial Sequence
  Description of Artificial Sequence: Synthetic oligonucleotide
  Antisense strand to SEQ ID NO: 2109676
auucacauucagaaucuag

SEQ ID NO: 2109678 - RNA, 19 nt, Artificial Sequence
  Description of Artificial Sequence: Synthetic oligonucleotide
  Sense strand starting at position 382 of SEQ ID NO: 1882292
ugugaauaaggcugagacu

SEQ ID NO: 2109679 - RNA, 19 nt, Artificial Sequence
  Description of Artificial Sequence: Synthetic oligonucleotide
  Antisense strand to SEQ ID NO: 2109678
agucucagccuuauucaca

SEQ ID NO: 2109680 - RNA, 19 nt, Artificial Sequence
  Description of Artificial Sequence: Synthetic oligonucleotide
  Sense strand starting at position 511 of SEQ ID NO: 1882292
auagauggcuuaucuuaga

SEQ ID NO: 2109681 - RNA, 19 nt, Artificial Sequence
  Description of Artificial Sequence: Synthetic oligonucleotide
  Antisense strand to SEQ ID NO: 2109680
ucuaagauaagccaucuau

SEQ ID NO: 2109682 - RNA, 19 nt, Artificial Sequence
  Description of Artificial Sequence: Synthetic oligonucleotide
  Sense strand starting at position 514 of SEQ ID NO: 1882292
gauggcuuaucuuagauuu

SEQ ID NO: 2109683 - RNA, 19 nt, Artificial Sequence
  Description of Artificial Sequence: Synthetic oligonucleotide
  Antisense strand to SEQ ID NO: 2109682
aaaucuaagauaagccauc

SEQ ID NO: 2109684 - RNA, 19 nt, Artificial Sequence
  Description of Artificial Sequence: Synthetic oligonucleotide
  Sense strand starting at position 516 of SEQ ID NO: 1882292
uggcuuaucuuagauuuag

SEQ ID NO: 2109685 - RNA, 19 nt, Artificial Sequence
  Description of Artificial Sequence: Synthetic oligonucleotide
  Antisense strand to SEQ ID NO: 2109684
cuaaaucuaagauaagcca

SEQ ID NO: 2109686 - RNA, 19 nt, Artificial Sequence
  Description of Artificial Sequence: Synthetic oligonucleotide
  Sense strand starting at position 935 of SEQ ID NO: 1882292
cccggcuagauguacuauu

SEQ ID NO: 2109687 - RNA, 19 nt, Artificial Sequence
  Description of Artificial Sequence: Synthetic oligonucleotide
  Antisense strand to SEQ ID NO: 2109686
aauaguacaucuagccggg

SEQ ID NO: 2109688 - RNA, 19 nt, Artificial Sequence
  Description of Artificial Sequence: Synthetic oligonucleotide
  Sense strand starting at position 1045 of SEQ ID NO: 1882292
cugguaauauucuuguucu

SEQ ID NO: 2109689 - RNA, 19 nt, Artificial Sequence
  Description of Artificial Sequence: Synthetic oligonucleotide
  Antisense strand to SEQ ID NO: 2109688
agaacaagaauauuaccag

SEQ ID NO: 2109690 - RNA, 19 nt, Artificial Sequence
  Description of Artificial Sequence: Synthetic oligonucleotide
  Sense strand starting at position 1048 of SEQ ID NO: 1882292
guaauauucuuguucugag

SEQ ID NO: 2109691 - RNA, 19 nt, Artificial Sequence
  Description of Artificial Sequence: Synthetic oligonucleotide
  Antisense strand to SEQ ID NO: 2109690
cucagaacaagaauauuac

SEQ ID NO: 2109692 - RNA, 19 nt, Artificial Sequence
  Description of Artificial Sequence: Synthetic oligonucleotide
  Sense strand starting at position 1062 of SEQ ID NO: 1882292
cugaguucaggugguaagu

SEQ ID NO: 2109693 - RNA, 19 nt, Artificial Sequence
  Description of Artificial Sequence: Synthetic oligonucleotide
  Antisense strand to SEQ ID NO: 2109692
acuuaccaccugaacucag

SEQ ID NO: 2109694 - RNA, 19 nt, Artificial Sequence
  Description of Artificial Sequence: Synthetic oligonucleotide
  Sense strand starting at position 1073 of SEQ ID NO: 1882292
ugguaaguucauggauguu

SEQ ID NO: 2109695 - RNA, 19 nt, Artificial Sequence
  Description of Artificial Sequence: Synthetic oligonucleotide
  Antisense strand to SEQ ID NO: 2109694
aacauccaugaacuuacca

SEQ ID NO: 2109696 - RNA, 19 nt, Artificial Sequence
  Description of Artificial Sequence: Synthetic oligonucleotide
  Sense strand starting at position 1095 of SEQ ID NO: 1882292
uuuauuaugccucauaguu

SEQ ID NO: 2109697 - RNA, 19 nt, Artificial Sequence
  Description of Artificial Sequence: Synthetic oligonucleotide
  Antisense strand to SEQ ID NO: 2109696
aacuaugaggcauaauaaa

SEQ ID NO: 2109698 - RNA, 19 nt, Artificial Sequence
  Description of Artificial Sequence: Synthetic oligonucleotide
  Sense strand starting at position 1209 of SEQ ID NO: 1882292
gcacacauugcugagcauu

SEQ ID NO: 2109699 - RNA, 19 nt, Artificial Sequence
  Description of Artificial Sequence: Synthetic oligonucleotide
  Antisense strand to SEQ ID NO: 2109698
aaugcucagcaaugugugc

SEQ ID NO: 2109700 - RNA, 19 nt, Artificial Sequence
  Description of Artificial Sequence: Synthetic oligonucleotide
  Sense strand starting at position 1291 of SEQ ID NO: 1882292
ugauacuuauugucagaau

SEQ ID NO: 2109701 - RNA, 19 nt, Artificial Sequence
  Description of Artificial Sequence: Synthetic oligonucleotide
  Antisense strand to SEQ ID NO: 2109700
auucugacaauaaguauca

SEQ ID NO: 2109702 - RNA, 19 nt, Artificial Sequence
  Description of Artificial Sequence: Synthetic oligonucleotide
  Sense strand starting at position 1306 of SEQ ID NO: 1882292
gaaugccuucuagaaaguu

SEQ ID NO: 2109703 - RNA, 19 nt, Artificial Sequence
  Description of Artificial Sequence: Synthetic oligonucleotide
  Antisense strand to SEQ ID NO: 2109702
aacuuucuagaaggcauuc

SEQ ID NO: 2109704 - RNA, 19 nt, Artificial Sequence
  Description of Artificial Sequence: Synthetic oligonucleotide
  Sense strand starting at position 1393 of SEQ ID NO: 1882292
gcugcuaugacaugugaaa

SEQ ID NO: 2109705 - RNA, 19 nt, Artificial Sequence
  Description of Artificial Sequence: Synthetic oligonucleotide
  Antisense strand to SEQ ID NO: 2109704
uuucacaugucauagcagc

SEQ ID NO: 2109706 - RNA, 19 nt, Artificial Sequence
  Description of Artificial Sequence: Synthetic oligonucleotide
  Sense strand starting at position 1496 of SEQ ID NO: 1882292
gggccagauucgucuuaau

SEQ ID NO: 2109707 - RNA, 19 nt, Artificial Sequence
  Description of Artificial Sequence: Synthetic oligonucleotide
  Antisense strand to SEQ ID NO: 2109706
auuaagacgaaucuggccc

SEQ ID NO: 2109708 - RNA, 19 nt, Artificial Sequence
  Description of Artificial Sequence: Synthetic oligonucleotide
  Sense strand starting at position 1563 of SEQ ID NO: 1882292
uuaaucucaugguuaaagu

SEQ ID NO: 2109709 - RNA, 19 nt, Artificial Sequence
  Description of Artificial Sequence: Synthetic oligonucleotide
  Antisense strand to SEQ ID NO: 2109708
acuuuaaccaugagauuaa

SEQ ID NO: 2109710 - RNA, 19 nt, Artificial Sequence
  Description of Artificial Sequence: Synthetic oligonucleotide
  Sense strand starting at position 1578 of SEQ ID NO: 1882292
aaguaagagcucuggaauc

SEQ ID NO: 2109711 - RNA, 19 nt, Artificial Sequence
  Description of Artificial Sequence: Synthetic oligonucleotide
  Antisense strand to SEQ ID NO: 2109710
gauuccagagcucuuacuu

SEQ ID NO: 2109712 - RNA, 19 nt, Artificial Sequence
  Description of Artificial Sequence: Synthetic oligonucleotide
  Sense strand starting at position 1593 of SEQ ID NO: 1882292
aaucaaacugccuggguau

SEQ ID NO: 2109713 - RNA, 19 nt, Artificial Sequence
  Description of Artificial Sequence: Synthetic oligonucleotide
  Antisense strand to SEQ ID NO: 2109712
auacccaggcaguuugauu

SEQ ID NO: 2109714 - RNA, 19 nt, Artificial Sequence
  Description of Artificial Sequence: Synthetic oligonucleotide
  Sense strand starting at position 1685 of SEQ ID NO: 1882292
uugauuaguuuguccaacu

SEQ ID NO: 2109715 - RNA, 19 nt, Artificial Sequence
  Description of Artificial Sequence: Synthetic oligonucleotide
  Antisense strand to SEQ ID NO: 2109714
aguuggacaaacuaaucaa

SEQ ID NO: 2109716 - RNA, 19 nt, Artificial Sequence
  Description of Artificial Sequence: Synthetic oligonucleotide
  Sense strand starting at position 1686 of SEQ ID NO: 1882292
ugauuaguuuguccaacuu

SEQ ID NO: 2109717 - RNA, 19 nt, Artificial Sequence
  Description of Artificial Sequence: Synthetic oligonucleotide
  Antisense strand to SEQ ID NO: 2109716
aaguuggacaaacuaauca

SEQ ID NO: 2109718 - RNA, 19 nt, Artificial Sequence
  Description of Artificial Sequence: Synthetic oligonucleotide
  Sense strand starting at position 1998 of SEQ ID NO: 1882292
gcuguuccuacuuagcgaa

SEQ ID NO: 2109719 - RNA, 19 nt, Artificial Sequence
  Description of Artificial Sequence: Synthetic oligonucleotide
  Antisense strand to SEQ ID NO: 2109718
uucgcuaaguaggaacagc

SEQ ID NO: 2109720 - RNA, 19 nt, Artificial Sequence
  Description of Artificial Sequence: Synthetic oligonucleotide
  Sense strand starting at position 2473 of SEQ ID NO: 1882292
cuuccucauggaggaaauu

SEQ ID NO: 2109721 - RNA, 19 nt, Artificial Sequence
  Description of Artificial Sequence: Synthetic oligonucleotide
  Antisense strand to SEQ ID NO: 2109720
aauuuccuccaugaggaag

SEQ ID NO: 2109722 - RNA, 19 nt, Artificial Sequence
  Description of Artificial Sequence: Synthetic oligonucleotide
  Sense strand starting at position 2513 of SEQ ID NO: 1882292
agaaacuucugauaaacug

SEQ ID NO: 2109723 - RNA, 19 nt, Artificial Sequence
  Description of Artificial Sequence: Synthetic oligonucleotide
  Antisense strand to SEQ ID NO: 2109722
caguuuaucagaaguuucu

SEQ ID NO: 2109724 - RNA, 19 nt, Artificial Sequence
  Description of Artificial Sequence: Synthetic oligonucleotide
  Sense strand starting at position 2521 of SEQ ID NO: 1882292
cugauaaacugauaaacug

SEQ ID NO: 2109725 - RNA, 19 nt, Artificial Sequence
  Description of Artificial Sequence: Synthetic oligonucleotide
  Antisense strand to SEQ ID NO: 2109724
caguuuaucaguuuaucag

SEQ ID NO: 2109726 - RNA, 19 nt, Artificial Sequence
  Description of Artificial Sequence: Synthetic oligonucleotide
  Sense strand starting at position 2635 of SEQ ID NO: 1882292
auauuacuucugugcauga

SEQ ID NO: 2109727 - RNA, 19 nt, Artificial Sequence
  Description of Artificial Sequence: Synthetic oligonucleotide
  Antisense strand to SEQ ID NO: 2109726
ucaugcacagaaguaauau

SEQ ID NO: 2109728 - RNA, 19 nt, Artificial Sequence
  Description of Artificial Sequence: Synthetic oligonucleotide
  Sense strand starting at position 2637 of SEQ ID NO: 1882292
auuacuucugugcaugaga

SEQ ID NO: 2109729 - RNA, 19 nt, Artificial Sequence
  Description of Artificial Sequence: Synthetic oligonucleotide
  Antisense strand to SEQ ID NO: 2109728
ucucaugcacagaaguaau

SEQ ID NO: 2109730 - RNA, 19 nt, Artificial Sequence
  Description of Artificial Sequence: Synthetic oligonucleotide
  Sense strand starting at position 2639 of SEQ ID NO: 1882292
uacuucugugcaugagauu

SEQ ID NO: 2109731 - RNA, 19 nt, Artificial Sequence
  Description of Artificial Sequence: Synthetic oligonucleotide
  Antisense strand to SEQ ID NO: 2109730
aaucucaugcacagaagua

SEQ ID NO: 2109732 - RNA, 19 nt, Artificial Sequence
  Description of Artificial Sequence: Synthetic oligonucleotide
  Sense strand starting at position 2640 of SEQ ID NO: 1882292
acuucugugcaugagauua

SEQ ID NO: 2109733 - RNA, 19 nt, Artificial Sequence
  Description of Artificial Sequence: Synthetic oligonucleotide
  Antisense strand to SEQ ID NO: 2109732
uaaucucaugcacagaagu

SEQ ID NO: 2109734 - RNA, 19 nt, Artificial Sequence
  Description of Artificial Sequence: Synthetic oligonucleotide
  Sense strand starting at position 2645 of SEQ ID NO: 1882292
ugugcaugagauuauacuu

SEQ ID NO: 2109735 - RNA, 19 nt, Artificial Sequence
  Description of Artificial Sequence: Synthetic oligonucleotide
  Antisense strand to SEQ ID NO: 2109734
aaguauaaucucaugcaca

SEQ ID NO: 2109736 - RNA, 19 nt, Artificial Sequence
  Description of Artificial Sequence: Synthetic oligonucleotide
  Sense strand starting at position 2716 of SEQ ID NO: 1882292
gccguauuaacauaugagu

SEQ ID NO: 2109737 - RNA, 19 nt, Artificial Sequence
  Description of Artificial Sequence: Synthetic oligonucleotide
  Antisense strand to SEQ ID NO: 2109736
acucauauguuaauacggc

SEQ ID NO: 2109738 - RNA, 19 nt, Artificial Sequence
  Description of Artificial Sequence: Synthetic oligonucleotide
  Sense strand starting at position 2718 of SEQ ID NO: 1882292
cguauuaacauaugaguug

SEQ ID NO: 2109739 - RNA, 19 nt, Artificial Sequence
  Description of Artificial Sequence: Synthetic oligonucleotide
  Antisense strand to SEQ ID NO: 2109738
caacucauauguuaauacg

SEQ ID NO: 2109740 - RNA, 19 nt, Artificial Sequence
  Description of Artificial Sequence: Synthetic oligonucleotide
  Sense strand starting at position 2758 of SEQ ID NO: 1882292
cuuagaaauugacagagaa

SEQ ID NO: 2109741 - RNA, 19 nt, Artificial Sequence
  Description of Artificial Sequence: Synthetic oligonucleotide
  Antisense strand to SEQ ID NO: 2109740
uucucugucaauuucuaag

SEQ ID NO: 2109742 - RNA, 19 nt, Artificial Sequence
  Description of Artificial Sequence: Synthetic oligonucleotide
  Sense strand starting at position 2990 of SEQ ID NO: 1882292
ggauuucucuaagguauac

SEQ ID NO: 2109743 - RNA, 19 nt, Artificial Sequence
  Description of Artificial Sequence: Synthetic oligonucleotide
  Antisense strand to SEQ ID NO: 2109742
guauaccuuagagaaaucc

SEQ ID NO: 2109744 - RNA, 19 nt, Artificial Sequence
  Description of Artificial Sequence: Synthetic oligonucleotide
  Sense strand starting at position 3954 of SEQ ID NO: 1882292
cgaguagggaugugcauuu

SEQ ID NO: 2109745 - RNA, 19 nt, Artificial Sequence
  Description of Artificial Sequence: Synthetic oligonucleotide
  Antisense strand to SEQ ID NO: 2109744
aaaugcacaucccuacucg

SEQ ID NO: 2109746 - RNA, 19 nt, Artificial Sequence
  Description of Artificial Sequence: Synthetic oligonucleotide
  Sense strand starting at position 3964 of SEQ ID NO: 1882292
ugugcauuucacggagcua

SEQ ID NO: 2109747 - RNA, 19 nt, Artificial Sequence
  Description of Artificial Sequence: Synthetic oligonucleotide
  Antisense strand to SEQ ID NO: 2109746
uagcuccgugaaaugcaca

SEQ ID NO: 2109748 - RNA, 19 nt, Artificial Sequence
  Description of Artificial Sequence: Synthetic oligonucleotide
  Sense strand starting at position 3976 of SEQ ID NO: 1882292
ggagcuacguucucagaag

SEQ ID NO: 2109749 - RNA, 19 nt, Artificial Sequence
  Description of Artificial Sequence: Synthetic oligonucleotide
  Antisense strand to SEQ ID NO: 2109748
cuucugagaacguagcucc

SEQ ID NO: 2109750 - RNA, 19 nt, Artificial Sequence
  Description of Artificial Sequence: Synthetic oligonucleotide
  Sense strand starting at position 21 of SEQ ID NO: 1882293
uguggaauuuaacaagauc

SEQ ID NO: 2109751 - RNA, 19 nt, Artificial Sequence
  Description of Artificial Sequence: Synthetic oligonucleotide
  Antisense strand to SEQ ID NO: 2109750
gaucuuguuaaauuccaca

SEQ ID NO: 2109752 - RNA, 19 nt, Artificial Sequence
  Description of Artificial Sequence: Synthetic oligonucleotide
  Sense strand starting at position 167 of SEQ ID NO: 1882293
acauuuguuccagggcuuu

SEQ ID NO: 2109753 - RNA, 19 nt, Artificial Sequence
  Description of Artificial Sequence: Synthetic oligonucleotide
  Antisense strand to SEQ ID NO: 2109752
aaagcccuggaacaaaugu

SEQ ID NO: 2109754 - RNA, 19 nt, Artificial Sequence
  Description of Artificial Sequence: Synthetic oligonucleotide
  Sense strand starting at position 317 of SEQ ID NO: 1882293
guuaccauauguucucaga

SEQ ID NO: 2109755 - RNA, 19 nt, Artificial Sequence
  Description of Artificial Sequence: Synthetic oligonucleotide
  Antisense strand to SEQ ID NO: 2109754
ucugagaacauaugguaac

SEQ ID NO: 2109756 - RNA, 19 nt, Artificial Sequence
  Description of Artificial Sequence: Synthetic oligonucleotide
  Sense strand starting at position 362 of SEQ ID NO: 1882293
ugagcagcuguggaauaau

SEQ ID NO: 2109757 - RNA, 19 nt, Artificial Sequence
  Description of Artificial Sequence: Synthetic oligonucleotide
  Antisense strand to SEQ ID NO: 2109756
auuauuccacagcugcuca

SEQ ID NO: 2109758 - RNA, 19 nt, Artificial Sequence
  Description of Artificial Sequence: Synthetic oligonucleotide
  Sense strand starting at position 714 of SEQ ID NO: 1882293
uugugagaggcugauaaug

SEQ ID NO: 2109759 - RNA, 19 nt, Artificial Sequence
  Description of Artificial Sequence: Synthetic oligonucleotide
  Antisense strand to SEQ ID NO: 2109758
cauuaucagccucucacaa

SEQ ID NO: 2109760 - RNA, 19 nt, Artificial Sequence
  Description of Artificial Sequence: Synthetic oligonucleotide
  Sense strand starting at position 723 of SEQ ID NO: 1882293
gcugauaaugugggaggaa

SEQ ID NO: 2109761 - RNA, 19 nt, Artificial Sequence
  Description of Artificial Sequence: Synthetic oligonucleotide
  Antisense strand to SEQ ID NO: 2109760
uuccucccacauuaucagc

SEQ ID NO: 2109762 - RNA, 19 nt, Artificial Sequence
  Description of Artificial Sequence: Synthetic oligonucleotide
  Sense strand starting at position 726 of SEQ ID NO: 1882293
gauaaugugggaggaaguu

SEQ ID NO: 2109763 - RNA, 19 nt, Artificial Sequence
  Description of Artificial Sequence: Synthetic oligonucleotide
  Antisense strand to SEQ ID NO: 2109762
aacuuccucccacauuauc

SEQ ID NO: 2109764 - RNA, 19 nt, Artificial Sequence
  Description of Artificial Sequence: Synthetic oligonucleotide
  Sense strand starting at position 772 of SEQ ID NO: 1882293
cuggcucugucacuuauuu

SEQ ID NO: 2109765 - RNA, 19 nt, Artificial Sequence
  Description of Artificial Sequence: Synthetic oligonucleotide
  Antisense strand to SEQ ID NO: 2109764
aaauaagugacagagccag

SEQ ID NO: 2109766 - RNA, 19 nt, Artificial Sequence
  Description of Artificial Sequence: Synthetic oligonucleotide
  Sense strand starting at position 783 of SEQ ID NO: 1882293
acuuauuugcugugugaau

SEQ ID NO: 2109767 - RNA, 19 nt, Artificial Sequence
  Description of Artificial Sequence: Synthetic oligonucleotide
  Antisense strand to SEQ ID NO: 2109766
auucacacagcaaauaagu

SEQ ID NO: 2109768 - RNA, 19 nt, Artificial Sequence
  Description of Artificial Sequence: Synthetic oligonucleotide
  Sense strand starting at position 784 of SEQ ID NO: 1882293
cuuauuugcugugugaauu

SEQ ID NO: 2109769 - RNA, 19 nt, Artificial Sequence
  Description of Artificial Sequence: Synthetic oligonucleotide
  Antisense strand to SEQ ID NO: 2109768
aauucacacagcaaauaag

SEQ ID NO: 2109770 - RNA, 19 nt, Artificial Sequence
  Description of Artificial Sequence: Synthetic oligonucleotide
  Sense strand starting at position 785 of SEQ ID NO: 1882293
uuauuugcugugugaauug

SEQ ID NO: 2109771 - RNA, 19 nt, Artificial Sequence
  Description of Artificial Sequence: Synthetic oligonucleotide
  Antisense strand to SEQ ID NO: 2109770
caauucacacagcaaauaa

SEQ ID NO: 2109772 - RNA, 19 nt, Artificial Sequence
  Description of Artificial Sequence: Synthetic oligonucleotide
  Sense strand starting at position 855 of SEQ ID NO: 1882293
agcaacuagccugaaugua

SEQ ID NO: 2109773 - RNA, 19 nt, Artificial Sequence
  Description of Artificial Sequence: Synthetic oligonucleotide
  Antisense strand to SEQ ID NO: 2109772
uacauucaggcuaguugcu

SEQ ID NO: 2109774 - RNA, 19 nt, Artificial Sequence
  Description of Artificial Sequence: Synthetic oligonucleotide
  Sense strand starting at position 906 of SEQ ID NO: 1882293
agggcuaauccuuaagggu

SEQ ID NO: 2109775 - RNA, 19 nt, Artificial Sequence
  Description of Artificial Sequence: Synthetic oligonucleotide
  Antisense strand to SEQ ID NO: 2109774
acccuuaaggauuagcccu

SEQ ID NO: 2109776 - RNA, 19 nt, Artificial Sequence
  Description of Artificial Sequence: Synthetic oligonucleotide
  Sense strand starting at position 922 of SEQ ID NO: 1882293
gguuaaaugcugcagggau

SEQ ID NO: 2109777 - RNA, 19 nt, Artificial Sequence
  Description of Artificial Sequence: Synthetic oligonucleotide
  Antisense strand to SEQ ID NO: 2109776
aucccugcagcauuuaacc

SEQ ID NO: 2109778 - RNA, 19 nt, Artificial Sequence
  Description of Artificial Sequence: Synthetic oligonucleotide
  Sense strand starting at position 947 of SEQ ID NO: 1882293
uguguuugcccaguuaagu

SEQ ID NO: 2109779 - RNA, 19 nt, Artificial Sequence
  Description of Artificial Sequence: Synthetic oligonucleotide
  Antisense strand to SEQ ID NO: 2109778
acuuaacugggcaaacaca

SEQ ID NO: 2109780 - RNA, 19 nt, Artificial Sequence
  Description of Artificial Sequence: Synthetic oligonucleotide
  Sense strand starting at position 948 of SEQ ID NO: 1882293
guguuugcccaguuaaguu

SEQ ID NO: 2109781 - RNA, 19 nt, Artificial Sequence
  Description of Artificial Sequence: Synthetic oligonucleotide
  Antisense strand to SEQ ID NO: 2109780
aacuuaacugggcaaacac

SEQ ID NO: 2109782 - RNA, 19 nt, Artificial Sequence
  Description of Artificial Sequence: Synthetic oligonucleotide
  Sense strand starting at position 1124 of SEQ ID NO: 1882293
gcagaauugagaggccuca

SEQ ID NO: 2109783 - RNA, 19 nt, Artificial Sequence
  Description of Artificial Sequence: Synthetic oligonucleotide
  Antisense strand to SEQ ID NO: 2109782
ugaggccucucaauucugc

SEQ ID NO: 2109784 - RNA, 19 nt, Artificial Sequence
  Description of Artificial Sequence: Synthetic oligonucleotide
  Sense strand starting at position 1197 of SEQ ID NO: 1882293
agaacugcagucuaucaga

SEQ ID NO: 2109785 - RNA, 19 nt, Artificial Sequence
  Description of Artificial Sequence: Synthetic oligonucleotide
  Antisense strand to SEQ ID NO: 2109784
ucugauagacugcaguucu

SEQ ID NO: 2109786 - RNA, 19 nt, Artificial Sequence
  Description of Artificial Sequence: Synthetic oligonucleotide
  Sense strand starting at position 1474 of SEQ ID NO: 1882293
uggguaauugcagaccaca

SEQ ID NO: 2109787 - RNA, 19 nt, Artificial Sequence
  Description of Artificial Sequence: Synthetic oligonucleotide
  Antisense strand to SEQ ID NO: 2109786
uguggucugcaauuaccca

SEQ ID NO: 2109788 - RNA, 19 nt, Artificial Sequence
  Description of Artificial Sequence: Synthetic oligonucleotide
  Sense strand starting at position 2059 of SEQ ID NO: 1882293
ugccaaauguuuguagaag

SEQ ID NO: 2109789 - RNA, 19 nt, Artificial Sequence
  Description of Artificial Sequence: Synthetic oligonucleotide
  Antisense strand to SEQ ID NO: 2109788
cuucuacaaacauuuggca

SEQ ID NO: 2109790 - RNA, 19 nt, Artificial Sequence
  Description of Artificial Sequence: Synthetic oligonucleotide
  Sense strand starting at position 2119 of SEQ ID NO: 1882293
gacaaagaauggucaaguu

SEQ ID NO: 2109791 - RNA, 19 nt, Artificial Sequence
  Description of Artificial Sequence: Synthetic oligonucleotide
  Antisense strand to SEQ ID NO: 2109790
aacuugaccauucuuuguc

SEQ ID NO: 2109792 - RNA, 19 nt, Artificial Sequence
  Description of Artificial Sequence: Synthetic oligonucleotide
  Sense strand starting at position 2239 of SEQ ID NO: 1882293
gggcucauggcuugaauga

SEQ ID NO: 2109793 - RNA, 19 nt, Artificial Sequence
  Description of Artificial Sequence: Synthetic oligonucleotide
  Antisense strand to SEQ ID NO: 2109792
ucauucaagccaugagccc

SEQ ID NO: 2109794 - RNA, 19 nt, Artificial Sequence
  Description of Artificial Sequence: Synthetic oligonucleotide
  Sense strand starting at position 2240 of SEQ ID NO: 1882293
ggcucauggcuugaaugaa

SEQ ID NO: 2109795 - RNA, 19 nt, Artificial Sequence
  Description of Artificial Sequence: Synthetic oligonucleotide
  Antisense strand to SEQ ID NO: 2109794
uucauucaagccaugagcc

SEQ ID NO: 2109796 - RNA, 19 nt, Artificial Sequence
  Description of Artificial Sequence: Synthetic oligonucleotide
  Sense strand starting at position 2446 of SEQ ID NO: 1882293
cauaguuuccgagagguau

SEQ ID NO: 2109797 - RNA, 19 nt, Artificial Sequence
  Description of Artificial Sequence: Synthetic oligonucleotide
  Antisense strand to SEQ ID NO: 2109796
auaccucucggaaacuaug

SEQ ID NO: 2109798 - RNA, 19 nt, Artificial Sequence
  Description of Artificial Sequence: Synthetic oligonucleotide
  Sense strand starting at position 2501 of SEQ ID NO: 1882293
uuacuugauuggguuucua

SEQ ID NO: 2109799 - RNA, 19 nt, Artificial Sequence
  Description of Artificial Sequence: Synthetic oligonucleotide
  Antisense strand to SEQ ID NO: 2109798
uagaaacccaaucaaguaa

SEQ ID NO: 2109800 - RNA, 19 nt, Artificial Sequence
  Description of Artificial Sequence: Synthetic oligonucleotide
  Sense strand starting at position 2583 of SEQ ID NO: 1882293
uguuauccuguuuggauuu

SEQ ID NO: 2109801 - RNA, 19 nt, Artificial Sequence
  Description of Artificial Sequence: Synthetic oligonucleotide
  Antisense strand to SEQ ID NO: 2109800
aaauccaaacaggauaaca

SEQ ID NO: 2109802 - RNA, 19 nt, Artificial Sequence
  Description of Artificial Sequence: Synthetic oligonucleotide
  Sense strand starting at position 2761 of SEQ ID NO: 1882293
ugacauuggagguguacuu

SEQ ID NO: 2109803 - RNA, 19 nt, Artificial Sequence
  Description of Artificial Sequence: Synthetic oligonucleotide
  Antisense strand to SEQ ID NO: 2109802
aaguacaccuccaauguca

SEQ ID NO: 2109804 - RNA, 19 nt, Artificial Sequence
  Description of Artificial Sequence: Synthetic oligonucleotide
  Sense strand starting at position 2900 of SEQ ID NO: 1882293
ucaugagacugacucugua

SEQ ID NO: 2109805 - RNA, 19 nt, Artificial Sequence
  Description of Artificial Sequence: Synthetic oligonucleotide
  Antisense strand to SEQ ID NO: 2109804
uacagagucagucucauga

SEQ ID NO: 2109806 - RNA, 19 nt, Artificial Sequence
  Description of Artificial Sequence: Synthetic oligonucleotide
  Sense strand starting at position 2903 of SEQ ID NO: 1882293
ugagacugacucuguaaac

SEQ ID NO: 2109807 - RNA, 19 nt, Artificial Sequence
  Description of Artificial Sequence: Synthetic oligonucleotide
  Antisense strand to SEQ ID NO: 2109806
guuuacagagucagucuca

SEQ ID NO: 2109808 - RNA, 19 nt, Artificial Sequence
  Description of Artificial Sequence: Synthetic oligonucleotide
  Sense strand starting at position 2904 of SEQ ID NO: 1882293
gagacugacucuguaaaca

SEQ ID NO: 2109809 - RNA, 19 nt, Artificial Sequence
  Description of Artificial Sequence: Synthetic oligonucleotide
  Antisense strand to SEQ ID NO: 2109808
uguuuacagagucagucuc

SEQ ID NO: 2109810 - RNA, 19 nt, Artificial Sequence
  Description of Artificial Sequence: Synthetic oligonucleotide
  Sense strand starting at position 2925 of SEQ ID NO: 1882293
guguauugagaacgggaaa

SEQ ID NO: 2109811 - RNA, 19 nt, Artificial Sequence
  Description of Artificial Sequence: Synthetic oligonucleotide
  Antisense strand to SEQ ID NO: 2109810
uuucccguucucaauacac

SEQ ID NO: 2109812 - RNA, 19 nt, Artificial Sequence
  Description of Artificial Sequence: Synthetic oligonucleotide
  Sense strand starting at position 2939 of SEQ ID NO: 1882293
ggaaaccaggcguggaauu

SEQ ID NO: 2109813 - RNA, 19 nt, Artificial Sequence
  Description of Artificial Sequence: Synthetic oligonucleotide
  Antisense strand to SEQ ID NO: 2109812
aauuccacgccugguuucc

SEQ ID NO: 2109814 - RNA, 19 nt, Artificial Sequence
  Description of Artificial Sequence: Synthetic oligonucleotide
  Sense strand starting at position 3103 of SEQ ID NO: 1882293
ccuagucaucacugacagu

SEQ ID NO: 2109815 - RNA, 19 nt, Artificial Sequence
  Description of Artificial Sequence: Synthetic oligonucleotide
  Antisense strand to SEQ ID NO: 2109814
acugucagugaugacuagg

SEQ ID NO: 2109816 - RNA, 19 nt, Artificial Sequence
  Description of Artificial Sequence: Synthetic oligonucleotide
  Sense strand starting at position 3130 of SEQ ID NO: 1882293
aaaguagauuagcuaggaa

SEQ ID NO: 2109817 - RNA, 19 nt, Artificial Sequence
  Description of Artificial Sequence: Synthetic oligonucleotide
  Antisense strand to SEQ ID NO: 2109816
uuccuagcuaaucuacuuu

SEQ ID NO: 2109818 - RNA, 19 nt, Artificial Sequence
  Description of Artificial Sequence: Synthetic oligonucleotide
  Sense strand starting at position 3133 of SEQ ID NO: 1882293
guagauuagcuaggaaacu

SEQ ID NO: 2109819 - RNA, 19 nt, Artificial Sequence
  Description of Artificial Sequence: Synthetic oligonucleotide
  Antisense strand to SEQ ID NO: 2109818
aguuuccuagcuaaucuac

SEQ ID NO: 2109820 - RNA, 19 nt, Artificial Sequence
  Description of Artificial Sequence: Synthetic oligonucleotide
  Sense strand starting at position 3178 of SEQ ID NO: 1882293
augugaauguacuccaaca

SEQ ID NO: 2109821 - RNA, 19 nt, Artificial Sequence
  Description of Artificial Sequence: Synthetic oligonucleotide
  Antisense strand to SEQ ID NO: 2109820
uguuggaguacauucacau

SEQ ID NO: 2109822 - RNA, 19 nt, Artificial Sequence
  Description of Artificial Sequence: Synthetic oligonucleotide
  Sense strand starting at position 3180 of SEQ ID NO: 1882293
gugaauguacuccaacaca

SEQ ID NO: 2109823 - RNA, 19 nt, Artificial Sequence
  Description of Artificial Sequence: Synthetic oligonucleotide
  Antisense strand to SEQ ID NO: 2109822
uguguuggaguacauucac

SEQ ID NO: 2109824 - RNA, 19 nt, Artificial Sequence
  Description of Artificial Sequence: Synthetic oligonucleotide
  Sense strand starting at position 3656 of SEQ ID NO: 1882293
accugaucauaugugaguu

SEQ ID NO: 2109825 - RNA, 19 nt, Artificial Sequence
  Description of Artificial Sequence: Synthetic oligonucleotide
  Antisense strand to SEQ ID NO: 2109824
aacucacauaugaucaggu

SEQ ID NO: 2109826 - RNA, 19 nt, Artificial Sequence
  Description of Artificial Sequence: Synthetic oligonucleotide
  Sense strand starting at position 3885 of SEQ ID NO: 1882293
gcugauguuccacaaggaa

SEQ ID NO: 2109827 - RNA, 19 nt, Artificial Sequence
  Description of Artificial Sequence: Synthetic oligonucleotide
  Antisense strand to SEQ ID NO: 2109826
uuccuuguggaacaucagc

SEQ ID NO: 2109828 - RNA, 19 nt, Artificial Sequence
  Description of Artificial Sequence: Synthetic oligonucleotide
  Sense strand starting at position 3914 of SEQ ID NO: 1882293
gaccaauguuagguuugga

SEQ ID NO: 2109829 - RNA, 19 nt, Artificial Sequence
  Description of Artificial Sequence: Synthetic oligonucleotide
  Antisense strand to SEQ ID NO: 2109828
uccaaaccuaacauugguc

SEQ ID NO: 2109830 - RNA, 19 nt, Artificial Sequence
  Description of Artificial Sequence: Synthetic oligonucleotide
  Sense strand starting at position 34 of SEQ ID NO: 1882294
gcauuucuuuaauaugaag

SEQ ID NO: 2109831 - RNA, 19 nt, Artificial Sequence
  Description of Artificial Sequence: Synthetic oligonucleotide
  Antisense strand to SEQ ID NO: 2109830
cuucauauuaaagaaaugc

SEQ ID NO: 2109832 - RNA, 19 nt, Artificial Sequence
  Description of Artificial Sequence: Synthetic oligonucleotide
  Sense strand starting at position 49 of SEQ ID NO: 1882294
gaaguaaugcaauauguau

SEQ ID NO: 2109833 - RNA, 19 nt, Artificial Sequence
  Description of Artificial Sequence: Synthetic oligonucleotide
  Antisense strand to SEQ ID NO: 2109832
auacauauugcauuacuuc

SEQ ID NO: 2109834 - RNA, 19 nt, Artificial Sequence
  Description of Artificial Sequence: Synthetic oligonucleotide
  Sense strand starting at position 996 of SEQ ID NO: 1882294
acuguugcauacugugaau

SEQ ID NO: 2109835 - RNA, 19 nt, Artificial Sequence
  Description of Artificial Sequence: Synthetic oligonucleotide
  Antisense strand to SEQ ID NO: 2109834
auucacaguaugcaacagu

SEQ ID NO: 2109836 - RNA, 19 nt, Artificial Sequence
  Description of Artificial Sequence: Synthetic oligonucleotide
  Sense strand starting at position 1250 of SEQ ID NO: 1882294
guagcagcuugugucaaua

SEQ ID NO: 2109837 - RNA, 19 nt, Artificial Sequence
  Description of Artificial Sequence: Synthetic oligonucleotide
  Antisense strand to SEQ ID NO: 2109836
uauugacacaagcugcuac

SEQ ID NO: 2109838 - RNA, 19 nt, Artificial Sequence
  Description of Artificial Sequence: Synthetic oligonucleotide
  Sense strand starting at position 1258 of SEQ ID NO: 1882294
uugugucaauaacaguuua

SEQ ID NO: 2109839 - RNA, 19 nt, Artificial Sequence
  Description of Artificial Sequence: Synthetic oligonucleotide
  Antisense strand to SEQ ID NO: 2109838
uaaacuguuauugacacaa

SEQ ID NO: 2109840 - RNA, 19 nt, Artificial Sequence
  Description of Artificial Sequence: Synthetic oligonucleotide
  Sense strand starting at position 1404 of SEQ ID NO: 1882294
acgucaauacccuaucgau

SEQ ID NO: 2109841 - RNA, 19 nt, Artificial Sequence
  Description of Artificial Sequence: Synthetic oligonucleotide
  Antisense strand to SEQ ID NO: 2109840
aucgauaggguauugacgu

SEQ ID NO: 2109842 - RNA, 19 nt, Artificial Sequence
  Description of Artificial Sequence: Synthetic oligonucleotide
  Sense strand starting at position 2538 of SEQ ID NO: 1882294
uggagaacuuauuacgucu

SEQ ID NO: 2109843 - RNA, 19 nt, Artificial Sequence
  Description of Artificial Sequence: Synthetic oligonucleotide
  Antisense strand to SEQ ID NO: 2109842
agacguaauaaguucucca

SEQ ID NO: 2109844 - RNA, 19 nt, Artificial Sequence
  Description of Artificial Sequence: Synthetic oligonucleotide
  Sense strand starting at position 3112 of SEQ ID NO: 1882294
cuaugagaaugacauaaga

SEQ ID NO: 2109845 - RNA, 19 nt, Artificial Sequence
  Description of Artificial Sequence: Synthetic oligonucleotide
  Antisense strand to SEQ ID NO: 2109844
ucuuaugucauucucauag

SEQ ID NO: 2109846 - RNA, 19 nt, Artificial Sequence
  Description of Artificial Sequence: Synthetic oligonucleotide
  Sense strand starting at position 3677 of SEQ ID NO: 1882294
ugcuguugugaauaacaug

SEQ ID NO: 2109847 - RNA, 19 nt, Artificial Sequence
  Description of Artificial Sequence: Synthetic oligonucleotide
  Antisense strand to SEQ ID NO: 2109846
cauguuauucacaacagca

SEQ ID NO: 2109848 - RNA, 19 nt, Artificial Sequence
  Description of Artificial Sequence: Synthetic oligonucleotide
  Sense strand starting at position 3865 of SEQ ID NO: 1882294
acaguaguuguauaagcau

SEQ ID NO: 2109849 - RNA, 19 nt, Artificial Sequence
  Description of Artificial Sequence: Synthetic oligonucleotide
  Antisense strand to SEQ ID NO: 2109848
augcuuauacaacuacugu

SEQ ID NO: 2109850 - RNA, 19 nt, Artificial Sequence
  Description of Artificial Sequence: Synthetic oligonucleotide
  Sense strand starting at position 3939 of SEQ ID NO: 1882294
uauugugacugaugugagu

SEQ ID NO: 2109851 - RNA, 19 nt, Artificial Sequence
  Description of Artificial Sequence: Synthetic oligonucleotide
  Antisense strand to SEQ ID NO: 2109850
acucacaucagucacaaua

SEQ ID NO: 2109852 - RNA, 19 nt, Artificial Sequence
  Description of Artificial Sequence: Synthetic oligonucleotide
  Sense strand starting at position 3948 of SEQ ID NO: 1882294
ugaugugaguuggcaucuu

SEQ ID NO: 2109853 - RNA, 19 nt, Artificial Sequence
  Description of Artificial Sequence: Synthetic oligonucleotide
  Antisense strand to SEQ ID NO: 2109852
aagaugccaacucacauca

SEQ ID NO: 2109854 - RNA, 19 nt, Artificial Sequence
  Description of Artificial Sequence: Synthetic oligonucleotide
  Sense strand starting at position 78 of SEQ ID NO: 1882295
aaggauguaaguugugaua

SEQ ID NO: 2109855 - RNA, 19 nt, Artificial Sequence
  Description of Artificial Sequence: Synthetic oligonucleotide
  Antisense strand to SEQ ID NO: 2109854
uaucacaacuuacauccuu

SEQ ID NO: 2109856 - RNA, 19 nt, Artificial Sequence
  Description of Artificial Sequence: Synthetic oligonucleotide
  Sense strand starting at position 184 of SEQ ID NO: 1882295
gagguaguuuaacuuauaa

SEQ ID NO: 2109857 - RNA, 19 nt, Artificial Sequence
  Description of Artificial Sequence: Synthetic oligonucleotide
  Antisense strand to SEQ ID NO: 2109856
uuauaaguuaaacuaccuc

SEQ ID NO: 2109858 - RNA, 19 nt, Artificial Sequence
  Description of Artificial Sequence: Synthetic oligonucleotide
  Sense strand starting at position 344 of SEQ ID NO: 1882295
gggacaugggugcaacuuu

SEQ ID NO: 2109859 - RNA, 19 nt, Artificial Sequence
  Description of Artificial Sequence: Synthetic oligonucleotide
  Antisense strand to SEQ ID NO: 2109858
aaaguugcacccauguccc

SEQ ID NO: 2109860 - RNA, 19 nt, Artificial Sequence
  Description of Artificial Sequence: Synthetic oligonucleotide
  Sense strand starting at position 658 of SEQ ID NO: 1882295
auuugaauguuagaaucag

SEQ ID NO: 2109861 - RNA, 19 nt, Artificial Sequence
  Description of Artificial Sequence: Synthetic oligonucleotide
  Antisense strand to SEQ ID NO: 2109860
cugauucuaacauucaaau

SEQ ID NO: 2109862 - RNA, 19 nt, Artificial Sequence
  Description of Artificial Sequence: Synthetic oligonucleotide
  Sense strand starting at position 667 of SEQ ID NO: 1882295
uuagaaucagauugucuag

SEQ ID NO: 2109863 - RNA, 19 nt, Artificial Sequence
  Description of Artificial Sequence: Synthetic oligonucleotide
  Antisense strand to SEQ ID NO: 2109862
cuagacaaucugauucuaa

SEQ ID NO: 2109864 - RNA, 19 nt, Artificial Sequence
  Description of Artificial Sequence: Synthetic oligonucleotide
  Sense strand starting at position 669 of SEQ ID NO: 1882295
agaaucagauugucuaguu

SEQ ID NO: 2109865 - RNA, 19 nt, Artificial Sequence
  Description of Artificial Sequence: Synthetic oligonucleotide
  Antisense strand to SEQ ID NO: 2109864
aacuagacaaucugauucu

SEQ ID NO: 2109866 - RNA, 19 nt, Artificial Sequence
  Description of Artificial Sequence: Synthetic oligonucleotide
  Sense strand starting at position 670 of SEQ ID NO: 1882295
gaaucagauugucuaguuc

SEQ ID NO: 2109867 - RNA, 19 nt, Artificial Sequence
  Description of Artificial Sequence: Synthetic oligonucleotide
  Antisense strand to SEQ ID NO: 2109866
gaacuagacaaucugauuc

SEQ ID NO: 2109868 - RNA, 19 nt, Artificial Sequence
  Description of Artificial Sequence: Synthetic oligonucleotide
  Sense strand starting at position 822 of SEQ ID NO: 1882295
ccuagucgagaacaucaua

SEQ ID NO: 2109869 - RNA, 19 nt, Artificial Sequence
  Description of Artificial Sequence: Synthetic oligonucleotide
  Antisense strand to SEQ ID NO: 2109868
uaugauguucucgacuagg

SEQ ID NO: 2109870 - RNA, 19 nt, Artificial Sequence
  Description of Artificial Sequence: Synthetic oligonucleotide
  Sense strand starting at position 825 of SEQ ID NO: 1882295
agucgagaacaucauaagu

SEQ ID NO: 2109871 - RNA, 19 nt, Artificial Sequence
  Description of Artificial Sequence: Synthetic oligonucleotide
  Antisense strand to SEQ ID NO: 2109870
acuuaugauguucucgacu

SEQ ID NO: 2109872 - RNA, 19 nt, Artificial Sequence
  Description of Artificial Sequence: Synthetic oligonucleotide
  Sense strand starting at position 844 of SEQ ID NO: 1882295
cuuucuauuuguccaaguu

SEQ ID NO: 2109873 - RNA, 19 nt, Artificial Sequence
  Description of Artificial Sequence: Synthetic oligonucleotide
  Antisense strand to SEQ ID NO: 2109872
aacuuggacaaauagaaag

SEQ ID NO: 2109874 - RNA, 19 nt, Artificial Sequence
  Description of Artificial Sequence: Synthetic oligonucleotide
  Sense strand starting at position 871 of SEQ ID NO: 1882295
uaaacuuucgaggguggau

SEQ ID NO: 2109875 - RNA, 19 nt, Artificial Sequence
  Description of Artificial Sequence: Synthetic oligonucleotide
  Antisense strand to SEQ ID NO: 2109874
auccacccucgaaaguuua

SEQ ID NO: 2109876 - RNA, 19 nt, Artificial Sequence
  Description of Artificial Sequence: Synthetic oligonucleotide
  Sense strand starting at position 873 of SEQ ID NO: 1882295
aacuuucgaggguggauaa

SEQ ID NO: 2109877 - RNA, 19 nt, Artificial Sequence
  Description of Artificial Sequence: Synthetic oligonucleotide
  Antisense strand to SEQ ID NO: 2109876
uuauccacccucgaaaguu

SEQ ID NO: 2109878 - RNA, 19 nt, Artificial Sequence
  Description of Artificial Sequence: Synthetic oligonucleotide
  Sense strand starting at position 924 of SEQ ID NO: 1882295
uuaaguuuauuccugggaa

SEQ ID NO: 2109879 - RNA, 19 nt, Artificial Sequence
  Description of Artificial Sequence: Synthetic oligonucleotide
  Antisense strand to SEQ ID NO: 2109878
uucccaggaauaaacuuaa

SEQ ID NO: 2109880 - RNA, 19 nt, Artificial Sequence
  Description of Artificial Sequence: Synthetic oligonucleotide
  Sense strand starting at position 926 of SEQ ID NO: 1882295
aaguuuauuccugggaacu

SEQ ID NO: 2109881 - RNA, 19 nt, Artificial Sequence
  Description of Artificial Sequence: Synthetic oligonucleotide
  Antisense strand to SEQ ID NO: 2109880
aguucccaggaauaaacuu

SEQ ID NO: 2109882 - RNA, 19 nt, Artificial Sequence
  Description of Artificial Sequence: Synthetic oligonucleotide
  Sense strand starting at position 950 of SEQ ID NO: 1882295
uugcuaauuaaaugggagu

SEQ ID NO: 2109883 - RNA, 19 nt, Artificial Sequence
  Description of Artificial Sequence: Synthetic oligonucleotide
  Antisense strand to SEQ ID NO: 2109882
acucccauuuaauuagcaa

SEQ ID NO: 2109884 - RNA, 19 nt, Artificial Sequence
  Description of Artificial Sequence: Synthetic oligonucleotide
  Sense strand starting at position 951 of SEQ ID NO: 1882295
ugcuaauuaaaugggagua

SEQ ID NO: 2109885 - RNA, 19 nt, Artificial Sequence
  Description of Artificial Sequence: Synthetic oligonucleotide
  Antisense strand to SEQ ID NO: 2109884
uacucccauuuaauuagca

SEQ ID NO: 2109886 - RNA, 19 nt, Artificial Sequence
  Description of Artificial Sequence: Synthetic oligonucleotide
  Sense strand starting at position 952 of SEQ ID NO: 1882295
gcuaauuaaaugggaguaa

SEQ ID NO: 2109887 - RNA, 19 nt, Artificial Sequence
  Description of Artificial Sequence: Synthetic oligonucleotide
  Antisense strand to SEQ ID NO: 2109886
uuacucccauuuaauuagc

SEQ ID NO: 2109888 - RNA, 19 nt, Artificial Sequence
  Description of Artificial Sequence: Synthetic oligonucleotide
  Sense strand starting at position 998 of SEQ ID NO: 1882295
uugguuucuguauaucaau

SEQ ID NO: 2109889 - RNA, 19 nt, Artificial Sequence
  Description of Artificial Sequence: Synthetic oligonucleotide
  Antisense strand to SEQ ID NO: 2109888
auugauauacagaaaccaa

SEQ ID NO: 2109890 - RNA, 19 nt, Artificial Sequence
  Description of Artificial Sequence: Synthetic oligonucleotide
  Sense strand starting at position 1079 of SEQ ID NO: 1882295
uuugguuugagauaggugu

SEQ ID NO: 2109891 - RNA, 19 nt, Artificial Sequence
  Description of Artificial Sequence: Synthetic oligonucleotide
  Antisense strand to SEQ ID NO: 2109890
acaccuaucucaaaccaaa

SEQ ID NO: 2109892 - RNA, 19 nt, Artificial Sequence
  Description of Artificial Sequence: Synthetic oligonucleotide
  Sense strand starting at position 1085 of SEQ ID NO: 1882295
uugagauagguguaucuua

SEQ ID NO: 2109893 - RNA, 19 nt, Artificial Sequence
  Description of Artificial Sequence: Synthetic oligonucleotide
  Antisense strand to SEQ ID NO: 2109892
uaagauacaccuaucucaa

SEQ ID NO: 2109894 - RNA, 19 nt, Artificial Sequence
  Description of Artificial Sequence: Synthetic oligonucleotide
  Sense strand starting at position 1389 of SEQ ID NO: 1882295
cuugaauucguuuaacaaa

SEQ ID NO: 2109895 - RNA, 19 nt, Artificial Sequence
  Description of Artificial Sequence: Synthetic oligonucleotide
  Antisense strand to SEQ ID NO: 2109894
uuuguuaaacgaauucaag

SEQ ID NO: 2109896 - RNA, 19 nt, Artificial Sequence
  Description of Artificial Sequence: Synthetic oligonucleotide
  Sense strand starting at position 1438 of SEQ ID NO: 1882295
acaguugugucauuauuua

SEQ ID NO: 2109897 - RNA, 19 nt, Artificial Sequence
  Description of Artificial Sequence: Synthetic oligonucleotide
  Antisense strand to SEQ ID NO: 2109896
uaaauaaugacacaacugu

SEQ ID NO: 2109898 - RNA, 19 nt, Artificial Sequence
  Description of Artificial Sequence: Synthetic oligonucleotide
  Sense strand starting at position 1568 of SEQ ID NO: 1882295
uucguaggcagauagauua

SEQ ID NO: 2109899 - RNA, 19 nt, Artificial Sequence
  Description of Artificial Sequence: Synthetic oligonucleotide
  Antisense strand to SEQ ID NO: 2109898
uaaucuaucugccuacgaa

SEQ ID NO: 2109900 - RNA, 19 nt, Artificial Sequence
  Description of Artificial Sequence: Synthetic oligonucleotide
  Sense strand starting at position 1584 of SEQ ID NO: 1882295
uuagauaaacauugucagu

SEQ ID NO: 2109901 - RNA, 19 nt, Artificial Sequence
  Description of Artificial Sequence: Synthetic oligonucleotide
  Antisense strand to SEQ ID NO: 2109900
acugacaauguuuaucuaa

SEQ ID NO: 2109902 - RNA, 19 nt, Artificial Sequence
  Description of Artificial Sequence: Synthetic oligonucleotide
  Sense strand starting at position 1586 of SEQ ID NO: 1882295
agauaaacauugucaguaa

SEQ ID NO: 2109903 - RNA, 19 nt, Artificial Sequence
  Description of Artificial Sequence: Synthetic oligonucleotide
  Antisense strand to SEQ ID NO: 2109902
uuacugacaauguuuaucu

SEQ ID NO: 2109904 - RNA, 19 nt, Artificial Sequence
  Description of Artificial Sequence: Synthetic oligonucleotide
  Sense strand starting at position 1709 of SEQ ID NO: 1882295
aagcacugucuccauggaa

SEQ ID NO: 2109905 - RNA, 19 nt, Artificial Sequence
  Description of Artificial Sequence: Synthetic oligonucleotide
  Antisense strand to SEQ ID NO: 2109904
uuccauggagacagugcuu

SEQ ID NO: 2109906 - RNA, 19 nt, Artificial Sequence
  Description of Artificial Sequence: Synthetic oligonucleotide
  Sense strand starting at position 1830 of SEQ ID NO: 1882295
acagaaucacauugugauu

SEQ ID NO: 2109907 - RNA, 19 nt, Artificial Sequence
  Description of Artificial Sequence: Synthetic oligonucleotide
  Antisense strand to SEQ ID NO: 2109906
aaucacaaugugauucugu

SEQ ID NO: 2109908 - RNA, 19 nt, Artificial Sequence
  Description of Artificial Sequence: Synthetic oligonucleotide
  Sense strand starting at position 1877 of SEQ ID NO: 1882295
augucuuaucuccaaggca

SEQ ID NO: 2109909 - RNA, 19 nt, Artificial Sequence
  Description of Artificial Sequence: Synthetic oligonucleotide
  Antisense strand to SEQ ID NO: 2109908
ugccuuggagauaagacau

SEQ ID NO: 2109910 - RNA, 19 nt, Artificial Sequence
  Description of Artificial Sequence: Synthetic oligonucleotide
  Sense strand starting at position 1897 of SEQ ID NO: 1882295
ggagcaggcacuuaccauu

SEQ ID NO: 2109911 - RNA, 19 nt, Artificial Sequence
  Description of Artificial Sequence: Synthetic oligonucleotide
  Antisense strand to SEQ ID NO: 2109910
aaugguaagugccugcucc

SEQ ID NO: 2109912 - RNA, 19 nt, Artificial Sequence
  Description of Artificial Sequence: Synthetic oligonucleotide
  Sense strand starting at position 2028 of SEQ ID NO: 1882295
caauaugcaguguaugaua

SEQ ID NO: 2109913 - RNA, 19 nt, Artificial Sequence
  Description of Artificial Sequence: Synthetic oligonucleotide
  Antisense strand to SEQ ID NO: 2109912
uaucauacacugcauauug

SEQ ID NO: 2109914 - RNA, 19 nt, Artificial Sequence
  Description of Artificial Sequence: Synthetic oligonucleotide
  Sense strand starting at position 2085 of SEQ ID NO: 1882295
accaacaucuggguuacuu

SEQ ID NO: 2109915 - RNA, 19 nt, Artificial Sequence
  Description of Artificial Sequence: Synthetic oligonucleotide
  Antisense strand to SEQ ID NO: 2109914
aaguaacccagauguuggu

SEQ ID NO: 2109916 - RNA, 19 nt, Artificial Sequence
  Description of Artificial Sequence: Synthetic oligonucleotide
  Sense strand starting at position 2343 of SEQ ID NO: 1882295
ggcugagacuucucaaauu

SEQ ID NO: 2109917 - RNA, 19 nt, Artificial Sequence
  Description of Artificial Sequence: Synthetic oligonucleotide
  Antisense strand to SEQ ID NO: 2109916
aauuugagaagucucagcc

SEQ ID NO: 2109918 - RNA, 19 nt, Artificial Sequence
  Description of Artificial Sequence: Synthetic oligonucleotide
  Sense strand starting at position 2567 of SEQ ID NO: 1882295
cucugauguuucuuaaagg

SEQ ID NO: 2109919 - RNA, 19 nt, Artificial Sequence
  Description of Artificial Sequence: Synthetic oligonucleotide
  Antisense strand to SEQ ID NO: 2109918
ccuuuaagaaacaucagag

SEQ ID NO: 2109920 - RNA, 19 nt, Artificial Sequence
  Description of Artificial Sequence: Synthetic oligonucleotide
  Sense strand starting at position 2586 of SEQ ID NO: 1882295
cugucauauaugcauggga

SEQ ID NO: 2109921 - RNA, 19 nt, Artificial Sequence
  Description of Artificial Sequence: Synthetic oligonucleotide
  Antisense strand to SEQ ID NO: 2109920
ucccaugcauauaugacag

SEQ ID NO: 2109922 - RNA, 19 nt, Artificial Sequence
  Description of Artificial Sequence: Synthetic oligonucleotide
  Sense strand starting at position 2588 of SEQ ID NO: 1882295
gucauauaugcaugggaua

SEQ ID NO: 2109923 - RNA, 19 nt, Artificial Sequence
  Description of Artificial Sequence: Synthetic oligonucleotide
  Antisense strand to SEQ ID NO: 2109922
uaucccaugcauauaugac

SEQ ID NO: 2109924 - RNA, 19 nt, Artificial Sequence
  Description of Artificial Sequence: Synthetic oligonucleotide
  Sense strand starting at position 2589 of SEQ ID NO: 1882295
ucauauaugcaugggauaa

SEQ ID NO: 2109925 - RNA, 19 nt, Artificial Sequence
  Description of Artificial Sequence: Synthetic oligonucleotide
  Antisense strand to SEQ ID NO: 2109924
uuaucccaugcauauauga

SEQ ID NO: 2109926 - RNA, 19 nt, Artificial Sequence
  Description of Artificial Sequence: Synthetic oligonucleotide
  Sense strand starting at position 2884 of SEQ ID NO: 1882295
cuguaaagaguaugggauu

SEQ ID NO: 2109927 - RNA, 19 nt, Artificial Sequence
  Description of Artificial Sequence: Synthetic oligonucleotide
  Antisense strand to SEQ ID NO: 2109926
aaucccauacucuuuacag

SEQ ID NO: 2109928 - RNA, 19 nt, Artificial Sequence
  Description of Artificial Sequence: Synthetic oligonucleotide
  Sense strand starting at position 2890 of SEQ ID NO: 1882295
agaguaugggauuguuuau

SEQ ID NO: 2109929 - RNA, 19 nt, Artificial Sequence
  Description of Artificial Sequence: Synthetic oligonucleotide
  Antisense strand to SEQ ID NO: 2109928
auaaacaaucccauacucu

SEQ ID NO: 2109930 - RNA, 19 nt, Artificial Sequence
  Description of Artificial Sequence: Synthetic oligonucleotide
  Sense strand starting at position 2902 of SEQ ID NO: 1882295
uguuuauauuugcugagua

SEQ ID NO: 2109931 - RNA, 19 nt, Artificial Sequence
  Description of Artificial Sequence: Synthetic oligonucleotide
  Antisense strand to SEQ ID NO: 2109930
uacucagcaaauauaaaca

SEQ ID NO: 2109932 - RNA, 19 nt, Artificial Sequence
  Description of Artificial Sequence: Synthetic oligonucleotide
  Sense strand starting at position 3954 of SEQ ID NO: 1882295
cuugcaauuugguuaaugu

SEQ ID NO: 2109933 - RNA, 19 nt, Artificial Sequence
  Description of Artificial Sequence: Synthetic oligonucleotide
  Antisense strand to SEQ ID NO: 2109932
acauuaaccaaauugcaag

SEQ ID NO: 2109934 - RNA, 19 nt, Artificial Sequence
  Description of Artificial Sequence: Synthetic oligonucleotide
  Sense strand starting at position 529 of SEQ ID NO: 1882296
agacacuaggccuggaaau

SEQ ID NO: 2109935 - RNA, 19 nt, Artificial Sequence
  Description of Artificial Sequence: Synthetic oligonucleotide
  Antisense strand to SEQ ID NO: 2109934
auuuccaggccuagugucu

SEQ ID NO: 2109936 - RNA, 19 nt, Artificial Sequence
  Description of Artificial Sequence: Synthetic oligonucleotide
  Sense strand starting at position 530 of SEQ ID NO: 1882296
gacacuaggccuggaaaua

SEQ ID NO: 2109937 - RNA, 19 nt, Artificial Sequence
  Description of Artificial Sequence: Synthetic oligonucleotide
  Antisense strand to SEQ ID NO: 2109936
uauuuccaggccuaguguc

SEQ ID NO: 2109938 - RNA, 19 nt, Artificial Sequence
  Description of Artificial Sequence: Synthetic oligonucleotide
  Sense strand starting at position 540 of SEQ ID NO: 1882296
cuggaaauagcccgacagu

SEQ ID NO: 2109939 - RNA, 19 nt, Artificial Sequence
  Description of Artificial Sequence: Synthetic oligonucleotide
  Antisense strand to SEQ ID NO: 2109938
acugucgggcuauuuccag

SEQ ID NO: 2109940 - RNA, 19 nt, Artificial Sequence
  Description of Artificial Sequence: Synthetic oligonucleotide
  Sense strand starting at position 543 of SEQ ID NO: 1882296
gaaauagcccgacagucau

SEQ ID NO: 2109941 - RNA, 19 nt, Artificial Sequence
  Description of Artificial Sequence: Synthetic oligonucleotide
  Antisense strand to SEQ ID NO: 2109940
augacugucgggcuauuuc

SEQ ID NO: 2109942 - RNA, 19 nt, Artificial Sequence
  Description of Artificial Sequence: Synthetic oligonucleotide
  Sense strand starting at position 663 of SEQ ID NO: 1882296
aagacagaguugguaagua

SEQ ID NO: 2109943 - RNA, 19 nt, Artificial Sequence
  Description of Artificial Sequence: Synthetic oligonucleotide
  Antisense strand to SEQ ID NO: 2109942
uacuuaccaacucugucuu

SEQ ID NO: 2109944 - RNA, 19 nt, Artificial Sequence
  Description of Artificial Sequence: Synthetic oligonucleotide
  Sense strand starting at position 1875 of SEQ ID NO: 1882296
ugcccugaguugucccaaa

SEQ ID NO: 2109945 - RNA, 19 nt, Artificial Sequence
  Description of Artificial Sequence: Synthetic oligonucleotide
  Antisense strand to SEQ ID NO: 2109944
uuugggacaacucagggca

SEQ ID NO: 2109946 - RNA, 19 nt, Artificial Sequence
  Description of Artificial Sequence: Synthetic oligonucleotide
  Sense strand starting at position 1958 of SEQ ID NO: 1882296
cuguguuaagcagaacgca

SEQ ID NO: 2109947 - RNA, 19 nt, Artificial Sequence
  Description of Artificial Sequence: Synthetic oligonucleotide
  Antisense strand to SEQ ID NO: 2109946
ugcguucugcuuaacacag

SEQ ID NO: 2109948 - RNA, 19 nt, Artificial Sequence
  Description of Artificial Sequence: Synthetic oligonucleotide
  Sense strand starting at position 2161 of SEQ ID NO: 1882296
gguggaaccucaguaauuc

SEQ ID NO: 2109949 - RNA, 19 nt, Artificial Sequence
  Description of Artificial Sequence: Synthetic oligonucleotide
  Antisense strand to SEQ ID NO: 2109948
gaauuacugagguuccacc

SEQ ID NO: 2109950 - RNA, 19 nt, Artificial Sequence
  Description of Artificial Sequence: Synthetic oligonucleotide
  Sense strand starting at position 2286 of SEQ ID NO: 1882296
gggcucuguugcuuauagu

SEQ ID NO: 2109951 - RNA, 19 nt, Artificial Sequence
  Description of Artificial Sequence: Synthetic oligonucleotide
  Antisense strand to SEQ ID NO: 2109950
acuauaagcaacagagccc

SEQ ID NO: 2109952 - RNA, 19 nt, Artificial Sequence
  Description of Artificial Sequence: Synthetic oligonucleotide
  Sense strand starting at position 2345 of SEQ ID NO: 1882296
cccucuugcucacaguaua

SEQ ID NO: 2109953 - RNA, 19 nt, Artificial Sequence
  Description of Artificial Sequence: Synthetic oligonucleotide
  Antisense strand to SEQ ID NO: 2109952
uauacugugagcaagaggg

SEQ ID NO: 2109954 - RNA, 19 nt, Artificial Sequence
  Description of Artificial Sequence: Synthetic oligonucleotide
  Sense strand starting at position 2601 of SEQ ID NO: 1882296
ugguguggugcccguauga

SEQ ID NO: 2109955 - RNA, 19 nt, Artificial Sequence
  Description of Artificial Sequence: Synthetic oligonucleotide
  Antisense strand to SEQ ID NO: 2109954
ucauacgggcaccacacca

SEQ ID NO: 2109956 - RNA, 19 nt, Artificial Sequence
  Description of Artificial Sequence: Synthetic oligonucleotide
  Sense strand starting at position 2995 of SEQ ID NO: 1882296
guguaaagagcucauugua

SEQ ID NO: 2109957 - RNA, 19 nt, Artificial Sequence
  Description of Artificial Sequence: Synthetic oligonucleotide
  Antisense strand to SEQ ID NO: 2109956
uacaaugagcucuuuacac

SEQ ID NO: 2109958 - RNA, 19 nt, Artificial Sequence
  Description of Artificial Sequence: Synthetic oligonucleotide
  Sense strand starting at position 2998 of SEQ ID NO: 1882296
uaaagagcucauuguagaa

SEQ ID NO: 2109959 - RNA, 19 nt, Artificial Sequence
  Description of Artificial Sequence: Synthetic oligonucleotide
  Antisense strand to SEQ ID NO: 2109958
uucuacaaugagcucuuua

SEQ ID NO: 2109960 - RNA, 19 nt, Artificial Sequence
  Description of Artificial Sequence: Synthetic oligonucleotide
  Sense strand starting at position 3058 of SEQ ID NO: 1882296
ggaguccugugcagggaau

SEQ ID NO: 2109961 - RNA, 19 nt, Artificial Sequence
  Description of Artificial Sequence: Synthetic oligonucleotide
  Antisense strand to SEQ ID NO: 2109960
auucccugcacaggacucc

SEQ ID NO: 2109962 - RNA, 19 nt, Artificial Sequence
  Description of Artificial Sequence: Synthetic oligonucleotide
  Sense strand starting at position 3434 of SEQ ID NO: 1882296
ugcagagugaaugaugguu

SEQ ID NO: 2109963 - RNA, 19 nt, Artificial Sequence
  Description of Artificial Sequence: Synthetic oligonucleotide
  Antisense strand to SEQ ID NO: 2109962
aaccaucauucacucugca

SEQ ID NO: 2109964 - RNA, 19 nt, Artificial Sequence
  Description of Artificial Sequence: Synthetic oligonucleotide
  Sense strand starting at position 3462 of SEQ ID NO: 1882296
uaaagagaguucuaggguu

SEQ ID NO: 2109965 - RNA, 19 nt, Artificial Sequence
  Description of Artificial Sequence: Synthetic oligonucleotide
  Antisense strand to SEQ ID NO: 2109964
aacccuagaacucucuuua

SEQ ID NO: 2109966 - RNA, 19 nt, Artificial Sequence
  Description of Artificial Sequence: Synthetic oligonucleotide
  Sense strand starting at position 3589 of SEQ ID NO: 1882296
aggugagccuucucagacu

SEQ ID NO: 2109967 - RNA, 19 nt, Artificial Sequence
  Description of Artificial Sequence: Synthetic oligonucleotide
  Antisense strand to SEQ ID NO: 2109966
agucugagaaggcucaccu

SEQ ID NO: 2109968 - RNA, 19 nt, Artificial Sequence
  Description of Artificial Sequence: Synthetic oligonucleotide
  Sense strand starting at position 3669 of SEQ ID NO: 1882296
cccacuauccuguguguuu

SEQ ID NO: 2109969 - RNA, 19 nt, Artificial Sequence
  Description of Artificial Sequence: Synthetic oligonucleotide
  Antisense strand to SEQ ID NO: 2109968
aaacacacaggauaguggg

SEQ ID NO: 2109970 - RNA, 19 nt, Artificial Sequence
  Description of Artificial Sequence: Synthetic oligonucleotide
  Sense strand starting at position 3725 of SEQ ID NO: 1882296
aggaaaugauaugcaugua

SEQ ID NO: 2109971 - RNA, 19 nt, Artificial Sequence
  Description of Artificial Sequence: Synthetic oligonucleotide
  Antisense strand to SEQ ID NO: 2109970
uacaugcauaucauuuccu

SEQ ID NO: 2109972 - RNA, 19 nt, Artificial Sequence
  Description of Artificial Sequence: Synthetic oligonucleotide
  Sense strand starting at position 3938 of SEQ ID NO: 1882296
aguuuauacucuggagaag

SEQ ID NO: 2109973 - RNA, 19 nt, Artificial Sequence
  Description of Artificial Sequence: Synthetic oligonucleotide
  Antisense strand to SEQ ID NO: 2109972
cuucuccagaguauaaacu

SEQ ID NO: 2109974 - RNA, 19 nt, Artificial Sequence
  Description of Artificial Sequence: Synthetic oligonucleotide
  Sense strand starting at position 3955 of SEQ ID NO: 1882296
agaccuuguuaagauaaca

SEQ ID NO: 2109975 - RNA, 19 nt, Artificial Sequence
  Description of Artificial Sequence: Synthetic oligonucleotide
  Antisense strand to SEQ ID NO: 2109974
uguuaucuuaacaaggucu

SEQ ID NO: 2109976 - RNA, 19 nt, Artificial Sequence
  Description of Artificial Sequence: Synthetic oligonucleotide
  Sense strand starting at position 25 of SEQ ID NO: 1882297
ucuuguagugaacacuaua

SEQ ID NO: 2109977 - RNA, 19 nt, Artificial Sequence
  Description of Artificial Sequence: Synthetic oligonucleotide
  Antisense strand to SEQ ID NO: 2109976
uauaguguucacuacaaga

SEQ ID NO: 2109978 - RNA, 19 nt, Artificial Sequence
  Description of Artificial Sequence: Synthetic oligonucleotide
  Sense strand starting at position 311 of SEQ ID NO: 1882297
ugcaguugugaggacagau

SEQ ID NO: 2109979 - RNA, 19 nt, Artificial Sequence
  Description of Artificial Sequence: Synthetic oligonucleotide
  Antisense strand to SEQ ID NO: 2109978
aucuguccucacaacugca

SEQ ID NO: 2109980 - RNA, 19 nt, Artificial Sequence
  Description of Artificial Sequence: Synthetic oligonucleotide
  Sense strand starting at position 553 of SEQ ID NO: 1882297
guuugaaggagucagucaa

SEQ ID NO: 2109981 - RNA, 19 nt, Artificial Sequence
  Description of Artificial Sequence: Synthetic oligonucleotide
  Antisense strand to SEQ ID NO: 2109980
uugacugacuccuucaaac

SEQ ID NO: 2109982 - RNA, 19 nt, Artificial Sequence
  Description of Artificial Sequence: Synthetic oligonucleotide
  Sense strand starting at position 566 of SEQ ID NO: 1882297
agucaaccugcuuaagauu

SEQ ID NO: 2109983 - RNA, 19 nt, Artificial Sequence
  Description of Artificial Sequence: Synthetic oligonucleotide
  Antisense strand to SEQ ID NO: 2109982
aaucuuaagcagguugacu

SEQ ID NO: 2109984 - RNA, 19 nt, Artificial Sequence
  Description of Artificial Sequence: Synthetic oligonucleotide
  Sense strand starting at position 597 of SEQ ID NO: 1882297
aacauuuggcugugaugca

SEQ ID NO: 2109985 - RNA, 19 nt, Artificial Sequence
  Description of Artificial Sequence: Synthetic oligonucleotide
  Antisense strand to SEQ ID NO: 2109984
ugcaucacagccaaauguu

SEQ ID NO: 2109986 - RNA, 19 nt, Artificial Sequence
  Description of Artificial Sequence: Synthetic oligonucleotide
  Sense strand starting at position 772 of SEQ ID NO: 1882297
gcuaacgagagaugaaacu

SEQ ID NO: 2109987 - RNA, 19 nt, Artificial Sequence
  Description of Artificial Sequence: Synthetic oligonucleotide
  Antisense strand to SEQ ID NO: 2109986
aguuucaucucucguuagc

SEQ ID NO: 2109988 - RNA, 19 nt, Artificial Sequence
  Description of Artificial Sequence: Synthetic oligonucleotide
  Sense strand starting at position 915 of SEQ ID NO: 1882297
gauagcaguguggagaauu

SEQ ID NO: 2109989 - RNA, 19 nt, Artificial Sequence
  Description of Artificial Sequence: Synthetic oligonucleotide
  Antisense strand to SEQ ID NO: 2109988
aauucuccacacugcuauc

SEQ ID NO: 2109990 - RNA, 19 nt, Artificial Sequence
  Description of Artificial Sequence: Synthetic oligonucleotide
  Sense strand starting at position 925 of SEQ ID NO: 1882297
uggagaauuuaagagucaa

SEQ ID NO: 2109991 - RNA, 19 nt, Artificial Sequence
  Description of Artificial Sequence: Synthetic oligonucleotide
  Antisense strand to SEQ ID NO: 2109990
uugacucuuaaauucucca

SEQ ID NO: 2109992 - RNA, 19 nt, Artificial Sequence
  Description of Artificial Sequence: Synthetic oligonucleotide
  Sense strand starting at position 968 of SEQ ID NO: 1882297
ggcccaucugaggaaguua

SEQ ID NO: 2109993 - RNA, 19 nt, Artificial Sequence
  Description of Artificial Sequence: Synthetic oligonucleotide
  Antisense strand to SEQ ID NO: 2109992
uaacuuccucagaugggcc

SEQ ID NO: 2109994 - RNA, 19 nt, Artificial Sequence
  Description of Artificial Sequence: Synthetic oligonucleotide
  Sense strand starting at position 1002 of SEQ ID NO: 1882297
uaugcuuuggcauaagaug

SEQ ID NO: 2109995 - RNA, 19 nt, Artificial Sequence
  Description of Artificial Sequence: Synthetic oligonucleotide
  Antisense strand to SEQ ID NO: 2109994
caucuuaugccaaagcaua

SEQ ID NO: 2109996 - RNA, 19 nt, Artificial Sequence
  Description of Artificial Sequence: Synthetic oligonucleotide
  Sense strand starting at position 1067 of SEQ ID NO: 1882297
gguggcuuacagcaagaua

SEQ ID NO: 2109997 - RNA, 19 nt, Artificial Sequence
  Description of Artificial Sequence: Synthetic oligonucleotide
  Antisense strand to SEQ ID NO: 2109996
uaucuugcuguaagccacc

SEQ ID NO: 2109998 - RNA, 19 nt, Artificial Sequence
  Description of Artificial Sequence: Synthetic oligonucleotide
  Sense strand starting at position 1091 of SEQ ID NO: 1882297
cuaggagaguauguuuaga

SEQ ID NO: 2109999 - RNA, 19 nt, Artificial Sequence
  Description of Artificial Sequence: Synthetic oligonucleotide
  Antisense strand to SEQ ID NO: 2109998
ucuaaacauacucuccuag

SEQ ID NO: 2110000 - RNA, 19 nt, Artificial Sequence
  Description of Artificial Sequence: Synthetic oligonucleotide
  Sense strand starting at position 1093 of SEQ ID NO: 1882297
aggagaguauguuuagaac

SEQ ID NO: 2110001 - RNA, 19 nt, Artificial Sequence
  Description of Artificial Sequence: Synthetic oligonucleotide
  Antisense strand to SEQ ID NO: 2110000
guucuaaacauacucuccu

SEQ ID NO: 2110002 - RNA, 19 nt, Artificial Sequence
  Description of Artificial Sequence: Synthetic oligonucleotide
  Sense strand starting at position 1101 of SEQ ID NO: 1882297
auguuuagaacggaaaguu

SEQ ID NO: 2110003 - RNA, 19 nt, Artificial Sequence
  Description of Artificial Sequence: Synthetic oligonucleotide
  Antisense strand to SEQ ID NO: 2110002
aacuuuccguucuaaacau

SEQ ID NO: 2110004 - RNA, 19 nt, Artificial Sequence
  Description of Artificial Sequence: Synthetic oligonucleotide
  Sense strand starting at position 1150 of SEQ ID NO: 1882297
guaaucuuucucguugcuu

SEQ ID NO: 2110005 - RNA, 19 nt, Artificial Sequence
  Description of Artificial Sequence: Synthetic oligonucleotide
  Antisense strand to SEQ ID NO: 2110004
aagcaacgagaaagauuac

SEQ ID NO: 2110006 - RNA, 19 nt, Artificial Sequence
  Description of Artificial Sequence: Synthetic oligonucleotide
  Sense strand starting at position 1214 of SEQ ID NO: 1882297
uggcaaugucaguaagaau

SEQ ID NO: 2110007 - RNA, 19 nt, Artificial Sequence
  Description of Artificial Sequence: Synthetic oligonucleotide
  Antisense strand to SEQ ID NO: 2110006
auucuuacugacauugcca

SEQ ID NO: 2110008 - RNA, 19 nt, Artificial Sequence
  Description of Artificial Sequence: Synthetic oligonucleotide
  Sense strand starting at position 1342 of SEQ ID NO: 1882297
acgaguagcgcaucuagua

SEQ ID NO: 2110009 - RNA, 19 nt, Artificial Sequence
  Description of Artificial Sequence: Synthetic oligonucleotide
  Antisense strand to SEQ ID NO: 2110008
uacuagaugcgcuacucgu

SEQ ID NO: 2110010 - RNA, 19 nt, Artificial Sequence
  Description of Artificial Sequence: Synthetic oligonucleotide
  Sense strand starting at position 1343 of SEQ ID NO: 1882297
cgaguagcgcaucuaguau

SEQ ID NO: 2110011 - RNA, 19 nt, Artificial Sequence
  Description of Artificial Sequence: Synthetic oligonucleotide
  Antisense strand to SEQ ID NO: 2110010
auacuagaugcgcuacucg

SEQ ID NO: 2110012 - RNA, 19 nt, Artificial Sequence
  Description of Artificial Sequence: Synthetic oligonucleotide
  Sense strand starting at position 1375 of SEQ ID NO: 1882297
gugacucagagcugaagau

SEQ ID NO: 2110013 - RNA, 19 nt, Artificial Sequence
  Description of Artificial Sequence: Synthetic oligonucleotide
  Antisense strand to SEQ ID NO: 2110012
aucuucagcucugagucac

SEQ ID NO: 2110014 - RNA, 19 nt, Artificial Sequence
  Description of Artificial Sequence: Synthetic oligonucleotide
  Sense strand starting at position 2452 of SEQ ID NO: 1882297
ggugcucugauagagaauu

SEQ ID NO: 2110015 - RNA, 19 nt, Artificial Sequence
  Description of Artificial Sequence: Synthetic oligonucleotide
  Antisense strand to SEQ ID NO: 2110014
aauucucuaucagagcacc

SEQ ID NO: 2110016 - RNA, 19 nt, Artificial Sequence
  Description of Artificial Sequence: Synthetic oligonucleotide
  Sense strand starting at position 2520 of SEQ ID NO: 1882297
agauguguacugagugugu

SEQ ID NO: 2110017 - RNA, 19 nt, Artificial Sequence
  Description of Artificial Sequence: Synthetic oligonucleotide
  Antisense strand to SEQ ID NO: 2110016
acacacucaguacacaucu

SEQ ID NO: 2110018 - RNA, 19 nt, Artificial Sequence
  Description of Artificial Sequence: Synthetic oligonucleotide
  Sense strand starting at position 2527 of SEQ ID NO: 1882297
uacugaguguguuuauuuc

SEQ ID NO: 2110019 - RNA, 19 nt, Artificial Sequence
  Description of Artificial Sequence: Synthetic oligonucleotide
  Antisense strand to SEQ ID NO: 2110018
gaaauaaacacacucagua

SEQ ID NO: 2110020 - RNA, 19 nt, Artificial Sequence
  Description of Artificial Sequence: Synthetic oligonucleotide
  Sense strand starting at position 2593 of SEQ ID NO: 1882297
ucuuaauuaugucugagaa

SEQ ID NO: 2110021 - RNA, 19 nt, Artificial Sequence
  Description of Artificial Sequence: Synthetic oligonucleotide
  Antisense strand to SEQ ID NO: 2110020
uucucagacauaauuaaga

SEQ ID NO: 2110022 - RNA, 19 nt, Artificial Sequence
  Description of Artificial Sequence: Synthetic oligonucleotide
  Sense strand starting at position 2594 of SEQ ID NO: 1882297
cuuaauuaugucugagaaa

SEQ ID NO: 2110023 - RNA, 19 nt, Artificial Sequence
  Description of Artificial Sequence: Synthetic oligonucleotide
  Antisense strand to SEQ ID NO: 2110022
uuucucagacauaauuaag

SEQ ID NO: 2110024 - RNA, 19 nt, Artificial Sequence
  Description of Artificial Sequence: Synthetic oligonucleotide
  Sense strand starting at position 2718 of SEQ ID NO: 1882297
aaagguugugcugcguuua

SEQ ID NO: 2110025 - RNA, 19 nt, Artificial Sequence
  Description of Artificial Sequence: Synthetic oligonucleotide
  Antisense strand to SEQ ID NO: 2110024
uaaacgcagcacaaccuuu

SEQ ID NO: 2110026 - RNA, 19 nt, Artificial Sequence
  Description of Artificial Sequence: Synthetic oligonucleotide
  Sense strand starting at position 2729 of SEQ ID NO: 1882297
ugcguuuagcauuccugua

SEQ ID NO: 2110027 - RNA, 19 nt, Artificial Sequence
  Description of Artificial Sequence: Synthetic oligonucleotide
  Antisense strand to SEQ ID NO: 2110026
uacaggaaugcuaaacgca

SEQ ID NO: 2110028 - RNA, 19 nt, Artificial Sequence
  Description of Artificial Sequence: Synthetic oligonucleotide
  Sense strand starting at position 2730 of SEQ ID NO: 1882297
gcguuuagcauuccuguaa

SEQ ID NO: 2110029 - RNA, 19 nt, Artificial Sequence
  Description of Artificial Sequence: Synthetic oligonucleotide
  Antisense strand to SEQ ID NO: 2110028
uuacaggaaugcuaaacgc

SEQ ID NO: 2110030 - RNA, 19 nt, Artificial Sequence
  Description of Artificial Sequence: Synthetic oligonucleotide
  Sense strand starting at position 2846 of SEQ ID NO: 1882297
gggcguuaggaggaagauu

SEQ ID NO: 2110031 - RNA, 19 nt, Artificial Sequence
  Description of Artificial Sequence: Synthetic oligonucleotide
  Antisense strand to SEQ ID NO: 2110030
aaucuuccuccuaacgccc

SEQ ID NO: 2110032 - RNA, 19 nt, Artificial Sequence
  Description of Artificial Sequence: Synthetic oligonucleotide
  Sense strand starting at position 2854 of SEQ ID NO: 1882297
ggaggaagauugcuucuua

SEQ ID NO: 2110033 - RNA, 19 nt, Artificial Sequence
  Description of Artificial Sequence: Synthetic oligonucleotide
  Antisense strand to SEQ ID NO: 2110032
uaagaagcaaucuuccucc

SEQ ID NO: 2110034 - RNA, 19 nt, Artificial Sequence
  Description of Artificial Sequence: Synthetic oligonucleotide
  Sense strand starting at position 2855 of SEQ ID NO: 1882297
gaggaagauugcuucuuau

SEQ ID NO: 2110035 - RNA, 19 nt, Artificial Sequence
  Description of Artificial Sequence: Synthetic oligonucleotide
  Antisense strand to SEQ ID NO: 2110034
auaagaagcaaucuuccuc

SEQ ID NO: 2110036 - RNA, 19 nt, Artificial Sequence
  Description of Artificial Sequence: Synthetic oligonucleotide
  Sense strand starting at position 2858 of SEQ ID NO: 1882297
gaagauugcuucuuaugag

SEQ ID NO: 2110037 - RNA, 19 nt, Artificial Sequence
  Description of Artificial Sequence: Synthetic oligonucleotide
  Antisense strand to SEQ ID NO: 2110036
cucauaagaagcaaucuuc

SEQ ID NO: 2110038 - RNA, 19 nt, Artificial Sequence
  Description of Artificial Sequence: Synthetic oligonucleotide
  Sense strand starting at position 2868 of SEQ ID NO: 1882297
ucuuaugaguacucuggga

SEQ ID NO: 2110039 - RNA, 19 nt, Artificial Sequence
  Description of Artificial Sequence: Synthetic oligonucleotide
  Antisense strand to SEQ ID NO: 2110038
ucccagaguacucauaaga

SEQ ID NO: 2110040 - RNA, 19 nt, Artificial Sequence
  Description of Artificial Sequence: Synthetic oligonucleotide
  Sense strand starting at position 2870 of SEQ ID NO: 1882297
uuaugaguacucugggaaa

SEQ ID NO: 2110041 - RNA, 19 nt, Artificial Sequence
  Description of Artificial Sequence: Synthetic oligonucleotide
  Antisense strand to SEQ ID NO: 2110040
uuucccagaguacucauaa

SEQ ID NO: 2110042 - RNA, 19 nt, Artificial Sequence
  Description of Artificial Sequence: Synthetic oligonucleotide
  Sense strand starting at position 2872 of SEQ ID NO: 1882297
augaguacucugggaaauu

SEQ ID NO: 2110043 - RNA, 19 nt, Artificial Sequence
  Description of Artificial Sequence: Synthetic oligonucleotide
  Antisense strand to SEQ ID NO: 2110042
aauuucccagaguacucau

SEQ ID NO: 2110044 - RNA, 19 nt, Artificial Sequence
  Description of Artificial Sequence: Synthetic oligonucleotide
  Sense strand starting at position 2944 of SEQ ID NO: 1882297
ccuagaaucuuguuuauga

SEQ ID NO: 2110045 - RNA, 19 nt, Artificial Sequence
  Description of Artificial Sequence: Synthetic oligonucleotide
  Antisense strand to SEQ ID NO: 2110044
ucauaaacaagauucuagg

SEQ ID NO: 2110046 - RNA, 19 nt, Artificial Sequence
  Description of Artificial Sequence: Synthetic oligonucleotide
  Sense strand starting at position 2945 of SEQ ID NO: 1882297
cuagaaucuuguuuaugag

SEQ ID NO: 2110047 - RNA, 19 nt, Artificial Sequence
  Description of Artificial Sequence: Synthetic oligonucleotide
  Antisense strand to SEQ ID NO: 2110046
cucauaaacaagauucuag

SEQ ID NO: 2110048 - RNA, 19 nt, Artificial Sequence
  Description of Artificial Sequence: Synthetic oligonucleotide
  Sense strand starting at position 3078 of SEQ ID NO: 1882297
ugguuaaggagcgaauuau

SEQ ID NO: 2110049 - RNA, 19 nt, Artificial Sequence
  Description of Artificial Sequence: Synthetic oligonucleotide
  Antisense strand to SEQ ID NO: 2110048
auaauucgcuccuuaacca

SEQ ID NO: 2110050 - RNA, 19 nt, Artificial Sequence
  Description of Artificial Sequence: Synthetic oligonucleotide
  Sense strand starting at position 3233 of SEQ ID NO: 1882297
ggguuugugagggagaagu

SEQ ID NO: 2110051 - RNA, 19 nt, Artificial Sequence
  Description of Artificial Sequence: Synthetic oligonucleotide
  Antisense strand to SEQ ID NO: 2110050
acuucucccucacaaaccc

SEQ ID NO: 2110052 - RNA, 19 nt, Artificial Sequence
  Description of Artificial Sequence: Synthetic oligonucleotide
  Sense strand starting at position 3270 of SEQ ID NO: 1882297
auaagaaucagaggugucu

SEQ ID NO: 2110053 - RNA, 19 nt, Artificial Sequence
  Description of Artificial Sequence: Synthetic oligonucleotide
  Antisense strand to SEQ ID NO: 2110052
agacaccucugauucuuau

SEQ ID NO: 2110054 - RNA, 19 nt, Artificial Sequence
  Description of Artificial Sequence: Synthetic oligonucleotide
  Sense strand starting at position 3708 of SEQ ID NO: 1882297
cuguguuaucauuacauaa

SEQ ID NO: 2110055 - RNA, 19 nt, Artificial Sequence
  Description of Artificial Sequence: Synthetic oligonucleotide
  Antisense strand to SEQ ID NO: 2110054
uuauguaaugauaacacag

SEQ ID NO: 2110056 - RNA, 19 nt, Artificial Sequence
  Description of Artificial Sequence: Synthetic oligonucleotide
  Sense strand starting at position 27 of SEQ ID NO: 1882298
ccagguacaugagugauau

SEQ ID NO: 2110057 - RNA, 19 nt, Artificial Sequence
  Description of Artificial Sequence: Synthetic oligonucleotide
  Antisense strand to SEQ ID NO: 2110056
auaucacucauguaccugg

SEQ ID NO: 2110058 - RNA, 19 nt, Artificial Sequence
  Description of Artificial Sequence: Synthetic oligonucleotide
  Sense strand starting at position 28 of SEQ ID NO: 1882298
cagguacaugagugauauu

SEQ ID NO: 2110059 - RNA, 19 nt, Artificial Sequence
  Description of Artificial Sequence: Synthetic oligonucleotide
  Antisense strand to SEQ ID NO: 2110058
aauaucacucauguaccug

SEQ ID NO: 2110060 - RNA, 19 nt, Artificial Sequence
  Description of Artificial Sequence: Synthetic oligonucleotide
  Sense strand starting at position 146 of SEQ ID NO: 1882298
cuccaaauccuaugagguu

SEQ ID NO: 2110061 - RNA, 19 nt, Artificial Sequence
  Description of Artificial Sequence: Synthetic oligonucleotide
  Antisense strand to SEQ ID NO: 2110060
aaccucauaggauuuggag

SEQ ID NO: 2110062 - RNA, 19 nt, Artificial Sequence
  Description of Artificial Sequence: Synthetic oligonucleotide
  Sense strand starting at position 241 of SEQ ID NO: 1882298
augacuuuacguuaucaaa

SEQ ID NO: 2110063 - RNA, 19 nt, Artificial Sequence
  Description of Artificial Sequence: Synthetic oligonucleotide
  Antisense strand to SEQ ID NO: 2110062
uuugauaacguaaagucau

SEQ ID NO: 2110064 - RNA, 19 nt, Artificial Sequence
  Description of Artificial Sequence: Synthetic oligonucleotide
  Sense strand starting at position 283 of SEQ ID NO: 1882298
uagggaauauucuuguuaa

SEQ ID NO: 2110065 - RNA, 19 nt, Artificial Sequence
  Description of Artificial Sequence: Synthetic oligonucleotide
  Antisense strand to SEQ ID NO: 2110064
uuaacaagaauauucccua

SEQ ID NO: 2110066 - RNA, 19 nt, Artificial Sequence
  Description of Artificial Sequence: Synthetic oligonucleotide
  Sense strand starting at position 602 of SEQ ID NO: 1882298
ccuuuagcucaguaaagac

SEQ ID NO: 2110067 - RNA, 19 nt, Artificial Sequence
  Description of Artificial Sequence: Synthetic oligonucleotide
  Antisense strand to SEQ ID NO: 2110066
gucuuuacugagcuaaagg

SEQ ID NO: 2110068 - RNA, 19 nt, Artificial Sequence
  Description of Artificial Sequence: Synthetic oligonucleotide
  Sense strand starting at position 724 of SEQ ID NO: 1882298
aguaauuauucccuggaac

SEQ ID NO: 2110069 - RNA, 19 nt, Artificial Sequence
  Description of Artificial Sequence: Synthetic oligonucleotide
  Antisense strand to SEQ ID NO: 2110068
guuccagggaauaauuacu

SEQ ID NO: 2110070 - RNA, 19 nt, Artificial Sequence
  Description of Artificial Sequence: Synthetic oligonucleotide
  Sense strand starting at position 725 of SEQ ID NO: 1882298
guaauuauucccuggaacc

SEQ ID NO: 2110071 - RNA, 19 nt, Artificial Sequence
  Description of Artificial Sequence: Synthetic oligonucleotide
  Antisense strand to SEQ ID NO: 2110070
gguuccagggaauaauuac

SEQ ID NO: 2110072 - RNA, 19 nt, Artificial Sequence
  Description of Artificial Sequence: Synthetic oligonucleotide
  Sense strand starting at position 808 of SEQ ID NO: 1882298
gagaguuaggcacaaagug

SEQ ID NO: 2110073 - RNA, 19 nt, Artificial Sequence
  Description of Artificial Sequence: Synthetic oligonucleotide
  Antisense strand to SEQ ID NO: 2110072
cacuuugugccuaacucuc

SEQ ID NO: 2110074 - RNA, 19 nt, Artificial Sequence
  Description of Artificial Sequence: Synthetic oligonucleotide
  Sense strand starting at position 933 of SEQ ID NO: 1882298
gcugaagauacagguguaa

SEQ ID NO: 2110075 - RNA, 19 nt, Artificial Sequence
  Description of Artificial Sequence: Synthetic oligonucleotide
  Antisense strand to SEQ ID NO: 2110074
uuacaccuguaucuucagc

SEQ ID NO: 2110076 - RNA, 19 nt, Artificial Sequence
  Description of Artificial Sequence: Synthetic oligonucleotide
  Sense strand starting at position 977 of SEQ ID NO: 1882298
ugauuugagucguugguca

SEQ ID NO: 2110077 - RNA, 19 nt, Artificial Sequence
  Description of Artificial Sequence: Synthetic oligonucleotide
  Antisense strand to SEQ ID NO: 2110076
ugaccaacgacucaaauca

SEQ ID NO: 2110078 - RNA, 19 nt, Artificial Sequence
  Description of Artificial Sequence: Synthetic oligonucleotide
  Sense strand starting at position 979 of SEQ ID NO: 1882298
auuugagucguuggucaag

SEQ ID NO: 2110079 - RNA, 19 nt, Artificial Sequence
  Description of Artificial Sequence: Synthetic oligonucleotide
  Antisense strand to SEQ ID NO: 2110078
cuugaccaacgacucaaau

SEQ ID NO: 2110080 - RNA, 19 nt, Artificial Sequence
  Description of Artificial Sequence: Synthetic oligonucleotide
  Sense strand starting at position 1386 of SEQ ID NO: 1882298
agugccaaauuaucagaaa

SEQ ID NO: 2110081 - RNA, 19 nt, Artificial Sequence
  Description of Artificial Sequence: Synthetic oligonucleotide
  Antisense strand to SEQ ID NO: 2110080
uuucugauaauuuggcacu

SEQ ID NO: 2110082 - RNA, 19 nt, Artificial Sequence
  Description of Artificial Sequence: Synthetic oligonucleotide
  Sense strand starting at position 2078 of SEQ ID NO: 1882298
uuaggaugugggcaucauu

SEQ ID NO: 2110083 - RNA, 19 nt, Artificial Sequence
  Description of Artificial Sequence: Synthetic oligonucleotide
  Antisense strand to SEQ ID NO: 2110082
aaugaugcccacauccuaa

SEQ ID NO: 2110084 - RNA, 19 nt, Artificial Sequence
  Description of Artificial Sequence: Synthetic oligonucleotide
  Sense strand starting at position 2081 of SEQ ID NO: 1882298
ggaugugggcaucauugga

SEQ ID NO: 2110085 - RNA, 19 nt, Artificial Sequence
  Description of Artificial Sequence: Synthetic oligonucleotide
  Antisense strand to SEQ ID NO: 2110084
uccaaugaugcccacaucc

SEQ ID NO: 2110086 - RNA, 19 nt, Artificial Sequence
  Description of Artificial Sequence: Synthetic oligonucleotide
  Sense strand starting at position 2157 of SEQ ID NO: 1882298
ggauuuggucuaugugcau

SEQ ID NO: 2110087 - RNA, 19 nt, Artificial Sequence
  Description of Artificial Sequence: Synthetic oligonucleotide
  Antisense strand to SEQ ID NO: 2110086
augcacauagaccaaaucc

SEQ ID NO: 2110088 - RNA, 19 nt, Artificial Sequence
  Description of Artificial Sequence: Synthetic oligonucleotide
  Sense strand starting at position 2180 of SEQ ID NO: 1882298
cuuugacaggccuagugau

SEQ ID NO: 2110089 - RNA, 19 nt, Artificial Sequence
  Description of Artificial Sequence: Synthetic oligonucleotide
  Antisense strand to SEQ ID NO: 2110088
aucacuaggccugucaaag

SEQ ID NO: 2110090 - RNA, 19 nt, Artificial Sequence
  Description of Artificial Sequence: Synthetic oligonucleotide
  Sense strand starting at position 2242 of SEQ ID NO: 1882298
auggaagccuuaucuguga

SEQ ID NO: 2110091 - RNA, 19 nt, Artificial Sequence
  Description of Artificial Sequence: Synthetic oligonucleotide
  Antisense strand to SEQ ID NO: 2110090
ucacagauaaggcuuccau

SEQ ID NO: 2110092 - RNA, 19 nt, Artificial Sequence
  Description of Artificial Sequence: Synthetic oligonucleotide
  Sense strand starting at position 2391 of SEQ ID NO: 1882298
cagucaaugggccauacuu

SEQ ID NO: 2110093 - RNA, 19 nt, Artificial Sequence
  Description of Artificial Sequence: Synthetic oligonucleotide
  Antisense strand to SEQ ID NO: 2110092
aaguauggcccauugacug

SEQ ID NO: 2110094 - RNA, 19 nt, Artificial Sequence
  Description of Artificial Sequence: Synthetic oligonucleotide
  Sense strand starting at position 2393 of SEQ ID NO: 1882298
gucaaugggccauacuuau

SEQ ID NO: 2110095 - RNA, 19 nt, Artificial Sequence
  Description of Artificial Sequence: Synthetic oligonucleotide
  Antisense strand to SEQ ID NO: 2110094
auaaguauggcccauugac

SEQ ID NO: 2110096 - RNA, 19 nt, Artificial Sequence
  Description of Artificial Sequence: Synthetic oligonucleotide
  Sense strand starting at position 2469 of SEQ ID NO: 1882298
gcagccauccagggagaau

SEQ ID NO: 2110097 - RNA, 19 nt, Artificial Sequence
  Description of Artificial Sequence: Synthetic oligonucleotide
  Antisense strand to SEQ ID NO: 2110096
auucucccuggauggcugc

SEQ ID NO: 2110098 - RNA, 19 nt, Artificial Sequence
  Description of Artificial Sequence: Synthetic oligonucleotide
  Sense strand starting at position 2478 of SEQ ID NO: 1882298
cagggagaauuauuagcuu

SEQ ID NO: 2110099 - RNA, 19 nt, Artificial Sequence
  Description of Artificial Sequence: Synthetic oligonucleotide
  Antisense strand to SEQ ID NO: 2110098
aagcuaauaauucucccug

SEQ ID NO: 2110100 - RNA, 19 nt, Artificial Sequence
  Description of Artificial Sequence: Synthetic oligonucleotide
  Sense strand starting at position 2489 of SEQ ID NO: 1882298
auuagcuugcuauaugaca

SEQ ID NO: 2110101 - RNA, 19 nt, Artificial Sequence
  Description of Artificial Sequence: Synthetic oligonucleotide
  Antisense strand to SEQ ID NO: 2110100
ugucauauagcaagcuaau

SEQ ID NO: 2110102 - RNA, 19 nt, Artificial Sequence
  Description of Artificial Sequence: Synthetic oligonucleotide
  Sense strand starting at position 2497 of SEQ ID NO: 1882298
gcuauaugacauuggugga

SEQ ID NO: 2110103 - RNA, 19 nt, Artificial Sequence
  Description of Artificial Sequence: Synthetic oligonucleotide
  Antisense strand to SEQ ID NO: 2110102
uccaccaaugucauauagc

SEQ ID NO: 2110104 - RNA, 19 nt, Artificial Sequence
  Description of Artificial Sequence: Synthetic oligonucleotide
  Sense strand starting at position 2498 of SEQ ID NO: 1882298
cuauaugacauugguggaa

SEQ ID NO: 2110105 - RNA, 19 nt, Artificial Sequence
  Description of Artificial Sequence: Synthetic oligonucleotide
  Antisense strand to SEQ ID NO: 2110104
uuccaccaaugucauauag

SEQ ID NO: 2110106 - RNA, 19 nt, Artificial Sequence
  Description of Artificial Sequence: Synthetic oligonucleotide
  Sense strand starting at position 2521 of SEQ ID NO: 1882298
ugcuucuuggacuagaugu

SEQ ID NO: 2110107 - RNA, 19 nt, Artificial Sequence
  Description of Artificial Sequence: Synthetic oligonucleotide
  Antisense strand to SEQ ID NO: 2110106
acaucuaguccaagaagca

SEQ ID NO: 2110108 - RNA, 19 nt, Artificial Sequence
  Description of Artificial Sequence: Synthetic oligonucleotide
  Sense strand starting at position 2951 of SEQ ID NO: 1882298
augacaaccucugugacua

SEQ ID NO: 2110109 - RNA, 19 nt, Artificial Sequence
  Description of Artificial Sequence: Synthetic oligonucleotide
  Antisense strand to SEQ ID NO: 2110108
uagucacagagguugucau

SEQ ID NO: 2110110 - RNA, 19 nt, Artificial Sequence
  Description of Artificial Sequence: Synthetic oligonucleotide
  Sense strand starting at position 2952 of SEQ ID NO: 1882298
ugacaaccucugugacuau

SEQ ID NO: 2110111 - RNA, 19 nt, Artificial Sequence
  Description of Artificial Sequence: Synthetic oligonucleotide
  Antisense strand to SEQ ID NO: 2110110
auagucacagagguuguca

SEQ ID NO: 2110112 - RNA, 19 nt, Artificial Sequence
  Description of Artificial Sequence: Synthetic oligonucleotide
  Sense strand starting at position 2963 of SEQ ID NO: 1882298
gugacuauacugugaacag

SEQ ID NO: 2110113 - RNA, 19 nt, Artificial Sequence
  Description of Artificial Sequence: Synthetic oligonucleotide
  Antisense strand to SEQ ID NO: 2110112
cuguucacaguauagucac

SEQ ID NO: 2110114 - RNA, 19 nt, Artificial Sequence
  Description of Artificial Sequence: Synthetic oligonucleotide
  Sense strand starting at position 2982 of SEQ ID NO: 1882298
acuugccuccuggauuaau

SEQ ID NO: 2110115 - RNA, 19 nt, Artificial Sequence
  Description of Artificial Sequence: Synthetic oligonucleotide
  Antisense strand to SEQ ID NO: 2110114
auuaauccaggaggcaagu

SEQ ID NO: 2110116 - RNA, 19 nt, Artificial Sequence
  Description of Artificial Sequence: Synthetic oligonucleotide
  Sense strand starting at position 2985 of SEQ ID NO: 1882298
ugccuccuggauuaauaaa

SEQ ID NO: 2110117 - RNA, 19 nt, Artificial Sequence
  Description of Artificial Sequence: Synthetic oligonucleotide
  Antisense strand to SEQ ID NO: 2110116
uuuauuaauccaggaggca

SEQ ID NO: 2110118 - RNA, 19 nt, Artificial Sequence
  Description of Artificial Sequence: Synthetic oligonucleotide
  Sense strand starting at position 3141 of SEQ ID NO: 1882298
agaauagcaagugauaugu

SEQ ID NO: 2110119 - RNA, 19 nt, Artificial Sequence
  Description of Artificial Sequence: Synthetic oligonucleotide
  Antisense strand to SEQ ID NO: 2110118
acauaucacuugcuauucu

SEQ ID NO: 2110120 - RNA, 19 nt, Artificial Sequence
  Description of Artificial Sequence: Synthetic oligonucleotide
  Sense strand starting at position 3495 of SEQ ID NO: 1882298
auaguugugaauugaauga

SEQ ID NO: 2110121 - RNA, 19 nt, Artificial Sequence
  Description of Artificial Sequence: Synthetic oligonucleotide
  Antisense strand to SEQ ID NO: 2110120
ucauucaauucacaacuau

SEQ ID NO: 2110122 - RNA, 19 nt, Artificial Sequence
  Description of Artificial Sequence: Synthetic oligonucleotide
  Sense strand starting at position 3547 of SEQ ID NO: 1882298
uaaggaauuguaugucuua

SEQ ID NO: 2110123 - RNA, 19 nt, Artificial Sequence
  Description of Artificial Sequence: Synthetic oligonucleotide
  Antisense strand to SEQ ID NO: 2110122
uaagacauacaauuccuua

SEQ ID NO: 2110124 - RNA, 19 nt, Artificial Sequence
  Description of Artificial Sequence: Synthetic oligonucleotide
  Sense strand starting at position 3548 of SEQ ID NO: 1882298
aaggaauuguaugucuuaa

SEQ ID NO: 2110125 - RNA, 19 nt, Artificial Sequence
  Description of Artificial Sequence: Synthetic oligonucleotide
  Antisense strand to SEQ ID NO: 2110124
uuaagacauacaauuccuu

SEQ ID NO: 2110126 - RNA, 19 nt, Artificial Sequence
  Description of Artificial Sequence: Synthetic oligonucleotide
  Sense strand starting at position 3559 of SEQ ID NO: 1882298
ugucuuaaggucuauggau

SEQ ID NO: 2110127 - RNA, 19 nt, Artificial Sequence
  Description of Artificial Sequence: Synthetic oligonucleotide
  Antisense strand to SEQ ID NO: 2110126
auccauagaccuuaagaca

SEQ ID NO: 2110128 - RNA, 19 nt, Artificial Sequence
  Description of Artificial Sequence: Synthetic oligonucleotide
  Sense strand starting at position 3721 of SEQ ID NO: 1882298
uagggauauucugcuacug

SEQ ID NO: 2110129 - RNA, 19 nt, Artificial Sequence
  Description of Artificial Sequence: Synthetic oligonucleotide
  Antisense strand to SEQ ID NO: 2110128
caguagcagaauaucccua

SEQ ID NO: 2110130 - RNA, 19 nt, Artificial Sequence
  Description of Artificial Sequence: Synthetic oligonucleotide
  Sense strand starting at position 3848 of SEQ ID NO: 1882298
guaaacagaguuugggaau

SEQ ID NO: 2110131 - RNA, 19 nt, Artificial Sequence
  Description of Artificial Sequence: Synthetic oligonucleotide
  Antisense strand to SEQ ID NO: 2110130
auucccaaacucuguuuac

SEQ ID NO: 2110132 - RNA, 19 nt, Artificial Sequence
  Description of Artificial Sequence: Synthetic oligonucleotide
  Sense strand starting at position 3912 of SEQ ID NO: 1882298
aggcucuaugcagaauaaa

SEQ ID NO: 2110133 - RNA, 19 nt, Artificial Sequence
  Description of Artificial Sequence: Synthetic oligonucleotide
  Antisense strand to SEQ ID NO: 2110132
uuuauucugcauagagccu

SEQ ID NO: 2110134 - RNA, 19 nt, Artificial Sequence
  Description of Artificial Sequence: Synthetic oligonucleotide
  Sense strand starting at position 3921 of SEQ ID NO: 1882298
gcagaauaaauugguuaag

SEQ ID NO: 2110135 - RNA, 19 nt, Artificial Sequence
  Description of Artificial Sequence: Synthetic oligonucleotide
  Antisense strand to SEQ ID NO: 2110134
cuuaaccaauuuauucugc

SEQ ID NO: 2110136 - RNA, 19 nt, Artificial Sequence
  Description of Artificial Sequence: Synthetic oligonucleotide
  Sense strand starting at position 69 of SEQ ID NO: 1882299
cacuguaucucagguggga

SEQ ID NO: 2110137 - RNA, 19 nt, Artificial Sequence
  Description of Artificial Sequence: Synthetic oligonucleotide
  Antisense strand to SEQ ID NO: 2110136
ucccaccugagauacagug

SEQ ID NO: 2110138 - RNA, 19 nt, Artificial Sequence
  Description of Artificial Sequence: Synthetic oligonucleotide
  Sense strand starting at position 73 of SEQ ID NO: 1882299
guaucucaggugggaugaa

SEQ ID NO: 2110139 - RNA, 19 nt, Artificial Sequence
  Description of Artificial Sequence: Synthetic oligonucleotide
  Antisense strand to SEQ ID NO: 2110138
uucaucccaccugagauac

SEQ ID NO: 2110140 - RNA, 19 nt, Artificial Sequence
  Description of Artificial Sequence: Synthetic oligonucleotide
  Sense strand starting at position 111 of SEQ ID NO: 1882299
ccagguccauucugagaga

SEQ ID NO: 2110141 - RNA, 19 nt, Artificial Sequence
  Description of Artificial Sequence: Synthetic oligonucleotide
  Antisense strand to SEQ ID NO: 2110140
ucucucagaauggaccugg

SEQ ID NO: 2110142 - RNA, 19 nt, Artificial Sequence
  Description of Artificial Sequence: Synthetic oligonucleotide
  Sense strand starting at position 114 of SEQ ID NO: 1882299
gguccauucugagagaguu

SEQ ID NO: 2110143 - RNA, 19 nt, Artificial Sequence
  Description of Artificial Sequence: Synthetic oligonucleotide
  Antisense strand to SEQ ID NO: 2110142
aacucucucagaauggacc

SEQ ID NO: 2110144 - RNA, 19 nt, Artificial Sequence
  Description of Artificial Sequence: Synthetic oligonucleotide
  Sense strand starting at position 124 of SEQ ID NO: 1882299
gagagaguuuagggacuca

SEQ ID NO: 2110145 - RNA, 19 nt, Artificial Sequence
  Description of Artificial Sequence: Synthetic oligonucleotide
  Antisense strand to SEQ ID NO: 2110144
ugagucccuaaacucucuc

SEQ ID NO: 2110146 - RNA, 19 nt, Artificial Sequence
  Description of Artificial Sequence: Synthetic oligonucleotide
  Sense strand starting at position 196 of SEQ ID NO: 1882299
gguggguggucccaggaaa

SEQ ID NO: 2110147 - RNA, 19 nt, Artificial Sequence
  Description of Artificial Sequence: Synthetic oligonucleotide
  Antisense strand to SEQ ID NO: 2110146
uuuccugggaccacccacc

SEQ ID NO: 2110148 - RNA, 19 nt, Artificial Sequence
  Description of Artificial Sequence: Synthetic oligonucleotide
  Sense strand starting at position 438 of SEQ ID NO: 1882299
gagacucagcuggguugaa

SEQ ID NO: 2110149 - RNA, 19 nt, Artificial Sequence
  Description of Artificial Sequence: Synthetic oligonucleotide
  Antisense strand to SEQ ID NO: 2110148
uucaacccagcugagucuc

SEQ ID NO: 2110150 - RNA, 19 nt, Artificial Sequence
  Description of Artificial Sequence: Synthetic oligonucleotide
  Sense strand starting at position 439 of SEQ ID NO: 1882299
agacucagcuggguugaaa

SEQ ID NO: 2110151 - RNA, 19 nt, Artificial Sequence
  Description of Artificial Sequence: Synthetic oligonucleotide
  Antisense strand to SEQ ID NO: 2110150
uuucaacccagcugagucu

SEQ ID NO: 2110152 - RNA, 19 nt, Artificial Sequence
  Description of Artificial Sequence: Synthetic oligonucleotide
  Sense strand starting at position 490 of SEQ ID NO: 1882299
gcagacaagucucauaucu

SEQ ID NO: 2110153 - RNA, 19 nt, Artificial Sequence
  Description of Artificial Sequence: Synthetic oligonucleotide
  Antisense strand to SEQ ID NO: 2110152
agauaugagacuugucugc

SEQ ID NO: 2110154 - RNA, 19 nt, Artificial Sequence
  Description of Artificial Sequence: Synthetic oligonucleotide
  Sense strand starting at position 529 of SEQ ID NO: 1882299
gucugugcaaugggugaau

SEQ ID NO: 2110155 - RNA, 19 nt, Artificial Sequence
  Description of Artificial Sequence: Synthetic oligonucleotide
  Antisense strand to SEQ ID NO: 2110154
auucacccauugcacagac

SEQ ID NO: 2110156 - RNA, 19 nt, Artificial Sequence
  Description of Artificial Sequence: Synthetic oligonucleotide
  Sense strand starting at position 531 of SEQ ID NO: 1882299
cugugcaaugggugaauga

SEQ ID NO: 2110157 - RNA, 19 nt, Artificial Sequence
  Description of Artificial Sequence: Synthetic oligonucleotide
  Antisense strand to SEQ ID NO: 2110156
ucauucacccauugcacag

SEQ ID NO: 2110158 - RNA, 19 nt, Artificial Sequence
  Description of Artificial Sequence: Synthetic oligonucleotide
  Sense strand starting at position 532 of SEQ ID NO: 1882299
ugugcaaugggugaaugaa

SEQ ID NO: 2110159 - RNA, 19 nt, Artificial Sequence
  Description of Artificial Sequence: Synthetic oligonucleotide
  Antisense strand to SEQ ID NO: 2110158
uucauucacccauugcaca

SEQ ID NO: 2110160 - RNA, 19 nt, Artificial Sequence
  Description of Artificial Sequence: Synthetic oligonucleotide
  Sense strand starting at position 552 of SEQ ID NO: 1882299
agcugcuuggcucguagaa

SEQ ID NO: 2110161 - RNA, 19 nt, Artificial Sequence
  Description of Artificial Sequence: Synthetic oligonucleotide
  Antisense strand to SEQ ID NO: 2110160
uucuacgagccaagcagcu

SEQ ID NO: 2110162 - RNA, 19 nt, Artificial Sequence
  Description of Artificial Sequence: Synthetic oligonucleotide
  Sense strand starting at position 944 of SEQ ID NO: 1882299
ggaauagagcaaugagcaa

SEQ ID NO: 2110163 - RNA, 19 nt, Artificial Sequence
  Description of Artificial Sequence: Synthetic oligonucleotide
  Antisense strand to SEQ ID NO: 2110162
uugcucauugcucuauucc

SEQ ID NO: 2110164 - RNA, 19 nt, Artificial Sequence
  Description of Artificial Sequence: Synthetic oligonucleotide
  Sense strand starting at position 990 of SEQ ID NO: 1882299
cuuacauuauugcuaguga

SEQ ID NO: 2110165 - RNA, 19 nt, Artificial Sequence
  Description of Artificial Sequence: Synthetic oligonucleotide
  Antisense strand to SEQ ID NO: 2110164
ucacuagcaauaauguaag

SEQ ID NO: 2110166 - RNA, 19 nt, Artificial Sequence
  Description of Artificial Sequence: Synthetic oligonucleotide
  Sense strand starting at position 991 of SEQ ID NO: 1882299
uuacauuauugcuagugag

SEQ ID NO: 2110167 - RNA, 19 nt, Artificial Sequence
  Description of Artificial Sequence: Synthetic oligonucleotide
  Antisense strand to SEQ ID NO: 2110166
cucacuagcaauaauguaa

SEQ ID NO: 2110168 - RNA, 19 nt, Artificial Sequence
  Description of Artificial Sequence: Synthetic oligonucleotide
  Sense strand starting at position 997 of SEQ ID NO: 1882299
uauugcuagugagauaaac

SEQ ID NO: 2110169 - RNA, 19 nt, Artificial Sequence
  Description of Artificial Sequence: Synthetic oligonucleotide
  Antisense strand to SEQ ID NO: 2110168
guuuaucucacuagcaaua

SEQ ID NO: 2110170 - RNA, 19 nt, Artificial Sequence
  Description of Artificial Sequence: Synthetic oligonucleotide
  Sense strand starting at position 1197 of SEQ ID NO: 1882299
acugguggguuugaggaaa

SEQ ID NO: 2110171 - RNA, 19 nt, Artificial Sequence
  Description of Artificial Sequence: Synthetic oligonucleotide
  Antisense strand to SEQ ID NO: 2110170
uuuccucaaacccaccagu

SEQ ID NO: 2110172 - RNA, 19 nt, Artificial Sequence
  Description of Artificial Sequence: Synthetic oligonucleotide
  Sense strand starting at position 1286 of SEQ ID NO: 1882299
ggagaugcgcuuugcugau

SEQ ID NO: 2110173 - RNA, 19 nt, Artificial Sequence
  Description of Artificial Sequence: Synthetic oligonucleotide
  Antisense strand to SEQ ID NO: 2110172
aucagcaaagcgcaucucc

SEQ ID NO: 2110174 - RNA, 19 nt, Artificial Sequence
  Description of Artificial Sequence: Synthetic oligonucleotide
  Sense strand starting at position 1316 of SEQ ID NO: 1882299
ggguuuguuucuuucucuu

SEQ ID NO: 2110175 - RNA, 19 nt, Artificial Sequence
  Description of Artificial Sequence: Synthetic oligonucleotide
  Antisense strand to SEQ ID NO: 2110174
aagagaaagaaacaaaccc

SEQ ID NO: 2110176 - RNA, 19 nt, Artificial Sequence
  Description of Artificial Sequence: Synthetic oligonucleotide
  Sense strand starting at position 1481 of SEQ ID NO: 1882299
ggagugaugcgaugugguu

SEQ ID NO: 2110177 - RNA, 19 nt, Artificial Sequence
  Description of Artificial Sequence: Synthetic oligonucleotide
  Antisense strand to SEQ ID NO: 2110176
aaccacaucgcaucacucc

SEQ ID NO: 2110178 - RNA, 19 nt, Artificial Sequence
  Description of Artificial Sequence: Synthetic oligonucleotide
  Sense strand starting at position 1488 of SEQ ID NO: 1882299
ugcgaugugguuugcauau

SEQ ID NO: 2110179 - RNA, 19 nt, Artificial Sequence
  Description of Artificial Sequence: Synthetic oligonucleotide
  Antisense strand to SEQ ID NO: 2110178
auaugcaaaccacaucgca

SEQ ID NO: 2110180 - RNA, 19 nt, Artificial Sequence
  Description of Artificial Sequence: Synthetic oligonucleotide
  Sense strand starting at position 1490 of SEQ ID NO: 1882299
cgaugugguuugcauauuu

SEQ ID NO: 2110181 - RNA, 19 nt, Artificial Sequence
  Description of Artificial Sequence: Synthetic oligonucleotide
  Antisense strand to SEQ ID NO: 2110180
aaauaugcaaaccacaucg

SEQ ID NO: 2110182 - RNA, 19 nt, Artificial Sequence
  Description of Artificial Sequence: Synthetic oligonucleotide
  Sense strand starting at position 1602 of SEQ ID NO: 1882299
gucgucuggcugugacuua

SEQ ID NO: 2110183 - RNA, 19 nt, Artificial Sequence
  Description of Artificial Sequence: Synthetic oligonucleotide
  Antisense strand to SEQ ID NO: 2110182
uaagucacagccagacgac

SEQ ID NO: 2110184 - RNA, 19 nt, Artificial Sequence
  Description of Artificial Sequence: Synthetic oligonucleotide
  Sense strand starting at position 1614 of SEQ ID NO: 1882299
ugacuuacugcagagagua

SEQ ID NO: 2110185 - RNA, 19 nt, Artificial Sequence
  Description of Artificial Sequence: Synthetic oligonucleotide
  Antisense strand to SEQ ID NO: 2110184
uacucucugcaguaaguca

SEQ ID NO: 2110186 - RNA, 19 nt, Artificial Sequence
  Description of Artificial Sequence: Synthetic oligonucleotide
  Sense strand starting at position 1758 of SEQ ID NO: 1882299
gggacuuugucuccaucau

SEQ ID NO: 2110187 - RNA, 19 nt, Artificial Sequence
  Description of Artificial Sequence: Synthetic oligonucleotide
  Antisense strand to SEQ ID NO: 2110186
augauggagacaaaguccc

SEQ ID NO: 2110188 - RNA, 19 nt, Artificial Sequence
  Description of Artificial Sequence: Synthetic oligonucleotide
  Sense strand starting at position 1759 of SEQ ID NO: 1882299
ggacuuugucuccaucauc

SEQ ID NO: 2110189 - RNA, 19 nt, Artificial Sequence
  Description of Artificial Sequence: Synthetic oligonucleotide
  Antisense strand to SEQ ID NO: 2110188
gaugauggagacaaagucc

SEQ ID NO: 2110190 - RNA, 19 nt, Artificial Sequence
  Description of Artificial Sequence: Synthetic oligonucleotide
  Sense strand starting at position 1805 of SEQ ID NO: 1882299
ccuggaguccgggaagagu

SEQ ID NO: 2110191 - RNA, 19 nt, Artificial Sequence
  Description of Artificial Sequence: Synthetic oligonucleotide
  Antisense strand to SEQ ID NO: 2110190
acucuucccggacuccagg

SEQ ID NO: 2110192 - RNA, 19 nt, Artificial Sequence
  Description of Artificial Sequence: Synthetic oligonucleotide
  Sense strand starting at position 1995 of SEQ ID NO: 1882299
gcaucugagaacugccgaa

SEQ ID NO: 2110193 - RNA, 19 nt, Artificial Sequence
  Description of Artificial Sequence: Synthetic oligonucleotide
  Antisense strand to SEQ ID NO: 2110192
uucggcaguucucagaugc

SEQ ID NO: 2110194 - RNA, 19 nt, Artificial Sequence
  Description of Artificial Sequence: Synthetic oligonucleotide
  Sense strand starting at position 2237 of SEQ ID NO: 1882299
ccagaaggcuuccaggaga

SEQ ID NO: 2110195 - RNA, 19 nt, Artificial Sequence
  Description of Artificial Sequence: Synthetic oligonucleotide
  Antisense strand to SEQ ID NO: 2110194
ucuccuggaagccuucugg

SEQ ID NO: 2110196 - RNA, 19 nt, Artificial Sequence
  Description of Artificial Sequence: Synthetic oligonucleotide
  Sense strand starting at position 2331 of SEQ ID NO: 1882299
aggcgaacagucugugauu

SEQ ID NO: 2110197 - RNA, 19 nt, Artificial Sequence
  Description of Artificial Sequence: Synthetic oligonucleotide
  Antisense strand to SEQ ID NO: 2110196
aaucacagacuguucgccu

SEQ ID NO: 2110198 - RNA, 19 nt, Artificial Sequence
  Description of Artificial Sequence: Synthetic oligonucleotide
  Sense strand starting at position 2332 of SEQ ID NO: 1882299
ggcgaacagucugugauug

SEQ ID NO: 2110199 - RNA, 19 nt, Artificial Sequence
  Description of Artificial Sequence: Synthetic oligonucleotide
  Antisense strand to SEQ ID NO: 2110198
caaucacagacuguucgcc

SEQ ID NO: 2110200 - RNA, 19 nt, Artificial Sequence
  Description of Artificial Sequence: Synthetic oligonucleotide
  Sense strand starting at position 2336 of SEQ ID NO: 1882299
aacagucugugauugggaa

SEQ ID NO: 2110201 - RNA, 19 nt, Artificial Sequence
  Description of Artificial Sequence: Synthetic oligonucleotide
  Antisense strand to SEQ ID NO: 2110200
uucccaaucacagacuguu

SEQ ID NO: 2110202 - RNA, 19 nt, Artificial Sequence
  Description of Artificial Sequence: Synthetic oligonucleotide
  Sense strand starting at position 2338 of SEQ ID NO: 1882299
cagucugugauugggaagu

SEQ ID NO: 2110203 - RNA, 19 nt, Artificial Sequence
  Description of Artificial Sequence: Synthetic oligonucleotide
  Antisense strand to SEQ ID NO: 2110202
acuucccaaucacagacug

SEQ ID NO: 2110204 - RNA, 19 nt, Artificial Sequence
  Description of Artificial Sequence: Synthetic oligonucleotide
  Sense strand starting at position 2665 of SEQ ID NO: 1882299
gcgccugucuacuuuauuu

SEQ ID NO: 2110205 - RNA, 19 nt, Artificial Sequence
  Description of Artificial Sequence: Synthetic oligonucleotide
  Antisense strand to SEQ ID NO: 2110204
aaauaaaguagacaggcgc

SEQ ID NO: 2110206 - RNA, 19 nt, Artificial Sequence
  Description of Artificial Sequence: Synthetic oligonucleotide
  Sense strand starting at position 3199 of SEQ ID NO: 1882299
guguuagugugccuggcua

SEQ ID NO: 2110207 - RNA, 19 nt, Artificial Sequence
  Description of Artificial Sequence: Synthetic oligonucleotide
  Antisense strand to SEQ ID NO: 2110206
uagccaggcacacuaacac

SEQ ID NO: 2110208 - RNA, 19 nt, Artificial Sequence
  Description of Artificial Sequence: Synthetic oligonucleotide
  Sense strand starting at position 3201 of SEQ ID NO: 1882299
guuagugugccuggcuaau

SEQ ID NO: 2110209 - RNA, 19 nt, Artificial Sequence
  Description of Artificial Sequence: Synthetic oligonucleotide
  Antisense strand to SEQ ID NO: 2110208
auuagccaggcacacuaac

SEQ ID NO: 2110210 - RNA, 19 nt, Artificial Sequence
  Description of Artificial Sequence: Synthetic oligonucleotide
  Sense strand starting at position 3696 of SEQ ID NO: 1882299
ggagcuuuguuuccauugu

SEQ ID NO: 2110211 - RNA, 19 nt, Artificial Sequence
  Description of Artificial Sequence: Synthetic oligonucleotide
  Antisense strand to SEQ ID NO: 2110210
acaauggaaacaaagcucc

SEQ ID NO: 2110212 - RNA, 19 nt, Artificial Sequence
  Description of Artificial Sequence: Synthetic oligonucleotide
  Sense strand starting at position 3917 of SEQ ID NO: 1882299
gggagaguggccugguaag

SEQ ID NO: 2110213 - RNA, 19 nt, Artificial Sequence
  Description of Artificial Sequence: Synthetic oligonucleotide
  Antisense strand to SEQ ID NO: 2110212
cuuaccaggccacucuccc

SEQ ID NO: 2110214 - RNA, 19 nt, Artificial Sequence
  Description of Artificial Sequence: Synthetic oligonucleotide
  Sense strand starting at position 3918 of SEQ ID NO: 1882299
ggagaguggccugguaaga

SEQ ID NO: 2110215 - RNA, 19 nt, Artificial Sequence
  Description of Artificial Sequence: Synthetic oligonucleotide
  Antisense strand to SEQ ID NO: 2110214
ucuuaccaggccacucucc

SEQ ID NO: 2110216 - RNA, 19 nt, Artificial Sequence
  Description of Artificial Sequence: Synthetic oligonucleotide
  Sense strand starting at position 20 of SEQ ID NO: 1882300
cucucaugaaauggugaga

SEQ ID NO: 2110217 - RNA, 19 nt, Artificial Sequence
  Description of Artificial Sequence: Synthetic oligonucleotide
  Antisense strand to SEQ ID NO: 2110216
ucucaccauuucaugagag

SEQ ID NO: 2110218 - RNA, 19 nt, Artificial Sequence
  Description of Artificial Sequence: Synthetic oligonucleotide
  Sense strand starting at position 41 of SEQ ID NO: 1882300
acugaaagacuuugucauu

SEQ ID NO: 2110219 - RNA, 19 nt, Artificial Sequence
  Description of Artificial Sequence: Synthetic oligonucleotide
  Antisense strand to SEQ ID NO: 2110218
aaugacaaagucuuucagu

SEQ ID NO: 2110220 - RNA, 19 nt, Artificial Sequence
  Description of Artificial Sequence: Synthetic oligonucleotide
  Sense strand starting at position 167 of SEQ ID NO: 1882300
aaaugcagguuaucaugau

SEQ ID NO: 2110221 - RNA, 19 nt, Artificial Sequence
  Description of Artificial Sequence: Synthetic oligonucleotide
  Antisense strand to SEQ ID NO: 2110220
aucaugauaaccugcauuu

SEQ ID NO: 2110222 - RNA, 19 nt, Artificial Sequence
  Description of Artificial Sequence: Synthetic oligonucleotide
  Sense strand starting at position 171 of SEQ ID NO: 1882300
gcagguuaucaugauaacc

SEQ ID NO: 2110223 - RNA, 19 nt, Artificial Sequence
  Description of Artificial Sequence: Synthetic oligonucleotide
  Antisense strand to SEQ ID NO: 2110222
gguuaucaugauaaccugc

SEQ ID NO: 2110224 - RNA, 19 nt, Artificial Sequence
  Description of Artificial Sequence: Synthetic oligonucleotide
  Sense strand starting at position 213 of SEQ ID NO: 1882300
gcaauacaaucugugacga

SEQ ID NO: 2110225 - RNA, 19 nt, Artificial Sequence
  Description of Artificial Sequence: Synthetic oligonucleotide
  Antisense strand to SEQ ID NO: 2110224
ucgucacagauuguauugc

SEQ ID NO: 2110226 - RNA, 19 nt, Artificial Sequence
  Description of Artificial Sequence: Synthetic oligonucleotide
  Sense strand starting at position 242 of SEQ ID NO: 1882300
auaccauugccggacuaaa

SEQ ID NO: 2110227 - RNA, 19 nt, Artificial Sequence
  Description of Artificial Sequence: Synthetic oligonucleotide
  Antisense strand to SEQ ID NO: 2110226
uuuaguccggcaaugguau

SEQ ID NO: 2110228 - RNA, 19 nt, Artificial Sequence
  Description of Artificial Sequence: Synthetic oligonucleotide
  Sense strand starting at position 319 of SEQ ID NO: 1882300
agauuauguaagugagcug

SEQ ID NO: 2110229 - RNA, 19 nt, Artificial Sequence
  Description of Artificial Sequence: Synthetic oligonucleotide
  Antisense strand to SEQ ID NO: 2110228
cagcucacuuacauaaucu

SEQ ID NO: 2110230 - RNA, 19 nt, Artificial Sequence
  Description of Artificial Sequence: Synthetic oligonucleotide
  Sense strand starting at position 334 of SEQ ID NO: 1882300
gcugccuuggcgucaguaa

SEQ ID NO: 2110231 - RNA, 19 nt, Artificial Sequence
  Description of Artificial Sequence: Synthetic oligonucleotide
  Antisense strand to SEQ ID NO: 2110230
uuacugacgccaaggcagc

SEQ ID NO: 2110232 - RNA, 19 nt, Artificial Sequence
  Description of Artificial Sequence: Synthetic oligonucleotide
  Sense strand starting at position 415 of SEQ ID NO: 1882300
uguguugcuguuccuguaa

SEQ ID NO: 2110233 - RNA, 19 nt, Artificial Sequence
  Description of Artificial Sequence: Synthetic oligonucleotide
  Antisense strand to SEQ ID NO: 2110232
uuacaggaacagcaacaca

SEQ ID NO: 2110234 - RNA, 19 nt, Artificial Sequence
  Description of Artificial Sequence: Synthetic oligonucleotide
  Sense strand starting at position 459 of SEQ ID NO: 1882300
uuacuuuggguauaaguga

SEQ ID NO: 2110235 - RNA, 19 nt, Artificial Sequence
  Description of Artificial Sequence: Synthetic oligonucleotide
  Antisense strand to SEQ ID NO: 2110234
ucacuuauacccaaaguaa

SEQ ID NO: 2110236 - RNA, 19 nt, Artificial Sequence
  Description of Artificial Sequence: Synthetic oligonucleotide
  Sense strand starting at position 838 of SEQ ID NO: 1882300
acuucugaguaggcugaaa

SEQ ID NO: 2110237 - RNA, 19 nt, Artificial Sequence
  Description of Artificial Sequence: Synthetic oligonucleotide
  Antisense strand to SEQ ID NO: 2110236
uuucagccuacucagaagu

SEQ ID NO: 2110238 - RNA, 19 nt, Artificial Sequence
  Description of Artificial Sequence: Synthetic oligonucleotide
  Sense strand starting at position 1024 of SEQ ID NO: 1882300
ugguaaagucacuggucca

SEQ ID NO: 2110239 - RNA, 19 nt, Artificial Sequence
  Description of Artificial Sequence: Synthetic oligonucleotide
  Antisense strand to SEQ ID NO: 2110238
uggaccagugacuuuacca

SEQ ID NO: 2110240 - RNA, 19 nt, Artificial Sequence
  Description of Artificial Sequence: Synthetic oligonucleotide
  Sense strand starting at position 1025 of SEQ ID NO: 1882300
gguaaagucacugguccaa

SEQ ID NO: 2110241 - RNA, 19 nt, Artificial Sequence
  Description of Artificial Sequence: Synthetic oligonucleotide
  Antisense strand to SEQ ID NO: 2110240
uuggaccagugacuuuacc

SEQ ID NO: 2110242 - RNA, 19 nt, Artificial Sequence
  Description of Artificial Sequence: Synthetic oligonucleotide
  Sense strand starting at position 1907 of SEQ ID NO: 1882300
gacagaugcugucuuggag

SEQ ID NO: 2110243 - RNA, 19 nt, Artificial Sequence
  Description of Artificial Sequence: Synthetic oligonucleotide
  Antisense strand to SEQ ID NO: 2110242
cuccaagacagcaucuguc

SEQ ID NO: 2110244 - RNA, 19 nt, Artificial Sequence
  Description of Artificial Sequence: Synthetic oligonucleotide
  Sense strand starting at position 2340 of SEQ ID NO: 1882300
caaagcugugucgcaaagu

SEQ ID NO: 2110245 - RNA, 19 nt, Artificial Sequence
  Description of Artificial Sequence: Synthetic oligonucleotide
  Antisense strand to SEQ ID NO: 2110244
acuuugcgacacagcuuug

SEQ ID NO: 2110246 - RNA, 19 nt, Artificial Sequence
  Description of Artificial Sequence: Synthetic oligonucleotide
  Sense strand starting at position 2346 of SEQ ID NO: 1882300
ugugucgcaaaguaagaau

SEQ ID NO: 2110247 - RNA, 19 nt, Artificial Sequence
  Description of Artificial Sequence: Synthetic oligonucleotide
  Antisense strand to SEQ ID NO: 2110246
auucuuacuuugcgacaca

SEQ ID NO: 2110248 - RNA, 19 nt, Artificial Sequence
  Description of Artificial Sequence: Synthetic oligonucleotide
  Sense strand starting at position 2380 of SEQ ID NO: 1882300
gugcuuaaaugacuauuau

SEQ ID NO: 2110249 - RNA, 19 nt, Artificial Sequence
  Description of Artificial Sequence: Synthetic oligonucleotide
  Antisense strand to SEQ ID NO: 2110248
auaauagucauuuaagcac

SEQ ID NO: 2110250 - RNA, 19 nt, Artificial Sequence
  Description of Artificial Sequence: Synthetic oligonucleotide
  Sense strand starting at position 2471 of SEQ ID NO: 1882300
aaaguuuguguaugaaaga

SEQ ID NO: 2110251 - RNA, 19 nt, Artificial Sequence
  Description of Artificial Sequence: Synthetic oligonucleotide
  Antisense strand to SEQ ID NO: 2110250
ucuuucauacacaaacuuu

SEQ ID NO: 2110252 - RNA, 19 nt, Artificial Sequence
  Description of Artificial Sequence: Synthetic oligonucleotide
  Sense strand starting at position 2600 of SEQ ID NO: 1882300
agcguuuguguuccuaaua

SEQ ID NO: 2110253 - RNA, 19 nt, Artificial Sequence
  Description of Artificial Sequence: Synthetic oligonucleotide
  Antisense strand to SEQ ID NO: 2110252
uauuaggaacacaaacgcu

SEQ ID NO: 2110254 - RNA, 19 nt, Artificial Sequence
  Description of Artificial Sequence: Synthetic oligonucleotide
  Sense strand starting at position 2611 of SEQ ID NO: 1882300
uccuaauaaguuugcuaga

SEQ ID NO: 2110255 - RNA, 19 nt, Artificial Sequence
  Description of Artificial Sequence: Synthetic oligonucleotide
  Antisense strand to SEQ ID NO: 2110254
ucuagcaaacuuauuagga

SEQ ID NO: 2110256 - RNA, 19 nt, Artificial Sequence
  Description of Artificial Sequence: Synthetic oligonucleotide
  Sense strand starting at position 2612 of SEQ ID NO: 1882300
ccuaauaaguuugcuagaa

SEQ ID NO: 2110257 - RNA, 19 nt, Artificial Sequence
  Description of Artificial Sequence: Synthetic oligonucleotide
  Antisense strand to SEQ ID NO: 2110256
uucuagcaaacuuauuagg

SEQ ID NO: 2110258 - RNA, 19 nt, Artificial Sequence
  Description of Artificial Sequence: Synthetic oligonucleotide
  Sense strand starting at position 2613 of SEQ ID NO: 1882300
cuaauaaguuugcuagaau

SEQ ID NO: 2110259 - RNA, 19 nt, Artificial Sequence
  Description of Artificial Sequence: Synthetic oligonucleotide
  Antisense strand to SEQ ID NO: 2110258
auucuagcaaacuuauuag

SEQ ID NO: 2110260 - RNA, 19 nt, Artificial Sequence
  Description of Artificial Sequence: Synthetic oligonucleotide
  Sense strand starting at position 2616 of SEQ ID NO: 1882300
auaaguuugcuagaauguc

SEQ ID NO: 2110261 - RNA, 19 nt, Artificial Sequence
  Description of Artificial Sequence: Synthetic oligonucleotide
  Antisense strand to SEQ ID NO: 2110260
gacauucuagcaaacuuau

SEQ ID NO: 2110262 - RNA, 19 nt, Artificial Sequence
  Description of Artificial Sequence: Synthetic oligonucleotide
  Sense strand starting at position 2726 of SEQ ID NO: 1882300
auaagaguucuguauguaa

SEQ ID NO: 2110263 - RNA, 19 nt, Artificial Sequence
  Description of Artificial Sequence: Synthetic oligonucleotide
  Antisense strand to SEQ ID NO: 2110262
uuacauacagaacucuuau

SEQ ID NO: 2110264 - RNA, 19 nt, Artificial Sequence
  Description of Artificial Sequence: Synthetic oligonucleotide
  Sense strand starting at position 2728 of SEQ ID NO: 1882300
aagaguucuguauguaaau

SEQ ID NO: 2110265 - RNA, 19 nt, Artificial Sequence
  Description of Artificial Sequence: Synthetic oligonucleotide
  Antisense strand to SEQ ID NO: 2110264
auuuacauacagaacucuu

SEQ ID NO: 2110266 - RNA, 19 nt, Artificial Sequence
  Description of Artificial Sequence: Synthetic oligonucleotide
  Sense strand starting at position 2729 of SEQ ID NO: 1882300
agaguucuguauguaaauc

SEQ ID NO: 2110267 - RNA, 19 nt, Artificial Sequence
  Description of Artificial Sequence: Synthetic oligonucleotide
  Antisense strand to SEQ ID NO: 2110266
gauuuacauacagaacucu

SEQ ID NO: 2110268 - RNA, 19 nt, Artificial Sequence
  Description of Artificial Sequence: Synthetic oligonucleotide
  Sense strand starting at position 2741 of SEQ ID NO: 1882300
guaaaucaucuuuauugug

SEQ ID NO: 2110269 - RNA, 19 nt, Artificial Sequence
  Description of Artificial Sequence: Synthetic oligonucleotide
  Antisense strand to SEQ ID NO: 2110268
cacaauaaagaugauuuac

SEQ ID NO: 2110270 - RNA, 19 nt, Artificial Sequence
  Description of Artificial Sequence: Synthetic oligonucleotide
  Sense strand starting at position 2787 of SEQ ID NO: 1882300
aaacuaucuuuaguggaag

SEQ ID NO: 2110271 - RNA, 19 nt, Artificial Sequence
  Description of Artificial Sequence: Synthetic oligonucleotide
  Antisense strand to SEQ ID NO: 2110270
cuuccacuaaagauaguuu

SEQ ID NO: 2110272 - RNA, 19 nt, Artificial Sequence
  Description of Artificial Sequence: Synthetic oligonucleotide
  Sense strand starting at position 2799 of SEQ ID NO: 1882300
guggaaguuggaugaaaua

SEQ ID NO: 2110273 - RNA, 19 nt, Artificial Sequence
  Description of Artificial Sequence: Synthetic oligonucleotide
  Antisense strand to SEQ ID NO: 2110272
uauuucauccaacuuccac

SEQ ID NO: 2110274 - RNA, 19 nt, Artificial Sequence
  Description of Artificial Sequence: Synthetic oligonucleotide
  Sense strand starting at position 2854 of SEQ ID NO: 1882300
guaggauaucucuauccau

SEQ ID NO: 2110275 - RNA, 19 nt, Artificial Sequence
  Description of Artificial Sequence: Synthetic oligonucleotide
  Antisense strand to SEQ ID NO: 2110274
auggauagagauauccuac

SEQ ID NO: 2110276 - RNA, 19 nt, Artificial Sequence
  Description of Artificial Sequence: Synthetic oligonucleotide
  Sense strand starting at position 2965 of SEQ ID NO: 1882300
gcacacuaguuauuuguuu

SEQ ID NO: 2110277 - RNA, 19 nt, Artificial Sequence
  Description of Artificial Sequence: Synthetic oligonucleotide
  Antisense strand to SEQ ID NO: 2110276
aaacaaauaacuagugugc

SEQ ID NO: 2110278 - RNA, 19 nt, Artificial Sequence
  Description of Artificial Sequence: Synthetic oligonucleotide
  Sense strand starting at position 3040 of SEQ ID NO: 1882300
cauugaguuguuuacugaa

SEQ ID NO: 2110279 - RNA, 19 nt, Artificial Sequence
  Description of Artificial Sequence: Synthetic oligonucleotide
  Antisense strand to SEQ ID NO: 2110278
uucaguaaacaacucaaug

SEQ ID NO: 2110280 - RNA, 19 nt, Artificial Sequence
  Description of Artificial Sequence: Synthetic oligonucleotide
  Sense strand starting at position 3042 of SEQ ID NO: 1882300
uugaguuguuuacugaaag

SEQ ID NO: 2110281 - RNA, 19 nt, Artificial Sequence
  Description of Artificial Sequence: Synthetic oligonucleotide
  Antisense strand to SEQ ID NO: 2110280
cuuucaguaaacaacucaa

SEQ ID NO: 2110282 - RNA, 19 nt, Artificial Sequence
  Description of Artificial Sequence: Synthetic oligonucleotide
  Sense strand starting at position 3153 of SEQ ID NO: 1882300
caguuuauuucuucgggua

SEQ ID NO: 2110283 - RNA, 19 nt, Artificial Sequence
  Description of Artificial Sequence: Synthetic oligonucleotide
  Antisense strand to SEQ ID NO: 2110282
uacccgaagaaauaaacug

SEQ ID NO: 2110284 - RNA, 19 nt, Artificial Sequence
  Description of Artificial Sequence: Synthetic oligonucleotide
  Sense strand starting at position 3154 of SEQ ID NO: 1882300
aguuuauuucuucggguaa

SEQ ID NO: 2110285 - RNA, 19 nt, Artificial Sequence
  Description of Artificial Sequence: Synthetic oligonucleotide
  Antisense strand to SEQ ID NO: 2110284
uuacccgaagaaauaaacu

SEQ ID NO: 2110286 - RNA, 19 nt, Artificial Sequence
  Description of Artificial Sequence: Synthetic oligonucleotide
  Sense strand starting at position 3422 of SEQ ID NO: 1882300
cuggauugaccuugagcca

SEQ ID NO: 2110287 - RNA, 19 nt, Artificial Sequence
  Description of Artificial Sequence: Synthetic oligonucleotide
  Antisense strand to SEQ ID NO: 2110286
uggcucaaggucaauccag

SEQ ID NO: 2110288 - RNA, 19 nt, Artificial Sequence
  Description of Artificial Sequence: Synthetic oligonucleotide
  Sense strand starting at position 3520 of SEQ ID NO: 1882300
ccaagauaguguuugucaa

SEQ ID NO: 2110289 - RNA, 19 nt, Artificial Sequence
  Description of Artificial Sequence: Synthetic oligonucleotide
  Antisense strand to SEQ ID NO: 2110288
uugacaaacacuaucuugg

SEQ ID NO: 2110290 - RNA, 19 nt, Artificial Sequence
  Description of Artificial Sequence: Synthetic oligonucleotide
  Sense strand starting at position 3521 of SEQ ID NO: 1882300
caagauaguguuugucaag

SEQ ID NO: 2110291 - RNA, 19 nt, Artificial Sequence
  Description of Artificial Sequence: Synthetic oligonucleotide
  Antisense strand to SEQ ID NO: 2110290
cuugacaaacacuaucuug

SEQ ID NO: 2110292 - RNA, 19 nt, Artificial Sequence
  Description of Artificial Sequence: Synthetic oligonucleotide
  Sense strand starting at position 3780 of SEQ ID NO: 1882300
agagaagaauacugaggaa

SEQ ID NO: 2110293 - RNA, 19 nt, Artificial Sequence
  Description of Artificial Sequence: Synthetic oligonucleotide
  Antisense strand to SEQ ID NO: 2110292
uuccucaguauucuucucu

SEQ ID NO: 2110294 - RNA, 19 nt, Artificial Sequence
  Description of Artificial Sequence: Synthetic oligonucleotide
  Sense strand starting at position 3783 of SEQ ID NO: 1882300
gaagaauacugaggaaaga

SEQ ID NO: 2110295 - RNA, 19 nt, Artificial Sequence
  Description of Artificial Sequence: Synthetic oligonucleotide
  Antisense strand to SEQ ID NO: 2110294
ucuuuccucaguauucuuc

SEQ ID NO: 2110296 - RNA, 19 nt, Artificial Sequence
  Description of Artificial Sequence: Synthetic oligonucleotide
  Sense strand starting at position 101 of SEQ ID NO: 1882301
guggguuccuccucuggga

SEQ ID NO: 2110297 - RNA, 19 nt, Artificial Sequence
  Description of Artificial Sequence: Synthetic oligonucleotide
  Antisense strand to SEQ ID NO: 2110296
ucccagaggaggaacccac

SEQ ID NO: 2110298 - RNA, 19 nt, Artificial Sequence
  Description of Artificial Sequence: Synthetic oligonucleotide
  Sense strand starting at position 153 of SEQ ID NO: 1882301
gggcuuugcguuucuucga

SEQ ID NO: 2110299 - RNA, 19 nt, Artificial Sequence
  Description of Artificial Sequence: Synthetic oligonucleotide
  Antisense strand to SEQ ID NO: 2110298
ucgaagaaacgcaaagccc

SEQ ID NO: 2110300 - RNA, 19 nt, Artificial Sequence
  Description of Artificial Sequence: Synthetic oligonucleotide
  Sense strand starting at position 156 of SEQ ID NO: 1882301
cuuugcguuucuucgacau

SEQ ID NO: 2110301 - RNA, 19 nt, Artificial Sequence
  Description of Artificial Sequence: Synthetic oligonucleotide
  Antisense strand to SEQ ID NO: 2110300
augucgaagaaacgcaaag

SEQ ID NO: 2110302 - RNA, 19 nt, Artificial Sequence
  Description of Artificial Sequence: Synthetic oligonucleotide
  Sense strand starting at position 158 of SEQ ID NO: 1882301
uugcguuucuucgacaucu

SEQ ID NO: 2110303 - RNA, 19 nt, Artificial Sequence
  Description of Artificial Sequence: Synthetic oligonucleotide
  Antisense strand to SEQ ID NO: 2110302
agaugucgaagaaacgcaa

SEQ ID NO: 2110304 - RNA, 19 nt, Artificial Sequence
  Description of Artificial Sequence: Synthetic oligonucleotide
  Sense strand starting at position 160 of SEQ ID NO: 1882301
gcguuucuucgacaucucu

SEQ ID NO: 2110305 - RNA, 19 nt, Artificial Sequence
  Description of Artificial Sequence: Synthetic oligonucleotide
  Antisense strand to SEQ ID NO: 2110304
agagaugucgaagaaacgc

SEQ ID NO: 2110306 - RNA, 19 nt, Artificial Sequence
  Description of Artificial Sequence: Synthetic oligonucleotide
  Sense strand starting at position 439 of SEQ ID NO: 1882301
gagacuguuugcugguguu

SEQ ID NO: 2110307 - RNA, 19 nt, Artificial Sequence
  Description of Artificial Sequence: Synthetic oligonucleotide
  Antisense strand to SEQ ID NO: 2110306
aacaccagcaaacagucuc

SEQ ID NO: 2110308 - RNA, 19 nt, Artificial Sequence
  Description of Artificial Sequence: Synthetic oligonucleotide
  Sense strand starting at position 686 of SEQ ID NO: 1882301
ggcccugucuagcuaugaa

SEQ ID NO: 2110309 - RNA, 19 nt, Artificial Sequence
  Description of Artificial Sequence: Synthetic oligonucleotide
  Antisense strand to SEQ ID NO: 2110308
uucauagcuagacagggcc

SEQ ID NO: 2110310 - RNA, 19 nt, Artificial Sequence
  Description of Artificial Sequence: Synthetic oligonucleotide
  Sense strand starting at position 689 of SEQ ID NO: 1882301
ccugucuagcuaugaagga

SEQ ID NO: 2110311 - RNA, 19 nt, Artificial Sequence
  Description of Artificial Sequence: Synthetic oligonucleotide
  Antisense strand to SEQ ID NO: 2110310
uccuucauagcuagacagg

SEQ ID NO: 2110312 - RNA, 19 nt, Artificial Sequence
  Description of Artificial Sequence: Synthetic oligonucleotide
  Sense strand starting at position 711 of SEQ ID NO: 1882301
gugucuuaugguugggcuu

SEQ ID NO: 2110313 - RNA, 19 nt, Artificial Sequence
  Description of Artificial Sequence: Synthetic oligonucleotide
  Antisense strand to SEQ ID NO: 2110312
aagcccaaccauaagacac

SEQ ID NO: 2110314 - RNA, 19 nt, Artificial Sequence
  Description of Artificial Sequence: Synthetic oligonucleotide
  Sense strand starting at position 766 of SEQ ID NO: 1882301
ugcaguguuuggugaggau

SEQ ID NO: 2110315 - RNA, 19 nt, Artificial Sequence
  Description of Artificial Sequence: Synthetic oligonucleotide
  Antisense strand to SEQ ID NO: 2110314
auccucaccaaacacugca

SEQ ID NO: 2110316 - RNA, 19 nt, Artificial Sequence
  Description of Artificial Sequence: Synthetic oligonucleotide
  Sense strand starting at position 767 of SEQ ID NO: 1882301
gcaguguuuggugaggaug

SEQ ID NO: 2110317 - RNA, 19 nt, Artificial Sequence
  Description of Artificial Sequence: Synthetic oligonucleotide
  Antisense strand to SEQ ID NO: 2110316
cauccucaccaaacacugc

SEQ ID NO: 2110318 - RNA, 19 nt, Artificial Sequence
  Description of Artificial Sequence: Synthetic oligonucleotide
  Sense strand starting at position 772 of SEQ ID NO: 1882301
guuuggugaggaugcgauu

SEQ ID NO: 2110319 - RNA, 19 nt, Artificial Sequence
  Description of Artificial Sequence: Synthetic oligonucleotide
  Antisense strand to SEQ ID NO: 2110318
aaucgcauccucaccaaac

SEQ ID NO: 2110320 - RNA, 19 nt, Artificial Sequence
  Description of Artificial Sequence: Synthetic oligonucleotide
  Sense strand starting at position 783 of SEQ ID NO: 1882301
augcgauuucaauggguug

SEQ ID NO: 2110321 - RNA, 19 nt, Artificial Sequence
  Description of Artificial Sequence: Synthetic oligonucleotide
  Antisense strand to SEQ ID NO: 2110320
caacccauugaaaucgcau

SEQ ID NO: 2110322 - RNA, 19 nt, Artificial Sequence
  Description of Artificial Sequence: Synthetic oligonucleotide
  Sense strand starting at position 843 of SEQ ID NO: 1882301
aaugcaaucuagugaugcu

SEQ ID NO: 2110323 - RNA, 19 nt, Artificial Sequence
  Description of Artificial Sequence: Synthetic oligonucleotide
  Antisense strand to SEQ ID NO: 2110322
agcaucacuagauugcauu

SEQ ID NO: 2110324 - RNA, 19 nt, Artificial Sequence
  Description of Artificial Sequence: Synthetic oligonucleotide
  Sense strand starting at position 1234 of SEQ ID NO: 1882301
cugcaaacccuugagucuu

SEQ ID NO: 2110325 - RNA, 19 nt, Artificial Sequence
  Description of Artificial Sequence: Synthetic oligonucleotide
  Antisense strand to SEQ ID NO: 2110324
aagacucaaggguuugcag

SEQ ID NO: 2110326 - RNA, 19 nt, Artificial Sequence
  Description of Artificial Sequence: Synthetic oligonucleotide
  Sense strand starting at position 1242 of SEQ ID NO: 1882301
ccuugagucuucggcuuua

SEQ ID NO: 2110327 - RNA, 19 nt, Artificial Sequence
  Description of Artificial Sequence: Synthetic oligonucleotide
  Antisense strand to SEQ ID NO: 2110326
uaaagccgaagacucaagg

SEQ ID NO: 2110328 - RNA, 19 nt, Artificial Sequence
  Description of Artificial Sequence: Synthetic oligonucleotide
  Sense strand starting at position 1247 of SEQ ID NO: 1882301
agucuucggcuuuauauac

SEQ ID NO: 2110329 - RNA, 19 nt, Artificial Sequence
  Description of Artificial Sequence: Synthetic oligonucleotide
  Antisense strand to SEQ ID NO: 2110328
guauauaaagccgaagacu

SEQ ID NO: 2110330 - RNA, 19 nt, Artificial Sequence
  Description of Artificial Sequence: Synthetic oligonucleotide
  Sense strand starting at position 1418 of SEQ ID NO: 1882301
acacaaagauugggacuaa

SEQ ID NO: 2110331 - RNA, 19 nt, Artificial Sequence
  Description of Artificial Sequence: Synthetic oligonucleotide
  Antisense strand to SEQ ID NO: 2110330
uuagucccaaucuuugugu

SEQ ID NO: 2110332 - RNA, 19 nt, Artificial Sequence
  Description of Artificial Sequence: Synthetic oligonucleotide
  Sense strand starting at position 1443 of SEQ ID NO: 1882301
cuggacucucaaggguuaa

SEQ ID NO: 2110333 - RNA, 19 nt, Artificial Sequence
  Description of Artificial Sequence: Synthetic oligonucleotide
  Antisense strand to SEQ ID NO: 2110332
uuaacccuugagaguccag

SEQ ID NO: 2110334 - RNA, 19 nt, Artificial Sequence
  Description of Artificial Sequence: Synthetic oligonucleotide
  Sense strand starting at position 1444 of SEQ ID NO: 1882301
uggacucucaaggguuaaa

SEQ ID NO: 2110335 - RNA, 19 nt, Artificial Sequence
  Description of Artificial Sequence: Synthetic oligonucleotide
  Antisense strand to SEQ ID NO: 2110334
uuuaacccuugagagucca

SEQ ID NO: 2110336 - RNA, 19 nt, Artificial Sequence
  Description of Artificial Sequence: Synthetic oligonucleotide
  Sense strand starting at position 1454 of SEQ ID NO: 1882301
aggguuaaauaauagguaa

SEQ ID NO: 2110337 - RNA, 19 nt, Artificial Sequence
  Description of Artificial Sequence: Synthetic oligonucleotide
  Antisense strand to SEQ ID NO: 2110336
uuaccuauuauuuaacccu

SEQ ID NO: 2110338 - RNA, 19 nt, Artificial Sequence
  Description of Artificial Sequence: Synthetic oligonucleotide
  Sense strand starting at position 3629 of SEQ ID NO: 1882301
gaaugcagcugucuagaug

SEQ ID NO: 2110339 - RNA, 19 nt, Artificial Sequence
  Description of Artificial Sequence: Synthetic oligonucleotide
  Antisense strand to SEQ ID NO: 2110338
caucuagacagcugcauuc

SEQ ID NO: 2110340 - RNA, 19 nt, Artificial Sequence
  Description of Artificial Sequence: Synthetic oligonucleotide
  Sense strand starting at position 3675 of SEQ ID NO: 1882301
ggucuugaaucguuccaaa

SEQ ID NO: 2110341 - RNA, 19 nt, Artificial Sequence
  Description of Artificial Sequence: Synthetic oligonucleotide
  Antisense strand to SEQ ID NO: 2110340
uuuggaacgauucaagacc

SEQ ID NO: 2110342 - RNA, 19 nt, Artificial Sequence
  Description of Artificial Sequence: Synthetic oligonucleotide
  Sense strand starting at position 3716 of SEQ ID NO: 1882301
ucugcuguccugcaauauc

SEQ ID NO: 2110343 - RNA, 19 nt, Artificial Sequence
  Description of Artificial Sequence: Synthetic oligonucleotide
  Antisense strand to SEQ ID NO: 2110342
gauauugcaggacagcaga

SEQ ID NO: 2110344 - RNA, 19 nt, Artificial Sequence
  Description of Artificial Sequence: Synthetic oligonucleotide
  Sense strand starting at position 3779 of SEQ ID NO: 1882301
agaguccauucuuagacau

SEQ ID NO: 2110345 - RNA, 19 nt, Artificial Sequence
  Description of Artificial Sequence: Synthetic oligonucleotide
  Antisense strand to SEQ ID NO: 2110344
augucuaagaauggacucu

SEQ ID NO: 2110346 - RNA, 19 nt, Artificial Sequence
  Description of Artificial Sequence: Synthetic oligonucleotide
  Sense strand starting at position 3781 of SEQ ID NO: 1882301
aguccauucuuagacaucu

SEQ ID NO: 2110347 - RNA, 19 nt, Artificial Sequence
  Description of Artificial Sequence: Synthetic oligonucleotide
  Antisense strand to SEQ ID NO: 2110346
agaugucuaagaauggacu

SEQ ID NO: 2110348 - RNA, 19 nt, Artificial Sequence
  Description of Artificial Sequence: Synthetic oligonucleotide
  Sense strand starting at position 3790 of SEQ ID NO: 1882301
uuagacaucuuagaugacu

SEQ ID NO: 2110349 - RNA, 19 nt, Artificial Sequence
  Description of Artificial Sequence: Synthetic oligonucleotide
  Antisense strand to SEQ ID NO: 2110348
agucaucuaagaugucuaa

SEQ ID NO: 2110350 - RNA, 19 nt, Artificial Sequence
  Description of Artificial Sequence: Synthetic oligonucleotide
  Sense strand starting at position 3803 of SEQ ID NO: 1882301
augacuuacccaugacagu

SEQ ID NO: 2110351 - RNA, 19 nt, Artificial Sequence
  Description of Artificial Sequence: Synthetic oligonucleotide
  Antisense strand to SEQ ID NO: 2110350
acugucauggguaagucau

SEQ ID NO: 2110352 - RNA, 19 nt, Artificial Sequence
  Description of Artificial Sequence: Synthetic oligonucleotide
  Sense strand starting at position 3892 of SEQ ID NO: 1882301
ugauuugugucccaccuuu

SEQ ID NO: 2110353 - RNA, 19 nt, Artificial Sequence
  Description of Artificial Sequence: Synthetic oligonucleotide
  Antisense strand to SEQ ID NO: 2110352
aaaggugggacacaaauca

SEQ ID NO: 2110354 - RNA, 19 nt, Artificial Sequence
  Description of Artificial Sequence: Synthetic oligonucleotide
  Sense strand starting at position 3900 of SEQ ID NO: 1882301
gucccaccuuucuggauau

SEQ ID NO: 2110355 - RNA, 19 nt, Artificial Sequence
  Description of Artificial Sequence: Synthetic oligonucleotide
  Antisense strand to SEQ ID NO: 2110354
auauccagaaaggugggac

SEQ ID NO: 2110356 - RNA, 19 nt, Artificial Sequence
  Description of Artificial Sequence: Synthetic oligonucleotide
  Sense strand starting at position 99 of SEQ ID NO: 1882302
uaugcagagcaaugguaaa

SEQ ID NO: 2110357 - RNA, 19 nt, Artificial Sequence
  Description of Artificial Sequence: Synthetic oligonucleotide
  Antisense strand to SEQ ID NO: 2110356
uuuaccauugcucugcaua

SEQ ID NO: 2110358 - RNA, 19 nt, Artificial Sequence
  Description of Artificial Sequence: Synthetic oligonucleotide
  Sense strand starting at position 187 of SEQ ID NO: 1882302
ggcuuauggcaauacuuac

SEQ ID NO: 2110359 - RNA, 19 nt, Artificial Sequence
  Description of Artificial Sequence: Synthetic oligonucleotide
  Antisense strand to SEQ ID NO: 2110358
guaaguauugccauaagcc

SEQ ID NO: 2110360 - RNA, 19 nt, Artificial Sequence
  Description of Artificial Sequence: Synthetic oligonucleotide
  Sense strand starting at position 273 of SEQ ID NO: 1882302
uuuguucugagauguagac

SEQ ID NO: 2110361 - RNA, 19 nt, Artificial Sequence
  Description of Artificial Sequence: Synthetic oligonucleotide
  Antisense strand to SEQ ID NO: 2110360
gucuacaucucagaacaaa

SEQ ID NO: 2110362 - RNA, 19 nt, Artificial Sequence
  Description of Artificial Sequence: Synthetic oligonucleotide
  Sense strand starting at position 279 of SEQ ID NO: 1882302
cugagauguagacagcuau

SEQ ID NO: 2110363 - RNA, 19 nt, Artificial Sequence
  Description of Artificial Sequence: Synthetic oligonucleotide
  Antisense strand to SEQ ID NO: 2110362
auagcugucuacaucucag

SEQ ID NO: 2110364 - RNA, 19 nt, Artificial Sequence
  Description of Artificial Sequence: Synthetic oligonucleotide
  Sense strand starting at position 304 of SEQ ID NO: 1882302
cugaucuuugcacaguaaa

SEQ ID NO: 2110365 - RNA, 19 nt, Artificial Sequence
  Description of Artificial Sequence: Synthetic oligonucleotide
  Antisense strand to SEQ ID NO: 2110364
uuuacugugcaaagaucag

SEQ ID NO: 2110366 - RNA, 19 nt, Artificial Sequence
  Description of Artificial Sequence: Synthetic oligonucleotide
  Sense strand starting at position 337 of SEQ ID NO: 1882302
agucauuauccuuagguga

SEQ ID NO: 2110367 - RNA, 19 nt, Artificial Sequence
  Description of Artificial Sequence: Synthetic oligonucleotide
  Antisense strand to SEQ ID NO: 2110366
ucaccuaaggauaaugacu

SEQ ID NO: 2110368 - RNA, 19 nt, Artificial Sequence
  Description of Artificial Sequence: Synthetic oligonucleotide
  Sense strand starting at position 529 of SEQ ID NO: 1882302
guagauaaugaaugguaug

SEQ ID NO: 2110369 - RNA, 19 nt, Artificial Sequence
  Description of Artificial Sequence: Synthetic oligonucleotide
  Antisense strand to SEQ ID NO: 2110368
cauaccauucauuaucuac

SEQ ID NO: 2110370 - RNA, 19 nt, Artificial Sequence
  Description of Artificial Sequence: Synthetic oligonucleotide
  Sense strand starting at position 539 of SEQ ID NO: 1882302
aaugguaugggcugaagga

SEQ ID NO: 2110371 - RNA, 19 nt, Artificial Sequence
  Description of Artificial Sequence: Synthetic oligonucleotide
  Antisense strand to SEQ ID NO: 2110370
uccuucagcccauaccauu

SEQ ID NO: 2110372 - RNA, 19 nt, Artificial Sequence
  Description of Artificial Sequence: Synthetic oligonucleotide
  Sense strand starting at position 599 of SEQ ID NO: 1882302
ugguuugcaguugagauaa

SEQ ID NO: 2110373 - RNA, 19 nt, Artificial Sequence
  Description of Artificial Sequence: Synthetic oligonucleotide
  Antisense strand to SEQ ID NO: 2110372
uuaucucaacugcaaacca

SEQ ID NO: 2110374 - RNA, 19 nt, Artificial Sequence
  Description of Artificial Sequence: Synthetic oligonucleotide
  Sense strand starting at position 618 of SEQ ID NO: 1882302
ggaugucuccaaggauaug

SEQ ID NO: 2110375 - RNA, 19 nt, Artificial Sequence
  Description of Artificial Sequence: Synthetic oligonucleotide
  Antisense strand to SEQ ID NO: 2110374
cauauccuuggagacaucc

SEQ ID NO: 2110376 - RNA, 19 nt, Artificial Sequence
  Description of Artificial Sequence: Synthetic oligonucleotide
  Sense strand starting at position 638 of SEQ ID NO: 1882302
uggcaucugcauuaccaga

SEQ ID NO: 2110377 - RNA, 19 nt, Artificial Sequence
  Description of Artificial Sequence: Synthetic oligonucleotide
  Antisense strand to SEQ ID NO: 2110376
ucugguaaugcagaugcca

SEQ ID NO: 2110378 - RNA, 19 nt, Artificial Sequence
  Description of Artificial Sequence: Synthetic oligonucleotide
  Sense strand starting at position 1197 of SEQ ID NO: 1882302
uggcgugaucugcuucgua

SEQ ID NO: 2110379 - RNA, 19 nt, Artificial Sequence
  Description of Artificial Sequence: Synthetic oligonucleotide
  Antisense strand to SEQ ID NO: 2110378
uacgaagcagaucacgcca

SEQ ID NO: 2110380 - RNA, 19 nt, Artificial Sequence
  Description of Artificial Sequence: Synthetic oligonucleotide
  Sense strand starting at position 1199 of SEQ ID NO: 1882302
gcgugaucugcuucguauc

SEQ ID NO: 2110381 - RNA, 19 nt, Artificial Sequence
  Description of Artificial Sequence: Synthetic oligonucleotide
  Antisense strand to SEQ ID NO: 2110380
gauacgaagcagaucacgc

SEQ ID NO: 2110382 - RNA, 19 nt, Artificial Sequence
  Description of Artificial Sequence: Synthetic oligonucleotide
  Sense strand starting at position 1373 of SEQ ID NO: 1882302
ggaggucuccaauguuuag

SEQ ID NO: 2110383 - RNA, 19 nt, Artificial Sequence
  Description of Artificial Sequence: Synthetic oligonucleotide
  Antisense strand to SEQ ID NO: 2110382
cuaaacauuggagaccucc

SEQ ID NO: 2110384 - RNA, 19 nt, Artificial Sequence
  Description of Artificial Sequence: Synthetic oligonucleotide
  Sense strand starting at position 1615 of SEQ ID NO: 1882302
guuagaaucagggagcucu

SEQ ID NO: 2110385 - RNA, 19 nt, Artificial Sequence
  Description of Artificial Sequence: Synthetic oligonucleotide
  Antisense strand to SEQ ID NO: 2110384
agagcucccugauucuaac

SEQ ID NO: 2110386 - RNA, 19 nt, Artificial Sequence
  Description of Artificial Sequence: Synthetic oligonucleotide
  Sense strand starting at position 2067 of SEQ ID NO: 1882302
uuaauuaugucuguaaagg

SEQ ID NO: 2110387 - RNA, 19 nt, Artificial Sequence
  Description of Artificial Sequence: Synthetic oligonucleotide
  Antisense strand to SEQ ID NO: 2110386
ccuuuacagacauaauuaa

SEQ ID NO: 2110388 - RNA, 19 nt, Artificial Sequence
  Description of Artificial Sequence: Synthetic oligonucleotide
  Sense strand starting at position 2068 of SEQ ID NO: 1882302
uaauuaugucuguaaaggc

SEQ ID NO: 2110389 - RNA, 19 nt, Artificial Sequence
  Description of Artificial Sequence: Synthetic oligonucleotide
  Antisense strand to SEQ ID NO: 2110388
gccuuuacagacauaauua

SEQ ID NO: 2110390 - RNA, 19 nt, Artificial Sequence
  Description of Artificial Sequence: Synthetic oligonucleotide
  Sense strand starting at position 2216 of SEQ ID NO: 1882302
cgguuauuccauuauuauu

SEQ ID NO: 2110391 - RNA, 19 nt, Artificial Sequence
  Description of Artificial Sequence: Synthetic oligonucleotide
  Antisense strand to SEQ ID NO: 2110390
aauaauaauggaauaaccg

SEQ ID NO: 2110392 - RNA, 19 nt, Artificial Sequence
  Description of Artificial Sequence: Synthetic oligonucleotide
  Sense strand starting at position 2226 of SEQ ID NO: 1882302
auuauuauugccuacgaua

SEQ ID NO: 2110393 - RNA, 19 nt, Artificial Sequence
  Description of Artificial Sequence: Synthetic oligonucleotide
  Antisense strand to SEQ ID NO: 2110392
uaucguaggcaauaauaau

SEQ ID NO: 2110394 - RNA, 19 nt, Artificial Sequence
  Description of Artificial Sequence: Synthetic oligonucleotide
  Sense strand starting at position 2305 of SEQ ID NO: 1882302
acauacgaauucucauuga

SEQ ID NO: 2110395 - RNA, 19 nt, Artificial Sequence
  Description of Artificial Sequence: Synthetic oligonucleotide
  Antisense strand to SEQ ID NO: 2110394
ucaaugagaauucguaugu

SEQ ID NO: 2110396 - RNA, 19 nt, Artificial Sequence
  Description of Artificial Sequence: Synthetic oligonucleotide
  Sense strand starting at position 2308 of SEQ ID NO: 1882302
uacgaauucucauugagga

SEQ ID NO: 2110397 - RNA, 19 nt, Artificial Sequence
  Description of Artificial Sequence: Synthetic oligonucleotide
  Antisense strand to SEQ ID NO: 2110396
uccucaaugagaauucgua

SEQ ID NO: 2110398 - RNA, 19 nt, Artificial Sequence
  Description of Artificial Sequence: Synthetic oligonucleotide
  Sense strand starting at position 2309 of SEQ ID NO: 1882302
acgaauucucauugaggaa

SEQ ID NO: 2110399 - RNA, 19 nt, Artificial Sequence
  Description of Artificial Sequence: Synthetic oligonucleotide
  Antisense strand to SEQ ID NO: 2110398
uuccucaaugagaauucgu

SEQ ID NO: 2110400 - RNA, 19 nt, Artificial Sequence
  Description of Artificial Sequence: Synthetic oligonucleotide
  Sense strand starting at position 2424 of SEQ ID NO: 1882302
cugccaucuguuggaauuu

SEQ ID NO: 2110401 - RNA, 19 nt, Artificial Sequence
  Description of Artificial Sequence: Synthetic oligonucleotide
  Antisense strand to SEQ ID NO: 2110400
aaauuccaacagauggcag

SEQ ID NO: 2110402 - RNA, 19 nt, Artificial Sequence
  Description of Artificial Sequence: Synthetic oligonucleotide
  Sense strand starting at position 2456 of SEQ ID NO: 1882302
uguguuggacuuuacucau

SEQ ID NO: 2110403 - RNA, 19 nt, Artificial Sequence
  Description of Artificial Sequence: Synthetic oligonucleotide
  Antisense strand to SEQ ID NO: 2110402
augaguaaaguccaacaca

SEQ ID NO: 2110404 - RNA, 19 nt, Artificial Sequence
  Description of Artificial Sequence: Synthetic oligonucleotide
  Sense strand starting at position 2462 of SEQ ID NO: 1882302
ggacuuuacucauucuuug

SEQ ID NO: 2110405 - RNA, 19 nt, Artificial Sequence
  Description of Artificial Sequence: Synthetic oligonucleotide
  Antisense strand to SEQ ID NO: 2110404
caaagaaugaguaaagucc

SEQ ID NO: 2110406 - RNA, 19 nt, Artificial Sequence
  Description of Artificial Sequence: Synthetic oligonucleotide
  Sense strand starting at position 3063 of SEQ ID NO: 1882302
uuauaaguuauuuggcguu

SEQ ID NO: 2110407 - RNA, 19 nt, Artificial Sequence
  Description of Artificial Sequence: Synthetic oligonucleotide
  Antisense strand to SEQ ID NO: 2110406
aacgccaaauaacuuauaa

SEQ ID NO: 2110408 - RNA, 19 nt, Artificial Sequence
  Description of Artificial Sequence: Synthetic oligonucleotide
  Sense strand starting at position 3202 of SEQ ID NO: 1882302
uauaauagaguugguuaca

SEQ ID NO: 2110409 - RNA, 19 nt, Artificial Sequence
  Description of Artificial Sequence: Synthetic oligonucleotide
  Antisense strand to SEQ ID NO: 2110408
uguaaccaacucuauuaua

SEQ ID NO: 2110410 - RNA, 19 nt, Artificial Sequence
  Description of Artificial Sequence: Synthetic oligonucleotide
  Sense strand starting at position 3203 of SEQ ID NO: 1882302
auaauagaguugguuacaa

SEQ ID NO: 2110411 - RNA, 19 nt, Artificial Sequence
  Description of Artificial Sequence: Synthetic oligonucleotide
  Antisense strand to SEQ ID NO: 2110410
uuguaaccaacucuauuau

SEQ ID NO: 2110412 - RNA, 19 nt, Artificial Sequence
  Description of Artificial Sequence: Synthetic oligonucleotide
  Sense strand starting at position 3265 of SEQ ID NO: 1882302
gcaacagauauuggaaugu

SEQ ID NO: 2110413 - RNA, 19 nt, Artificial Sequence
  Description of Artificial Sequence: Synthetic oligonucleotide
  Antisense strand to SEQ ID NO: 2110412
acauuccaauaucuguugc

SEQ ID NO: 2110414 - RNA, 19 nt, Artificial Sequence
  Description of Artificial Sequence: Synthetic oligonucleotide
  Sense strand starting at position 3528 of SEQ ID NO: 1882302
gcauucuuauacuuugaug

SEQ ID NO: 2110415 - RNA, 19 nt, Artificial Sequence
  Description of Artificial Sequence: Synthetic oligonucleotide
  Antisense strand to SEQ ID NO: 2110414
caucaaaguauaagaaugc

SEQ ID NO: 2110416 - RNA, 19 nt, Artificial Sequence
  Description of Artificial Sequence: Synthetic oligonucleotide
  Sense strand starting at position 3539 of SEQ ID NO: 1882302
cuuugaugggaguagugua

SEQ ID NO: 2110417 - RNA, 19 nt, Artificial Sequence
  Description of Artificial Sequence: Synthetic oligonucleotide
  Antisense strand to SEQ ID NO: 2110416
uacacuacucccaucaaag

SEQ ID NO: 2110418 - RNA, 19 nt, Artificial Sequence
  Description of Artificial Sequence: Synthetic oligonucleotide
  Sense strand starting at position 3544 of SEQ ID NO: 1882302
augggaguaguguaauaug

SEQ ID NO: 2110419 - RNA, 19 nt, Artificial Sequence
  Description of Artificial Sequence: Synthetic oligonucleotide
  Antisense strand to SEQ ID NO: 2110418
cauauuacacuacucccau

SEQ ID NO: 2110420 - RNA, 19 nt, Artificial Sequence
  Description of Artificial Sequence: Synthetic oligonucleotide
  Sense strand starting at position 3665 of SEQ ID NO: 1882302
gcgaaaugauggguuuaua

SEQ ID NO: 2110421 - RNA, 19 nt, Artificial Sequence
  Description of Artificial Sequence: Synthetic oligonucleotide
  Antisense strand to SEQ ID NO: 2110420
uauaaacccaucauuucgc

SEQ ID NO: 2110422 - RNA, 19 nt, Artificial Sequence
  Description of Artificial Sequence: Synthetic oligonucleotide
  Sense strand starting at position 3761 of SEQ ID NO: 1882302
gggucagucguauaaagga

SEQ ID NO: 2110423 - RNA, 19 nt, Artificial Sequence
  Description of Artificial Sequence: Synthetic oligonucleotide
  Antisense strand to SEQ ID NO: 2110422
uccuuuauacgacugaccc

SEQ ID NO: 2110424 - RNA, 19 nt, Artificial Sequence
  Description of Artificial Sequence: Synthetic oligonucleotide
  Sense strand starting at position 3814 of SEQ ID NO: 1882302
cucuauguacucuacagau

SEQ ID NO: 2110425 - RNA, 19 nt, Artificial Sequence
  Description of Artificial Sequence: Synthetic oligonucleotide
  Antisense strand to SEQ ID NO: 2110424
aucuguagaguacauagag

SEQ ID NO: 2110426 - RNA, 19 nt, Artificial Sequence
  Description of Artificial Sequence: Synthetic oligonucleotide
  Sense strand starting at position 3816 of SEQ ID NO: 1882302
cuauguacucuacagauuc

SEQ ID NO: 2110427 - RNA, 19 nt, Artificial Sequence
  Description of Artificial Sequence: Synthetic oligonucleotide
  Antisense strand to SEQ ID NO: 2110426
gaaucuguagaguacauag

SEQ ID NO: 2110428 - RNA, 19 nt, Artificial Sequence
  Description of Artificial Sequence: Synthetic oligonucleotide
  Sense strand starting at position 3879 of SEQ ID NO: 1882302
cuagguaugguauacacau

SEQ ID NO: 2110429 - RNA, 19 nt, Artificial Sequence
  Description of Artificial Sequence: Synthetic oligonucleotide
  Antisense strand to SEQ ID NO: 2110428
auguguauaccauaccuag

SEQ ID NO: 2110430 - RNA, 19 nt, Artificial Sequence
  Description of Artificial Sequence: Synthetic oligonucleotide
  Sense strand starting at position 3887 of SEQ ID NO: 1882302
gguauacacauguguuaag

SEQ ID NO: 2110431 - RNA, 19 nt, Artificial Sequence
  Description of Artificial Sequence: Synthetic oligonucleotide
  Antisense strand to SEQ ID NO: 2110430
cuuaacacauguguauacc

SEQ ID NO: 2110432 - RNA, 19 nt, Artificial Sequence
  Description of Artificial Sequence: Synthetic oligonucleotide
  Sense strand starting at position 3888 of SEQ ID NO: 1882302
guauacacauguguuaaga

SEQ ID NO: 2110433 - RNA, 19 nt, Artificial Sequence
  Description of Artificial Sequence: Synthetic oligonucleotide
  Antisense strand to SEQ ID NO: 2110432
ucuuaacacauguguauac

SEQ ID NO: 2110434 - RNA, 19 nt, Artificial Sequence
  Description of Artificial Sequence: Synthetic oligonucleotide
  Sense strand starting at position 3919 of SEQ ID NO: 1882302
uguaguauaccauaccuua

SEQ ID NO: 2110435 - RNA, 19 nt, Artificial Sequence
  Description of Artificial Sequence: Synthetic oligonucleotide
  Antisense strand to SEQ ID NO: 2110434
uaagguaugguauacuaca

SEQ ID NO: 2110436 - RNA, 19 nt, Artificial Sequence
  Description of Artificial Sequence: Synthetic oligonucleotide
  Sense strand starting at position 71 of SEQ ID NO: 1882303
uuagucauggucuggacuu

SEQ ID NO: 2110437 - RNA, 19 nt, Artificial Sequence
  Description of Artificial Sequence: Synthetic oligonucleotide
  Antisense strand to SEQ ID NO: 2110436
aaguccagaccaugacuaa

SEQ ID NO: 2110438 - RNA, 19 nt, Artificial Sequence
  Description of Artificial Sequence: Synthetic oligonucleotide
  Sense strand starting at position 188 of SEQ ID NO: 1882303
gcagucagaugacucaauu

SEQ ID NO: 2110439 - RNA, 19 nt, Artificial Sequence
  Description of Artificial Sequence: Synthetic oligonucleotide
  Antisense strand to SEQ ID NO: 2110438
aauugagucaucugacugc

SEQ ID NO: 2110440 - RNA, 19 nt, Artificial Sequence
  Description of Artificial Sequence: Synthetic oligonucleotide
  Sense strand starting at position 239 of SEQ ID NO: 1882303
augccuucugcuuagacaa

SEQ ID NO: 2110441 - RNA, 19 nt, Artificial Sequence
  Description of Artificial Sequence: Synthetic oligonucleotide
  Antisense strand to SEQ ID NO: 2110440
uugucuaagcagaaggcau

SEQ ID NO: 2110442 - RNA, 19 nt, Artificial Sequence
  Description of Artificial Sequence: Synthetic oligonucleotide
  Sense strand starting at position 313 of SEQ ID NO: 1882303
aggccugacucaccacaau

SEQ ID NO: 2110443 - RNA, 19 nt, Artificial Sequence
  Description of Artificial Sequence: Synthetic oligonucleotide
  Antisense strand to SEQ ID NO: 2110442
auuguggugagucaggccu

SEQ ID NO: 2110444 - RNA, 19 nt, Artificial Sequence
  Description of Artificial Sequence: Synthetic oligonucleotide
  Sense strand starting at position 479 of SEQ ID NO: 1882303
aaguguuacaucgauguga

SEQ ID NO: 2110445 - RNA, 19 nt, Artificial Sequence
  Description of Artificial Sequence: Synthetic oligonucleotide
  Antisense strand to SEQ ID NO: 2110444
ucacaucgauguaacacuu

SEQ ID NO: 2110446 - RNA, 19 nt, Artificial Sequence
  Description of Artificial Sequence: Synthetic oligonucleotide
  Sense strand starting at position 490 of SEQ ID NO: 1882303
cgaugugauuauccugaga

SEQ ID NO: 2110447 - RNA, 19 nt, Artificial Sequence
  Description of Artificial Sequence: Synthetic oligonucleotide
  Antisense strand to SEQ ID NO: 2110446
ucucaggauaaucacaucg

SEQ ID NO: 2110448 - RNA, 19 nt, Artificial Sequence
  Description of Artificial Sequence: Synthetic oligonucleotide
  Sense strand starting at position 501 of SEQ ID NO: 1882303
uccugagauugagaggaaa

SEQ ID NO: 2110449 - RNA, 19 nt, Artificial Sequence
  Description of Artificial Sequence: Synthetic oligonucleotide
  Antisense strand to SEQ ID NO: 2110448
uuuccucucaaucucagga

SEQ ID NO: 2110450 - RNA, 19 nt, Artificial Sequence
  Description of Artificial Sequence: Synthetic oligonucleotide
  Sense strand starting at position 514 of SEQ ID NO: 1882303
aggaaaugucagugaggca

SEQ ID NO: 2110451 - RNA, 19 nt, Artificial Sequence
  Description of Artificial Sequence: Synthetic oligonucleotide
  Antisense strand to SEQ ID NO: 2110450
ugccucacugacauuuccu

SEQ ID NO: 2110452 - RNA, 19 nt, Artificial Sequence
  Description of Artificial Sequence: Synthetic oligonucleotide
  Sense strand starting at position 515 of SEQ ID NO: 1882303
ggaaaugucagugaggcac

SEQ ID NO: 2110453 - RNA, 19 nt, Artificial Sequence
  Description of Artificial Sequence: Synthetic oligonucleotide
  Antisense strand to SEQ ID NO: 2110452
gugccucacugacauuucc

SEQ ID NO: 2110454 - RNA, 19 nt, Artificial Sequence
  Description of Artificial Sequence: Synthetic oligonucleotide
  Sense strand starting at position 565 of SEQ ID NO: 1882303
gaggguggauguuccagau

SEQ ID NO: 2110455 - RNA, 19 nt, Artificial Sequence
  Description of Artificial Sequence: Synthetic oligonucleotide
  Antisense strand to SEQ ID NO: 2110454
aucuggaacauccacccuc

SEQ ID NO: 2110456 - RNA, 19 nt, Artificial Sequence
  Description of Artificial Sequence: Synthetic oligonucleotide
  Sense strand starting at position 571 of SEQ ID NO: 1882303
ggauguuccagaugucccu

SEQ ID NO: 2110457 - RNA, 19 nt, Artificial Sequence
  Description of Artificial Sequence: Synthetic oligonucleotide
  Antisense strand to SEQ ID NO: 2110456
agggacaucuggaacaucc

SEQ ID NO: 2110458 - RNA, 19 nt, Artificial Sequence
  Description of Artificial Sequence: Synthetic oligonucleotide
  Sense strand starting at position 577 of SEQ ID NO: 1882303
uccagaugucccuggaucu

SEQ ID NO: 2110459 - RNA, 19 nt, Artificial Sequence
  Description of Artificial Sequence: Synthetic oligonucleotide
  Antisense strand to SEQ ID NO: 2110458
agauccagggacaucugga

SEQ ID NO: 2110460 - RNA, 19 nt, Artificial Sequence
  Description of Artificial Sequence: Synthetic oligonucleotide
  Sense strand starting at position 749 of SEQ ID NO: 1882303
acaauuaaugaucgcaaag

SEQ ID NO: 2110461 - RNA, 19 nt, Artificial Sequence
  Description of Artificial Sequence: Synthetic oligonucleotide
  Antisense strand to SEQ ID NO: 2110460
cuuugcgaucauuaauugu

SEQ ID NO: 2110462 - RNA, 19 nt, Artificial Sequence
  Description of Artificial Sequence: Synthetic oligonucleotide
  Sense strand starting at position 943 of SEQ ID NO: 1882303
ugcauuccuccagagucuu

SEQ ID NO: 2110463 - RNA, 19 nt, Artificial Sequence
  Description of Artificial Sequence: Synthetic oligonucleotide
  Antisense strand to SEQ ID NO: 2110462
aagacucuggaggaaugca

SEQ ID NO: 2110464 - RNA, 19 nt, Artificial Sequence
  Description of Artificial Sequence: Synthetic oligonucleotide
  Sense strand starting at position 951 of SEQ ID NO: 1882303
uccagagucuuauucggaa

SEQ ID NO: 2110465 - RNA, 19 nt, Artificial Sequence
  Description of Artificial Sequence: Synthetic oligonucleotide
  Antisense strand to SEQ ID NO: 2110464
uuccgaauaagacucugga

SEQ ID NO: 2110466 - RNA, 19 nt, Artificial Sequence
  Description of Artificial Sequence: Synthetic oligonucleotide
  Sense strand starting at position 1282 of SEQ ID NO: 1882303
gcgugaauucagccugcac

SEQ ID NO: 2110467 - RNA, 19 nt, Artificial Sequence
  Description of Artificial Sequence: Synthetic oligonucleotide
  Antisense strand to SEQ ID NO: 2110466
gugcaggcugaauucacgc

SEQ ID NO: 2110468 - RNA, 19 nt, Artificial Sequence
  Description of Artificial Sequence: Synthetic oligonucleotide
  Sense strand starting at position 1354 of SEQ ID NO: 1882303
cucuuuaaacaugaguguu

SEQ ID NO: 2110469 - RNA, 19 nt, Artificial Sequence
  Description of Artificial Sequence: Synthetic oligonucleotide
  Antisense strand to SEQ ID NO: 2110468
aacacucauguuuaaagag

SEQ ID NO: 2110470 - RNA, 19 nt, Artificial Sequence
  Description of Artificial Sequence: Synthetic oligonucleotide
  Sense strand starting at position 1362 of SEQ ID NO: 1882303
acaugaguguuucuuuaaa

SEQ ID NO: 2110471 - RNA, 19 nt, Artificial Sequence
  Description of Artificial Sequence: Synthetic oligonucleotide
  Antisense strand to SEQ ID NO: 2110470
uuuaaagaaacacucaugu

SEQ ID NO: 2110472 - RNA, 19 nt, Artificial Sequence
  Description of Artificial Sequence: Synthetic oligonucleotide
  Sense strand starting at position 1395 of SEQ ID NO: 1882303
ggcauugaggucugauuaa

SEQ ID NO: 2110473 - RNA, 19 nt, Artificial Sequence
  Description of Artificial Sequence: Synthetic oligonucleotide
  Antisense strand to SEQ ID NO: 2110472
uuaaucagaccucaaugcc

SEQ ID NO: 2110474 - RNA, 19 nt, Artificial Sequence
  Description of Artificial Sequence: Synthetic oligonucleotide
  Sense strand starting at position 2078 of SEQ ID NO: 1882303
ucagcugaaccugaaguua

SEQ ID NO: 2110475 - RNA, 19 nt, Artificial Sequence
  Description of Artificial Sequence: Synthetic oligonucleotide
  Antisense strand to SEQ ID NO: 2110474
uaacuucagguucagcuga

SEQ ID NO: 2110476 - RNA, 19 nt, Artificial Sequence
  Description of Artificial Sequence: Synthetic oligonucleotide
  Sense strand starting at position 2160 of SEQ ID NO: 1882303
uacuaaagcugugcagaga

SEQ ID NO: 2110477 - RNA, 19 nt, Artificial Sequence
  Description of Artificial Sequence: Synthetic oligonucleotide
  Antisense strand to SEQ ID NO: 2110476
ucucugcacagcuuuagua

SEQ ID NO: 2110478 - RNA, 19 nt, Artificial Sequence
  Description of Artificial Sequence: Synthetic oligonucleotide
  Sense strand starting at position 2173 of SEQ ID NO: 1882303
cagagaauccgaggcuaug

SEQ ID NO: 2110479 - RNA, 19 nt, Artificial Sequence
  Description of Artificial Sequence: Synthetic oligonucleotide
  Antisense strand to SEQ ID NO: 2110478
cauagccucggauucucug

SEQ ID NO: 2110480 - RNA, 19 nt, Artificial Sequence
  Description of Artificial Sequence: Synthetic oligonucleotide
  Sense strand starting at position 2243 of SEQ ID NO: 1882303
acgagaacguccucugaac

SEQ ID NO: 2110481 - RNA, 19 nt, Artificial Sequence
  Description of Artificial Sequence: Synthetic oligonucleotide
  Antisense strand to SEQ ID NO: 2110480
guucagaggacguucucgu

SEQ ID NO: 2110482 - RNA, 19 nt, Artificial Sequence
  Description of Artificial Sequence: Synthetic oligonucleotide
  Sense strand starting at position 2349 of SEQ ID NO: 1882303
guguuuaucgaugcuacgu

SEQ ID NO: 2110483 - RNA, 19 nt, Artificial Sequence
  Description of Artificial Sequence: Synthetic oligonucleotide
  Antisense strand to SEQ ID NO: 2110482
acguagcaucgauaaacac

SEQ ID NO: 2110484 - RNA, 19 nt, Artificial Sequence
  Description of Artificial Sequence: Synthetic oligonucleotide
  Sense strand starting at position 2408 of SEQ ID NO: 1882303
cgucuaaugaggcagggaa

SEQ ID NO: 2110485 - RNA, 19 nt, Artificial Sequence
  Description of Artificial Sequence: Synthetic oligonucleotide
  Antisense strand to SEQ ID NO: 2110484
uucccugccucauuagacg

SEQ ID NO: 2110486 - RNA, 19 nt, Artificial Sequence
  Description of Artificial Sequence: Synthetic oligonucleotide
  Sense strand starting at position 2421 of SEQ ID NO: 1882303
agggaaugucacugucaca

SEQ ID NO: 2110487 - RNA, 19 nt, Artificial Sequence
  Description of Artificial Sequence: Synthetic oligonucleotide
  Antisense strand to SEQ ID NO: 2110486
ugugacagugacauucccu

SEQ ID NO: 2110488 - RNA, 19 nt, Artificial Sequence
  Description of Artificial Sequence: Synthetic oligonucleotide
  Sense strand starting at position 2971 of SEQ ID NO: 1882303
ccacacguccugcaauauu

SEQ ID NO: 2110489 - RNA, 19 nt, Artificial Sequence
  Description of Artificial Sequence: Synthetic oligonucleotide
  Antisense strand to SEQ ID NO: 2110488
aauauugcaggacgugugg

SEQ ID NO: 2110490 - RNA, 19 nt, Artificial Sequence
  Description of Artificial Sequence: Synthetic oligonucleotide
  Sense strand starting at position 3134 of SEQ ID NO: 1882303
acugucaaauuugaggaaa

SEQ ID NO: 2110491 - RNA, 19 nt, Artificial Sequence
  Description of Artificial Sequence: Synthetic oligonucleotide
  Antisense strand to SEQ ID NO: 2110490
uuuccucaaauuugacagu

SEQ ID NO: 2110492 - RNA, 19 nt, Artificial Sequence
  Description of Artificial Sequence: Synthetic oligonucleotide
  Sense strand starting at position 3136 of SEQ ID NO: 1882303
ugucaaauuugaggaaaca

SEQ ID NO: 2110493 - RNA, 19 nt, Artificial Sequence
  Description of Artificial Sequence: Synthetic oligonucleotide
  Antisense strand to SEQ ID NO: 2110492
uguuuccucaaauuugaca

SEQ ID NO: 2110494 - RNA, 19 nt, Artificial Sequence
  Description of Artificial Sequence: Synthetic oligonucleotide
  Sense strand starting at position 3289 of SEQ ID NO: 1882303
gcaguuguggugcuuggau

SEQ ID NO: 2110495 - RNA, 19 nt, Artificial Sequence
  Description of Artificial Sequence: Synthetic oligonucleotide
  Antisense strand to SEQ ID NO: 2110494
auccaagcaccacaacugc

SEQ ID NO: 2110496 - RNA, 19 nt, Artificial Sequence
  Description of Artificial Sequence: Synthetic oligonucleotide
  Sense strand starting at position 3455 of SEQ ID NO: 1882303
ucaauagaugaaugcucaa

SEQ ID NO: 2110497 - RNA, 19 nt, Artificial Sequence
  Description of Artificial Sequence: Synthetic oligonucleotide
  Antisense strand to SEQ ID NO: 2110496
uugagcauucaucuauuga

SEQ ID NO: 2110498 - RNA, 19 nt, Artificial Sequence
  Description of Artificial Sequence: Synthetic oligonucleotide
  Sense strand starting at position 3458 of SEQ ID NO: 1882303
auagaugaaugcucaagua

SEQ ID NO: 2110499 - RNA, 19 nt, Artificial Sequence
  Description of Artificial Sequence: Synthetic oligonucleotide
  Antisense strand to SEQ ID NO: 2110498
uacuugagcauucaucuau

SEQ ID NO: 2110500 - RNA, 19 nt, Artificial Sequence
  Description of Artificial Sequence: Synthetic oligonucleotide
  Sense strand starting at position 3591 of SEQ ID NO: 1882303
ugaacugucaugugggaau

SEQ ID NO: 2110501 - RNA, 19 nt, Artificial Sequence
  Description of Artificial Sequence: Synthetic oligonucleotide
  Antisense strand to SEQ ID NO: 2110500
auucccacaugacaguuca

SEQ ID NO: 2110502 - RNA, 19 nt, Artificial Sequence
  Description of Artificial Sequence: Synthetic oligonucleotide
  Sense strand starting at position 3602 of SEQ ID NO: 1882303
gugggaauccauuggacua

SEQ ID NO: 2110503 - RNA, 19 nt, Artificial Sequence
  Description of Artificial Sequence: Synthetic oligonucleotide
  Antisense strand to SEQ ID NO: 2110502
uaguccaauggauucccac

SEQ ID NO: 2110504 - RNA, 19 nt, Artificial Sequence
  Description of Artificial Sequence: Synthetic oligonucleotide
  Sense strand starting at position 3744 of SEQ ID NO: 1882303
caggguuucugaccucaga

SEQ ID NO: 2110505 - RNA, 19 nt, Artificial Sequence
  Description of Artificial Sequence: Synthetic oligonucleotide
  Antisense strand to SEQ ID NO: 2110504
ucugaggucagaaacccug

SEQ ID NO: 2110506 - RNA, 19 nt, Artificial Sequence
  Description of Artificial Sequence: Synthetic oligonucleotide
  Sense strand starting at position 3827 of SEQ ID NO: 1882303
caggucaugucucuacuga

SEQ ID NO: 2110507 - RNA, 19 nt, Artificial Sequence
  Description of Artificial Sequence: Synthetic oligonucleotide
  Antisense strand to SEQ ID NO: 2110506
ucaguagagacaugaccug

SEQ ID NO: 2110508 - RNA, 19 nt, Artificial Sequence
  Description of Artificial Sequence: Synthetic oligonucleotide
  Sense strand starting at position 3855 of SEQ ID NO: 1882303
aggauaaggucucugcaaa

SEQ ID NO: 2110509 - RNA, 19 nt, Artificial Sequence
  Description of Artificial Sequence: Synthetic oligonucleotide
  Antisense strand to SEQ ID NO: 2110508
uuugcagagaccuuauccu

SEQ ID NO: 2110510 - RNA, 19 nt, Artificial Sequence
  Description of Artificial Sequence: Synthetic oligonucleotide
  Sense strand starting at position 3856 of SEQ ID NO: 1882303
ggauaaggucucugcaaac

SEQ ID NO: 2110511 - RNA, 19 nt, Artificial Sequence
  Description of Artificial Sequence: Synthetic oligonucleotide
  Antisense strand to SEQ ID NO: 2110510
guuugcagagaccuuaucc

SEQ ID NO: 2110512 - RNA, 19 nt, Artificial Sequence
  Description of Artificial Sequence: Synthetic oligonucleotide
  Sense strand starting at position 3887 of SEQ ID NO: 1882303
gccauuuguuuagucuaca

SEQ ID NO: 2110513 - RNA, 19 nt, Artificial Sequence
  Description of Artificial Sequence: Synthetic oligonucleotide
  Antisense strand to SEQ ID NO: 2110512
uguagacuaaacaaauggc

SEQ ID NO: 2110514 - RNA, 19 nt, Artificial Sequence
  Description of Artificial Sequence: Synthetic oligonucleotide
  Sense strand starting at position 3892 of SEQ ID NO: 1882303
uuguuuagucuacauuaca

SEQ ID NO: 2110515 - RNA, 19 nt, Artificial Sequence
  Description of Artificial Sequence: Synthetic oligonucleotide
  Antisense strand to SEQ ID NO: 2110514
uguaauguagacuaaacaa

SEQ ID NO: 2110516 - RNA, 19 nt, Artificial Sequence
  Description of Artificial Sequence: Synthetic oligonucleotide
  Sense strand starting at position 141 of SEQ ID NO: 1882304
agaaauugccaagagccau

SEQ ID NO: 2110517 - RNA, 19 nt, Artificial Sequence
  Description of Artificial Sequence: Synthetic oligonucleotide
  Antisense strand to SEQ ID NO: 2110516
auggcucuuggcaauuucu

SEQ ID NO: 2110518 - RNA, 19 nt, Artificial Sequence
  Description of Artificial Sequence: Synthetic oligonucleotide
  Sense strand starting at position 147 of SEQ ID NO: 1882304
ugccaagagccauacguaa

SEQ ID NO: 2110519 - RNA, 19 nt, Artificial Sequence
  Description of Artificial Sequence: Synthetic oligonucleotide
  Antisense strand to SEQ ID NO: 2110518
uuacguauggcucuuggca

SEQ ID NO: 2110520 - RNA, 19 nt, Artificial Sequence
  Description of Artificial Sequence: Synthetic oligonucleotide
  Sense strand starting at position 330 of SEQ ID NO: 1882304
gcaugauggcaugaugaua

SEQ ID NO: 2110521 - RNA, 19 nt, Artificial Sequence
  Description of Artificial Sequence: Synthetic oligonucleotide
  Antisense strand to SEQ ID NO: 2110520
uaucaucaugccaucaugc

SEQ ID NO: 2110522 - RNA, 19 nt, Artificial Sequence
  Description of Artificial Sequence: Synthetic oligonucleotide
  Sense strand starting at position 338 of SEQ ID NO: 1882304
gcaugaugauaacuaguuu

SEQ ID NO: 2110523 - RNA, 19 nt, Artificial Sequence
  Description of Artificial Sequence: Synthetic oligonucleotide
  Antisense strand to SEQ ID NO: 2110522
aaacuaguuaucaucaugc

SEQ ID NO: 2110524 - RNA, 19 nt, Artificial Sequence
  Description of Artificial Sequence: Synthetic oligonucleotide
  Sense strand starting at position 344 of SEQ ID NO: 1882304
ugauaacuaguuugaaauc

SEQ ID NO: 2110525 - RNA, 19 nt, Artificial Sequence
  Description of Artificial Sequence: Synthetic oligonucleotide
  Antisense strand to SEQ ID NO: 2110524
gauuucaaacuaguuauca

SEQ ID NO: 2110526 - RNA, 19 nt, Artificial Sequence
  Description of Artificial Sequence: Synthetic oligonucleotide
  Sense strand starting at position 371 of SEQ ID NO: 1882304
ggaugaacucuugagugcu

SEQ ID NO: 2110527 - RNA, 19 nt, Artificial Sequence
  Description of Artificial Sequence: Synthetic oligonucleotide
  Antisense strand to SEQ ID NO: 2110526
agcacucaagaguucaucc

SEQ ID NO: 2110528 - RNA, 19 nt, Artificial Sequence
  Description of Artificial Sequence: Synthetic oligonucleotide
  Sense strand starting at position 379 of SEQ ID NO: 1882304
ucuugagugcugggauacu

SEQ ID NO: 2110529 - RNA, 19 nt, Artificial Sequence
  Description of Artificial Sequence: Synthetic oligonucleotide
  Antisense strand to SEQ ID NO: 2110528
aguaucccagcacucaaga

SEQ ID NO: 2110530 - RNA, 19 nt, Artificial Sequence
  Description of Artificial Sequence: Synthetic oligonucleotide
  Sense strand starting at position 746 of SEQ ID NO: 1882304
cugaaagaauccucuguac

SEQ ID NO: 2110531 - RNA, 19 nt, Artificial Sequence
  Description of Artificial Sequence: Synthetic oligonucleotide
  Antisense strand to SEQ ID NO: 2110530
guacagaggauucuuucag

SEQ ID NO: 2110532 - RNA, 19 nt, Artificial Sequence
  Description of Artificial Sequence: Synthetic oligonucleotide
  Sense strand starting at position 770 of SEQ ID NO: 1882304
cgcaaaguaauguaagaaa

SEQ ID NO: 2110533 - RNA, 19 nt, Artificial Sequence
  Description of Artificial Sequence: Synthetic oligonucleotide
  Antisense strand to SEQ ID NO: 2110532
uuucuuacauuacuuugcg

SEQ ID NO: 2110534 - RNA, 19 nt, Artificial Sequence
  Description of Artificial Sequence: Synthetic oligonucleotide
  Sense strand starting at position 792 of SEQ ID NO: 1882304
uuuacauacuugccaguga

SEQ ID NO: 2110535 - RNA, 19 nt, Artificial Sequence
  Description of Artificial Sequence: Synthetic oligonucleotide
  Antisense strand to SEQ ID NO: 2110534
ucacuggcaaguauguaaa

SEQ ID NO: 2110536 - RNA, 19 nt, Artificial Sequence
  Description of Artificial Sequence: Synthetic oligonucleotide
  Sense strand starting at position 818 of SEQ ID NO: 1882304
ucuuuaaaguaagugguau

SEQ ID NO: 2110537 - RNA, 19 nt, Artificial Sequence
  Description of Artificial Sequence: Synthetic oligonucleotide
  Antisense strand to SEQ ID NO: 2110536
auaccacuuacuuuaaaga

SEQ ID NO: 2110538 - RNA, 19 nt, Artificial Sequence
  Description of Artificial Sequence: Synthetic oligonucleotide
  Sense strand starting at position 997 of SEQ ID NO: 1882304
gacugugguuacccuugau

SEQ ID NO: 2110539 - RNA, 19 nt, Artificial Sequence
  Description of Artificial Sequence: Synthetic oligonucleotide
  Antisense strand to SEQ ID NO: 2110538
aucaaggguaaccacaguc

SEQ ID NO: 2110540 - RNA, 19 nt, Artificial Sequence
  Description of Artificial Sequence: Synthetic oligonucleotide
  Sense strand starting at position 1000 of SEQ ID NO: 1882304
ugugguuacccuugauaga

SEQ ID NO: 2110541 - RNA, 19 nt, Artificial Sequence
  Description of Artificial Sequence: Synthetic oligonucleotide
  Antisense strand to SEQ ID NO: 2110540
ucuaucaaggguaaccaca

SEQ ID NO: 2110542 - RNA, 19 nt, Artificial Sequence
  Description of Artificial Sequence: Synthetic oligonucleotide
  Sense strand starting at position 1001 of SEQ ID NO: 1882304
gugguuacccuugauagau

SEQ ID NO: 2110543 - RNA, 19 nt, Artificial Sequence
  Description of Artificial Sequence: Synthetic oligonucleotide
  Antisense strand to SEQ ID NO: 2110542
aucuaucaaggguaaccac

SEQ ID NO: 2110544 - RNA, 19 nt, Artificial Sequence
  Description of Artificial Sequence: Synthetic oligonucleotide
  Sense strand starting at position 1122 of SEQ ID NO: 1882304
ugaacuggccuuuauuagu

SEQ ID NO: 2110545 - RNA, 19 nt, Artificial Sequence
  Description of Artificial Sequence: Synthetic oligonucleotide
  Antisense strand to SEQ ID NO: 2110544
acuaauaaaggccaguuca

SEQ ID NO: 2110546 - RNA, 19 nt, Artificial Sequence
  Description of Artificial Sequence: Synthetic oligonucleotide
  Sense strand starting at position 1253 of SEQ ID NO: 1882304
gucaguuccacagaacagu

SEQ ID NO: 2110547 - RNA, 19 nt, Artificial Sequence
  Description of Artificial Sequence: Synthetic oligonucleotide
  Antisense strand to SEQ ID NO: 2110546
acuguucuguggaacugac

SEQ ID NO: 2110548 - RNA, 19 nt, Artificial Sequence
  Description of Artificial Sequence: Synthetic oligonucleotide
  Sense strand starting at position 1271 of SEQ ID NO: 1882304
uccagauuacaaggcgaua

SEQ ID NO: 2110549 - RNA, 19 nt, Artificial Sequence
  Description of Artificial Sequence: Synthetic oligonucleotide
  Antisense strand to SEQ ID NO: 2110548
uaucgccuuguaaucugga

SEQ ID NO: 2110550 - RNA, 19 nt, Artificial Sequence
  Description of Artificial Sequence: Synthetic oligonucleotide
  Sense strand starting at position 1306 of SEQ ID NO: 1882304
gucagauaaugauugacua

SEQ ID NO: 2110551 - RNA, 19 nt, Artificial Sequence
  Description of Artificial Sequence: Synthetic oligonucleotide
  Antisense strand to SEQ ID NO: 2110550
uagucaaucauuaucugac

SEQ ID NO: 2110552 - RNA, 19 nt, Artificial Sequence
  Description of Artificial Sequence: Synthetic oligonucleotide
  Sense strand starting at position 1324 of SEQ ID NO: 1882304
aguacuguuuaguucugaa

SEQ ID NO: 2110553 - RNA, 19 nt, Artificial Sequence
  Description of Artificial Sequence: Synthetic oligonucleotide
  Antisense strand to SEQ ID NO: 2110552
uucagaacuaaacaguacu

SEQ ID NO: 2110554 - RNA, 19 nt, Artificial Sequence
  Description of Artificial Sequence: Synthetic oligonucleotide
  Sense strand starting at position 1408 of SEQ ID NO: 1882304
gagagaaagcagugauauu

SEQ ID NO: 2110555 - RNA, 19 nt, Artificial Sequence
  Description of Artificial Sequence: Synthetic oligonucleotide
  Antisense strand to SEQ ID NO: 2110554
aauaucacugcuuucucuc

SEQ ID NO: 2110556 - RNA, 19 nt, Artificial Sequence
  Description of Artificial Sequence: Synthetic oligonucleotide
  Sense strand starting at position 1497 of SEQ ID NO: 1882304
uggcucuuugagugaugau

SEQ ID NO: 2110557 - RNA, 19 nt, Artificial Sequence
  Description of Artificial Sequence: Synthetic oligonucleotide
  Antisense strand to SEQ ID NO: 2110556
aucaucacucaaagagcca

SEQ ID NO: 2110558 - RNA, 19 nt, Artificial Sequence
  Description of Artificial Sequence: Synthetic oligonucleotide
  Sense strand starting at position 1498 of SEQ ID NO: 1882304
ggcucuuugagugaugaug

SEQ ID NO: 2110559 - RNA, 19 nt, Artificial Sequence
  Description of Artificial Sequence: Synthetic oligonucleotide
  Antisense strand to SEQ ID NO: 2110558
caucaucacucaaagagcc

SEQ ID NO: 2110560 - RNA, 19 nt, Artificial Sequence
  Description of Artificial Sequence: Synthetic oligonucleotide
  Sense strand starting at position 1506 of SEQ ID NO: 1882304
gagugaugaugauuaaguu

SEQ ID NO: 2110561 - RNA, 19 nt, Artificial Sequence
  Description of Artificial Sequence: Synthetic oligonucleotide
  Antisense strand to SEQ ID NO: 2110560
aacuuaaucaucaucacuc

SEQ ID NO: 2110562 - RNA, 19 nt, Artificial Sequence
  Description of Artificial Sequence: Synthetic oligonucleotide
  Sense strand starting at position 1510 of SEQ ID NO: 1882304
gaugaugauuaaguuugua

SEQ ID NO: 2110563 - RNA, 19 nt, Artificial Sequence
  Description of Artificial Sequence: Synthetic oligonucleotide
  Antisense strand to SEQ ID NO: 2110562
uacaaacuuaaucaucauc

SEQ ID NO: 2110564 - RNA, 19 nt, Artificial Sequence
  Description of Artificial Sequence: Synthetic oligonucleotide
  Sense strand starting at position 1513 of SEQ ID NO: 1882304
gaugauuaaguuuguauca

SEQ ID NO: 2110565 - RNA, 19 nt, Artificial Sequence
  Description of Artificial Sequence: Synthetic oligonucleotide
  Antisense strand to SEQ ID NO: 2110564
ugauacaaacuuaaucauc

SEQ ID NO: 2110566 - RNA, 19 nt, Artificial Sequence
  Description of Artificial Sequence: Synthetic oligonucleotide
  Sense strand starting at position 1537 of SEQ ID NO: 1882304
uuugacguugaguaucuua

SEQ ID NO: 2110567 - RNA, 19 nt, Artificial Sequence
  Description of Artificial Sequence: Synthetic oligonucleotide
  Antisense strand to SEQ ID NO: 2110566
uaagauacucaacgucaaa

SEQ ID NO: 2110568 - RNA, 19 nt, Artificial Sequence
  Description of Artificial Sequence: Synthetic oligonucleotide
  Sense strand starting at position 1547 of SEQ ID NO: 1882304
aguaucuuauuguuuagga

SEQ ID NO: 2110569 - RNA, 19 nt, Artificial Sequence
  Description of Artificial Sequence: Synthetic oligonucleotide
  Antisense strand to SEQ ID NO: 2110568
uccuaaacaauaagauacu

SEQ ID NO: 2110570 - RNA, 19 nt, Artificial Sequence
  Description of Artificial Sequence: Synthetic oligonucleotide
  Sense strand starting at position 1609 of SEQ ID NO: 1882304
cuaccaugcucacuggauu

SEQ ID NO: 2110571 - RNA, 19 nt, Artificial Sequence
  Description of Artificial Sequence: Synthetic oligonucleotide
  Antisense strand to SEQ ID NO: 2110570
aauccagugagcaugguag

SEQ ID NO: 2110572 - RNA, 19 nt, Artificial Sequence
  Description of Artificial Sequence: Synthetic oligonucleotide
  Sense strand starting at position 1669 of SEQ ID NO: 1882304
gaaugauguccagggcauc

SEQ ID NO: 2110573 - RNA, 19 nt, Artificial Sequence
  Description of Artificial Sequence: Synthetic oligonucleotide
  Antisense strand to SEQ ID NO: 2110572
gaugcccuggacaucauuc

SEQ ID NO: 2110574 - RNA, 19 nt, Artificial Sequence
  Description of Artificial Sequence: Synthetic oligonucleotide
  Sense strand starting at position 3134 of SEQ ID NO: 1882304
uuugguaucggugauguaa

SEQ ID NO: 2110575 - RNA, 19 nt, Artificial Sequence
  Description of Artificial Sequence: Synthetic oligonucleotide
  Antisense strand to SEQ ID NO: 2110574
uuacaucaccgauaccaaa

SEQ ID NO: 2110576 - RNA, 19 nt, Artificial Sequence
  Description of Artificial Sequence: Synthetic oligonucleotide
  Sense strand starting at position 3242 of SEQ ID NO: 1882304
aaaugauacguuugcagga

SEQ ID NO: 2110577 - RNA, 19 nt, Artificial Sequence
  Description of Artificial Sequence: Synthetic oligonucleotide
  Antisense strand to SEQ ID NO: 2110576
uccugcaaacguaucauuu

SEQ ID NO: 2110578 - RNA, 19 nt, Artificial Sequence
  Description of Artificial Sequence: Synthetic oligonucleotide
  Sense strand starting at position 3260 of SEQ ID NO: 1882304
agcauuaacugacuacuga

SEQ ID NO: 2110579 - RNA, 19 nt, Artificial Sequence
  Description of Artificial Sequence: Synthetic oligonucleotide
  Antisense strand to SEQ ID NO: 2110578
ucaguagucaguuaaugcu

SEQ ID NO: 2110580 - RNA, 19 nt, Artificial Sequence
  Description of Artificial Sequence: Synthetic oligonucleotide
  Sense strand starting at position 3297 of SEQ ID NO: 1882304
gugcuuugugaagauuugu

SEQ ID NO: 2110581 - RNA, 19 nt, Artificial Sequence
  Description of Artificial Sequence: Synthetic oligonucleotide
  Antisense strand to SEQ ID NO: 2110580
acaaaucuucacaaagcac

SEQ ID NO: 2110582 - RNA, 19 nt, Artificial Sequence
  Description of Artificial Sequence: Synthetic oligonucleotide
  Sense strand starting at position 3346 of SEQ ID NO: 1882304
uugguaaauauugaguguu

SEQ ID NO: 2110583 - RNA, 19 nt, Artificial Sequence
  Description of Artificial Sequence: Synthetic oligonucleotide
  Antisense strand to SEQ ID NO: 2110582
aacacucaauauuuaccaa

SEQ ID NO: 2110584 - RNA, 19 nt, Artificial Sequence
  Description of Artificial Sequence: Synthetic oligonucleotide
  Sense strand starting at position 3386 of SEQ ID NO: 1882304
uguauuuagugcccuuauu

SEQ ID NO: 2110585 - RNA, 19 nt, Artificial Sequence
  Description of Artificial Sequence: Synthetic oligonucleotide
  Antisense strand to SEQ ID NO: 2110584
aauaagggcacuaaauaca

SEQ ID NO: 2110586 - RNA, 19 nt, Artificial Sequence
  Description of Artificial Sequence: Synthetic oligonucleotide
  Sense strand starting at position 3428 of SEQ ID NO: 1882304
aauaguaaguccgccauuu

SEQ ID NO: 2110587 - RNA, 19 nt, Artificial Sequence
  Description of Artificial Sequence: Synthetic oligonucleotide
  Antisense strand to SEQ ID NO: 2110586
aaauggcggacuuacuauu

SEQ ID NO: 2110588 - RNA, 19 nt, Artificial Sequence
  Description of Artificial Sequence: Synthetic oligonucleotide
  Sense strand starting at position 3912 of SEQ ID NO: 1882304
cagggaagauuugaaaguu

SEQ ID NO: 2110589 - RNA, 19 nt, Artificial Sequence
  Description of Artificial Sequence: Synthetic oligonucleotide
  Antisense strand to SEQ ID NO: 2110588
aacuuucaaaucuucccug

SEQ ID NO: 2110590 - RNA, 19 nt, Artificial Sequence
  Description of Artificial Sequence: Synthetic oligonucleotide
  Sense strand starting at position 3922 of SEQ ID NO: 1882304
uugaaaguuaagggugaau

SEQ ID NO: 2110591 - RNA, 19 nt, Artificial Sequence
  Description of Artificial Sequence: Synthetic oligonucleotide
  Antisense strand to SEQ ID NO: 2110590
auucacccuuaacuuucaa

SEQ ID NO: 2110592 - RNA, 19 nt, Artificial Sequence
  Description of Artificial Sequence: Synthetic oligonucleotide
  Sense strand starting at position 3924 of SEQ ID NO: 1882304
gaaaguuaagggugaauuc

SEQ ID NO: 2110593 - RNA, 19 nt, Artificial Sequence
  Description of Artificial Sequence: Synthetic oligonucleotide
  Antisense strand to SEQ ID NO: 2110592
gaauucacccuuaacuuuc

SEQ ID NO: 2110594 - RNA, 19 nt, Artificial Sequence
  Description of Artificial Sequence: Synthetic oligonucleotide
  Sense strand starting at position 3945 of SEQ ID NO: 1882304
ggaaauauaugccaauuug

SEQ ID NO: 2110595 - RNA, 19 nt, Artificial Sequence
  Description of Artificial Sequence: Synthetic oligonucleotide
  Antisense strand to SEQ ID NO: 2110594
caaauuggcauauauuucc

SEQ ID NO: 2110596 - RNA, 19 nt, Artificial Sequence
  Description of Artificial Sequence: Synthetic oligonucleotide
  Sense strand starting at position 10 of SEQ ID NO: 1882305
uuacaagggaguugugauu

SEQ ID NO: 2110597 - RNA, 19 nt, Artificial Sequence
  Description of Artificial Sequence: Synthetic oligonucleotide
  Antisense strand to SEQ ID NO: 2110596
aaucacaacucccuuguaa

SEQ ID NO: 2110598 - RNA, 19 nt, Artificial Sequence
  Description of Artificial Sequence: Synthetic oligonucleotide
  Sense strand starting at position 16 of SEQ ID NO: 1882305
gggaguugugauuagcuac

SEQ ID NO: 2110599 - RNA, 19 nt, Artificial Sequence
  Description of Artificial Sequence: Synthetic oligonucleotide
  Antisense strand to SEQ ID NO: 2110598
guagcuaaucacaacuccc

SEQ ID NO: 2110600 - RNA, 19 nt, Artificial Sequence
  Description of Artificial Sequence: Synthetic oligonucleotide
  Sense strand starting at position 581 of SEQ ID NO: 1882305
ggugacacuccugguacaa

SEQ ID NO: 2110601 - RNA, 19 nt, Artificial Sequence
  Description of Artificial Sequence: Synthetic oligonucleotide
  Antisense strand to SEQ ID NO: 2110600
uuguaccaggagugucacc

SEQ ID NO: 2110602 - RNA, 19 nt, Artificial Sequence
  Description of Artificial Sequence: Synthetic oligonucleotide
  Sense strand starting at position 705 of SEQ ID NO: 1882305
acuuuaguucuagggauag

SEQ ID NO: 2110603 - RNA, 19 nt, Artificial Sequence
  Description of Artificial Sequence: Synthetic oligonucleotide
  Antisense strand to SEQ ID NO: 2110602
cuaucccuagaacuaaagu

SEQ ID NO: 2110604 - RNA, 19 nt, Artificial Sequence
  Description of Artificial Sequence: Synthetic oligonucleotide
  Sense strand starting at position 707 of SEQ ID NO: 1882305
uuuaguucuagggauagcu

SEQ ID NO: 2110605 - RNA, 19 nt, Artificial Sequence
  Description of Artificial Sequence: Synthetic oligonucleotide
  Antisense strand to SEQ ID NO: 2110604
agcuaucccuagaacuaaa

SEQ ID NO: 2110606 - RNA, 19 nt, Artificial Sequence
  Description of Artificial Sequence: Synthetic oligonucleotide
  Sense strand starting at position 709 of SEQ ID NO: 1882305
uaguucuagggauagcuaa

SEQ ID NO: 2110607 - RNA, 19 nt, Artificial Sequence
  Description of Artificial Sequence: Synthetic oligonucleotide
  Antisense strand to SEQ ID NO: 2110606
uuagcuaucccuagaacua

SEQ ID NO: 2110608 - RNA, 19 nt, Artificial Sequence
  Description of Artificial Sequence: Synthetic oligonucleotide
  Sense strand starting at position 757 of SEQ ID NO: 1882305
cuagccucagauugggaau

SEQ ID NO: 2110609 - RNA, 19 nt, Artificial Sequence
  Description of Artificial Sequence: Synthetic oligonucleotide
  Antisense strand to SEQ ID NO: 2110608
auucccaaucugaggcuag

SEQ ID NO: 2110610 - RNA, 19 nt, Artificial Sequence
  Description of Artificial Sequence: Synthetic oligonucleotide
  Sense strand starting at position 789 of SEQ ID NO: 1882305
gcaggaauauccucagaga

SEQ ID NO: 2110611 - RNA, 19 nt, Artificial Sequence
  Description of Artificial Sequence: Synthetic oligonucleotide
  Antisense strand to SEQ ID NO: 2110610
ucucugaggauauuccugc

SEQ ID NO: 2110612 - RNA, 19 nt, Artificial Sequence
  Description of Artificial Sequence: Synthetic oligonucleotide
  Sense strand starting at position 906 of SEQ ID NO: 1882305
caaguucaggguugugaga

SEQ ID NO: 2110613 - RNA, 19 nt, Artificial Sequence
  Description of Artificial Sequence: Synthetic oligonucleotide
  Antisense strand to SEQ ID NO: 2110612
ucucacaacccugaacuug

SEQ ID NO: 2110614 - RNA, 19 nt, Artificial Sequence
  Description of Artificial Sequence: Synthetic oligonucleotide
  Sense strand starting at position 988 of SEQ ID NO: 1882305
ugaugauccuaguuugcaa

SEQ ID NO: 2110615 - RNA, 19 nt, Artificial Sequence
  Description of Artificial Sequence: Synthetic oligonucleotide
  Antisense strand to SEQ ID NO: 2110614
uugcaaacuaggaucauca

SEQ ID NO: 2110616 - RNA, 19 nt, Artificial Sequence
  Description of Artificial Sequence: Synthetic oligonucleotide
  Sense strand starting at position 990 of SEQ ID NO: 1882305
augauccuaguuugcaaua

SEQ ID NO: 2110617 - RNA, 19 nt, Artificial Sequence
  Description of Artificial Sequence: Synthetic oligonucleotide
  Antisense strand to SEQ ID NO: 2110616
uauugcaaacuaggaucau

SEQ ID NO: 2110618 - RNA, 19 nt, Artificial Sequence
  Description of Artificial Sequence: Synthetic oligonucleotide
  Sense strand starting at position 995 of SEQ ID NO: 1882305
ccuaguuugcaauacagaa

SEQ ID NO: 2110619 - RNA, 19 nt, Artificial Sequence
  Description of Artificial Sequence: Synthetic oligonucleotide
  Antisense strand to SEQ ID NO: 2110618
uucuguauugcaaacuagg

SEQ ID NO: 2110620 - RNA, 19 nt, Artificial Sequence
  Description of Artificial Sequence: Synthetic oligonucleotide
  Sense strand starting at position 1014 of SEQ ID NO: 1882305
gggacugaacguuaaaggu

SEQ ID NO: 2110621 - RNA, 19 nt, Artificial Sequence
  Description of Artificial Sequence: Synthetic oligonucleotide
  Antisense strand to SEQ ID NO: 2110620
accuuuaacguucaguccc

SEQ ID NO: 2110622 - RNA, 19 nt, Artificial Sequence
  Description of Artificial Sequence: Synthetic oligonucleotide
  Sense strand starting at position 1429 of SEQ ID NO: 1882305
gaagcaucuucugucacag

SEQ ID NO: 2110623 - RNA, 19 nt, Artificial Sequence
  Description of Artificial Sequence: Synthetic oligonucleotide
  Antisense strand to SEQ ID NO: 2110622
cugugacagaagaugcuuc

SEQ ID NO: 2110624 - RNA, 19 nt, Artificial Sequence
  Description of Artificial Sequence: Synthetic oligonucleotide
  Sense strand starting at position 1474 of SEQ ID NO: 1882305
ugaaauucuaaagagcguu

SEQ ID NO: 2110625 - RNA, 19 nt, Artificial Sequence
  Description of Artificial Sequence: Synthetic oligonucleotide
  Antisense strand to SEQ ID NO: 2110624
aacgcucuuuagaauuuca

SEQ ID NO: 2110626 - RNA, 19 nt, Artificial Sequence
  Description of Artificial Sequence: Synthetic oligonucleotide
  Sense strand starting at position 1598 of SEQ ID NO: 1882305
uggaauauccaucacagcu

SEQ ID NO: 2110627 - RNA, 19 nt, Artificial Sequence
  Description of Artificial Sequence: Synthetic oligonucleotide
  Antisense strand to SEQ ID NO: 2110626
agcugugauggauauucca

SEQ ID NO: 2110628 - RNA, 19 nt, Artificial Sequence
  Description of Artificial Sequence: Synthetic oligonucleotide
  Sense strand starting at position 1636 of SEQ ID NO: 1882305
ggucuuaccgcauugcuca

SEQ ID NO: 2110629 - RNA, 19 nt, Artificial Sequence
  Description of Artificial Sequence: Synthetic oligonucleotide
  Antisense strand to SEQ ID NO: 2110628
ugagcaaugcgguaagacc

SEQ ID NO: 2110630 - RNA, 19 nt, Artificial Sequence
  Description of Artificial Sequence: Synthetic oligonucleotide
  Sense strand starting at position 1741 of SEQ ID NO: 1882305
uucugaauggaagguuuau

SEQ ID NO: 2110631 - RNA, 19 nt, Artificial Sequence
  Description of Artificial Sequence: Synthetic oligonucleotide
  Antisense strand to SEQ ID NO: 2110630
auaaaccuuccauucagaa

SEQ ID NO: 2110632 - RNA, 19 nt, Artificial Sequence
  Description of Artificial Sequence: Synthetic oligonucleotide
  Sense strand starting at position 1752 of SEQ ID NO: 1882305
agguuuauaguguaucaga

SEQ ID NO: 2110633 - RNA, 19 nt, Artificial Sequence
  Description of Artificial Sequence: Synthetic oligonucleotide
  Antisense strand to SEQ ID NO: 2110632
ucugauacacuauaaaccu

SEQ ID NO: 2110634 - RNA, 19 nt, Artificial Sequence
  Description of Artificial Sequence: Synthetic oligonucleotide
  Sense strand starting at position 1763 of SEQ ID NO: 1882305
guaucagagccucaugaag

SEQ ID NO: 2110635 - RNA, 19 nt, Artificial Sequence
  Description of Artificial Sequence: Synthetic oligonucleotide
  Antisense strand to SEQ ID NO: 2110634
cuucaugaggcucugauac

SEQ ID NO: 2110636 - RNA, 19 nt, Artificial Sequence
  Description of Artificial Sequence: Synthetic oligonucleotide
  Sense strand starting at position 1804 of SEQ ID NO: 1882305
guuggugaaccucaaauug

SEQ ID NO: 2110637 - RNA, 19 nt, Artificial Sequence
  Description of Artificial Sequence: Synthetic oligonucleotide
  Antisense strand to SEQ ID NO: 2110636
caauuugagguucaccaac

SEQ ID NO: 2110638 - RNA, 19 nt, Artificial Sequence
  Description of Artificial Sequence: Synthetic oligonucleotide
  Sense strand starting at position 1825 of SEQ ID NO: 1882305
ucuauauggccauaagcaa

SEQ ID NO: 2110639 - RNA, 19 nt, Artificial Sequence
  Description of Artificial Sequence: Synthetic oligonucleotide
  Antisense strand to SEQ ID NO: 2110638
uugcuuauggccauauaga

SEQ ID NO: 2110640 - RNA, 19 nt, Artificial Sequence
  Description of Artificial Sequence: Synthetic oligonucleotide
  Sense strand starting at position 2084 of SEQ ID NO: 1882305
uuucuugagcucgagaggu

SEQ ID NO: 2110641 - RNA, 19 nt, Artificial Sequence
  Description of Artificial Sequence: Synthetic oligonucleotide
  Antisense strand to SEQ ID NO: 2110640
accucucgagcucaagaaa

SEQ ID NO: 2110642 - RNA, 19 nt, Artificial Sequence
  Description of Artificial Sequence: Synthetic oligonucleotide
  Sense strand starting at position 2505 of SEQ ID NO: 1882305
uccaaagacugguuuacaa

SEQ ID NO: 2110643 - RNA, 19 nt, Artificial Sequence
  Description of Artificial Sequence: Synthetic oligonucleotide
  Antisense strand to SEQ ID NO: 2110642
uuguaaaccagucuuugga

SEQ ID NO: 2110644 - RNA, 19 nt, Artificial Sequence
  Description of Artificial Sequence: Synthetic oligonucleotide
  Sense strand starting at position 2704 of SEQ ID NO: 1882305
uuguucguuccauauaaau

SEQ ID NO: 2110645 - RNA, 19 nt, Artificial Sequence
  Description of Artificial Sequence: Synthetic oligonucleotide
  Antisense strand to SEQ ID NO: 2110644
auuuauauggaacgaacaa

SEQ ID NO: 2110646 - RNA, 19 nt, Artificial Sequence
  Description of Artificial Sequence: Synthetic oligonucleotide
  Sense strand starting at position 2933 of SEQ ID NO: 1882305
caguguaaugagcaaugaa

SEQ ID NO: 2110647 - RNA, 19 nt, Artificial Sequence
  Description of Artificial Sequence: Synthetic oligonucleotide
  Antisense strand to SEQ ID NO: 2110646
uucauugcucauuacacug

SEQ ID NO: 2110648 - RNA, 19 nt, Artificial Sequence
  Description of Artificial Sequence: Synthetic oligonucleotide
  Sense strand starting at position 3039 of SEQ ID NO: 1882305
agcauucucuagucagaga

SEQ ID NO: 2110649 - RNA, 19 nt, Artificial Sequence
  Description of Artificial Sequence: Synthetic oligonucleotide
  Antisense strand to SEQ ID NO: 2110648
ucucugacuagagaaugcu

SEQ ID NO: 2110650 - RNA, 19 nt, Artificial Sequence
  Description of Artificial Sequence: Synthetic oligonucleotide
  Sense strand starting at position 3058 of SEQ ID NO: 1882305
auaggagaauucgccaaga

SEQ ID NO: 2110651 - RNA, 19 nt, Artificial Sequence
  Description of Artificial Sequence: Synthetic oligonucleotide
  Antisense strand to SEQ ID NO: 2110650
ucuuggcgaauucuccuau

SEQ ID NO: 2110652 - RNA, 19 nt, Artificial Sequence
  Description of Artificial Sequence: Synthetic oligonucleotide
  Sense strand starting at position 3080 of SEQ ID NO: 1882305
gaaggugguaaaggucauu

SEQ ID NO: 2110653 - RNA, 19 nt, Artificial Sequence
  Description of Artificial Sequence: Synthetic oligonucleotide
  Antisense strand to SEQ ID NO: 2110652
aaugaccuuuaccaccuuc

SEQ ID NO: 2110654 - RNA, 19 nt, Artificial Sequence
  Description of Artificial Sequence: Synthetic oligonucleotide
  Sense strand starting at position 3083 of SEQ ID NO: 1882305
ggugguaaaggucauucca

SEQ ID NO: 2110655 - RNA, 19 nt, Artificial Sequence
  Description of Artificial Sequence: Synthetic oligonucleotide
  Antisense strand to SEQ ID NO: 2110654
uggaaugaccuuuaccacc

SEQ ID NO: 2110656 - RNA, 19 nt, Artificial Sequence
  Description of Artificial Sequence: Synthetic oligonucleotide
  Sense strand starting at position 3085 of SEQ ID NO: 1882305
ugguaaaggucauuccaau

SEQ ID NO: 2110657 - RNA, 19 nt, Artificial Sequence
  Description of Artificial Sequence: Synthetic oligonucleotide
  Antisense strand to SEQ ID NO: 2110656
auuggaaugaccuuuacca

SEQ ID NO: 2110658 - RNA, 19 nt, Artificial Sequence
  Description of Artificial Sequence: Synthetic oligonucleotide
  Sense strand starting at position 3477 of SEQ ID NO: 1882305
ggaaguuuaaaguauggca

SEQ ID NO: 2110659 - RNA, 19 nt, Artificial Sequence
  Description of Artificial Sequence: Synthetic oligonucleotide
  Antisense strand to SEQ ID NO: 2110658
ugccauacuuuaaacuucc

SEQ ID NO: 2110660 - RNA, 19 nt, Artificial Sequence
  Description of Artificial Sequence: Synthetic oligonucleotide
  Sense strand starting at position 3593 of SEQ ID NO: 1882305
gugcuugugauuuguauau

SEQ ID NO: 2110661 - RNA, 19 nt, Artificial Sequence
  Description of Artificial Sequence: Synthetic oligonucleotide
  Antisense strand to SEQ ID NO: 2110660
auauacaaaucacaagcac

SEQ ID NO: 2110662 - RNA, 19 nt, Artificial Sequence
  Description of Artificial Sequence: Synthetic oligonucleotide
  Sense strand starting at position 3697 of SEQ ID NO: 1882305
auuauugcugcuuacagaa

SEQ ID NO: 2110663 - RNA, 19 nt, Artificial Sequence
  Description of Artificial Sequence: Synthetic oligonucleotide
  Antisense strand to SEQ ID NO: 2110662
uucuguaagcagcaauaau

SEQ ID NO: 2110664 - RNA, 19 nt, Artificial Sequence
  Description of Artificial Sequence: Synthetic oligonucleotide
  Sense strand starting at position 3766 of SEQ ID NO: 1882305
cugggaaguuugccaagga

SEQ ID NO: 2110665 - RNA, 19 nt, Artificial Sequence
  Description of Artificial Sequence: Synthetic oligonucleotide
  Antisense strand to SEQ ID NO: 2110664
uccuuggcaaacuucccag

SEQ ID NO: 2110666 - RNA, 19 nt, Artificial Sequence
  Description of Artificial Sequence: Synthetic oligonucleotide
  Sense strand starting at position 3814 of SEQ ID NO: 1882305
gcaacuaagagauguuaag

SEQ ID NO: 2110667 - RNA, 19 nt, Artificial Sequence
  Description of Artificial Sequence: Synthetic oligonucleotide
  Antisense strand to SEQ ID NO: 2110666
cuuaacaucucuuaguugc

SEQ ID NO: 2110668 - RNA, 19 nt, Artificial Sequence
  Description of Artificial Sequence: Synthetic oligonucleotide
  Sense strand starting at position 3820 of SEQ ID NO: 1882305
aagagauguuaagcagguu

SEQ ID NO: 2110669 - RNA, 19 nt, Artificial Sequence
  Description of Artificial Sequence: Synthetic oligonucleotide
  Antisense strand to SEQ ID NO: 2110668
aaccugcuuaacaucucuu

SEQ ID NO: 2110670 - RNA, 19 nt, Artificial Sequence
  Description of Artificial Sequence: Synthetic oligonucleotide
  Sense strand starting at position 3821 of SEQ ID NO: 1882305
agagauguuaagcagguuu

SEQ ID NO: 2110671 - RNA, 19 nt, Artificial Sequence
  Description of Artificial Sequence: Synthetic oligonucleotide
  Antisense strand to SEQ ID NO: 2110670
aaaccugcuuaacaucucu

SEQ ID NO: 2110672 - RNA, 19 nt, Artificial Sequence
  Description of Artificial Sequence: Synthetic oligonucleotide
  Sense strand starting at position 3840 of SEQ ID NO: 1882305
agagaagccugaucagauu

SEQ ID NO: 2110673 - RNA, 19 nt, Artificial Sequence
  Description of Artificial Sequence: Synthetic oligonucleotide
  Antisense strand to SEQ ID NO: 2110672
aaucugaucaggcuucucu

SEQ ID NO: 2110674 - RNA, 19 nt, Artificial Sequence
  Description of Artificial Sequence: Synthetic oligonucleotide
  Sense strand starting at position 3846 of SEQ ID NO: 1882305
gccugaucagauugacuuu

SEQ ID NO: 2110675 - RNA, 19 nt, Artificial Sequence
  Description of Artificial Sequence: Synthetic oligonucleotide
  Antisense strand to SEQ ID NO: 2110674
aaagucaaucugaucaggc

SEQ ID NO: 2110676 - RNA, 19 nt, Artificial Sequence
  Description of Artificial Sequence: Synthetic oligonucleotide
  Sense strand starting at position 1994 of SEQ ID NO: 1882306
gcagauaugcgcgucagca

SEQ ID NO: 2110677 - RNA, 19 nt, Artificial Sequence
  Description of Artificial Sequence: Synthetic oligonucleotide
  Antisense strand to SEQ ID NO: 2110676
ugcugacgcgcauaucugc

SEQ ID NO: 2110678 - RNA, 19 nt, Artificial Sequence
  Description of Artificial Sequence: Synthetic oligonucleotide
  Sense strand starting at position 1995 of SEQ ID NO: 1882306
cagauaugcgcgucagcau

SEQ ID NO: 2110679 - RNA, 19 nt, Artificial Sequence
  Description of Artificial Sequence: Synthetic oligonucleotide
  Antisense strand to SEQ ID NO: 2110678
augcugacgcgcauaucug

SEQ ID NO: 2110680 - RNA, 19 nt, Artificial Sequence
  Description of Artificial Sequence: Synthetic oligonucleotide
  Sense strand starting at position 1996 of SEQ ID NO: 1882306
agauaugcgcgucagcaua

SEQ ID NO: 2110681 - RNA, 19 nt, Artificial Sequence
  Description of Artificial Sequence: Synthetic oligonucleotide
  Antisense strand to SEQ ID NO: 2110680
uaugcugacgcgcauaucu

SEQ ID NO: 2110682 - RNA, 19 nt, Artificial Sequence
  Description of Artificial Sequence: Synthetic oligonucleotide
  Sense strand starting at position 2009 of SEQ ID NO: 1882306
agcauacuuuggcggguaa

SEQ ID NO: 2110683 - RNA, 19 nt, Artificial Sequence
  Description of Artificial Sequence: Synthetic oligonucleotide
  Antisense strand to SEQ ID NO: 2110682
uuacccgccaaaguaugcu

SEQ ID NO: 2110684 - RNA, 19 nt, Artificial Sequence
  Description of Artificial Sequence: Synthetic oligonucleotide
  Sense strand starting at position 2011 of SEQ ID NO: 1882306
cauacuuuggcggguaagu

SEQ ID NO: 2110685 - RNA, 19 nt, Artificial Sequence
  Description of Artificial Sequence: Synthetic oligonucleotide
  Antisense strand to SEQ ID NO: 2110684
acuuacccgccaaaguaug

SEQ ID NO: 2110686 - RNA, 19 nt, Artificial Sequence
  Description of Artificial Sequence: Synthetic oligonucleotide
  Sense strand starting at position 2096 of SEQ ID NO: 1882306
gugugugcguguacuuaaa

SEQ ID NO: 2110687 - RNA, 19 nt, Artificial Sequence
  Description of Artificial Sequence: Synthetic oligonucleotide
  Antisense strand to SEQ ID NO: 2110686
uuuaaguacacgcacacac

SEQ ID NO: 2110688 - RNA, 19 nt, Artificial Sequence
  Description of Artificial Sequence: Synthetic oligonucleotide
  Sense strand starting at position 2175 of SEQ ID NO: 1882306
gguguguugugcuugugga

SEQ ID NO: 2110689 - RNA, 19 nt, Artificial Sequence
  Description of Artificial Sequence: Synthetic oligonucleotide
  Antisense strand to SEQ ID NO: 2110688
uccacaagcacaacacacc

SEQ ID NO: 2110690 - RNA, 19 nt, Artificial Sequence
  Description of Artificial Sequence: Synthetic oligonucleotide
  Sense strand starting at position 2176 of SEQ ID NO: 1882306
guguguugugcuuguggag

SEQ ID NO: 2110691 - RNA, 19 nt, Artificial Sequence
  Description of Artificial Sequence: Synthetic oligonucleotide
  Antisense strand to SEQ ID NO: 2110690
cuccacaagcacaacacac

SEQ ID NO: 2110692 - RNA, 19 nt, Artificial Sequence
  Description of Artificial Sequence: Synthetic oligonucleotide
  Sense strand starting at position 2248 of SEQ ID NO: 1882306
guauauaaagccgaagacu

SEQ ID NO: 2110693 - RNA, 19 nt, Artificial Sequence
  Description of Artificial Sequence: Synthetic oligonucleotide
  Antisense strand to SEQ ID NO: 2110692
agucuucggcuuuauauac

SEQ ID NO: 2110694 - RNA, 19 nt, Artificial Sequence
  Description of Artificial Sequence: Synthetic oligonucleotide
  Sense strand starting at position 2329 of SEQ ID NO: 1882306
gggcuaacgcuugauccga

SEQ ID NO: 2110695 - RNA, 19 nt, Artificial Sequence
  Description of Artificial Sequence: Synthetic oligonucleotide
  Antisense strand to SEQ ID NO: 2110694
ucggaucaagcguuagccc

SEQ ID NO: 2110696 - RNA, 19 nt, Artificial Sequence
  Description of Artificial Sequence: Synthetic oligonucleotide
  Sense strand starting at position 2334 of SEQ ID NO: 1882306
aacgcuugauccgaggagu

SEQ ID NO: 2110697 - RNA, 19 nt, Artificial Sequence
  Description of Artificial Sequence: Synthetic oligonucleotide
  Antisense strand to SEQ ID NO: 2110696
acuccucggaucaagcguu

SEQ ID NO: 2110698 - RNA, 19 nt, Artificial Sequence
  Description of Artificial Sequence: Synthetic oligonucleotide
  Sense strand starting at position 2335 of SEQ ID NO: 1882306
acgcuugauccgaggaguu

SEQ ID NO: 2110699 - RNA, 19 nt, Artificial Sequence
  Description of Artificial Sequence: Synthetic oligonucleotide
  Antisense strand to SEQ ID NO: 2110698
aacuccucggaucaagcgu

SEQ ID NO: 2110700 - RNA, 19 nt, Artificial Sequence
  Description of Artificial Sequence: Synthetic oligonucleotide
  Sense strand starting at position 2598 of SEQ ID NO: 1882306
aagauccugugaugucaua

SEQ ID NO: 2110701 - RNA, 19 nt, Artificial Sequence
  Description of Artificial Sequence: Synthetic oligonucleotide
  Antisense strand to SEQ ID NO: 2110700
uaugacaucacaggaucuu

SEQ ID NO: 2110702 - RNA, 19 nt, Artificial Sequence
  Description of Artificial Sequence: Synthetic oligonucleotide
  Sense strand starting at position 2647 of SEQ ID NO: 1882306
cugaaagcaucacuagauu

SEQ ID NO: 2110703 - RNA, 19 nt, Artificial Sequence
  Description of Artificial Sequence: Synthetic oligonucleotide
  Antisense strand to SEQ ID NO: 2110702
aaucuagugaugcuuucag

SEQ ID NO: 2110704 - RNA, 19 nt, Artificial Sequence
  Description of Artificial Sequence: Synthetic oligonucleotide
  Sense strand starting at position 2662 of SEQ ID NO: 1882306
gauugcauucugcagcauu

SEQ ID NO: 2110705 - RNA, 19 nt, Artificial Sequence
  Description of Artificial Sequence: Synthetic oligonucleotide
  Antisense strand to SEQ ID NO: 2110704
aaugcugcagaaugcaauc

SEQ ID NO: 2110706 - RNA, 19 nt, Artificial Sequence
  Description of Artificial Sequence: Synthetic oligonucleotide
  Sense strand starting at position 2871 of SEQ ID NO: 1882306
gaagaaauccgcugaggca

SEQ ID NO: 2110707 - RNA, 19 nt, Artificial Sequence
  Description of Artificial Sequence: Synthetic oligonucleotide
  Antisense strand to SEQ ID NO: 2110706
ugccucagcggauuucuuc

SEQ ID NO: 2110708 - RNA, 19 nt, Artificial Sequence
  Description of Artificial Sequence: Synthetic oligonucleotide
  Sense strand starting at position 2901 of SEQ ID NO: 1882306
ucuccuuucugguuugauc

SEQ ID NO: 2110709 - RNA, 19 nt, Artificial Sequence
  Description of Artificial Sequence: Synthetic oligonucleotide
  Antisense strand to SEQ ID NO: 2110708
gaucaaaccagaaaggaga

SEQ ID NO: 2110710 - RNA, 19 nt, Artificial Sequence
  Description of Artificial Sequence: Synthetic oligonucleotide
  Sense strand starting at position 3064 of SEQ ID NO: 1882306
caaacagucuccuagacgu

SEQ ID NO: 2110711 - RNA, 19 nt, Artificial Sequence
  Description of Artificial Sequence: Synthetic oligonucleotide
  Antisense strand to SEQ ID NO: 2110710
acgucuaggagacuguuug

SEQ ID NO: 2110712 - RNA, 19 nt, Artificial Sequence
  Description of Artificial Sequence: Synthetic oligonucleotide
  Sense strand starting at position 3078 of SEQ ID NO: 1882306
gacguagggcuacauugau

SEQ ID NO: 2110713 - RNA, 19 nt, Artificial Sequence
  Description of Artificial Sequence: Synthetic oligonucleotide
  Antisense strand to SEQ ID NO: 2110712
aucaauguagcccuacguc

SEQ ID NO: 2110714 - RNA, 19 nt, Artificial Sequence
  Description of Artificial Sequence: Synthetic oligonucleotide
  Sense strand starting at position 3090 of SEQ ID NO: 1882306
cauugauggaccggauugu

SEQ ID NO: 2110715 - RNA, 19 nt, Artificial Sequence
  Description of Artificial Sequence: Synthetic oligonucleotide
  Antisense strand to SEQ ID NO: 2110714
acaauccgguccaucaaug

SEQ ID NO: 2110716 - RNA, 19 nt, Artificial Sequence
  Description of Artificial Sequence: Synthetic oligonucleotide
  Sense strand starting at position 3091 of SEQ ID NO: 1882306
auugauggaccggauugua

SEQ ID NO: 2110717 - RNA, 19 nt, Artificial Sequence
  Description of Artificial Sequence: Synthetic oligonucleotide
  Antisense strand to SEQ ID NO: 2110716
uacaauccgguccaucaau

SEQ ID NO: 2110718 - RNA, 19 nt, Artificial Sequence
  Description of Artificial Sequence: Synthetic oligonucleotide
  Sense strand starting at position 3497 of SEQ ID NO: 1882306
acguuugggaguugagauc

SEQ ID NO: 2110719 - RNA, 19 nt, Artificial Sequence
  Description of Artificial Sequence: Synthetic oligonucleotide
  Antisense strand to SEQ ID NO: 2110718
gaucucaacucccaaacgu

SEQ ID NO: 2110720 - RNA, 19 nt, Artificial Sequence
  Description of Artificial Sequence: Synthetic oligonucleotide
  Sense strand starting at position 3508 of SEQ ID NO: 1882306
uugagaucccuccgcagga

SEQ ID NO: 2110721 - RNA, 19 nt, Artificial Sequence
  Description of Artificial Sequence: Synthetic oligonucleotide
  Antisense strand to SEQ ID NO: 2110720
uccugcggagggaucucaa

SEQ ID NO: 2110722 - RNA, 19 nt, Artificial Sequence
  Description of Artificial Sequence: Synthetic oligonucleotide
  Sense strand starting at position 3509 of SEQ ID NO: 1882306
ugagaucccuccgcaggaa

SEQ ID NO: 2110723 - RNA, 19 nt, Artificial Sequence
  Description of Artificial Sequence: Synthetic oligonucleotide
  Antisense strand to SEQ ID NO: 2110722
uuccugcggagggaucuca

SEQ ID NO: 2110724 - RNA, 19 nt, Artificial Sequence
  Description of Artificial Sequence: Synthetic oligonucleotide
  Sense strand starting at position 3510 of SEQ ID NO: 1882306
gagaucccuccgcaggaau

SEQ ID NO: 2110725 - RNA, 19 nt, Artificial Sequence
  Description of Artificial Sequence: Synthetic oligonucleotide
  Antisense strand to SEQ ID NO: 2110724
auuccugcggagggaucuc

SEQ ID NO: 2110726 - RNA, 19 nt, Artificial Sequence
  Description of Artificial Sequence: Synthetic oligonucleotide
  Sense strand starting at position 3545 of SEQ ID NO: 1882306
aucagagcucccuauagca

SEQ ID NO: 2110727 - RNA, 19 nt, Artificial Sequence
  Description of Artificial Sequence: Synthetic oligonucleotide
  Antisense strand to SEQ ID NO: 2110726
ugcuauagggagcucugau

SEQ ID NO: 2110728 - RNA, 19 nt, Artificial Sequence
  Description of Artificial Sequence: Synthetic oligonucleotide
  Sense strand starting at position 3633 of SEQ ID NO: 1882306
gugggagugagcugauuag

SEQ ID NO: 2110729 - RNA, 19 nt, Artificial Sequence
  Description of Artificial Sequence: Synthetic oligonucleotide
  Antisense strand to SEQ ID NO: 2110728
cuaaucagcucacucccac

SEQ ID NO: 2110730 - RNA, 19 nt, Artificial Sequence
  Description of Artificial Sequence: Synthetic oligonucleotide
  Sense strand starting at position 3665 of SEQ ID NO: 1882306
cccagaucugcguggacuu

SEQ ID NO: 2110731 - RNA, 19 nt, Artificial Sequence
  Description of Artificial Sequence: Synthetic oligonucleotide
  Antisense strand to SEQ ID NO: 2110730
aaguccacgcagaucuggg

SEQ ID NO: 2110732 - RNA, 19 nt, Artificial Sequence
  Description of Artificial Sequence: Synthetic oligonucleotide
  Sense strand starting at position 3789 of SEQ ID NO: 1882306
gugcauugguguggacaca

SEQ ID NO: 2110733 - RNA, 19 nt, Artificial Sequence
  Description of Artificial Sequence: Synthetic oligonucleotide
  Antisense strand to SEQ ID NO: 2110732
uguguccacaccaaugcac

SEQ ID NO: 2110734 - RNA, 19 nt, Artificial Sequence
  Description of Artificial Sequence: Synthetic oligonucleotide
  Sense strand starting at position 3896 of SEQ ID NO: 1882306
gcuccuugcugaugaggga

SEQ ID NO: 2110735 - RNA, 19 nt, Artificial Sequence
  Description of Artificial Sequence: Synthetic oligonucleotide
  Antisense strand to SEQ ID NO: 2110734
ucccucaucagcaaggagc

SEQ ID NO: 2110736 - RNA, 19 nt, Artificial Sequence
  Description of Artificial Sequence: Synthetic oligonucleotide
  Sense strand starting at position 3926 of SEQ ID NO: 1882306
gacguuuacuucuuccaug

SEQ ID NO: 2110737 - RNA, 19 nt, Artificial Sequence
  Description of Artificial Sequence: Synthetic oligonucleotide
  Antisense strand to SEQ ID NO: 2110736
cauggaagaaguaaacguc

SEQ ID NO: 2110738 - RNA, 19 nt, Artificial Sequence
  Description of Artificial Sequence: Synthetic oligonucleotide
  Sense strand starting at position 3929 of SEQ ID NO: 1882306
guuuacuucuuccaugcuu

SEQ ID NO: 2110739 - RNA, 19 nt, Artificial Sequence
  Description of Artificial Sequence: Synthetic oligonucleotide
  Antisense strand to SEQ ID NO: 2110738
aagcauggaagaaguaaac

SEQ ID NO: 2110740 - RNA, 19 nt, Artificial Sequence
  Description of Artificial Sequence: Synthetic oligonucleotide
  Sense strand starting at position 3967 of SEQ ID NO: 1882306
agggcugcgucaugugaaa

SEQ ID NO: 2110741 - RNA, 19 nt, Artificial Sequence
  Description of Artificial Sequence: Synthetic oligonucleotide
  Antisense strand to SEQ ID NO: 2110740
uuucacaugacgcagcccu

SEQ ID NO: 2110742 - RNA, 19 nt, Artificial Sequence
  Description of Artificial Sequence: Synthetic oligonucleotide
  Sense strand starting at position 3969 of SEQ ID NO: 1882306
ggcugcgucaugugaaauc

SEQ ID NO: 2110743 - RNA, 19 nt, Artificial Sequence
  Description of Artificial Sequence: Synthetic oligonucleotide
  Antisense strand to SEQ ID NO: 2110742
gauuucacaugacgcagcc

SEQ ID NO: 2110744 - RNA, 19 nt, Artificial Sequence
  Description of Artificial Sequence: Synthetic oligonucleotide
  Sense strand starting at position 337 of SEQ ID NO: 1882307
uggagcucuugguuccaaa

SEQ ID NO: 2110745 - RNA, 19 nt, Artificial Sequence
  Description of Artificial Sequence: Synthetic oligonucleotide
  Antisense strand to SEQ ID NO: 2110744
uuuggaaccaagagcucca

SEQ ID NO: 2110746 - RNA, 19 nt, Artificial Sequence
  Description of Artificial Sequence: Synthetic oligonucleotide
  Sense strand starting at position 385 of SEQ ID NO: 1882307
ccuggacucuuagccagaa

SEQ ID NO: 2110747 - RNA, 19 nt, Artificial Sequence
  Description of Artificial Sequence: Synthetic oligonucleotide
  Antisense strand to SEQ ID NO: 2110746
uucuggcuaagaguccagg

SEQ ID NO: 2110748 - RNA, 19 nt, Artificial Sequence
  Description of Artificial Sequence: Synthetic oligonucleotide
  Sense strand starting at position 386 of SEQ ID NO: 1882307
cuggacucuuagccagaaa

SEQ ID NO: 2110749 - RNA, 19 nt, Artificial Sequence
  Description of Artificial Sequence: Synthetic oligonucleotide
  Antisense strand to SEQ ID NO: 2110748
uuucuggcuaagaguccag

SEQ ID NO: 2110750 - RNA, 19 nt, Artificial Sequence
  Description of Artificial Sequence: Synthetic oligonucleotide
  Sense strand starting at position 397 of SEQ ID NO: 1882307
gccagaaagccuuggaaug

SEQ ID NO: 2110751 - RNA, 19 nt, Artificial Sequence
  Description of Artificial Sequence: Synthetic oligonucleotide
  Antisense strand to SEQ ID NO: 2110750
cauuccaaggcuuucuggc

SEQ ID NO: 2110752 - RNA, 19 nt, Artificial Sequence
  Description of Artificial Sequence: Synthetic oligonucleotide
  Sense strand starting at position 409 of SEQ ID NO: 1882307
uggaaugguccugagagca

SEQ ID NO: 2110753 - RNA, 19 nt, Artificial Sequence
  Description of Artificial Sequence: Synthetic oligonucleotide
  Antisense strand to SEQ ID NO: 2110752
ugcucucaggaccauucca

SEQ ID NO: 2110754 - RNA, 19 nt, Artificial Sequence
  Description of Artificial Sequence: Synthetic oligonucleotide
  Sense strand starting at position 442 of SEQ ID NO: 1882307
cugagauucuccuucucag

SEQ ID NO: 2110755 - RNA, 19 nt, Artificial Sequence
  Description of Artificial Sequence: Synthetic oligonucleotide
  Antisense strand to SEQ ID NO: 2110754
cugagaaggagaaucucag

SEQ ID NO: 2110756 - RNA, 19 nt, Artificial Sequence
  Description of Artificial Sequence: Synthetic oligonucleotide
  Sense strand starting at position 544 of SEQ ID NO: 1882307
gguuauucugagggugaaa

SEQ ID NO: 2110757 - RNA, 19 nt, Artificial Sequence
  Description of Artificial Sequence: Synthetic oligonucleotide
  Antisense strand to SEQ ID NO: 2110756
uuucacccucagaauaacc

SEQ ID NO: 2110758 - RNA, 19 nt, Artificial Sequence
  Description of Artificial Sequence: Synthetic oligonucleotide
  Sense strand starting at position 546 of SEQ ID NO: 1882307
uuauucugagggugaaaug

SEQ ID NO: 2110759 - RNA, 19 nt, Artificial Sequence
  Description of Artificial Sequence: Synthetic oligonucleotide
  Antisense strand to SEQ ID NO: 2110758
cauuucacccucagaauaa

SEQ ID NO: 2110760 - RNA, 19 nt, Artificial Sequence
  Description of Artificial Sequence: Synthetic oligonucleotide
  Sense strand starting at position 584 of SEQ ID NO: 1882307
guacaaguccaguagcaaa

SEQ ID NO: 2110761 - RNA, 19 nt, Artificial Sequence
  Description of Artificial Sequence: Synthetic oligonucleotide
  Antisense strand to SEQ ID NO: 2110760
uuugcuacuggacuuguac

SEQ ID NO: 2110762 - RNA, 19 nt, Artificial Sequence
  Description of Artificial Sequence: Synthetic oligonucleotide
  Sense strand starting at position 834 of SEQ ID NO: 1882307
ccguuacauguauauucca

SEQ ID NO: 2110763 - RNA, 19 nt, Artificial Sequence
  Description of Artificial Sequence: Synthetic oligonucleotide
  Antisense strand to SEQ ID NO: 2110762
uggaauauacauguaacgg

SEQ ID NO: 2110764 - RNA, 19 nt, Artificial Sequence
  Description of Artificial Sequence: Synthetic oligonucleotide
  Sense strand starting at position 933 of SEQ ID NO: 1882307
ggaagugcaugucugagaa

SEQ ID NO: 2110765 - RNA, 19 nt, Artificial Sequence
  Description of Artificial Sequence: Synthetic oligonucleotide
  Antisense strand to SEQ ID NO: 2110764
uucucagacaugcacuucc

SEQ ID NO: 2110766 - RNA, 19 nt, Artificial Sequence
  Description of Artificial Sequence: Synthetic oligonucleotide
  Sense strand starting at position 1145 of SEQ ID NO: 1882307
agaaaucugcuguacaaug

SEQ ID NO: 2110767 - RNA, 19 nt, Artificial Sequence
  Description of Artificial Sequence: Synthetic oligonucleotide
  Antisense strand to SEQ ID NO: 2110766
cauuguacagcagauuucu

SEQ ID NO: 2110768 - RNA, 19 nt, Artificial Sequence
  Description of Artificial Sequence: Synthetic oligonucleotide
  Sense strand starting at position 1178 of SEQ ID NO: 1882307
uguaguuaacaauagcuua

SEQ ID NO: 2110769 - RNA, 19 nt, Artificial Sequence
  Description of Artificial Sequence: Synthetic oligonucleotide
  Antisense strand to SEQ ID NO: 2110768
uaagcuauuguuaacuaca

SEQ ID NO: 2110770 - RNA, 19 nt, Artificial Sequence
  Description of Artificial Sequence: Synthetic oligonucleotide
  Sense strand starting at position 1345 of SEQ ID NO: 1882307
cgggcuauaccugacacua

SEQ ID NO: 2110771 - RNA, 19 nt, Artificial Sequence
  Description of Artificial Sequence: Synthetic oligonucleotide
  Antisense strand to SEQ ID NO: 2110770
uagugucagguauagcccg

SEQ ID NO: 2110772 - RNA, 19 nt, Artificial Sequence
  Description of Artificial Sequence: Synthetic oligonucleotide
  Sense strand starting at position 1436 of SEQ ID NO: 1882307
agaaucaaagccugugauu

SEQ ID NO: 2110773 - RNA, 19 nt, Artificial Sequence
  Description of Artificial Sequence: Synthetic oligonucleotide
  Antisense strand to SEQ ID NO: 2110772
aaucacaggcuuugauucu

SEQ ID NO: 2110774 - RNA, 19 nt, Artificial Sequence
  Description of Artificial Sequence: Synthetic oligonucleotide
  Sense strand starting at position 1449 of SEQ ID NO: 1882307
gugauuauuggucaagcaa

SEQ ID NO: 2110775 - RNA, 19 nt, Artificial Sequence
  Description of Artificial Sequence: Synthetic oligonucleotide
  Antisense strand to SEQ ID NO: 2110774
uugcuugaccaauaaucac

SEQ ID NO: 2110776 - RNA, 19 nt, Artificial Sequence
  Description of Artificial Sequence: Synthetic oligonucleotide
  Sense strand starting at position 1607 of SEQ ID NO: 1882307
uguagagggaucugcucau

SEQ ID NO: 2110777 - RNA, 19 nt, Artificial Sequence
  Description of Artificial Sequence: Synthetic oligonucleotide
  Antisense strand to SEQ ID NO: 2110776
augagcagaucccucuaca

SEQ ID NO: 2110778 - RNA, 19 nt, Artificial Sequence
  Description of Artificial Sequence: Synthetic oligonucleotide
  Sense strand starting at position 1752 of SEQ ID NO: 1882307
caugacugcucacugggaa

SEQ ID NO: 2110779 - RNA, 19 nt, Artificial Sequence
  Description of Artificial Sequence: Synthetic oligonucleotide
  Antisense strand to SEQ ID NO: 2110778
uucccagugagcagucaug

SEQ ID NO: 2110780 - RNA, 19 nt, Artificial Sequence
  Description of Artificial Sequence: Synthetic oligonucleotide
  Sense strand starting at position 2059 of SEQ ID NO: 1882307
aggguucuugaaugaaggu

SEQ ID NO: 2110781 - RNA, 19 nt, Artificial Sequence
  Description of Artificial Sequence: Synthetic oligonucleotide
  Antisense strand to SEQ ID NO: 2110780
accuucauucaagaacccu

SEQ ID NO: 2110782 - RNA, 19 nt, Artificial Sequence
  Description of Artificial Sequence: Synthetic oligonucleotide
  Sense strand starting at position 2060 of SEQ ID NO: 1882307
ggguucuugaaugaagguu

SEQ ID NO: 2110783 - RNA, 19 nt, Artificial Sequence
  Description of Artificial Sequence: Synthetic oligonucleotide
  Antisense strand to SEQ ID NO: 2110782
aaccuucauucaagaaccc

SEQ ID NO: 2110784 - RNA, 19 nt, Artificial Sequence
  Description of Artificial Sequence: Synthetic oligonucleotide
  Sense strand starting at position 2088 of SEQ ID NO: 1882307
auuucuuacugcuugaagu

SEQ ID NO: 2110785 - RNA, 19 nt, Artificial Sequence
  Description of Artificial Sequence: Synthetic oligonucleotide
  Antisense strand to SEQ ID NO: 2110784
acuucaagcaguaagaaau

SEQ ID NO: 2110786 - RNA, 19 nt, Artificial Sequence
  Description of Artificial Sequence: Synthetic oligonucleotide
  Sense strand starting at position 2167 of SEQ ID NO: 1882307
guggacuguaccugagaga

SEQ ID NO: 2110787 - RNA, 19 nt, Artificial Sequence
  Description of Artificial Sequence: Synthetic oligonucleotide
  Antisense strand to SEQ ID NO: 2110786
ucucucagguacaguccac

SEQ ID NO: 2110788 - RNA, 19 nt, Artificial Sequence
  Description of Artificial Sequence: Synthetic oligonucleotide
  Sense strand starting at position 2275 of SEQ ID NO: 1882307
cugugauuugcugggagug

SEQ ID NO: 2110789 - RNA, 19 nt, Artificial Sequence
  Description of Artificial Sequence: Synthetic oligonucleotide
  Antisense strand to SEQ ID NO: 2110788
cacucccagcaaaucacag

SEQ ID NO: 2110790 - RNA, 19 nt, Artificial Sequence
  Description of Artificial Sequence: Synthetic oligonucleotide
  Sense strand starting at position 2294 of SEQ ID NO: 1882307
gggaccaucuucuuaugca

SEQ ID NO: 2110791 - RNA, 19 nt, Artificial Sequence
  Description of Artificial Sequence: Synthetic oligonucleotide
  Antisense strand to SEQ ID NO: 2110790
ugcauaagaagaugguccc

SEQ ID NO: 2110792 - RNA, 19 nt, Artificial Sequence
  Description of Artificial Sequence: Synthetic oligonucleotide
  Sense strand starting at position 2512 of SEQ ID NO: 1882307
aggugacucccagggaauu

SEQ ID NO: 2110793 - RNA, 19 nt, Artificial Sequence
  Description of Artificial Sequence: Synthetic oligonucleotide
  Antisense strand to SEQ ID NO: 2110792
aauucccugggagucaccu

SEQ ID NO: 2110794 - RNA, 19 nt, Artificial Sequence
  Description of Artificial Sequence: Synthetic oligonucleotide
  Sense strand starting at position 2540 of SEQ ID NO: 1882307
ugcuuaugucguuuauguc

SEQ ID NO: 2110795 - RNA, 19 nt, Artificial Sequence
  Description of Artificial Sequence: Synthetic oligonucleotide
  Antisense strand to SEQ ID NO: 2110794
gacauaaacgacauaagca

SEQ ID NO: 2110796 - RNA, 19 nt, Artificial Sequence
  Description of Artificial Sequence: Synthetic oligonucleotide
  Sense strand starting at position 2561 of SEQ ID NO: 1882307
aaguuauaucaagggcucu

SEQ ID NO: 2110797 - RNA, 19 nt, Artificial Sequence
  Description of Artificial Sequence: Synthetic oligonucleotide
  Antisense strand to SEQ ID NO: 2110796
agagcccuugauauaacuu

SEQ ID NO: 2110798 - RNA, 19 nt, Artificial Sequence
  Description of Artificial Sequence: Synthetic oligonucleotide
  Sense strand starting at position 2679 of SEQ ID NO: 1882307
agucuaagcccugacucau

SEQ ID NO: 2110799 - RNA, 19 nt, Artificial Sequence
  Description of Artificial Sequence: Synthetic oligonucleotide
  Antisense strand to SEQ ID NO: 2110798
augagucagggcuuagacu

SEQ ID NO: 2110800 - RNA, 19 nt, Artificial Sequence
  Description of Artificial Sequence: Synthetic oligonucleotide
  Sense strand starting at position 2845 of SEQ ID NO: 1882307
cuggaugaacucugauauu

SEQ ID NO: 2110801 - RNA, 19 nt, Artificial Sequence
  Description of Artificial Sequence: Synthetic oligonucleotide
  Antisense strand to SEQ ID NO: 2110800
aauaucagaguucauccag

SEQ ID NO: 2110802 - RNA, 19 nt, Artificial Sequence
  Description of Artificial Sequence: Synthetic oligonucleotide
  Sense strand starting at position 2892 of SEQ ID NO: 1882307
auugguacuccuuagcaca

SEQ ID NO: 2110803 - RNA, 19 nt, Artificial Sequence
  Description of Artificial Sequence: Synthetic oligonucleotide
  Antisense strand to SEQ ID NO: 2110802
ugugcuaaggaguaccaau

SEQ ID NO: 2110804 - RNA, 19 nt, Artificial Sequence
  Description of Artificial Sequence: Synthetic oligonucleotide
  Sense strand starting at position 2894 of SEQ ID NO: 1882307
ugguacuccuuagcacaaa

SEQ ID NO: 2110805 - RNA, 19 nt, Artificial Sequence
  Description of Artificial Sequence: Synthetic oligonucleotide
  Antisense strand to SEQ ID NO: 2110804
uuugugcuaaggaguacca

SEQ ID NO: 2110806 - RNA, 19 nt, Artificial Sequence
  Description of Artificial Sequence: Synthetic oligonucleotide
  Sense strand starting at position 2954 of SEQ ID NO: 1882307
cuggauggccucugaaaua

SEQ ID NO: 2110807 - RNA, 19 nt, Artificial Sequence
  Description of Artificial Sequence: Synthetic oligonucleotide
  Antisense strand to SEQ ID NO: 2110806
uauuucagaggccauccag

SEQ ID NO: 2110808 - RNA, 19 nt, Artificial Sequence
  Description of Artificial Sequence: Synthetic oligonucleotide
  Sense strand starting at position 3042 of SEQ ID NO: 1882307
uuacaaugugcucagugau

SEQ ID NO: 2110809 - RNA, 19 nt, Artificial Sequence
  Description of Artificial Sequence: Synthetic oligonucleotide
  Antisense strand to SEQ ID NO: 2110808
aucacugagcacauuguaa

SEQ ID NO: 2110810 - RNA, 19 nt, Artificial Sequence
  Description of Artificial Sequence: Synthetic oligonucleotide
  Sense strand starting at position 3052 of SEQ ID NO: 1882307
cucagugaugcauauaauu

SEQ ID NO: 2110811 - RNA, 19 nt, Artificial Sequence
  Description of Artificial Sequence: Synthetic oligonucleotide
  Antisense strand to SEQ ID NO: 2110810
aauuauaugcaucacugag

SEQ ID NO: 2110812 - RNA, 19 nt, Artificial Sequence
  Description of Artificial Sequence: Synthetic oligonucleotide
  Sense strand starting at position 3108 of SEQ ID NO: 1882307
gucuguguuaugcauuuaa

SEQ ID NO: 2110813 - RNA, 19 nt, Artificial Sequence
  Description of Artificial Sequence: Synthetic oligonucleotide
  Antisense strand to SEQ ID NO: 2110812
uuaaaugcauaacacagac

SEQ ID NO: 2110814 - RNA, 19 nt, Artificial Sequence
  Description of Artificial Sequence: Synthetic oligonucleotide
  Sense strand starting at position 3142 of SEQ ID NO: 1882307
acaguuuaucaguauacca

SEQ ID NO: 2110815 - RNA, 19 nt, Artificial Sequence
  Description of Artificial Sequence: Synthetic oligonucleotide
  Antisense strand to SEQ ID NO: 2110814
ugguauacugauaaacugu

SEQ ID NO: 2110816 - RNA, 19 nt, Artificial Sequence
  Description of Artificial Sequence: Synthetic oligonucleotide
  Sense strand starting at position 3374 of SEQ ID NO: 1882307
cgaaacuccaaaggaguuu

SEQ ID NO: 2110817 - RNA, 19 nt, Artificial Sequence
  Description of Artificial Sequence: Synthetic oligonucleotide
  Antisense strand to SEQ ID NO: 2110816
aaacuccuuuggaguuucg

SEQ ID NO: 2110818 - RNA, 19 nt, Artificial Sequence
  Description of Artificial Sequence: Synthetic oligonucleotide
  Sense strand starting at position 3404 of SEQ ID NO: 1882307
ccuccuugguccucagaaa

SEQ ID NO: 2110819 - RNA, 19 nt, Artificial Sequence
  Description of Artificial Sequence: Synthetic oligonucleotide
  Antisense strand to SEQ ID NO: 2110818
uuucugaggaccaaggagg

SEQ ID NO: 2110820 - RNA, 19 nt, Artificial Sequence
  Description of Artificial Sequence: Synthetic oligonucleotide
  Sense strand starting at position 3835 of SEQ ID NO: 1882307
aauucuucuggcuguaaga

SEQ ID NO: 2110821 - RNA, 19 nt, Artificial Sequence
  Description of Artificial Sequence: Synthetic oligonucleotide
  Antisense strand to SEQ ID NO: 2110820
ucuuacagccagaagaauu

SEQ ID NO: 2110822 - RNA, 19 nt, Artificial Sequence
  Description of Artificial Sequence: Synthetic oligonucleotide
  Sense strand starting at position 3917 of SEQ ID NO: 1882307
gucacagguaccugguaaa

SEQ ID NO: 2110823 - RNA, 19 nt, Artificial Sequence
  Description of Artificial Sequence: Synthetic oligonucleotide
  Antisense strand to SEQ ID NO: 2110822
uuuaccagguaccugugac

SEQ ID NO: 2110824 - RNA, 19 nt, Artificial Sequence
  Description of Artificial Sequence: Synthetic oligonucleotide
  Sense strand starting at position 31 of SEQ ID NO: 1882308
ucuuaugguuaauccaagu

SEQ ID NO: 2110825 - RNA, 19 nt, Artificial Sequence
  Description of Artificial Sequence: Synthetic oligonucleotide
  Antisense strand to SEQ ID NO: 2110824
acuuggauuaaccauaaga

SEQ ID NO: 2110826 - RNA, 19 nt, Artificial Sequence
  Description of Artificial Sequence: Synthetic oligonucleotide
  Sense strand starting at position 37 of SEQ ID NO: 1882308
gguuaauccaagugaauug

SEQ ID NO: 2110827 - RNA, 19 nt, Artificial Sequence
  Description of Artificial Sequence: Synthetic oligonucleotide
  Antisense strand to SEQ ID NO: 2110826
caauucacuuggauuaacc

SEQ ID NO: 2110828 - RNA, 19 nt, Artificial Sequence
  Description of Artificial Sequence: Synthetic oligonucleotide
  Sense strand starting at position 64 of SEQ ID NO: 1882308
cuccaugguaaggguuaua

SEQ ID NO: 2110829 - RNA, 19 nt, Artificial Sequence
  Description of Artificial Sequence: Synthetic oligonucleotide
  Antisense strand to SEQ ID NO: 2110828
uauaacccuuaccauggag

SEQ ID NO: 2110830 - RNA, 19 nt, Artificial Sequence
  Description of Artificial Sequence: Synthetic oligonucleotide
  Sense strand starting at position 368 of SEQ ID NO: 1882308
ucauguacuuaguuuacua

SEQ ID NO: 2110831 - RNA, 19 nt, Artificial Sequence
  Description of Artificial Sequence: Synthetic oligonucleotide
  Antisense strand to SEQ ID NO: 2110830
uaguaaacuaaguacauga

SEQ ID NO: 2110832 - RNA, 19 nt, Artificial Sequence
  Description of Artificial Sequence: Synthetic oligonucleotide
  Sense strand starting at position 378 of SEQ ID NO: 1882308
aguuuacuaucagucacua

SEQ ID NO: 2110833 - RNA, 19 nt, Artificial Sequence
  Description of Artificial Sequence: Synthetic oligonucleotide
  Antisense strand to SEQ ID NO: 2110832
uagugacugauaguaaacu

SEQ ID NO: 2110834 - RNA, 19 nt, Artificial Sequence
  Description of Artificial Sequence: Synthetic oligonucleotide
  Sense strand starting at position 499 of SEQ ID NO: 1882308
uuggauaggccuuaguuua

SEQ ID NO: 2110835 - RNA, 19 nt, Artificial Sequence
  Description of Artificial Sequence: Synthetic oligonucleotide
  Antisense strand to SEQ ID NO: 2110834
uaaacuaaggccuauccaa

SEQ ID NO: 2110836 - RNA, 19 nt, Artificial Sequence
  Description of Artificial Sequence: Synthetic oligonucleotide
  Sense strand starting at position 934 of SEQ ID NO: 1882308
ucuucuaugcuauagugaa

SEQ ID NO: 2110837 - RNA, 19 nt, Artificial Sequence
  Description of Artificial Sequence: Synthetic oligonucleotide
  Antisense strand to SEQ ID NO: 2110836
uucacuauagcauagaaga

SEQ ID NO: 2110838 - RNA, 19 nt, Artificial Sequence
  Description of Artificial Sequence: Synthetic oligonucleotide
  Sense strand starting at position 1027 of SEQ ID NO: 1882308
augcaaagaguccauucua

SEQ ID NO: 2110839 - RNA, 19 nt, Artificial Sequence
  Description of Artificial Sequence: Synthetic oligonucleotide
  Antisense strand to SEQ ID NO: 2110838
uagaauggacucuuugcau

SEQ ID NO: 2110840 - RNA, 19 nt, Artificial Sequence
  Description of Artificial Sequence: Synthetic oligonucleotide
  Sense strand starting at position 1073 of SEQ ID NO: 1882308
acagacuuucuacaguagu

SEQ ID NO: 2110841 - RNA, 19 nt, Artificial Sequence
  Description of Artificial Sequence: Synthetic oligonucleotide
  Antisense strand to SEQ ID NO: 2110840
acuacuguagaaagucugu

SEQ ID NO: 2110842 - RNA, 19 nt, Artificial Sequence
  Description of Artificial Sequence: Synthetic oligonucleotide
  Sense strand starting at position 1107 of SEQ ID NO: 1882308
gaagucuuacguuacaaau

SEQ ID NO: 2110843 - RNA, 19 nt, Artificial Sequence
  Description of Artificial Sequence: Synthetic oligonucleotide
  Antisense strand to SEQ ID NO: 2110842
auuuguaacguaagacuuc

SEQ ID NO: 2110844 - RNA, 19 nt, Artificial Sequence
  Description of Artificial Sequence: Synthetic oligonucleotide
  Sense strand starting at position 1192 of SEQ ID NO: 1882308
uuaccagaucacugucaga

SEQ ID NO: 2110845 - RNA, 19 nt, Artificial Sequence
  Description of Artificial Sequence: Synthetic oligonucleotide
  Antisense strand to SEQ ID NO: 2110844
ucugacagugaucugguaa

SEQ ID NO: 2110846 - RNA, 19 nt, Artificial Sequence
  Description of Artificial Sequence: Synthetic oligonucleotide
  Sense strand starting at position 1440 of SEQ ID NO: 1882308
acaguaacuccuugaggcu

SEQ ID NO: 2110847 - RNA, 19 nt, Artificial Sequence
  Description of Artificial Sequence: Synthetic oligonucleotide
  Antisense strand to SEQ ID NO: 2110846
agccucaaggaguuacugu

SEQ ID NO: 2110848 - RNA, 19 nt, Artificial Sequence
  Description of Artificial Sequence: Synthetic oligonucleotide
  Sense strand starting at position 1441 of SEQ ID NO: 1882308
caguaacuccuugaggcua

SEQ ID NO: 2110849 - RNA, 19 nt, Artificial Sequence
  Description of Artificial Sequence: Synthetic oligonucleotide
  Antisense strand to SEQ ID NO: 2110848
uagccucaaggaguuacug

SEQ ID NO: 2110850 - RNA, 19 nt, Artificial Sequence
  Description of Artificial Sequence: Synthetic oligonucleotide
  Sense strand starting at position 1497 of SEQ ID NO: 1882308
uaccacagugacugguaau

SEQ ID NO: 2110851 - RNA, 19 nt, Artificial Sequence
  Description of Artificial Sequence: Synthetic oligonucleotide
  Antisense strand to SEQ ID NO: 2110850
auuaccagucacuguggua

SEQ ID NO: 2110852 - RNA, 19 nt, Artificial Sequence
  Description of Artificial Sequence: Synthetic oligonucleotide
  Sense strand starting at position 1595 of SEQ ID NO: 1882308
uuuauagaauccuugcaag

SEQ ID NO: 2110853 - RNA, 19 nt, Artificial Sequence
  Description of Artificial Sequence: Synthetic oligonucleotide
  Antisense strand to SEQ ID NO: 2110852
cuugcaaggauucuauaaa

SEQ ID NO: 2110854 - RNA, 19 nt, Artificial Sequence
  Description of Artificial Sequence: Synthetic oligonucleotide
  Sense strand starting at position 1686 of SEQ ID NO: 1882308
ugaugauauugucucucca

SEQ ID NO: 2110855 - RNA, 19 nt, Artificial Sequence
  Description of Artificial Sequence: Synthetic oligonucleotide
  Antisense strand to SEQ ID NO: 2110854
uggagagacaauaucauca

SEQ ID NO: 2110856 - RNA, 19 nt, Artificial Sequence
  Description of Artificial Sequence: Synthetic oligonucleotide
  Sense strand starting at position 1996 of SEQ ID NO: 1882308
augaaaugagagugaugcu

SEQ ID NO: 2110857 - RNA, 19 nt, Artificial Sequence
  Description of Artificial Sequence: Synthetic oligonucleotide
  Antisense strand to SEQ ID NO: 2110856
agcaucacucucauuucau

SEQ ID NO: 2110858 - RNA, 19 nt, Artificial Sequence
  Description of Artificial Sequence: Synthetic oligonucleotide
  Sense strand starting at position 2010 of SEQ ID NO: 1882308
augcuaagagucugacaua

SEQ ID NO: 2110859 - RNA, 19 nt, Artificial Sequence
  Description of Artificial Sequence: Synthetic oligonucleotide
  Antisense strand to SEQ ID NO: 2110858
uaugucagacucuuagcau

SEQ ID NO: 2110860 - RNA, 19 nt, Artificial Sequence
  Description of Artificial Sequence: Synthetic oligonucleotide
  Sense strand starting at position 2250 of SEQ ID NO: 1882308
cuuguaagguguccaagga

SEQ ID NO: 2110861 - RNA, 19 nt, Artificial Sequence
  Description of Artificial Sequence: Synthetic oligonucleotide
  Antisense strand to SEQ ID NO: 2110860
uccuuggacaccuuacaag

SEQ ID NO: 2110862 - RNA, 19 nt, Artificial Sequence
  Description of Artificial Sequence: Synthetic oligonucleotide
  Sense strand starting at position 2254 of SEQ ID NO: 1882308
uaagguguccaaggacaau

SEQ ID NO: 2110863 - RNA, 19 nt, Artificial Sequence
  Description of Artificial Sequence: Synthetic oligonucleotide
  Antisense strand to SEQ ID NO: 2110862
auuguccuuggacaccuua

SEQ ID NO: 2110864 - RNA, 19 nt, Artificial Sequence
  Description of Artificial Sequence: Synthetic oligonucleotide
  Sense strand starting at position 2330 of SEQ ID NO: 1882308
agcuuaggugcugaaucua

SEQ ID NO: 2110865 - RNA, 19 nt, Artificial Sequence
  Description of Artificial Sequence: Synthetic oligonucleotide
  Antisense strand to SEQ ID NO: 2110864
uagauucagcaccuaagcu

SEQ ID NO: 2110866 - RNA, 19 nt, Artificial Sequence
  Description of Artificial Sequence: Synthetic oligonucleotide
  Sense strand starting at position 2461 of SEQ ID NO: 1882308
uccagagaguacuuacagu

SEQ ID NO: 2110867 - RNA, 19 nt, Artificial Sequence
  Description of Artificial Sequence: Synthetic oligonucleotide
  Antisense strand to SEQ ID NO: 2110866
acuguaaguacucucugga

SEQ ID NO: 2110868 - RNA, 19 nt, Artificial Sequence
  Description of Artificial Sequence: Synthetic oligonucleotide
  Sense strand starting at position 2622 of SEQ ID NO: 1882308
uuaggcauaucauuauaug

SEQ ID NO: 2110869 - RNA, 19 nt, Artificial Sequence
  Description of Artificial Sequence: Synthetic oligonucleotide
  Antisense strand to SEQ ID NO: 2110868
cauauaaugauaugccuaa

SEQ ID NO: 2110870 - RNA, 19 nt, Artificial Sequence
  Description of Artificial Sequence: Synthetic oligonucleotide
  Sense strand starting at position 2756 of SEQ ID NO: 1882308
acuuuaucugguuguauga

SEQ ID NO: 2110871 - RNA, 19 nt, Artificial Sequence
  Description of Artificial Sequence: Synthetic oligonucleotide
  Antisense strand to SEQ ID NO: 2110870
ucauacaaccagauaaagu

SEQ ID NO: 2110872 - RNA, 19 nt, Artificial Sequence
  Description of Artificial Sequence: Synthetic oligonucleotide
  Sense strand starting at position 2769 of SEQ ID NO: 1882308
guaugaugaggaugaguua

SEQ ID NO: 2110873 - RNA, 19 nt, Artificial Sequence
  Description of Artificial Sequence: Synthetic oligonucleotide
  Antisense strand to SEQ ID NO: 2110872
uaacucauccucaucauac

SEQ ID NO: 2110874 - RNA, 19 nt, Artificial Sequence
  Description of Artificial Sequence: Synthetic oligonucleotide
  Sense strand starting at position 3133 of SEQ ID NO: 1882308
caauuauguugggcuauca

SEQ ID NO: 2110875 - RNA, 19 nt, Artificial Sequence
  Description of Artificial Sequence: Synthetic oligonucleotide
  Antisense strand to SEQ ID NO: 2110874
ugauagcccaacauaauug

SEQ ID NO: 2110876 - RNA, 19 nt, Artificial Sequence
  Description of Artificial Sequence: Synthetic oligonucleotide
  Sense strand starting at position 3192 of SEQ ID NO: 1882308
uuguaauggugcuuauuuc

SEQ ID NO: 2110877 - RNA, 19 nt, Artificial Sequence
  Description of Artificial Sequence: Synthetic oligonucleotide
  Antisense strand to SEQ ID NO: 2110876
gaaauaagcaccauuacaa

SEQ ID NO: 2110878 - RNA, 19 nt, Artificial Sequence
  Description of Artificial Sequence: Synthetic oligonucleotide
  Sense strand starting at position 3353 of SEQ ID NO: 1882308
agcauuugccacugacuca

SEQ ID NO: 2110879 - RNA, 19 nt, Artificial Sequence
  Description of Artificial Sequence: Synthetic oligonucleotide
  Antisense strand to SEQ ID NO: 2110878
ugagucaguggcaaaugcu

SEQ ID NO: 2110880 - RNA, 19 nt, Artificial Sequence
  Description of Artificial Sequence: Synthetic oligonucleotide
  Sense strand starting at position 3391 of SEQ ID NO: 1882308
agcgaugagcaguaaguga

SEQ ID NO: 2110881 - RNA, 19 nt, Artificial Sequence
  Description of Artificial Sequence: Synthetic oligonucleotide
  Antisense strand to SEQ ID NO: 2110880
ucacuuacugcucaucgcu

SEQ ID NO: 2110882 - RNA, 19 nt, Artificial Sequence
  Description of Artificial Sequence: Synthetic oligonucleotide
  Sense strand starting at position 3453 of SEQ ID NO: 1882308
acuaguaaacagugaaauc

SEQ ID NO: 2110883 - RNA, 19 nt, Artificial Sequence
  Description of Artificial Sequence: Synthetic oligonucleotide
  Antisense strand to SEQ ID NO: 2110882
gauuucacuguuuacuagu

SEQ ID NO: 2110884 - RNA, 19 nt, Artificial Sequence
  Description of Artificial Sequence: Synthetic oligonucleotide
  Sense strand starting at position 3564 of SEQ ID NO: 1882308
acacauacaccucguuauu

SEQ ID NO: 2110885 - RNA, 19 nt, Artificial Sequence
  Description of Artificial Sequence: Synthetic oligonucleotide
  Antisense strand to SEQ ID NO: 2110884
aauaacgagguguaugugu

SEQ ID NO: 2110886 - RNA, 19 nt, Artificial Sequence
  Description of Artificial Sequence: Synthetic oligonucleotide
  Sense strand starting at position 3617 of SEQ ID NO: 1882308
ucuuaagaucuauguagga

SEQ ID NO: 2110887 - RNA, 19 nt, Artificial Sequence
  Description of Artificial Sequence: Synthetic oligonucleotide
  Antisense strand to SEQ ID NO: 2110886
uccuacauagaucuuaaga

SEQ ID NO: 2110888 - RNA, 19 nt, Artificial Sequence
  Description of Artificial Sequence: Synthetic oligonucleotide
  Sense strand starting at position 3643 of SEQ ID NO: 1882308
guaguugccagauaggguu

SEQ ID NO: 2110889 - RNA, 19 nt, Artificial Sequence
  Description of Artificial Sequence: Synthetic oligonucleotide
  Antisense strand to SEQ ID NO: 2110888
aacccuaucuggcaacuac

SEQ ID NO: 2110890 - RNA, 19 nt, Artificial Sequence
  Description of Artificial Sequence: Synthetic oligonucleotide
  Sense strand starting at position 3651 of SEQ ID NO: 1882308
cagauaggguuauuaccaa

SEQ ID NO: 2110891 - RNA, 19 nt, Artificial Sequence
  Description of Artificial Sequence: Synthetic oligonucleotide
  Antisense strand to SEQ ID NO: 2110890
uugguaauaacccuaucug

SEQ ID NO: 2110892 - RNA, 19 nt, Artificial Sequence
  Description of Artificial Sequence: Synthetic oligonucleotide
  Sense strand starting at position 3704 of SEQ ID NO: 1882308
cacugaugacuuuguuuga

SEQ ID NO: 2110893 - RNA, 19 nt, Artificial Sequence
  Description of Artificial Sequence: Synthetic oligonucleotide
  Antisense strand to SEQ ID NO: 2110892
ucaaacaaagucaucagug

SEQ ID NO: 2110894 - RNA, 19 nt, Artificial Sequence
  Description of Artificial Sequence: Synthetic oligonucleotide
  Sense strand starting at position 3707 of SEQ ID NO: 1882308
ugaugacuuuguuugacuu

SEQ ID NO: 2110895 - RNA, 19 nt, Artificial Sequence
  Description of Artificial Sequence: Synthetic oligonucleotide
  Antisense strand to SEQ ID NO: 2110894
aagucaaacaaagucauca

SEQ ID NO: 2110896 - RNA, 19 nt, Artificial Sequence
  Description of Artificial Sequence: Synthetic oligonucleotide
  Sense strand starting at position 3708 of SEQ ID NO: 1882308
gaugacuuuguuugacuuu

SEQ ID NO: 2110897 - RNA, 19 nt, Artificial Sequence
  Description of Artificial Sequence: Synthetic oligonucleotide
  Antisense strand to SEQ ID NO: 2110896
aaagucaaacaaagucauc

SEQ ID NO: 2110898 - RNA, 19 nt, Artificial Sequence
  Description of Artificial Sequence: Synthetic oligonucleotide
  Sense strand starting at position 3820 of SEQ ID NO: 1882308
uuucuaugacauugaaaug

SEQ ID NO: 2110899 - RNA, 19 nt, Artificial Sequence
  Description of Artificial Sequence: Synthetic oligonucleotide
  Antisense strand to SEQ ID NO: 2110898
cauuucaaugucauagaaa

SEQ ID NO: 2110900 - RNA, 19 nt, Artificial Sequence
  Description of Artificial Sequence: Synthetic oligonucleotide
  Sense strand starting at position 3878 of SEQ ID NO: 1882308
uggaauucuucugcacuga

SEQ ID NO: 2110901 - RNA, 19 nt, Artificial Sequence
  Description of Artificial Sequence: Synthetic oligonucleotide
  Antisense strand to SEQ ID NO: 2110900
ucagugcagaagaauucca

SEQ ID NO: 2110902 - RNA, 19 nt, Artificial Sequence
  Description of Artificial Sequence: Synthetic oligonucleotide
  Sense strand starting at position 3882 of SEQ ID NO: 1882308
auucuucugcacugaggau

SEQ ID NO: 2110903 - RNA, 19 nt, Artificial Sequence
  Description of Artificial Sequence: Synthetic oligonucleotide
  Antisense strand to SEQ ID NO: 2110902
auccucagugcagaagaau

SEQ ID NO: 2110904 - RNA, 19 nt, Artificial Sequence
  Description of Artificial Sequence: Synthetic oligonucleotide
  Sense strand starting at position 306 of SEQ ID NO: 1882309
ugugaauaucuugagcacu

SEQ ID NO: 2110905 - RNA, 19 nt, Artificial Sequence
  Description of Artificial Sequence: Synthetic oligonucleotide
  Antisense strand to SEQ ID NO: 2110904
agugcucaagauauucaca

SEQ ID NO: 2110906 - RNA, 19 nt, Artificial Sequence
  Description of Artificial Sequence: Synthetic oligonucleotide
  Sense strand starting at position 452 of SEQ ID NO: 1882309
uuagaauagguuugguaug

SEQ ID NO: 2110907 - RNA, 19 nt, Artificial Sequence
  Description of Artificial Sequence: Synthetic oligonucleotide
  Antisense strand to SEQ ID NO: 2110906
cauaccaaaccuauucuaa

SEQ ID NO: 2110908 - RNA, 19 nt, Artificial Sequence
  Description of Artificial Sequence: Synthetic oligonucleotide
  Sense strand starting at position 454 of SEQ ID NO: 1882309
agaauagguuugguaugaa

SEQ ID NO: 2110909 - RNA, 19 nt, Artificial Sequence
  Description of Artificial Sequence: Synthetic oligonucleotide
  Antisense strand to SEQ ID NO: 2110908
uucauaccaaaccuauucu

SEQ ID NO: 2110910 - RNA, 19 nt, Artificial Sequence
  Description of Artificial Sequence: Synthetic oligonucleotide
  Sense strand starting at position 557 of SEQ ID NO: 1882309
aaagguguaaagugguaua

SEQ ID NO: 2110911 - RNA, 19 nt, Artificial Sequence
  Description of Artificial Sequence: Synthetic oligonucleotide
  Antisense strand to SEQ ID NO: 2110910
uauaccacuuuacaccuuu

SEQ ID NO: 2110912 - RNA, 19 nt, Artificial Sequence
  Description of Artificial Sequence: Synthetic oligonucleotide
  Sense strand starting at position 628 of SEQ ID NO: 1882309
uacagcucacagugugaaa

SEQ ID NO: 2110913 - RNA, 19 nt, Artificial Sequence
  Description of Artificial Sequence: Synthetic oligonucleotide
  Antisense strand to SEQ ID NO: 2110912
uuucacacugugagcugua

SEQ ID NO: 2110914 - RNA, 19 nt, Artificial Sequence
  Description of Artificial Sequence: Synthetic oligonucleotide
  Sense strand starting at position 705 of SEQ ID NO: 1882309
ucuuaugguuaauccaagu

SEQ ID NO: 2110915 - RNA, 19 nt, Artificial Sequence
  Description of Artificial Sequence: Synthetic oligonucleotide
  Antisense strand to SEQ ID NO: 2110914
acuuggauuaaccauaaga

SEQ ID NO: 2110916 - RNA, 19 nt, Artificial Sequence
  Description of Artificial Sequence: Synthetic oligonucleotide
  Sense strand starting at position 711 of SEQ ID NO: 1882309
gguuaauccaagugaauug

SEQ ID NO: 2110917 - RNA, 19 nt, Artificial Sequence
  Description of Artificial Sequence: Synthetic oligonucleotide
  Antisense strand to SEQ ID NO: 2110916
caauucacuuggauuaacc

SEQ ID NO: 2110918 - RNA, 19 nt, Artificial Sequence
  Description of Artificial Sequence: Synthetic oligonucleotide
  Sense strand starting at position 738 of SEQ ID NO: 1882309
cuccaugguaaggguuaua

SEQ ID NO: 2110919 - RNA, 19 nt, Artificial Sequence
  Description of Artificial Sequence: Synthetic oligonucleotide
  Antisense strand to SEQ ID NO: 2110918
uauaacccuuaccauggag

SEQ ID NO: 2110920 - RNA, 19 nt, Artificial Sequence
  Description of Artificial Sequence: Synthetic oligonucleotide
  Sense strand starting at position 850 of SEQ ID NO: 1882309
acccuccuuuccgcagaaa

SEQ ID NO: 2110921 - RNA, 19 nt, Artificial Sequence
  Description of Artificial Sequence: Synthetic oligonucleotide
  Antisense strand to SEQ ID NO: 2110920
uuucugcggaaaggagggu

SEQ ID NO: 2110922 - RNA, 19 nt, Artificial Sequence
  Description of Artificial Sequence: Synthetic oligonucleotide
  Sense strand starting at position 1042 of SEQ ID NO: 1882309
ucauguacuuaguuuacua

SEQ ID NO: 2110923 - RNA, 19 nt, Artificial Sequence
  Description of Artificial Sequence: Synthetic oligonucleotide
  Antisense strand to SEQ ID NO: 2110922
uaguaaacuaaguacauga

SEQ ID NO: 2110924 - RNA, 19 nt, Artificial Sequence
  Description of Artificial Sequence: Synthetic oligonucleotide
  Sense strand starting at position 1052 of SEQ ID NO: 1882309
aguuuacuaucagucacua

SEQ ID NO: 2110925 - RNA, 19 nt, Artificial Sequence
  Description of Artificial Sequence: Synthetic oligonucleotide
  Antisense strand to SEQ ID NO: 2110924
uagugacugauaguaaacu

SEQ ID NO: 2110926 - RNA, 19 nt, Artificial Sequence
  Description of Artificial Sequence: Synthetic oligonucleotide
  Sense strand starting at position 1173 of SEQ ID NO: 1882309
uuggauaggccuuaguuua

SEQ ID NO: 2110927 - RNA, 19 nt, Artificial Sequence
  Description of Artificial Sequence: Synthetic oligonucleotide
  Antisense strand to SEQ ID NO: 2110926
uaaacuaaggccuauccaa

SEQ ID NO: 2110928 - RNA, 19 nt, Artificial Sequence
  Description of Artificial Sequence: Synthetic oligonucleotide
  Sense strand starting at position 1608 of SEQ ID NO: 1882309
ucuucuaugcuauagugaa

SEQ ID NO: 2110929 - RNA, 19 nt, Artificial Sequence
  Description of Artificial Sequence: Synthetic oligonucleotide
  Antisense strand to SEQ ID NO: 2110928
uucacuauagcauagaaga

SEQ ID NO: 2110930 - RNA, 19 nt, Artificial Sequence
  Description of Artificial Sequence: Synthetic oligonucleotide
  Sense strand starting at position 1701 of SEQ ID NO: 1882309
augcaaagaguccauucua

SEQ ID NO: 2110931 - RNA, 19 nt, Artificial Sequence
  Description of Artificial Sequence: Synthetic oligonucleotide
  Antisense strand to SEQ ID NO: 2110930
uagaauggacucuuugcau

SEQ ID NO: 2110932 - RNA, 19 nt, Artificial Sequence
  Description of Artificial Sequence: Synthetic oligonucleotide
  Sense strand starting at position 1747 of SEQ ID NO: 1882309
acagacuuucuacaguagu

SEQ ID NO: 2110933 - RNA, 19 nt, Artificial Sequence
  Description of Artificial Sequence: Synthetic oligonucleotide
  Antisense strand to SEQ ID NO: 2110932
acuacuguagaaagucugu

SEQ ID NO: 2110934 - RNA, 19 nt, Artificial Sequence
  Description of Artificial Sequence: Synthetic oligonucleotide
  Sense strand starting at position 1781 of SEQ ID NO: 1882309
gaagucuuacguuacaaau

SEQ ID NO: 2110935 - RNA, 19 nt, Artificial Sequence
  Description of Artificial Sequence: Synthetic oligonucleotide
  Antisense strand to SEQ ID NO: 2110934
auuuguaacguaagacuuc

SEQ ID NO: 2110936 - RNA, 19 nt, Artificial Sequence
  Description of Artificial Sequence: Synthetic oligonucleotide
  Sense strand starting at position 1866 of SEQ ID NO: 1882309
uuaccagaucacugucaga

SEQ ID NO: 2110937 - RNA, 19 nt, Artificial Sequence
  Description of Artificial Sequence: Synthetic oligonucleotide
  Antisense strand to SEQ ID NO: 2110936
ucugacagugaucugguaa

SEQ ID NO: 2110938 - RNA, 19 nt, Artificial Sequence
  Description of Artificial Sequence: Synthetic oligonucleotide
  Sense strand starting at position 2114 of SEQ ID NO: 1882309
acaguaacuccuugaggcu

SEQ ID NO: 2110939 - RNA, 19 nt, Artificial Sequence
  Description of Artificial Sequence: Synthetic oligonucleotide
  Antisense strand to SEQ ID NO: 2110938
agccucaaggaguuacugu

SEQ ID NO: 2110940 - RNA, 19 nt, Artificial Sequence
  Description of Artificial Sequence: Synthetic oligonucleotide
  Sense strand starting at position 2115 of SEQ ID NO: 1882309
caguaacuccuugaggcua

SEQ ID NO: 2110941 - RNA, 19 nt, Artificial Sequence
  Description of Artificial Sequence: Synthetic oligonucleotide
  Antisense strand to SEQ ID NO: 2110940
uagccucaaggaguuacug

SEQ ID NO: 2110942 - RNA, 19 nt, Artificial Sequence
  Description of Artificial Sequence: Synthetic oligonucleotide
  Sense strand starting at position 2171 of SEQ ID NO: 1882309
uaccacagugacugguaau

SEQ ID NO: 2110943 - RNA, 19 nt, Artificial Sequence
  Description of Artificial Sequence: Synthetic oligonucleotide
  Antisense strand to SEQ ID NO: 2110942
auuaccagucacuguggua

SEQ ID NO: 2110944 - RNA, 19 nt, Artificial Sequence
  Description of Artificial Sequence: Synthetic oligonucleotide
  Sense strand starting at position 2248 of SEQ ID NO: 1882309
uuucgauuguaaccuguaa

SEQ ID NO: 2110945 - RNA, 19 nt, Artificial Sequence
  Description of Artificial Sequence: Synthetic oligonucleotide
  Antisense strand to SEQ ID NO: 2110944
uuacagguuacaaucgaaa

SEQ ID NO: 2110946 - RNA, 19 nt, Artificial Sequence
  Description of Artificial Sequence: Synthetic oligonucleotide
  Sense strand starting at position 2269 of SEQ ID NO: 1882309
uuuauagaauccuugcaag

SEQ ID NO: 2110947 - RNA, 19 nt, Artificial Sequence
  Description of Artificial Sequence: Synthetic oligonucleotide
  Antisense strand to SEQ ID NO: 2110946
cuugcaaggauucuauaaa

SEQ ID NO: 2110948 - RNA, 19 nt, Artificial Sequence
  Description of Artificial Sequence: Synthetic oligonucleotide
  Sense strand starting at position 2319 of SEQ ID NO: 1882309
auucuuguuugcgcuauuu

SEQ ID NO: 2110949 - RNA, 19 nt, Artificial Sequence
  Description of Artificial Sequence: Synthetic oligonucleotide
  Antisense strand to SEQ ID NO: 2110948
aaauagcgcaaacaagaau

SEQ ID NO: 2110950 - RNA, 19 nt, Artificial Sequence
  Description of Artificial Sequence: Synthetic oligonucleotide
  Sense strand starting at position 2360 of SEQ ID NO: 1882309
ugaugauauugucucucca

SEQ ID NO: 2110951 - RNA, 19 nt, Artificial Sequence
  Description of Artificial Sequence: Synthetic oligonucleotide
  Antisense strand to SEQ ID NO: 2110950
uggagagacaauaucauca

SEQ ID NO: 2110952 - RNA, 19 nt, Artificial Sequence
  Description of Artificial Sequence: Synthetic oligonucleotide
  Sense strand starting at position 2670 of SEQ ID NO: 1882309
augaaaugagagugaugcu

SEQ ID NO: 2110953 - RNA, 19 nt, Artificial Sequence
  Description of Artificial Sequence: Synthetic oligonucleotide
  Antisense strand to SEQ ID NO: 2110952
agcaucacucucauuucau

SEQ ID NO: 2110954 - RNA, 19 nt, Artificial Sequence
  Description of Artificial Sequence: Synthetic oligonucleotide
  Sense strand starting at position 2684 of SEQ ID NO: 1882309
augcuaagagucugacaua

SEQ ID NO: 2110955 - RNA, 19 nt, Artificial Sequence
  Description of Artificial Sequence: Synthetic oligonucleotide
  Antisense strand to SEQ ID NO: 2110954
uaugucagacucuuagcau

SEQ ID NO: 2110956 - RNA, 19 nt, Artificial Sequence
  Description of Artificial Sequence: Synthetic oligonucleotide
  Sense strand starting at position 2854 of SEQ ID NO: 1882309
uggugagugggucgauaag

SEQ ID NO: 2110957 - RNA, 19 nt, Artificial Sequence
  Description of Artificial Sequence: Synthetic oligonucleotide
  Antisense strand to SEQ ID NO: 2110956
cuuaucgacccacucacca

SEQ ID NO: 2110958 - RNA, 19 nt, Artificial Sequence
  Description of Artificial Sequence: Synthetic oligonucleotide
  Sense strand starting at position 2924 of SEQ ID NO: 1882309
cuuguaagguguccaagga

SEQ ID NO: 2110959 - RNA, 19 nt, Artificial Sequence
  Description of Artificial Sequence: Synthetic oligonucleotide
  Antisense strand to SEQ ID NO: 2110958
uccuuggacaccuuacaag

SEQ ID NO: 2110960 - RNA, 19 nt, Artificial Sequence
  Description of Artificial Sequence: Synthetic oligonucleotide
  Sense strand starting at position 2928 of SEQ ID NO: 1882309
uaagguguccaaggacaau

SEQ ID NO: 2110961 - RNA, 19 nt, Artificial Sequence
  Description of Artificial Sequence: Synthetic oligonucleotide
  Antisense strand to SEQ ID NO: 2110960
auuguccuuggacaccuua

SEQ ID NO: 2110962 - RNA, 19 nt, Artificial Sequence
  Description of Artificial Sequence: Synthetic oligonucleotide
  Sense strand starting at position 3004 of SEQ ID NO: 1882309
agcuuaggugcugaaucua

SEQ ID NO: 2110963 - RNA, 19 nt, Artificial Sequence
  Description of Artificial Sequence: Synthetic oligonucleotide
  Antisense strand to SEQ ID NO: 2110962
uagauucagcaccuaagcu

SEQ ID NO: 2110964 - RNA, 19 nt, Artificial Sequence
  Description of Artificial Sequence: Synthetic oligonucleotide
  Sense strand starting at position 3135 of SEQ ID NO: 1882309
uccagagaguacuuacagu

SEQ ID NO: 2110965 - RNA, 19 nt, Artificial Sequence
  Description of Artificial Sequence: Synthetic oligonucleotide
  Antisense strand to SEQ ID NO: 2110964
acuguaaguacucucugga

SEQ ID NO: 2110966 - RNA, 19 nt, Artificial Sequence
  Description of Artificial Sequence: Synthetic oligonucleotide
  Sense strand starting at position 3274 of SEQ ID NO: 1882309
auagcugugucauugacac

SEQ ID NO: 2110967 - RNA, 19 nt, Artificial Sequence
  Description of Artificial Sequence: Synthetic oligonucleotide
  Antisense strand to SEQ ID NO: 2110966
gugucaaugacacagcuau

SEQ ID NO: 2110968 - RNA, 19 nt, Artificial Sequence
  Description of Artificial Sequence: Synthetic oligonucleotide
  Sense strand starting at position 3296 of SEQ ID NO: 1882309
uuaggcauaucauuauaug

SEQ ID NO: 2110969 - RNA, 19 nt, Artificial Sequence
  Description of Artificial Sequence: Synthetic oligonucleotide
  Antisense strand to SEQ ID NO: 2110968
cauauaaugauaugccuaa

SEQ ID NO: 2110970 - RNA, 19 nt, Artificial Sequence
  Description of Artificial Sequence: Synthetic oligonucleotide
  Sense strand starting at position 3308 of SEQ ID NO: 1882309
uuauauguaugcucagagu

SEQ ID NO: 2110971 - RNA, 19 nt, Artificial Sequence
  Description of Artificial Sequence: Synthetic oligonucleotide
  Antisense strand to SEQ ID NO: 2110970
acucugagcauacauauaa

SEQ ID NO: 2110972 - RNA, 19 nt, Artificial Sequence
  Description of Artificial Sequence: Synthetic oligonucleotide
  Sense strand starting at position 3429 of SEQ ID NO: 1882309
uacuuuaucugguuguaug

SEQ ID NO: 2110973 - RNA, 19 nt, Artificial Sequence
  Description of Artificial Sequence: Synthetic oligonucleotide
  Antisense strand to SEQ ID NO: 2110972
cauacaaccagauaaagua

SEQ ID NO: 2110974 - RNA, 19 nt, Artificial Sequence
  Description of Artificial Sequence: Synthetic oligonucleotide
  Sense strand starting at position 3430 of SEQ ID NO: 1882309
acuuuaucugguuguauga

SEQ ID NO: 2110975 - RNA, 19 nt, Artificial Sequence
  Description of Artificial Sequence: Synthetic oligonucleotide
  Antisense strand to SEQ ID NO: 2110974
ucauacaaccagauaaagu

SEQ ID NO: 2110976 - RNA, 19 nt, Artificial Sequence
  Description of Artificial Sequence: Synthetic oligonucleotide
  Sense strand starting at position 3443 of SEQ ID NO: 1882309
guaugaugaggaugaguua

SEQ ID NO: 2110977 - RNA, 19 nt, Artificial Sequence
  Description of Artificial Sequence: Synthetic oligonucleotide
  Antisense strand to SEQ ID NO: 2110976
uaacucauccucaucauac

SEQ ID NO: 2110978 - RNA, 19 nt, Artificial Sequence
  Description of Artificial Sequence: Synthetic oligonucleotide
  Sense strand starting at position 3807 of SEQ ID NO: 1882309
caauuauguugggcuauca

SEQ ID NO: 2110979 - RNA, 19 nt, Artificial Sequence
  Description of Artificial Sequence: Synthetic oligonucleotide
  Antisense strand to SEQ ID NO: 2110978
ugauagcccaacauaauug

SEQ ID NO: 2110980 - RNA, 19 nt, Artificial Sequence
  Description of Artificial Sequence: Synthetic oligonucleotide
  Sense strand starting at position 3866 of SEQ ID NO: 1882309
uuguaauggugcuuauuuc

SEQ ID NO: 2110981 - RNA, 19 nt, Artificial Sequence
  Description of Artificial Sequence: Synthetic oligonucleotide
  Antisense strand to SEQ ID NO: 2110980
gaaauaagcaccauuacaa

SEQ ID NO: 2110982 - RNA, 19 nt, Artificial Sequence
  Description of Artificial Sequence: Synthetic oligonucleotide
  Sense strand starting at position 3917 of SEQ ID NO: 1882309
agugccuguuucucagaaa

SEQ ID NO: 2110983 - RNA, 19 nt, Artificial Sequence
  Description of Artificial Sequence: Synthetic oligonucleotide
  Antisense strand to SEQ ID NO: 2110982
uuucugagaaacaggcacu

SEQ ID NO: 2110984 - RNA, 19 nt, Artificial Sequence
  Description of Artificial Sequence: Synthetic oligonucleotide
  Sense strand starting at position 1674 of SEQ ID NO: 1882310
guuuguugugaauaacugu

SEQ ID NO: 2110985 - RNA, 19 nt, Artificial Sequence
  Description of Artificial Sequence: Synthetic oligonucleotide
  Antisense strand to SEQ ID NO: 2110984
acaguuauucacaacaaac

SEQ ID NO: 2110986 - RNA, 19 nt, Artificial Sequence
  Description of Artificial Sequence: Synthetic oligonucleotide
  Sense strand starting at position 1681 of SEQ ID NO: 1882310
gugaauaacugucuucccu

SEQ ID NO: 2110987 - RNA, 19 nt, Artificial Sequence
  Description of Artificial Sequence: Synthetic oligonucleotide
  Antisense strand to SEQ ID NO: 2110986
agggaagacaguuauucac

SEQ ID NO: 2110988 - RNA, 19 nt, Artificial Sequence
  Description of Artificial Sequence: Synthetic oligonucleotide
  Sense strand starting at position 1987 of SEQ ID NO: 1882310
ccaagucaguagucugaga

SEQ ID NO: 2110989 - RNA, 19 nt, Artificial Sequence
  Description of Artificial Sequence: Synthetic oligonucleotide
  Antisense strand to SEQ ID NO: 2110988
ucucagacuacugacuugg

SEQ ID NO: 2110990 - RNA, 19 nt, Artificial Sequence
  Description of Artificial Sequence: Synthetic oligonucleotide
  Sense strand starting at position 1989 of SEQ ID NO: 1882310
aagucaguagucugagagu

SEQ ID NO: 2110991 - RNA, 19 nt, Artificial Sequence
  Description of Artificial Sequence: Synthetic oligonucleotide
  Antisense strand to SEQ ID NO: 2110990
acucucagacuacugacuu

SEQ ID NO: 2110992 - RNA, 19 nt, Artificial Sequence
  Description of Artificial Sequence: Synthetic oligonucleotide
  Sense strand starting at position 2442 of SEQ ID NO: 1882310
uccacauugcugcagagua

SEQ ID NO: 2110993 - RNA, 19 nt, Artificial Sequence
  Description of Artificial Sequence: Synthetic oligonucleotide
  Antisense strand to SEQ ID NO: 2110992
uacucugcagcaaugugga

SEQ ID NO: 2110994 - RNA, 19 nt, Artificial Sequence
  Description of Artificial Sequence: Synthetic oligonucleotide
  Sense strand starting at position 2455 of SEQ ID NO: 1882310
agaguagucucuuccauac

SEQ ID NO: 2110995 - RNA, 19 nt, Artificial Sequence
  Description of Artificial Sequence: Synthetic oligonucleotide
  Antisense strand to SEQ ID NO: 2110994
guauggaagagacuacucu

SEQ ID NO: 2110996 - RNA, 19 nt, Artificial Sequence
  Description of Artificial Sequence: Synthetic oligonucleotide
  Sense strand starting at position 2563 of SEQ ID NO: 1882310
gggugagcuagugaagcuu

SEQ ID NO: 2110997 - RNA, 19 nt, Artificial Sequence
  Description of Artificial Sequence: Synthetic oligonucleotide
  Antisense strand to SEQ ID NO: 2110996
aagcuucacuagcucaccc

SEQ ID NO: 2110998 - RNA, 19 nt, Artificial Sequence
  Description of Artificial Sequence: Synthetic oligonucleotide
  Sense strand starting at position 2578 of SEQ ID NO: 1882310
gcuuuaucuguaugugcag

SEQ ID NO: 2110999 - RNA, 19 nt, Artificial Sequence
  Description of Artificial Sequence: Synthetic oligonucleotide
  Antisense strand to SEQ ID NO: 2110998
cugcacauacagauaaagc

SEQ ID NO: 2111000 - RNA, 19 nt, Artificial Sequence
  Description of Artificial Sequence: Synthetic oligonucleotide
  Sense strand starting at position 2683 of SEQ ID NO: 1882310
cugugaacugcacacauaa

SEQ ID NO: 2111001 - RNA, 19 nt, Artificial Sequence
  Description of Artificial Sequence: Synthetic oligonucleotide
  Antisense strand to SEQ ID NO: 2111000
uuaugugugcaguucacag

SEQ ID NO: 2111002 - RNA, 19 nt, Artificial Sequence
  Description of Artificial Sequence: Synthetic oligonucleotide
  Sense strand starting at position 2712 of SEQ ID NO: 1882310
augugcgcuccuuaugaga

SEQ ID NO: 2111003 - RNA, 19 nt, Artificial Sequence
  Description of Artificial Sequence: Synthetic oligonucleotide
  Antisense strand to SEQ ID NO: 2111002
ucucauaaggagcgcacau

SEQ ID NO: 2111004 - RNA, 19 nt, Artificial Sequence
  Description of Artificial Sequence: Synthetic oligonucleotide
  Sense strand starting at position 2833 of SEQ ID NO: 1882310
agaagugucaugugcuuga

SEQ ID NO: 2111005 - RNA, 19 nt, Artificial Sequence
  Description of Artificial Sequence: Synthetic oligonucleotide
  Antisense strand to SEQ ID NO: 2111004
ucaagcacaugacacuucu

SEQ ID NO: 2111006 - RNA, 19 nt, Artificial Sequence
  Description of Artificial Sequence: Synthetic oligonucleotide
  Sense strand starting at position 2836 of SEQ ID NO: 1882310
agugucaugugcuugaauc

SEQ ID NO: 2111007 - RNA, 19 nt, Artificial Sequence
  Description of Artificial Sequence: Synthetic oligonucleotide
  Antisense strand to SEQ ID NO: 2111006
gauucaagcacaugacacu

SEQ ID NO: 2111008 - RNA, 19 nt, Artificial Sequence
  Description of Artificial Sequence: Synthetic oligonucleotide
  Sense strand starting at position 2837 of SEQ ID NO: 1882310
gugucaugugcuugaauca

SEQ ID NO: 2111009 - RNA, 19 nt, Artificial Sequence
  Description of Artificial Sequence: Synthetic oligonucleotide
  Antisense strand to SEQ ID NO: 2111008
ugauucaagcacaugacac

SEQ ID NO: 2111010 - RNA, 19 nt, Artificial Sequence
  Description of Artificial Sequence: Synthetic oligonucleotide
  Sense strand starting at position 2926 of SEQ ID NO: 1882310
uugggaugguugccauaca

SEQ ID NO: 2111011 - RNA, 19 nt, Artificial Sequence
  Description of Artificial Sequence: Synthetic oligonucleotide
  Antisense strand to SEQ ID NO: 2111010
uguauggcaaccaucccaa

SEQ ID NO: 2111012 - RNA, 19 nt, Artificial Sequence
  Description of Artificial Sequence: Synthetic oligonucleotide
  Sense strand starting at position 2940 of SEQ ID NO: 1882310
auacauaacucugaugaug

SEQ ID NO: 2111013 - RNA, 19 nt, Artificial Sequence
  Description of Artificial Sequence: Synthetic oligonucleotide
  Antisense strand to SEQ ID NO: 2111012
caucaucagaguuauguau

SEQ ID NO: 2111014 - RNA, 19 nt, Artificial Sequence
  Description of Artificial Sequence: Synthetic oligonucleotide
  Sense strand starting at position 2942 of SEQ ID NO: 1882310
acauaacucugaugaugag

SEQ ID NO: 2111015 - RNA, 19 nt, Artificial Sequence
  Description of Artificial Sequence: Synthetic oligonucleotide
  Antisense strand to SEQ ID NO: 2111014
cucaucaucagaguuaugu

SEQ ID NO: 2111016 - RNA, 19 nt, Artificial Sequence
  Description of Artificial Sequence: Synthetic oligonucleotide
  Sense strand starting at position 2993 of SEQ ID NO: 1882310
cacugccuguaagaugaaa

SEQ ID NO: 2111017 - RNA, 19 nt, Artificial Sequence
  Description of Artificial Sequence: Synthetic oligonucleotide
  Antisense strand to SEQ ID NO: 2111016
uuucaucuuacaggcagug

SEQ ID NO: 2111018 - RNA, 19 nt, Artificial Sequence
  Description of Artificial Sequence: Synthetic oligonucleotide
  Sense strand starting at position 3016 of SEQ ID NO: 1882310
auuuaugggugugacuuau

SEQ ID NO: 2111019 - RNA, 19 nt, Artificial Sequence
  Description of Artificial Sequence: Synthetic oligonucleotide
  Antisense strand to SEQ ID NO: 2111018
auaagucacacccauaaau

SEQ ID NO: 2111020 - RNA, 19 nt, Artificial Sequence
  Description of Artificial Sequence: Synthetic oligonucleotide
  Sense strand starting at position 3020 of SEQ ID NO: 1882310
augggugugacuuauccau

SEQ ID NO: 2111021 - RNA, 19 nt, Artificial Sequence
  Description of Artificial Sequence: Synthetic oligonucleotide
  Antisense strand to SEQ ID NO: 2111020
auggauaagucacacccau

SEQ ID NO: 2111022 - RNA, 19 nt, Artificial Sequence
  Description of Artificial Sequence: Synthetic oligonucleotide
  Sense strand starting at position 3022 of SEQ ID NO: 1882310
gggugugacuuauccauaa

SEQ ID NO: 2111023 - RNA, 19 nt, Artificial Sequence
  Description of Artificial Sequence: Synthetic oligonucleotide
  Antisense strand to SEQ ID NO: 2111022
uuauggauaagucacaccc

SEQ ID NO: 2111024 - RNA, 19 nt, Artificial Sequence
  Description of Artificial Sequence: Synthetic oligonucleotide
  Sense strand starting at position 3024 of SEQ ID NO: 1882310
gugugacuuauccauaagg

SEQ ID NO: 2111025 - RNA, 19 nt, Artificial Sequence
  Description of Artificial Sequence: Synthetic oligonucleotide
  Antisense strand to SEQ ID NO: 2111024
ccuuauggauaagucacac

SEQ ID NO: 2111026 - RNA, 19 nt, Artificial Sequence
  Description of Artificial Sequence: Synthetic oligonucleotide
  Sense strand starting at position 3026 of SEQ ID NO: 1882310
gugacuuauccauaagggc

SEQ ID NO: 2111027 - RNA, 19 nt, Artificial Sequence
  Description of Artificial Sequence: Synthetic oligonucleotide
  Antisense strand to SEQ ID NO: 2111026
gcccuuauggauaagucac

SEQ ID NO: 2111028 - RNA, 19 nt, Artificial Sequence
  Description of Artificial Sequence: Synthetic oligonucleotide
  Sense strand starting at position 3121 of SEQ ID NO: 1882310
ccagucuccuagguuggaa

SEQ ID NO: 2111029 - RNA, 19 nt, Artificial Sequence
  Description of Artificial Sequence: Synthetic oligonucleotide
  Antisense strand to SEQ ID NO: 2111028
uuccaaccuaggagacugg

SEQ ID NO: 2111030 - RNA, 19 nt, Artificial Sequence
  Description of Artificial Sequence: Synthetic oligonucleotide
  Sense strand starting at position 3123 of SEQ ID NO: 1882310
agucuccuagguuggaaua

SEQ ID NO: 2111031 - RNA, 19 nt, Artificial Sequence
  Description of Artificial Sequence: Synthetic oligonucleotide
  Antisense strand to SEQ ID NO: 2111030
uauuccaaccuaggagacu

SEQ ID NO: 2111032 - RNA, 19 nt, Artificial Sequence
  Description of Artificial Sequence: Synthetic oligonucleotide
  Sense strand starting at position 3124 of SEQ ID NO: 1882310
gucuccuagguuggaauau

SEQ ID NO: 2111033 - RNA, 19 nt, Artificial Sequence
  Description of Artificial Sequence: Synthetic oligonucleotide
  Antisense strand to SEQ ID NO: 2111032
auauuccaaccuaggagac

SEQ ID NO: 2111034 - RNA, 19 nt, Artificial Sequence
  Description of Artificial Sequence: Synthetic oligonucleotide
  Sense strand starting at position 3133 of SEQ ID NO: 1882310
guuggaauaugcucugugu

SEQ ID NO: 2111035 - RNA, 19 nt, Artificial Sequence
  Description of Artificial Sequence: Synthetic oligonucleotide
  Antisense strand to SEQ ID NO: 2111034
acacagagcauauuccaac

SEQ ID NO: 2111036 - RNA, 19 nt, Artificial Sequence
  Description of Artificial Sequence: Synthetic oligonucleotide
  Sense strand starting at position 3135 of SEQ ID NO: 1882310
uggaauaugcucugugugu

SEQ ID NO: 2111037 - RNA, 19 nt, Artificial Sequence
  Description of Artificial Sequence: Synthetic oligonucleotide
  Antisense strand to SEQ ID NO: 2111036
acacacagagcauauucca

SEQ ID NO: 2111038 - RNA, 19 nt, Artificial Sequence
  Description of Artificial Sequence: Synthetic oligonucleotide
  Sense strand starting at position 3136 of SEQ ID NO: 1882310
ggaauaugcucuguguguc

SEQ ID NO: 2111039 - RNA, 19 nt, Artificial Sequence
  Description of Artificial Sequence: Synthetic oligonucleotide
  Antisense strand to SEQ ID NO: 2111038
gacacacagagcauauucc

SEQ ID NO: 2111040 - RNA, 19 nt, Artificial Sequence
  Description of Artificial Sequence: Synthetic oligonucleotide
  Sense strand starting at position 3137 of SEQ ID NO: 1882310
gaauaugcucuguguguca

SEQ ID NO: 2111041 - RNA, 19 nt, Artificial Sequence
  Description of Artificial Sequence: Synthetic oligonucleotide
  Antisense strand to SEQ ID NO: 2111040
ugacacacagagcauauuc

SEQ ID NO: 2111042 - RNA, 19 nt, Artificial Sequence
  Description of Artificial Sequence: Synthetic oligonucleotide
  Sense strand starting at position 3189 of SEQ ID NO: 1882310
ucaaguguuagggacucua

SEQ ID NO: 2111043 - RNA, 19 nt, Artificial Sequence
  Description of Artificial Sequence: Synthetic oligonucleotide
  Antisense strand to SEQ ID NO: 2111042
uagagucccuaacacuuga

SEQ ID NO: 2111044 - RNA, 19 nt, Artificial Sequence
  Description of Artificial Sequence: Synthetic oligonucleotide
  Sense strand starting at position 3396 of SEQ ID NO: 1882310
agccuauagugagugcaga

SEQ ID NO: 2111045 - RNA, 19 nt, Artificial Sequence
  Description of Artificial Sequence: Synthetic oligonucleotide
  Antisense strand to SEQ ID NO: 2111044
ucugcacucacuauaggcu

SEQ ID NO: 2111046 - RNA, 19 nt, Artificial Sequence
  Description of Artificial Sequence: Synthetic oligonucleotide
  Sense strand starting at position 3397 of SEQ ID NO: 1882310
gccuauagugagugcagaa

SEQ ID NO: 2111047 - RNA, 19 nt, Artificial Sequence
  Description of Artificial Sequence: Synthetic oligonucleotide
  Antisense strand to SEQ ID NO: 2111046
uucugcacucacuauaggc

SEQ ID NO: 2111048 - RNA, 19 nt, Artificial Sequence
  Description of Artificial Sequence: Synthetic oligonucleotide
  Sense strand starting at position 3760 of SEQ ID NO: 1882310
accacaguuagugagucau

SEQ ID NO: 2111049 - RNA, 19 nt, Artificial Sequence
  Description of Artificial Sequence: Synthetic oligonucleotide
  Antisense strand to SEQ ID NO: 2111048
augacucacuaacuguggu

SEQ ID NO: 2111050 - RNA, 19 nt, Artificial Sequence
  Description of Artificial Sequence: Synthetic oligonucleotide
  Sense strand starting at position 3764 of SEQ ID NO: 1882310
caguuagugagucaucgau

SEQ ID NO: 2111051 - RNA, 19 nt, Artificial Sequence
  Description of Artificial Sequence: Synthetic oligonucleotide
  Antisense strand to SEQ ID NO: 2111050
aucgaugacucacuaacug

SEQ ID NO: 2111052 - RNA, 19 nt, Artificial Sequence
  Description of Artificial Sequence: Synthetic oligonucleotide
  Sense strand starting at position 3766 of SEQ ID NO: 1882310
guuagugagucaucgauac

SEQ ID NO: 2111053 - RNA, 19 nt, Artificial Sequence
  Description of Artificial Sequence: Synthetic oligonucleotide
  Antisense strand to SEQ ID NO: 2111052
guaucgaugacucacuaac

SEQ ID NO: 2111054 - RNA, 19 nt, Artificial Sequence
  Description of Artificial Sequence: Synthetic oligonucleotide
  Sense strand starting at position 3795 of SEQ ID NO: 1882310
cuggguauuucguauaaua

SEQ ID NO: 2111055 - RNA, 19 nt, Artificial Sequence
  Description of Artificial Sequence: Synthetic oligonucleotide
  Antisense strand to SEQ ID NO: 2111054
uauuauacgaaauacccag

SEQ ID NO: 2111056 - RNA, 19 nt, Artificial Sequence
  Description of Artificial Sequence: Synthetic oligonucleotide
  Sense strand starting at position 3857 of SEQ ID NO: 1882310
cagcacugccggugaucua

SEQ ID NO: 2111057 - RNA, 19 nt, Artificial Sequence
  Description of Artificial Sequence: Synthetic oligonucleotide
  Antisense strand to SEQ ID NO: 2111056
uagaucaccggcagugcug

SEQ ID NO: 2111058 - RNA, 19 nt, Artificial Sequence
  Description of Artificial Sequence: Synthetic oligonucleotide
  Sense strand starting at position 3858 of SEQ ID NO: 1882310
agcacugccggugaucuaa

SEQ ID NO: 2111059 - RNA, 19 nt, Artificial Sequence
  Description of Artificial Sequence: Synthetic oligonucleotide
  Antisense strand to SEQ ID NO: 2111058
uuagaucaccggcagugcu

SEQ ID NO: 2111060 - RNA, 19 nt, Artificial Sequence
  Description of Artificial Sequence: Synthetic oligonucleotide
  Sense strand starting at position 3866 of SEQ ID NO: 1882310
cggugaucuaaaggucuuu

SEQ ID NO: 2111061 - RNA, 19 nt, Artificial Sequence
  Description of Artificial Sequence: Synthetic oligonucleotide
  Antisense strand to SEQ ID NO: 2111060
aaagaccuuuagaucaccg

SEQ ID NO: 2111062 - RNA, 19 nt, Artificial Sequence
  Description of Artificial Sequence: Synthetic oligonucleotide
  Sense strand starting at position 3965 of SEQ ID NO: 1882310
gcaauagacuugggaaaga

SEQ ID NO: 2111063 - RNA, 19 nt, Artificial Sequence
  Description of Artificial Sequence: Synthetic oligonucleotide
  Antisense strand to SEQ ID NO: 2111062
ucuuucccaagucuauugc

SEQ ID NO: 2111064 - RNA, 19 nt, Artificial Sequence
  Description of Artificial Sequence: Synthetic oligonucleotide
  Sense strand starting at position 360 of SEQ ID NO: 1882312
uuacuaguugugggauguu

SEQ ID NO: 2111065 - RNA, 19 nt, Artificial Sequence
  Description of Artificial Sequence: Synthetic oligonucleotide
  Antisense strand to SEQ ID NO: 2111064
aacaucccacaacuaguaa

SEQ ID NO: 2111066 - RNA, 19 nt, Artificial Sequence
  Description of Artificial Sequence: Synthetic oligonucleotide
  Sense strand starting at position 363 of SEQ ID NO: 1882312
cuaguugugggauguugga

SEQ ID NO: 2111067 - RNA, 19 nt, Artificial Sequence
  Description of Artificial Sequence: Synthetic oligonucleotide
  Antisense strand to SEQ ID NO: 2111066
uccaacaucccacaacuag

SEQ ID NO: 2111068 - RNA, 19 nt, Artificial Sequence
  Description of Artificial Sequence: Synthetic oligonucleotide
  Sense strand starting at position 392 of SEQ ID NO: 1882312
gguuaaauccucuaagccu

SEQ ID NO: 2111069 - RNA, 19 nt, Artificial Sequence
  Description of Artificial Sequence: Synthetic oligonucleotide
  Antisense strand to SEQ ID NO: 2111068
aggcuuagaggauuuaacc

SEQ ID NO: 2111070 - RNA, 19 nt, Artificial Sequence
  Description of Artificial Sequence: Synthetic oligonucleotide
  Sense strand starting at position 410 of SEQ ID NO: 1882312
ucagcuuuacugugguuaa

SEQ ID NO: 2111071 - RNA, 19 nt, Artificial Sequence
  Description of Artificial Sequence: Synthetic oligonucleotide
  Antisense strand to SEQ ID NO: 2111070
uuaaccacaguaaagcuga

SEQ ID NO: 2111072 - RNA, 19 nt, Artificial Sequence
  Description of Artificial Sequence: Synthetic oligonucleotide
  Sense strand starting at position 413 of SEQ ID NO: 1882312
gcuuuacugugguuaaaug

SEQ ID NO: 2111073 - RNA, 19 nt, Artificial Sequence
  Description of Artificial Sequence: Synthetic oligonucleotide
  Antisense strand to SEQ ID NO: 2111072
cauuuaaccacaguaaagc

SEQ ID NO: 2111074 - RNA, 19 nt, Artificial Sequence
  Description of Artificial Sequence: Synthetic oligonucleotide
  Sense strand starting at position 536 of SEQ ID NO: 1882312
uuacaaucacugcgacaga

SEQ ID NO: 2111075 - RNA, 19 nt, Artificial Sequence
  Description of Artificial Sequence: Synthetic oligonucleotide
  Antisense strand to SEQ ID NO: 2111074
ucugucgcagugauuguaa

SEQ ID NO: 2111076 - RNA, 19 nt, Artificial Sequence
  Description of Artificial Sequence: Synthetic oligonucleotide
  Sense strand starting at position 568 of SEQ ID NO: 1882312
gaggaauauuuccaaaucg

SEQ ID NO: 2111077 - RNA, 19 nt, Artificial Sequence
  Description of Artificial Sequence: Synthetic oligonucleotide
  Antisense strand to SEQ ID NO: 2111076
cgauuuggaaauauuccuc

SEQ ID NO: 2111078 - RNA, 19 nt, Artificial Sequence
  Description of Artificial Sequence: Synthetic oligonucleotide
  Sense strand starting at position 576 of SEQ ID NO: 1882312
uuuccaaaucguuagaggu

SEQ ID NO: 2111079 - RNA, 19 nt, Artificial Sequence
  Description of Artificial Sequence: Synthetic oligonucleotide
  Antisense strand to SEQ ID NO: 2111078
accucuaacgauuuggaaa

SEQ ID NO: 2111080 - RNA, 19 nt, Artificial Sequence
  Description of Artificial Sequence: Synthetic oligonucleotide
  Sense strand starting at position 1010 of SEQ ID NO: 1882312
cuagauuucuuagauuaga

SEQ ID NO: 2111081 - RNA, 19 nt, Artificial Sequence
  Description of Artificial Sequence: Synthetic oligonucleotide
  Antisense strand to SEQ ID NO: 2111080
ucuaaucuaagaaaucuag

SEQ ID NO: 2111082 - RNA, 19 nt, Artificial Sequence
  Description of Artificial Sequence: Synthetic oligonucleotide
  Sense strand starting at position 1056 of SEQ ID NO: 1882312
cuacucguuccuuguauua

SEQ ID NO: 2111083 - RNA, 19 nt, Artificial Sequence
  Description of Artificial Sequence: Synthetic oligonucleotide
  Antisense strand to SEQ ID NO: 2111082
uaauacaaggaacgaguag

SEQ ID NO: 2111084 - RNA, 19 nt, Artificial Sequence
  Description of Artificial Sequence: Synthetic oligonucleotide
  Sense strand starting at position 1130 of SEQ ID NO: 1882312
auuaaaugcuaguuaaggu

SEQ ID NO: 2111085 - RNA, 19 nt, Artificial Sequence
  Description of Artificial Sequence: Synthetic oligonucleotide
  Antisense strand to SEQ ID NO: 2111084
accuuaacuagcauuuaau

SEQ ID NO: 2111086 - RNA, 19 nt, Artificial Sequence
  Description of Artificial Sequence: Synthetic oligonucleotide
  Sense strand starting at position 1146 of SEQ ID NO: 1882312
gguacaaugucuccaacag

SEQ ID NO: 2111087 - RNA, 19 nt, Artificial Sequence
  Description of Artificial Sequence: Synthetic oligonucleotide
  Antisense strand to SEQ ID NO: 2111086
cuguuggagacauuguacc

SEQ ID NO: 2111088 - RNA, 19 nt, Artificial Sequence
  Description of Artificial Sequence: Synthetic oligonucleotide
  Sense strand starting at position 1173 of SEQ ID NO: 1882312
ucagaauaaugguuucugu

SEQ ID NO: 2111089 - RNA, 19 nt, Artificial Sequence
  Description of Artificial Sequence: Synthetic oligonucleotide
  Antisense strand to SEQ ID NO: 2111088
acagaaaccauuauucuga

SEQ ID NO: 2111090 - RNA, 19 nt, Artificial Sequence
  Description of Artificial Sequence: Synthetic oligonucleotide
  Sense strand starting at position 1176 of SEQ ID NO: 1882312
gaauaaugguuucugucca

SEQ ID NO: 2111091 - RNA, 19 nt, Artificial Sequence
  Description of Artificial Sequence: Synthetic oligonucleotide
  Antisense strand to SEQ ID NO: 2111090
uggacagaaaccauuauuc

SEQ ID NO: 2111092 - RNA, 19 nt, Artificial Sequence
  Description of Artificial Sequence: Synthetic oligonucleotide
  Sense strand starting at position 1181 of SEQ ID NO: 1882312
augguuucuguccaucaga

SEQ ID NO: 2111093 - RNA, 19 nt, Artificial Sequence
  Description of Artificial Sequence: Synthetic oligonucleotide
  Antisense strand to SEQ ID NO: 2111092
ucugauggacagaaaccau

SEQ ID NO: 2111094 - RNA, 19 nt, Artificial Sequence
  Description of Artificial Sequence: Synthetic oligonucleotide
  Sense strand starting at position 1184 of SEQ ID NO: 1882312
guuucuguccaucagaaca

SEQ ID NO: 2111095 - RNA, 19 nt, Artificial Sequence
  Description of Artificial Sequence: Synthetic oligonucleotide
  Antisense strand to SEQ ID NO: 2111094
uguucugauggacagaaac

SEQ ID NO: 2111096 - RNA, 19 nt, Artificial Sequence
  Description of Artificial Sequence: Synthetic oligonucleotide
  Sense strand starting at position 1284 of SEQ ID NO: 1882312
uuuaaagcucuauagguga

SEQ ID NO: 2111097 - RNA, 19 nt, Artificial Sequence
  Description of Artificial Sequence: Synthetic oligonucleotide
  Antisense strand to SEQ ID NO: 2111096
ucaccuauagagcuuuaaa

SEQ ID NO: 2111098 - RNA, 19 nt, Artificial Sequence
  Description of Artificial Sequence: Synthetic oligonucleotide
  Sense strand starting at position 1291 of SEQ ID NO: 1882312
cucuauaggugauucuaag

SEQ ID NO: 2111099 - RNA, 19 nt, Artificial Sequence
  Description of Artificial Sequence: Synthetic oligonucleotide
  Antisense strand to SEQ ID NO: 2111098
cuuagaaucaccuauagag

SEQ ID NO: 2111100 - RNA, 19 nt, Artificial Sequence
  Description of Artificial Sequence: Synthetic oligonucleotide
  Sense strand starting at position 1297 of SEQ ID NO: 1882312
aggugauucuaaggaagag

SEQ ID NO: 2111101 - RNA, 19 nt, Artificial Sequence
  Description of Artificial Sequence: Synthetic oligonucleotide
  Antisense strand to SEQ ID NO: 2111100
cucuuccuuagaaucaccu

SEQ ID NO: 2111102 - RNA, 19 nt, Artificial Sequence
  Description of Artificial Sequence: Synthetic oligonucleotide
  Sense strand starting at position 1400 of SEQ ID NO: 1882312
accugaugcccagaaucau

SEQ ID NO: 2111103 - RNA, 19 nt, Artificial Sequence
  Description of Artificial Sequence: Synthetic oligonucleotide
  Antisense strand to SEQ ID NO: 2111102
augauucugggcaucaggu

SEQ ID NO: 2111104 - RNA, 19 nt, Artificial Sequence
  Description of Artificial Sequence: Synthetic oligonucleotide
  Sense strand starting at position 1460 of SEQ ID NO: 1882312
aggugacuauccuccacaa

SEQ ID NO: 2111105 - RNA, 19 nt, Artificial Sequence
  Description of Artificial Sequence: Synthetic oligonucleotide
  Antisense strand to SEQ ID NO: 2111104
uuguggaggauagucaccu

SEQ ID NO: 2111106 - RNA, 19 nt, Artificial Sequence
  Description of Artificial Sequence: Synthetic oligonucleotide
  Sense strand starting at position 1475 of SEQ ID NO: 1882312
acaagauacuguuauccag

SEQ ID NO: 2111107 - RNA, 19 nt, Artificial Sequence
  Description of Artificial Sequence: Synthetic oligonucleotide
  Antisense strand to SEQ ID NO: 2111106
cuggauaacaguaucuugu

SEQ ID NO: 2111108 - RNA, 19 nt, Artificial Sequence
  Description of Artificial Sequence: Synthetic oligonucleotide
  Sense strand starting at position 1477 of SEQ ID NO: 1882312
aagauacuguuauccagag

SEQ ID NO: 2111109 - RNA, 19 nt, Artificial Sequence
  Description of Artificial Sequence: Synthetic oligonucleotide
  Antisense strand to SEQ ID NO: 2111108
cucuggauaacaguaucuu

SEQ ID NO: 2111110 - RNA, 19 nt, Artificial Sequence
  Description of Artificial Sequence: Synthetic oligonucleotide
  Sense strand starting at position 1497 of SEQ ID NO: 1882312
agguaaacucccuagcauc

SEQ ID NO: 2111111 - RNA, 19 nt, Artificial Sequence
  Description of Artificial Sequence: Synthetic oligonucleotide
  Antisense strand to SEQ ID NO: 2111110
gaugcuagggaguuuaccu

SEQ ID NO: 2111112 - RNA, 19 nt, Artificial Sequence
  Description of Artificial Sequence: Synthetic oligonucleotide
  Sense strand starting at position 1509 of SEQ ID NO: 1882312
uagcaucugucgcucaaga

SEQ ID NO: 2111113 - RNA, 19 nt, Artificial Sequence
  Description of Artificial Sequence: Synthetic oligonucleotide
  Antisense strand to SEQ ID NO: 2111112
ucuugagcgacagaugcua

SEQ ID NO: 2111114 - RNA, 19 nt, Artificial Sequence
  Description of Artificial Sequence: Synthetic oligonucleotide
  Sense strand starting at position 1511 of SEQ ID NO: 1882312
gcaucugucgcucaagaac

SEQ ID NO: 2111115 - RNA, 19 nt, Artificial Sequence
  Description of Artificial Sequence: Synthetic oligonucleotide
  Antisense strand to SEQ ID NO: 2111114
guucuugagcgacagaugc

SEQ ID NO: 2111116 - RNA, 19 nt, Artificial Sequence
  Description of Artificial Sequence: Synthetic oligonucleotide
  Sense strand starting at position 1514 of SEQ ID NO: 1882312
ucugucgcucaagaacuua

SEQ ID NO: 2111117 - RNA, 19 nt, Artificial Sequence
  Description of Artificial Sequence: Synthetic oligonucleotide
  Antisense strand to SEQ ID NO: 2111116
uaaguucuugagcgacaga

SEQ ID NO: 2111118 - RNA, 19 nt, Artificial Sequence
  Description of Artificial Sequence: Synthetic oligonucleotide
  Sense strand starting at position 2062 of SEQ ID NO: 1882312
ucuggaaaccucggagguu

SEQ ID NO: 2111119 - RNA, 19 nt, Artificial Sequence
  Description of Artificial Sequence: Synthetic oligonucleotide
  Antisense strand to SEQ ID NO: 2111118
aaccuccgagguuuccaga

SEQ ID NO: 2111120 - RNA, 19 nt, Artificial Sequence
  Description of Artificial Sequence: Synthetic oligonucleotide
  Sense strand starting at position 2083 of SEQ ID NO: 1882312
cgugucucugucguuuauu

SEQ ID NO: 2111121 - RNA, 19 nt, Artificial Sequence
  Description of Artificial Sequence: Synthetic oligonucleotide
  Antisense strand to SEQ ID NO: 2111120
aauaaacgacagagacacg

SEQ ID NO: 2111122 - RNA, 19 nt, Artificial Sequence
  Description of Artificial Sequence: Synthetic oligonucleotide
  Sense strand starting at position 2086 of SEQ ID NO: 1882312
gucucugucguuuauucca

SEQ ID NO: 2111123 - RNA, 19 nt, Artificial Sequence
  Description of Artificial Sequence: Synthetic oligonucleotide
  Antisense strand to SEQ ID NO: 2111122
uggaauaaacgacagagac

SEQ ID NO: 2111124 - RNA, 19 nt, Artificial Sequence
  Description of Artificial Sequence: Synthetic oligonucleotide
  Sense strand starting at position 2817 of SEQ ID NO: 1882312
ggagguugugauuagccga

SEQ ID NO: 2111125 - RNA, 19 nt, Artificial Sequence
  Description of Artificial Sequence: Synthetic oligonucleotide
  Antisense strand to SEQ ID NO: 2111124
ucggcuaaucacaaccucc

SEQ ID NO: 2111126 - RNA, 19 nt, Artificial Sequence
  Description of Artificial Sequence: Synthetic oligonucleotide
  Sense strand starting at position 2820 of SEQ ID NO: 1882312
gguugugauuagccgagau

SEQ ID NO: 2111127 - RNA, 19 nt, Artificial Sequence
  Description of Artificial Sequence: Synthetic oligonucleotide
  Antisense strand to SEQ ID NO: 2111126
aucucggcuaaucacaacc

SEQ ID NO: 2111128 - RNA, 19 nt, Artificial Sequence
  Description of Artificial Sequence: Synthetic oligonucleotide
  Sense strand starting at position 2822 of SEQ ID NO: 1882312
uugugauuagccgagauag

SEQ ID NO: 2111129 - RNA, 19 nt, Artificial Sequence
  Description of Artificial Sequence: Synthetic oligonucleotide
  Antisense strand to SEQ ID NO: 2111128
cuaucucggcuaaucacaa

SEQ ID NO: 2111130 - RNA, 19 nt, Artificial Sequence
  Description of Artificial Sequence: Synthetic oligonucleotide
  Sense strand starting at position 2929 of SEQ ID NO: 1882312
auaccaacucguggcaauu

SEQ ID NO: 2111131 - RNA, 19 nt, Artificial Sequence
  Description of Artificial Sequence: Synthetic oligonucleotide
  Antisense strand to SEQ ID NO: 2111130
aauugccacgaguugguau

SEQ ID NO: 2111132 - RNA, 19 nt, Artificial Sequence
  Description of Artificial Sequence: Synthetic oligonucleotide
  Sense strand starting at position 3329 of SEQ ID NO: 1882312
accugucauucuucuguuu

SEQ ID NO: 2111133 - RNA, 19 nt, Artificial Sequence
  Description of Artificial Sequence: Synthetic oligonucleotide
  Antisense strand to SEQ ID NO: 2111132
aaacagaagaaugacaggu

SEQ ID NO: 2111134 - RNA, 19 nt, Artificial Sequence
  Description of Artificial Sequence: Synthetic oligonucleotide
  Sense strand starting at position 3332 of SEQ ID NO: 1882312
ugucauucuucuguuucuu

SEQ ID NO: 2111135 - RNA, 19 nt, Artificial Sequence
  Description of Artificial Sequence: Synthetic oligonucleotide
  Antisense strand to SEQ ID NO: 2111134
aagaaacagaagaaugaca

SEQ ID NO: 2111136 - RNA, 19 nt, Artificial Sequence
  Description of Artificial Sequence: Synthetic oligonucleotide
  Sense strand starting at position 3450 of SEQ ID NO: 1882312
cuuugagcuuuagcagaaa

SEQ ID NO: 2111137 - RNA, 19 nt, Artificial Sequence
  Description of Artificial Sequence: Synthetic oligonucleotide
  Antisense strand to SEQ ID NO: 2111136
uuucugcuaaagcucaaag

SEQ ID NO: 2111138 - RNA, 19 nt, Artificial Sequence
  Description of Artificial Sequence: Synthetic oligonucleotide
  Sense strand starting at position 3453 of SEQ ID NO: 1882312
ugagcuuuagcagaaacaa

SEQ ID NO: 2111139 - RNA, 19 nt, Artificial Sequence
  Description of Artificial Sequence: Synthetic oligonucleotide
  Antisense strand to SEQ ID NO: 2111138
uuguuucugcuaaagcuca

SEQ ID NO: 2111140 - RNA, 19 nt, Artificial Sequence
  Description of Artificial Sequence: Synthetic oligonucleotide
  Sense strand starting at position 3891 of SEQ ID NO: 1882312
uucugaacaguuuggucau

SEQ ID NO: 2111141 - RNA, 19 nt, Artificial Sequence
  Description of Artificial Sequence: Synthetic oligonucleotide
  Antisense strand to SEQ ID NO: 2111140
augaccaaacuguucagaa

SEQ ID NO: 2111142 - RNA, 19 nt, Artificial Sequence
  Description of Artificial Sequence: Synthetic oligonucleotide
  Sense strand starting at position 3922 of SEQ ID NO: 1882312
ugggauaaaucugaauacu

SEQ ID NO: 2111143 - RNA, 19 nt, Artificial Sequence
  Description of Artificial Sequence: Synthetic oligonucleotide
  Antisense strand to SEQ ID NO: 2111142
aguauucagauuuauccca

SEQ ID NO: 2111144 - RNA, 19 nt, Artificial Sequence
  Description of Artificial Sequence: Synthetic oligonucleotide
  Sense strand starting at position 316 of SEQ ID NO: 1882311
uuacuaguugugggauguu

SEQ ID NO: 2111145 - RNA, 19 nt, Artificial Sequence
  Description of Artificial Sequence: Synthetic oligonucleotide
  Antisense strand to SEQ ID NO: 2111144
aacaucccacaacuaguaa

SEQ ID NO: 2111146 - RNA, 19 nt, Artificial Sequence
  Description of Artificial Sequence: Synthetic oligonucleotide
  Sense strand starting at position 319 of SEQ ID NO: 1882311
cuaguugugggauguugga

SEQ ID NO: 2111147 - RNA, 19 nt, Artificial Sequence
  Description of Artificial Sequence: Synthetic oligonucleotide
  Antisense strand to SEQ ID NO: 2111146
uccaacaucccacaacuag

SEQ ID NO: 2111148 - RNA, 19 nt, Artificial Sequence
  Description of Artificial Sequence: Synthetic oligonucleotide
  Sense strand starting at position 348 of SEQ ID NO: 1882311
gguuaaauccucuaagccu

SEQ ID NO: 2111149 - RNA, 19 nt, Artificial Sequence
  Description of Artificial Sequence: Synthetic oligonucleotide
  Antisense strand to SEQ ID NO: 2111148
aggcuuagaggauuuaacc

SEQ ID NO: 2111150 - RNA, 19 nt, Artificial Sequence
  Description of Artificial Sequence: Synthetic oligonucleotide
  Sense strand starting at position 366 of SEQ ID NO: 1882311
ucagcuuuacugugguuaa

SEQ ID NO: 2111151 - RNA, 19 nt, Artificial Sequence
  Description of Artificial Sequence: Synthetic oligonucleotide
  Antisense strand to SEQ ID NO: 2111150
uuaaccacaguaaagcuga

SEQ ID NO: 2111152 - RNA, 19 nt, Artificial Sequence
  Description of Artificial Sequence: Synthetic oligonucleotide
  Sense strand starting at position 369 of SEQ ID NO: 1882311
gcuuuacugugguuaaaug

SEQ ID NO: 2111153 - RNA, 19 nt, Artificial Sequence
  Description of Artificial Sequence: Synthetic oligonucleotide
  Antisense strand to SEQ ID NO: 2111152
cauuuaaccacaguaaagc

SEQ ID NO: 2111154 - RNA, 19 nt, Artificial Sequence
  Description of Artificial Sequence: Synthetic oligonucleotide
  Sense strand starting at position 492 of SEQ ID NO: 1882311
uuacaaucacugcgacaga

SEQ ID NO: 2111155 - RNA, 19 nt, Artificial Sequence
  Description of Artificial Sequence: Synthetic oligonucleotide
  Antisense strand to SEQ ID NO: 2111154
ucugucgcagugauuguaa

SEQ ID NO: 2111156 - RNA, 19 nt, Artificial Sequence
  Description of Artificial Sequence: Synthetic oligonucleotide
  Sense strand starting at position 524 of SEQ ID NO: 1882311
gaggaauauuuccaaaucg

SEQ ID NO: 2111157 - RNA, 19 nt, Artificial Sequence
  Description of Artificial Sequence: Synthetic oligonucleotide
  Antisense strand to SEQ ID NO: 2111156
cgauuuggaaauauuccuc

SEQ ID NO: 2111158 - RNA, 19 nt, Artificial Sequence
  Description of Artificial Sequence: Synthetic oligonucleotide
  Sense strand starting at position 532 of SEQ ID NO: 1882311
uuuccaaaucguuagaggu

SEQ ID NO: 2111159 - RNA, 19 nt, Artificial Sequence
  Description of Artificial Sequence: Synthetic oligonucleotide
  Antisense strand to SEQ ID NO: 2111158
accucuaacgauuuggaaa

SEQ ID NO: 2111160 - RNA, 19 nt, Artificial Sequence
  Description of Artificial Sequence: Synthetic oligonucleotide
  Sense strand starting at position 966 of SEQ ID NO: 1882311
cuagauuucuuagauuaga

SEQ ID NO: 2111161 - RNA, 19 nt, Artificial Sequence
  Description of Artificial Sequence: Synthetic oligonucleotide
  Antisense strand to SEQ ID NO: 2111160
ucuaaucuaagaaaucuag

SEQ ID NO: 2111162 - RNA, 19 nt, Artificial Sequence
  Description of Artificial Sequence: Synthetic oligonucleotide
  Sense strand starting at position 1012 of SEQ ID NO: 1882311
cuacucguuccuuguauua

SEQ ID NO: 2111163 - RNA, 19 nt, Artificial Sequence
  Description of Artificial Sequence: Synthetic oligonucleotide
  Antisense strand to SEQ ID NO: 2111162
uaauacaaggaacgaguag

SEQ ID NO: 2111164 - RNA, 19 nt, Artificial Sequence
  Description of Artificial Sequence: Synthetic oligonucleotide
  Sense strand starting at position 1086 of SEQ ID NO: 1882311
auuaaaugcuaguuaaggu

SEQ ID NO: 2111165 - RNA, 19 nt, Artificial Sequence
  Description of Artificial Sequence: Synthetic oligonucleotide
  Antisense strand to SEQ ID NO: 2111164
accuuaacuagcauuuaau

SEQ ID NO: 2111166 - RNA, 19 nt, Artificial Sequence
  Description of Artificial Sequence: Synthetic oligonucleotide
  Sense strand starting at position 1102 of SEQ ID NO: 1882311
gguacaaugucuccaacag

SEQ ID NO: 2111167 - RNA, 19 nt, Artificial Sequence
  Description of Artificial Sequence: Synthetic oligonucleotide
  Antisense strand to SEQ ID NO: 2111166
cuguuggagacauuguacc

SEQ ID NO: 2111168 - RNA, 19 nt, Artificial Sequence
  Description of Artificial Sequence: Synthetic oligonucleotide
  Sense strand starting at position 1129 of SEQ ID NO: 1882311
ucagaauaaugguuucugu

SEQ ID NO: 2111169 - RNA, 19 nt, Artificial Sequence
  Description of Artificial Sequence: Synthetic oligonucleotide
  Antisense strand to SEQ ID NO: 2111168
acagaaaccauuauucuga

SEQ ID NO: 2111170 - RNA, 19 nt, Artificial Sequence
  Description of Artificial Sequence: Synthetic oligonucleotide
  Sense strand starting at position 1132 of SEQ ID NO: 1882311
gaauaaugguuucugucca

SEQ ID NO: 2111171 - RNA, 19 nt, Artificial Sequence
  Description of Artificial Sequence: Synthetic oligonucleotide
  Antisense strand to SEQ ID NO: 2111170
uggacagaaaccauuauuc

SEQ ID NO: 2111172 - RNA, 19 nt, Artificial Sequence
  Description of Artificial Sequence: Synthetic oligonucleotide
  Sense strand starting at position 1137 of SEQ ID NO: 1882311
augguuucuguccaucaga

SEQ ID NO: 2111173 - RNA, 19 nt, Artificial Sequence
  Description of Artificial Sequence: Synthetic oligonucleotide
  Antisense strand to SEQ ID NO: 2111172
ucugauggacagaaaccau

SEQ ID NO: 2111174 - RNA, 19 nt, Artificial Sequence
  Description of Artificial Sequence: Synthetic oligonucleotide
  Sense strand starting at position 1140 of SEQ ID NO: 1882311
guuucuguccaucagaaca

SEQ ID NO: 2111175 - RNA, 19 nt, Artificial Sequence
  Description of Artificial Sequence: Synthetic oligonucleotide
  Antisense strand to SEQ ID NO: 2111174
uguucugauggacagaaac

SEQ ID NO: 2111176 - RNA, 19 nt, Artificial Sequence
  Description of Artificial Sequence: Synthetic oligonucleotide
  Sense strand starting at position 1240 of SEQ ID NO: 1882311
uuuaaagcucuauagguga

SEQ ID NO: 2111177 - RNA, 19 nt, Artificial Sequence
  Description of Artificial Sequence: Synthetic oligonucleotide
  Antisense strand to SEQ ID NO: 2111176
ucaccuauagagcuuuaaa

SEQ ID NO: 2111178 - RNA, 19 nt, Artificial Sequence
  Description of Artificial Sequence: Synthetic oligonucleotide
  Sense strand starting at position 1247 of SEQ ID NO: 1882311
cucuauaggugauucuaag

SEQ ID NO: 2111179 - RNA, 19 nt, Artificial Sequence
  Description of Artificial Sequence: Synthetic oligonucleotide
  Antisense strand to SEQ ID NO: 2111178
cuuagaaucaccuauagag

SEQ ID NO: 2111180 - RNA, 19 nt, Artificial Sequence
  Description of Artificial Sequence: Synthetic oligonucleotide
  Sense strand starting at position 1356 of SEQ ID NO: 1882311
accugaugcccagaaucau

SEQ ID NO: 2111181 - RNA, 19 nt, Artificial Sequence
  Description of Artificial Sequence: Synthetic oligonucleotide
  Antisense strand to SEQ ID NO: 2111180
augauucugggcaucaggu

SEQ ID NO: 2111182 - RNA, 19 nt, Artificial Sequence
  Description of Artificial Sequence: Synthetic oligonucleotide
  Sense strand starting at position 1416 of SEQ ID NO: 1882311
aggugacuauccuccacaa

SEQ ID NO: 2111183 - RNA, 19 nt, Artificial Sequence
  Description of Artificial Sequence: Synthetic oligonucleotide
  Antisense strand to SEQ ID NO: 2111182
uuguggaggauagucaccu

SEQ ID NO: 2111184 - RNA, 19 nt, Artificial Sequence
  Description of Artificial Sequence: Synthetic oligonucleotide
  Sense strand starting at position 1433 of SEQ ID NO: 1882311
aagauacuguuauccagag

SEQ ID NO: 2111185 - RNA, 19 nt, Artificial Sequence
  Description of Artificial Sequence: Synthetic oligonucleotide
  Antisense strand to SEQ ID NO: 2111184
cucuggauaacaguaucuu

SEQ ID NO: 2111186 - RNA, 19 nt, Artificial Sequence
  Description of Artificial Sequence: Synthetic oligonucleotide
  Sense strand starting at position 1453 of SEQ ID NO: 1882311
agguaaacucccuagcauc

SEQ ID NO: 2111187 - RNA, 19 nt, Artificial Sequence
  Description of Artificial Sequence: Synthetic oligonucleotide
  Antisense strand to SEQ ID NO: 2111186
gaugcuagggaguuuaccu

SEQ ID NO: 2111188 - RNA, 19 nt, Artificial Sequence
  Description of Artificial Sequence: Synthetic oligonucleotide
  Sense strand starting at position 1465 of SEQ ID NO: 1882311
uagcaucugucgcucaaga

SEQ ID NO: 2111189 - RNA, 19 nt, Artificial Sequence
  Description of Artificial Sequence: Synthetic oligonucleotide
  Antisense strand to SEQ ID NO: 2111188
ucuugagcgacagaugcua

SEQ ID NO: 2111190 - RNA, 19 nt, Artificial Sequence
  Description of Artificial Sequence: Synthetic oligonucleotide
  Sense strand starting at position 1467 of SEQ ID NO: 1882311
gcaucugucgcucaagaac

SEQ ID NO: 2111191 - RNA, 19 nt, Artificial Sequence
  Description of Artificial Sequence: Synthetic oligonucleotide
  Antisense strand to SEQ ID NO: 2111190
guucuugagcgacagaugc

SEQ ID NO: 2111192 - RNA, 19 nt, Artificial Sequence
  Description of Artificial Sequence: Synthetic oligonucleotide
  Sense strand starting at position 1470 of SEQ ID NO: 1882311
ucugucgcucaagaacuua

SEQ ID NO: 2111193 - RNA, 19 nt, Artificial Sequence
  Description of Artificial Sequence: Synthetic oligonucleotide
  Antisense strand to SEQ ID NO: 2111192
uaaguucuugagcgacaga

SEQ ID NO: 2111194 - RNA, 19 nt, Artificial Sequence
  Description of Artificial Sequence: Synthetic oligonucleotide
  Sense strand starting at position 2018 of SEQ ID NO: 1882311
ucuggaaaccucggagguu

SEQ ID NO: 2111195 - RNA, 19 nt, Artificial Sequence
  Description of Artificial Sequence: Synthetic oligonucleotide
  Antisense strand to SEQ ID NO: 2111194
aaccuccgagguuuccaga

SEQ ID NO: 2111196 - RNA, 19 nt, Artificial Sequence
  Description of Artificial Sequence: Synthetic oligonucleotide
  Sense strand starting at position 2039 of SEQ ID NO: 1882311
cgugucucugucguuuauu

SEQ ID NO: 2111197 - RNA, 19 nt, Artificial Sequence
  Description of Artificial Sequence: Synthetic oligonucleotide
  Antisense strand to SEQ ID NO: 2111196
aauaaacgacagagacacg

SEQ ID NO: 2111198 - RNA, 19 nt, Artificial Sequence
  Description of Artificial Sequence: Synthetic oligonucleotide
  Sense strand starting at position 2042 of SEQ ID NO: 1882311
gucucugucguuuauucca

SEQ ID NO: 2111199 - RNA, 19 nt, Artificial Sequence
  Description of Artificial Sequence: Synthetic oligonucleotide
  Antisense strand to SEQ ID NO: 2111198
uggaauaaacgacagagac

SEQ ID NO: 2111200 - RNA, 19 nt, Artificial Sequence
  Description of Artificial Sequence: Synthetic oligonucleotide
  Sense strand starting at position 2773 of SEQ ID NO: 1882311
ggagguugugauuagccga

SEQ ID NO: 2111201 - RNA, 19 nt, Artificial Sequence
  Description of Artificial Sequence: Synthetic oligonucleotide
  Antisense strand to SEQ ID NO: 2111200
ucggcuaaucacaaccucc

SEQ ID NO: 2111202 - RNA, 19 nt, Artificial Sequence
  Description of Artificial Sequence: Synthetic oligonucleotide
  Sense strand starting at position 2776 of SEQ ID NO: 1882311
gguugugauuagccgagau

SEQ ID NO: 2111203 - RNA, 19 nt, Artificial Sequence
  Description of Artificial Sequence: Synthetic oligonucleotide
  Antisense strand to SEQ ID NO: 2111202
aucucggcuaaucacaacc

SEQ ID NO: 2111204 - RNA, 19 nt, Artificial Sequence
  Description of Artificial Sequence: Synthetic oligonucleotide
  Sense strand starting at position 2778 of SEQ ID NO: 1882311
uugugauuagccgagauag

SEQ ID NO: 2111205 - RNA, 19 nt, Artificial Sequence
  Description of Artificial Sequence: Synthetic oligonucleotide
  Antisense strand to SEQ ID NO: 2111204
cuaucucggcuaaucacaa

SEQ ID NO: 2111206 - RNA, 19 nt, Artificial Sequence
  Description of Artificial Sequence: Synthetic oligonucleotide
  Sense strand starting at position 2885 of SEQ ID NO: 1882311
auaccaacucguggcaauu

SEQ ID NO: 2111207 - RNA, 19 nt, Artificial Sequence
  Description of Artificial Sequence: Synthetic oligonucleotide
  Antisense strand to SEQ ID NO: 2111206
aauugccacgaguugguau

SEQ ID NO: 2111208 - RNA, 19 nt, Artificial Sequence
  Description of Artificial Sequence: Synthetic oligonucleotide
  Sense strand starting at position 3285 of SEQ ID NO: 1882311
accugucauucuucuguuu

SEQ ID NO: 2111209 - RNA, 19 nt, Artificial Sequence
  Description of Artificial Sequence: Synthetic oligonucleotide
  Antisense strand to SEQ ID NO: 2111208
aaacagaagaaugacaggu

SEQ ID NO: 2111210 - RNA, 19 nt, Artificial Sequence
  Description of Artificial Sequence: Synthetic oligonucleotide
  Sense strand starting at position 3288 of SEQ ID NO: 1882311
ugucauucuucuguuucuu

SEQ ID NO: 2111211 - RNA, 19 nt, Artificial Sequence
  Description of Artificial Sequence: Synthetic oligonucleotide
  Antisense strand to SEQ ID NO: 2111210
aagaaacagaagaaugaca

SEQ ID NO: 2111212 - RNA, 19 nt, Artificial Sequence
  Description of Artificial Sequence: Synthetic oligonucleotide
  Sense strand starting at position 3406 of SEQ ID NO: 1882311
cuuugagcuuuagcagaaa

SEQ ID NO: 2111213 - RNA, 19 nt, Artificial Sequence
  Description of Artificial Sequence: Synthetic oligonucleotide
  Antisense strand to SEQ ID NO: 2111212
uuucugcuaaagcucaaag

SEQ ID NO: 2111214 - RNA, 19 nt, Artificial Sequence
  Description of Artificial Sequence: Synthetic oligonucleotide
  Sense strand starting at position 3409 of SEQ ID NO: 1882311
ugagcuuuagcagaaacaa

SEQ ID NO: 2111215 - RNA, 19 nt, Artificial Sequence
  Description of Artificial Sequence: Synthetic oligonucleotide
  Antisense strand to SEQ ID NO: 2111214
uuguuucugcuaaagcuca

SEQ ID NO: 2111216 - RNA, 19 nt, Artificial Sequence
  Description of Artificial Sequence: Synthetic oligonucleotide
  Sense strand starting at position 3847 of SEQ ID NO: 1882311
uucugaacaguuuggucau

SEQ ID NO: 2111217 - RNA, 19 nt, Artificial Sequence
  Description of Artificial Sequence: Synthetic oligonucleotide
  Antisense strand to SEQ ID NO: 2111216
augaccaaacuguucagaa

SEQ ID NO: 2111218 - RNA, 19 nt, Artificial Sequence
  Description of Artificial Sequence: Synthetic oligonucleotide
  Sense strand starting at position 3878 of SEQ ID NO: 1882311
ugggauaaaucugaauacu

SEQ ID NO: 2111219 - RNA, 19 nt, Artificial Sequence
  Description of Artificial Sequence: Synthetic oligonucleotide
  Antisense strand to SEQ ID NO: 2111218
aguauucagauuuauccca

SEQ ID NO: 2111220 - RNA, 19 nt, Artificial Sequence
  Description of Artificial Sequence: Synthetic oligonucleotide
  Sense strand starting at position 3967 of SEQ ID NO: 1882311
cacaguugucccuguauua

SEQ ID NO: 2111221 - RNA, 19 nt, Artificial Sequence
  Description of Artificial Sequence: Synthetic oligonucleotide
  Antisense strand to SEQ ID NO: 2111220
uaauacagggacaacugug

SEQ ID NO: 2111222 - RNA, 19 nt, Artificial Sequence
  Description of Artificial Sequence: Synthetic oligonucleotide
  Sense strand starting at position 3974 of SEQ ID NO: 1882311
gucccuguauuaucuuuaa

SEQ ID NO: 2111223 - RNA, 19 nt, Artificial Sequence
  Description of Artificial Sequence: Synthetic oligonucleotide
  Antisense strand to SEQ ID NO: 2111222
uuaaagauaauacagggac

SEQ ID NO: 2111224 - RNA, 19 nt, Artificial Sequence
  Description of Artificial Sequence: Synthetic oligonucleotide
  Sense strand starting at position 82 of SEQ ID NO: 1882313
cgaauuuccaguggucuga

SEQ ID NO: 2111225 - RNA, 19 nt, Artificial Sequence
  Description of Artificial Sequence: Synthetic oligonucleotide
  Antisense strand to SEQ ID NO: 2111224
ucagaccacuggaaauucg

SEQ ID NO: 2111226 - RNA, 19 nt, Artificial Sequence
  Description of Artificial Sequence: Synthetic oligonucleotide
  Sense strand starting at position 167 of SEQ ID NO: 1882313
auccaaugucacuaguucu

SEQ ID NO: 2111227 - RNA, 19 nt, Artificial Sequence
  Description of Artificial Sequence: Synthetic oligonucleotide
  Antisense strand to SEQ ID NO: 2111226
agaacuagugacauuggau

SEQ ID NO: 2111228 - RNA, 19 nt, Artificial Sequence
  Description of Artificial Sequence: Synthetic oligonucleotide
  Sense strand starting at position 185 of SEQ ID NO: 1882313
uccuauguaucuuuccaga

SEQ ID NO: 2111229 - RNA, 19 nt, Artificial Sequence
  Description of Artificial Sequence: Synthetic oligonucleotide
  Antisense strand to SEQ ID NO: 2111228
ucuggaaagauacauagga

SEQ ID NO: 2111230 - RNA, 19 nt, Artificial Sequence
  Description of Artificial Sequence: Synthetic oligonucleotide
  Sense strand starting at position 187 of SEQ ID NO: 1882313
cuauguaucuuuccagaga

SEQ ID NO: 2111231 - RNA, 19 nt, Artificial Sequence
  Description of Artificial Sequence: Synthetic oligonucleotide
  Antisense strand to SEQ ID NO: 2111230
ucucuggaaagauacauag

SEQ ID NO: 2111232 - RNA, 19 nt, Artificial Sequence
  Description of Artificial Sequence: Synthetic oligonucleotide
  Sense strand starting at position 201 of SEQ ID NO: 1882313
agagacauuccaugacucu

SEQ ID NO: 2111233 - RNA, 19 nt, Artificial Sequence
  Description of Artificial Sequence: Synthetic oligonucleotide
  Antisense strand to SEQ ID NO: 2111232
agagucauggaaugucucu

SEQ ID NO: 2111234 - RNA, 19 nt, Artificial Sequence
  Description of Artificial Sequence: Synthetic oligonucleotide
  Sense strand starting at position 258 of SEQ ID NO: 1882313
cagagugugucacugagau

SEQ ID NO: 2111235 - RNA, 19 nt, Artificial Sequence
  Description of Artificial Sequence: Synthetic oligonucleotide
  Antisense strand to SEQ ID NO: 2111234
aucucagugacacacucug

SEQ ID NO: 2111236 - RNA, 19 nt, Artificial Sequence
  Description of Artificial Sequence: Synthetic oligonucleotide
  Sense strand starting at position 260 of SEQ ID NO: 1882313
gagugugucacugagaucu

SEQ ID NO: 2111237 - RNA, 19 nt, Artificial Sequence
  Description of Artificial Sequence: Synthetic oligonucleotide
  Antisense strand to SEQ ID NO: 2111236
agaucucagugacacacuc

SEQ ID NO: 2111238 - RNA, 19 nt, Artificial Sequence
  Description of Artificial Sequence: Synthetic oligonucleotide
  Sense strand starting at position 270 of SEQ ID NO: 1882313
cugagaucucgacaaaguu

SEQ ID NO: 2111239 - RNA, 19 nt, Artificial Sequence
  Description of Artificial Sequence: Synthetic oligonucleotide
  Antisense strand to SEQ ID NO: 2111238
aacuuugucgagaucucag

SEQ ID NO: 2111240 - RNA, 19 nt, Artificial Sequence
  Description of Artificial Sequence: Synthetic oligonucleotide
  Sense strand starting at position 313 of SEQ ID NO: 1882313
uuuguacaguaauuacaga

SEQ ID NO: 2111241 - RNA, 19 nt, Artificial Sequence
  Description of Artificial Sequence: Synthetic oligonucleotide
  Antisense strand to SEQ ID NO: 2111240
ucuguaauuacuguacaaa

SEQ ID NO: 2111242 - RNA, 19 nt, Artificial Sequence
  Description of Artificial Sequence: Synthetic oligonucleotide
  Sense strand starting at position 393 of SEQ ID NO: 1882313
uugugaagucaccaaguca

SEQ ID NO: 2111243 - RNA, 19 nt, Artificial Sequence
  Description of Artificial Sequence: Synthetic oligonucleotide
  Antisense strand to SEQ ID NO: 2111242
ugacuuggugacuucacaa

SEQ ID NO: 2111244 - RNA, 19 nt, Artificial Sequence
  Description of Artificial Sequence: Synthetic oligonucleotide
  Sense strand starting at position 798 of SEQ ID NO: 1882313
uucuguauuucuuugaugu

SEQ ID NO: 2111245 - RNA, 19 nt, Artificial Sequence
  Description of Artificial Sequence: Synthetic oligonucleotide
  Antisense strand to SEQ ID NO: 2111244
acaucaaagaaauacagaa

SEQ ID NO: 2111246 - RNA, 19 nt, Artificial Sequence
  Description of Artificial Sequence: Synthetic oligonucleotide
  Sense strand starting at position 799 of SEQ ID NO: 1882313
ucuguauuucuuugauguu

SEQ ID NO: 2111247 - RNA, 19 nt, Artificial Sequence
  Description of Artificial Sequence: Synthetic oligonucleotide
  Antisense strand to SEQ ID NO: 2111246
aacaucaaagaaauacaga

SEQ ID NO: 2111248 - RNA, 19 nt, Artificial Sequence
  Description of Artificial Sequence: Synthetic oligonucleotide
  Sense strand starting at position 921 of SEQ ID NO: 1882313
gagucuaccucuccaacga

SEQ ID NO: 2111249 - RNA, 19 nt, Artificial Sequence
  Description of Artificial Sequence: Synthetic oligonucleotide
  Antisense strand to SEQ ID NO: 2111248
ucguuggagagguagacuc

SEQ ID NO: 2111250 - RNA, 19 nt, Artificial Sequence
  Description of Artificial Sequence: Synthetic oligonucleotide
  Sense strand starting at position 922 of SEQ ID NO: 1882313
agucuaccucuccaacgau

SEQ ID NO: 2111251 - RNA, 19 nt, Artificial Sequence
  Description of Artificial Sequence: Synthetic oligonucleotide
  Antisense strand to SEQ ID NO: 2111250
aucguuggagagguagacu

SEQ ID NO: 2111252 - RNA, 19 nt, Artificial Sequence
  Description of Artificial Sequence: Synthetic oligonucleotide
  Sense strand starting at position 969 of SEQ ID NO: 1882313
ggaacauuccuauggcccu

SEQ ID NO: 2111253 - RNA, 19 nt, Artificial Sequence
  Description of Artificial Sequence: Synthetic oligonucleotide
  Antisense strand to SEQ ID NO: 2111252
agggccauaggaauguucc

SEQ ID NO: 2111254 - RNA, 19 nt, Artificial Sequence
  Description of Artificial Sequence: Synthetic oligonucleotide
  Sense strand starting at position 1040 of SEQ ID NO: 1882313
agacaccaucucuggaauu

SEQ ID NO: 2111255 - RNA, 19 nt, Artificial Sequence
  Description of Artificial Sequence: Synthetic oligonucleotide
  Antisense strand to SEQ ID NO: 2111254
aauuccagagauggugucu

SEQ ID NO: 2111256 - RNA, 19 nt, Artificial Sequence
  Description of Artificial Sequence: Synthetic oligonucleotide
  Sense strand starting at position 1053 of SEQ ID NO: 1882313
ggaauuaaaguguaucuuu

SEQ ID NO: 2111257 - RNA, 19 nt, Artificial Sequence
  Description of Artificial Sequence: Synthetic oligonucleotide
  Antisense strand to SEQ ID NO: 2111256
aaagauacacuuuaauucc

SEQ ID NO: 2111258 - RNA, 19 nt, Artificial Sequence
  Description of Artificial Sequence: Synthetic oligonucleotide
  Sense strand starting at position 1265 of SEQ ID NO: 1882313
uuuauucuagaaggacauu

SEQ ID NO: 2111259 - RNA, 19 nt, Artificial Sequence
  Description of Artificial Sequence: Synthetic oligonucleotide
  Antisense strand to SEQ ID NO: 2111258
aauguccuucuagaauaaa

SEQ ID NO: 2111260 - RNA, 19 nt, Artificial Sequence
  Description of Artificial Sequence: Synthetic oligonucleotide
  Sense strand starting at position 1392 of SEQ ID NO: 1882313
auauauuaaggaugcuuga

SEQ ID NO: 2111261 - RNA, 19 nt, Artificial Sequence
  Description of Artificial Sequence: Synthetic oligonucleotide
  Antisense strand to SEQ ID NO: 2111260
ucaagcauccuuaauauau

SEQ ID NO: 2111262 - RNA, 19 nt, Artificial Sequence
  Description of Artificial Sequence: Synthetic oligonucleotide
  Sense strand starting at position 2200 of SEQ ID NO: 1882313
uguugaaugccucaucuaa

SEQ ID NO: 2111263 - RNA, 19 nt, Artificial Sequence
  Description of Artificial Sequence: Synthetic oligonucleotide
  Antisense strand to SEQ ID NO: 2111262
uuagaugaggcauucaaca

SEQ ID NO: 2111264 - RNA, 19 nt, Artificial Sequence
  Description of Artificial Sequence: Synthetic oligonucleotide
  Sense strand starting at position 2202 of SEQ ID NO: 1882313
uugaaugccucaucuaaga

SEQ ID NO: 2111265 - RNA, 19 nt, Artificial Sequence
  Description of Artificial Sequence: Synthetic oligonucleotide
  Antisense strand to SEQ ID NO: 2111264
ucuuagaugaggcauucaa

SEQ ID NO: 2111266 - RNA, 19 nt, Artificial Sequence
  Description of Artificial Sequence: Synthetic oligonucleotide
  Sense strand starting at position 2499 of SEQ ID NO: 1882313
uguaaauugugaucuuuag

SEQ ID NO: 2111267 - RNA, 19 nt, Artificial Sequence
  Description of Artificial Sequence: Synthetic oligonucleotide
  Antisense strand to SEQ ID NO: 2111266
cuaaagaucacaauuuaca

SEQ ID NO: 2111268 - RNA, 19 nt, Artificial Sequence
  Description of Artificial Sequence: Synthetic oligonucleotide
  Sense strand starting at position 2610 of SEQ ID NO: 1882313
ucugcagugguccagagau

SEQ ID NO: 2111269 - RNA, 19 nt, Artificial Sequence
  Description of Artificial Sequence: Synthetic oligonucleotide
  Antisense strand to SEQ ID NO: 2111268
aucucuggaccacugcaga

SEQ ID NO: 2111270 - RNA, 19 nt, Artificial Sequence
  Description of Artificial Sequence: Synthetic oligonucleotide
  Sense strand starting at position 2612 of SEQ ID NO: 1882313
ugcagugguccagagauga

SEQ ID NO: 2111271 - RNA, 19 nt, Artificial Sequence
  Description of Artificial Sequence: Synthetic oligonucleotide
  Antisense strand to SEQ ID NO: 2111270
ucaucucuggaccacugca

SEQ ID NO: 2111272 - RNA, 19 nt, Artificial Sequence
  Description of Artificial Sequence: Synthetic oligonucleotide
  Sense strand starting at position 2646 of SEQ ID NO: 1882313
agaccuauauuauuaguga

SEQ ID NO: 2111273 - RNA, 19 nt, Artificial Sequence
  Description of Artificial Sequence: Synthetic oligonucleotide
  Antisense strand to SEQ ID NO: 2111272
ucacuaauaauauaggucu

SEQ ID NO: 2111274 - RNA, 19 nt, Artificial Sequence
  Description of Artificial Sequence: Synthetic oligonucleotide
  Sense strand starting at position 2752 of SEQ ID NO: 1882313
augcuuugugucuccgauu

SEQ ID NO: 2111275 - RNA, 19 nt, Artificial Sequence
  Description of Artificial Sequence: Synthetic oligonucleotide
  Antisense strand to SEQ ID NO: 2111274
aaucggagacacaaagcau

SEQ ID NO: 2111276 - RNA, 19 nt, Artificial Sequence
  Description of Artificial Sequence: Synthetic oligonucleotide
  Sense strand starting at position 2894 of SEQ ID NO: 1882313
cuuaauaguggugaguaau

SEQ ID NO: 2111277 - RNA, 19 nt, Artificial Sequence
  Description of Artificial Sequence: Synthetic oligonucleotide
  Antisense strand to SEQ ID NO: 2111276
auuacucaccacuauuaag

SEQ ID NO: 2111278 - RNA, 19 nt, Artificial Sequence
  Description of Artificial Sequence: Synthetic oligonucleotide
  Sense strand starting at position 2904 of SEQ ID NO: 1882313
gugaguaaugcacagaguc

SEQ ID NO: 2111279 - RNA, 19 nt, Artificial Sequence
  Description of Artificial Sequence: Synthetic oligonucleotide
  Antisense strand to SEQ ID NO: 2111278
gacucugugcauuacucac

SEQ ID NO: 2111280 - RNA, 19 nt, Artificial Sequence
  Description of Artificial Sequence: Synthetic oligonucleotide
  Sense strand starting at position 2938 of SEQ ID NO: 1882313
ggagaaucuugggucuuga

SEQ ID NO: 2111281 - RNA, 19 nt, Artificial Sequence
  Description of Artificial Sequence: Synthetic oligonucleotide
  Antisense strand to SEQ ID NO: 2111280
ucaagacccaagauucucc

SEQ ID NO: 2111282 - RNA, 19 nt, Artificial Sequence
  Description of Artificial Sequence: Synthetic oligonucleotide
  Sense strand starting at position 3086 of SEQ ID NO: 1882313
uccuuaauggcagaaguuc

SEQ ID NO: 2111283 - RNA, 19 nt, Artificial Sequence
  Description of Artificial Sequence: Synthetic oligonucleotide
  Antisense strand to SEQ ID NO: 2111282
gaacuucugccauuaagga

SEQ ID NO: 2111284 - RNA, 19 nt, Artificial Sequence
  Description of Artificial Sequence: Synthetic oligonucleotide
  Sense strand starting at position 3156 of SEQ ID NO: 1882313
uuguccuauccuuagcaga

SEQ ID NO: 2111285 - RNA, 19 nt, Artificial Sequence
  Description of Artificial Sequence: Synthetic oligonucleotide
  Antisense strand to SEQ ID NO: 2111284
ucugcuaaggauaggacaa

SEQ ID NO: 2111286 - RNA, 19 nt, Artificial Sequence
  Description of Artificial Sequence: Synthetic oligonucleotide
  Sense strand starting at position 3214 of SEQ ID NO: 1882313
uuauuaaucugagccauag

SEQ ID NO: 2111287 - RNA, 19 nt, Artificial Sequence
  Description of Artificial Sequence: Synthetic oligonucleotide
  Antisense strand to SEQ ID NO: 2111286
cuauggcucagauuaauaa

SEQ ID NO: 2111288 - RNA, 19 nt, Artificial Sequence
  Description of Artificial Sequence: Synthetic oligonucleotide
  Sense strand starting at position 3268 of SEQ ID NO: 1882313
auugcauuccagugagaug

SEQ ID NO: 2111289 - RNA, 19 nt, Artificial Sequence
  Description of Artificial Sequence: Synthetic oligonucleotide
  Antisense strand to SEQ ID NO: 2111288
caucucacuggaaugcaau

SEQ ID NO: 2111290 - RNA, 19 nt, Artificial Sequence
  Description of Artificial Sequence: Synthetic oligonucleotide
  Sense strand starting at position 3269 of SEQ ID NO: 1882313
uugcauuccagugagauga

SEQ ID NO: 2111291 - RNA, 19 nt, Artificial Sequence
  Description of Artificial Sequence: Synthetic oligonucleotide
  Antisense strand to SEQ ID NO: 2111290
ucaucucacuggaaugcaa

SEQ ID NO: 2111292 - RNA, 19 nt, Artificial Sequence
  Description of Artificial Sequence: Synthetic oligonucleotide
  Sense strand starting at position 3361 of SEQ ID NO: 1882313
caggaauccugagcaguuc

SEQ ID NO: 2111293 - RNA, 19 nt, Artificial Sequence
  Description of Artificial Sequence: Synthetic oligonucleotide
  Antisense strand to SEQ ID NO: 2111292
gaacugcucaggauuccug

SEQ ID NO: 2111294 - RNA, 19 nt, Artificial Sequence
  Description of Artificial Sequence: Synthetic oligonucleotide
  Sense strand starting at position 3370 of SEQ ID NO: 1882313
ugagcaguucuugauagug

SEQ ID NO: 2111295 - RNA, 19 nt, Artificial Sequence
  Description of Artificial Sequence: Synthetic oligonucleotide
  Antisense strand to SEQ ID NO: 2111294
cacuaucaagaacugcuca

SEQ ID NO: 2111296 - RNA, 19 nt, Artificial Sequence
  Description of Artificial Sequence: Synthetic oligonucleotide
  Sense strand starting at position 3379 of SEQ ID NO: 1882313
cuugauaguggucacagga

SEQ ID NO: 2111297 - RNA, 19 nt, Artificial Sequence
  Description of Artificial Sequence: Synthetic oligonucleotide
  Antisense strand to SEQ ID NO: 2111296
uccugugaccacuaucaag

SEQ ID NO: 2111298 - RNA, 19 nt, Artificial Sequence
  Description of Artificial Sequence: Synthetic oligonucleotide
  Sense strand starting at position 3513 of SEQ ID NO: 1882313
uaaauaugugcucaggcaa

SEQ ID NO: 2111299 - RNA, 19 nt, Artificial Sequence
  Description of Artificial Sequence: Synthetic oligonucleotide
  Antisense strand to SEQ ID NO: 2111298
uugccugagcacauauuua

SEQ ID NO: 2111300 - RNA, 19 nt, Artificial Sequence
  Description of Artificial Sequence: Synthetic oligonucleotide
  Sense strand starting at position 3650 of SEQ ID NO: 1882313
ucugaaaggugagcucuua

SEQ ID NO: 2111301 - RNA, 19 nt, Artificial Sequence
  Description of Artificial Sequence: Synthetic oligonucleotide
  Antisense strand to SEQ ID NO: 2111300
uaagagcucaccuuucaga

SEQ ID NO: 2111302 - RNA, 19 nt, Artificial Sequence
  Description of Artificial Sequence: Synthetic oligonucleotide
  Sense strand starting at position 3935 of SEQ ID NO: 1882313
agguuugugaaucaaugca

SEQ ID NO: 2111303 - RNA, 19 nt, Artificial Sequence
  Description of Artificial Sequence: Synthetic oligonucleotide
  Antisense strand to SEQ ID NO: 2111302
ugcauugauucacaaaccu

SEQ ID NO: 2111304 - RNA, 19 nt, Artificial Sequence
  Description of Artificial Sequence: Synthetic oligonucleotide
  Sense strand starting at position 510 of SEQ ID NO: 1882314
ggguccagauguucacaga

SEQ ID NO: 2111305 - RNA, 19 nt, Artificial Sequence
  Description of Artificial Sequence: Synthetic oligonucleotide
  Antisense strand to SEQ ID NO: 2111304
ucugugaacaucuggaccc

SEQ ID NO: 2111306 - RNA, 19 nt, Artificial Sequence
  Description of Artificial Sequence: Synthetic oligonucleotide
  Sense strand starting at position 734 of SEQ ID NO: 1882314
ggaaucuguccuggcuaua

SEQ ID NO: 2111307 - RNA, 19 nt, Artificial Sequence
  Description of Artificial Sequence: Synthetic oligonucleotide
  Antisense strand to SEQ ID NO: 2111306
uauagccaggacagauucc

SEQ ID NO: 2111308 - RNA, 19 nt, Artificial Sequence
  Description of Artificial Sequence: Synthetic oligonucleotide
  Sense strand starting at position 805 of SEQ ID NO: 1882314
gacuuaauucuguggcugu

SEQ ID NO: 2111309 - RNA, 19 nt, Artificial Sequence
  Description of Artificial Sequence: Synthetic oligonucleotide
  Antisense strand to SEQ ID NO: 2111308
acagccacagaauuaaguc

SEQ ID NO: 2111310 - RNA, 19 nt, Artificial Sequence
  Description of Artificial Sequence: Synthetic oligonucleotide
  Sense strand starting at position 818 of SEQ ID NO: 1882314
ggcugugaaggccauguau

SEQ ID NO: 2111311 - RNA, 19 nt, Artificial Sequence
  Description of Artificial Sequence: Synthetic oligonucleotide
  Antisense strand to SEQ ID NO: 2111310
auacauggccuucacagcc

SEQ ID NO: 2111312 - RNA, 19 nt, Artificial Sequence
  Description of Artificial Sequence: Synthetic oligonucleotide
  Sense strand starting at position 820 of SEQ ID NO: 1882314
cugugaaggccauguauac

SEQ ID NO: 2111313 - RNA, 19 nt, Artificial Sequence
  Description of Artificial Sequence: Synthetic oligonucleotide
  Antisense strand to SEQ ID NO: 2111312
guauacauggccuucacag

SEQ ID NO: 2111314 - RNA, 19 nt, Artificial Sequence
  Description of Artificial Sequence: Synthetic oligonucleotide
  Sense strand starting at position 829 of SEQ ID NO: 1882314
ccauguauaccauaguugu

SEQ ID NO: 2111315 - RNA, 19 nt, Artificial Sequence
  Description of Artificial Sequence: Synthetic oligonucleotide
  Antisense strand to SEQ ID NO: 2111314
acaacuaugguauacaugg

SEQ ID NO: 2111316 - RNA, 19 nt, Artificial Sequence
  Description of Artificial Sequence: Synthetic oligonucleotide
  Sense strand starting at position 902 of SEQ ID NO: 1882314
gaaggaagucugugggaac

SEQ ID NO: 2111317 - RNA, 19 nt, Artificial Sequence
  Description of Artificial Sequence: Synthetic oligonucleotide
  Antisense strand to SEQ ID NO: 2111316
guucccacagacuuccuuc

SEQ ID NO: 2111318 - RNA, 19 nt, Artificial Sequence
  Description of Artificial Sequence: Synthetic oligonucleotide
  Sense strand starting at position 1088 of SEQ ID NO: 1882314
ggacucaucucagcagaaa

SEQ ID NO: 2111319 - RNA, 19 nt, Artificial Sequence
  Description of Artificial Sequence: Synthetic oligonucleotide
  Antisense strand to SEQ ID NO: 2111318
uuucugcugagaugagucc

SEQ ID NO: 2111320 - RNA, 19 nt, Artificial Sequence
  Description of Artificial Sequence: Synthetic oligonucleotide
  Sense strand starting at position 1091 of SEQ ID NO: 1882314
cucaucucagcagaaaugu

SEQ ID NO: 2111321 - RNA, 19 nt, Artificial Sequence
  Description of Artificial Sequence: Synthetic oligonucleotide
  Antisense strand to SEQ ID NO: 2111320
acauuucugcugagaugag

SEQ ID NO: 2111322 - RNA, 19 nt, Artificial Sequence
  Description of Artificial Sequence: Synthetic oligonucleotide
  Sense strand starting at position 1100 of SEQ ID NO: 1882314
gcagaaaugugguucccag

SEQ ID NO: 2111323 - RNA, 19 nt, Artificial Sequence
  Description of Artificial Sequence: Synthetic oligonucleotide
  Antisense strand to SEQ ID NO: 2111322
cugggaaccacauuucugc

SEQ ID NO: 2111324 - RNA, 19 nt, Artificial Sequence
  Description of Artificial Sequence: Synthetic oligonucleotide
  Sense strand starting at position 1156 of SEQ ID NO: 1882314
uccuuuggcucuuccaaga

SEQ ID NO: 2111325 - RNA, 19 nt, Artificial Sequence
  Description of Artificial Sequence: Synthetic oligonucleotide
  Antisense strand to SEQ ID NO: 2111324
ucuuggaagagccaaagga

SEQ ID NO: 2111326 - RNA, 19 nt, Artificial Sequence
  Description of Artificial Sequence: Synthetic oligonucleotide
  Sense strand starting at position 1183 of SEQ ID NO: 1882314
ggcccagucugcccagaau

SEQ ID NO: 2111327 - RNA, 19 nt, Artificial Sequence
  Description of Artificial Sequence: Synthetic oligonucleotide
  Antisense strand to SEQ ID NO: 2111326
auucugggcagacugggcc

SEQ ID NO: 2111328 - RNA, 19 nt, Artificial Sequence
  Description of Artificial Sequence: Synthetic oligonucleotide
  Sense strand starting at position 1194 of SEQ ID NO: 1882314
cccagaauucccugguguc

SEQ ID NO: 2111329 - RNA, 19 nt, Artificial Sequence
  Description of Artificial Sequence: Synthetic oligonucleotide
  Antisense strand to SEQ ID NO: 2111328
gacaccagggaauucuggg

SEQ ID NO: 2111330 - RNA, 19 nt, Artificial Sequence
  Description of Artificial Sequence: Synthetic oligonucleotide
  Sense strand starting at position 1195 of SEQ ID NO: 1882314
ccagaauucccuggugucu

SEQ ID NO: 2111331 - RNA, 19 nt, Artificial Sequence
  Description of Artificial Sequence: Synthetic oligonucleotide
  Antisense strand to SEQ ID NO: 2111330
agacaccagggaauucugg

SEQ ID NO: 2111332 - RNA, 19 nt, Artificial Sequence
  Description of Artificial Sequence: Synthetic oligonucleotide
  Sense strand starting at position 1206 of SEQ ID NO: 1882314
uggugucugguguguaaag

SEQ ID NO: 2111333 - RNA, 19 nt, Artificial Sequence
  Description of Artificial Sequence: Synthetic oligonucleotide
  Antisense strand to SEQ ID NO: 2111332
cuuuacacaccagacacca

SEQ ID NO: 2111334 - RNA, 19 nt, Artificial Sequence
  Description of Artificial Sequence: Synthetic oligonucleotide
  Sense strand starting at position 1446 of SEQ ID NO: 1882314
acccuuccuuguccugaua

SEQ ID NO: 2111335 - RNA, 19 nt, Artificial Sequence
  Description of Artificial Sequence: Synthetic oligonucleotide
  Antisense strand to SEQ ID NO: 2111334
uaucaggacaaggaagggu

SEQ ID NO: 2111336 - RNA, 19 nt, Artificial Sequence
  Description of Artificial Sequence: Synthetic oligonucleotide
  Sense strand starting at position 1449 of SEQ ID NO: 1882314
cuuccuuguccugauagaa

SEQ ID NO: 2111337 - RNA, 19 nt, Artificial Sequence
  Description of Artificial Sequence: Synthetic oligonucleotide
  Antisense strand to SEQ ID NO: 2111336
uucuaucaggacaaggaag

SEQ ID NO: 2111338 - RNA, 19 nt, Artificial Sequence
  Description of Artificial Sequence: Synthetic oligonucleotide
  Sense strand starting at position 2422 of SEQ ID NO: 1882314
gggccagaagguugugaca

SEQ ID NO: 2111339 - RNA, 19 nt, Artificial Sequence
  Description of Artificial Sequence: Synthetic oligonucleotide
  Antisense strand to SEQ ID NO: 2111338
ugucacaaccuucuggccc

SEQ ID NO: 2111340 - RNA, 19 nt, Artificial Sequence
  Description of Artificial Sequence: Synthetic oligonucleotide
  Sense strand starting at position 2597 of SEQ ID NO: 1882314
gaaggugccuugucuguaa

SEQ ID NO: 2111341 - RNA, 19 nt, Artificial Sequence
  Description of Artificial Sequence: Synthetic oligonucleotide
  Antisense strand to SEQ ID NO: 2111340
uuacagacaaggcaccuuc

SEQ ID NO: 2111342 - RNA, 19 nt, Artificial Sequence
  Description of Artificial Sequence: Synthetic oligonucleotide
  Sense strand starting at position 2604 of SEQ ID NO: 1882314
ccuugucuguaagucacaa

SEQ ID NO: 2111343 - RNA, 19 nt, Artificial Sequence
  Description of Artificial Sequence: Synthetic oligonucleotide
  Antisense strand to SEQ ID NO: 2111342
uugugacuuacagacaagg

SEQ ID NO: 2111344 - RNA, 19 nt, Artificial Sequence
  Description of Artificial Sequence: Synthetic oligonucleotide
  Sense strand starting at position 2658 of SEQ ID NO: 1882314
gugugaugccucgugggua

SEQ ID NO: 2111345 - RNA, 19 nt, Artificial Sequence
  Description of Artificial Sequence: Synthetic oligonucleotide
  Antisense strand to SEQ ID NO: 2111344
uacccacgaggcaucacac

SEQ ID NO: 2111346 - RNA, 19 nt, Artificial Sequence
  Description of Artificial Sequence: Synthetic oligonucleotide
  Sense strand starting at position 2707 of SEQ ID NO: 1882314
aggacugugucaccugaga

SEQ ID NO: 2111347 - RNA, 19 nt, Artificial Sequence
  Description of Artificial Sequence: Synthetic oligonucleotide
  Antisense strand to SEQ ID NO: 2111346
ucucaggugacacaguccu

SEQ ID NO: 2111348 - RNA, 19 nt, Artificial Sequence
  Description of Artificial Sequence: Synthetic oligonucleotide
  Sense strand starting at position 2730 of SEQ ID NO: 1882314
agaggucaccuuggagagu

SEQ ID NO: 2111349 - RNA, 19 nt, Artificial Sequence
  Description of Artificial Sequence: Synthetic oligonucleotide
  Antisense strand to SEQ ID NO: 2111348
acucuccaaggugaccucu

SEQ ID NO: 2111350 - RNA, 19 nt, Artificial Sequence
  Description of Artificial Sequence: Synthetic oligonucleotide
  Sense strand starting at position 2794 of SEQ ID NO: 1882314
ccagaugucuccucauucu

SEQ ID NO: 2111351 - RNA, 19 nt, Artificial Sequence
  Description of Artificial Sequence: Synthetic oligonucleotide
  Antisense strand to SEQ ID NO: 2111350
agaaugaggagacaucugg

SEQ ID NO: 2111352 - RNA, 19 nt, Artificial Sequence
  Description of Artificial Sequence: Synthetic oligonucleotide
  Sense strand starting at position 2813 of SEQ ID NO: 1882314
ggaacaugagcaggauagu

SEQ ID NO: 2111353 - RNA, 19 nt, Artificial Sequence
  Description of Artificial Sequence: Synthetic oligonucleotide
  Antisense strand to SEQ ID NO: 2111352
acuauccugcucauguucc

SEQ ID NO: 2111354 - RNA, 19 nt, Artificial Sequence
  Description of Artificial Sequence: Synthetic oligonucleotide
  Sense strand starting at position 2865 of SEQ ID NO: 1882314
guagccuaccucuggcaaa

SEQ ID NO: 2111355 - RNA, 19 nt, Artificial Sequence
  Description of Artificial Sequence: Synthetic oligonucleotide
  Antisense strand to SEQ ID NO: 2111354
uuugccagagguaggcuac

SEQ ID NO: 2111356 - RNA, 19 nt, Artificial Sequence
  Description of Artificial Sequence: Synthetic oligonucleotide
  Sense strand starting at position 2883 of SEQ ID NO: 1882314
aagccaaagucaucaugga

SEQ ID NO: 2111357 - RNA, 19 nt, Artificial Sequence
  Description of Artificial Sequence: Synthetic oligonucleotide
  Antisense strand to SEQ ID NO: 2111356
uccaugaugacuuuggcuu

SEQ ID NO: 2111358 - RNA, 19 nt, Artificial Sequence
  Description of Artificial Sequence: Synthetic oligonucleotide
  Sense strand starting at position 2989 of SEQ ID NO: 1882314
ggcagagguuaccuggaaa

SEQ ID NO: 2111359 - RNA, 19 nt, Artificial Sequence
  Description of Artificial Sequence: Synthetic oligonucleotide
  Antisense strand to SEQ ID NO: 2111358
uuuccagguaaccucugcc

SEQ ID NO: 2111360 - RNA, 19 nt, Artificial Sequence
  Description of Artificial Sequence: Synthetic oligonucleotide
  Sense strand starting at position 3098 of SEQ ID NO: 1882314
gagaacuaaugucaccuga

SEQ ID NO: 2111361 - RNA, 19 nt, Artificial Sequence
  Description of Artificial Sequence: Synthetic oligonucleotide
  Antisense strand to SEQ ID NO: 2111360
ucaggugacauuaguucuc

SEQ ID NO: 2111362 - RNA, 19 nt, Artificial Sequence
  Description of Artificial Sequence: Synthetic oligonucleotide
  Sense strand starting at position 3100 of SEQ ID NO: 1882314
gaacuaaugucaccugaga

SEQ ID NO: 2111363 - RNA, 19 nt, Artificial Sequence
  Description of Artificial Sequence: Synthetic oligonucleotide
  Antisense strand to SEQ ID NO: 2111362
ucucaggugacauuaguuc

SEQ ID NO: 2111364 - RNA, 19 nt, Artificial Sequence
  Description of Artificial Sequence: Synthetic oligonucleotide
  Sense strand starting at position 3122 of SEQ ID NO: 1882314
cagagaucaucugggaaag

SEQ ID NO: 2111365 - RNA, 19 nt, Artificial Sequence
  Description of Artificial Sequence: Synthetic oligonucleotide
  Antisense strand to SEQ ID NO: 2111364
cuuucccagaugaucucug

SEQ ID NO: 2111366 - RNA, 19 nt, Artificial Sequence
  Description of Artificial Sequence: Synthetic oligonucleotide
  Sense strand starting at position 3124 of SEQ ID NO: 1882314
gagaucaucugggaaagca

SEQ ID NO: 2111367 - RNA, 19 nt, Artificial Sequence
  Description of Artificial Sequence: Synthetic oligonucleotide
  Antisense strand to SEQ ID NO: 2111366
ugcuuucccagaugaucuc

SEQ ID NO: 2111368 - RNA, 19 nt, Artificial Sequence
  Description of Artificial Sequence: Synthetic oligonucleotide
  Sense strand starting at position 3195 of SEQ ID NO: 1882314
ggacuaaugucacuuagga

SEQ ID NO: 2111369 - RNA, 19 nt, Artificial Sequence
  Description of Artificial Sequence: Synthetic oligonucleotide
  Antisense strand to SEQ ID NO: 2111368
uccuaagugacauuagucc

SEQ ID NO: 2111370 - RNA, 19 nt, Artificial Sequence
  Description of Artificial Sequence: Synthetic oligonucleotide
  Sense strand starting at position 3290 of SEQ ID NO: 1882314
gggcacagaucacuugaga

SEQ ID NO: 2111371 - RNA, 19 nt, Artificial Sequence
  Description of Artificial Sequence: Synthetic oligonucleotide
  Antisense strand to SEQ ID NO: 2111370
ucucaagugaucugugccc

SEQ ID NO: 2111372 - RNA, 19 nt, Artificial Sequence
  Description of Artificial Sequence: Synthetic oligonucleotide
  Sense strand starting at position 3314 of SEQ ID NO: 1882314
gaacuaaugucacccagga

SEQ ID NO: 2111373 - RNA, 19 nt, Artificial Sequence
  Description of Artificial Sequence: Synthetic oligonucleotide
  Antisense strand to SEQ ID NO: 2111372
uccugggugacauuaguuc

SEQ ID NO: 2111374 - RNA, 19 nt, Artificial Sequence
  Description of Artificial Sequence: Synthetic oligonucleotide
  Sense strand starting at position 3335 of SEQ ID NO: 1882314
gcagaagucaccugagaag

SEQ ID NO: 2111375 - RNA, 19 nt, Artificial Sequence
  Description of Artificial Sequence: Synthetic oligonucleotide
  Antisense strand to SEQ ID NO: 2111374
cuucucaggugacuucugc

SEQ ID NO: 2111376 - RNA, 19 nt, Artificial Sequence
  Description of Artificial Sequence: Synthetic oligonucleotide
  Sense strand starting at position 3443 of SEQ ID NO: 1882314
gccagucauggacaucuca

SEQ ID NO: 2111377 - RNA, 19 nt, Artificial Sequence
  Description of Artificial Sequence: Synthetic oligonucleotide
  Antisense strand to SEQ ID NO: 2111376
ugagauguccaugacuggc

SEQ ID NO: 2111378 - RNA, 19 nt, Artificial Sequence
  Description of Artificial Sequence: Synthetic oligonucleotide
  Sense strand starting at position 3450 of SEQ ID NO: 1882314
auggacaucucagaugaaa

SEQ ID NO: 2111379 - RNA, 19 nt, Artificial Sequence
  Description of Artificial Sequence: Synthetic oligonucleotide
  Antisense strand to SEQ ID NO: 2111378
uuucaucugagauguccau

SEQ ID NO: 2111380 - RNA, 19 nt, Artificial Sequence
  Description of Artificial Sequence: Synthetic oligonucleotide
  Sense strand starting at position 3502 of SEQ ID NO: 1882314
acucauguguggccagaaa

SEQ ID NO: 2111381 - RNA, 19 nt, Artificial Sequence
  Description of Artificial Sequence: Synthetic oligonucleotide
  Antisense strand to SEQ ID NO: 2111380
uuucuggccacacaugagu

SEQ ID NO: 2111382 - RNA, 19 nt, Artificial Sequence
  Description of Artificial Sequence: Synthetic oligonucleotide
  Sense strand starting at position 3868 of SEQ ID NO: 1882314
cccaaagccugauuaagau

SEQ ID NO: 2111383 - RNA, 19 nt, Artificial Sequence
  Description of Artificial Sequence: Synthetic oligonucleotide
  Antisense strand to SEQ ID NO: 2111382
aucuuaaucaggcuuuggg

SEQ ID NO: 2111384 - RNA, 19 nt, Artificial Sequence
  Description of Artificial Sequence: Synthetic oligonucleotide
  Sense strand starting at position 20 of SEQ ID NO: 1882315
aguauuucugggugggcau

SEQ ID NO: 2111385 - RNA, 19 nt, Artificial Sequence
  Description of Artificial Sequence: Synthetic oligonucleotide
  Antisense strand to SEQ ID NO: 2111384
augcccacccagaaauacu

SEQ ID NO: 2111386 - RNA, 19 nt, Artificial Sequence
  Description of Artificial Sequence: Synthetic oligonucleotide
  Sense strand starting at position 207 of SEQ ID NO: 1882315
cgaguuuagaguugaaagg

SEQ ID NO: 2111387 - RNA, 19 nt, Artificial Sequence
  Description of Artificial Sequence: Synthetic oligonucleotide
  Antisense strand to SEQ ID NO: 2111386
ccuuucaacucuaaacucg

SEQ ID NO: 2111388 - RNA, 19 nt, Artificial Sequence
  Description of Artificial Sequence: Synthetic oligonucleotide
  Sense strand starting at position 223 of SEQ ID NO: 1882315
agggaaacgucuuugaggu

SEQ ID NO: 2111389 - RNA, 19 nt, Artificial Sequence
  Description of Artificial Sequence: Synthetic oligonucleotide
  Antisense strand to SEQ ID NO: 2111388
accucaaagacguuucccu

SEQ ID NO: 2111390 - RNA, 19 nt, Artificial Sequence
  Description of Artificial Sequence: Synthetic oligonucleotide
  Sense strand starting at position 283 of SEQ ID NO: 1882315
gagccuuagguuuggaaag

SEQ ID NO: 2111391 - RNA, 19 nt, Artificial Sequence
  Description of Artificial Sequence: Synthetic oligonucleotide
  Antisense strand to SEQ ID NO: 2111390
cuuuccaaaccuaaggcuc

SEQ ID NO: 2111392 - RNA, 19 nt, Artificial Sequence
  Description of Artificial Sequence: Synthetic oligonucleotide
  Sense strand starting at position 620 of SEQ ID NO: 1882315
ugaugcugucaauaagcca

SEQ ID NO: 2111393 - RNA, 19 nt, Artificial Sequence
  Description of Artificial Sequence: Synthetic oligonucleotide
  Antisense strand to SEQ ID NO: 2111392
uggcuuauugacagcauca

SEQ ID NO: 2111394 - RNA, 19 nt, Artificial Sequence
  Description of Artificial Sequence: Synthetic oligonucleotide
  Sense strand starting at position 826 of SEQ ID NO: 1882315
gaagaugagcucuguuaca

SEQ ID NO: 2111395 - RNA, 19 nt, Artificial Sequence
  Description of Artificial Sequence: Synthetic oligonucleotide
  Antisense strand to SEQ ID NO: 2111394
uguaacagagcucaucuuc

SEQ ID NO: 2111396 - RNA, 19 nt, Artificial Sequence
  Description of Artificial Sequence: Synthetic oligonucleotide
  Sense strand starting at position 1104 of SEQ ID NO: 1882315
ucagcucugccugagaaga

SEQ ID NO: 2111397 - RNA, 19 nt, Artificial Sequence
  Description of Artificial Sequence: Synthetic oligonucleotide
  Antisense strand to SEQ ID NO: 2111396
ucuucucaggcagagcuga

SEQ ID NO: 2111398 - RNA, 19 nt, Artificial Sequence
  Description of Artificial Sequence: Synthetic oligonucleotide
  Sense strand starting at position 1166 of SEQ ID NO: 1882315
ggcaaagucaaguauguga

SEQ ID NO: 2111399 - RNA, 19 nt, Artificial Sequence
  Description of Artificial Sequence: Synthetic oligonucleotide
  Antisense strand to SEQ ID NO: 2111398
ucacauacuugacuuugcc

SEQ ID NO: 2111400 - RNA, 19 nt, Artificial Sequence
  Description of Artificial Sequence: Synthetic oligonucleotide
  Sense strand starting at position 1361 of SEQ ID NO: 1882315
cuuggauacuugucuccaa

SEQ ID NO: 2111401 - RNA, 19 nt, Artificial Sequence
  Description of Artificial Sequence: Synthetic oligonucleotide
  Antisense strand to SEQ ID NO: 2111400
uuggagacaaguauccaag

SEQ ID NO: 2111402 - RNA, 19 nt, Artificial Sequence
  Description of Artificial Sequence: Synthetic oligonucleotide
  Sense strand starting at position 1362 of SEQ ID NO: 1882315
uuggauacuugucuccaau

SEQ ID NO: 2111403 - RNA, 19 nt, Artificial Sequence
  Description of Artificial Sequence: Synthetic oligonucleotide
  Antisense strand to SEQ ID NO: 2111402
auuggagacaaguauccaa

SEQ ID NO: 2111404 - RNA, 19 nt, Artificial Sequence
  Description of Artificial Sequence: Synthetic oligonucleotide
  Sense strand starting at position 1364 of SEQ ID NO: 1882315
ggauacuugucuccaauaa

SEQ ID NO: 2111405 - RNA, 19 nt, Artificial Sequence
  Description of Artificial Sequence: Synthetic oligonucleotide
  Antisense strand to SEQ ID NO: 2111404
uuauuggagacaaguaucc

SEQ ID NO: 2111406 - RNA, 19 nt, Artificial Sequence
  Description of Artificial Sequence: Synthetic oligonucleotide
  Sense strand starting at position 1424 of SEQ ID NO: 1882315
auaagauagcuaugucaaa

SEQ ID NO: 2111407 - RNA, 19 nt, Artificial Sequence
  Description of Artificial Sequence: Synthetic oligonucleotide
  Antisense strand to SEQ ID NO: 2111406
uuugacauagcuaucuuau

SEQ ID NO: 2111408 - RNA, 19 nt, Artificial Sequence
  Description of Artificial Sequence: Synthetic oligonucleotide
  Sense strand starting at position 1784 of SEQ ID NO: 1882315
ugggaaucccuguggacuu

SEQ ID NO: 2111409 - RNA, 19 nt, Artificial Sequence
  Description of Artificial Sequence: Synthetic oligonucleotide
  Antisense strand to SEQ ID NO: 2111408
aaguccacagggauuccca

SEQ ID NO: 2111410 - RNA, 19 nt, Artificial Sequence
  Description of Artificial Sequence: Synthetic oligonucleotide
  Sense strand starting at position 1942 of SEQ ID NO: 1882315
ccugaucaguccucccaga

SEQ ID NO: 2111411 - RNA, 19 nt, Artificial Sequence
  Description of Artificial Sequence: Synthetic oligonucleotide
  Antisense strand to SEQ ID NO: 2111410
ucugggaggacugaucagg

SEQ ID NO: 2111412 - RNA, 19 nt, Artificial Sequence
  Description of Artificial Sequence: Synthetic oligonucleotide
  Sense strand starting at position 1977 of SEQ ID NO: 1882315
ggccuuugccuguucggau

SEQ ID NO: 2111413 - RNA, 19 nt, Artificial Sequence
  Description of Artificial Sequence: Synthetic oligonucleotide
  Antisense strand to SEQ ID NO: 2111412
auccgaacaggcaaaggcc

SEQ ID NO: 2111414 - RNA, 19 nt, Artificial Sequence
  Description of Artificial Sequence: Synthetic oligonucleotide
  Sense strand starting at position 2084 of SEQ ID NO: 1882315
gaggcagagaugggucuuu

SEQ ID NO: 2111415 - RNA, 19 nt, Artificial Sequence
  Description of Artificial Sequence: Synthetic oligonucleotide
  Antisense strand to SEQ ID NO: 2111414
aaagacccaucucugccuc

SEQ ID NO: 2111416 - RNA, 19 nt, Artificial Sequence
  Description of Artificial Sequence: Synthetic oligonucleotide
  Sense strand starting at position 2214 of SEQ ID NO: 1882315
gccagaucucacugaguga

SEQ ID NO: 2111417 - RNA, 19 nt, Artificial Sequence
  Description of Artificial Sequence: Synthetic oligonucleotide
  Antisense strand to SEQ ID NO: 2111416
ucacucagugagaucuggc

SEQ ID NO: 2111418 - RNA, 19 nt, Artificial Sequence
  Description of Artificial Sequence: Synthetic oligonucleotide
  Sense strand starting at position 2218 of SEQ ID NO: 1882315
gaucucacugagugaccau

SEQ ID NO: 2111419 - RNA, 19 nt, Artificial Sequence
  Description of Artificial Sequence: Synthetic oligonucleotide
  Antisense strand to SEQ ID NO: 2111418
auggucacucagugagauc

SEQ ID NO: 2111420 - RNA, 19 nt, Artificial Sequence
  Description of Artificial Sequence: Synthetic oligonucleotide
  Sense strand starting at position 2243 of SEQ ID NO: 1882315
caaccugaggacugauguu

SEQ ID NO: 2111421 - RNA, 19 nt, Artificial Sequence
  Description of Artificial Sequence: Synthetic oligonucleotide
  Antisense strand to SEQ ID NO: 2111420
aacaucaguccucagguug

SEQ ID NO: 2111422 - RNA, 19 nt, Artificial Sequence
  Description of Artificial Sequence: Synthetic oligonucleotide
  Sense strand starting at position 2290 of SEQ ID NO: 1882315
auuagacuucugcagauca

SEQ ID NO: 2111423 - RNA, 19 nt, Artificial Sequence
  Description of Artificial Sequence: Synthetic oligonucleotide
  Antisense strand to SEQ ID NO: 2111422
ugaucugcagaagucuaau

SEQ ID NO: 2111424 - RNA, 19 nt, Artificial Sequence
  Description of Artificial Sequence: Synthetic oligonucleotide
  Sense strand starting at position 2385 of SEQ ID NO: 1882315
gcuggaaauauguguaaca

SEQ ID NO: 2111425 - RNA, 19 nt, Artificial Sequence
  Description of Artificial Sequence: Synthetic oligonucleotide
  Antisense strand to SEQ ID NO: 2111424
uguuacacauauuuccagc

SEQ ID NO: 2111426 - RNA, 19 nt, Artificial Sequence
  Description of Artificial Sequence: Synthetic oligonucleotide
  Sense strand starting at position 2424 of SEQ ID NO: 1882315
cuuccaguggcagggaaau

SEQ ID NO: 2111427 - RNA, 19 nt, Artificial Sequence
  Description of Artificial Sequence: Synthetic oligonucleotide
  Antisense strand to SEQ ID NO: 2111426
auuucccugccacuggaag

SEQ ID NO: 2111428 - RNA, 19 nt, Artificial Sequence
  Description of Artificial Sequence: Synthetic oligonucleotide
  Sense strand starting at position 2453 of SEQ ID NO: 1882315
guguguaguaaagacuuaa

SEQ ID NO: 2111429 - RNA, 19 nt, Artificial Sequence
  Description of Artificial Sequence: Synthetic oligonucleotide
  Antisense strand to SEQ ID NO: 2111428
uuaagucuuuacuacacac

SEQ ID NO: 2111430 - RNA, 19 nt, Artificial Sequence
  Description of Artificial Sequence: Synthetic oligonucleotide
  Sense strand starting at position 2531 of SEQ ID NO: 1882315
aucuguucccaguaaauaa

SEQ ID NO: 2111431 - RNA, 19 nt, Artificial Sequence
  Description of Artificial Sequence: Synthetic oligonucleotide
  Antisense strand to SEQ ID NO: 2111430
uuauuuacugggaacagau

SEQ ID NO: 2111432 - RNA, 19 nt, Artificial Sequence
  Description of Artificial Sequence: Synthetic oligonucleotide
  Sense strand starting at position 2617 of SEQ ID NO: 1882315
ugccucuuugccuaagaaa

SEQ ID NO: 2111433 - RNA, 19 nt, Artificial Sequence
  Description of Artificial Sequence: Synthetic oligonucleotide
  Antisense strand to SEQ ID NO: 2111432
uuucuuaggcaaagaggca

SEQ ID NO: 2111434 - RNA, 19 nt, Artificial Sequence
  Description of Artificial Sequence: Synthetic oligonucleotide
  Sense strand starting at position 2813 of SEQ ID NO: 1882315
ccacaauaaggguguccau

SEQ ID NO: 2111435 - RNA, 19 nt, Artificial Sequence
  Description of Artificial Sequence: Synthetic oligonucleotide
  Antisense strand to SEQ ID NO: 2111434
auggacacccuuauugugg

SEQ ID NO: 2111436 - RNA, 19 nt, Artificial Sequence
  Description of Artificial Sequence: Synthetic oligonucleotide
  Sense strand starting at position 2829 of SEQ ID NO: 1882315
cauggauuccuaggacuac

SEQ ID NO: 2111437 - RNA, 19 nt, Artificial Sequence
  Description of Artificial Sequence: Synthetic oligonucleotide
  Antisense strand to SEQ ID NO: 2111436
guaguccuaggaauccaug

SEQ ID NO: 2111438 - RNA, 19 nt, Artificial Sequence
  Description of Artificial Sequence: Synthetic oligonucleotide
  Sense strand starting at position 3003 of SEQ ID NO: 1882315
uugggugucagugauggga

SEQ ID NO: 2111439 - RNA, 19 nt, Artificial Sequence
  Description of Artificial Sequence: Synthetic oligonucleotide
  Antisense strand to SEQ ID NO: 2111438
ucccaucacugacacccaa

SEQ ID NO: 2111440 - RNA, 19 nt, Artificial Sequence
  Description of Artificial Sequence: Synthetic oligonucleotide
  Sense strand starting at position 3007 of SEQ ID NO: 1882315
gugucagugaugggaagau

SEQ ID NO: 2111441 - RNA, 19 nt, Artificial Sequence
  Description of Artificial Sequence: Synthetic oligonucleotide
  Antisense strand to SEQ ID NO: 2111440
aucuucccaucacugacac

SEQ ID NO: 2111442 - RNA, 19 nt, Artificial Sequence
  Description of Artificial Sequence: Synthetic oligonucleotide
  Sense strand starting at position 3144 of SEQ ID NO: 1882315
ugcggaguuccagugucuu

SEQ ID NO: 2111443 - RNA, 19 nt, Artificial Sequence
  Description of Artificial Sequence: Synthetic oligonucleotide
  Antisense strand to SEQ ID NO: 2111442
aagacacuggaacuccgca

SEQ ID NO: 2111444 - RNA, 19 nt, Artificial Sequence
  Description of Artificial Sequence: Synthetic oligonucleotide
  Sense strand starting at position 3217 of SEQ ID NO: 1882315
caagacauuccugggcaga

SEQ ID NO: 2111445 - RNA, 19 nt, Artificial Sequence
  Description of Artificial Sequence: Synthetic oligonucleotide
  Antisense strand to SEQ ID NO: 2111444
ucugcccaggaaugucuug

SEQ ID NO: 2111446 - RNA, 19 nt, Artificial Sequence
  Description of Artificial Sequence: Synthetic oligonucleotide
  Sense strand starting at position 3218 of SEQ ID NO: 1882315
aagacauuccugggcagag

SEQ ID NO: 2111447 - RNA, 19 nt, Artificial Sequence
  Description of Artificial Sequence: Synthetic oligonucleotide
  Antisense strand to SEQ ID NO: 2111446
cucugcccaggaaugucuu

SEQ ID NO: 2111448 - RNA, 19 nt, Artificial Sequence
  Description of Artificial Sequence: Synthetic oligonucleotide
  Sense strand starting at position 3220 of SEQ ID NO: 1882315
gacauuccugggcagagua

SEQ ID NO: 2111449 - RNA, 19 nt, Artificial Sequence
  Description of Artificial Sequence: Synthetic oligonucleotide
  Antisense strand to SEQ ID NO: 2111448
uacucugcccaggaauguc

SEQ ID NO: 2111450 - RNA, 19 nt, Artificial Sequence
  Description of Artificial Sequence: Synthetic oligonucleotide
  Sense strand starting at position 3750 of SEQ ID NO: 1882315
cgugaauuaccugagcauu

SEQ ID NO: 2111451 - RNA, 19 nt, Artificial Sequence
  Description of Artificial Sequence: Synthetic oligonucleotide
  Antisense strand to SEQ ID NO: 2111450
aaugcucagguaauucacg

SEQ ID NO: 2111452 - RNA, 19 nt, Artificial Sequence
  Description of Artificial Sequence: Synthetic oligonucleotide
  Sense strand starting at position 3752 of SEQ ID NO: 1882315
ugaauuaccugagcauuaa

SEQ ID NO: 2111453 - RNA, 19 nt, Artificial Sequence
  Description of Artificial Sequence: Synthetic oligonucleotide
  Antisense strand to SEQ ID NO: 2111452
uuaaugcucagguaauuca

SEQ ID NO: 2111454 - RNA, 19 nt, Artificial Sequence
  Description of Artificial Sequence: Synthetic oligonucleotide
  Sense strand starting at position 3764 of SEQ ID NO: 1882315
gcauuaauuccugaaagcu

SEQ ID NO: 2111455 - RNA, 19 nt, Artificial Sequence
  Description of Artificial Sequence: Synthetic oligonucleotide
  Antisense strand to SEQ ID NO: 2111454
agcuuucaggaauuaaugc

SEQ ID NO: 2111456 - RNA, 19 nt, Artificial Sequence
  Description of Artificial Sequence: Synthetic oligonucleotide
  Sense strand starting at position 3881 of SEQ ID NO: 1882315
aacagaacuguauggaguu

SEQ ID NO: 2111457 - RNA, 19 nt, Artificial Sequence
  Description of Artificial Sequence: Synthetic oligonucleotide
  Antisense strand to SEQ ID NO: 2111456
aacuccauacaguucuguu

SEQ ID NO: 2111458 - RNA, 19 nt, Artificial Sequence
  Description of Artificial Sequence: Synthetic oligonucleotide
  Sense strand starting at position 3893 of SEQ ID NO: 1882315
uggaguucucuuggauuga

SEQ ID NO: 2111459 - RNA, 19 nt, Artificial Sequence
  Description of Artificial Sequence: Synthetic oligonucleotide
  Antisense strand to SEQ ID NO: 2111458
ucaauccaagagaacucca

SEQ ID NO: 2111460 - RNA, 19 nt, Artificial Sequence
  Description of Artificial Sequence: Synthetic oligonucleotide
  Sense strand starting at position 3897 of SEQ ID NO: 1882315
guucucuuggauugagaag

SEQ ID NO: 2111461 - RNA, 19 nt, Artificial Sequence
  Description of Artificial Sequence: Synthetic oligonucleotide
  Antisense strand to SEQ ID NO: 2111460
cuucucaauccaagagaac

SEQ ID NO: 2111462 - RNA, 19 nt, Artificial Sequence
  Description of Artificial Sequence: Synthetic oligonucleotide
  Sense strand starting at position 3977 of SEQ ID NO: 1882315
ggcaguaacccucauaggu

SEQ ID NO: 2111463 - RNA, 19 nt, Artificial Sequence
  Description of Artificial Sequence: Synthetic oligonucleotide
  Antisense strand to SEQ ID NO: 2111462
accuaugaggguuacugcc

SEQ ID NO: 2111464 - RNA, 19 nt, Artificial Sequence
  Description of Artificial Sequence: Synthetic oligonucleotide
  Sense strand starting at position 3 of SEQ ID NO: 1882316
agcguaaagacagaucauu

SEQ ID NO: 2111465 - RNA, 19 nt, Artificial Sequence
  Description of Artificial Sequence: Synthetic oligonucleotide
  Antisense strand to SEQ ID NO: 2111464
aaugaucugucuuuacgcu

SEQ ID NO: 2111466 - RNA, 19 nt, Artificial Sequence
  Description of Artificial Sequence: Synthetic oligonucleotide
  Sense strand starting at position 200 of SEQ ID NO: 1882316
ccacuuucuccuggagaac

SEQ ID NO: 2111467 - RNA, 19 nt, Artificial Sequence
  Description of Artificial Sequence: Synthetic oligonucleotide
  Antisense strand to SEQ ID NO: 2111466
guucuccaggagaaagugg

SEQ ID NO: 2111468 - RNA, 19 nt, Artificial Sequence
  Description of Artificial Sequence: Synthetic oligonucleotide
  Sense strand starting at position 349 of SEQ ID NO: 1882316
ggguuuauacuggauugca

SEQ ID NO: 2111469 - RNA, 19 nt, Artificial Sequence
  Description of Artificial Sequence: Synthetic oligonucleotide
  Antisense strand to SEQ ID NO: 2111468
ugcaauccaguauaaaccc

SEQ ID NO: 2111470 - RNA, 19 nt, Artificial Sequence
  Description of Artificial Sequence: Synthetic oligonucleotide
  Sense strand starting at position 395 of SEQ ID NO: 1882316
ucgcaauugaucgaacaug

SEQ ID NO: 2111471 - RNA, 19 nt, Artificial Sequence
  Description of Artificial Sequence: Synthetic oligonucleotide
  Antisense strand to SEQ ID NO: 2111470
cauguucgaucaauugcga

SEQ ID NO: 2111472 - RNA, 19 nt, Artificial Sequence
  Description of Artificial Sequence: Synthetic oligonucleotide
  Sense strand starting at position 405 of SEQ ID NO: 1882316
ucgaacauguaaucugaca

SEQ ID NO: 2111473 - RNA, 19 nt, Artificial Sequence
  Description of Artificial Sequence: Synthetic oligonucleotide
  Antisense strand to SEQ ID NO: 2111472
ugucagauuacauguucga

SEQ ID NO: 2111474 - RNA, 19 nt, Artificial Sequence
  Description of Artificial Sequence: Synthetic oligonucleotide
  Sense strand starting at position 470 of SEQ ID NO: 1882316
aagccuguaugugucauuu

SEQ ID NO: 2111475 - RNA, 19 nt, Artificial Sequence
  Description of Artificial Sequence: Synthetic oligonucleotide
  Antisense strand to SEQ ID NO: 2111474
aaaugacacauacaggcuu

SEQ ID NO: 2111476 - RNA, 19 nt, Artificial Sequence
  Description of Artificial Sequence: Synthetic oligonucleotide
  Sense strand starting at position 474 of SEQ ID NO: 1882316
cuguaugugucauuuaccu

SEQ ID NO: 2111477 - RNA, 19 nt, Artificial Sequence
  Description of Artificial Sequence: Synthetic oligonucleotide
  Antisense strand to SEQ ID NO: 2111476
agguaaaugacacauacag

SEQ ID NO: 2111478 - RNA, 19 nt, Artificial Sequence
  Description of Artificial Sequence: Synthetic oligonucleotide
  Sense strand starting at position 476 of SEQ ID NO: 1882316
guaugugucauuuaccugu

SEQ ID NO: 2111479 - RNA, 19 nt, Artificial Sequence
  Description of Artificial Sequence: Synthetic oligonucleotide
  Antisense strand to SEQ ID NO: 2111478
acagguaaaugacacauac

SEQ ID NO: 2111480 - RNA, 19 nt, Artificial Sequence
  Description of Artificial Sequence: Synthetic oligonucleotide
  Sense strand starting at position 478 of SEQ ID NO: 1882316
augugucauuuaccuguga

SEQ ID NO: 2111481 - RNA, 19 nt, Artificial Sequence
  Description of Artificial Sequence: Synthetic oligonucleotide
  Antisense strand to SEQ ID NO: 2111480
ucacagguaaaugacacau

SEQ ID NO: 2111482 - RNA, 19 nt, Artificial Sequence
  Description of Artificial Sequence: Synthetic oligonucleotide
  Sense strand starting at position 480 of SEQ ID NO: 1882316
gugucauuuaccugugacg

SEQ ID NO: 2111483 - RNA, 19 nt, Artificial Sequence
  Description of Artificial Sequence: Synthetic oligonucleotide
  Antisense strand to SEQ ID NO: 2111482
cgucacagguaaaugacac

SEQ ID NO: 2111484 - RNA, 19 nt, Artificial Sequence
  Description of Artificial Sequence: Synthetic oligonucleotide
  Sense strand starting at position 578 of SEQ ID NO: 1882316
ugaacaauugcuuagcacu

SEQ ID NO: 2111485 - RNA, 19 nt, Artificial Sequence
  Description of Artificial Sequence: Synthetic oligonucleotide
  Antisense strand to SEQ ID NO: 2111484
agugcuaagcaauuguuca

SEQ ID NO: 2111486 - RNA, 19 nt, Artificial Sequence
  Description of Artificial Sequence: Synthetic oligonucleotide
  Sense strand starting at position 589 of SEQ ID NO: 1882316
uuagcacucgaacagaaua

SEQ ID NO: 2111487 - RNA, 19 nt, Artificial Sequence
  Description of Artificial Sequence: Synthetic oligonucleotide
  Antisense strand to SEQ ID NO: 2111486
uauucuguucgagugcuaa

SEQ ID NO: 2111488 - RNA, 19 nt, Artificial Sequence
  Description of Artificial Sequence: Synthetic oligonucleotide
  Sense strand starting at position 599 of SEQ ID NO: 1882316
aacagaauagcccagcgau

SEQ ID NO: 2111489 - RNA, 19 nt, Artificial Sequence
  Description of Artificial Sequence: Synthetic oligonucleotide
  Antisense strand to SEQ ID NO: 2111488
aucgcugggcuauucuguu

SEQ ID NO: 2111490 - RNA, 19 nt, Artificial Sequence
  Description of Artificial Sequence: Synthetic oligonucleotide
  Sense strand starting at position 828 of SEQ ID NO: 1882316
auuguuuagcacuggaaga

SEQ ID NO: 2111491 - RNA, 19 nt, Artificial Sequence
  Description of Artificial Sequence: Synthetic oligonucleotide
  Antisense strand to SEQ ID NO: 2111490
ucuuccagugcuaaacaau

SEQ ID NO: 2111492 - RNA, 19 nt, Artificial Sequence
  Description of Artificial Sequence: Synthetic oligonucleotide
  Sense strand starting at position 829 of SEQ ID NO: 1882316
uuguuuagcacuggaagaa

SEQ ID NO: 2111493 - RNA, 19 nt, Artificial Sequence
  Description of Artificial Sequence: Synthetic oligonucleotide
  Antisense strand to SEQ ID NO: 2111492
uucuuccagugcuaaacaa

SEQ ID NO: 2111494 - RNA, 19 nt, Artificial Sequence
  Description of Artificial Sequence: Synthetic oligonucleotide
  Sense strand starting at position 830 of SEQ ID NO: 1882316
uguuuagcacuggaagaau

SEQ ID NO: 2111495 - RNA, 19 nt, Artificial Sequence
  Description of Artificial Sequence: Synthetic oligonucleotide
  Antisense strand to SEQ ID NO: 2111494
auucuuccagugcuaaaca

SEQ ID NO: 2111496 - RNA, 19 nt, Artificial Sequence
  Description of Artificial Sequence: Synthetic oligonucleotide
  Sense strand starting at position 839 of SEQ ID NO: 1882316
cuggaagaaucaucuagug

SEQ ID NO: 2111497 - RNA, 19 nt, Artificial Sequence
  Description of Artificial Sequence: Synthetic oligonucleotide
  Antisense strand to SEQ ID NO: 2111496
cacuagaugauucuuccag

SEQ ID NO: 2111498 - RNA, 19 nt, Artificial Sequence
  Description of Artificial Sequence: Synthetic oligonucleotide
  Sense strand starting at position 841 of SEQ ID NO: 1882316
ggaagaaucaucuagugcu

SEQ ID NO: 2111499 - RNA, 19 nt, Artificial Sequence
  Description of Artificial Sequence: Synthetic oligonucleotide
  Antisense strand to SEQ ID NO: 2111498
agcacuagaugauucuucc

SEQ ID NO: 2111500 - RNA, 19 nt, Artificial Sequence
  Description of Artificial Sequence: Synthetic oligonucleotide
  Sense strand starting at position 1130 of SEQ ID NO: 1882316
gggcaacagguuugauauu

SEQ ID NO: 2111501 - RNA, 19 nt, Artificial Sequence
  Description of Artificial Sequence: Synthetic oligonucleotide
  Antisense strand to SEQ ID NO: 2111500
aauaucaaaccuguugccc

SEQ ID NO: 2111502 - RNA, 19 nt, Artificial Sequence
  Description of Artificial Sequence: Synthetic oligonucleotide
  Sense strand starting at position 1175 of SEQ ID NO: 1882316
uuccaacuugucuggaaua

SEQ ID NO: 2111503 - RNA, 19 nt, Artificial Sequence
  Description of Artificial Sequence: Synthetic oligonucleotide
  Antisense strand to SEQ ID NO: 2111502
uauuccagacaaguuggaa

SEQ ID NO: 2111504 - RNA, 19 nt, Artificial Sequence
  Description of Artificial Sequence: Synthetic oligonucleotide
  Sense strand starting at position 1481 of SEQ ID NO: 1882316
cuugacuuuccuggaguaa

SEQ ID NO: 2111505 - RNA, 19 nt, Artificial Sequence
  Description of Artificial Sequence: Synthetic oligonucleotide
  Antisense strand to SEQ ID NO: 2111504
uuacuccaggaaagucaag

SEQ ID NO: 2111506 - RNA, 19 nt, Artificial Sequence
  Description of Artificial Sequence: Synthetic oligonucleotide
  Sense strand starting at position 1482 of SEQ ID NO: 1882316
uugacuuuccuggaguaac

SEQ ID NO: 2111507 - RNA, 19 nt, Artificial Sequence
  Description of Artificial Sequence: Synthetic oligonucleotide
  Antisense strand to SEQ ID NO: 2111506
guuacuccaggaaagucaa

SEQ ID NO: 2111508 - RNA, 19 nt, Artificial Sequence
  Description of Artificial Sequence: Synthetic oligonucleotide
  Sense strand starting at position 1697 of SEQ ID NO: 1882316
ccaaauuagccagggugaa

SEQ ID NO: 2111509 - RNA, 19 nt, Artificial Sequence
  Description of Artificial Sequence: Synthetic oligonucleotide
  Antisense strand to SEQ ID NO: 2111508
uucacccuggcuaauuugg

SEQ ID NO: 2111510 - RNA, 19 nt, Artificial Sequence
  Description of Artificial Sequence: Synthetic oligonucleotide
  Sense strand starting at position 1869 of SEQ ID NO: 1882316
ggccuuucucaagggagaa

SEQ ID NO: 2111511 - RNA, 19 nt, Artificial Sequence
  Description of Artificial Sequence: Synthetic oligonucleotide
  Antisense strand to SEQ ID NO: 2111510
uucucccuugagaaaggcc

SEQ ID NO: 2111512 - RNA, 19 nt, Artificial Sequence
  Description of Artificial Sequence: Synthetic oligonucleotide
  Sense strand starting at position 2114 of SEQ ID NO: 1882316
gaggucauuuaacaagaga

SEQ ID NO: 2111513 - RNA, 19 nt, Artificial Sequence
  Description of Artificial Sequence: Synthetic oligonucleotide
  Antisense strand to SEQ ID NO: 2111512
ucucuuguuaaaugaccuc

SEQ ID NO: 2111514 - RNA, 19 nt, Artificial Sequence
  Description of Artificial Sequence: Synthetic oligonucleotide
  Sense strand starting at position 2446 of SEQ ID NO: 1882316
uuggaauuaaguuguugga

SEQ ID NO: 2111515 - RNA, 19 nt, Artificial Sequence
  Description of Artificial Sequence: Synthetic oligonucleotide
  Antisense strand to SEQ ID NO: 2111514
uccaacaacuuaauuccaa

SEQ ID NO: 2111516 - RNA, 19 nt, Artificial Sequence
  Description of Artificial Sequence: Synthetic oligonucleotide
  Sense strand starting at position 2448 of SEQ ID NO: 1882316
ggaauuaaguuguuggaug

SEQ ID NO: 2111517 - RNA, 19 nt, Artificial Sequence
  Description of Artificial Sequence: Synthetic oligonucleotide
  Antisense strand to SEQ ID NO: 2111516
cauccaacaacuuaauucc

SEQ ID NO: 2111518 - RNA, 19 nt, Artificial Sequence
  Description of Artificial Sequence: Synthetic oligonucleotide
  Sense strand starting at position 2505 of SEQ ID NO: 1882316
acaguuuguccacaauaua

SEQ ID NO: 2111519 - RNA, 19 nt, Artificial Sequence
  Description of Artificial Sequence: Synthetic oligonucleotide
  Antisense strand to SEQ ID NO: 2111518
uauauuguggacaaacugu

SEQ ID NO: 2111520 - RNA, 19 nt, Artificial Sequence
  Description of Artificial Sequence: Synthetic oligonucleotide
  Sense strand starting at position 2624 of SEQ ID NO: 1882316
agaggcuugaauuguuaaa

SEQ ID NO: 2111521 - RNA, 19 nt, Artificial Sequence
  Description of Artificial Sequence: Synthetic oligonucleotide
  Antisense strand to SEQ ID NO: 2111520
uuuaacaauucaagccucu

SEQ ID NO: 2111522 - RNA, 19 nt, Artificial Sequence
  Description of Artificial Sequence: Synthetic oligonucleotide
  Sense strand starting at position 3196 of SEQ ID NO: 1882316
gcuaauauuuacuuugugu

SEQ ID NO: 2111523 - RNA, 19 nt, Artificial Sequence
  Description of Artificial Sequence: Synthetic oligonucleotide
  Antisense strand to SEQ ID NO: 2111522
acacaaaguaaauauuagc

SEQ ID NO: 2111524 - RNA, 19 nt, Artificial Sequence
  Description of Artificial Sequence: Synthetic oligonucleotide
  Sense strand starting at position 3300 of SEQ ID NO: 1882316
aacuaaaucuuugugagag

SEQ ID NO: 2111525 - RNA, 19 nt, Artificial Sequence
  Description of Artificial Sequence: Synthetic oligonucleotide
  Antisense strand to SEQ ID NO: 2111524
cucucacaaagauuuaguu

SEQ ID NO: 2111526 - RNA, 19 nt, Artificial Sequence
  Description of Artificial Sequence: Synthetic oligonucleotide
  Sense strand starting at position 3325 of SEQ ID NO: 1882316
ggacaauaccaguguaagu

SEQ ID NO: 2111527 - RNA, 19 nt, Artificial Sequence
  Description of Artificial Sequence: Synthetic oligonucleotide
  Antisense strand to SEQ ID NO: 2111526
acuuacacugguauugucc

SEQ ID NO: 2111528 - RNA, 19 nt, Artificial Sequence
  Description of Artificial Sequence: Synthetic oligonucleotide
  Sense strand starting at position 3327 of SEQ ID NO: 1882316
acaauaccaguguaaguaa

SEQ ID NO: 2111529 - RNA, 19 nt, Artificial Sequence
  Description of Artificial Sequence: Synthetic oligonucleotide
  Antisense strand to SEQ ID NO: 2111528
uuacuuacacugguauugu

SEQ ID NO: 2111530 - RNA, 19 nt, Artificial Sequence
  Description of Artificial Sequence: Synthetic oligonucleotide
  Sense strand starting at position 3399 of SEQ ID NO: 1882316
ucuauuuggugauugcauu

SEQ ID NO: 2111531 - RNA, 19 nt, Artificial Sequence
  Description of Artificial Sequence: Synthetic oligonucleotide
  Antisense strand to SEQ ID NO: 2111530
aaugcaaucaccaaauaga

SEQ ID NO: 2111532 - RNA, 19 nt, Artificial Sequence
  Description of Artificial Sequence: Synthetic oligonucleotide
  Sense strand starting at position 3517 of SEQ ID NO: 1882316
agggcaaggucccuaauaa

SEQ ID NO: 2111533 - RNA, 19 nt, Artificial Sequence
  Description of Artificial Sequence: Synthetic oligonucleotide
  Antisense strand to SEQ ID NO: 2111532
uuauuagggaccuugcccu

SEQ ID NO: 2111534 - RNA, 19 nt, Artificial Sequence
  Description of Artificial Sequence: Synthetic oligonucleotide
  Sense strand starting at position 3518 of SEQ ID NO: 1882316
gggcaaggucccuaauaau

SEQ ID NO: 2111535 - RNA, 19 nt, Artificial Sequence
  Description of Artificial Sequence: Synthetic oligonucleotide
  Antisense strand to SEQ ID NO: 2111534
auuauuagggaccuugccc

SEQ ID NO: 2111536 - RNA, 19 nt, Artificial Sequence
  Description of Artificial Sequence: Synthetic oligonucleotide
  Sense strand starting at position 3628 of SEQ ID NO: 1882316
cucccucuggcucaagaau

SEQ ID NO: 2111537 - RNA, 19 nt, Artificial Sequence
  Description of Artificial Sequence: Synthetic oligonucleotide
  Antisense strand to SEQ ID NO: 2111536
auucuugagccagagggag

SEQ ID NO: 2111538 - RNA, 19 nt, Artificial Sequence
  Description of Artificial Sequence: Synthetic oligonucleotide
  Sense strand starting at position 3864 of SEQ ID NO: 1882316
ggcaguugaagauagguaa

SEQ ID NO: 2111539 - RNA, 19 nt, Artificial Sequence
  Description of Artificial Sequence: Synthetic oligonucleotide
  Antisense strand to SEQ ID NO: 2111538
uuaccuaucuucaacugcc

SEQ ID NO: 2111540 - RNA, 19 nt, Artificial Sequence
  Description of Artificial Sequence: Synthetic oligonucleotide
  Sense strand starting at position 3871 of SEQ ID NO: 1882316
gaagauagguaagauuuga

SEQ ID NO: 2111541 - RNA, 19 nt, Artificial Sequence
  Description of Artificial Sequence: Synthetic oligonucleotide
  Antisense strand to SEQ ID NO: 2111540
ucaaaucuuaccuaucuuc

SEQ ID NO: 2111542 - RNA, 19 nt, Artificial Sequence
  Description of Artificial Sequence: Synthetic oligonucleotide
  Sense strand starting at position 3902 of SEQ ID NO: 1882316
acaagacaaugagaauaua

SEQ ID NO: 2111543 - RNA, 19 nt, Artificial Sequence
  Description of Artificial Sequence: Synthetic oligonucleotide
  Antisense strand to SEQ ID NO: 2111542
uauauucucauugucuugu

SEQ ID NO: 2111544 - RNA, 19 nt, Artificial Sequence
  Description of Artificial Sequence: Synthetic oligonucleotide
  Sense strand starting at position 33 of SEQ ID NO: 1882317
aaguucucaccauguugga

SEQ ID NO: 2111545 - RNA, 19 nt, Artificial Sequence
  Description of Artificial Sequence: Synthetic oligonucleotide
  Antisense strand to SEQ ID NO: 2111544
uccaacauggugagaacuu

SEQ ID NO: 2111546 - RNA, 19 nt, Artificial Sequence
  Description of Artificial Sequence: Synthetic oligonucleotide
  Sense strand starting at position 400 of SEQ ID NO: 1882317
ggcauaaauauggaugcau

SEQ ID NO: 2111547 - RNA, 19 nt, Artificial Sequence
  Description of Artificial Sequence: Synthetic oligonucleotide
  Antisense strand to SEQ ID NO: 2111546
augcauccauauuuaugcc

SEQ ID NO: 2111548 - RNA, 19 nt, Artificial Sequence
  Description of Artificial Sequence: Synthetic oligonucleotide
  Sense strand starting at position 531 of SEQ ID NO: 1882317
ucugaaugcuuucuaagac

SEQ ID NO: 2111549 - RNA, 19 nt, Artificial Sequence
  Description of Artificial Sequence: Synthetic oligonucleotide
  Antisense strand to SEQ ID NO: 2111548
gucuuagaaagcauucaga

SEQ ID NO: 2111550 - RNA, 19 nt, Artificial Sequence
  Description of Artificial Sequence: Synthetic oligonucleotide
  Sense strand starting at position 565 of SEQ ID NO: 1882317
uugaaugagguuuagaguu

SEQ ID NO: 2111551 - RNA, 19 nt, Artificial Sequence
  Description of Artificial Sequence: Synthetic oligonucleotide
  Antisense strand to SEQ ID NO: 2111550
aacucuaaaccucauucaa

SEQ ID NO: 2111552 - RNA, 19 nt, Artificial Sequence
  Description of Artificial Sequence: Synthetic oligonucleotide
  Sense strand starting at position 608 of SEQ ID NO: 1882317
agaaguugauucucugaag

SEQ ID NO: 2111553 - RNA, 19 nt, Artificial Sequence
  Description of Artificial Sequence: Synthetic oligonucleotide
  Antisense strand to SEQ ID NO: 2111552
cuucagagaaucaacuucu

SEQ ID NO: 2111554 - RNA, 19 nt, Artificial Sequence
  Description of Artificial Sequence: Synthetic oligonucleotide
  Sense strand starting at position 609 of SEQ ID NO: 1882317
gaaguugauucucugaagu

SEQ ID NO: 2111555 - RNA, 19 nt, Artificial Sequence
  Description of Artificial Sequence: Synthetic oligonucleotide
  Antisense strand to SEQ ID NO: 2111554
acuucagagaaucaacuuc

SEQ ID NO: 2111556 - RNA, 19 nt, Artificial Sequence
  Description of Artificial Sequence: Synthetic oligonucleotide
  Sense strand starting at position 701 of SEQ ID NO: 1882317
acguacaucugaccuacaa

SEQ ID NO: 2111557 - RNA, 19 nt, Artificial Sequence
  Description of Artificial Sequence: Synthetic oligonucleotide
  Antisense strand to SEQ ID NO: 2111556
uuguaggucagauguacgu

SEQ ID NO: 2111558 - RNA, 19 nt, Artificial Sequence
  Description of Artificial Sequence: Synthetic oligonucleotide
  Sense strand starting at position 794 of SEQ ID NO: 1882317
ucaguuagacuugagguca

SEQ ID NO: 2111559 - RNA, 19 nt, Artificial Sequence
  Description of Artificial Sequence: Synthetic oligonucleotide
  Antisense strand to SEQ ID NO: 2111558
ugaccucaagucuaacuga

SEQ ID NO: 2111560 - RNA, 19 nt, Artificial Sequence
  Description of Artificial Sequence: Synthetic oligonucleotide
  Sense strand starting at position 799 of SEQ ID NO: 1882317
uagacuugaggucaugcua

SEQ ID NO: 2111561 - RNA, 19 nt, Artificial Sequence
  Description of Artificial Sequence: Synthetic oligonucleotide
  Antisense strand to SEQ ID NO: 2111560
uagcaugaccucaagucua

SEQ ID NO: 2111562 - RNA, 19 nt, Artificial Sequence
  Description of Artificial Sequence: Synthetic oligonucleotide
  Sense strand starting at position 828 of SEQ ID NO: 1882317
gggucacgaggaugaauua

SEQ ID NO: 2111563 - RNA, 19 nt, Artificial Sequence
  Description of Artificial Sequence: Synthetic oligonucleotide
  Antisense strand to SEQ ID NO: 2111562
uaauucauccucgugaccc

SEQ ID NO: 2111564 - RNA, 19 nt, Artificial Sequence
  Description of Artificial Sequence: Synthetic oligonucleotide
  Sense strand starting at position 988 of SEQ ID NO: 1882317
agacacugguguccugaaa

SEQ ID NO: 2111565 - RNA, 19 nt, Artificial Sequence
  Description of Artificial Sequence: Synthetic oligonucleotide
  Antisense strand to SEQ ID NO: 2111564
uuucaggacaccagugucu

SEQ ID NO: 2111566 - RNA, 19 nt, Artificial Sequence
  Description of Artificial Sequence: Synthetic oligonucleotide
  Sense strand starting at position 1123 of SEQ ID NO: 1882317
uaauauguucuagggaaug

SEQ ID NO: 2111567 - RNA, 19 nt, Artificial Sequence
  Description of Artificial Sequence: Synthetic oligonucleotide
  Antisense strand to SEQ ID NO: 2111566
cauucccuagaacauauua

SEQ ID NO: 2111568 - RNA, 19 nt, Artificial Sequence
  Description of Artificial Sequence: Synthetic oligonucleotide
  Sense strand starting at position 1154 of SEQ ID NO: 1882317
gaaacuuaagagugaaugu

SEQ ID NO: 2111569 - RNA, 19 nt, Artificial Sequence
  Description of Artificial Sequence: Synthetic oligonucleotide
  Antisense strand to SEQ ID NO: 2111568
acauucacucuuaaguuuc

SEQ ID NO: 2111570 - RNA, 19 nt, Artificial Sequence
  Description of Artificial Sequence: Synthetic oligonucleotide
  Sense strand starting at position 1170 of SEQ ID NO: 1882317
ugugcaaaugccuagaauc

SEQ ID NO: 2111571 - RNA, 19 nt, Artificial Sequence
  Description of Artificial Sequence: Synthetic oligonucleotide
  Antisense strand to SEQ ID NO: 2111570
gauucuaggcauuugcaca

SEQ ID NO: 2111572 - RNA, 19 nt, Artificial Sequence
  Description of Artificial Sequence: Synthetic oligonucleotide
  Sense strand starting at position 1319 of SEQ ID NO: 1882317
cuguauaaucuauagucua

SEQ ID NO: 2111573 - RNA, 19 nt, Artificial Sequence
  Description of Artificial Sequence: Synthetic oligonucleotide
  Antisense strand to SEQ ID NO: 2111572
uagacuauagauuauacag

SEQ ID NO: 2111574 - RNA, 19 nt, Artificial Sequence
  Description of Artificial Sequence: Synthetic oligonucleotide
  Sense strand starting at position 1695 of SEQ ID NO: 1882317
caugauucuguaggucaag

SEQ ID NO: 2111575 - RNA, 19 nt, Artificial Sequence
  Description of Artificial Sequence: Synthetic oligonucleotide
  Antisense strand to SEQ ID NO: 2111574
cuugaccuacagaaucaug

SEQ ID NO: 2111576 - RNA, 19 nt, Artificial Sequence
  Description of Artificial Sequence: Synthetic oligonucleotide
  Sense strand starting at position 1698 of SEQ ID NO: 1882317
gauucuguaggucaaggau

SEQ ID NO: 2111577 - RNA, 19 nt, Artificial Sequence
  Description of Artificial Sequence: Synthetic oligonucleotide
  Antisense strand to SEQ ID NO: 2111576
auccuugaccuacagaauc

SEQ ID NO: 2111578 - RNA, 19 nt, Artificial Sequence
  Description of Artificial Sequence: Synthetic oligonucleotide
  Sense strand starting at position 1732 of SEQ ID NO: 1882317
cagagaguuugucccugau

SEQ ID NO: 2111579 - RNA, 19 nt, Artificial Sequence
  Description of Artificial Sequence: Synthetic oligonucleotide
  Antisense strand to SEQ ID NO: 2111578
aucagggacaaacucucug

SEQ ID NO: 2111580 - RNA, 19 nt, Artificial Sequence
  Description of Artificial Sequence: Synthetic oligonucleotide
  Sense strand starting at position 1734 of SEQ ID NO: 1882317
gagaguuugucccugauac

SEQ ID NO: 2111581 - RNA, 19 nt, Artificial Sequence
  Description of Artificial Sequence: Synthetic oligonucleotide
  Antisense strand to SEQ ID NO: 2111580
guaucagggacaaacucuc

SEQ ID NO: 2111582 - RNA, 19 nt, Artificial Sequence
  Description of Artificial Sequence: Synthetic oligonucleotide
  Sense strand starting at position 1735 of SEQ ID NO: 1882317
agaguuugucccugauaca

SEQ ID NO: 2111583 - RNA, 19 nt, Artificial Sequence
  Description of Artificial Sequence: Synthetic oligonucleotide
  Antisense strand to SEQ ID NO: 2111582
uguaucagggacaaacucu

SEQ ID NO: 2111584 - RNA, 19 nt, Artificial Sequence
  Description of Artificial Sequence: Synthetic oligonucleotide
  Sense strand starting at position 1736 of SEQ ID NO: 1882317
gaguuugucccugauacac

SEQ ID NO: 2111585 - RNA, 19 nt, Artificial Sequence
  Description of Artificial Sequence: Synthetic oligonucleotide
  Antisense strand to SEQ ID NO: 2111584
guguaucagggacaaacuc

SEQ ID NO: 2111586 - RNA, 19 nt, Artificial Sequence
  Description of Artificial Sequence: Synthetic oligonucleotide
  Sense strand starting at position 1816 of SEQ ID NO: 1882317
gggaucauaugccuggagu

SEQ ID NO: 2111587 - RNA, 19 nt, Artificial Sequence
  Description of Artificial Sequence: Synthetic oligonucleotide
  Antisense strand to SEQ ID NO: 2111586
acuccaggcauaugauccc

SEQ ID NO: 2111588 - RNA, 19 nt, Artificial Sequence
  Description of Artificial Sequence: Synthetic oligonucleotide
  Sense strand starting at position 1852 of SEQ ID NO: 1882317
ggauguuugcugggaugag

SEQ ID NO: 2111589 - RNA, 19 nt, Artificial Sequence
  Description of Artificial Sequence: Synthetic oligonucleotide
  Antisense strand to SEQ ID NO: 2111588
cucaucccagcaaacaucc

SEQ ID NO: 2111590 - RNA, 19 nt, Artificial Sequence
  Description of Artificial Sequence: Synthetic oligonucleotide
  Sense strand starting at position 1876 of SEQ ID NO: 1882317
ccaagauaguccuuugaua

SEQ ID NO: 2111591 - RNA, 19 nt, Artificial Sequence
  Description of Artificial Sequence: Synthetic oligonucleotide
  Antisense strand to SEQ ID NO: 2111590
uaucaaaggacuaucuugg

SEQ ID NO: 2111592 - RNA, 19 nt, Artificial Sequence
  Description of Artificial Sequence: Synthetic oligonucleotide
  Sense strand starting at position 2225 of SEQ ID NO: 1882317
acgcauguuggauauucua

SEQ ID NO: 2111593 - RNA, 19 nt, Artificial Sequence
  Description of Artificial Sequence: Synthetic oligonucleotide
  Antisense strand to SEQ ID NO: 2111592
uagaauauccaacaugcgu

SEQ ID NO: 2111594 - RNA, 19 nt, Artificial Sequence
  Description of Artificial Sequence: Synthetic oligonucleotide
  Sense strand starting at position 2239 of SEQ ID NO: 1882317
uucuauauuccugagugaa

SEQ ID NO: 2111595 - RNA, 19 nt, Artificial Sequence
  Description of Artificial Sequence: Synthetic oligonucleotide
  Antisense strand to SEQ ID NO: 2111594
uucacucaggaauauagaa

SEQ ID NO: 2111596 - RNA, 19 nt, Artificial Sequence
  Description of Artificial Sequence: Synthetic oligonucleotide
  Sense strand starting at position 2241 of SEQ ID NO: 1882317
cuauauuccugagugaaag

SEQ ID NO: 2111597 - RNA, 19 nt, Artificial Sequence
  Description of Artificial Sequence: Synthetic oligonucleotide
  Antisense strand to SEQ ID NO: 2111596
cuuucacucaggaauauag

SEQ ID NO: 2111598 - RNA, 19 nt, Artificial Sequence
  Description of Artificial Sequence: Synthetic oligonucleotide
  Sense strand starting at position 2242 of SEQ ID NO: 1882317
uauauuccugagugaaaga

SEQ ID NO: 2111599 - RNA, 19 nt, Artificial Sequence
  Description of Artificial Sequence: Synthetic oligonucleotide
  Antisense strand to SEQ ID NO: 2111598
ucuuucacucaggaauaua

SEQ ID NO: 2111600 - RNA, 19 nt, Artificial Sequence
  Description of Artificial Sequence: Synthetic oligonucleotide
  Sense strand starting at position 2266 of SEQ ID NO: 1882317
ucaauuuggucacaugaac

SEQ ID NO: 2111601 - RNA, 19 nt, Artificial Sequence
  Description of Artificial Sequence: Synthetic oligonucleotide
  Antisense strand to SEQ ID NO: 2111600
guucaugugaccaaauuga

SEQ ID NO: 2111602 - RNA, 19 nt, Artificial Sequence
  Description of Artificial Sequence: Synthetic oligonucleotide
  Sense strand starting at position 2476 of SEQ ID NO: 1882317
gguaaauaccauuguuuau

SEQ ID NO: 2111603 - RNA, 19 nt, Artificial Sequence
  Description of Artificial Sequence: Synthetic oligonucleotide
  Antisense strand to SEQ ID NO: 2111602
auaaacaaugguauuuacc

SEQ ID NO: 2111604 - RNA, 19 nt, Artificial Sequence
  Description of Artificial Sequence: Synthetic oligonucleotide
  Sense strand starting at position 2629 of SEQ ID NO: 1882317
ucggauucuagugauguua

SEQ ID NO: 2111605 - RNA, 19 nt, Artificial Sequence
  Description of Artificial Sequence: Synthetic oligonucleotide
  Antisense strand to SEQ ID NO: 2111604
uaacaucacuagaauccga

SEQ ID NO: 2111606 - RNA, 19 nt, Artificial Sequence
  Description of Artificial Sequence: Synthetic oligonucleotide
  Sense strand starting at position 3031 of SEQ ID NO: 1882317
auaaauggaucuguuacau

SEQ ID NO: 2111607 - RNA, 19 nt, Artificial Sequence
  Description of Artificial Sequence: Synthetic oligonucleotide
  Antisense strand to SEQ ID NO: 2111606
auguaacagauccauuuau

SEQ ID NO: 2111608 - RNA, 19 nt, Artificial Sequence
  Description of Artificial Sequence: Synthetic oligonucleotide
  Sense strand starting at position 3110 of SEQ ID NO: 1882317
aucuguugugaggauagca

SEQ ID NO: 2111609 - RNA, 19 nt, Artificial Sequence
  Description of Artificial Sequence: Synthetic oligonucleotide
  Antisense strand to SEQ ID NO: 2111608
ugcuauccucacaacagau

SEQ ID NO: 2111610 - RNA, 19 nt, Artificial Sequence
  Description of Artificial Sequence: Synthetic oligonucleotide
  Sense strand starting at position 3124 of SEQ ID NO: 1882317
uagcaucuugaagaaaugu

SEQ ID NO: 2111611 - RNA, 19 nt, Artificial Sequence
  Description of Artificial Sequence: Synthetic oligonucleotide
  Antisense strand to SEQ ID NO: 2111610
acauuucuucaagaugcua

SEQ ID NO: 2111612 - RNA, 19 nt, Artificial Sequence
  Description of Artificial Sequence: Synthetic oligonucleotide
  Sense strand starting at position 3559 of SEQ ID NO: 1882317
aucucuucuggcuaaagca

SEQ ID NO: 2111613 - RNA, 19 nt, Artificial Sequence
  Description of Artificial Sequence: Synthetic oligonucleotide
  Antisense strand to SEQ ID NO: 2111612
ugcuuuagccagaagagau

SEQ ID NO: 2111614 - RNA, 19 nt, Artificial Sequence
  Description of Artificial Sequence: Synthetic oligonucleotide
  Sense strand starting at position 3639 of SEQ ID NO: 1882317
auuucuauaucagggagau

SEQ ID NO: 2111615 - RNA, 19 nt, Artificial Sequence
  Description of Artificial Sequence: Synthetic oligonucleotide
  Antisense strand to SEQ ID NO: 2111614
aucucccugauauagaaau

SEQ ID NO: 2111616 - RNA, 19 nt, Artificial Sequence
  Description of Artificial Sequence: Synthetic oligonucleotide
  Sense strand starting at position 3640 of SEQ ID NO: 1882317
uuucuauaucagggagauc

SEQ ID NO: 2111617 - RNA, 19 nt, Artificial Sequence
  Description of Artificial Sequence: Synthetic oligonucleotide
  Antisense strand to SEQ ID NO: 2111616
gaucucccugauauagaaa

SEQ ID NO: 2111618 - RNA, 19 nt, Artificial Sequence
  Description of Artificial Sequence: Synthetic oligonucleotide
  Sense strand starting at position 3800 of SEQ ID NO: 1882317
agcgacauuccuugggaga

SEQ ID NO: 2111619 - RNA, 19 nt, Artificial Sequence
  Description of Artificial Sequence: Synthetic oligonucleotide
  Antisense strand to SEQ ID NO: 2111618
ucucccaaggaaugucgcu

SEQ ID NO: 2111620 - RNA, 19 nt, Artificial Sequence
  Description of Artificial Sequence: Synthetic oligonucleotide
  Sense strand starting at position 3801 of SEQ ID NO: 1882317
gcgacauuccuugggagag

SEQ ID NO: 2111621 - RNA, 19 nt, Artificial Sequence
  Description of Artificial Sequence: Synthetic oligonucleotide
  Antisense strand to SEQ ID NO: 2111620
cucucccaaggaaugucgc

SEQ ID NO: 2111622 - RNA, 19 nt, Artificial Sequence
  Description of Artificial Sequence: Synthetic oligonucleotide
  Sense strand starting at position 3886 of SEQ ID NO: 1882317
uugguuacugaaugcuaaa

SEQ ID NO: 2111623 - RNA, 19 nt, Artificial Sequence
  Description of Artificial Sequence: Synthetic oligonucleotide
  Antisense strand to SEQ ID NO: 2111622
uuuagcauucaguaaccaa

SEQ ID NO: 2111624 - RNA, 19 nt, Artificial Sequence
  Description of Artificial Sequence: Synthetic oligonucleotide
  Sense strand starting at position 401 of SEQ ID NO: 1882318
gccggauuccguagguuuc

SEQ ID NO: 2111625 - RNA, 19 nt, Artificial Sequence
  Description of Artificial Sequence: Synthetic oligonucleotide
  Antisense strand to SEQ ID NO: 2111624
gaaaccuacggaauccggc

SEQ ID NO: 2111626 - RNA, 19 nt, Artificial Sequence
  Description of Artificial Sequence: Synthetic oligonucleotide
  Sense strand starting at position 402 of SEQ ID NO: 1882318
ccggauuccguagguuuca

SEQ ID NO: 2111627 - RNA, 19 nt, Artificial Sequence
  Description of Artificial Sequence: Synthetic oligonucleotide
  Antisense strand to SEQ ID NO: 2111626
ugaaaccuacggaauccgg

SEQ ID NO: 2111628 - RNA, 19 nt, Artificial Sequence
  Description of Artificial Sequence: Synthetic oligonucleotide
  Sense strand starting at position 874 of SEQ ID NO: 1882318
guuagcagaccgcaucauu

SEQ ID NO: 2111629 - RNA, 19 nt, Artificial Sequence
  Description of Artificial Sequence: Synthetic oligonucleotide
  Antisense strand to SEQ ID NO: 2111628
aaugaugcggucugcuaac

SEQ ID NO: 2111630 - RNA, 19 nt, Artificial Sequence
  Description of Artificial Sequence: Synthetic oligonucleotide
  Sense strand starting at position 1050 of SEQ ID NO: 1882318
ugaagcaaucgacaguuga

SEQ ID NO: 2111631 - RNA, 19 nt, Artificial Sequence
  Description of Artificial Sequence: Synthetic oligonucleotide
  Antisense strand to SEQ ID NO: 2111630
ucaacugucgauugcuuca

SEQ ID NO: 2111632 - RNA, 19 nt, Artificial Sequence
  Description of Artificial Sequence: Synthetic oligonucleotide
  Sense strand starting at position 1117 of SEQ ID NO: 1882318
ccgggaauuaagugucacu

SEQ ID NO: 2111633 - RNA, 19 nt, Artificial Sequence
  Description of Artificial Sequence: Synthetic oligonucleotide
  Antisense strand to SEQ ID NO: 2111632
agugacacuuaauucccgg

SEQ ID NO: 2111634 - RNA, 19 nt, Artificial Sequence
  Description of Artificial Sequence: Synthetic oligonucleotide
  Sense strand starting at position 1636 of SEQ ID NO: 1882318
augggaucuugugagauug

SEQ ID NO: 2111635 - RNA, 19 nt, Artificial Sequence
  Description of Artificial Sequence: Synthetic oligonucleotide
  Antisense strand to SEQ ID NO: 2111634
caaucucacaagaucccau

SEQ ID NO: 2111636 - RNA, 19 nt, Artificial Sequence
  Description of Artificial Sequence: Synthetic oligonucleotide
  Sense strand starting at position 1666 of SEQ ID NO: 1882318
gagaauaaaucagggaaag

SEQ ID NO: 2111637 - RNA, 19 nt, Artificial Sequence
  Description of Artificial Sequence: Synthetic oligonucleotide
  Antisense strand to SEQ ID NO: 2111636
cuuucccugauuuauucuc

SEQ ID NO: 2111638 - RNA, 19 nt, Artificial Sequence
  Description of Artificial Sequence: Synthetic oligonucleotide
  Sense strand starting at position 1678 of SEQ ID NO: 1882318
gggaaaguguaucauuuga

SEQ ID NO: 2111639 - RNA, 19 nt, Artificial Sequence
  Description of Artificial Sequence: Synthetic oligonucleotide
  Antisense strand to SEQ ID NO: 2111638
ucaaaugauacacuuuccc

SEQ ID NO: 2111640 - RNA, 19 nt, Artificial Sequence
  Description of Artificial Sequence: Synthetic oligonucleotide
  Sense strand starting at position 1683 of SEQ ID NO: 1882318
aguguaucauuugaggauu

SEQ ID NO: 2111641 - RNA, 19 nt, Artificial Sequence
  Description of Artificial Sequence: Synthetic oligonucleotide
  Antisense strand to SEQ ID NO: 2111640
aauccucaaaugauacacu

SEQ ID NO: 2111642 - RNA, 19 nt, Artificial Sequence
  Description of Artificial Sequence: Synthetic oligonucleotide
  Sense strand starting at position 1685 of SEQ ID NO: 1882318
uguaucauuugaggauuag

SEQ ID NO: 2111643 - RNA, 19 nt, Artificial Sequence
  Description of Artificial Sequence: Synthetic oligonucleotide
  Antisense strand to SEQ ID NO: 2111642
cuaauccucaaaugauaca

SEQ ID NO: 2111644 - RNA, 19 nt, Artificial Sequence
  Description of Artificial Sequence: Synthetic oligonucleotide
  Sense strand starting at position 1984 of SEQ ID NO: 1882318
uggagaaugugucccaacu

SEQ ID NO: 2111645 - RNA, 19 nt, Artificial Sequence
  Description of Artificial Sequence: Synthetic oligonucleotide
  Antisense strand to SEQ ID NO: 2111644
aguugggacacauucucca

SEQ ID NO: 2111646 - RNA, 19 nt, Artificial Sequence
  Description of Artificial Sequence: Synthetic oligonucleotide
  Sense strand starting at position 2053 of SEQ ID NO: 1882318
agcuuugagcccuggcaga

SEQ ID NO: 2111647 - RNA, 19 nt, Artificial Sequence
  Description of Artificial Sequence: Synthetic oligonucleotide
  Antisense strand to SEQ ID NO: 2111646
ucugccagggcucaaagcu

SEQ ID NO: 2111648 - RNA, 19 nt, Artificial Sequence
  Description of Artificial Sequence: Synthetic oligonucleotide
  Sense strand starting at position 2184 of SEQ ID NO: 1882318
cugaguucuggccgcaauc

SEQ ID NO: 2111649 - RNA, 19 nt, Artificial Sequence
  Description of Artificial Sequence: Synthetic oligonucleotide
  Antisense strand to SEQ ID NO: 2111648
gauugcggccagaacucag

SEQ ID NO: 2111650 - RNA, 19 nt, Artificial Sequence
  Description of Artificial Sequence: Synthetic oligonucleotide
  Sense strand starting at position 2186 of SEQ ID NO: 1882318
gaguucuggccgcaaucca

SEQ ID NO: 2111651 - RNA, 19 nt, Artificial Sequence
  Description of Artificial Sequence: Synthetic oligonucleotide
  Antisense strand to SEQ ID NO: 2111650
uggauugcggccagaacuc

SEQ ID NO: 2111652 - RNA, 19 nt, Artificial Sequence
  Description of Artificial Sequence: Synthetic oligonucleotide
  Sense strand starting at position 2306 of SEQ ID NO: 1882318
uaguauauuccaggcagug

SEQ ID NO: 2111653 - RNA, 19 nt, Artificial Sequence
  Description of Artificial Sequence: Synthetic oligonucleotide
  Antisense strand to SEQ ID NO: 2111652
cacugccuggaauauacua

SEQ ID NO: 2111654 - RNA, 19 nt, Artificial Sequence
  Description of Artificial Sequence: Synthetic oligonucleotide
  Sense strand starting at position 2322 of SEQ ID NO: 1882318
gugugcuagacucaggaca

SEQ ID NO: 2111655 - RNA, 19 nt, Artificial Sequence
  Description of Artificial Sequence: Synthetic oligonucleotide
  Antisense strand to SEQ ID NO: 2111654
uguccugagucuagcacac

SEQ ID NO: 2111656 - RNA, 19 nt, Artificial Sequence
  Description of Artificial Sequence: Synthetic oligonucleotide
  Sense strand starting at position 2341 of SEQ ID NO: 1882318
uuuggagacuaaugaaacu

SEQ ID NO: 2111657 - RNA, 19 nt, Artificial Sequence
  Description of Artificial Sequence: Synthetic oligonucleotide
  Antisense strand to SEQ ID NO: 2111656
aguuucauuagucuccaaa

SEQ ID NO: 2111658 - RNA, 19 nt, Artificial Sequence
  Description of Artificial Sequence: Synthetic oligonucleotide
  Sense strand starting at position 2503 of SEQ ID NO: 1882318
ggguucagagcugagcaaa

SEQ ID NO: 2111659 - RNA, 19 nt, Artificial Sequence
  Description of Artificial Sequence: Synthetic oligonucleotide
  Antisense strand to SEQ ID NO: 2111658
uuugcucagcucugaaccc

SEQ ID NO: 2111660 - RNA, 19 nt, Artificial Sequence
  Description of Artificial Sequence: Synthetic oligonucleotide
  Sense strand starting at position 2522 of SEQ ID NO: 1882318
ggccauuucugcccuccaa

SEQ ID NO: 2111661 - RNA, 19 nt, Artificial Sequence
  Description of Artificial Sequence: Synthetic oligonucleotide
  Antisense strand to SEQ ID NO: 2111660
uuggagggcagaaauggcc

SEQ ID NO: 2111662 - RNA, 19 nt, Artificial Sequence
  Description of Artificial Sequence: Synthetic oligonucleotide
  Sense strand starting at position 2642 of SEQ ID NO: 1882318
caccuuggcugggauagaa

SEQ ID NO: 2111663 - RNA, 19 nt, Artificial Sequence
  Description of Artificial Sequence: Synthetic oligonucleotide
  Antisense strand to SEQ ID NO: 2111662
uucuaucccagccaaggug

SEQ ID NO: 2111664 - RNA, 19 nt, Artificial Sequence
  Description of Artificial Sequence: Synthetic oligonucleotide
  Sense strand starting at position 3002 of SEQ ID NO: 1882318
ggguaaccucaucacugua

SEQ ID NO: 2111665 - RNA, 19 nt, Artificial Sequence
  Description of Artificial Sequence: Synthetic oligonucleotide
  Antisense strand to SEQ ID NO: 2111664
uacagugaugagguuaccc

SEQ ID NO: 2111666 - RNA, 19 nt, Artificial Sequence
  Description of Artificial Sequence: Synthetic oligonucleotide
  Sense strand starting at position 3053 of SEQ ID NO: 1882318
ccuaaugguuaagagcaaa

SEQ ID NO: 2111667 - RNA, 19 nt, Artificial Sequence
  Description of Artificial Sequence: Synthetic oligonucleotide
  Antisense strand to SEQ ID NO: 2111666
uuugcucuuaaccauuagg

SEQ ID NO: 2111668 - RNA, 19 nt, Artificial Sequence
  Description of Artificial Sequence: Synthetic oligonucleotide
  Sense strand starting at position 3065 of SEQ ID NO: 1882318
gagcaaauggugugguuua

SEQ ID NO: 2111669 - RNA, 19 nt, Artificial Sequence
  Description of Artificial Sequence: Synthetic oligonucleotide
  Antisense strand to SEQ ID NO: 2111668
uaaaccacaccauuugcuc

SEQ ID NO: 2111670 - RNA, 19 nt, Artificial Sequence
  Description of Artificial Sequence: Synthetic oligonucleotide
  Sense strand starting at position 3175 of SEQ ID NO: 1882318
uaggaacugccuugugagu

SEQ ID NO: 2111671 - RNA, 19 nt, Artificial Sequence
  Description of Artificial Sequence: Synthetic oligonucleotide
  Antisense strand to SEQ ID NO: 2111670
acucacaaggcaguuccua

SEQ ID NO: 2111672 - RNA, 19 nt, Artificial Sequence
  Description of Artificial Sequence: Synthetic oligonucleotide
  Sense strand starting at position 3232 of SEQ ID NO: 1882318
gcaaccucugacugaaugu

SEQ ID NO: 2111673 - RNA, 19 nt, Artificial Sequence
  Description of Artificial Sequence: Synthetic oligonucleotide
  Antisense strand to SEQ ID NO: 2111672
acauucagucagagguugc

SEQ ID NO: 2111674 - RNA, 19 nt, Artificial Sequence
  Description of Artificial Sequence: Synthetic oligonucleotide
  Sense strand starting at position 3351 of SEQ ID NO: 1882318
gugcuaggcacauagagua

SEQ ID NO: 2111675 - RNA, 19 nt, Artificial Sequence
  Description of Artificial Sequence: Synthetic oligonucleotide
  Antisense strand to SEQ ID NO: 2111674
uacucuaugugccuagcac

SEQ ID NO: 2111676 - RNA, 19 nt, Artificial Sequence
  Description of Artificial Sequence: Synthetic oligonucleotide
  Sense strand starting at position 3361 of SEQ ID NO: 1882318
cauagaguaagugguggaa

SEQ ID NO: 2111677 - RNA, 19 nt, Artificial Sequence
  Description of Artificial Sequence: Synthetic oligonucleotide
  Antisense strand to SEQ ID NO: 2111676
uuccaccacuuacucuaug

SEQ ID NO: 2111678 - RNA, 19 nt, Artificial Sequence
  Description of Artificial Sequence: Synthetic oligonucleotide
  Sense strand starting at position 3364 of SEQ ID NO: 1882318
agaguaagugguggaauaa

SEQ ID NO: 2111679 - RNA, 19 nt, Artificial Sequence
  Description of Artificial Sequence: Synthetic oligonucleotide
  Antisense strand to SEQ ID NO: 2111678
uuauuccaccacuuacucu

SEQ ID NO: 2111680 - RNA, 19 nt, Artificial Sequence
  Description of Artificial Sequence: Synthetic oligonucleotide
  Sense strand starting at position 3418 of SEQ ID NO: 1882318
gcucaagugcugcuaggua

SEQ ID NO: 2111681 - RNA, 19 nt, Artificial Sequence
  Description of Artificial Sequence: Synthetic oligonucleotide
  Antisense strand to SEQ ID NO: 2111680
uaccuagcagcacuugagc

SEQ ID NO: 2111682 - RNA, 19 nt, Artificial Sequence
  Description of Artificial Sequence: Synthetic oligonucleotide
  Sense strand starting at position 3441 of SEQ ID NO: 1882318
agcagugggccugaauguu

SEQ ID NO: 2111683 - RNA, 19 nt, Artificial Sequence
  Description of Artificial Sequence: Synthetic oligonucleotide
  Antisense strand to SEQ ID NO: 2111682
aacauucaggcccacugcu

SEQ ID NO: 2111684 - RNA, 19 nt, Artificial Sequence
  Description of Artificial Sequence: Synthetic oligonucleotide
  Sense strand starting at position 3449 of SEQ ID NO: 1882318
gccugaauguuccauuucu

SEQ ID NO: 2111685 - RNA, 19 nt, Artificial Sequence
  Description of Artificial Sequence: Synthetic oligonucleotide
  Antisense strand to SEQ ID NO: 2111684
agaaauggaacauucaggc

SEQ ID NO: 2111686 - RNA, 19 nt, Artificial Sequence
  Description of Artificial Sequence: Synthetic oligonucleotide
  Sense strand starting at position 3532 of SEQ ID NO: 1882318
ccagaagucaggcagagua

SEQ ID NO: 2111687 - RNA, 19 nt, Artificial Sequence
  Description of Artificial Sequence: Synthetic oligonucleotide
  Antisense strand to SEQ ID NO: 2111686
uacucugccugacuucugg

SEQ ID NO: 2111688 - RNA, 19 nt, Artificial Sequence
  Description of Artificial Sequence: Synthetic oligonucleotide
  Sense strand starting at position 3570 of SEQ ID NO: 1882318
uuucucugcucaguagaaa

SEQ ID NO: 2111689 - RNA, 19 nt, Artificial Sequence
  Description of Artificial Sequence: Synthetic oligonucleotide
  Antisense strand to SEQ ID NO: 2111688
uuucuacugagcagagaaa

SEQ ID NO: 2111690 - RNA, 19 nt, Artificial Sequence
  Description of Artificial Sequence: Synthetic oligonucleotide
  Sense strand starting at position 3571 of SEQ ID NO: 1882318
uucucugcucaguagaaag

SEQ ID NO: 2111691 - RNA, 19 nt, Artificial Sequence
  Description of Artificial Sequence: Synthetic oligonucleotide
  Antisense strand to SEQ ID NO: 2111690
cuuucuacugagcagagaa

SEQ ID NO: 2111692 - RNA, 19 nt, Artificial Sequence
  Description of Artificial Sequence: Synthetic oligonucleotide
  Sense strand starting at position 3644 of SEQ ID NO: 1882318
agucuugacuugcugugua

SEQ ID NO: 2111693 - RNA, 19 nt, Artificial Sequence
  Description of Artificial Sequence: Synthetic oligonucleotide
  Antisense strand to SEQ ID NO: 2111692
uacacagcaagucaagacu

SEQ ID NO: 2111694 - RNA, 19 nt, Artificial Sequence
  Description of Artificial Sequence: Synthetic oligonucleotide
  Sense strand starting at position 3696 of SEQ ID NO: 1882318
ggacuccuuauaggugaaa

SEQ ID NO: 2111695 - RNA, 19 nt, Artificial Sequence
  Description of Artificial Sequence: Synthetic oligonucleotide
  Antisense strand to SEQ ID NO: 2111694
uuucaccuauaaggagucc

SEQ ID NO: 2111696 - RNA, 19 nt, Artificial Sequence
  Description of Artificial Sequence: Synthetic oligonucleotide
  Sense strand starting at position 3697 of SEQ ID NO: 1882318
gacuccuuauaggugaaau

SEQ ID NO: 2111697 - RNA, 19 nt, Artificial Sequence
  Description of Artificial Sequence: Synthetic oligonucleotide
  Antisense strand to SEQ ID NO: 2111696
auuucaccuauaaggaguc

SEQ ID NO: 2111698 - RNA, 19 nt, Artificial Sequence
  Description of Artificial Sequence: Synthetic oligonucleotide
  Sense strand starting at position 3709 of SEQ ID NO: 1882318
gugaaaugaguagguugga

SEQ ID NO: 2111699 - RNA, 19 nt, Artificial Sequence
  Description of Artificial Sequence: Synthetic oligonucleotide
  Antisense strand to SEQ ID NO: 2111698
uccaaccuacucauuucac

SEQ ID NO: 2111700 - RNA, 19 nt, Artificial Sequence
  Description of Artificial Sequence: Synthetic oligonucleotide
  Sense strand starting at position 3752 of SEQ ID NO: 1882318
cagccuuuguguuugaugu

SEQ ID NO: 2111701 - RNA, 19 nt, Artificial Sequence
  Description of Artificial Sequence: Synthetic oligonucleotide
  Antisense strand to SEQ ID NO: 2111700
acaucaaacacaaaggcug

SEQ ID NO: 2111702 - RNA, 19 nt, Artificial Sequence
  Description of Artificial Sequence: Synthetic oligonucleotide
  Sense strand starting at position 3758 of SEQ ID NO: 1882318
uuguguuugaugucugcuu

SEQ ID NO: 2111703 - RNA, 19 nt, Artificial Sequence
  Description of Artificial Sequence: Synthetic oligonucleotide
  Antisense strand to SEQ ID NO: 2111702
aagcagacaucaaacacaa

SEQ ID NO: 2111704 - RNA, 19 nt, Artificial Sequence
  Description of Artificial Sequence: Synthetic oligonucleotide
  Sense strand starting at position 72 of SEQ ID NO: 1882319
uuggaagagucccugguuu

SEQ ID NO: 2111705 - RNA, 19 nt, Artificial Sequence
  Description of Artificial Sequence: Synthetic oligonucleotide
  Antisense strand to SEQ ID NO: 2111704
aaaccagggacucuuccaa

SEQ ID NO: 2111706 - RNA, 19 nt, Artificial Sequence
  Description of Artificial Sequence: Synthetic oligonucleotide
  Sense strand starting at position 160 of SEQ ID NO: 1882319
guauuauauuggcuuugga

SEQ ID NO: 2111707 - RNA, 19 nt, Artificial Sequence
  Description of Artificial Sequence: Synthetic oligonucleotide
  Antisense strand to SEQ ID NO: 2111706
uccaaagccaauauaauac

SEQ ID NO: 2111708 - RNA, 19 nt, Artificial Sequence
  Description of Artificial Sequence: Synthetic oligonucleotide
  Sense strand starting at position 342 of SEQ ID NO: 1882319
uaaauuugaucagguaaag

SEQ ID NO: 2111709 - RNA, 19 nt, Artificial Sequence
  Description of Artificial Sequence: Synthetic oligonucleotide
  Antisense strand to SEQ ID NO: 2111708
cuuuaccugaucaaauuua

SEQ ID NO: 2111710 - RNA, 19 nt, Artificial Sequence
  Description of Artificial Sequence: Synthetic oligonucleotide
  Sense strand starting at position 375 of SEQ ID NO: 1882319
aguauacuguuggauuuga

SEQ ID NO: 2111711 - RNA, 19 nt, Artificial Sequence
  Description of Artificial Sequence: Synthetic oligonucleotide
  Antisense strand to SEQ ID NO: 2111710
ucaaauccaacaguauacu

SEQ ID NO: 2111712 - RNA, 19 nt, Artificial Sequence
  Description of Artificial Sequence: Synthetic oligonucleotide
  Sense strand starting at position 418 of SEQ ID NO: 1882319
gugcuuauuagauagauug

SEQ ID NO: 2111713 - RNA, 19 nt, Artificial Sequence
  Description of Artificial Sequence: Synthetic oligonucleotide
  Antisense strand to SEQ ID NO: 2111712
caaucuaucuaauaagcac

SEQ ID NO: 2111714 - RNA, 19 nt, Artificial Sequence
  Description of Artificial Sequence: Synthetic oligonucleotide
  Sense strand starting at position 428 of SEQ ID NO: 1882319
gauagauuggcccaugguu

SEQ ID NO: 2111715 - RNA, 19 nt, Artificial Sequence
  Description of Artificial Sequence: Synthetic oligonucleotide
  Antisense strand to SEQ ID NO: 2111714
aaccaugggccaaucuauc

SEQ ID NO: 2111716 - RNA, 19 nt, Artificial Sequence
  Description of Artificial Sequence: Synthetic oligonucleotide
  Sense strand starting at position 450 of SEQ ID NO: 1882319
ugacauauuuaucagguuu

SEQ ID NO: 2111717 - RNA, 19 nt, Artificial Sequence
  Description of Artificial Sequence: Synthetic oligonucleotide
  Antisense strand to SEQ ID NO: 2111716
aaaccugauaaauauguca

SEQ ID NO: 2111718 - RNA, 19 nt, Artificial Sequence
  Description of Artificial Sequence: Synthetic oligonucleotide
  Sense strand starting at position 519 of SEQ ID NO: 1882319
gaacuuaacuauucgucag

SEQ ID NO: 2111719 - RNA, 19 nt, Artificial Sequence
  Description of Artificial Sequence: Synthetic oligonucleotide
  Antisense strand to SEQ ID NO: 2111718
cugacgaauaguuaaguuc

SEQ ID NO: 2111720 - RNA, 19 nt, Artificial Sequence
  Description of Artificial Sequence: Synthetic oligonucleotide
  Sense strand starting at position 521 of SEQ ID NO: 1882319
acuuaacuauucgucagua

SEQ ID NO: 2111721 - RNA, 19 nt, Artificial Sequence
  Description of Artificial Sequence: Synthetic oligonucleotide
  Antisense strand to SEQ ID NO: 2111720
uacugacgaauaguuaagu

SEQ ID NO: 2111722 - RNA, 19 nt, Artificial Sequence
  Description of Artificial Sequence: Synthetic oligonucleotide
  Sense strand starting at position 523 of SEQ ID NO: 1882319
uuaacuauucgucaguauu

SEQ ID NO: 2111723 - RNA, 19 nt, Artificial Sequence
  Description of Artificial Sequence: Synthetic oligonucleotide
  Antisense strand to SEQ ID NO: 2111722
aauacugacgaauaguuaa

SEQ ID NO: 2111724 - RNA, 19 nt, Artificial Sequence
  Description of Artificial Sequence: Synthetic oligonucleotide
  Sense strand starting at position 525 of SEQ ID NO: 1882319
aacuauucgucaguauuug

SEQ ID NO: 2111725 - RNA, 19 nt, Artificial Sequence
  Description of Artificial Sequence: Synthetic oligonucleotide
  Antisense strand to SEQ ID NO: 2111724
caaauacugacgaauaguu

SEQ ID NO: 2111726 - RNA, 19 nt, Artificial Sequence
  Description of Artificial Sequence: Synthetic oligonucleotide
  Sense strand starting at position 529 of SEQ ID NO: 1882319
auucgucaguauuugguaa

SEQ ID NO: 2111727 - RNA, 19 nt, Artificial Sequence
  Description of Artificial Sequence: Synthetic oligonucleotide
  Antisense strand to SEQ ID NO: 2111726
uuaccaaauacugacgaau

SEQ ID NO: 2111728 - RNA, 19 nt, Artificial Sequence
  Description of Artificial Sequence: Synthetic oligonucleotide
  Sense strand starting at position 530 of SEQ ID NO: 1882319
uucgucaguauuugguaaa

SEQ ID NO: 2111729 - RNA, 19 nt, Artificial Sequence
  Description of Artificial Sequence: Synthetic oligonucleotide
  Antisense strand to SEQ ID NO: 2111728
uuuaccaaauacugacgaa

SEQ ID NO: 2111730 - RNA, 19 nt, Artificial Sequence
  Description of Artificial Sequence: Synthetic oligonucleotide
  Sense strand starting at position 785 of SEQ ID NO: 1882319
guauuuguguucucuuagg

SEQ ID NO: 2111731 - RNA, 19 nt, Artificial Sequence
  Description of Artificial Sequence: Synthetic oligonucleotide
  Antisense strand to SEQ ID NO: 2111730
ccuaagagaacacaaauac

SEQ ID NO: 2111732 - RNA, 19 nt, Artificial Sequence
  Description of Artificial Sequence: Synthetic oligonucleotide
  Sense strand starting at position 803 of SEQ ID NO: 1882319
guuuccuuuggcuagacuu

SEQ ID NO: 2111733 - RNA, 19 nt, Artificial Sequence
  Description of Artificial Sequence: Synthetic oligonucleotide
  Antisense strand to SEQ ID NO: 2111732
aagucuagccaaaggaaac

SEQ ID NO: 2111734 - RNA, 19 nt, Artificial Sequence
  Description of Artificial Sequence: Synthetic oligonucleotide
  Sense strand starting at position 824 of SEQ ID NO: 1882319
uagggauugauugguuugu

SEQ ID NO: 2111735 - RNA, 19 nt, Artificial Sequence
  Description of Artificial Sequence: Synthetic oligonucleotide
  Antisense strand to SEQ ID NO: 2111734
acaaaccaaucaaucccua

SEQ ID NO: 2111736 - RNA, 19 nt, Artificial Sequence
  Description of Artificial Sequence: Synthetic oligonucleotide
  Sense strand starting at position 825 of SEQ ID NO: 1882319
agggauugauugguuuguu

SEQ ID NO: 2111737 - RNA, 19 nt, Artificial Sequence
  Description of Artificial Sequence: Synthetic oligonucleotide
  Antisense strand to SEQ ID NO: 2111736
aacaaaccaaucaaucccu

SEQ ID NO: 2111738 - RNA, 19 nt, Artificial Sequence
  Description of Artificial Sequence: Synthetic oligonucleotide
  Sense strand starting at position 826 of SEQ ID NO: 1882319
gggauugauugguuuguuu

SEQ ID NO: 2111739 - RNA, 19 nt, Artificial Sequence
  Description of Artificial Sequence: Synthetic oligonucleotide
  Antisense strand to SEQ ID NO: 2111738
aaacaaaccaaucaauccc

SEQ ID NO: 2111740 - RNA, 19 nt, Artificial Sequence
  Description of Artificial Sequence: Synthetic oligonucleotide
  Sense strand starting at position 905 of SEQ ID NO: 1882319
cuuucucauguuuaaguca

SEQ ID NO: 2111741 - RNA, 19 nt, Artificial Sequence
  Description of Artificial Sequence: Synthetic oligonucleotide
  Antisense strand to SEQ ID NO: 2111740
ugacuuaaacaugagaaag

SEQ ID NO: 2111742 - RNA, 19 nt, Artificial Sequence
  Description of Artificial Sequence: Synthetic oligonucleotide
  Sense strand starting at position 1018 of SEQ ID NO: 1882319
aagguaagauuugguuaca

SEQ ID NO: 2111743 - RNA, 19 nt, Artificial Sequence
  Description of Artificial Sequence: Synthetic oligonucleotide
  Antisense strand to SEQ ID NO: 2111742
uguaaccaaaucuuaccuu

SEQ ID NO: 2111744 - RNA, 19 nt, Artificial Sequence
  Description of Artificial Sequence: Synthetic oligonucleotide
  Sense strand starting at position 1052 of SEQ ID NO: 1882319
uuauguuaucaggauucuu

SEQ ID NO: 2111745 - RNA, 19 nt, Artificial Sequence
  Description of Artificial Sequence: Synthetic oligonucleotide
  Antisense strand to SEQ ID NO: 2111744
aagaauccugauaacauaa

SEQ ID NO: 2111746 - RNA, 19 nt, Artificial Sequence
  Description of Artificial Sequence: Synthetic oligonucleotide
  Sense strand starting at position 1158 of SEQ ID NO: 1882319
guauuuauugcauggaguc

SEQ ID NO: 2111747 - RNA, 19 nt, Artificial Sequence
  Description of Artificial Sequence: Synthetic oligonucleotide
  Antisense strand to SEQ ID NO: 2111746
gacuccaugcaauaaauac

SEQ ID NO: 2111748 - RNA, 19 nt, Artificial Sequence
  Description of Artificial Sequence: Synthetic oligonucleotide
  Sense strand starting at position 1320 of SEQ ID NO: 1882319
uaguuacuggcuuauugua

SEQ ID NO: 2111749 - RNA, 19 nt, Artificial Sequence
  Description of Artificial Sequence: Synthetic oligonucleotide
  Antisense strand to SEQ ID NO: 2111748
uacaauaagccaguaacua

SEQ ID NO: 2111750 - RNA, 19 nt, Artificial Sequence
  Description of Artificial Sequence: Synthetic oligonucleotide
  Sense strand starting at position 2186 of SEQ ID NO: 1882319
cuucuuaaccaguggguua

SEQ ID NO: 2111751 - RNA, 19 nt, Artificial Sequence
  Description of Artificial Sequence: Synthetic oligonucleotide
  Antisense strand to SEQ ID NO: 2111750
uaacccacugguuaagaag

SEQ ID NO: 2111752 - RNA, 19 nt, Artificial Sequence
  Description of Artificial Sequence: Synthetic oligonucleotide
  Sense strand starting at position 2188 of SEQ ID NO: 1882319
ucuuaaccaguggguuaaa

SEQ ID NO: 2111753 - RNA, 19 nt, Artificial Sequence
  Description of Artificial Sequence: Synthetic oligonucleotide
  Antisense strand to SEQ ID NO: 2111752
uuuaacccacugguuaaga

SEQ ID NO: 2111754 - RNA, 19 nt, Artificial Sequence
  Description of Artificial Sequence: Synthetic oligonucleotide
  Sense strand starting at position 2189 of SEQ ID NO: 1882319
cuuaaccaguggguuaaau

SEQ ID NO: 2111755 - RNA, 19 nt, Artificial Sequence
  Description of Artificial Sequence: Synthetic oligonucleotide
  Antisense strand to SEQ ID NO: 2111754
auuuaacccacugguuaag

SEQ ID NO: 2111756 - RNA, 19 nt, Artificial Sequence
  Description of Artificial Sequence: Synthetic oligonucleotide
  Sense strand starting at position 2191 of SEQ ID NO: 1882319
uaaccaguggguuaaaugu

SEQ ID NO: 2111757 - RNA, 19 nt, Artificial Sequence
  Description of Artificial Sequence: Synthetic oligonucleotide
  Antisense strand to SEQ ID NO: 2111756
acauuuaacccacugguua

SEQ ID NO: 2111758 - RNA, 19 nt, Artificial Sequence
  Description of Artificial Sequence: Synthetic oligonucleotide
  Sense strand starting at position 2319 of SEQ ID NO: 1882319
auacuuguccuguaugucu

SEQ ID NO: 2111759 - RNA, 19 nt, Artificial Sequence
  Description of Artificial Sequence: Synthetic oligonucleotide
  Antisense strand to SEQ ID NO: 2111758
agacauacaggacaaguau

SEQ ID NO: 2111760 - RNA, 19 nt, Artificial Sequence
  Description of Artificial Sequence: Synthetic oligonucleotide
  Sense strand starting at position 2736 of SEQ ID NO: 1882319
guccuaucaucuguaaaua

SEQ ID NO: 2111761 - RNA, 19 nt, Artificial Sequence
  Description of Artificial Sequence: Synthetic oligonucleotide
  Antisense strand to SEQ ID NO: 2111760
uauuuacagaugauaggac

SEQ ID NO: 2111762 - RNA, 19 nt, Artificial Sequence
  Description of Artificial Sequence: Synthetic oligonucleotide
  Sense strand starting at position 2941 of SEQ ID NO: 1882319
uuguuuguuauggaaauug

SEQ ID NO: 2111763 - RNA, 19 nt, Artificial Sequence
  Description of Artificial Sequence: Synthetic oligonucleotide
  Antisense strand to SEQ ID NO: 2111762
caauuuccauaacaaacaa

SEQ ID NO: 2111764 - RNA, 19 nt, Artificial Sequence
  Description of Artificial Sequence: Synthetic oligonucleotide
  Sense strand starting at position 3008 of SEQ ID NO: 1882319
gguccucuccauggucaga

SEQ ID NO: 2111765 - RNA, 19 nt, Artificial Sequence
  Description of Artificial Sequence: Synthetic oligonucleotide
  Antisense strand to SEQ ID NO: 2111764
ucugaccauggagaggacc

SEQ ID NO: 2111766 - RNA, 19 nt, Artificial Sequence
  Description of Artificial Sequence: Synthetic oligonucleotide
  Sense strand starting at position 3010 of SEQ ID NO: 1882319
uccucuccauggucagaau

SEQ ID NO: 2111767 - RNA, 19 nt, Artificial Sequence
  Description of Artificial Sequence: Synthetic oligonucleotide
  Antisense strand to SEQ ID NO: 2111766
auucugaccauggagagga

SEQ ID NO: 2111768 - RNA, 19 nt, Artificial Sequence
  Description of Artificial Sequence: Synthetic oligonucleotide
  Sense strand starting at position 3011 of SEQ ID NO: 1882319
ccucuccauggucagaauu

SEQ ID NO: 2111769 - RNA, 19 nt, Artificial Sequence
  Description of Artificial Sequence: Synthetic oligonucleotide
  Antisense strand to SEQ ID NO: 2111768
aauucugaccauggagagg

SEQ ID NO: 2111770 - RNA, 19 nt, Artificial Sequence
  Description of Artificial Sequence: Synthetic oligonucleotide
  Sense strand starting at position 3458 of SEQ ID NO: 1882319
ggcuguuagacacauuguu

SEQ ID NO: 2111771 - RNA, 19 nt, Artificial Sequence
  Description of Artificial Sequence: Synthetic oligonucleotide
  Antisense strand to SEQ ID NO: 2111770
aacaaugugucuaacagcc

SEQ ID NO: 2111772 - RNA, 19 nt, Artificial Sequence
  Description of Artificial Sequence: Synthetic oligonucleotide
  Sense strand starting at position 3561 of SEQ ID NO: 1882319
auacaugcuuccuuggaca

SEQ ID NO: 2111773 - RNA, 19 nt, Artificial Sequence
  Description of Artificial Sequence: Synthetic oligonucleotide
  Antisense strand to SEQ ID NO: 2111772
uguccaaggaagcauguau

SEQ ID NO: 2111774 - RNA, 19 nt, Artificial Sequence
  Description of Artificial Sequence: Synthetic oligonucleotide
  Sense strand starting at position 3603 of SEQ ID NO: 1882319
uggcuuucccauuaugacu

SEQ ID NO: 2111775 - RNA, 19 nt, Artificial Sequence
  Description of Artificial Sequence: Synthetic oligonucleotide
  Antisense strand to SEQ ID NO: 2111774
agucauaaugggaaagcca

SEQ ID NO: 2111776 - RNA, 19 nt, Artificial Sequence
  Description of Artificial Sequence: Synthetic oligonucleotide
  Sense strand starting at position 3737 of SEQ ID NO: 1882319
uucuuaacugacgauagua

SEQ ID NO: 2111777 - RNA, 19 nt, Artificial Sequence
  Description of Artificial Sequence: Synthetic oligonucleotide
  Antisense strand to SEQ ID NO: 2111776
uacuaucgucaguuaagaa

SEQ ID NO: 2111778 - RNA, 19 nt, Artificial Sequence
  Description of Artificial Sequence: Synthetic oligonucleotide
  Sense strand starting at position 3739 of SEQ ID NO: 1882319
cuuaacugacgauaguaua

SEQ ID NO: 2111779 - RNA, 19 nt, Artificial Sequence
  Description of Artificial Sequence: Synthetic oligonucleotide
  Antisense strand to SEQ ID NO: 2111778
uauacuaucgucaguuaag

SEQ ID NO: 2111780 - RNA, 19 nt, Artificial Sequence
  Description of Artificial Sequence: Synthetic oligonucleotide
  Sense strand starting at position 3742 of SEQ ID NO: 1882319
aacugacgauaguauauuu

SEQ ID NO: 2111781 - RNA, 19 nt, Artificial Sequence
  Description of Artificial Sequence: Synthetic oligonucleotide
  Antisense strand to SEQ ID NO: 2111780
aaauauacuaucgucaguu

SEQ ID NO: 2111782 - RNA, 19 nt, Artificial Sequence
  Description of Artificial Sequence: Synthetic oligonucleotide
  Sense strand starting at position 3949 of SEQ ID NO: 1882319
cuugauuauugggcaaaug

SEQ ID NO: 2111783 - RNA, 19 nt, Artificial Sequence
  Description of Artificial Sequence: Synthetic oligonucleotide
  Antisense strand to SEQ ID NO: 2111782
cauuugcccaauaaucaag

SEQ ID NO: 2111784 - RNA, 19 nt, Artificial Sequence
  Description of Artificial Sequence: Synthetic oligonucleotide
  Sense strand starting at position 6 of SEQ ID NO: 1882320
cugauugcuucuguuauuu

SEQ ID NO: 2111785 - RNA, 19 nt, Artificial Sequence
  Description of Artificial Sequence: Synthetic oligonucleotide
  Antisense strand to SEQ ID NO: 2111784
aaauaacagaagcaaucag

SEQ ID NO: 2111786 - RNA, 19 nt, Artificial Sequence
  Description of Artificial Sequence: Synthetic oligonucleotide
  Sense strand starting at position 133 of SEQ ID NO: 1882320
aauguaaguguggagugau

SEQ ID NO: 2111787 - RNA, 19 nt, Artificial Sequence
  Description of Artificial Sequence: Synthetic oligonucleotide
  Antisense strand to SEQ ID NO: 2111786
aucacuccacacuuacauu

SEQ ID NO: 2111788 - RNA, 19 nt, Artificial Sequence
  Description of Artificial Sequence: Synthetic oligonucleotide
  Sense strand starting at position 140 of SEQ ID NO: 1882320
guguggagugauggaaaga

SEQ ID NO: 2111789 - RNA, 19 nt, Artificial Sequence
  Description of Artificial Sequence: Synthetic oligonucleotide
  Antisense strand to SEQ ID NO: 2111788
ucuuuccaucacuccacac

SEQ ID NO: 2111790 - RNA, 19 nt, Artificial Sequence
  Description of Artificial Sequence: Synthetic oligonucleotide
  Sense strand starting at position 160 of SEQ ID NO: 1882320
gcauauaaccaugguugga

SEQ ID NO: 2111791 - RNA, 19 nt, Artificial Sequence
  Description of Artificial Sequence: Synthetic oligonucleotide
  Antisense strand to SEQ ID NO: 2111790
uccaaccaugguuauaugc

SEQ ID NO: 2111792 - RNA, 19 nt, Artificial Sequence
  Description of Artificial Sequence: Synthetic oligonucleotide
  Sense strand starting at position 330 of SEQ ID NO: 1882320
cugugaauggauuggugaa

SEQ ID NO: 2111793 - RNA, 19 nt, Artificial Sequence
  Description of Artificial Sequence: Synthetic oligonucleotide
  Antisense strand to SEQ ID NO: 2111792
uucaccaauccauucacag

SEQ ID NO: 2111794 - RNA, 19 nt, Artificial Sequence
  Description of Artificial Sequence: Synthetic oligonucleotide
  Sense strand starting at position 331 of SEQ ID NO: 1882320
ugugaauggauuggugaag

SEQ ID NO: 2111795 - RNA, 19 nt, Artificial Sequence
  Description of Artificial Sequence: Synthetic oligonucleotide
  Antisense strand to SEQ ID NO: 2111794
cuucaccaauccauucaca

SEQ ID NO: 2111796 - RNA, 19 nt, Artificial Sequence
  Description of Artificial Sequence: Synthetic oligonucleotide
  Sense strand starting at position 332 of SEQ ID NO: 1882320
gugaauggauuggugaagu

SEQ ID NO: 2111797 - RNA, 19 nt, Artificial Sequence
  Description of Artificial Sequence: Synthetic oligonucleotide
  Antisense strand to SEQ ID NO: 2111796
acuucaccaauccauucac

SEQ ID NO: 2111798 - RNA, 19 nt, Artificial Sequence
  Description of Artificial Sequence: Synthetic oligonucleotide
  Sense strand starting at position 383 of SEQ ID NO: 1882320
gaagcuguuggucagagaa

SEQ ID NO: 2111799 - RNA, 19 nt, Artificial Sequence
  Description of Artificial Sequence: Synthetic oligonucleotide
  Antisense strand to SEQ ID NO: 2111798
uucucugaccaacagcuuc

SEQ ID NO: 2111800 - RNA, 19 nt, Artificial Sequence
  Description of Artificial Sequence: Synthetic oligonucleotide
  Sense strand starting at position 457 of SEQ ID NO: 1882320
aggguaugucaauggaagu

SEQ ID NO: 2111801 - RNA, 19 nt, Artificial Sequence
  Description of Artificial Sequence: Synthetic oligonucleotide
  Antisense strand to SEQ ID NO: 2111800
acuuccauugacauacccu

SEQ ID NO: 2111802 - RNA, 19 nt, Artificial Sequence
  Description of Artificial Sequence: Synthetic oligonucleotide
  Sense strand starting at position 458 of SEQ ID NO: 1882320
ggguaugucaauggaagug

SEQ ID NO: 2111803 - RNA, 19 nt, Artificial Sequence
  Description of Artificial Sequence: Synthetic oligonucleotide
  Antisense strand to SEQ ID NO: 2111802
cacuuccauugacauaccc

SEQ ID NO: 2111804 - RNA, 19 nt, Artificial Sequence
  Description of Artificial Sequence: Synthetic oligonucleotide
  Sense strand starting at position 640 of SEQ ID NO: 1882320
aagccaaauugaguaagga

SEQ ID NO: 2111805 - RNA, 19 nt, Artificial Sequence
  Description of Artificial Sequence: Synthetic oligonucleotide
  Antisense strand to SEQ ID NO: 2111804
uccuuacucaauuuggcuu

SEQ ID NO: 2111806 - RNA, 19 nt, Artificial Sequence
  Description of Artificial Sequence: Synthetic oligonucleotide
  Sense strand starting at position 877 of SEQ ID NO: 1882320
uugggcagucacuaauuau

SEQ ID NO: 2111807 - RNA, 19 nt, Artificial Sequence
  Description of Artificial Sequence: Synthetic oligonucleotide
  Antisense strand to SEQ ID NO: 2111806
auaauuagugacugcccaa

SEQ ID NO: 2111808 - RNA, 19 nt, Artificial Sequence
  Description of Artificial Sequence: Synthetic oligonucleotide
  Sense strand starting at position 887 of SEQ ID NO: 1882320
acuaauuauuagguuguga

SEQ ID NO: 2111809 - RNA, 19 nt, Artificial Sequence
  Description of Artificial Sequence: Synthetic oligonucleotide
  Antisense strand to SEQ ID NO: 2111808
ucacaaccuaauaauuagu

SEQ ID NO: 2111810 - RNA, 19 nt, Artificial Sequence
  Description of Artificial Sequence: Synthetic oligonucleotide
  Sense strand starting at position 942 of SEQ ID NO: 1882320
gaauguauuguuuaucuga

SEQ ID NO: 2111811 - RNA, 19 nt, Artificial Sequence
  Description of Artificial Sequence: Synthetic oligonucleotide
  Antisense strand to SEQ ID NO: 2111810
ucagauaaacaauacauuc

SEQ ID NO: 2111812 - RNA, 19 nt, Artificial Sequence
  Description of Artificial Sequence: Synthetic oligonucleotide
  Sense strand starting at position 1006 of SEQ ID NO: 1882320
auaaguuaacuuugaagca

SEQ ID NO: 2111813 - RNA, 19 nt, Artificial Sequence
  Description of Artificial Sequence: Synthetic oligonucleotide
  Antisense strand to SEQ ID NO: 2111812
ugcuucaaaguuaacuuau

SEQ ID NO: 2111814 - RNA, 19 nt, Artificial Sequence
  Description of Artificial Sequence: Synthetic oligonucleotide
  Sense strand starting at position 1346 of SEQ ID NO: 1882320
guuaaaggucucuaaggca

SEQ ID NO: 2111815 - RNA, 19 nt, Artificial Sequence
  Description of Artificial Sequence: Synthetic oligonucleotide
  Antisense strand to SEQ ID NO: 2111814
ugccuuagagaccuuuaac

SEQ ID NO: 2111816 - RNA, 19 nt, Artificial Sequence
  Description of Artificial Sequence: Synthetic oligonucleotide
  Sense strand starting at position 2040 of SEQ ID NO: 1882320
cucaaacaguaguucuaaa

SEQ ID NO: 2111817 - RNA, 19 nt, Artificial Sequence
  Description of Artificial Sequence: Synthetic oligonucleotide
  Antisense strand to SEQ ID NO: 2111816
uuuagaacuacuguuugag

SEQ ID NO: 2111818 - RNA, 19 nt, Artificial Sequence
  Description of Artificial Sequence: Synthetic oligonucleotide
  Sense strand starting at position 2126 of SEQ ID NO: 1882320
ccauuaucucugcagagau

SEQ ID NO: 2111819 - RNA, 19 nt, Artificial Sequence
  Description of Artificial Sequence: Synthetic oligonucleotide
  Antisense strand to SEQ ID NO: 2111818
aucucugcagagauaaugg

SEQ ID NO: 2111820 - RNA, 19 nt, Artificial Sequence
  Description of Artificial Sequence: Synthetic oligonucleotide
  Sense strand starting at position 2128 of SEQ ID NO: 1882320
auuaucucugcagagauuc

SEQ ID NO: 2111821 - RNA, 19 nt, Artificial Sequence
  Description of Artificial Sequence: Synthetic oligonucleotide
  Antisense strand to SEQ ID NO: 2111820
gaaucucugcagagauaau

SEQ ID NO: 2111822 - RNA, 19 nt, Artificial Sequence
  Description of Artificial Sequence: Synthetic oligonucleotide
  Sense strand starting at position 2169 of SEQ ID NO: 1882320
auucgagacucacuuaucu

SEQ ID NO: 2111823 - RNA, 19 nt, Artificial Sequence
  Description of Artificial Sequence: Synthetic oligonucleotide
  Antisense strand to SEQ ID NO: 2111822
agauaagugagucucgaau

SEQ ID NO: 2111824 - RNA, 19 nt, Artificial Sequence
  Description of Artificial Sequence: Synthetic oligonucleotide
  Sense strand starting at position 2191 of SEQ ID NO: 1882320
gcacauccgcaaguguuua

SEQ ID NO: 2111825 - RNA, 19 nt, Artificial Sequence
  Description of Artificial Sequence: Synthetic oligonucleotide
  Antisense strand to SEQ ID NO: 2111824
uaaacacuugcggaugugc

SEQ ID NO: 2111826 - RNA, 19 nt, Artificial Sequence
  Description of Artificial Sequence: Synthetic oligonucleotide
  Sense strand starting at position 2248 of SEQ ID NO: 1882320
ccaggaauucugugaagug

SEQ ID NO: 2111827 - RNA, 19 nt, Artificial Sequence
  Description of Artificial Sequence: Synthetic oligonucleotide
  Antisense strand to SEQ ID NO: 2111826
cacuucacagaauuccugg

SEQ ID NO: 2111828 - RNA, 19 nt, Artificial Sequence
  Description of Artificial Sequence: Synthetic oligonucleotide
  Sense strand starting at position 2272 of SEQ ID NO: 1882320
cugccuagaucauuacaag

SEQ ID NO: 2111829 - RNA, 19 nt, Artificial Sequence
  Description of Artificial Sequence: Synthetic oligonucleotide
  Antisense strand to SEQ ID NO: 2111828
cuuguaaugaucuaggcag

SEQ ID NO: 2111830 - RNA, 19 nt, Artificial Sequence
  Description of Artificial Sequence: Synthetic oligonucleotide
  Sense strand starting at position 2278 of SEQ ID NO: 1882320
agaucauuacaagguagua

SEQ ID NO: 2111831 - RNA, 19 nt, Artificial Sequence
  Description of Artificial Sequence: Synthetic oligonucleotide
  Antisense strand to SEQ ID NO: 2111830
uacuaccuuguaaugaucu

SEQ ID NO: 2111832 - RNA, 19 nt, Artificial Sequence
  Description of Artificial Sequence: Synthetic oligonucleotide
  Sense strand starting at position 2367 of SEQ ID NO: 1882320
ucuugaaucuuaguuugaa

SEQ ID NO: 2111833 - RNA, 19 nt, Artificial Sequence
  Description of Artificial Sequence: Synthetic oligonucleotide
  Antisense strand to SEQ ID NO: 2111832
uucaaacuaagauucaaga

SEQ ID NO: 2111834 - RNA, 19 nt, Artificial Sequence
  Description of Artificial Sequence: Synthetic oligonucleotide
  Sense strand starting at position 2368 of SEQ ID NO: 1882320
cuugaaucuuaguuugaaa

SEQ ID NO: 2111835 - RNA, 19 nt, Artificial Sequence
  Description of Artificial Sequence: Synthetic oligonucleotide
  Antisense strand to SEQ ID NO: 2111834
uuucaaacuaagauucaag

SEQ ID NO: 2111836 - RNA, 19 nt, Artificial Sequence
  Description of Artificial Sequence: Synthetic oligonucleotide
  Sense strand starting at position 2399 of SEQ ID NO: 1882320
auauaaguggccuaaugua

SEQ ID NO: 2111837 - RNA, 19 nt, Artificial Sequence
  Description of Artificial Sequence: Synthetic oligonucleotide
  Antisense strand to SEQ ID NO: 2111836
uacauuaggccacuuauau

SEQ ID NO: 2111838 - RNA, 19 nt, Artificial Sequence
  Description of Artificial Sequence: Synthetic oligonucleotide
  Sense strand starting at position 2604 of SEQ ID NO: 1882320
ugcauuugccaauggcaaa

SEQ ID NO: 2111839 - RNA, 19 nt, Artificial Sequence
  Description of Artificial Sequence: Synthetic oligonucleotide
  Antisense strand to SEQ ID NO: 2111838
uuugccauuggcaaaugca

SEQ ID NO: 2111840 - RNA, 19 nt, Artificial Sequence
  Description of Artificial Sequence: Synthetic oligonucleotide
  Sense strand starting at position 2766 of SEQ ID NO: 1882320
agaccaagacuguggcauu

SEQ ID NO: 2111841 - RNA, 19 nt, Artificial Sequence
  Description of Artificial Sequence: Synthetic oligonucleotide
  Antisense strand to SEQ ID NO: 2111840
aaugccacagucuuggucu

SEQ ID NO: 2111842 - RNA, 19 nt, Artificial Sequence
  Description of Artificial Sequence: Synthetic oligonucleotide
  Sense strand starting at position 2787 of SEQ ID NO: 1882320
uugcuuugucuacaagaca

SEQ ID NO: 2111843 - RNA, 19 nt, Artificial Sequence
  Description of Artificial Sequence: Synthetic oligonucleotide
  Antisense strand to SEQ ID NO: 2111842
ugucuuguagacaaagcaa

SEQ ID NO: 2111844 - RNA, 19 nt, Artificial Sequence
  Description of Artificial Sequence: Synthetic oligonucleotide
  Sense strand starting at position 2795 of SEQ ID NO: 1882320
ucuacaagacauggugaua

SEQ ID NO: 2111845 - RNA, 19 nt, Artificial Sequence
  Description of Artificial Sequence: Synthetic oligonucleotide
  Antisense strand to SEQ ID NO: 2111844
uaucaccaugucuuguaga

SEQ ID NO: 2111846 - RNA, 19 nt, Artificial Sequence
  Description of Artificial Sequence: Synthetic oligonucleotide
  Sense strand starting at position 3139 of SEQ ID NO: 1882320
uguauuauugacugauuac

SEQ ID NO: 2111847 - RNA, 19 nt, Artificial Sequence
  Description of Artificial Sequence: Synthetic oligonucleotide
  Antisense strand to SEQ ID NO: 2111846
guaaucagucaauaauaca

SEQ ID NO: 2111848 - RNA, 19 nt, Artificial Sequence
  Description of Artificial Sequence: Synthetic oligonucleotide
  Sense strand starting at position 3184 of SEQ ID NO: 1882320
uugggugauacugaaaguu

SEQ ID NO: 2111849 - RNA, 19 nt, Artificial Sequence
  Description of Artificial Sequence: Synthetic oligonucleotide
  Antisense strand to SEQ ID NO: 2111848
aacuuucaguaucacccaa

SEQ ID NO: 2111850 - RNA, 19 nt, Artificial Sequence
  Description of Artificial Sequence: Synthetic oligonucleotide
  Sense strand starting at position 3294 of SEQ ID NO: 1882320
uugugugaaguccaggauu

SEQ ID NO: 2111851 - RNA, 19 nt, Artificial Sequence
  Description of Artificial Sequence: Synthetic oligonucleotide
  Antisense strand to SEQ ID NO: 2111850
aauccuggacuucacacaa

SEQ ID NO: 2111852 - RNA, 19 nt, Artificial Sequence
  Description of Artificial Sequence: Synthetic oligonucleotide
  Sense strand starting at position 3444 of SEQ ID NO: 1882320
agacauaagccuuaaguac

SEQ ID NO: 2111853 - RNA, 19 nt, Artificial Sequence
  Description of Artificial Sequence: Synthetic oligonucleotide
  Antisense strand to SEQ ID NO: 2111852
guacuuaaggcuuaugucu

SEQ ID NO: 2111854 - RNA, 19 nt, Artificial Sequence
  Description of Artificial Sequence: Synthetic oligonucleotide
  Sense strand starting at position 3458 of SEQ ID NO: 1882320
aguacuggauuugagagaa

SEQ ID NO: 2111855 - RNA, 19 nt, Artificial Sequence
  Description of Artificial Sequence: Synthetic oligonucleotide
  Antisense strand to SEQ ID NO: 2111854
uucucucaaauccaguacu

SEQ ID NO: 2111856 - RNA, 19 nt, Artificial Sequence
  Description of Artificial Sequence: Synthetic oligonucleotide
  Sense strand starting at position 3517 of SEQ ID NO: 1882320
cucugcuuuagugaaggga

SEQ ID NO: 2111857 - RNA, 19 nt, Artificial Sequence
  Description of Artificial Sequence: Synthetic oligonucleotide
  Antisense strand to SEQ ID NO: 2111856
ucccuucacuaaagcagag

SEQ ID NO: 2111858 - RNA, 19 nt, Artificial Sequence
  Description of Artificial Sequence: Synthetic oligonucleotide
  Sense strand starting at position 3520 of SEQ ID NO: 1882320
ugcuuuagugaagggaaua

SEQ ID NO: 2111859 - RNA, 19 nt, Artificial Sequence
  Description of Artificial Sequence: Synthetic oligonucleotide
  Antisense strand to SEQ ID NO: 2111858
uauucccuucacuaaagca

SEQ ID NO: 2111860 - RNA, 19 nt, Artificial Sequence
  Description of Artificial Sequence: Synthetic oligonucleotide
  Sense strand starting at position 3521 of SEQ ID NO: 1882320
gcuuuagugaagggaauac

SEQ ID NO: 2111861 - RNA, 19 nt, Artificial Sequence
  Description of Artificial Sequence: Synthetic oligonucleotide
  Antisense strand to SEQ ID NO: 2111860
guauucccuucacuaaagc

SEQ ID NO: 2111862 - RNA, 19 nt, Artificial Sequence
  Description of Artificial Sequence: Synthetic oligonucleotide
  Sense strand starting at position 3533 of SEQ ID NO: 1882320
ggaauacugccaggcaaau

SEQ ID NO: 2111863 - RNA, 19 nt, Artificial Sequence
  Description of Artificial Sequence: Synthetic oligonucleotide
  Antisense strand to SEQ ID NO: 2111862
auuugccuggcaguauucc

SEQ ID NO: 2111864 - RNA, 19 nt, Artificial Sequence
  Description of Artificial Sequence: Synthetic oligonucleotide
  Sense strand starting at position 37 of SEQ ID NO: 1882321
uucugaacguucucugaga

SEQ ID NO: 2111865 - RNA, 19 nt, Artificial Sequence
  Description of Artificial Sequence: Synthetic oligonucleotide
  Antisense strand to SEQ ID NO: 2111864
ucucagagaacguucagaa

SEQ ID NO: 2111866 - RNA, 19 nt, Artificial Sequence
  Description of Artificial Sequence: Synthetic oligonucleotide
  Sense strand starting at position 110 of SEQ ID NO: 1882321
gucacuacgguuuggaaga

SEQ ID NO: 2111867 - RNA, 19 nt, Artificial Sequence
  Description of Artificial Sequence: Synthetic oligonucleotide
  Antisense strand to SEQ ID NO: 2111866
ucuuccaaaccguagugac

SEQ ID NO: 2111868 - RNA, 19 nt, Artificial Sequence
  Description of Artificial Sequence: Synthetic oligonucleotide
  Sense strand starting at position 111 of SEQ ID NO: 1882321
ucacuacgguuuggaagaa

SEQ ID NO: 2111869 - RNA, 19 nt, Artificial Sequence
  Description of Artificial Sequence: Synthetic oligonucleotide
  Antisense strand to SEQ ID NO: 2111868
uucuuccaaaccguaguga

SEQ ID NO: 2111870 - RNA, 19 nt, Artificial Sequence
  Description of Artificial Sequence: Synthetic oligonucleotide
  Sense strand starting at position 112 of SEQ ID NO: 1882321
cacuacgguuuggaagaaa

SEQ ID NO: 2111871 - RNA, 19 nt, Artificial Sequence
  Description of Artificial Sequence: Synthetic oligonucleotide
  Antisense strand to SEQ ID NO: 2111870
uuucuuccaaaccguagug

SEQ ID NO: 2111872 - RNA, 19 nt, Artificial Sequence
  Description of Artificial Sequence: Synthetic oligonucleotide
  Sense strand starting at position 132 of SEQ ID NO: 1882321
agucuagaaucuuaggcuu

SEQ ID NO: 2111873 - RNA, 19 nt, Artificial Sequence
  Description of Artificial Sequence: Synthetic oligonucleotide
  Antisense strand to SEQ ID NO: 2111872
aagccuaagauucuagacu

SEQ ID NO: 2111874 - RNA, 19 nt, Artificial Sequence
  Description of Artificial Sequence: Synthetic oligonucleotide
  Sense strand starting at position 135 of SEQ ID NO: 1882321
cuagaaucuuaggcuuuaa

SEQ ID NO: 2111875 - RNA, 19 nt, Artificial Sequence
  Description of Artificial Sequence: Synthetic oligonucleotide
  Antisense strand to SEQ ID NO: 2111874
uuaaagccuaagauucuag

SEQ ID NO: 2111876 - RNA, 19 nt, Artificial Sequence
  Description of Artificial Sequence: Synthetic oligonucleotide
  Sense strand starting at position 156 of SEQ ID NO: 1882321
uggaccuggucucuaauaa

SEQ ID NO: 2111877 - RNA, 19 nt, Artificial Sequence
  Description of Artificial Sequence: Synthetic oligonucleotide
  Antisense strand to SEQ ID NO: 2111876
uuauuagagaccaggucca

SEQ ID NO: 2111878 - RNA, 19 nt, Artificial Sequence
  Description of Artificial Sequence: Synthetic oligonucleotide
  Sense strand starting at position 167 of SEQ ID NO: 1882321
ucuaauaaccuguguuucu

SEQ ID NO: 2111879 - RNA, 19 nt, Artificial Sequence
  Description of Artificial Sequence: Synthetic oligonucleotide
  Antisense strand to SEQ ID NO: 2111878
agaaacacagguuauuaga

SEQ ID NO: 2111880 - RNA, 19 nt, Artificial Sequence
  Description of Artificial Sequence: Synthetic oligonucleotide
  Sense strand starting at position 249 of SEQ ID NO: 1882321
uuaccagucucacuugcua

SEQ ID NO: 2111881 - RNA, 19 nt, Artificial Sequence
  Description of Artificial Sequence: Synthetic oligonucleotide
  Antisense strand to SEQ ID NO: 2111880
uagcaagugagacugguaa

SEQ ID NO: 2111882 - RNA, 19 nt, Artificial Sequence
  Description of Artificial Sequence: Synthetic oligonucleotide
  Sense strand starting at position 261 of SEQ ID NO: 1882321
cuugcuaacugaucuugga

SEQ ID NO: 2111883 - RNA, 19 nt, Artificial Sequence
  Description of Artificial Sequence: Synthetic oligonucleotide
  Antisense strand to SEQ ID NO: 2111882
uccaagaucaguuagcaag

SEQ ID NO: 2111884 - RNA, 19 nt, Artificial Sequence
  Description of Artificial Sequence: Synthetic oligonucleotide
  Sense strand starting at position 385 of SEQ ID NO: 1882321
ggugucugcuaaagugguu

SEQ ID NO: 2111885 - RNA, 19 nt, Artificial Sequence
  Description of Artificial Sequence: Synthetic oligonucleotide
  Antisense strand to SEQ ID NO: 2111884
aaccacuuuagcagacacc

SEQ ID NO: 2111886 - RNA, 19 nt, Artificial Sequence
  Description of Artificial Sequence: Synthetic oligonucleotide
  Sense strand starting at position 390 of SEQ ID NO: 1882321
cugcuaaagugguuugaaa

SEQ ID NO: 2111887 - RNA, 19 nt, Artificial Sequence
  Description of Artificial Sequence: Synthetic oligonucleotide
  Antisense strand to SEQ ID NO: 2111886
uuucaaaccacuuuagcag

SEQ ID NO: 2111888 - RNA, 19 nt, Artificial Sequence
  Description of Artificial Sequence: Synthetic oligonucleotide
  Sense strand starting at position 392 of SEQ ID NO: 1882321
gcuaaagugguuugaaauc

SEQ ID NO: 2111889 - RNA, 19 nt, Artificial Sequence
  Description of Artificial Sequence: Synthetic oligonucleotide
  Antisense strand to SEQ ID NO: 2111888
gauuucaaaccacuuuagc

SEQ ID NO: 2111890 - RNA, 19 nt, Artificial Sequence
  Description of Artificial Sequence: Synthetic oligonucleotide
  Sense strand starting at position 428 of SEQ ID NO: 1882321
acaggagaguauuauuaug

SEQ ID NO: 2111891 - RNA, 19 nt, Artificial Sequence
  Description of Artificial Sequence: Synthetic oligonucleotide
  Antisense strand to SEQ ID NO: 2111890
cauaauaauacucuccugu

SEQ ID NO: 2111892 - RNA, 19 nt, Artificial Sequence
  Description of Artificial Sequence: Synthetic oligonucleotide
  Sense strand starting at position 434 of SEQ ID NO: 1882321
gaguauuauuaugaucaag

SEQ ID NO: 2111893 - RNA, 19 nt, Artificial Sequence
  Description of Artificial Sequence: Synthetic oligonucleotide
  Antisense strand to SEQ ID NO: 2111892
cuugaucauaauaauacuc

SEQ ID NO: 2111894 - RNA, 19 nt, Artificial Sequence
  Description of Artificial Sequence: Synthetic oligonucleotide
  Sense strand starting at position 436 of SEQ ID NO: 1882321
guauuauuaugaucaagga

SEQ ID NO: 2111895 - RNA, 19 nt, Artificial Sequence
  Description of Artificial Sequence: Synthetic oligonucleotide
  Antisense strand to SEQ ID NO: 2111894
uccuugaucauaauaauac

SEQ ID NO: 2111896 - RNA, 19 nt, Artificial Sequence
  Description of Artificial Sequence: Synthetic oligonucleotide
  Sense strand starting at position 625 of SEQ ID NO: 1882321
agagaaaccugacuacugu

SEQ ID NO: 2111897 - RNA, 19 nt, Artificial Sequence
  Description of Artificial Sequence: Synthetic oligonucleotide
  Antisense strand to SEQ ID NO: 2111896
acaguagucagguuucucu

SEQ ID NO: 2111898 - RNA, 19 nt, Artificial Sequence
  Description of Artificial Sequence: Synthetic oligonucleotide
  Sense strand starting at position 1137 of SEQ ID NO: 1882321
cccaguuagucauuuaguc

SEQ ID NO: 2111899 - RNA, 19 nt, Artificial Sequence
  Description of Artificial Sequence: Synthetic oligonucleotide
  Antisense strand to SEQ ID NO: 2111898
gacuaaaugacuaacuggg

SEQ ID NO: 2111900 - RNA, 19 nt, Artificial Sequence
  Description of Artificial Sequence: Synthetic oligonucleotide
  Sense strand starting at position 1143 of SEQ ID NO: 1882321
uagucauuuagucggcaga

SEQ ID NO: 2111901 - RNA, 19 nt, Artificial Sequence
  Description of Artificial Sequence: Synthetic oligonucleotide
  Antisense strand to SEQ ID NO: 2111900
ucugccgacuaaaugacua

SEQ ID NO: 2111902 - RNA, 19 nt, Artificial Sequence
  Description of Artificial Sequence: Synthetic oligonucleotide
  Sense strand starting at position 1363 of SEQ ID NO: 1882321
ggaucaaagguuuggcuuu

SEQ ID NO: 2111903 - RNA, 19 nt, Artificial Sequence
  Description of Artificial Sequence: Synthetic oligonucleotide
  Antisense strand to SEQ ID NO: 2111902
aaagccaaaccuuugaucc

SEQ ID NO: 2111904 - RNA, 19 nt, Artificial Sequence
  Description of Artificial Sequence: Synthetic oligonucleotide
  Sense strand starting at position 1369 of SEQ ID NO: 1882321
aagguuuggcuuuggaaga

SEQ ID NO: 2111905 - RNA, 19 nt, Artificial Sequence
  Description of Artificial Sequence: Synthetic oligonucleotide
  Antisense strand to SEQ ID NO: 2111904
ucuuccaaagccaaaccuu

SEQ ID NO: 2111906 - RNA, 19 nt, Artificial Sequence
  Description of Artificial Sequence: Synthetic oligonucleotide
  Sense strand starting at position 1370 of SEQ ID NO: 1882321
agguuuggcuuuggaagaa

SEQ ID NO: 2111907 - RNA, 19 nt, Artificial Sequence
  Description of Artificial Sequence: Synthetic oligonucleotide
  Antisense strand to SEQ ID NO: 2111906
uucuuccaaagccaaaccu

SEQ ID NO: 2111908 - RNA, 19 nt, Artificial Sequence
  Description of Artificial Sequence: Synthetic oligonucleotide
  Sense strand starting at position 1383 of SEQ ID NO: 1882321
gaagaaagaugugcugcuu

SEQ ID NO: 2111909 - RNA, 19 nt, Artificial Sequence
  Description of Artificial Sequence: Synthetic oligonucleotide
  Antisense strand to SEQ ID NO: 2111908
aagcagcacaucuuucuuc

SEQ ID NO: 2111910 - RNA, 19 nt, Artificial Sequence
  Description of Artificial Sequence: Synthetic oligonucleotide
  Sense strand starting at position 2290 of SEQ ID NO: 1882321
caggaaucccugugucucu

SEQ ID NO: 2111911 - RNA, 19 nt, Artificial Sequence
  Description of Artificial Sequence: Synthetic oligonucleotide
  Antisense strand to SEQ ID NO: 2111910
agagacacagggauuccug

SEQ ID NO: 2111912 - RNA, 19 nt, Artificial Sequence
  Description of Artificial Sequence: Synthetic oligonucleotide
  Sense strand starting at position 2319 of SEQ ID NO: 1882321
gagugaagucugugcccuu

SEQ ID NO: 2111913 - RNA, 19 nt, Artificial Sequence
  Description of Artificial Sequence: Synthetic oligonucleotide
  Antisense strand to SEQ ID NO: 2111912
aagggcacagacuucacuc

SEQ ID NO: 2111914 - RNA, 19 nt, Artificial Sequence
  Description of Artificial Sequence: Synthetic oligonucleotide
  Sense strand starting at position 2439 of SEQ ID NO: 1882321
cugcuacuguguccugaga

SEQ ID NO: 2111915 - RNA, 19 nt, Artificial Sequence
  Description of Artificial Sequence: Synthetic oligonucleotide
  Antisense strand to SEQ ID NO: 2111914
ucucaggacacaguagcag

SEQ ID NO: 2111916 - RNA, 19 nt, Artificial Sequence
  Description of Artificial Sequence: Synthetic oligonucleotide
  Sense strand starting at position 2630 of SEQ ID NO: 1882321
ucgauuuccuuaucuguga

SEQ ID NO: 2111917 - RNA, 19 nt, Artificial Sequence
  Description of Artificial Sequence: Synthetic oligonucleotide
  Antisense strand to SEQ ID NO: 2111916
ucacagauaaggaaaucga

SEQ ID NO: 2111918 - RNA, 19 nt, Artificial Sequence
  Description of Artificial Sequence: Synthetic oligonucleotide
  Sense strand starting at position 2698 of SEQ ID NO: 1882321
auaagauuaagguggccau

SEQ ID NO: 2111919 - RNA, 19 nt, Artificial Sequence
  Description of Artificial Sequence: Synthetic oligonucleotide
  Antisense strand to SEQ ID NO: 2111918
auggccaccuuaaucuuau

SEQ ID NO: 2111920 - RNA, 19 nt, Artificial Sequence
  Description of Artificial Sequence: Synthetic oligonucleotide
  Sense strand starting at position 2710 of SEQ ID NO: 1882321
uggccaugugccuaacaca

SEQ ID NO: 2111921 - RNA, 19 nt, Artificial Sequence
  Description of Artificial Sequence: Synthetic oligonucleotide
  Antisense strand to SEQ ID NO: 2111920
uguguuaggcacauggcca

SEQ ID NO: 2111922 - RNA, 19 nt, Artificial Sequence
  Description of Artificial Sequence: Synthetic oligonucleotide
  Sense strand starting at position 2731 of SEQ ID NO: 1882321
gccugauaugggcaaagga

SEQ ID NO: 2111923 - RNA, 19 nt, Artificial Sequence
  Description of Artificial Sequence: Synthetic oligonucleotide
  Antisense strand to SEQ ID NO: 2111922
uccuuugcccauaucaggc

SEQ ID NO: 2111924 - RNA, 19 nt, Artificial Sequence
  Description of Artificial Sequence: Synthetic oligonucleotide
  Sense strand starting at position 2816 of SEQ ID NO: 1882321
gcuggcgugggaugagaau

SEQ ID NO: 2111925 - RNA, 19 nt, Artificial Sequence
  Description of Artificial Sequence: Synthetic oligonucleotide
  Antisense strand to SEQ ID NO: 2111924
auucucaucccacgccagc

SEQ ID NO: 2111926 - RNA, 19 nt, Artificial Sequence
  Description of Artificial Sequence: Synthetic oligonucleotide
  Sense strand starting at position 2825 of SEQ ID NO: 1882321
ggaugagaauucuggccuu

SEQ ID NO: 2111927 - RNA, 19 nt, Artificial Sequence
  Description of Artificial Sequence: Synthetic oligonucleotide
  Antisense strand to SEQ ID NO: 2111926
aaggccagaauucucaucc

SEQ ID NO: 2111928 - RNA, 19 nt, Artificial Sequence
  Description of Artificial Sequence: Synthetic oligonucleotide
  Sense strand starting at position 2856 of SEQ ID NO: 1882321
gggacaguaugaggcuuau

SEQ ID NO: 2111929 - RNA, 19 nt, Artificial Sequence
  Description of Artificial Sequence: Synthetic oligonucleotide
  Antisense strand to SEQ ID NO: 2111928
auaagccucauacuguccc

SEQ ID NO: 2111930 - RNA, 19 nt, Artificial Sequence
  Description of Artificial Sequence: Synthetic oligonucleotide
  Sense strand starting at position 2876 of SEQ ID NO: 1882321
aaagcuaaaggaugguaau

SEQ ID NO: 2111931 - RNA, 19 nt, Artificial Sequence
  Description of Artificial Sequence: Synthetic oligonucleotide
  Antisense strand to SEQ ID NO: 2111930
auuaccauccuuuagcuuu

SEQ ID NO: 2111932 - RNA, 19 nt, Artificial Sequence
  Description of Artificial Sequence: Synthetic oligonucleotide
  Sense strand starting at position 3329 of SEQ ID NO: 1882321
cccacaaaguauucugagu

SEQ ID NO: 2111933 - RNA, 19 nt, Artificial Sequence
  Description of Artificial Sequence: Synthetic oligonucleotide
  Antisense strand to SEQ ID NO: 2111932
acucagaauacuuuguggg

SEQ ID NO: 2111934 - RNA, 19 nt, Artificial Sequence
  Description of Artificial Sequence: Synthetic oligonucleotide
  Sense strand starting at position 3331 of SEQ ID NO: 1882321
cacaaaguauucugaguug

SEQ ID NO: 2111935 - RNA, 19 nt, Artificial Sequence
  Description of Artificial Sequence: Synthetic oligonucleotide
  Antisense strand to SEQ ID NO: 2111934
caacucagaauacuuugug

SEQ ID NO: 2111936 - RNA, 19 nt, Artificial Sequence
  Description of Artificial Sequence: Synthetic oligonucleotide
  Sense strand starting at position 3334 of SEQ ID NO: 1882321
aaaguauucugaguuguuu

SEQ ID NO: 2111937 - RNA, 19 nt, Artificial Sequence
  Description of Artificial Sequence: Synthetic oligonucleotide
  Antisense strand to SEQ ID NO: 2111936
aaacaacucagaauacuuu

SEQ ID NO: 2111938 - RNA, 19 nt, Artificial Sequence
  Description of Artificial Sequence: Synthetic oligonucleotide
  Sense strand starting at position 3572 of SEQ ID NO: 1882321
cacucuugguggcuuuaau

SEQ ID NO: 2111939 - RNA, 19 nt, Artificial Sequence
  Description of Artificial Sequence: Synthetic oligonucleotide
  Antisense strand to SEQ ID NO: 2111938
auuaaagccaccaagagug

SEQ ID NO: 2111940 - RNA, 19 nt, Artificial Sequence
  Description of Artificial Sequence: Synthetic oligonucleotide
  Sense strand starting at position 3826 of SEQ ID NO: 1882321
gcagccuguccugagggaa

SEQ ID NO: 2111941 - RNA, 19 nt, Artificial Sequence
  Description of Artificial Sequence: Synthetic oligonucleotide
  Antisense strand to SEQ ID NO: 2111940
uucccucaggacaggcugc

SEQ ID NO: 2111942 - RNA, 19 nt, Artificial Sequence
  Description of Artificial Sequence: Synthetic oligonucleotide
  Sense strand starting at position 3902 of SEQ ID NO: 1882321
gagacauagcccugcuucu

SEQ ID NO: 2111943 - RNA, 19 nt, Artificial Sequence
  Description of Artificial Sequence: Synthetic oligonucleotide
  Antisense strand to SEQ ID NO: 2111942
agaagcagggcuaugucuc

SEQ ID NO: 2111944 - RNA, 19 nt, Artificial Sequence
  Description of Artificial Sequence: Synthetic oligonucleotide
  Sense strand starting at position 172 of SEQ ID NO: 1882322
agacuuaucgccgagaaag

SEQ ID NO: 2111945 - RNA, 19 nt, Artificial Sequence
  Description of Artificial Sequence: Synthetic oligonucleotide
  Antisense strand to SEQ ID NO: 2111944
cuuucucggcgauaagucu

SEQ ID NO: 2111946 - RNA, 19 nt, Artificial Sequence
  Description of Artificial Sequence: Synthetic oligonucleotide
  Sense strand starting at position 188 of SEQ ID NO: 1882322
aagcaaugggcuugcauuu

SEQ ID NO: 2111947 - RNA, 19 nt, Artificial Sequence
  Description of Artificial Sequence: Synthetic oligonucleotide
  Antisense strand to SEQ ID NO: 2111946
aaaugcaagcccauugcuu

SEQ ID NO: 2111948 - RNA, 19 nt, Artificial Sequence
  Description of Artificial Sequence: Synthetic oligonucleotide
  Sense strand starting at position 194 of SEQ ID NO: 1882322
ugggcuugcauuuguugaa

SEQ ID NO: 2111949 - RNA, 19 nt, Artificial Sequence
  Description of Artificial Sequence: Synthetic oligonucleotide
  Antisense strand to SEQ ID NO: 2111948
uucaacaaaugcaagccca

SEQ ID NO: 2111950 - RNA, 19 nt, Artificial Sequence
  Description of Artificial Sequence: Synthetic oligonucleotide
  Sense strand starting at position 195 of SEQ ID NO: 1882322
gggcuugcauuuguugaau

SEQ ID NO: 2111951 - RNA, 19 nt, Artificial Sequence
  Description of Artificial Sequence: Synthetic oligonucleotide
  Antisense strand to SEQ ID NO: 2111950
auucaacaaaugcaagccc

SEQ ID NO: 2111952 - RNA, 19 nt, Artificial Sequence
  Description of Artificial Sequence: Synthetic oligonucleotide
  Sense strand starting at position 204 of SEQ ID NO: 1882322
uuuguugaaugauucuaac

SEQ ID NO: 2111953 - RNA, 19 nt, Artificial Sequence
  Description of Artificial Sequence: Synthetic oligonucleotide
  Antisense strand to SEQ ID NO: 2111952
guuagaaucauucaacaaa

SEQ ID NO: 2111954 - RNA, 19 nt, Artificial Sequence
  Description of Artificial Sequence: Synthetic oligonucleotide
  Sense strand starting at position 259 of SEQ ID NO: 1882322
gugacuuacuuucuuugaa

SEQ ID NO: 2111955 - RNA, 19 nt, Artificial Sequence
  Description of Artificial Sequence: Synthetic oligonucleotide
  Antisense strand to SEQ ID NO: 2111954
uucaaagaaaguaagucac

SEQ ID NO: 2111956 - RNA, 19 nt, Artificial Sequence
  Description of Artificial Sequence: Synthetic oligonucleotide
  Sense strand starting at position 516 of SEQ ID NO: 1882322
agaccaagauuggaagaga

SEQ ID NO: 2111957 - RNA, 19 nt, Artificial Sequence
  Description of Artificial Sequence: Synthetic oligonucleotide
  Antisense strand to SEQ ID NO: 2111956
ucucuuccaaucuuggucu

SEQ ID NO: 2111958 - RNA, 19 nt, Artificial Sequence
  Description of Artificial Sequence: Synthetic oligonucleotide
  Sense strand starting at position 591 of SEQ ID NO: 1882322
gaagacuuauguuugaugu

SEQ ID NO: 2111959 - RNA, 19 nt, Artificial Sequence
  Description of Artificial Sequence: Synthetic oligonucleotide
  Antisense strand to SEQ ID NO: 2111958
acaucaaacauaagucuuc

SEQ ID NO: 2111960 - RNA, 19 nt, Artificial Sequence
  Description of Artificial Sequence: Synthetic oligonucleotide
  Sense strand starting at position 817 of SEQ ID NO: 1882322
ggagauuauccaugugacu

SEQ ID NO: 2111961 - RNA, 19 nt, Artificial Sequence
  Description of Artificial Sequence: Synthetic oligonucleotide
  Antisense strand to SEQ ID NO: 2111960
agucacauggauaaucucc

SEQ ID NO: 2111962 - RNA, 19 nt, Artificial Sequence
  Description of Artificial Sequence: Synthetic oligonucleotide
  Sense strand starting at position 1007 of SEQ ID NO: 1882322
ugaaguccaaguuagguaa

SEQ ID NO: 2111963 - RNA, 19 nt, Artificial Sequence
  Description of Artificial Sequence: Synthetic oligonucleotide
  Antisense strand to SEQ ID NO: 2111962
uuaccuaacuuggacuuca

SEQ ID NO: 2111964 - RNA, 19 nt, Artificial Sequence
  Description of Artificial Sequence: Synthetic oligonucleotide
  Sense strand starting at position 1010 of SEQ ID NO: 1882322
aguccaaguuagguaaaga

SEQ ID NO: 2111965 - RNA, 19 nt, Artificial Sequence
  Description of Artificial Sequence: Synthetic oligonucleotide
  Antisense strand to SEQ ID NO: 2111964
ucuuuaccuaacuuggacu

SEQ ID NO: 2111966 - RNA, 19 nt, Artificial Sequence
  Description of Artificial Sequence: Synthetic oligonucleotide
  Sense strand starting at position 1322 of SEQ ID NO: 1882322
aggaccuuccuguggugaa

SEQ ID NO: 2111967 - RNA, 19 nt, Artificial Sequence
  Description of Artificial Sequence: Synthetic oligonucleotide
  Antisense strand to SEQ ID NO: 2111966
uucaccacaggaagguccu

SEQ ID NO: 2111968 - RNA, 19 nt, Artificial Sequence
  Description of Artificial Sequence: Synthetic oligonucleotide
  Sense strand starting at position 1538 of SEQ ID NO: 1882322
auguuaguaaaucgagaaa

SEQ ID NO: 2111969 - RNA, 19 nt, Artificial Sequence
  Description of Artificial Sequence: Synthetic oligonucleotide
  Antisense strand to SEQ ID NO: 2111968
uuucucgauuuacuaacau

SEQ ID NO: 2111970 - RNA, 19 nt, Artificial Sequence
  Description of Artificial Sequence: Synthetic oligonucleotide
  Sense strand starting at position 1693 of SEQ ID NO: 1882322
ucugaaacucuuuguagaa

SEQ ID NO: 2111971 - RNA, 19 nt, Artificial Sequence
  Description of Artificial Sequence: Synthetic oligonucleotide
  Antisense strand to SEQ ID NO: 2111970
uucuacaaagaguuucaga

SEQ ID NO: 2111972 - RNA, 19 nt, Artificial Sequence
  Description of Artificial Sequence: Synthetic oligonucleotide
  Sense strand starting at position 1694 of SEQ ID NO: 1882322
cugaaacucuuuguagaaa

SEQ ID NO: 2111973 - RNA, 19 nt, Artificial Sequence
  Description of Artificial Sequence: Synthetic oligonucleotide
  Antisense strand to SEQ ID NO: 2111972
uuucuacaaagaguuucag

SEQ ID NO: 2111974 - RNA, 19 nt, Artificial Sequence
  Description of Artificial Sequence: Synthetic oligonucleotide
  Sense strand starting at position 1742 of SEQ ID NO: 1882322
gauuauugagauuguaacu

SEQ ID NO: 2111975 - RNA, 19 nt, Artificial Sequence
  Description of Artificial Sequence: Synthetic oligonucleotide
  Antisense strand to SEQ ID NO: 2111974
aguuacaaucucaauaauc

SEQ ID NO: 2111976 - RNA, 19 nt, Artificial Sequence
  Description of Artificial Sequence: Synthetic oligonucleotide
  Sense strand starting at position 1806 of SEQ ID NO: 1882322
gaaauauguguaugaauca

SEQ ID NO: 2111977 - RNA, 19 nt, Artificial Sequence
  Description of Artificial Sequence: Synthetic oligonucleotide
  Antisense strand to SEQ ID NO: 2111976
ugauucauacacauauuuc

SEQ ID NO: 2111978 - RNA, 19 nt, Artificial Sequence
  Description of Artificial Sequence: Synthetic oligonucleotide
  Sense strand starting at position 1811 of SEQ ID NO: 1882322
auguguaugaaucaagagu

SEQ ID NO: 2111979 - RNA, 19 nt, Artificial Sequence
  Description of Artificial Sequence: Synthetic oligonucleotide
  Antisense strand to SEQ ID NO: 2111978
acucuugauucauacacau

SEQ ID NO: 2111980 - RNA, 19 nt, Artificial Sequence
  Description of Artificial Sequence: Synthetic oligonucleotide
  Sense strand starting at position 1884 of SEQ ID NO: 1882322
cacugaggguguuccauaa

SEQ ID NO: 2111981 - RNA, 19 nt, Artificial Sequence
  Description of Artificial Sequence: Synthetic oligonucleotide
  Antisense strand to SEQ ID NO: 2111980
uuauggaacacccucagug

SEQ ID NO: 2111982 - RNA, 19 nt, Artificial Sequence
  Description of Artificial Sequence: Synthetic oligonucleotide
  Sense strand starting at position 1888 of SEQ ID NO: 1882322
gaggguguuccauaaagug

SEQ ID NO: 2111983 - RNA, 19 nt, Artificial Sequence
  Description of Artificial Sequence: Synthetic oligonucleotide
  Antisense strand to SEQ ID NO: 2111982
cacuuuauggaacacccuc

SEQ ID NO: 2111984 - RNA, 19 nt, Artificial Sequence
  Description of Artificial Sequence: Synthetic oligonucleotide
  Sense strand starting at position 1962 of SEQ ID NO: 1882322
ggugcagugauuugcaaau

SEQ ID NO: 2111985 - RNA, 19 nt, Artificial Sequence
  Description of Artificial Sequence: Synthetic oligonucleotide
  Antisense strand to SEQ ID NO: 2111984
auuugcaaaucacugcacc

SEQ ID NO: 2111986 - RNA, 19 nt, Artificial Sequence
  Description of Artificial Sequence: Synthetic oligonucleotide
  Sense strand starting at position 1973 of SEQ ID NO: 1882322
uugcaaauaugguccuaga

SEQ ID NO: 2111987 - RNA, 19 nt, Artificial Sequence
  Description of Artificial Sequence: Synthetic oligonucleotide
  Antisense strand to SEQ ID NO: 2111986
ucuaggaccauauuugcaa

SEQ ID NO: 2111988 - RNA, 19 nt, Artificial Sequence
  Description of Artificial Sequence: Synthetic oligonucleotide
  Sense strand starting at position 2034 of SEQ ID NO: 1882322
auugucaggccaggauaua

SEQ ID NO: 2111989 - RNA, 19 nt, Artificial Sequence
  Description of Artificial Sequence: Synthetic oligonucleotide
  Antisense strand to SEQ ID NO: 2111988
uauauccuggccugacaau

SEQ ID NO: 2111990 - RNA, 19 nt, Artificial Sequence
  Description of Artificial Sequence: Synthetic oligonucleotide
  Sense strand starting at position 2035 of SEQ ID NO: 1882322
uugucaggccaggauauau

SEQ ID NO: 2111991 - RNA, 19 nt, Artificial Sequence
  Description of Artificial Sequence: Synthetic oligonucleotide
  Antisense strand to SEQ ID NO: 2111990
auauauccuggccugacaa

SEQ ID NO: 2111992 - RNA, 19 nt, Artificial Sequence
  Description of Artificial Sequence: Synthetic oligonucleotide
  Sense strand starting at position 2113 of SEQ ID NO: 1882322
gugacuugaugguugagaa

SEQ ID NO: 2111993 - RNA, 19 nt, Artificial Sequence
  Description of Artificial Sequence: Synthetic oligonucleotide
  Antisense strand to SEQ ID NO: 2111992
uucucaaccaucaagucac

SEQ ID NO: 2111994 - RNA, 19 nt, Artificial Sequence
  Description of Artificial Sequence: Synthetic oligonucleotide
  Sense strand starting at position 2114 of SEQ ID NO: 1882322
ugacuugaugguugagaac

SEQ ID NO: 2111995 - RNA, 19 nt, Artificial Sequence
  Description of Artificial Sequence: Synthetic oligonucleotide
  Antisense strand to SEQ ID NO: 2111994
guucucaaccaucaaguca

SEQ ID NO: 2111996 - RNA, 19 nt, Artificial Sequence
  Description of Artificial Sequence: Synthetic oligonucleotide
  Sense strand starting at position 2713 of SEQ ID NO: 1882322
ucaggcuauaauggguaaa

SEQ ID NO: 2111997 - RNA, 19 nt, Artificial Sequence
  Description of Artificial Sequence: Synthetic oligonucleotide
  Antisense strand to SEQ ID NO: 2111996
uuuacccauuauagccuga

SEQ ID NO: 2111998 - RNA, 19 nt, Artificial Sequence
  Description of Artificial Sequence: Synthetic oligonucleotide
  Sense strand starting at position 2756 of SEQ ID NO: 1882322
aggagauguagccaucagu

SEQ ID NO: 2111999 - RNA, 19 nt, Artificial Sequence
  Description of Artificial Sequence: Synthetic oligonucleotide
  Antisense strand to SEQ ID NO: 2111998
acugauggcuacaucuccu

SEQ ID NO: 2112000 - RNA, 19 nt, Artificial Sequence
  Description of Artificial Sequence: Synthetic oligonucleotide
  Sense strand starting at position 2851 of SEQ ID NO: 1882322
ugagaagucuggcuuagga

SEQ ID NO: 2112001 - RNA, 19 nt, Artificial Sequence
  Description of Artificial Sequence: Synthetic oligonucleotide
  Antisense strand to SEQ ID NO: 2112000
uccuaagccagacuucuca

SEQ ID NO: 2112002 - RNA, 19 nt, Artificial Sequence
  Description of Artificial Sequence: Synthetic oligonucleotide
  Sense strand starting at position 2886 of SEQ ID NO: 1882322
gcccuaaagcaagagugaa

SEQ ID NO: 2112003 - RNA, 19 nt, Artificial Sequence
  Description of Artificial Sequence: Synthetic oligonucleotide
  Antisense strand to SEQ ID NO: 2112002
uucacucuugcuuuagggc

SEQ ID NO: 2112004 - RNA, 19 nt, Artificial Sequence
  Description of Artificial Sequence: Synthetic oligonucleotide
  Sense strand starting at position 2918 of SEQ ID NO: 1882322
cagguaauagcauagaggu

SEQ ID NO: 2112005 - RNA, 19 nt, Artificial Sequence
  Description of Artificial Sequence: Synthetic oligonucleotide
  Antisense strand to SEQ ID NO: 2112004
accucuaugcuauuaccug

SEQ ID NO: 2112006 - RNA, 19 nt, Artificial Sequence
  Description of Artificial Sequence: Synthetic oligonucleotide
  Sense strand starting at position 2928 of SEQ ID NO: 1882322
cauagaggugugugagaca

SEQ ID NO: 2112007 - RNA, 19 nt, Artificial Sequence
  Description of Artificial Sequence: Synthetic oligonucleotide
  Antisense strand to SEQ ID NO: 2112006
ugucucacacaccucuaug

SEQ ID NO: 2112008 - RNA, 19 nt, Artificial Sequence
  Description of Artificial Sequence: Synthetic oligonucleotide
  Sense strand starting at position 2990 of SEQ ID NO: 1882322
agaacucagcuguaaucca

SEQ ID NO: 2112009 - RNA, 19 nt, Artificial Sequence
  Description of Artificial Sequence: Synthetic oligonucleotide
  Antisense strand to SEQ ID NO: 2112008
uggauuacagcugaguucu

SEQ ID NO: 2112010 - RNA, 19 nt, Artificial Sequence
  Description of Artificial Sequence: Synthetic oligonucleotide
  Sense strand starting at position 3080 of SEQ ID NO: 1882322
agaggauauagcugcagaa

SEQ ID NO: 2112011 - RNA, 19 nt, Artificial Sequence
  Description of Artificial Sequence: Synthetic oligonucleotide
  Antisense strand to SEQ ID NO: 2112010
uucugcagcuauauccucu

SEQ ID NO: 2112012 - RNA, 19 nt, Artificial Sequence
  Description of Artificial Sequence: Synthetic oligonucleotide
  Sense strand starting at position 3350 of SEQ ID NO: 1882322
agaguaacucauuaaacgu

SEQ ID NO: 2112013 - RNA, 19 nt, Artificial Sequence
  Description of Artificial Sequence: Synthetic oligonucleotide
  Antisense strand to SEQ ID NO: 2112012
acguuuaaugaguuacucu

SEQ ID NO: 2112014 - RNA, 19 nt, Artificial Sequence
  Description of Artificial Sequence: Synthetic oligonucleotide
  Sense strand starting at position 3656 of SEQ ID NO: 1882322
cagucaaguguuuacaaga

SEQ ID NO: 2112015 - RNA, 19 nt, Artificial Sequence
  Description of Artificial Sequence: Synthetic oligonucleotide
  Antisense strand to SEQ ID NO: 2112014
ucuuguaaacacuugacug

SEQ ID NO: 2112016 - RNA, 19 nt, Artificial Sequence
  Description of Artificial Sequence: Synthetic oligonucleotide
  Sense strand starting at position 3726 of SEQ ID NO: 1882322
cgagcaaaucaauaaugua

SEQ ID NO: 2112017 - RNA, 19 nt, Artificial Sequence
  Description of Artificial Sequence: Synthetic oligonucleotide
  Antisense strand to SEQ ID NO: 2112016
uacauuauugauuugcucg

SEQ ID NO: 2112018 - RNA, 19 nt, Artificial Sequence
  Description of Artificial Sequence: Synthetic oligonucleotide
  Sense strand starting at position 3849 of SEQ ID NO: 1882322
caaagaguggcaugguuga

SEQ ID NO: 2112019 - RNA, 19 nt, Artificial Sequence
  Description of Artificial Sequence: Synthetic oligonucleotide
  Antisense strand to SEQ ID NO: 2112018
ucaaccaugccacucuuug

SEQ ID NO: 2112020 - RNA, 19 nt, Artificial Sequence
  Description of Artificial Sequence: Synthetic oligonucleotide
  Sense strand starting at position 3892 of SEQ ID NO: 1882322
guaaauggucucuaugagg

SEQ ID NO: 2112021 - RNA, 19 nt, Artificial Sequence
  Description of Artificial Sequence: Synthetic oligonucleotide
  Antisense strand to SEQ ID NO: 2112020
ccucauagagaccauuuac

SEQ ID NO: 2112022 - RNA, 19 nt, Artificial Sequence
  Description of Artificial Sequence: Synthetic oligonucleotide
  Sense strand starting at position 3915 of SEQ ID NO: 1882322
gccuauaauuuagaaagau

SEQ ID NO: 2112023 - RNA, 19 nt, Artificial Sequence
  Description of Artificial Sequence: Synthetic oligonucleotide
  Antisense strand to SEQ ID NO: 2112022
aucuuucuaaauuauaggc

SEQ ID NO: 2112024 - RNA, 19 nt, Artificial Sequence
  Description of Artificial Sequence: Synthetic oligonucleotide
  Sense strand starting at position 21 of SEQ ID NO: 1882323
ggcauccuggagugcuaaa

SEQ ID NO: 2112025 - RNA, 19 nt, Artificial Sequence
  Description of Artificial Sequence: Synthetic oligonucleotide
  Antisense strand to SEQ ID NO: 2112024
uuuagcacuccaggaugcc

SEQ ID NO: 2112026 - RNA, 19 nt, Artificial Sequence
  Description of Artificial Sequence: Synthetic oligonucleotide
  Sense strand starting at position 74 of SEQ ID NO: 1882323
uguaauggacagugagaca

SEQ ID NO: 2112027 - RNA, 19 nt, Artificial Sequence
  Description of Artificial Sequence: Synthetic oligonucleotide
  Antisense strand to SEQ ID NO: 2112026
ugucucacuguccauuaca

SEQ ID NO: 2112028 - RNA, 19 nt, Artificial Sequence
  Description of Artificial Sequence: Synthetic oligonucleotide
  Sense strand starting at position 89 of SEQ ID NO: 1882323
gacauucuggaaugcauga

SEQ ID NO: 2112029 - RNA, 19 nt, Artificial Sequence
  Description of Artificial Sequence: Synthetic oligonucleotide
  Antisense strand to SEQ ID NO: 2112028
ucaugcauuccagaauguc

SEQ ID NO: 2112030 - RNA, 19 nt, Artificial Sequence
  Description of Artificial Sequence: Synthetic oligonucleotide
  Sense strand starting at position 258 of SEQ ID NO: 1882323
ggcaaaggaguuugggaaa

SEQ ID NO: 2112031 - RNA, 19 nt, Artificial Sequence
  Description of Artificial Sequence: Synthetic oligonucleotide
  Antisense strand to SEQ ID NO: 2112030
uuucccaaacuccuuugcc

SEQ ID NO: 2112032 - RNA, 19 nt, Artificial Sequence
  Description of Artificial Sequence: Synthetic oligonucleotide
  Sense strand starting at position 261 of SEQ ID NO: 1882323
aaaggaguuugggaaauau

SEQ ID NO: 2112033 - RNA, 19 nt, Artificial Sequence
  Description of Artificial Sequence: Synthetic oligonucleotide
  Antisense strand to SEQ ID NO: 2112032
auauuucccaaacuccuuu

SEQ ID NO: 2112034 - RNA, 19 nt, Artificial Sequence
  Description of Artificial Sequence: Synthetic oligonucleotide
  Sense strand starting at position 349 of SEQ ID NO: 1882323
auggauuaauaggaacaca

SEQ ID NO: 2112035 - RNA, 19 nt, Artificial Sequence
  Description of Artificial Sequence: Synthetic oligonucleotide
  Antisense strand to SEQ ID NO: 2112034
uguguuccuauuaauccau

SEQ ID NO: 2112036 - RNA, 19 nt, Artificial Sequence
  Description of Artificial Sequence: Synthetic oligonucleotide
  Sense strand starting at position 396 of SEQ ID NO: 1882323
ggacauuaaugaucagucu

SEQ ID NO: 2112037 - RNA, 19 nt, Artificial Sequence
  Description of Artificial Sequence: Synthetic oligonucleotide
  Antisense strand to SEQ ID NO: 2112036
agacugaucauuaaugucc

SEQ ID NO: 2112038 - RNA, 19 nt, Artificial Sequence
  Description of Artificial Sequence: Synthetic oligonucleotide
  Sense strand starting at position 415 of SEQ ID NO: 1882323
ugcucauuauuauuugagu

SEQ ID NO: 2112039 - RNA, 19 nt, Artificial Sequence
  Description of Artificial Sequence: Synthetic oligonucleotide
  Antisense strand to SEQ ID NO: 2112038
acucaaauaauaaugagca

SEQ ID NO: 2112040 - RNA, 19 nt, Artificial Sequence
  Description of Artificial Sequence: Synthetic oligonucleotide
  Sense strand starting at position 418 of SEQ ID NO: 1882323
ucauuauuauuugagucag

SEQ ID NO: 2112041 - RNA, 19 nt, Artificial Sequence
  Description of Artificial Sequence: Synthetic oligonucleotide
  Antisense strand to SEQ ID NO: 2112040
cugacucaaauaauaauga

SEQ ID NO: 2112042 - RNA, 19 nt, Artificial Sequence
  Description of Artificial Sequence: Synthetic oligonucleotide
  Sense strand starting at position 438 of SEQ ID NO: 1882323
ggcucaucuugacuguaaa

SEQ ID NO: 2112043 - RNA, 19 nt, Artificial Sequence
  Description of Artificial Sequence: Synthetic oligonucleotide
  Antisense strand to SEQ ID NO: 2112042
uuuacagucaagaugagcc

SEQ ID NO: 2112044 - RNA, 19 nt, Artificial Sequence
  Description of Artificial Sequence: Synthetic oligonucleotide
  Sense strand starting at position 439 of SEQ ID NO: 1882323
gcucaucuugacuguaaau

SEQ ID NO: 2112045 - RNA, 19 nt, Artificial Sequence
  Description of Artificial Sequence: Synthetic oligonucleotide
  Antisense strand to SEQ ID NO: 2112044
auuuacagucaagaugagc

SEQ ID NO: 2112046 - RNA, 19 nt, Artificial Sequence
  Description of Artificial Sequence: Synthetic oligonucleotide
  Sense strand starting at position 561 of SEQ ID NO: 1882323
gguccaaugcaaugagacu

SEQ ID NO: 2112047 - RNA, 19 nt, Artificial Sequence
  Description of Artificial Sequence: Synthetic oligonucleotide
  Antisense strand to SEQ ID NO: 2112046
agucucauugcauuggacc

SEQ ID NO: 2112048 - RNA, 19 nt, Artificial Sequence
  Description of Artificial Sequence: Synthetic oligonucleotide
  Sense strand starting at position 686 of SEQ ID NO: 1882323
ccaagucaguaauugauaa

SEQ ID NO: 2112049 - RNA, 19 nt, Artificial Sequence
  Description of Artificial Sequence: Synthetic oligonucleotide
  Antisense strand to SEQ ID NO: 2112048
uuaucaauuacugacuugg

SEQ ID NO: 2112050 - RNA, 19 nt, Artificial Sequence
  Description of Artificial Sequence: Synthetic oligonucleotide
  Sense strand starting at position 938 of SEQ ID NO: 1882323
guaacugaacaugguucua

SEQ ID NO: 2112051 - RNA, 19 nt, Artificial Sequence
  Description of Artificial Sequence: Synthetic oligonucleotide
  Antisense strand to SEQ ID NO: 2112050
uagaaccauguucaguuac

SEQ ID NO: 2112052 - RNA, 19 nt, Artificial Sequence
  Description of Artificial Sequence: Synthetic oligonucleotide
  Sense strand starting at position 1234 of SEQ ID NO: 1882323
cggcucuaccaagaugauu

SEQ ID NO: 2112053 - RNA, 19 nt, Artificial Sequence
  Description of Artificial Sequence: Synthetic oligonucleotide
  Antisense strand to SEQ ID NO: 2112052
aaucaucuugguagagccg

SEQ ID NO: 2112054 - RNA, 19 nt, Artificial Sequence
  Description of Artificial Sequence: Synthetic oligonucleotide
  Sense strand starting at position 1245 of SEQ ID NO: 1882323
agaugauuaugaggcauuu

SEQ ID NO: 2112055 - RNA, 19 nt, Artificial Sequence
  Description of Artificial Sequence: Synthetic oligonucleotide
  Antisense strand to SEQ ID NO: 2112054
aaaugccucauaaucaucu

SEQ ID NO: 2112056 - RNA, 19 nt, Artificial Sequence
  Description of Artificial Sequence: Synthetic oligonucleotide
  Sense strand starting at position 2038 of SEQ ID NO: 1882323
cagucacuugggugaaacu

SEQ ID NO: 2112057 - RNA, 19 nt, Artificial Sequence
  Description of Artificial Sequence: Synthetic oligonucleotide
  Antisense strand to SEQ ID NO: 2112056
aguuucacccaagugacug

SEQ ID NO: 2112058 - RNA, 19 nt, Artificial Sequence
  Description of Artificial Sequence: Synthetic oligonucleotide
  Sense strand starting at position 2411 of SEQ ID NO: 1882323
ugcgaaauuugugaaccaa

SEQ ID NO: 2112059 - RNA, 19 nt, Artificial Sequence
  Description of Artificial Sequence: Synthetic oligonucleotide
  Antisense strand to SEQ ID NO: 2112058
uugguucacaaauuucgca

SEQ ID NO: 2112060 - RNA, 19 nt, Artificial Sequence
  Description of Artificial Sequence: Synthetic oligonucleotide
  Sense strand starting at position 2518 of SEQ ID NO: 1882323
cauugucuucuccaaggga

SEQ ID NO: 2112061 - RNA, 19 nt, Artificial Sequence
  Description of Artificial Sequence: Synthetic oligonucleotide
  Antisense strand to SEQ ID NO: 2112060
ucccuuggagaagacaaug

SEQ ID NO: 2112062 - RNA, 19 nt, Artificial Sequence
  Description of Artificial Sequence: Synthetic oligonucleotide
  Sense strand starting at position 2521 of SEQ ID NO: 1882323
ugucuucuccaagggauaa

SEQ ID NO: 2112063 - RNA, 19 nt, Artificial Sequence
  Description of Artificial Sequence: Synthetic oligonucleotide
  Antisense strand to SEQ ID NO: 2112062
uuaucccuuggagaagaca

SEQ ID NO: 2112064 - RNA, 19 nt, Artificial Sequence
  Description of Artificial Sequence: Synthetic oligonucleotide
  Sense strand starting at position 2631 of SEQ ID NO: 1882323
aguuuaagguccuuaguug

SEQ ID NO: 2112065 - RNA, 19 nt, Artificial Sequence
  Description of Artificial Sequence: Synthetic oligonucleotide
  Antisense strand to SEQ ID NO: 2112064
caacuaaggaccuuaaacu

SEQ ID NO: 2112066 - RNA, 19 nt, Artificial Sequence
  Description of Artificial Sequence: Synthetic oligonucleotide
  Sense strand starting at position 2632 of SEQ ID NO: 1882323
guuuaagguccuuaguuga

SEQ ID NO: 2112067 - RNA, 19 nt, Artificial Sequence
  Description of Artificial Sequence: Synthetic oligonucleotide
  Antisense strand to SEQ ID NO: 2112066
ucaacuaaggaccuuaaac

SEQ ID NO: 2112068 - RNA, 19 nt, Artificial Sequence
  Description of Artificial Sequence: Synthetic oligonucleotide
  Sense strand starting at position 2635 of SEQ ID NO: 1882323
uaagguccuuaguugaaca

SEQ ID NO: 2112069 - RNA, 19 nt, Artificial Sequence
  Description of Artificial Sequence: Synthetic oligonucleotide
  Antisense strand to SEQ ID NO: 2112068
uguucaacuaaggaccuua

SEQ ID NO: 2112070 - RNA, 19 nt, Artificial Sequence
  Description of Artificial Sequence: Synthetic oligonucleotide
  Sense strand starting at position 2675 of SEQ ID NO: 1882323
agauucuguuaucuucuua

SEQ ID NO: 2112071 - RNA, 19 nt, Artificial Sequence
  Description of Artificial Sequence: Synthetic oligonucleotide
  Antisense strand to SEQ ID NO: 2112070
uaagaagauaacagaaucu

SEQ ID NO: 2112072 - RNA, 19 nt, Artificial Sequence
  Description of Artificial Sequence: Synthetic oligonucleotide
  Sense strand starting at position 2812 of SEQ ID NO: 1882323
gguaguuuagaccaucuuu

SEQ ID NO: 2112073 - RNA, 19 nt, Artificial Sequence
  Description of Artificial Sequence: Synthetic oligonucleotide
  Antisense strand to SEQ ID NO: 2112072
aaagauggucuaaacuacc

SEQ ID NO: 2112074 - RNA, 19 nt, Artificial Sequence
  Description of Artificial Sequence: Synthetic oligonucleotide
  Sense strand starting at position 3004 of SEQ ID NO: 1882323
acaggcaccuugcuugaaa

SEQ ID NO: 2112075 - RNA, 19 nt, Artificial Sequence
  Description of Artificial Sequence: Synthetic oligonucleotide
  Antisense strand to SEQ ID NO: 2112074
uuucaagcaaggugccugu

SEQ ID NO: 2112076 - RNA, 19 nt, Artificial Sequence
  Description of Artificial Sequence: Synthetic oligonucleotide
  Sense strand starting at position 3007 of SEQ ID NO: 1882323
ggcaccuugcuugaaagga

SEQ ID NO: 2112077 - RNA, 19 nt, Artificial Sequence
  Description of Artificial Sequence: Synthetic oligonucleotide
  Antisense strand to SEQ ID NO: 2112076
uccuuucaagcaaggugcc

SEQ ID NO: 2112078 - RNA, 19 nt, Artificial Sequence
  Description of Artificial Sequence: Synthetic oligonucleotide
  Sense strand starting at position 3037 of SEQ ID NO: 1882323
aaaugauuccaggguuccu

SEQ ID NO: 2112079 - RNA, 19 nt, Artificial Sequence
  Description of Artificial Sequence: Synthetic oligonucleotide
  Antisense strand to SEQ ID NO: 2112078
aggaacccuggaaucauuu

SEQ ID NO: 2112080 - RNA, 19 nt, Artificial Sequence
  Description of Artificial Sequence: Synthetic oligonucleotide
  Sense strand starting at position 3085 of SEQ ID NO: 1882323
gcacauuaagcauaguuga

SEQ ID NO: 2112081 - RNA, 19 nt, Artificial Sequence
  Description of Artificial Sequence: Synthetic oligonucleotide
  Antisense strand to SEQ ID NO: 2112080
ucaacuaugcuuaaugugc

SEQ ID NO: 2112082 - RNA, 19 nt, Artificial Sequence
  Description of Artificial Sequence: Synthetic oligonucleotide
  Sense strand starting at position 3090 of SEQ ID NO: 1882323
uuaagcauaguugacaaau

SEQ ID NO: 2112083 - RNA, 19 nt, Artificial Sequence
  Description of Artificial Sequence: Synthetic oligonucleotide
  Antisense strand to SEQ ID NO: 2112082
auuugucaacuaugcuuaa

SEQ ID NO: 2112084 - RNA, 19 nt, Artificial Sequence
  Description of Artificial Sequence: Synthetic oligonucleotide
  Sense strand starting at position 3161 of SEQ ID NO: 1882323
agacacgcuacguauauau

SEQ ID NO: 2112085 - RNA, 19 nt, Artificial Sequence
  Description of Artificial Sequence: Synthetic oligonucleotide
  Antisense strand to SEQ ID NO: 2112084
auauauacguagcgugucu

SEQ ID NO: 2112086 - RNA, 19 nt, Artificial Sequence
  Description of Artificial Sequence: Synthetic oligonucleotide
  Sense strand starting at position 3172 of SEQ ID NO: 1882323
guauauauguggucuauuu

SEQ ID NO: 2112087 - RNA, 19 nt, Artificial Sequence
  Description of Artificial Sequence: Synthetic oligonucleotide
  Antisense strand to SEQ ID NO: 2112086
aaauagaccacauauauac

SEQ ID NO: 2112088 - RNA, 19 nt, Artificial Sequence
  Description of Artificial Sequence: Synthetic oligonucleotide
  Sense strand starting at position 3290 of SEQ ID NO: 1882323
cuaguuuggucauccauac

SEQ ID NO: 2112089 - RNA, 19 nt, Artificial Sequence
  Description of Artificial Sequence: Synthetic oligonucleotide
  Antisense strand to SEQ ID NO: 2112088
guauggaugaccaaacuag

SEQ ID NO: 2112090 - RNA, 19 nt, Artificial Sequence
  Description of Artificial Sequence: Synthetic oligonucleotide
  Sense strand starting at position 3316 of SEQ ID NO: 1882323
caccuauauguugggucau

SEQ ID NO: 2112091 - RNA, 19 nt, Artificial Sequence
  Description of Artificial Sequence: Synthetic oligonucleotide
  Antisense strand to SEQ ID NO: 2112090
augacccaacauauaggug

SEQ ID NO: 2112092 - RNA, 19 nt, Artificial Sequence
  Description of Artificial Sequence: Synthetic oligonucleotide
  Sense strand starting at position 3318 of SEQ ID NO: 1882323
ccuauauguugggucaucu

SEQ ID NO: 2112093 - RNA, 19 nt, Artificial Sequence
  Description of Artificial Sequence: Synthetic oligonucleotide
  Antisense strand to SEQ ID NO: 2112092
agaugacccaacauauagg

SEQ ID NO: 2112094 - RNA, 19 nt, Artificial Sequence
  Description of Artificial Sequence: Synthetic oligonucleotide
  Sense strand starting at position 3491 of SEQ ID NO: 1882323
ggcugucccacugaguauu

SEQ ID NO: 2112095 - RNA, 19 nt, Artificial Sequence
  Description of Artificial Sequence: Synthetic oligonucleotide
  Antisense strand to SEQ ID NO: 2112094
aauacucagugggacagcc

SEQ ID NO: 2112096 - RNA, 19 nt, Artificial Sequence
  Description of Artificial Sequence: Synthetic oligonucleotide
  Sense strand starting at position 3564 of SEQ ID NO: 1882323
acaagcauugguugagcuu

SEQ ID NO: 2112097 - RNA, 19 nt, Artificial Sequence
  Description of Artificial Sequence: Synthetic oligonucleotide
  Antisense strand to SEQ ID NO: 2112096
aagcucaaccaaugcuugu

SEQ ID NO: 2112098 - RNA, 19 nt, Artificial Sequence
  Description of Artificial Sequence: Synthetic oligonucleotide
  Sense strand starting at position 3722 of SEQ ID NO: 1882323
gagguuguucuagaggcau

SEQ ID NO: 2112099 - RNA, 19 nt, Artificial Sequence
  Description of Artificial Sequence: Synthetic oligonucleotide
  Antisense strand to SEQ ID NO: 2112098
augccucuagaacaaccuc

SEQ ID NO: 2112100 - RNA, 19 nt, Artificial Sequence
  Description of Artificial Sequence: Synthetic oligonucleotide
  Sense strand starting at position 3743 of SEQ ID NO: 1882323
guagguaucguacaaugaa

SEQ ID NO: 2112101 - RNA, 19 nt, Artificial Sequence
  Description of Artificial Sequence: Synthetic oligonucleotide
  Antisense strand to SEQ ID NO: 2112100
uucauuguacgauaccuac

SEQ ID NO: 2112102 - RNA, 19 nt, Artificial Sequence
  Description of Artificial Sequence: Synthetic oligonucleotide
  Sense strand starting at position 3746 of SEQ ID NO: 1882323
gguaucguacaaugaauaa

SEQ ID NO: 2112103 - RNA, 19 nt, Artificial Sequence
  Description of Artificial Sequence: Synthetic oligonucleotide
  Antisense strand to SEQ ID NO: 2112102
uuauucauuguacgauacc

SEQ ID NO: 2112104 - RNA, 19 nt, Artificial Sequence
  Description of Artificial Sequence: Synthetic oligonucleotide
  Sense strand starting at position 52 of SEQ ID NO: 1882324
acagauagaugguagauaa

SEQ ID NO: 2112105 - RNA, 19 nt, Artificial Sequence
  Description of Artificial Sequence: Synthetic oligonucleotide
  Antisense strand to SEQ ID NO: 2112104
uuaucuaccaucuaucugu

SEQ ID NO: 2112106 - RNA, 19 nt, Artificial Sequence
  Description of Artificial Sequence: Synthetic oligonucleotide
  Sense strand starting at position 108 of SEQ ID NO: 1882324
guggauagguagguaguua

SEQ ID NO: 2112107 - RNA, 19 nt, Artificial Sequence
  Description of Artificial Sequence: Synthetic oligonucleotide
  Antisense strand to SEQ ID NO: 2112106
uaacuaccuaccuauccac

SEQ ID NO: 2112108 - RNA, 19 nt, Artificial Sequence
  Description of Artificial Sequence: Synthetic oligonucleotide
  Sense strand starting at position 119 of SEQ ID NO: 1882324
gguaguuaguagguagaua

SEQ ID NO: 2112109 - RNA, 19 nt, Artificial Sequence
  Description of Artificial Sequence: Synthetic oligonucleotide
  Antisense strand to SEQ ID NO: 2112108
uaucuaccuacuaacuacc

SEQ ID NO: 2112110 - RNA, 19 nt, Artificial Sequence
  Description of Artificial Sequence: Synthetic oligonucleotide
  Sense strand starting at position 204 of SEQ ID NO: 1882324
uagagaugacccuggcuuu

SEQ ID NO: 2112111 - RNA, 19 nt, Artificial Sequence
  Description of Artificial Sequence: Synthetic oligonucleotide
  Antisense strand to SEQ ID NO: 2112110
aaagccagggucaucucua

SEQ ID NO: 2112112 - RNA, 19 nt, Artificial Sequence
  Description of Artificial Sequence: Synthetic oligonucleotide
  Sense strand starting at position 205 of SEQ ID NO: 1882324
agagaugacccuggcuuua

SEQ ID NO: 2112113 - RNA, 19 nt, Artificial Sequence
  Description of Artificial Sequence: Synthetic oligonucleotide
  Antisense strand to SEQ ID NO: 2112112
uaaagccagggucaucucu

SEQ ID NO: 2112114 - RNA, 19 nt, Artificial Sequence
  Description of Artificial Sequence: Synthetic oligonucleotide
  Sense strand starting at position 210 of SEQ ID NO: 1882324
ugacccuggcuuuaucauu

SEQ ID NO: 2112115 - RNA, 19 nt, Artificial Sequence
  Description of Artificial Sequence: Synthetic oligonucleotide
  Antisense strand to SEQ ID NO: 2112114
aaugauaaagccaggguca

SEQ ID NO: 2112116 - RNA, 19 nt, Artificial Sequence
  Description of Artificial Sequence: Synthetic oligonucleotide
  Sense strand starting at position 231 of SEQ ID NO: 1882324
uuaauaucauuucgacaag

SEQ ID NO: 2112117 - RNA, 19 nt, Artificial Sequence
  Description of Artificial Sequence: Synthetic oligonucleotide
  Antisense strand to SEQ ID NO: 2112116
cuugucgaaaugauauuaa

SEQ ID NO: 2112118 - RNA, 19 nt, Artificial Sequence
  Description of Artificial Sequence: Synthetic oligonucleotide
  Sense strand starting at position 288 of SEQ ID NO: 1882324
ggcugagguaugcaaaugu

SEQ ID NO: 2112119 - RNA, 19 nt, Artificial Sequence
  Description of Artificial Sequence: Synthetic oligonucleotide
  Antisense strand to SEQ ID NO: 2112118
acauuugcauaccucagcc

SEQ ID NO: 2112120 - RNA, 19 nt, Artificial Sequence
  Description of Artificial Sequence: Synthetic oligonucleotide
  Sense strand starting at position 412 of SEQ ID NO: 1882324
uguguuaaauaggugguua

SEQ ID NO: 2112121 - RNA, 19 nt, Artificial Sequence
  Description of Artificial Sequence: Synthetic oligonucleotide
  Antisense strand to SEQ ID NO: 2112120
uaaccaccuauuuaacaca

SEQ ID NO: 2112122 - RNA, 19 nt, Artificial Sequence
  Description of Artificial Sequence: Synthetic oligonucleotide
  Sense strand starting at position 413 of SEQ ID NO: 1882324
guguuaaauaggugguuau

SEQ ID NO: 2112123 - RNA, 19 nt, Artificial Sequence
  Description of Artificial Sequence: Synthetic oligonucleotide
  Antisense strand to SEQ ID NO: 2112122
auaaccaccuauuuaacac

SEQ ID NO: 2112124 - RNA, 19 nt, Artificial Sequence
  Description of Artificial Sequence: Synthetic oligonucleotide
  Sense strand starting at position 414 of SEQ ID NO: 1882324
uguuaaauaggugguuauu

SEQ ID NO: 2112125 - RNA, 19 nt, Artificial Sequence
  Description of Artificial Sequence: Synthetic oligonucleotide
  Antisense strand to SEQ ID NO: 2112124
aauaaccaccuauuuaaca

SEQ ID NO: 2112126 - RNA, 19 nt, Artificial Sequence
  Description of Artificial Sequence: Synthetic oligonucleotide
  Sense strand starting at position 533 of SEQ ID NO: 1882324
ggaaacugcucucugugaa

SEQ ID NO: 2112127 - RNA, 19 nt, Artificial Sequence
  Description of Artificial Sequence: Synthetic oligonucleotide
  Antisense strand to SEQ ID NO: 2112126
uucacagagagcaguuucc

SEQ ID NO: 2112128 - RNA, 19 nt, Artificial Sequence
  Description of Artificial Sequence: Synthetic oligonucleotide
  Sense strand starting at position 534 of SEQ ID NO: 1882324
gaaacugcucucugugaau

SEQ ID NO: 2112129 - RNA, 19 nt, Artificial Sequence
  Description of Artificial Sequence: Synthetic oligonucleotide
  Antisense strand to SEQ ID NO: 2112128
auucacagagagcaguuuc

SEQ ID NO: 2112130 - RNA, 19 nt, Artificial Sequence
  Description of Artificial Sequence: Synthetic oligonucleotide
  Sense strand starting at position 536 of SEQ ID NO: 1882324
aacugcucucugugaauug

SEQ ID NO: 2112131 - RNA, 19 nt, Artificial Sequence
  Description of Artificial Sequence: Synthetic oligonucleotide
  Antisense strand to SEQ ID NO: 2112130
caauucacagagagcaguu

SEQ ID NO: 2112132 - RNA, 19 nt, Artificial Sequence
  Description of Artificial Sequence: Synthetic oligonucleotide
  Sense strand starting at position 545 of SEQ ID NO: 1882324
cugugaauugacggcuaau

SEQ ID NO: 2112133 - RNA, 19 nt, Artificial Sequence
  Description of Artificial Sequence: Synthetic oligonucleotide
  Antisense strand to SEQ ID NO: 2112132
auuagccgucaauucacag

SEQ ID NO: 2112134 - RNA, 19 nt, Artificial Sequence
  Description of Artificial Sequence: Synthetic oligonucleotide
  Sense strand starting at position 556 of SEQ ID NO: 1882324
cggcuaaugagacaagcau

SEQ ID NO: 2112135 - RNA, 19 nt, Artificial Sequence
  Description of Artificial Sequence: Synthetic oligonucleotide
  Antisense strand to SEQ ID NO: 2112134
augcuugucucauuagccg

SEQ ID NO: 2112136 - RNA, 19 nt, Artificial Sequence
  Description of Artificial Sequence: Synthetic oligonucleotide
  Sense strand starting at position 999 of SEQ ID NO: 1882324
agaaguugcaagugaugga

SEQ ID NO: 2112137 - RNA, 19 nt, Artificial Sequence
  Description of Artificial Sequence: Synthetic oligonucleotide
  Antisense strand to SEQ ID NO: 2112136
uccaucacuugcaacuucu

SEQ ID NO: 2112138 - RNA, 19 nt, Artificial Sequence
  Description of Artificial Sequence: Synthetic oligonucleotide
  Sense strand starting at position 1003 of SEQ ID NO: 1882324
guugcaagugauggagaua

SEQ ID NO: 2112139 - RNA, 19 nt, Artificial Sequence
  Description of Artificial Sequence: Synthetic oligonucleotide
  Antisense strand to SEQ ID NO: 2112138
uaucuccaucacuugcaac

SEQ ID NO: 2112140 - RNA, 19 nt, Artificial Sequence
  Description of Artificial Sequence: Synthetic oligonucleotide
  Sense strand starting at position 1103 of SEQ ID NO: 1882324
cggagugagcccugagaca

SEQ ID NO: 2112141 - RNA, 19 nt, Artificial Sequence
  Description of Artificial Sequence: Synthetic oligonucleotide
  Antisense strand to SEQ ID NO: 2112140
ugucucagggcucacuccg

SEQ ID NO: 2112142 - RNA, 19 nt, Artificial Sequence
  Description of Artificial Sequence: Synthetic oligonucleotide
  Sense strand starting at position 1237 of SEQ ID NO: 1882324
guggucuucccagagcaaa

SEQ ID NO: 2112143 - RNA, 19 nt, Artificial Sequence
  Description of Artificial Sequence: Synthetic oligonucleotide
  Antisense strand to SEQ ID NO: 2112142
uuugcucugggaagaccac

SEQ ID NO: 2112144 - RNA, 19 nt, Artificial Sequence
  Description of Artificial Sequence: Synthetic oligonucleotide
  Sense strand starting at position 1348 of SEQ ID NO: 1882324
cgaauagaacguuguggaa

SEQ ID NO: 2112145 - RNA, 19 nt, Artificial Sequence
  Description of Artificial Sequence: Synthetic oligonucleotide
  Antisense strand to SEQ ID NO: 2112144
uuccacaacguucuauucg

SEQ ID NO: 2112146 - RNA, 19 nt, Artificial Sequence
  Description of Artificial Sequence: Synthetic oligonucleotide
  Sense strand starting at position 2096 of SEQ ID NO: 1882324
ucuguuugaucauuaguuu

SEQ ID NO: 2112147 - RNA, 19 nt, Artificial Sequence
  Description of Artificial Sequence: Synthetic oligonucleotide
  Antisense strand to SEQ ID NO: 2112146
aaacuaaugaucaaacaga

SEQ ID NO: 2112148 - RNA, 19 nt, Artificial Sequence
  Description of Artificial Sequence: Synthetic oligonucleotide
  Sense strand starting at position 2097 of SEQ ID NO: 1882324
cuguuugaucauuaguuuc

SEQ ID NO: 2112149 - RNA, 19 nt, Artificial Sequence
  Description of Artificial Sequence: Synthetic oligonucleotide
  Antisense strand to SEQ ID NO: 2112148
gaaacuaaugaucaaacag

SEQ ID NO: 2112150 - RNA, 19 nt, Artificial Sequence
  Description of Artificial Sequence: Synthetic oligonucleotide
  Sense strand starting at position 2437 of SEQ ID NO: 1882324
ugcauuccgcucuagaaca

SEQ ID NO: 2112151 - RNA, 19 nt, Artificial Sequence
  Description of Artificial Sequence: Synthetic oligonucleotide
  Antisense strand to SEQ ID NO: 2112150
uguucuagagcggaaugca

SEQ ID NO: 2112152 - RNA, 19 nt, Artificial Sequence
  Description of Artificial Sequence: Synthetic oligonucleotide
  Sense strand starting at position 2638 of SEQ ID NO: 1882324
ggagcuaucagugaggugu

SEQ ID NO: 2112153 - RNA, 19 nt, Artificial Sequence
  Description of Artificial Sequence: Synthetic oligonucleotide
  Antisense strand to SEQ ID NO: 2112152
acaccucacugauagcucc

SEQ ID NO: 2112154 - RNA, 19 nt, Artificial Sequence
  Description of Artificial Sequence: Synthetic oligonucleotide
  Sense strand starting at position 2642 of SEQ ID NO: 1882324
cuaucagugagguguggau

SEQ ID NO: 2112155 - RNA, 19 nt, Artificial Sequence
  Description of Artificial Sequence: Synthetic oligonucleotide
  Antisense strand to SEQ ID NO: 2112154
auccacaccucacugauag

SEQ ID NO: 2112156 - RNA, 19 nt, Artificial Sequence
  Description of Artificial Sequence: Synthetic oligonucleotide
  Sense strand starting at position 2977 of SEQ ID NO: 1882324
gcaagacuacugugaacca

SEQ ID NO: 2112157 - RNA, 19 nt, Artificial Sequence
  Description of Artificial Sequence: Synthetic oligonucleotide
  Antisense strand to SEQ ID NO: 2112156
ugguucacaguagucuugc

SEQ ID NO: 2112158 - RNA, 19 nt, Artificial Sequence
  Description of Artificial Sequence: Synthetic oligonucleotide
  Sense strand starting at position 3198 of SEQ ID NO: 1882324
caauguccugaggguauga

SEQ ID NO: 2112159 - RNA, 19 nt, Artificial Sequence
  Description of Artificial Sequence: Synthetic oligonucleotide
  Antisense strand to SEQ ID NO: 2112158
ucauacccucaggacauug

SEQ ID NO: 2112160 - RNA, 19 nt, Artificial Sequence
  Description of Artificial Sequence: Synthetic oligonucleotide
  Sense strand starting at position 3200 of SEQ ID NO: 1882324
auguccugaggguaugaau

SEQ ID NO: 2112161 - RNA, 19 nt, Artificial Sequence
  Description of Artificial Sequence: Synthetic oligonucleotide
  Antisense strand to SEQ ID NO: 2112160
auucauacccucaggacau

SEQ ID NO: 2112162 - RNA, 19 nt, Artificial Sequence
  Description of Artificial Sequence: Synthetic oligonucleotide
  Sense strand starting at position 3264 of SEQ ID NO: 1882324
cauguuuccuggguauuaa

SEQ ID NO: 2112163 - RNA, 19 nt, Artificial Sequence
  Description of Artificial Sequence: Synthetic oligonucleotide
  Antisense strand to SEQ ID NO: 2112162
uuaauacccaggaaacaug

SEQ ID NO: 2112164 - RNA, 19 nt, Artificial Sequence
  Description of Artificial Sequence: Synthetic oligonucleotide
  Sense strand starting at position 3265 of SEQ ID NO: 1882324
auguuuccuggguauuaag

SEQ ID NO: 2112165 - RNA, 19 nt, Artificial Sequence
  Description of Artificial Sequence: Synthetic oligonucleotide
  Antisense strand to SEQ ID NO: 2112164
cuuaauacccaggaaacau

SEQ ID NO: 2112166 - RNA, 19 nt, Artificial Sequence
  Description of Artificial Sequence: Synthetic oligonucleotide
  Sense strand starting at position 3385 of SEQ ID NO: 1882324
ucacauaugugacucucau

SEQ ID NO: 2112167 - RNA, 19 nt, Artificial Sequence
  Description of Artificial Sequence: Synthetic oligonucleotide
  Antisense strand to SEQ ID NO: 2112166
augagagucacauauguga

SEQ ID NO: 2112168 - RNA, 19 nt, Artificial Sequence
  Description of Artificial Sequence: Synthetic oligonucleotide
  Sense strand starting at position 3391 of SEQ ID NO: 1882324
augugacucucauuguauu

SEQ ID NO: 2112169 - RNA, 19 nt, Artificial Sequence
  Description of Artificial Sequence: Synthetic oligonucleotide
  Antisense strand to SEQ ID NO: 2112168
aauacaaugagagucacau

SEQ ID NO: 2112170 - RNA, 19 nt, Artificial Sequence
  Description of Artificial Sequence: Synthetic oligonucleotide
  Sense strand starting at position 3392 of SEQ ID NO: 1882324
ugugacucucauuguauuu

SEQ ID NO: 2112171 - RNA, 19 nt, Artificial Sequence
  Description of Artificial Sequence: Synthetic oligonucleotide
  Antisense strand to SEQ ID NO: 2112170
aaauacaaugagagucaca

SEQ ID NO: 2112172 - RNA, 19 nt, Artificial Sequence
  Description of Artificial Sequence: Synthetic oligonucleotide
  Sense strand starting at position 3616 of SEQ ID NO: 1882324
gaggucuucuaagccuuau

SEQ ID NO: 2112173 - RNA, 19 nt, Artificial Sequence
  Description of Artificial Sequence: Synthetic oligonucleotide
  Antisense strand to SEQ ID NO: 2112172
auaaggcuuagaagaccuc

SEQ ID NO: 2112174 - RNA, 19 nt, Artificial Sequence
  Description of Artificial Sequence: Synthetic oligonucleotide
  Sense strand starting at position 3629 of SEQ ID NO: 1882324
ccuuauagcucugugauau

SEQ ID NO: 2112175 - RNA, 19 nt, Artificial Sequence
  Description of Artificial Sequence: Synthetic oligonucleotide
  Antisense strand to SEQ ID NO: 2112174
auaucacagagcuauaagg

SEQ ID NO: 2112176 - RNA, 19 nt, Artificial Sequence
  Description of Artificial Sequence: Synthetic oligonucleotide
  Sense strand starting at position 3630 of SEQ ID NO: 1882324
cuuauagcucugugauauu

SEQ ID NO: 2112177 - RNA, 19 nt, Artificial Sequence
  Description of Artificial Sequence: Synthetic oligonucleotide
  Antisense strand to SEQ ID NO: 2112176
aauaucacagagcuauaag

SEQ ID NO: 2112178 - RNA, 19 nt, Artificial Sequence
  Description of Artificial Sequence: Synthetic oligonucleotide
  Sense strand starting at position 3728 of SEQ ID NO: 1882324
agccgcugugaagagauaa

SEQ ID NO: 2112179 - RNA, 19 nt, Artificial Sequence
  Description of Artificial Sequence: Synthetic oligonucleotide
  Antisense strand to SEQ ID NO: 2112178
uuaucucuucacagcggcu

SEQ ID NO: 2112180 - RNA, 19 nt, Artificial Sequence
  Description of Artificial Sequence: Synthetic oligonucleotide
  Sense strand starting at position 3877 of SEQ ID NO: 1882324
gcgugacccauuuguaaca

SEQ ID NO: 2112181 - RNA, 19 nt, Artificial Sequence
  Description of Artificial Sequence: Synthetic oligonucleotide
  Antisense strand to SEQ ID NO: 2112180
uguuacaaaugggucacgc

SEQ ID NO: 2112182 - RNA, 19 nt, Artificial Sequence
  Description of Artificial Sequence: Synthetic oligonucleotide
  Sense strand starting at position 3882 of SEQ ID NO: 1882324
acccauuuguaacauggaa

SEQ ID NO: 2112183 - RNA, 19 nt, Artificial Sequence
  Description of Artificial Sequence: Synthetic oligonucleotide
  Antisense strand to SEQ ID NO: 2112182
uuccauguuacaaaugggu

SEQ ID NO: 2112184 - RNA, 19 nt, Artificial Sequence
  Description of Artificial Sequence: Synthetic oligonucleotide
  Sense strand starting at position 48 of SEQ ID NO: 1882325
ucccauucucuugagucau

SEQ ID NO: 2112185 - RNA, 19 nt, Artificial Sequence
  Description of Artificial Sequence: Synthetic oligonucleotide
  Antisense strand to SEQ ID NO: 2112184
augacucaagagaauggga

SEQ ID NO: 2112186 - RNA, 19 nt, Artificial Sequence
  Description of Artificial Sequence: Synthetic oligonucleotide
  Sense strand starting at position 54 of SEQ ID NO: 1882325
ucucuugagucauuugcga

SEQ ID NO: 2112187 - RNA, 19 nt, Artificial Sequence
  Description of Artificial Sequence: Synthetic oligonucleotide
  Antisense strand to SEQ ID NO: 2112186
ucgcaaaugacucaagaga

SEQ ID NO: 2112188 - RNA, 19 nt, Artificial Sequence
  Description of Artificial Sequence: Synthetic oligonucleotide
  Sense strand starting at position 56 of SEQ ID NO: 1882325
ucuugagucauuugcgaau

SEQ ID NO: 2112189 - RNA, 19 nt, Artificial Sequence
  Description of Artificial Sequence: Synthetic oligonucleotide
  Antisense strand to SEQ ID NO: 2112188
auucgcaaaugacucaaga

SEQ ID NO: 2112190 - RNA, 19 nt, Artificial Sequence
  Description of Artificial Sequence: Synthetic oligonucleotide
  Sense strand starting at position 123 of SEQ ID NO: 1882325
gauguagggcccuggaaua

SEQ ID NO: 2112191 - RNA, 19 nt, Artificial Sequence
  Description of Artificial Sequence: Synthetic oligonucleotide
  Antisense strand to SEQ ID NO: 2112190
uauuccagggcccuacauc

SEQ ID NO: 2112192 - RNA, 19 nt, Artificial Sequence
  Description of Artificial Sequence: Synthetic oligonucleotide
  Sense strand starting at position 241 of SEQ ID NO: 1882325
auugcaucaucuucuagga

SEQ ID NO: 2112193 - RNA, 19 nt, Artificial Sequence
  Description of Artificial Sequence: Synthetic oligonucleotide
  Antisense strand to SEQ ID NO: 2112192
uccuagaagaugaugcaau

SEQ ID NO: 2112194 - RNA, 19 nt, Artificial Sequence
  Description of Artificial Sequence: Synthetic oligonucleotide
  Sense strand starting at position 384 of SEQ ID NO: 1882325
gaccaaacacucuggaagu

SEQ ID NO: 2112195 - RNA, 19 nt, Artificial Sequence
  Description of Artificial Sequence: Synthetic oligonucleotide
  Antisense strand to SEQ ID NO: 2112194
acuuccagaguguuugguc

SEQ ID NO: 2112196 - RNA, 19 nt, Artificial Sequence
  Description of Artificial Sequence: Synthetic oligonucleotide
  Sense strand starting at position 444 of SEQ ID NO: 1882325
guaguauggguaggacaau

SEQ ID NO: 2112197 - RNA, 19 nt, Artificial Sequence
  Description of Artificial Sequence: Synthetic oligonucleotide
  Antisense strand to SEQ ID NO: 2112196
auuguccuacccauacuac

SEQ ID NO: 2112198 - RNA, 19 nt, Artificial Sequence
  Description of Artificial Sequence: Synthetic oligonucleotide
  Sense strand starting at position 618 of SEQ ID NO: 1882325
cacucuggaucuguuuaga

SEQ ID NO: 2112199 - RNA, 19 nt, Artificial Sequence
  Description of Artificial Sequence: Synthetic oligonucleotide
  Antisense strand to SEQ ID NO: 2112198
ucuaaacagauccagagug

SEQ ID NO: 2112200 - RNA, 19 nt, Artificial Sequence
  Description of Artificial Sequence: Synthetic oligonucleotide
  Sense strand starting at position 621 of SEQ ID NO: 1882325
ucuggaucuguuuagauuc

SEQ ID NO: 2112201 - RNA, 19 nt, Artificial Sequence
  Description of Artificial Sequence: Synthetic oligonucleotide
  Antisense strand to SEQ ID NO: 2112200
gaaucuaaacagauccaga

SEQ ID NO: 2112202 - RNA, 19 nt, Artificial Sequence
  Description of Artificial Sequence: Synthetic oligonucleotide
  Sense strand starting at position 692 of SEQ ID NO: 1882325
uguucuagacucugacauc

SEQ ID NO: 2112203 - RNA, 19 nt, Artificial Sequence
  Description of Artificial Sequence: Synthetic oligonucleotide
  Antisense strand to SEQ ID NO: 2112202
gaugucagagucuagaaca

SEQ ID NO: 2112204 - RNA, 19 nt, Artificial Sequence
  Description of Artificial Sequence: Synthetic oligonucleotide
  Sense strand starting at position 702 of SEQ ID NO: 1882325
ucugacaucuggucaaaua

SEQ ID NO: 2112205 - RNA, 19 nt, Artificial Sequence
  Description of Artificial Sequence: Synthetic oligonucleotide
  Antisense strand to SEQ ID NO: 2112204
uauuugaccagaugucaga

SEQ ID NO: 2112206 - RNA, 19 nt, Artificial Sequence
  Description of Artificial Sequence: Synthetic oligonucleotide
  Sense strand starting at position 888 of SEQ ID NO: 1882325
ggugaaaccucaccauuau

SEQ ID NO: 2112207 - RNA, 19 nt, Artificial Sequence
  Description of Artificial Sequence: Synthetic oligonucleotide
  Antisense strand to SEQ ID NO: 2112206
auaauggugagguuucacc

SEQ ID NO: 2112208 - RNA, 19 nt, Artificial Sequence
  Description of Artificial Sequence: Synthetic oligonucleotide
  Sense strand starting at position 1121 of SEQ ID NO: 1882325
auugccauguaucucagaa

SEQ ID NO: 2112209 - RNA, 19 nt, Artificial Sequence
  Description of Artificial Sequence: Synthetic oligonucleotide
  Antisense strand to SEQ ID NO: 2112208
uucugagauacauggcaau

SEQ ID NO: 2112210 - RNA, 19 nt, Artificial Sequence
  Description of Artificial Sequence: Synthetic oligonucleotide
  Sense strand starting at position 1351 of SEQ ID NO: 1882325
aucauuauguacuugauga

SEQ ID NO: 2112211 - RNA, 19 nt, Artificial Sequence
  Description of Artificial Sequence: Synthetic oligonucleotide
  Antisense strand to SEQ ID NO: 2112210
ucaucaaguacauaaugau

SEQ ID NO: 2112212 - RNA, 19 nt, Artificial Sequence
  Description of Artificial Sequence: Synthetic oligonucleotide
  Sense strand starting at position 1415 of SEQ ID NO: 1882325
aaaguuaugcagcauagau

SEQ ID NO: 2112213 - RNA, 19 nt, Artificial Sequence
  Description of Artificial Sequence: Synthetic oligonucleotide
  Antisense strand to SEQ ID NO: 2112212
aucuaugcugcauaacuuu

SEQ ID NO: 2112214 - RNA, 19 nt, Artificial Sequence
  Description of Artificial Sequence: Synthetic oligonucleotide
  Sense strand starting at position 1445 of SEQ ID NO: 1882325
uuuccuaaugaaugugaau

SEQ ID NO: 2112215 - RNA, 19 nt, Artificial Sequence
  Description of Artificial Sequence: Synthetic oligonucleotide
  Antisense strand to SEQ ID NO: 2112214
auucacauucauuaggaaa

SEQ ID NO: 2112216 - RNA, 19 nt, Artificial Sequence
  Description of Artificial Sequence: Synthetic oligonucleotide
  Sense strand starting at position 1558 of SEQ ID NO: 1882325
uugagcagucguguagcua

SEQ ID NO: 2112217 - RNA, 19 nt, Artificial Sequence
  Description of Artificial Sequence: Synthetic oligonucleotide
  Antisense strand to SEQ ID NO: 2112216
uagcuacacgacugcucaa

SEQ ID NO: 2112218 - RNA, 19 nt, Artificial Sequence
  Description of Artificial Sequence: Synthetic oligonucleotide
  Sense strand starting at position 1561 of SEQ ID NO: 1882325
agcagucguguagcuaaca

SEQ ID NO: 2112219 - RNA, 19 nt, Artificial Sequence
  Description of Artificial Sequence: Synthetic oligonucleotide
  Antisense strand to SEQ ID NO: 2112218
uguuagcuacacgacugcu

SEQ ID NO: 2112220 - RNA, 19 nt, Artificial Sequence
  Description of Artificial Sequence: Synthetic oligonucleotide
  Sense strand starting at position 1673 of SEQ ID NO: 1882325
gagagcucccaguauaccu

SEQ ID NO: 2112221 - RNA, 19 nt, Artificial Sequence
  Description of Artificial Sequence: Synthetic oligonucleotide
  Antisense strand to SEQ ID NO: 2112220
agguauacugggagcucuc

SEQ ID NO: 2112222 - RNA, 19 nt, Artificial Sequence
  Description of Artificial Sequence: Synthetic oligonucleotide
  Sense strand starting at position 1683 of SEQ ID NO: 1882325
aguauaccugaauauguuu

SEQ ID NO: 2112223 - RNA, 19 nt, Artificial Sequence
  Description of Artificial Sequence: Synthetic oligonucleotide
  Antisense strand to SEQ ID NO: 2112222
aaacauauucagguauacu

SEQ ID NO: 2112224 - RNA, 19 nt, Artificial Sequence
  Description of Artificial Sequence: Synthetic oligonucleotide
  Sense strand starting at position 1705 of SEQ ID NO: 1882325
gcaaauagauucccgaaca

SEQ ID NO: 2112225 - RNA, 19 nt, Artificial Sequence
  Description of Artificial Sequence: Synthetic oligonucleotide
  Antisense strand to SEQ ID NO: 2112224
uguucgggaaucuauuugc

SEQ ID NO: 2112226 - RNA, 19 nt, Artificial Sequence
  Description of Artificial Sequence: Synthetic oligonucleotide
  Sense strand starting at position 1815 of SEQ ID NO: 1882325
aaaugauccuggucuagau

SEQ ID NO: 2112227 - RNA, 19 nt, Artificial Sequence
  Description of Artificial Sequence: Synthetic oligonucleotide
  Antisense strand to SEQ ID NO: 2112226
aucuagaccaggaucauuu

SEQ ID NO: 2112228 - RNA, 19 nt, Artificial Sequence
  Description of Artificial Sequence: Synthetic oligonucleotide
  Sense strand starting at position 1884 of SEQ ID NO: 1882325
uuggcagacccauaaucua

SEQ ID NO: 2112229 - RNA, 19 nt, Artificial Sequence
  Description of Artificial Sequence: Synthetic oligonucleotide
  Antisense strand to SEQ ID NO: 2112228
uagauuaugggucugccaa

SEQ ID NO: 2112230 - RNA, 19 nt, Artificial Sequence
  Description of Artificial Sequence: Synthetic oligonucleotide
  Sense strand starting at position 1951 of SEQ ID NO: 1882325
gagugagacagagguuacu

SEQ ID NO: 2112231 - RNA, 19 nt, Artificial Sequence
  Description of Artificial Sequence: Synthetic oligonucleotide
  Antisense strand to SEQ ID NO: 2112230
aguaaccucugucucacuc

SEQ ID NO: 2112232 - RNA, 19 nt, Artificial Sequence
  Description of Artificial Sequence: Synthetic oligonucleotide
  Sense strand starting at position 2104 of SEQ ID NO: 1882325
ggcugauaucuuuggauag

SEQ ID NO: 2112233 - RNA, 19 nt, Artificial Sequence
  Description of Artificial Sequence: Synthetic oligonucleotide
  Antisense strand to SEQ ID NO: 2112232
cuauccaaagauaucagcc

SEQ ID NO: 2112234 - RNA, 19 nt, Artificial Sequence
  Description of Artificial Sequence: Synthetic oligonucleotide
  Sense strand starting at position 2172 of SEQ ID NO: 1882325
cauggagaacuguguaaau

SEQ ID NO: 2112235 - RNA, 19 nt, Artificial Sequence
  Description of Artificial Sequence: Synthetic oligonucleotide
  Antisense strand to SEQ ID NO: 2112234
auuuacacaguucuccaug

SEQ ID NO: 2112236 - RNA, 19 nt, Artificial Sequence
  Description of Artificial Sequence: Synthetic oligonucleotide
  Sense strand starting at position 2174 of SEQ ID NO: 1882325
uggagaacuguguaaaugu

SEQ ID NO: 2112237 - RNA, 19 nt, Artificial Sequence
  Description of Artificial Sequence: Synthetic oligonucleotide
  Antisense strand to SEQ ID NO: 2112236
acauuuacacaguucucca

SEQ ID NO: 2112238 - RNA, 19 nt, Artificial Sequence
  Description of Artificial Sequence: Synthetic oligonucleotide
  Sense strand starting at position 2264 of SEQ ID NO: 1882325
ucuguuacagcggaguaaa

SEQ ID NO: 2112239 - RNA, 19 nt, Artificial Sequence
  Description of Artificial Sequence: Synthetic oligonucleotide
  Antisense strand to SEQ ID NO: 2112238
uuuacuccgcuguaacaga

SEQ ID NO: 2112240 - RNA, 19 nt, Artificial Sequence
  Description of Artificial Sequence: Synthetic oligonucleotide
  Sense strand starting at position 2844 of SEQ ID NO: 1882325
ucaaguaacuggguccaaa

SEQ ID NO: 2112241 - RNA, 19 nt, Artificial Sequence
  Description of Artificial Sequence: Synthetic oligonucleotide
  Antisense strand to SEQ ID NO: 2112240
uuuggacccaguuacuuga

SEQ ID NO: 2112242 - RNA, 19 nt, Artificial Sequence
  Description of Artificial Sequence: Synthetic oligonucleotide
  Sense strand starting at position 2867 of SEQ ID NO: 1882325
cauggaauuugagacaggu

SEQ ID NO: 2112243 - RNA, 19 nt, Artificial Sequence
  Description of Artificial Sequence: Synthetic oligonucleotide
  Antisense strand to SEQ ID NO: 2112242
accugucucaaauuccaug

SEQ ID NO: 2112244 - RNA, 19 nt, Artificial Sequence
  Description of Artificial Sequence: Synthetic oligonucleotide
  Sense strand starting at position 2910 of SEQ ID NO: 1882325
aaggacucaugcucaggaa

SEQ ID NO: 2112245 - RNA, 19 nt, Artificial Sequence
  Description of Artificial Sequence: Synthetic oligonucleotide
  Antisense strand to SEQ ID NO: 2112244
uuccugagcaugaguccuu

SEQ ID NO: 2112246 - RNA, 19 nt, Artificial Sequence
  Description of Artificial Sequence: Synthetic oligonucleotide
  Sense strand starting at position 2925 of SEQ ID NO: 1882325
ggaagaacuucucugcccu

SEQ ID NO: 2112247 - RNA, 19 nt, Artificial Sequence
  Description of Artificial Sequence: Synthetic oligonucleotide
  Antisense strand to SEQ ID NO: 2112246
agggcagagaaguucuucc

SEQ ID NO: 2112248 - RNA, 19 nt, Artificial Sequence
  Description of Artificial Sequence: Synthetic oligonucleotide
  Sense strand starting at position 3005 of SEQ ID NO: 1882325
agggaaaccucugagaaga

SEQ ID NO: 2112249 - RNA, 19 nt, Artificial Sequence
  Description of Artificial Sequence: Synthetic oligonucleotide
  Antisense strand to SEQ ID NO: 2112248
ucuucucagagguuucccu

SEQ ID NO: 2112250 - RNA, 19 nt, Artificial Sequence
  Description of Artificial Sequence: Synthetic oligonucleotide
  Sense strand starting at position 3110 of SEQ ID NO: 1882325
gcagauaaaccuuaauugu

SEQ ID NO: 2112251 - RNA, 19 nt, Artificial Sequence
  Description of Artificial Sequence: Synthetic oligonucleotide
  Antisense strand to SEQ ID NO: 2112250
acaauuaagguuuaucugc

SEQ ID NO: 2112252 - RNA, 19 nt, Artificial Sequence
  Description of Artificial Sequence: Synthetic oligonucleotide
  Sense strand starting at position 3333 of SEQ ID NO: 1882325
cuuacacucuuuguuggaa

SEQ ID NO: 2112253 - RNA, 19 nt, Artificial Sequence
  Description of Artificial Sequence: Synthetic oligonucleotide
  Antisense strand to SEQ ID NO: 2112252
uuccaacaaagaguguaag

SEQ ID NO: 2112254 - RNA, 19 nt, Artificial Sequence
  Description of Artificial Sequence: Synthetic oligonucleotide
  Sense strand starting at position 3334 of SEQ ID NO: 1882325
uuacacucuuuguuggaaa

SEQ ID NO: 2112255 - RNA, 19 nt, Artificial Sequence
  Description of Artificial Sequence: Synthetic oligonucleotide
  Antisense strand to SEQ ID NO: 2112254
uuuccaacaaagaguguaa

SEQ ID NO: 2112256 - RNA, 19 nt, Artificial Sequence
  Description of Artificial Sequence: Synthetic oligonucleotide
  Sense strand starting at position 3491 of SEQ ID NO: 1882325
ugaugauauggcuggaaau

SEQ ID NO: 2112257 - RNA, 19 nt, Artificial Sequence
  Description of Artificial Sequence: Synthetic oligonucleotide
  Antisense strand to SEQ ID NO: 2112256
auuuccagccauaucauca

SEQ ID NO: 2112258 - RNA, 19 nt, Artificial Sequence
  Description of Artificial Sequence: Synthetic oligonucleotide
  Sense strand starting at position 3492 of SEQ ID NO: 1882325
gaugauauggcuggaaauu

SEQ ID NO: 2112259 - RNA, 19 nt, Artificial Sequence
  Description of Artificial Sequence: Synthetic oligonucleotide
  Antisense strand to SEQ ID NO: 2112258
aauuuccagccauaucauc

SEQ ID NO: 2112260 - RNA, 19 nt, Artificial Sequence
  Description of Artificial Sequence: Synthetic oligonucleotide
  Sense strand starting at position 3558 of SEQ ID NO: 1882325
ugagaagagcaauguauau

SEQ ID NO: 2112261 - RNA, 19 nt, Artificial Sequence
  Description of Artificial Sequence: Synthetic oligonucleotide
  Antisense strand to SEQ ID NO: 2112260
auauacauugcucuucuca

SEQ ID NO: 2112262 - RNA, 19 nt, Artificial Sequence
  Description of Artificial Sequence: Synthetic oligonucleotide
  Sense strand starting at position 3593 of SEQ ID NO: 1882325
aucuuauuugguuguaguu

SEQ ID NO: 2112263 - RNA, 19 nt, Artificial Sequence
  Description of Artificial Sequence: Synthetic oligonucleotide
  Antisense strand to SEQ ID NO: 2112262
aacuacaaccaaauaagau

SEQ ID NO: 2112264 - RNA, 19 nt, Artificial Sequence
  Description of Artificial Sequence: Synthetic oligonucleotide
  Sense strand starting at position 111 of SEQ ID NO: 1882326
uuuggauucuucucucuga

SEQ ID NO: 2112265 - RNA, 19 nt, Artificial Sequence
  Description of Artificial Sequence: Synthetic oligonucleotide
  Antisense strand to SEQ ID NO: 2112264
ucagagagaagaauccaaa

SEQ ID NO: 2112266 - RNA, 19 nt, Artificial Sequence
  Description of Artificial Sequence: Synthetic oligonucleotide
  Sense strand starting at position 112 of SEQ ID NO: 1882326
uuggauucuucucucugaa

SEQ ID NO: 2112267 - RNA, 19 nt, Artificial Sequence
  Description of Artificial Sequence: Synthetic oligonucleotide
  Antisense strand to SEQ ID NO: 2112266
uucagagagaagaauccaa

SEQ ID NO: 2112268 - RNA, 19 nt, Artificial Sequence
  Description of Artificial Sequence: Synthetic oligonucleotide
  Sense strand starting at position 114 of SEQ ID NO: 1882326
ggauucuucucucugaaga

SEQ ID NO: 2112269 - RNA, 19 nt, Artificial Sequence
  Description of Artificial Sequence: Synthetic oligonucleotide
  Antisense strand to SEQ ID NO: 2112268
ucuucagagagaagaaucc

SEQ ID NO: 2112270 - RNA, 19 nt, Artificial Sequence
  Description of Artificial Sequence: Synthetic oligonucleotide
  Sense strand starting at position 296 of SEQ ID NO: 1882326
ggucaucauuuguugagca

SEQ ID NO: 2112271 - RNA, 19 nt, Artificial Sequence
  Description of Artificial Sequence: Synthetic oligonucleotide
  Antisense strand to SEQ ID NO: 2112270
ugcucaacaaaugaugacc

SEQ ID NO: 2112272 - RNA, 19 nt, Artificial Sequence
  Description of Artificial Sequence: Synthetic oligonucleotide
  Sense strand starting at position 459 of SEQ ID NO: 1882326
gcauuaauugcugagggau

SEQ ID NO: 2112273 - RNA, 19 nt, Artificial Sequence
  Description of Artificial Sequence: Synthetic oligonucleotide
  Antisense strand to SEQ ID NO: 2112272
aucccucagcaauuaaugc

SEQ ID NO: 2112274 - RNA, 19 nt, Artificial Sequence
  Description of Artificial Sequence: Synthetic oligonucleotide
  Sense strand starting at position 588 of SEQ ID NO: 1882326
acagaauguccaggcacau

SEQ ID NO: 2112275 - RNA, 19 nt, Artificial Sequence
  Description of Artificial Sequence: Synthetic oligonucleotide
  Antisense strand to SEQ ID NO: 2112274
augugccuggacauucugu

SEQ ID NO: 2112276 - RNA, 19 nt, Artificial Sequence
  Description of Artificial Sequence: Synthetic oligonucleotide
  Sense strand starting at position 753 of SEQ ID NO: 1882326
aggaaucauuaagagaaau

SEQ ID NO: 2112277 - RNA, 19 nt, Artificial Sequence
  Description of Artificial Sequence: Synthetic oligonucleotide
  Antisense strand to SEQ ID NO: 2112276
auuucucuuaaugauuccu

SEQ ID NO: 2112278 - RNA, 19 nt, Artificial Sequence
  Description of Artificial Sequence: Synthetic oligonucleotide
  Sense strand starting at position 806 of SEQ ID NO: 1882326
uuguucuugggccaagauu

SEQ ID NO: 2112279 - RNA, 19 nt, Artificial Sequence
  Description of Artificial Sequence: Synthetic oligonucleotide
  Antisense strand to SEQ ID NO: 2112278
aaucuuggcccaagaacaa

SEQ ID NO: 2112280 - RNA, 19 nt, Artificial Sequence
  Description of Artificial Sequence: Synthetic oligonucleotide
  Sense strand starting at position 905 of SEQ ID NO: 1882326
uugccaucacuugaggaua

SEQ ID NO: 2112281 - RNA, 19 nt, Artificial Sequence
  Description of Artificial Sequence: Synthetic oligonucleotide
  Antisense strand to SEQ ID NO: 2112280
uauccucaagugauggcaa

SEQ ID NO: 2112282 - RNA, 19 nt, Artificial Sequence
  Description of Artificial Sequence: Synthetic oligonucleotide
  Sense strand starting at position 913 of SEQ ID NO: 1882326
acuugaggauaauuauguu

SEQ ID NO: 2112283 - RNA, 19 nt, Artificial Sequence
  Description of Artificial Sequence: Synthetic oligonucleotide
  Antisense strand to SEQ ID NO: 2112282
aacauaauuauccucaagu

SEQ ID NO: 2112284 - RNA, 19 nt, Artificial Sequence
  Description of Artificial Sequence: Synthetic oligonucleotide
  Sense strand starting at position 1238 of SEQ ID NO: 1882326
cccggaacuguuugaauua

SEQ ID NO: 2112285 - RNA, 19 nt, Artificial Sequence
  Description of Artificial Sequence: Synthetic oligonucleotide
  Antisense strand to SEQ ID NO: 2112284
uaauucaaacaguuccggg

SEQ ID NO: 2112286 - RNA, 19 nt, Artificial Sequence
  Description of Artificial Sequence: Synthetic oligonucleotide
  Sense strand starting at position 1353 of SEQ ID NO: 1882326
uguucuagccauuggaaau

SEQ ID NO: 2112287 - RNA, 19 nt, Artificial Sequence
  Description of Artificial Sequence: Synthetic oligonucleotide
  Antisense strand to SEQ ID NO: 2112286
auuuccaauggcuagaaca

SEQ ID NO: 2112288 - RNA, 19 nt, Artificial Sequence
  Description of Artificial Sequence: Synthetic oligonucleotide
  Sense strand starting at position 1465 of SEQ ID NO: 1882326
gugguuuguaccgugcuau

SEQ ID NO: 2112289 - RNA, 19 nt, Artificial Sequence
  Description of Artificial Sequence: Synthetic oligonucleotide
  Antisense strand to SEQ ID NO: 2112288
auagcacgguacaaaccac

SEQ ID NO: 2112290 - RNA, 19 nt, Artificial Sequence
  Description of Artificial Sequence: Synthetic oligonucleotide
  Sense strand starting at position 1468 of SEQ ID NO: 1882326
guuuguaccgugcuauacu

SEQ ID NO: 2112291 - RNA, 19 nt, Artificial Sequence
  Description of Artificial Sequence: Synthetic oligonucleotide
  Antisense strand to SEQ ID NO: 2112290
aguauagcacgguacaaac

SEQ ID NO: 2112292 - RNA, 19 nt, Artificial Sequence
  Description of Artificial Sequence: Synthetic oligonucleotide
  Sense strand starting at position 1652 of SEQ ID NO: 1882326
gggagauguugucuaagua

SEQ ID NO: 2112293 - RNA, 19 nt, Artificial Sequence
  Description of Artificial Sequence: Synthetic oligonucleotide
  Antisense strand to SEQ ID NO: 2112292
uacuuagacaacaucuccc

SEQ ID NO: 2112294 - RNA, 19 nt, Artificial Sequence
  Description of Artificial Sequence: Synthetic oligonucleotide
  Sense strand starting at position 1653 of SEQ ID NO: 1882326
ggagauguugucuaaguag

SEQ ID NO: 2112295 - RNA, 19 nt, Artificial Sequence
  Description of Artificial Sequence: Synthetic oligonucleotide
  Antisense strand to SEQ ID NO: 2112294
cuacuuagacaacaucucc

SEQ ID NO: 2112296 - RNA, 19 nt, Artificial Sequence
  Description of Artificial Sequence: Synthetic oligonucleotide
  Sense strand starting at position 1694 of SEQ ID NO: 1882326
auggguuguaacgaacuca

SEQ ID NO: 2112297 - RNA, 19 nt, Artificial Sequence
  Description of Artificial Sequence: Synthetic oligonucleotide
  Antisense strand to SEQ ID NO: 2112296
ugaguucguuacaacccau

SEQ ID NO: 2112298 - RNA, 19 nt, Artificial Sequence
  Description of Artificial Sequence: Synthetic oligonucleotide
  Sense strand starting at position 1877 of SEQ ID NO: 1882326
cugguaaguccugucgcau

SEQ ID NO: 2112299 - RNA, 19 nt, Artificial Sequence
  Description of Artificial Sequence: Synthetic oligonucleotide
  Antisense strand to SEQ ID NO: 2112298
augcgacaggacuuaccag

SEQ ID NO: 2112300 - RNA, 19 nt, Artificial Sequence
  Description of Artificial Sequence: Synthetic oligonucleotide
  Sense strand starting at position 2020 of SEQ ID NO: 1882326
gaaggaggucuuggcgaga

SEQ ID NO: 2112301 - RNA, 19 nt, Artificial Sequence
  Description of Artificial Sequence: Synthetic oligonucleotide
  Antisense strand to SEQ ID NO: 2112300
ucucgccaagaccuccuuc

SEQ ID NO: 2112302 - RNA, 19 nt, Artificial Sequence
  Description of Artificial Sequence: Synthetic oligonucleotide
  Sense strand starting at position 2023 of SEQ ID NO: 1882326
ggaggucuuggcgagagaa

SEQ ID NO: 2112303 - RNA, 19 nt, Artificial Sequence
  Description of Artificial Sequence: Synthetic oligonucleotide
  Antisense strand to SEQ ID NO: 2112302
uucucucgccaagaccucc

SEQ ID NO: 2112304 - RNA, 19 nt, Artificial Sequence
  Description of Artificial Sequence: Synthetic oligonucleotide
  Sense strand starting at position 2025 of SEQ ID NO: 1882326
aggucuuggcgagagaaac

SEQ ID NO: 2112305 - RNA, 19 nt, Artificial Sequence
  Description of Artificial Sequence: Synthetic oligonucleotide
  Antisense strand to SEQ ID NO: 2112304
guuucucucgccaagaccu

SEQ ID NO: 2112306 - RNA, 19 nt, Artificial Sequence
  Description of Artificial Sequence: Synthetic oligonucleotide
  Sense strand starting at position 2049 of SEQ ID NO: 1882326
ccgggugacccagauccua

SEQ ID NO: 2112307 - RNA, 19 nt, Artificial Sequence
  Description of Artificial Sequence: Synthetic oligonucleotide
  Antisense strand to SEQ ID NO: 2112306
uaggaucugggucacccgg

SEQ ID NO: 2112308 - RNA, 19 nt, Artificial Sequence
  Description of Artificial Sequence: Synthetic oligonucleotide
  Sense strand starting at position 2134 of SEQ ID NO: 1882326
gacccagagcguuaacagu

SEQ ID NO: 2112309 - RNA, 19 nt, Artificial Sequence
  Description of Artificial Sequence: Synthetic oligonucleotide
  Antisense strand to SEQ ID NO: 2112308
acuguuaacgcucuggguc

SEQ ID NO: 2112310 - RNA, 19 nt, Artificial Sequence
  Description of Artificial Sequence: Synthetic oligonucleotide
  Sense strand starting at position 2176 of SEQ ID NO: 1882326
cacuguagugcuuaagaag

SEQ ID NO: 2112311 - RNA, 19 nt, Artificial Sequence
  Description of Artificial Sequence: Synthetic oligonucleotide
  Antisense strand to SEQ ID NO: 2112310
cuucuuaagcacuacagug

SEQ ID NO: 2112312 - RNA, 19 nt, Artificial Sequence
  Description of Artificial Sequence: Synthetic oligonucleotide
  Sense strand starting at position 2313 of SEQ ID NO: 1882326
gauucuaaagguuguggga

SEQ ID NO: 2112313 - RNA, 19 nt, Artificial Sequence
  Description of Artificial Sequence: Synthetic oligonucleotide
  Antisense strand to SEQ ID NO: 2112312
ucccacaaccuuuagaauc

SEQ ID NO: 2112314 - RNA, 19 nt, Artificial Sequence
  Description of Artificial Sequence: Synthetic oligonucleotide
  Sense strand starting at position 2434 of SEQ ID NO: 1882326
cugucauugcaccaguaau

SEQ ID NO: 2112315 - RNA, 19 nt, Artificial Sequence
  Description of Artificial Sequence: Synthetic oligonucleotide
  Antisense strand to SEQ ID NO: 2112314
auuacuggugcaaugacag

SEQ ID NO: 2112316 - RNA, 19 nt, Artificial Sequence
  Description of Artificial Sequence: Synthetic oligonucleotide
  Sense strand starting at position 2487 of SEQ ID NO: 1882326
agcuccauaagggauguua

SEQ ID NO: 2112317 - RNA, 19 nt, Artificial Sequence
  Description of Artificial Sequence: Synthetic oligonucleotide
  Antisense strand to SEQ ID NO: 2112316
uaacaucccuuauggagcu

SEQ ID NO: 2112318 - RNA, 19 nt, Artificial Sequence
  Description of Artificial Sequence: Synthetic oligonucleotide
  Sense strand starting at position 2489 of SEQ ID NO: 1882326
cuccauaagggauguuagu

SEQ ID NO: 2112319 - RNA, 19 nt, Artificial Sequence
  Description of Artificial Sequence: Synthetic oligonucleotide
  Antisense strand to SEQ ID NO: 2112318
acuaacaucccuuauggag

SEQ ID NO: 2112320 - RNA, 19 nt, Artificial Sequence
  Description of Artificial Sequence: Synthetic oligonucleotide
  Sense strand starting at position 2507 of SEQ ID NO: 1882326
ucucgagcccaguaauuau

SEQ ID NO: 2112321 - RNA, 19 nt, Artificial Sequence
  Description of Artificial Sequence: Synthetic oligonucleotide
  Antisense strand to SEQ ID NO: 2112320
auaauuacugggcucgaga

SEQ ID NO: 2112322 - RNA, 19 nt, Artificial Sequence
  Description of Artificial Sequence: Synthetic oligonucleotide
  Sense strand starting at position 2514 of SEQ ID NO: 1882326
cccaguaauuauuuccgca

SEQ ID NO: 2112323 - RNA, 19 nt, Artificial Sequence
  Description of Artificial Sequence: Synthetic oligonucleotide
  Antisense strand to SEQ ID NO: 2112322
ugcggaaauaauuacuggg

SEQ ID NO: 2112324 - RNA, 19 nt, Artificial Sequence
  Description of Artificial Sequence: Synthetic oligonucleotide
  Sense strand starting at position 2518 of SEQ ID NO: 1882326
guaauuauuuccgcagcac

SEQ ID NO: 2112325 - RNA, 19 nt, Artificial Sequence
  Description of Artificial Sequence: Synthetic oligonucleotide
  Antisense strand to SEQ ID NO: 2112324
gugcugcggaaauaauuac

SEQ ID NO: 2112326 - RNA, 19 nt, Artificial Sequence
  Description of Artificial Sequence: Synthetic oligonucleotide
  Sense strand starting at position 2563 of SEQ ID NO: 1882326
ggaguugcgcgucuuucuu

SEQ ID NO: 2112327 - RNA, 19 nt, Artificial Sequence
  Description of Artificial Sequence: Synthetic oligonucleotide
  Antisense strand to SEQ ID NO: 2112326
aagaaagacgcgcaacucc

SEQ ID NO: 2112328 - RNA, 19 nt, Artificial Sequence
  Description of Artificial Sequence: Synthetic oligonucleotide
  Sense strand starting at position 2752 of SEQ ID NO: 1882326
ggaaguguugaggaucagu

SEQ ID NO: 2112329 - RNA, 19 nt, Artificial Sequence
  Description of Artificial Sequence: Synthetic oligonucleotide
  Antisense strand to SEQ ID NO: 2112328
acugauccucaacacuucc

SEQ ID NO: 2112330 - RNA, 19 nt, Artificial Sequence
  Description of Artificial Sequence: Synthetic oligonucleotide
  Sense strand starting at position 2763 of SEQ ID NO: 1882326
ggaucagucagagguguug

SEQ ID NO: 2112331 - RNA, 19 nt, Artificial Sequence
  Description of Artificial Sequence: Synthetic oligonucleotide
  Antisense strand to SEQ ID NO: 2112330
caacaccucugacugaucc

SEQ ID NO: 2112332 - RNA, 19 nt, Artificial Sequence
  Description of Artificial Sequence: Synthetic oligonucleotide
  Sense strand starting at position 2988 of SEQ ID NO: 1882326
ucaaauccaugauuagagu

SEQ ID NO: 2112333 - RNA, 19 nt, Artificial Sequence
  Description of Artificial Sequence: Synthetic oligonucleotide
  Antisense strand to SEQ ID NO: 2112332
acucuaaucauggauuuga

SEQ ID NO: 2112334 - RNA, 19 nt, Artificial Sequence
  Description of Artificial Sequence: Synthetic oligonucleotide
  Sense strand starting at position 3613 of SEQ ID NO: 1882326
uggugagacguguauucag

SEQ ID NO: 2112335 - RNA, 19 nt, Artificial Sequence
  Description of Artificial Sequence: Synthetic oligonucleotide
  Antisense strand to SEQ ID NO: 2112334
cugaauacacgucucacca

SEQ ID NO: 2112336 - RNA, 19 nt, Artificial Sequence
  Description of Artificial Sequence: Synthetic oligonucleotide
  Sense strand starting at position 3879 of SEQ ID NO: 1882326
aguuaagaggaaugcucua

SEQ ID NO: 2112337 - RNA, 19 nt, Artificial Sequence
  Description of Artificial Sequence: Synthetic oligonucleotide
  Antisense strand to SEQ ID NO: 2112336
uagagcauuccucuuaacu

SEQ ID NO: 2112338 - RNA, 19 nt, Artificial Sequence
  Description of Artificial Sequence: Synthetic oligonucleotide
  Sense strand starting at position 3884 of SEQ ID NO: 1882326
agaggaaugcucuagcuuc

SEQ ID NO: 2112339 - RNA, 19 nt, Artificial Sequence
  Description of Artificial Sequence: Synthetic oligonucleotide
  Antisense strand to SEQ ID NO: 2112338
gaagcuagagcauuccucu

SEQ ID NO: 2112340 - RNA, 19 nt, Artificial Sequence
  Description of Artificial Sequence: Synthetic oligonucleotide
  Sense strand starting at position 3898 of SEQ ID NO: 1882326
gcuucuuccguucugucaa

SEQ ID NO: 2112341 - RNA, 19 nt, Artificial Sequence
  Description of Artificial Sequence: Synthetic oligonucleotide
  Antisense strand to SEQ ID NO: 2112340
uugacagaacggaagaagc

SEQ ID NO: 2112342 - RNA, 19 nt, Artificial Sequence
  Description of Artificial Sequence: Synthetic oligonucleotide
  Sense strand starting at position 3923 of SEQ ID NO: 1882326
guugccauccuguaaauca

SEQ ID NO: 2112343 - RNA, 19 nt, Artificial Sequence
  Description of Artificial Sequence: Synthetic oligonucleotide
  Antisense strand to SEQ ID NO: 2112342
ugauuuacaggauggcaac

SEQ ID NO: 2112344 - RNA, 19 nt, Artificial Sequence
  Description of Artificial Sequence: Synthetic oligonucleotide
  Sense strand starting at position 39 of SEQ ID NO: 1882327
acagguucucauuagguuu

SEQ ID NO: 2112345 - RNA, 19 nt, Artificial Sequence
  Description of Artificial Sequence: Synthetic oligonucleotide
  Antisense strand to SEQ ID NO: 2112344
aaaccuaaugagaaccugu

SEQ ID NO: 2112346 - RNA, 19 nt, Artificial Sequence
  Description of Artificial Sequence: Synthetic oligonucleotide
  Sense strand starting at position 839 of SEQ ID NO: 1882327
guuccaggaagauguauca

SEQ ID NO: 2112347 - RNA, 19 nt, Artificial Sequence
  Description of Artificial Sequence: Synthetic oligonucleotide
  Antisense strand to SEQ ID NO: 2112346
ugauacaucuuccuggaac

SEQ ID NO: 2112348 - RNA, 19 nt, Artificial Sequence
  Description of Artificial Sequence: Synthetic oligonucleotide
  Sense strand starting at position 905 of SEQ ID NO: 1882327
gccucucuaguuugagaag

SEQ ID NO: 2112349 - RNA, 19 nt, Artificial Sequence
  Description of Artificial Sequence: Synthetic oligonucleotide
  Antisense strand to SEQ ID NO: 2112348
cuucucaaacuagagaggc

SEQ ID NO: 2112350 - RNA, 19 nt, Artificial Sequence
  Description of Artificial Sequence: Synthetic oligonucleotide
  Sense strand starting at position 914 of SEQ ID NO: 1882327
guuugagaagcauguagua

SEQ ID NO: 2112351 - RNA, 19 nt, Artificial Sequence
  Description of Artificial Sequence: Synthetic oligonucleotide
  Antisense strand to SEQ ID NO: 2112350
uacuacaugcuucucaaac

SEQ ID NO: 2112352 - RNA, 19 nt, Artificial Sequence
  Description of Artificial Sequence: Synthetic oligonucleotide
  Sense strand starting at position 916 of SEQ ID NO: 1882327
uugagaagcauguaguaac

SEQ ID NO: 2112353 - RNA, 19 nt, Artificial Sequence
  Description of Artificial Sequence: Synthetic oligonucleotide
  Antisense strand to SEQ ID NO: 2112352
guuacuacaugcuucucaa

SEQ ID NO: 2112354 - RNA, 19 nt, Artificial Sequence
  Description of Artificial Sequence: Synthetic oligonucleotide
  Sense strand starting at position 946 of SEQ ID NO: 1882327
ugcccugaucaguaacgua

SEQ ID NO: 2112355 - RNA, 19 nt, Artificial Sequence
  Description of Artificial Sequence: Synthetic oligonucleotide
  Antisense strand to SEQ ID NO: 2112354
uacguuacugaucagggca

SEQ ID NO: 2112356 - RNA, 19 nt, Artificial Sequence
  Description of Artificial Sequence: Synthetic oligonucleotide
  Sense strand starting at position 1262 of SEQ ID NO: 1882327
aacagaguccugugaacca

SEQ ID NO: 2112357 - RNA, 19 nt, Artificial Sequence
  Description of Artificial Sequence: Synthetic oligonucleotide
  Antisense strand to SEQ ID NO: 2112356
ugguucacaggacucuguu

SEQ ID NO: 2112358 - RNA, 19 nt, Artificial Sequence
  Description of Artificial Sequence: Synthetic oligonucleotide
  Sense strand starting at position 1851 of SEQ ID NO: 1882327
cacuuacugguuugcgaga

SEQ ID NO: 2112359 - RNA, 19 nt, Artificial Sequence
  Description of Artificial Sequence: Synthetic oligonucleotide
  Antisense strand to SEQ ID NO: 2112358
ucucgcaaaccaguaagug

SEQ ID NO: 2112360 - RNA, 19 nt, Artificial Sequence
  Description of Artificial Sequence: Synthetic oligonucleotide
  Sense strand starting at position 1852 of SEQ ID NO: 1882327
acuuacugguuugcgagaa

SEQ ID NO: 2112361 - RNA, 19 nt, Artificial Sequence
  Description of Artificial Sequence: Synthetic oligonucleotide
  Antisense strand to SEQ ID NO: 2112360
uucucgcaaaccaguaagu

SEQ ID NO: 2112362 - RNA, 19 nt, Artificial Sequence
  Description of Artificial Sequence: Synthetic oligonucleotide
  Sense strand starting at position 1856 of SEQ ID NO: 1882327
acugguuugcgagaaaucc

SEQ ID NO: 2112363 - RNA, 19 nt, Artificial Sequence
  Description of Artificial Sequence: Synthetic oligonucleotide
  Antisense strand to SEQ ID NO: 2112362
ggauuucucgcaaaccagu

SEQ ID NO: 2112364 - RNA, 19 nt, Artificial Sequence
  Description of Artificial Sequence: Synthetic oligonucleotide
  Sense strand starting at position 2064 of SEQ ID NO: 1882327
cggcuugcugggaguugua

SEQ ID NO: 2112365 - RNA, 19 nt, Artificial Sequence
  Description of Artificial Sequence: Synthetic oligonucleotide
  Antisense strand to SEQ ID NO: 2112364
uacaacucccagcaagccg

SEQ ID NO: 2112366 - RNA, 19 nt, Artificial Sequence
  Description of Artificial Sequence: Synthetic oligonucleotide
  Sense strand starting at position 2198 of SEQ ID NO: 1882327
ggcugcucacucgugucaa

SEQ ID NO: 2112367 - RNA, 19 nt, Artificial Sequence
  Description of Artificial Sequence: Synthetic oligonucleotide
  Antisense strand to SEQ ID NO: 2112366
uugacacgagugagcagcc

SEQ ID NO: 2112368 - RNA, 19 nt, Artificial Sequence
  Description of Artificial Sequence: Synthetic oligonucleotide
  Sense strand starting at position 2764 of SEQ ID NO: 1882327
uucuaaauugguuguugga

SEQ ID NO: 2112369 - RNA, 19 nt, Artificial Sequence
  Description of Artificial Sequence: Synthetic oligonucleotide
  Antisense strand to SEQ ID NO: 2112368
uccaacaaccaauuuagaa

SEQ ID NO: 2112370 - RNA, 19 nt, Artificial Sequence
  Description of Artificial Sequence: Synthetic oligonucleotide
  Sense strand starting at position 2847 of SEQ ID NO: 1882327
cuuuaaauggaucagcuua

SEQ ID NO: 2112371 - RNA, 19 nt, Artificial Sequence
  Description of Artificial Sequence: Synthetic oligonucleotide
  Antisense strand to SEQ ID NO: 2112370
uaagcugauccauuuaaag

SEQ ID NO: 2112372 - RNA, 19 nt, Artificial Sequence
  Description of Artificial Sequence: Synthetic oligonucleotide
  Sense strand starting at position 2849 of SEQ ID NO: 1882327
uuaaauggaucagcuuaau

SEQ ID NO: 2112373 - RNA, 19 nt, Artificial Sequence
  Description of Artificial Sequence: Synthetic oligonucleotide
  Antisense strand to SEQ ID NO: 2112372
auuaagcugauccauuuaa

SEQ ID NO: 2112374 - RNA, 19 nt, Artificial Sequence
  Description of Artificial Sequence: Synthetic oligonucleotide
  Sense strand starting at position 2871 of SEQ ID NO: 1882327
ucagguuugacugagcagu

SEQ ID NO: 2112375 - RNA, 19 nt, Artificial Sequence
  Description of Artificial Sequence: Synthetic oligonucleotide
  Antisense strand to SEQ ID NO: 2112374
acugcucagucaaaccuga

SEQ ID NO: 2112376 - RNA, 19 nt, Artificial Sequence
  Description of Artificial Sequence: Synthetic oligonucleotide
  Sense strand starting at position 2894 of SEQ ID NO: 1882327
cagagauguuaagugguga

SEQ ID NO: 2112377 - RNA, 19 nt, Artificial Sequence
  Description of Artificial Sequence: Synthetic oligonucleotide
  Antisense strand to SEQ ID NO: 2112376
ucaccacuuaacaucucug

SEQ ID NO: 2112378 - RNA, 19 nt, Artificial Sequence
  Description of Artificial Sequence: Synthetic oligonucleotide
  Sense strand starting at position 2935 of SEQ ID NO: 1882327
guguuugagccuugggaca

SEQ ID NO: 2112379 - RNA, 19 nt, Artificial Sequence
  Description of Artificial Sequence: Synthetic oligonucleotide
  Antisense strand to SEQ ID NO: 2112378
ugucccaaggcucaaacac

SEQ ID NO: 2112380 - RNA, 19 nt, Artificial Sequence
  Description of Artificial Sequence: Synthetic oligonucleotide
  Sense strand starting at position 3013 of SEQ ID NO: 1882327
ggaugucaagcucaucaca

SEQ ID NO: 2112381 - RNA, 19 nt, Artificial Sequence
  Description of Artificial Sequence: Synthetic oligonucleotide
  Antisense strand to SEQ ID NO: 2112380
ugugaugagcuugacaucc

SEQ ID NO: 2112382 - RNA, 19 nt, Artificial Sequence
  Description of Artificial Sequence: Synthetic oligonucleotide
  Sense strand starting at position 3029 of SEQ ID NO: 1882327
acagcagucagggauguau

SEQ ID NO: 2112383 - RNA, 19 nt, Artificial Sequence
  Description of Artificial Sequence: Synthetic oligonucleotide
  Antisense strand to SEQ ID NO: 2112382
auacaucccugacugcugu

SEQ ID NO: 2112384 - RNA, 19 nt, Artificial Sequence
  Description of Artificial Sequence: Synthetic oligonucleotide
  Sense strand starting at position 3038 of SEQ ID NO: 1882327
agggauguauacuuuaacu

SEQ ID NO: 2112385 - RNA, 19 nt, Artificial Sequence
  Description of Artificial Sequence: Synthetic oligonucleotide
  Antisense strand to SEQ ID NO: 2112384
aguuaaaguauacaucccu

SEQ ID NO: 2112386 - RNA, 19 nt, Artificial Sequence
  Description of Artificial Sequence: Synthetic oligonucleotide
  Sense strand starting at position 3112 of SEQ ID NO: 1882327
gcacauagauucuuaguaa

SEQ ID NO: 2112387 - RNA, 19 nt, Artificial Sequence
  Description of Artificial Sequence: Synthetic oligonucleotide
  Antisense strand to SEQ ID NO: 2112386
uuacuaagaaucuaugugc

SEQ ID NO: 2112388 - RNA, 19 nt, Artificial Sequence
  Description of Artificial Sequence: Synthetic oligonucleotide
  Sense strand starting at position 3119 of SEQ ID NO: 1882327
gauucuuaguaauuggaug

SEQ ID NO: 2112389 - RNA, 19 nt, Artificial Sequence
  Description of Artificial Sequence: Synthetic oligonucleotide
  Antisense strand to SEQ ID NO: 2112388
cauccaauuacuaagaauc

SEQ ID NO: 2112390 - RNA, 19 nt, Artificial Sequence
  Description of Artificial Sequence: Synthetic oligonucleotide
  Sense strand starting at position 3124 of SEQ ID NO: 1882327
uuaguaauuggauguccau

SEQ ID NO: 2112391 - RNA, 19 nt, Artificial Sequence
  Description of Artificial Sequence: Synthetic oligonucleotide
  Antisense strand to SEQ ID NO: 2112390
auggacauccaauuacuaa

SEQ ID NO: 2112392 - RNA, 19 nt, Artificial Sequence
  Description of Artificial Sequence: Synthetic oligonucleotide
  Sense strand starting at position 3127 of SEQ ID NO: 1882327
guaauuggauguccauaaa

SEQ ID NO: 2112393 - RNA, 19 nt, Artificial Sequence
  Description of Artificial Sequence: Synthetic oligonucleotide
  Antisense strand to SEQ ID NO: 2112392
uuuauggacauccaauuac

SEQ ID NO: 2112394 - RNA, 19 nt, Artificial Sequence
  Description of Artificial Sequence: Synthetic oligonucleotide
  Sense strand starting at position 3399 of SEQ ID NO: 1882327
uuucucuuugccugagaua

SEQ ID NO: 2112395 - RNA, 19 nt, Artificial Sequence
  Description of Artificial Sequence: Synthetic oligonucleotide
  Antisense strand to SEQ ID NO: 2112394
uaucucaggcaaagagaaa

SEQ ID NO: 2112396 - RNA, 19 nt, Artificial Sequence
  Description of Artificial Sequence: Synthetic oligonucleotide
  Sense strand starting at position 3400 of SEQ ID NO: 1882327
uucucuuugccugagauag

SEQ ID NO: 2112397 - RNA, 19 nt, Artificial Sequence
  Description of Artificial Sequence: Synthetic oligonucleotide
  Antisense strand to SEQ ID NO: 2112396
cuaucucaggcaaagagaa

SEQ ID NO: 2112398 - RNA, 19 nt, Artificial Sequence
  Description of Artificial Sequence: Synthetic oligonucleotide
  Sense strand starting at position 3404 of SEQ ID NO: 1882327
cuuugccugagauagguaa

SEQ ID NO: 2112399 - RNA, 19 nt, Artificial Sequence
  Description of Artificial Sequence: Synthetic oligonucleotide
  Antisense strand to SEQ ID NO: 2112398
uuaccuaucucaggcaaag

SEQ ID NO: 2112400 - RNA, 19 nt, Artificial Sequence
  Description of Artificial Sequence: Synthetic oligonucleotide
  Sense strand starting at position 3408 of SEQ ID NO: 1882327
gccugagauagguaaguua

SEQ ID NO: 2112401 - RNA, 19 nt, Artificial Sequence
  Description of Artificial Sequence: Synthetic oligonucleotide
  Antisense strand to SEQ ID NO: 2112400
uaacuuaccuaucucaggc

SEQ ID NO: 2112402 - RNA, 19 nt, Artificial Sequence
  Description of Artificial Sequence: Synthetic oligonucleotide
  Sense strand starting at position 3411 of SEQ ID NO: 1882327
ugagauagguaaguuaaca

SEQ ID NO: 2112403 - RNA, 19 nt, Artificial Sequence
  Description of Artificial Sequence: Synthetic oligonucleotide
  Antisense strand to SEQ ID NO: 2112402
uguuaacuuaccuaucuca

SEQ ID NO: 2112404 - RNA, 19 nt, Artificial Sequence
  Description of Artificial Sequence: Synthetic oligonucleotide
  Sense strand starting at position 3462 of SEQ ID NO: 1882327
agugaaacucguggagaaa

SEQ ID NO: 2112405 - RNA, 19 nt, Artificial Sequence
  Description of Artificial Sequence: Synthetic oligonucleotide
  Antisense strand to SEQ ID NO: 2112404
uuucuccacgaguuucacu

SEQ ID NO: 2112406 - RNA, 19 nt, Artificial Sequence
  Description of Artificial Sequence: Synthetic oligonucleotide
  Sense strand starting at position 3463 of SEQ ID NO: 1882327
gugaaacucguggagaaau

SEQ ID NO: 2112407 - RNA, 19 nt, Artificial Sequence
  Description of Artificial Sequence: Synthetic oligonucleotide
  Antisense strand to SEQ ID NO: 2112406
auuucuccacgaguuucac

SEQ ID NO: 2112408 - RNA, 19 nt, Artificial Sequence
  Description of Artificial Sequence: Synthetic oligonucleotide
  Sense strand starting at position 3536 of SEQ ID NO: 1882327
gaaguaagaccuuguuugu

SEQ ID NO: 2112409 - RNA, 19 nt, Artificial Sequence
  Description of Artificial Sequence: Synthetic oligonucleotide
  Antisense strand to SEQ ID NO: 2112408
acaaacaaggucuuacuuc

SEQ ID NO: 2112410 - RNA, 19 nt, Artificial Sequence
  Description of Artificial Sequence: Synthetic oligonucleotide
  Sense strand starting at position 3539 of SEQ ID NO: 1882327
guaagaccuuguuuguauu

SEQ ID NO: 2112411 - RNA, 19 nt, Artificial Sequence
  Description of Artificial Sequence: Synthetic oligonucleotide
  Antisense strand to SEQ ID NO: 2112410
aauacaaacaaggucuuac

SEQ ID NO: 2112412 - RNA, 19 nt, Artificial Sequence
  Description of Artificial Sequence: Synthetic oligonucleotide
  Sense strand starting at position 3638 of SEQ ID NO: 1882327
ggacccuauuacuuuguga

SEQ ID NO: 2112413 - RNA, 19 nt, Artificial Sequence
  Description of Artificial Sequence: Synthetic oligonucleotide
  Antisense strand to SEQ ID NO: 2112412
ucacaaaguaauagggucc

SEQ ID NO: 2112414 - RNA, 19 nt, Artificial Sequence
  Description of Artificial Sequence: Synthetic oligonucleotide
  Sense strand starting at position 3640 of SEQ ID NO: 1882327
acccuauuacuuugugaag

SEQ ID NO: 2112415 - RNA, 19 nt, Artificial Sequence
  Description of Artificial Sequence: Synthetic oligonucleotide
  Antisense strand to SEQ ID NO: 2112414
cuucacaaaguaauagggu

SEQ ID NO: 2112416 - RNA, 19 nt, Artificial Sequence
  Description of Artificial Sequence: Synthetic oligonucleotide
  Sense strand starting at position 3641 of SEQ ID NO: 1882327
cccuauuacuuugugaaga

SEQ ID NO: 2112417 - RNA, 19 nt, Artificial Sequence
  Description of Artificial Sequence: Synthetic oligonucleotide
  Antisense strand to SEQ ID NO: 2112416
ucuucacaaaguaauaggg

SEQ ID NO: 2112418 - RNA, 19 nt, Artificial Sequence
  Description of Artificial Sequence: Synthetic oligonucleotide
  Sense strand starting at position 3726 of SEQ ID NO: 1882327
accugaaauggcugugaac

SEQ ID NO: 2112419 - RNA, 19 nt, Artificial Sequence
  Description of Artificial Sequence: Synthetic oligonucleotide
  Antisense strand to SEQ ID NO: 2112418
guucacagccauuucaggu

SEQ ID NO: 2112420 - RNA, 19 nt, Artificial Sequence
  Description of Artificial Sequence: Synthetic oligonucleotide
  Sense strand starting at position 3728 of SEQ ID NO: 1882327
cugaaauggcugugaacaa

SEQ ID NO: 2112421 - RNA, 19 nt, Artificial Sequence
  Description of Artificial Sequence: Synthetic oligonucleotide
  Antisense strand to SEQ ID NO: 2112420
uuguucacagccauuucag

SEQ ID NO: 2112422 - RNA, 19 nt, Artificial Sequence
  Description of Artificial Sequence: Synthetic oligonucleotide
  Sense strand starting at position 3897 of SEQ ID NO: 1882327
ggugguuucugauugcaau

SEQ ID NO: 2112423 - RNA, 19 nt, Artificial Sequence
  Description of Artificial Sequence: Synthetic oligonucleotide
  Antisense strand to SEQ ID NO: 2112422
auugcaaucagaaaccacc

SEQ ID NO: 2112424 - RNA, 19 nt, Artificial Sequence
  Description of Artificial Sequence: Synthetic oligonucleotide
  Sense strand starting at position 23 of SEQ ID NO: 1882328
cucauauaagauugagugu

SEQ ID NO: 2112425 - RNA, 19 nt, Artificial Sequence
  Description of Artificial Sequence: Synthetic oligonucleotide
  Antisense strand to SEQ ID NO: 2112424
acacucaaucuuauaugag

SEQ ID NO: 2112426 - RNA, 19 nt, Artificial Sequence
  Description of Artificial Sequence: Synthetic oligonucleotide
  Sense strand starting at position 30 of SEQ ID NO: 1882328
aagauugaguguuuccauu

SEQ ID NO: 2112427 - RNA, 19 nt, Artificial Sequence
  Description of Artificial Sequence: Synthetic oligonucleotide
  Antisense strand to SEQ ID NO: 2112426
aauggaaacacucaaucuu

SEQ ID NO: 2112428 - RNA, 19 nt, Artificial Sequence
  Description of Artificial Sequence: Synthetic oligonucleotide
  Sense strand starting at position 32 of SEQ ID NO: 1882328
gauugaguguuuccauuga

SEQ ID NO: 2112429 - RNA, 19 nt, Artificial Sequence
  Description of Artificial Sequence: Synthetic oligonucleotide
  Antisense strand to SEQ ID NO: 2112428
ucaauggaaacacucaauc

SEQ ID NO: 2112430 - RNA, 19 nt, Artificial Sequence
  Description of Artificial Sequence: Synthetic oligonucleotide
  Sense strand starting at position 36 of SEQ ID NO: 1882328
gaguguuuccauugaucaa

SEQ ID NO: 2112431 - RNA, 19 nt, Artificial Sequence
  Description of Artificial Sequence: Synthetic oligonucleotide
  Antisense strand to SEQ ID NO: 2112430
uugaucaauggaaacacuc

SEQ ID NO: 2112432 - RNA, 19 nt, Artificial Sequence
  Description of Artificial Sequence: Synthetic oligonucleotide
  Sense strand starting at position 66 of SEQ ID NO: 1882328
aaauguugugaugauucuu

SEQ ID NO: 2112433 - RNA, 19 nt, Artificial Sequence
  Description of Artificial Sequence: Synthetic oligonucleotide
  Antisense strand to SEQ ID NO: 2112432
aagaaucaucacaacauuu

SEQ ID NO: 2112434 - RNA, 19 nt, Artificial Sequence
  Description of Artificial Sequence: Synthetic oligonucleotide
  Sense strand starting at position 93 of SEQ ID NO: 1882328
uuaauuggcuaugucauuu

SEQ ID NO: 2112435 - RNA, 19 nt, Artificial Sequence
  Description of Artificial Sequence: Synthetic oligonucleotide
  Antisense strand to SEQ ID NO: 2112434
aaaugacauagccaauuaa

SEQ ID NO: 2112436 - RNA, 19 nt, Artificial Sequence
  Description of Artificial Sequence: Synthetic oligonucleotide
  Sense strand starting at position 148 of SEQ ID NO: 1882328
ugauguaaauaacaggaaa

SEQ ID NO: 2112437 - RNA, 19 nt, Artificial Sequence
  Description of Artificial Sequence: Synthetic oligonucleotide
  Antisense strand to SEQ ID NO: 2112436
uuuccuguuauuuacauca

SEQ ID NO: 2112438 - RNA, 19 nt, Artificial Sequence
  Description of Artificial Sequence: Synthetic oligonucleotide
  Sense strand starting at position 169 of SEQ ID NO: 1882328
agaagaacugcuggccuua

SEQ ID NO: 2112439 - RNA, 19 nt, Artificial Sequence
  Description of Artificial Sequence: Synthetic oligonucleotide
  Antisense strand to SEQ ID NO: 2112438
uaaggccagcaguucuucu

SEQ ID NO: 2112440 - RNA, 19 nt, Artificial Sequence
  Description of Artificial Sequence: Synthetic oligonucleotide
  Sense strand starting at position 256 of SEQ ID NO: 1882328
uuacuucugcuccagggau

SEQ ID NO: 2112441 - RNA, 19 nt, Artificial Sequence
  Description of Artificial Sequence: Synthetic oligonucleotide
  Antisense strand to SEQ ID NO: 2112440
aucccuggagcagaaguaa

SEQ ID NO: 2112442 - RNA, 19 nt, Artificial Sequence
  Description of Artificial Sequence: Synthetic oligonucleotide
  Sense strand starting at position 264 of SEQ ID NO: 1882328
gcuccagggauccaaguaa

SEQ ID NO: 2112443 - RNA, 19 nt, Artificial Sequence
  Description of Artificial Sequence: Synthetic oligonucleotide
  Antisense strand to SEQ ID NO: 2112442
uuacuuggaucccuggagc

SEQ ID NO: 2112444 - RNA, 19 nt, Artificial Sequence
  Description of Artificial Sequence: Synthetic oligonucleotide
  Sense strand starting at position 301 of SEQ ID NO: 1882328
gagggaauguugccauaaa

SEQ ID NO: 2112445 - RNA, 19 nt, Artificial Sequence
  Description of Artificial Sequence: Synthetic oligonucleotide
  Antisense strand to SEQ ID NO: 2112444
uuuauggcaacauucccuc

SEQ ID NO: 2112446 - RNA, 19 nt, Artificial Sequence
  Description of Artificial Sequence: Synthetic oligonucleotide
  Sense strand starting at position 312 of SEQ ID NO: 1882328
gccauaaaucaggguauca

SEQ ID NO: 2112447 - RNA, 19 nt, Artificial Sequence
  Description of Artificial Sequence: Synthetic oligonucleotide
  Antisense strand to SEQ ID NO: 2112446
ugauacccugauuuauggc

SEQ ID NO: 2112448 - RNA, 19 nt, Artificial Sequence
  Description of Artificial Sequence: Synthetic oligonucleotide
  Sense strand starting at position 576 of SEQ ID NO: 1882328
guagguuuggcgguaaguc

SEQ ID NO: 2112449 - RNA, 19 nt, Artificial Sequence
  Description of Artificial Sequence: Synthetic oligonucleotide
  Antisense strand to SEQ ID NO: 2112448
gacuuaccgccaaaccuac

SEQ ID NO: 2112450 - RNA, 19 nt, Artificial Sequence
  Description of Artificial Sequence: Synthetic oligonucleotide
  Sense strand starting at position 879 of SEQ ID NO: 1882328
guugacacuuugccaaaca

SEQ ID NO: 2112451 - RNA, 19 nt, Artificial Sequence
  Description of Artificial Sequence: Synthetic oligonucleotide
  Antisense strand to SEQ ID NO: 2112450
uguuuggcaaagugucaac

SEQ ID NO: 2112452 - RNA, 19 nt, Artificial Sequence
  Description of Artificial Sequence: Synthetic oligonucleotide
  Sense strand starting at position 1111 of SEQ ID NO: 1882328
acggaacaucucgaucguu

SEQ ID NO: 2112453 - RNA, 19 nt, Artificial Sequence
  Description of Artificial Sequence: Synthetic oligonucleotide
  Antisense strand to SEQ ID NO: 2112452
aacgaucgagauguuccgu

SEQ ID NO: 2112454 - RNA, 19 nt, Artificial Sequence
  Description of Artificial Sequence: Synthetic oligonucleotide
  Sense strand starting at position 1114 of SEQ ID NO: 1882328
gaacaucucgaucguuaca

SEQ ID NO: 2112455 - RNA, 19 nt, Artificial Sequence
  Description of Artificial Sequence: Synthetic oligonucleotide
  Antisense strand to SEQ ID NO: 2112454
uguaacgaucgagauguuc

SEQ ID NO: 2112456 - RNA, 19 nt, Artificial Sequence
  Description of Artificial Sequence: Synthetic oligonucleotide
  Sense strand starting at position 1172 of SEQ ID NO: 1882328
gggcacaggccuuacuuua

SEQ ID NO: 2112457 - RNA, 19 nt, Artificial Sequence
  Description of Artificial Sequence: Synthetic oligonucleotide
  Antisense strand to SEQ ID NO: 2112456
uaaaguaaggccugugccc

SEQ ID NO: 2112458 - RNA, 19 nt, Artificial Sequence
  Description of Artificial Sequence: Synthetic oligonucleotide
  Sense strand starting at position 1288 of SEQ ID NO: 1882328
cugcgaucucucccgcaca

SEQ ID NO: 2112459 - RNA, 19 nt, Artificial Sequence
  Description of Artificial Sequence: Synthetic oligonucleotide
  Antisense strand to SEQ ID NO: 2112458
ugugcgggagagaucgcag

SEQ ID NO: 2112460 - RNA, 19 nt, Artificial Sequence
  Description of Artificial Sequence: Synthetic oligonucleotide
  Sense strand starting at position 1291 of SEQ ID NO: 1882328
cgaucucucccgcacacaa

SEQ ID NO: 2112461 - RNA, 19 nt, Artificial Sequence
  Description of Artificial Sequence: Synthetic oligonucleotide
  Antisense strand to SEQ ID NO: 2112460
uugugugcgggagagaucg

SEQ ID NO: 2112462 - RNA, 19 nt, Artificial Sequence
  Description of Artificial Sequence: Synthetic oligonucleotide
  Sense strand starting at position 1355 of SEQ ID NO: 1882328
gccaucauagccuaagaau

SEQ ID NO: 2112463 - RNA, 19 nt, Artificial Sequence
  Description of Artificial Sequence: Synthetic oligonucleotide
  Antisense strand to SEQ ID NO: 2112462
auucuuaggcuaugauggc

SEQ ID NO: 2112464 - RNA, 19 nt, Artificial Sequence
  Description of Artificial Sequence: Synthetic oligonucleotide
  Sense strand starting at position 1374 of SEQ ID NO: 1882328
gagggucagauagguaauu

SEQ ID NO: 2112465 - RNA, 19 nt, Artificial Sequence
  Description of Artificial Sequence: Synthetic oligonucleotide
  Antisense strand to SEQ ID NO: 2112464
aauuaccuaucugacccuc

SEQ ID NO: 2112466 - RNA, 19 nt, Artificial Sequence
  Description of Artificial Sequence: Synthetic oligonucleotide
  Sense strand starting at position 1375 of SEQ ID NO: 1882328
agggucagauagguaauua

SEQ ID NO: 2112467 - RNA, 19 nt, Artificial Sequence
  Description of Artificial Sequence: Synthetic oligonucleotide
  Antisense strand to SEQ ID NO: 2112466
uaauuaccuaucugacccu

SEQ ID NO: 2112468 - RNA, 19 nt, Artificial Sequence
  Description of Artificial Sequence: Synthetic oligonucleotide
  Sense strand starting at position 1463 of SEQ ID NO: 1882328
accagaacuuggucugguu

SEQ ID NO: 2112469 - RNA, 19 nt, Artificial Sequence
  Description of Artificial Sequence: Synthetic oligonucleotide
  Antisense strand to SEQ ID NO: 2112468
aaccagaccaaguucuggu

SEQ ID NO: 2112470 - RNA, 19 nt, Artificial Sequence
  Description of Artificial Sequence: Synthetic oligonucleotide
  Sense strand starting at position 1465 of SEQ ID NO: 1882328
cagaacuuggucugguuau

SEQ ID NO: 2112471 - RNA, 19 nt, Artificial Sequence
  Description of Artificial Sequence: Synthetic oligonucleotide
  Antisense strand to SEQ ID NO: 2112470
auaaccagaccaaguucug

SEQ ID NO: 2112472 - RNA, 19 nt, Artificial Sequence
  Description of Artificial Sequence: Synthetic oligonucleotide
  Sense strand starting at position 1637 of SEQ ID NO: 1882328
gugcuugcuagaggagaua

SEQ ID NO: 2112473 - RNA, 19 nt, Artificial Sequence
  Description of Artificial Sequence: Synthetic oligonucleotide
  Antisense strand to SEQ ID NO: 2112472
uaucuccucuagcaagcac

SEQ ID NO: 2112474 - RNA, 19 nt, Artificial Sequence
  Description of Artificial Sequence: Synthetic oligonucleotide
  Sense strand starting at position 1650 of SEQ ID NO: 1882328
gagauagcaucccuguaaa

SEQ ID NO: 2112475 - RNA, 19 nt, Artificial Sequence
  Description of Artificial Sequence: Synthetic oligonucleotide
  Antisense strand to SEQ ID NO: 2112474
uuuacagggaugcuaucuc

SEQ ID NO: 2112476 - RNA, 19 nt, Artificial Sequence
  Description of Artificial Sequence: Synthetic oligonucleotide
  Sense strand starting at position 1653 of SEQ ID NO: 1882328
auagcaucccuguaaagaa

SEQ ID NO: 2112477 - RNA, 19 nt, Artificial Sequence
  Description of Artificial Sequence: Synthetic oligonucleotide
  Antisense strand to SEQ ID NO: 2112476
uucuuuacagggaugcuau

SEQ ID NO: 2112478 - RNA, 19 nt, Artificial Sequence
  Description of Artificial Sequence: Synthetic oligonucleotide
  Sense strand starting at position 2016 of SEQ ID NO: 1882328
cgguaaguucuagaaccug

SEQ ID NO: 2112479 - RNA, 19 nt, Artificial Sequence
  Description of Artificial Sequence: Synthetic oligonucleotide
  Antisense strand to SEQ ID NO: 2112478
cagguucuagaacuuaccg

SEQ ID NO: 2112480 - RNA, 19 nt, Artificial Sequence
  Description of Artificial Sequence: Synthetic oligonucleotide
  Sense strand starting at position 2393 of SEQ ID NO: 1882328
cuuggucuucuuuauacau

SEQ ID NO: 2112481 - RNA, 19 nt, Artificial Sequence
  Description of Artificial Sequence: Synthetic oligonucleotide
  Antisense strand to SEQ ID NO: 2112480
auguauaaagaagaccaag

SEQ ID NO: 2112482 - RNA, 19 nt, Artificial Sequence
  Description of Artificial Sequence: Synthetic oligonucleotide
  Sense strand starting at position 2724 of SEQ ID NO: 1882328
guugaaagguuuccauguu

SEQ ID NO: 2112483 - RNA, 19 nt, Artificial Sequence
  Description of Artificial Sequence: Synthetic oligonucleotide
  Antisense strand to SEQ ID NO: 2112482
aacauggaaaccuuucaac

SEQ ID NO: 2112484 - RNA, 19 nt, Artificial Sequence
  Description of Artificial Sequence: Synthetic oligonucleotide
  Sense strand starting at position 2772 of SEQ ID NO: 1882328
ccuucuuauggccggacaa

SEQ ID NO: 2112485 - RNA, 19 nt, Artificial Sequence
  Description of Artificial Sequence: Synthetic oligonucleotide
  Antisense strand to SEQ ID NO: 2112484
uuguccggccauaagaagg

SEQ ID NO: 2112486 - RNA, 19 nt, Artificial Sequence
  Description of Artificial Sequence: Synthetic oligonucleotide
  Sense strand starting at position 2773 of SEQ ID NO: 1882328
cuucuuauggccggacaau

SEQ ID NO: 2112487 - RNA, 19 nt, Artificial Sequence
  Description of Artificial Sequence: Synthetic oligonucleotide
  Antisense strand to SEQ ID NO: 2112486
auuguccggccauaagaag

SEQ ID NO: 2112488 - RNA, 19 nt, Artificial Sequence
  Description of Artificial Sequence: Synthetic oligonucleotide
  Sense strand starting at position 2774 of SEQ ID NO: 1882328
uucuuauggccggacaaua

SEQ ID NO: 2112489 - RNA, 19 nt, Artificial Sequence
  Description of Artificial Sequence: Synthetic oligonucleotide
  Antisense strand to SEQ ID NO: 2112488
uauuguccggccauaagaa

SEQ ID NO: 2112490 - RNA, 19 nt, Artificial Sequence
  Description of Artificial Sequence: Synthetic oligonucleotide
  Sense strand starting at position 2784 of SEQ ID NO: 1882328
cggacaauauccucuugua

SEQ ID NO: 2112491 - RNA, 19 nt, Artificial Sequence
  Description of Artificial Sequence: Synthetic oligonucleotide
  Antisense strand to SEQ ID NO: 2112490
uacaagaggauauuguccg

SEQ ID NO: 2112492 - RNA, 19 nt, Artificial Sequence
  Description of Artificial Sequence: Synthetic oligonucleotide
  Sense strand starting at position 2834 of SEQ ID NO: 1882328
gguacauaacaguaugcuu

SEQ ID NO: 2112493 - RNA, 19 nt, Artificial Sequence
  Description of Artificial Sequence: Synthetic oligonucleotide
  Antisense strand to SEQ ID NO: 2112492
aagcauacuguuauguacc

SEQ ID NO: 2112494 - RNA, 19 nt, Artificial Sequence
  Description of Artificial Sequence: Synthetic oligonucleotide
  Sense strand starting at position 2896 of SEQ ID NO: 1882328
uuaugaguagugugacuau

SEQ ID NO: 2112495 - RNA, 19 nt, Artificial Sequence
  Description of Artificial Sequence: Synthetic oligonucleotide
  Antisense strand to SEQ ID NO: 2112494
auagucacacuacucauaa

SEQ ID NO: 2112496 - RNA, 19 nt, Artificial Sequence
  Description of Artificial Sequence: Synthetic oligonucleotide
  Sense strand starting at position 2913 of SEQ ID NO: 1882328
augcgcauuccuguguuaa

SEQ ID NO: 2112497 - RNA, 19 nt, Artificial Sequence
  Description of Artificial Sequence: Synthetic oligonucleotide
  Antisense strand to SEQ ID NO: 2112496
uuaacacaggaaugcgcau

SEQ ID NO: 2112498 - RNA, 19 nt, Artificial Sequence
  Description of Artificial Sequence: Synthetic oligonucleotide
  Sense strand starting at position 3359 of SEQ ID NO: 1882328
gugaauacauuccucaguu

SEQ ID NO: 2112499 - RNA, 19 nt, Artificial Sequence
  Description of Artificial Sequence: Synthetic oligonucleotide
  Antisense strand to SEQ ID NO: 2112498
aacugaggaauguauucac

SEQ ID NO: 2112500 - RNA, 19 nt, Artificial Sequence
  Description of Artificial Sequence: Synthetic oligonucleotide
  Sense strand starting at position 3868 of SEQ ID NO: 1882328
ugcugaacccuguauguaa

SEQ ID NO: 2112501 - RNA, 19 nt, Artificial Sequence
  Description of Artificial Sequence: Synthetic oligonucleotide
  Antisense strand to SEQ ID NO: 2112500
uuacauacaggguucagca

SEQ ID NO: 2112502 - RNA, 19 nt, Artificial Sequence
  Description of Artificial Sequence: Synthetic oligonucleotide
  Sense strand starting at position 3901 of SEQ ID NO: 1882328
uuuccauugcacugagaaa

SEQ ID NO: 2112503 - RNA, 19 nt, Artificial Sequence
  Description of Artificial Sequence: Synthetic oligonucleotide
  Antisense strand to SEQ ID NO: 2112502
uuucucagugcaauggaaa

SEQ ID NO: 2112504 - RNA, 19 nt, Artificial Sequence
  Description of Artificial Sequence: Synthetic oligonucleotide
  Sense strand starting at position 236 of SEQ ID NO: 1882329
accugaugugcuuguaaga

SEQ ID NO: 2112505 - RNA, 19 nt, Artificial Sequence
  Description of Artificial Sequence: Synthetic oligonucleotide
  Antisense strand to SEQ ID NO: 2112504
ucuuacaagcacaucaggu

SEQ ID NO: 2112506 - RNA, 19 nt, Artificial Sequence
  Description of Artificial Sequence: Synthetic oligonucleotide
  Sense strand starting at position 241 of SEQ ID NO: 1882329
augugcuuguaagaauuua

SEQ ID NO: 2112507 - RNA, 19 nt, Artificial Sequence
  Description of Artificial Sequence: Synthetic oligonucleotide
  Antisense strand to SEQ ID NO: 2112506
uaaauucuuacaagcacau

SEQ ID NO: 2112508 - RNA, 19 nt, Artificial Sequence
  Description of Artificial Sequence: Synthetic oligonucleotide
  Sense strand starting at position 288 of SEQ ID NO: 1882329
cgagguuagauguaaggau

SEQ ID NO: 2112509 - RNA, 19 nt, Artificial Sequence
  Description of Artificial Sequence: Synthetic oligonucleotide
  Antisense strand to SEQ ID NO: 2112508
auccuuacaucuaaccucg

SEQ ID NO: 2112510 - RNA, 19 nt, Artificial Sequence
  Description of Artificial Sequence: Synthetic oligonucleotide
  Sense strand starting at position 308 of SEQ ID NO: 1882329
ucagacuugucaguauaca

SEQ ID NO: 2112511 - RNA, 19 nt, Artificial Sequence
  Description of Artificial Sequence: Synthetic oligonucleotide
  Antisense strand to SEQ ID NO: 2112510
uguauacugacaagucuga

SEQ ID NO: 2112512 - RNA, 19 nt, Artificial Sequence
  Description of Artificial Sequence: Synthetic oligonucleotide
  Sense strand starting at position 309 of SEQ ID NO: 1882329
cagacuugucaguauacag

SEQ ID NO: 2112513 - RNA, 19 nt, Artificial Sequence
  Description of Artificial Sequence: Synthetic oligonucleotide
  Antisense strand to SEQ ID NO: 2112512
cuguauacugacaagucug

SEQ ID NO: 2112514 - RNA, 19 nt, Artificial Sequence
  Description of Artificial Sequence: Synthetic oligonucleotide
  Sense strand starting at position 317 of SEQ ID NO: 1882329
ucaguauacagguggugau

SEQ ID NO: 2112515 - RNA, 19 nt, Artificial Sequence
  Description of Artificial Sequence: Synthetic oligonucleotide
  Antisense strand to SEQ ID NO: 2112514
aucaccaccuguauacuga

SEQ ID NO: 2112516 - RNA, 19 nt, Artificial Sequence
  Description of Artificial Sequence: Synthetic oligonucleotide
  Sense strand starting at position 318 of SEQ ID NO: 1882329
caguauacagguggugauu

SEQ ID NO: 2112517 - RNA, 19 nt, Artificial Sequence
  Description of Artificial Sequence: Synthetic oligonucleotide
  Antisense strand to SEQ ID NO: 2112516
aaucaccaccuguauacug

SEQ ID NO: 2112518 - RNA, 19 nt, Artificial Sequence
  Description of Artificial Sequence: Synthetic oligonucleotide
  Sense strand starting at position 343 of SEQ ID NO: 1882329
guaggaaugacugguauua

SEQ ID NO: 2112519 - RNA, 19 nt, Artificial Sequence
  Description of Artificial Sequence: Synthetic oligonucleotide
  Antisense strand to SEQ ID NO: 2112518
uaauaccagucauuccuac

SEQ ID NO: 2112520 - RNA, 19 nt, Artificial Sequence
  Description of Artificial Sequence: Synthetic oligonucleotide
  Sense strand starting at position 354 of SEQ ID NO: 1882329
ugguauuacccagggagcu

SEQ ID NO: 2112521 - RNA, 19 nt, Artificial Sequence
  Description of Artificial Sequence: Synthetic oligonucleotide
  Antisense strand to SEQ ID NO: 2112520
agcucccuggguaauacca

SEQ ID NO: 2112522 - RNA, 19 nt, Artificial Sequence
  Description of Artificial Sequence: Synthetic oligonucleotide
  Sense strand starting at position 489 of SEQ ID NO: 1882329
ggaggcauuccuugaauuc

SEQ ID NO: 2112523 - RNA, 19 nt, Artificial Sequence
  Description of Artificial Sequence: Synthetic oligonucleotide
  Antisense strand to SEQ ID NO: 2112522
gaauucaaggaaugccucc

SEQ ID NO: 2112524 - RNA, 19 nt, Artificial Sequence
  Description of Artificial Sequence: Synthetic oligonucleotide
  Sense strand starting at position 498 of SEQ ID NO: 1882329
ccuugaauuccuuggacuc

SEQ ID NO: 2112525 - RNA, 19 nt, Artificial Sequence
  Description of Artificial Sequence: Synthetic oligonucleotide
  Antisense strand to SEQ ID NO: 2112524
gaguccaaggaauucaagg

SEQ ID NO: 2112526 - RNA, 19 nt, Artificial Sequence
  Description of Artificial Sequence: Synthetic oligonucleotide
  Sense strand starting at position 499 of SEQ ID NO: 1882329
cuugaauuccuuggacuca

SEQ ID NO: 2112527 - RNA, 19 nt, Artificial Sequence
  Description of Artificial Sequence: Synthetic oligonucleotide
  Antisense strand to SEQ ID NO: 2112526
ugaguccaaggaauucaag

SEQ ID NO: 2112528 - RNA, 19 nt, Artificial Sequence
  Description of Artificial Sequence: Synthetic oligonucleotide
  Sense strand starting at position 577 of SEQ ID NO: 1882329
gaguucuuagcagaguaga

SEQ ID NO: 2112529 - RNA, 19 nt, Artificial Sequence
  Description of Artificial Sequence: Synthetic oligonucleotide
  Antisense strand to SEQ ID NO: 2112528
ucuacucugcuaagaacuc

SEQ ID NO: 2112530 - RNA, 19 nt, Artificial Sequence
  Description of Artificial Sequence: Synthetic oligonucleotide
  Sense strand starting at position 636 of SEQ ID NO: 1882329
cugaaauugcacuguuaug

SEQ ID NO: 2112531 - RNA, 19 nt, Artificial Sequence
  Description of Artificial Sequence: Synthetic oligonucleotide
  Antisense strand to SEQ ID NO: 2112530
cauaacagugcaauuucag

SEQ ID NO: 2112532 - RNA, 19 nt, Artificial Sequence
  Description of Artificial Sequence: Synthetic oligonucleotide
  Sense strand starting at position 726 of SEQ ID NO: 1882329
auccgcauaucucugcaaa

SEQ ID NO: 2112533 - RNA, 19 nt, Artificial Sequence
  Description of Artificial Sequence: Synthetic oligonucleotide
  Antisense strand to SEQ ID NO: 2112532
uuugcagagauaugcggau

SEQ ID NO: 2112534 - RNA, 19 nt, Artificial Sequence
  Description of Artificial Sequence: Synthetic oligonucleotide
  Sense strand starting at position 729 of SEQ ID NO: 1882329
cgcauaucucugcaaaguc

SEQ ID NO: 2112535 - RNA, 19 nt, Artificial Sequence
  Description of Artificial Sequence: Synthetic oligonucleotide
  Antisense strand to SEQ ID NO: 2112534
gacuuugcagagauaugcg

SEQ ID NO: 2112536 - RNA, 19 nt, Artificial Sequence
  Description of Artificial Sequence: Synthetic oligonucleotide
  Sense strand starting at position 745 of SEQ ID NO: 1882329
gucuuaauguagguuucca

SEQ ID NO: 2112537 - RNA, 19 nt, Artificial Sequence
  Description of Artificial Sequence: Synthetic oligonucleotide
  Antisense strand to SEQ ID NO: 2112536
uggaaaccuacauuaagac

SEQ ID NO: 2112538 - RNA, 19 nt, Artificial Sequence
  Description of Artificial Sequence: Synthetic oligonucleotide
  Sense strand starting at position 749 of SEQ ID NO: 1882329
uaauguagguuuccaggau

SEQ ID NO: 2112539 - RNA, 19 nt, Artificial Sequence
  Description of Artificial Sequence: Synthetic oligonucleotide
  Antisense strand to SEQ ID NO: 2112538
auccuggaaaccuacauua

SEQ ID NO: 2112540 - RNA, 19 nt, Artificial Sequence
  Description of Artificial Sequence: Synthetic oligonucleotide
  Sense strand starting at position 804 of SEQ ID NO: 1882329
gaagauucuccagguccgu

SEQ ID NO: 2112541 - RNA, 19 nt, Artificial Sequence
  Description of Artificial Sequence: Synthetic oligonucleotide
  Antisense strand to SEQ ID NO: 2112540
acggaccuggagaaucuuc

SEQ ID NO: 2112542 - RNA, 19 nt, Artificial Sequence
  Description of Artificial Sequence: Synthetic oligonucleotide
  Sense strand starting at position 910 of SEQ ID NO: 1882329
cucauaagcuugccuggaa

SEQ ID NO: 2112543 - RNA, 19 nt, Artificial Sequence
  Description of Artificial Sequence: Synthetic oligonucleotide
  Antisense strand to SEQ ID NO: 2112542
uuccaggcaagcuuaugag

SEQ ID NO: 2112544 - RNA, 19 nt, Artificial Sequence
  Description of Artificial Sequence: Synthetic oligonucleotide
  Sense strand starting at position 911 of SEQ ID NO: 1882329
ucauaagcuugccuggaaa

SEQ ID NO: 2112545 - RNA, 19 nt, Artificial Sequence
  Description of Artificial Sequence: Synthetic oligonucleotide
  Antisense strand to SEQ ID NO: 2112544
uuuccaggcaagcuuauga

SEQ ID NO: 2112546 - RNA, 19 nt, Artificial Sequence
  Description of Artificial Sequence: Synthetic oligonucleotide
  Sense strand starting at position 950 of SEQ ID NO: 1882329
uuaugaacuuugcccagua

SEQ ID NO: 2112547 - RNA, 19 nt, Artificial Sequence
  Description of Artificial Sequence: Synthetic oligonucleotide
  Antisense strand to SEQ ID NO: 2112546
uacugggcaaaguucauaa

SEQ ID NO: 2112548 - RNA, 19 nt, Artificial Sequence
  Description of Artificial Sequence: Synthetic oligonucleotide
  Sense strand starting at position 1312 of SEQ ID NO: 1882329
agagauaagucuuugucac

SEQ ID NO: 2112549 - RNA, 19 nt, Artificial Sequence
  Description of Artificial Sequence: Synthetic oligonucleotide
  Antisense strand to SEQ ID NO: 2112548
gugacaaagacuuaucucu

SEQ ID NO: 2112550 - RNA, 19 nt, Artificial Sequence
  Description of Artificial Sequence: Synthetic oligonucleotide
  Sense strand starting at position 1336 of SEQ ID NO: 1882329
agucuuuacuguuucgaga

SEQ ID NO: 2112551 - RNA, 19 nt, Artificial Sequence
  Description of Artificial Sequence: Synthetic oligonucleotide
  Antisense strand to SEQ ID NO: 2112550
ucucgaaacaguaaagacu

SEQ ID NO: 2112552 - RNA, 19 nt, Artificial Sequence
  Description of Artificial Sequence: Synthetic oligonucleotide
  Sense strand starting at position 1432 of SEQ ID NO: 1882329
gguuucaggcgcucuguaa

SEQ ID NO: 2112553 - RNA, 19 nt, Artificial Sequence
  Description of Artificial Sequence: Synthetic oligonucleotide
  Antisense strand to SEQ ID NO: 2112552
uuacagagcgccugaaacc

SEQ ID NO: 2112554 - RNA, 19 nt, Artificial Sequence
  Description of Artificial Sequence: Synthetic oligonucleotide
  Sense strand starting at position 1433 of SEQ ID NO: 1882329
guuucaggcgcucuguaaa

SEQ ID NO: 2112555 - RNA, 19 nt, Artificial Sequence
  Description of Artificial Sequence: Synthetic oligonucleotide
  Antisense strand to SEQ ID NO: 2112554
uuuacagagcgccugaaac

SEQ ID NO: 2112556 - RNA, 19 nt, Artificial Sequence
  Description of Artificial Sequence: Synthetic oligonucleotide
  Sense strand starting at position 1875 of SEQ ID NO: 1882329
gccggacuuguguaggaga

SEQ ID NO: 2112557 - RNA, 19 nt, Artificial Sequence
  Description of Artificial Sequence: Synthetic oligonucleotide
  Antisense strand to SEQ ID NO: 2112556
ucuccuacacaaguccggc

SEQ ID NO: 2112558 - RNA, 19 nt, Artificial Sequence
  Description of Artificial Sequence: Synthetic oligonucleotide
  Sense strand starting at position 2315 of SEQ ID NO: 1882329
cauccaguccuucggauuu

SEQ ID NO: 2112559 - RNA, 19 nt, Artificial Sequence
  Description of Artificial Sequence: Synthetic oligonucleotide
  Antisense strand to SEQ ID NO: 2112558
aaauccgaaggacuggaug

SEQ ID NO: 2112560 - RNA, 19 nt, Artificial Sequence
  Description of Artificial Sequence: Synthetic oligonucleotide
  Sense strand starting at position 2720 of SEQ ID NO: 1882329
agguaagucucagugauuc

SEQ ID NO: 2112561 - RNA, 19 nt, Artificial Sequence
  Description of Artificial Sequence: Synthetic oligonucleotide
  Antisense strand to SEQ ID NO: 2112560
gaaucacugagacuuaccu

SEQ ID NO: 2112562 - RNA, 19 nt, Artificial Sequence
  Description of Artificial Sequence: Synthetic oligonucleotide
  Sense strand starting at position 2722 of SEQ ID NO: 1882329
guaagucucagugauucca

SEQ ID NO: 2112563 - RNA, 19 nt, Artificial Sequence
  Description of Artificial Sequence: Synthetic oligonucleotide
  Antisense strand to SEQ ID NO: 2112562
uggaaucacugagacuuac

SEQ ID NO: 2112564 - RNA, 19 nt, Artificial Sequence
  Description of Artificial Sequence: Synthetic oligonucleotide
  Sense strand starting at position 2745 of SEQ ID NO: 1882329
aagucaggcuuauuagaaa

SEQ ID NO: 2112565 - RNA, 19 nt, Artificial Sequence
  Description of Artificial Sequence: Synthetic oligonucleotide
  Antisense strand to SEQ ID NO: 2112564
uuucuaauaagccugacuu

SEQ ID NO: 2112566 - RNA, 19 nt, Artificial Sequence
  Description of Artificial Sequence: Synthetic oligonucleotide
  Sense strand starting at position 2851 of SEQ ID NO: 1882329
cagaguucccucuguuaug

SEQ ID NO: 2112567 - RNA, 19 nt, Artificial Sequence
  Description of Artificial Sequence: Synthetic oligonucleotide
  Antisense strand to SEQ ID NO: 2112566
cauaacagagggaacucug

SEQ ID NO: 2112568 - RNA, 19 nt, Artificial Sequence
  Description of Artificial Sequence: Synthetic oligonucleotide
  Sense strand starting at position 2852 of SEQ ID NO: 1882329
agaguucccucuguuauga

SEQ ID NO: 2112569 - RNA, 19 nt, Artificial Sequence
  Description of Artificial Sequence: Synthetic oligonucleotide
  Antisense strand to SEQ ID NO: 2112568
ucauaacagagggaacucu

SEQ ID NO: 2112570 - RNA, 19 nt, Artificial Sequence
  Description of Artificial Sequence: Synthetic oligonucleotide
  Sense strand starting at position 2863 of SEQ ID NO: 1882329
uguuaugauuccuccuguu

SEQ ID NO: 2112571 - RNA, 19 nt, Artificial Sequence
  Description of Artificial Sequence: Synthetic oligonucleotide
  Antisense strand to SEQ ID NO: 2112570
aacaggaggaaucauaaca

SEQ ID NO: 2112572 - RNA, 19 nt, Artificial Sequence
  Description of Artificial Sequence: Synthetic oligonucleotide
  Sense strand starting at position 2911 of SEQ ID NO: 1882329
uucuauccagcuugagacu

SEQ ID NO: 2112573 - RNA, 19 nt, Artificial Sequence
  Description of Artificial Sequence: Synthetic oligonucleotide
  Antisense strand to SEQ ID NO: 2112572
agucucaagcuggauagaa

SEQ ID NO: 2112574 - RNA, 19 nt, Artificial Sequence
  Description of Artificial Sequence: Synthetic oligonucleotide
  Sense strand starting at position 2920 of SEQ ID NO: 1882329
gcuugagacucagcuucuu

SEQ ID NO: 2112575 - RNA, 19 nt, Artificial Sequence
  Description of Artificial Sequence: Synthetic oligonucleotide
  Antisense strand to SEQ ID NO: 2112574
aagaagcugagucucaagc

SEQ ID NO: 2112576 - RNA, 19 nt, Artificial Sequence
  Description of Artificial Sequence: Synthetic oligonucleotide
  Sense strand starting at position 3143 of SEQ ID NO: 1882329
uugagacugcagugauugu

SEQ ID NO: 2112577 - RNA, 19 nt, Artificial Sequence
  Description of Artificial Sequence: Synthetic oligonucleotide
  Antisense strand to SEQ ID NO: 2112576
acaaucacugcagucucaa

SEQ ID NO: 2112578 - RNA, 19 nt, Artificial Sequence
  Description of Artificial Sequence: Synthetic oligonucleotide
  Sense strand starting at position 3171 of SEQ ID NO: 1882329
cuccgucaugggugacaga

SEQ ID NO: 2112579 - RNA, 19 nt, Artificial Sequence
  Description of Artificial Sequence: Synthetic oligonucleotide
  Antisense strand to SEQ ID NO: 2112578
ucugucacccaugacggag

SEQ ID NO: 2112580 - RNA, 19 nt, Artificial Sequence
  Description of Artificial Sequence: Synthetic oligonucleotide
  Sense strand starting at position 3802 of SEQ ID NO: 1882329
cagccugacgcauaggaaa

SEQ ID NO: 2112581 - RNA, 19 nt, Artificial Sequence
  Description of Artificial Sequence: Synthetic oligonucleotide
  Antisense strand to SEQ ID NO: 2112580
uuuccuaugcgucaggcug

SEQ ID NO: 2112582 - RNA, 19 nt, Artificial Sequence
  Description of Artificial Sequence: Synthetic oligonucleotide
  Sense strand starting at position 3912 of SEQ ID NO: 1882329
cugggaguaugguuccaac

SEQ ID NO: 2112583 - RNA, 19 nt, Artificial Sequence
  Description of Artificial Sequence: Synthetic oligonucleotide
  Antisense strand to SEQ ID NO: 2112582
guuggaaccauacucccag

SEQ ID NO: 2112584 - RNA, 19 nt, Artificial Sequence
  Description of Artificial Sequence: Synthetic oligonucleotide
  Sense strand starting at position 46 of SEQ ID NO: 1882330
cacuaaucguuagggaaag

SEQ ID NO: 2112585 - RNA, 19 nt, Artificial Sequence
  Description of Artificial Sequence: Synthetic oligonucleotide
  Antisense strand to SEQ ID NO: 2112584
cuuucccuaacgauuagug

SEQ ID NO: 2112586 - RNA, 19 nt, Artificial Sequence
  Description of Artificial Sequence: Synthetic oligonucleotide
  Sense strand starting at position 879 of SEQ ID NO: 1882330
agaugaacuuaacauaugu

SEQ ID NO: 2112587 - RNA, 19 nt, Artificial Sequence
  Description of Artificial Sequence: Synthetic oligonucleotide
  Antisense strand to SEQ ID NO: 2112586
acauauguuaaguucaucu

SEQ ID NO: 2112588 - RNA, 19 nt, Artificial Sequence
  Description of Artificial Sequence: Synthetic oligonucleotide
  Sense strand starting at position 955 of SEQ ID NO: 1882330
ugagacaugccacauucuu

SEQ ID NO: 2112589 - RNA, 19 nt, Artificial Sequence
  Description of Artificial Sequence: Synthetic oligonucleotide
  Antisense strand to SEQ ID NO: 2112588
aagaauguggcaugucuca

SEQ ID NO: 2112590 - RNA, 19 nt, Artificial Sequence
  Description of Artificial Sequence: Synthetic oligonucleotide
  Sense strand starting at position 1020 of SEQ ID NO: 1882330
aauugucugcauuguguuu

SEQ ID NO: 2112591 - RNA, 19 nt, Artificial Sequence
  Description of Artificial Sequence: Synthetic oligonucleotide
  Antisense strand to SEQ ID NO: 2112590
aaacacaaugcagacaauu

SEQ ID NO: 2112592 - RNA, 19 nt, Artificial Sequence
  Description of Artificial Sequence: Synthetic oligonucleotide
  Sense strand starting at position 1025 of SEQ ID NO: 1882330
ucugcauuguguuuggauu

SEQ ID NO: 2112593 - RNA, 19 nt, Artificial Sequence
  Description of Artificial Sequence: Synthetic oligonucleotide
  Antisense strand to SEQ ID NO: 2112592
aauccaaacacaaugcaga

SEQ ID NO: 2112594 - RNA, 19 nt, Artificial Sequence
  Description of Artificial Sequence: Synthetic oligonucleotide
  Sense strand starting at position 1031 of SEQ ID NO: 1882330
uuguguuuggauuguaaca

SEQ ID NO: 2112595 - RNA, 19 nt, Artificial Sequence
  Description of Artificial Sequence: Synthetic oligonucleotide
  Antisense strand to SEQ ID NO: 2112594
uguuacaauccaaacacaa

SEQ ID NO: 2112596 - RNA, 19 nt, Artificial Sequence
  Description of Artificial Sequence: Synthetic oligonucleotide
  Sense strand starting at position 1155 of SEQ ID NO: 1882330
aucaaauauuacuaagggu

SEQ ID NO: 2112597 - RNA, 19 nt, Artificial Sequence
  Description of Artificial Sequence: Synthetic oligonucleotide
  Antisense strand to SEQ ID NO: 2112596
acccuuaguaauauuugau

SEQ ID NO: 2112598 - RNA, 19 nt, Artificial Sequence
  Description of Artificial Sequence: Synthetic oligonucleotide
  Sense strand starting at position 1479 of SEQ ID NO: 1882330
gaguuugauuugcauauga

SEQ ID NO: 2112599 - RNA, 19 nt, Artificial Sequence
  Description of Artificial Sequence: Synthetic oligonucleotide
  Antisense strand to SEQ ID NO: 2112598
ucauaugcaaaucaaacuc

SEQ ID NO: 2112600 - RNA, 19 nt, Artificial Sequence
  Description of Artificial Sequence: Synthetic oligonucleotide
  Sense strand starting at position 1487 of SEQ ID NO: 1882330
uuugcauaugauugaaaca

SEQ ID NO: 2112601 - RNA, 19 nt, Artificial Sequence
  Description of Artificial Sequence: Synthetic oligonucleotide
  Antisense strand to SEQ ID NO: 2112600
uguuucaaucauaugcaaa

SEQ ID NO: 2112602 - RNA, 19 nt, Artificial Sequence
  Description of Artificial Sequence: Synthetic oligonucleotide
  Sense strand starting at position 1571 of SEQ ID NO: 1882330
uacaaauuagugugugaug

SEQ ID NO: 2112603 - RNA, 19 nt, Artificial Sequence
  Description of Artificial Sequence: Synthetic oligonucleotide
  Antisense strand to SEQ ID NO: 2112602
caucacacacuaauuugua

SEQ ID NO: 2112604 - RNA, 19 nt, Artificial Sequence
  Description of Artificial Sequence: Synthetic oligonucleotide
  Sense strand starting at position 1572 of SEQ ID NO: 1882330
acaaauuagugugugauga

SEQ ID NO: 2112605 - RNA, 19 nt, Artificial Sequence
  Description of Artificial Sequence: Synthetic oligonucleotide
  Antisense strand to SEQ ID NO: 2112604
ucaucacacacuaauuugu

SEQ ID NO: 2112606 - RNA, 19 nt, Artificial Sequence
  Description of Artificial Sequence: Synthetic oligonucleotide
  Sense strand starting at position 1573 of SEQ ID NO: 1882330
caaauuagugugugaugaa

SEQ ID NO: 2112607 - RNA, 19 nt, Artificial Sequence
  Description of Artificial Sequence: Synthetic oligonucleotide
  Antisense strand to SEQ ID NO: 2112606
uucaucacacacuaauuug

SEQ ID NO: 2112608 - RNA, 19 nt, Artificial Sequence
  Description of Artificial Sequence: Synthetic oligonucleotide
  Sense strand starting at position 1574 of SEQ ID NO: 1882330
aaauuagugugugaugaag

SEQ ID NO: 2112609 - RNA, 19 nt, Artificial Sequence
  Description of Artificial Sequence: Synthetic oligonucleotide
  Antisense strand to SEQ ID NO: 2112608
cuucaucacacacuaauuu

SEQ ID NO: 2112610 - RNA, 19 nt, Artificial Sequence
  Description of Artificial Sequence: Synthetic oligonucleotide
  Sense strand starting at position 1598 of SEQ ID NO: 1882330
uuuguugaccagcgugaga

SEQ ID NO: 2112611 - RNA, 19 nt, Artificial Sequence
  Description of Artificial Sequence: Synthetic oligonucleotide
  Antisense strand to SEQ ID NO: 2112610
ucucacgcuggucaacaaa

SEQ ID NO: 2112612 - RNA, 19 nt, Artificial Sequence
  Description of Artificial Sequence: Synthetic oligonucleotide
  Sense strand starting at position 1600 of SEQ ID NO: 1882330
uguugaccagcgugagaaa

SEQ ID NO: 2112613 - RNA, 19 nt, Artificial Sequence
  Description of Artificial Sequence: Synthetic oligonucleotide
  Antisense strand to SEQ ID NO: 2112612
uuucucacgcuggucaaca

SEQ ID NO: 2112614 - RNA, 19 nt, Artificial Sequence
  Description of Artificial Sequence: Synthetic oligonucleotide
  Sense strand starting at position 1940 of SEQ ID NO: 1882330
ggaccucucugucccaauu

SEQ ID NO: 2112615 - RNA, 19 nt, Artificial Sequence
  Description of Artificial Sequence: Synthetic oligonucleotide
  Antisense strand to SEQ ID NO: 2112614
aauugggacagagaggucc

SEQ ID NO: 2112616 - RNA, 19 nt, Artificial Sequence
  Description of Artificial Sequence: Synthetic oligonucleotide
  Sense strand starting at position 2136 of SEQ ID NO: 1882330
ggagauucccaucacgcuu

SEQ ID NO: 2112617 - RNA, 19 nt, Artificial Sequence
  Description of Artificial Sequence: Synthetic oligonucleotide
  Antisense strand to SEQ ID NO: 2112616
aagcgugaugggaaucucc

SEQ ID NO: 2112618 - RNA, 19 nt, Artificial Sequence
  Description of Artificial Sequence: Synthetic oligonucleotide
  Sense strand starting at position 2176 of SEQ ID NO: 1882330
auaggagaccugcguguau

SEQ ID NO: 2112619 - RNA, 19 nt, Artificial Sequence
  Description of Artificial Sequence: Synthetic oligonucleotide
  Antisense strand to SEQ ID NO: 2112618
auacacgcaggucuccuau

SEQ ID NO: 2112620 - RNA, 19 nt, Artificial Sequence
  Description of Artificial Sequence: Synthetic oligonucleotide
  Sense strand starting at position 2178 of SEQ ID NO: 1882330
aggagaccugcguguauaa

SEQ ID NO: 2112621 - RNA, 19 nt, Artificial Sequence
  Description of Artificial Sequence: Synthetic oligonucleotide
  Antisense strand to SEQ ID NO: 2112620
uuauacacgcaggucuccu

SEQ ID NO: 2112622 - RNA, 19 nt, Artificial Sequence
  Description of Artificial Sequence: Synthetic oligonucleotide
  Sense strand starting at position 2180 of SEQ ID NO: 1882330
gagaccugcguguauaaug

SEQ ID NO: 2112623 - RNA, 19 nt, Artificial Sequence
  Description of Artificial Sequence: Synthetic oligonucleotide
  Antisense strand to SEQ ID NO: 2112622
cauuauacacgcaggucuc

SEQ ID NO: 2112624 - RNA, 19 nt, Artificial Sequence
  Description of Artificial Sequence: Synthetic oligonucleotide
  Sense strand starting at position 2187 of SEQ ID NO: 1882330
gcguguauaaugugagaaa

SEQ ID NO: 2112625 - RNA, 19 nt, Artificial Sequence
  Description of Artificial Sequence: Synthetic oligonucleotide
  Antisense strand to SEQ ID NO: 2112624
uuucucacauuauacacgc

SEQ ID NO: 2112626 - RNA, 19 nt, Artificial Sequence
  Description of Artificial Sequence: Synthetic oligonucleotide
  Sense strand starting at position 2190 of SEQ ID NO: 1882330
uguauaaugugagaaagcu

SEQ ID NO: 2112627 - RNA, 19 nt, Artificial Sequence
  Description of Artificial Sequence: Synthetic oligonucleotide
  Antisense strand to SEQ ID NO: 2112626
agcuuucucacauuauaca

SEQ ID NO: 2112628 - RNA, 19 nt, Artificial Sequence
  Description of Artificial Sequence: Synthetic oligonucleotide
  Sense strand starting at position 2238 of SEQ ID NO: 1882330
ggaaacauuugccacaucu

SEQ ID NO: 2112629 - RNA, 19 nt, Artificial Sequence
  Description of Artificial Sequence: Synthetic oligonucleotide
  Antisense strand to SEQ ID NO: 2112628
agauguggcaaauguuucc

SEQ ID NO: 2112630 - RNA, 19 nt, Artificial Sequence
  Description of Artificial Sequence: Synthetic oligonucleotide
  Sense strand starting at position 2255 of SEQ ID NO: 1882330
cuagccuuuccagauguau

SEQ ID NO: 2112631 - RNA, 19 nt, Artificial Sequence
  Description of Artificial Sequence: Synthetic oligonucleotide
  Antisense strand to SEQ ID NO: 2112630
auacaucuggaaaggcuag

SEQ ID NO: 2112632 - RNA, 19 nt, Artificial Sequence
  Description of Artificial Sequence: Synthetic oligonucleotide
  Sense strand starting at position 2276 of SEQ ID NO: 1882330
agguuaccgaccuaugaua

SEQ ID NO: 2112633 - RNA, 19 nt, Artificial Sequence
  Description of Artificial Sequence: Synthetic oligonucleotide
  Antisense strand to SEQ ID NO: 2112632
uaucauaggucgguaaccu

SEQ ID NO: 2112634 - RNA, 19 nt, Artificial Sequence
  Description of Artificial Sequence: Synthetic oligonucleotide
  Sense strand starting at position 2278 of SEQ ID NO: 1882330
guuaccgaccuaugauaga

SEQ ID NO: 2112635 - RNA, 19 nt, Artificial Sequence
  Description of Artificial Sequence: Synthetic oligonucleotide
  Antisense strand to SEQ ID NO: 2112634
ucuaucauaggucgguaac

SEQ ID NO: 2112636 - RNA, 19 nt, Artificial Sequence
  Description of Artificial Sequence: Synthetic oligonucleotide
  Sense strand starting at position 2341 of SEQ ID NO: 1882330
guagguaaucaguauguaa

SEQ ID NO: 2112637 - RNA, 19 nt, Artificial Sequence
  Description of Artificial Sequence: Synthetic oligonucleotide
  Antisense strand to SEQ ID NO: 2112636
uuacauacugauuaccuac

SEQ ID NO: 2112638 - RNA, 19 nt, Artificial Sequence
  Description of Artificial Sequence: Synthetic oligonucleotide
  Sense strand starting at position 2343 of SEQ ID NO: 1882330
agguaaucaguauguaauu

SEQ ID NO: 2112639 - RNA, 19 nt, Artificial Sequence
  Description of Artificial Sequence: Synthetic oligonucleotide
  Antisense strand to SEQ ID NO: 2112638
aauuacauacugauuaccu

SEQ ID NO: 2112640 - RNA, 19 nt, Artificial Sequence
  Description of Artificial Sequence: Synthetic oligonucleotide
  Sense strand starting at position 2344 of SEQ ID NO: 1882330
gguaaucaguauguaauug

SEQ ID NO: 2112641 - RNA, 19 nt, Artificial Sequence
  Description of Artificial Sequence: Synthetic oligonucleotide
  Antisense strand to SEQ ID NO: 2112640
caauuacauacugauuacc

SEQ ID NO: 2112642 - RNA, 19 nt, Artificial Sequence
  Description of Artificial Sequence: Synthetic oligonucleotide
  Sense strand starting at position 2345 of SEQ ID NO: 1882330
guaaucaguauguaauugu

SEQ ID NO: 2112643 - RNA, 19 nt, Artificial Sequence
  Description of Artificial Sequence: Synthetic oligonucleotide
  Antisense strand to SEQ ID NO: 2112642
acaauuacauacugauuac

SEQ ID NO: 2112644 - RNA, 19 nt, Artificial Sequence
  Description of Artificial Sequence: Synthetic oligonucleotide
  Sense strand starting at position 2356 of SEQ ID NO: 1882330
guaauuguaucaguggauu

SEQ ID NO: 2112645 - RNA, 19 nt, Artificial Sequence
  Description of Artificial Sequence: Synthetic oligonucleotide
  Antisense strand to SEQ ID NO: 2112644
aauccacugauacaauuac

SEQ ID NO: 2112646 - RNA, 19 nt, Artificial Sequence
  Description of Artificial Sequence: Synthetic oligonucleotide
  Sense strand starting at position 2359 of SEQ ID NO: 1882330
auuguaucaguggauuaca

SEQ ID NO: 2112647 - RNA, 19 nt, Artificial Sequence
  Description of Artificial Sequence: Synthetic oligonucleotide
  Antisense strand to SEQ ID NO: 2112646
uguaauccacugauacaau

SEQ ID NO: 2112648 - RNA, 19 nt, Artificial Sequence
  Description of Artificial Sequence: Synthetic oligonucleotide
  Sense strand starting at position 2386 of SEQ ID NO: 1882330
agauuauauucugagaauc

SEQ ID NO: 2112649 - RNA, 19 nt, Artificial Sequence
  Description of Artificial Sequence: Synthetic oligonucleotide
  Antisense strand to SEQ ID NO: 2112648
gauucucagaauauaaucu

SEQ ID NO: 2112650 - RNA, 19 nt, Artificial Sequence
  Description of Artificial Sequence: Synthetic oligonucleotide
  Sense strand starting at position 2611 of SEQ ID NO: 1882330
gugaaacugucucuucuga

SEQ ID NO: 2112651 - RNA, 19 nt, Artificial Sequence
  Description of Artificial Sequence: Synthetic oligonucleotide
  Antisense strand to SEQ ID NO: 2112650
ucagaagagacaguuucac

SEQ ID NO: 2112652 - RNA, 19 nt, Artificial Sequence
  Description of Artificial Sequence: Synthetic oligonucleotide
  Sense strand starting at position 2613 of SEQ ID NO: 1882330
gaaacugucucuucugaug

SEQ ID NO: 2112653 - RNA, 19 nt, Artificial Sequence
  Description of Artificial Sequence: Synthetic oligonucleotide
  Antisense strand to SEQ ID NO: 2112652
caucagaagagacaguuuc

SEQ ID NO: 2112654 - RNA, 19 nt, Artificial Sequence
  Description of Artificial Sequence: Synthetic oligonucleotide
  Sense strand starting at position 2616 of SEQ ID NO: 1882330
acugucucuucugaugaca

SEQ ID NO: 2112655 - RNA, 19 nt, Artificial Sequence
  Description of Artificial Sequence: Synthetic oligonucleotide
  Antisense strand to SEQ ID NO: 2112654
ugucaucagaagagacagu

SEQ ID NO: 2112656 - RNA, 19 nt, Artificial Sequence
  Description of Artificial Sequence: Synthetic oligonucleotide
  Sense strand starting at position 2845 of SEQ ID NO: 1882330
gugaaagauuuguacacuu

SEQ ID NO: 2112657 - RNA, 19 nt, Artificial Sequence
  Description of Artificial Sequence: Synthetic oligonucleotide
  Antisense strand to SEQ ID NO: 2112656
aaguguacaaaucuuucac

SEQ ID NO: 2112658 - RNA, 19 nt, Artificial Sequence
  Description of Artificial Sequence: Synthetic oligonucleotide
  Sense strand starting at position 3154 of SEQ ID NO: 1882330
gugaaccuauagucaucaa

SEQ ID NO: 2112659 - RNA, 19 nt, Artificial Sequence
  Description of Artificial Sequence: Synthetic oligonucleotide
  Antisense strand to SEQ ID NO: 2112658
uugaugacuauagguucac

SEQ ID NO: 2112660 - RNA, 19 nt, Artificial Sequence
  Description of Artificial Sequence: Synthetic oligonucleotide
  Sense strand starting at position 3334 of SEQ ID NO: 1882330
auauccacauguugaagaa

SEQ ID NO: 2112661 - RNA, 19 nt, Artificial Sequence
  Description of Artificial Sequence: Synthetic oligonucleotide
  Antisense strand to SEQ ID NO: 2112660
uucuucaacauguggauau

SEQ ID NO: 2112662 - RNA, 19 nt, Artificial Sequence
  Description of Artificial Sequence: Synthetic oligonucleotide
  Sense strand starting at position 3341 of SEQ ID NO: 1882330
cauguugaagaacgaaauu

SEQ ID NO: 2112663 - RNA, 19 nt, Artificial Sequence
  Description of Artificial Sequence: Synthetic oligonucleotide
  Antisense strand to SEQ ID NO: 2112662
aauuucguucuucaacaug

SEQ ID NO: 2112664 - RNA, 19 nt, Artificial Sequence
  Description of Artificial Sequence: Synthetic oligonucleotide
  Sense strand starting at position 114 of SEQ ID NO: 1882331
ccaguauuaucagccauca

SEQ ID NO: 2112665 - RNA, 19 nt, Artificial Sequence
  Description of Artificial Sequence: Synthetic oligonucleotide
  Antisense strand to SEQ ID NO: 2112664
ugauggcugauaauacugg

SEQ ID NO: 2112666 - RNA, 19 nt, Artificial Sequence
  Description of Artificial Sequence: Synthetic oligonucleotide
  Sense strand starting at position 176 of SEQ ID NO: 1882331
cuaauaaagccuuggagac

SEQ ID NO: 2112667 - RNA, 19 nt, Artificial Sequence
  Description of Artificial Sequence: Synthetic oligonucleotide
  Antisense strand to SEQ ID NO: 2112666
gucuccaaggcuuuauuag

SEQ ID NO: 2112668 - RNA, 19 nt, Artificial Sequence
  Description of Artificial Sequence: Synthetic oligonucleotide
  Sense strand starting at position 235 of SEQ ID NO: 1882331
cugaaaugcugcuuugaau

SEQ ID NO: 2112669 - RNA, 19 nt, Artificial Sequence
  Description of Artificial Sequence: Synthetic oligonucleotide
  Antisense strand to SEQ ID NO: 2112668
auucaaagcagcauuucag

SEQ ID NO: 2112670 - RNA, 19 nt, Artificial Sequence
  Description of Artificial Sequence: Synthetic oligonucleotide
  Sense strand starting at position 267 of SEQ ID NO: 1882331
gaugcuuggugagcagaaa

SEQ ID NO: 2112671 - RNA, 19 nt, Artificial Sequence
  Description of Artificial Sequence: Synthetic oligonucleotide
  Antisense strand to SEQ ID NO: 2112670
uuucugcucaccaagcauc

SEQ ID NO: 2112672 - RNA, 19 nt, Artificial Sequence
  Description of Artificial Sequence: Synthetic oligonucleotide
  Sense strand starting at position 268 of SEQ ID NO: 1882331
augcuuggugagcagaaau

SEQ ID NO: 2112673 - RNA, 19 nt, Artificial Sequence
  Description of Artificial Sequence: Synthetic oligonucleotide
  Antisense strand to SEQ ID NO: 2112672
auuucugcucaccaagcau

SEQ ID NO: 2112674 - RNA, 19 nt, Artificial Sequence
  Description of Artificial Sequence: Synthetic oligonucleotide
  Sense strand starting at position 612 of SEQ ID NO: 1882331
ucuucuucuccacaguuga

SEQ ID NO: 2112675 - RNA, 19 nt, Artificial Sequence
  Description of Artificial Sequence: Synthetic oligonucleotide
  Antisense strand to SEQ ID NO: 2112674
ucaacuguggagaagaaga

SEQ ID NO: 2112676 - RNA, 19 nt, Artificial Sequence
  Description of Artificial Sequence: Synthetic oligonucleotide
  Sense strand starting at position 692 of SEQ ID NO: 1882331
gcgauuuccacauggaugu

SEQ ID NO: 2112677 - RNA, 19 nt, Artificial Sequence
  Description of Artificial Sequence: Synthetic oligonucleotide
  Antisense strand to SEQ ID NO: 2112676
acauccauguggaaaucgc

SEQ ID NO: 2112678 - RNA, 19 nt, Artificial Sequence
  Description of Artificial Sequence: Synthetic oligonucleotide
  Sense strand starting at position 940 of SEQ ID NO: 1882331
cagagagucacgugacuuu

SEQ ID NO: 2112679 - RNA, 19 nt, Artificial Sequence
  Description of Artificial Sequence: Synthetic oligonucleotide
  Antisense strand to SEQ ID NO: 2112678
aaagucacgugacucucug

SEQ ID NO: 2112680 - RNA, 19 nt, Artificial Sequence
  Description of Artificial Sequence: Synthetic oligonucleotide
  Sense strand starting at position 1547 of SEQ ID NO: 1882331
cagauaaugcacggaacuu

SEQ ID NO: 2112681 - RNA, 19 nt, Artificial Sequence
  Description of Artificial Sequence: Synthetic oligonucleotide
  Antisense strand to SEQ ID NO: 2112680
aaguuccgugcauuaucug

SEQ ID NO: 2112682 - RNA, 19 nt, Artificial Sequence
  Description of Artificial Sequence: Synthetic oligonucleotide
  Sense strand starting at position 1870 of SEQ ID NO: 1882331
agcaguguaagagaaguau

SEQ ID NO: 2112683 - RNA, 19 nt, Artificial Sequence
  Description of Artificial Sequence: Synthetic oligonucleotide
  Antisense strand to SEQ ID NO: 2112682
auacuucucuuacacugcu

SEQ ID NO: 2112684 - RNA, 19 nt, Artificial Sequence
  Description of Artificial Sequence: Synthetic oligonucleotide
  Sense strand starting at position 1874 of SEQ ID NO: 1882331
guguaagagaaguaugcau

SEQ ID NO: 2112685 - RNA, 19 nt, Artificial Sequence
  Description of Artificial Sequence: Synthetic oligonucleotide
  Antisense strand to SEQ ID NO: 2112684
augcauacuucucuuacac

SEQ ID NO: 2112686 - RNA, 19 nt, Artificial Sequence
  Description of Artificial Sequence: Synthetic oligonucleotide
  Sense strand starting at position 1876 of SEQ ID NO: 1882331
guaagagaaguaugcaugu

SEQ ID NO: 2112687 - RNA, 19 nt, Artificial Sequence
  Description of Artificial Sequence: Synthetic oligonucleotide
  Antisense strand to SEQ ID NO: 2112686
acaugcauacuucucuuac

SEQ ID NO: 2112688 - RNA, 19 nt, Artificial Sequence
  Description of Artificial Sequence: Synthetic oligonucleotide
  Sense strand starting at position 2066 of SEQ ID NO: 1882331
agaucuucuugccuuggaa

SEQ ID NO: 2112689 - RNA, 19 nt, Artificial Sequence
  Description of Artificial Sequence: Synthetic oligonucleotide
  Antisense strand to SEQ ID NO: 2112688
uuccaaggcaagaagaucu

SEQ ID NO: 2112690 - RNA, 19 nt, Artificial Sequence
  Description of Artificial Sequence: Synthetic oligonucleotide
  Sense strand starting at position 2068 of SEQ ID NO: 1882331
aucuucuugccuuggaaag

SEQ ID NO: 2112691 - RNA, 19 nt, Artificial Sequence
  Description of Artificial Sequence: Synthetic oligonucleotide
  Antisense strand to SEQ ID NO: 2112690
cuuuccaaggcaagaagau

SEQ ID NO: 2112692 - RNA, 19 nt, Artificial Sequence
  Description of Artificial Sequence: Synthetic oligonucleotide
  Sense strand starting at position 2121 of SEQ ID NO: 1882331
gcagaaccauuguuaauua

SEQ ID NO: 2112693 - RNA, 19 nt, Artificial Sequence
  Description of Artificial Sequence: Synthetic oligonucleotide
  Antisense strand to SEQ ID NO: 2112692
uaauuaacaaugguucugc

SEQ ID NO: 2112694 - RNA, 19 nt, Artificial Sequence
  Description of Artificial Sequence: Synthetic oligonucleotide
  Sense strand starting at position 2381 of SEQ ID NO: 1882331
guuugaguaacggagaagu

SEQ ID NO: 2112695 - RNA, 19 nt, Artificial Sequence
  Description of Artificial Sequence: Synthetic oligonucleotide
  Antisense strand to SEQ ID NO: 2112694
acuucuccguuacucaaac

SEQ ID NO: 2112696 - RNA, 19 nt, Artificial Sequence
  Description of Artificial Sequence: Synthetic oligonucleotide
  Sense strand starting at position 2391 of SEQ ID NO: 1882331
cggagaaguucuguggaau

SEQ ID NO: 2112697 - RNA, 19 nt, Artificial Sequence
  Description of Artificial Sequence: Synthetic oligonucleotide
  Antisense strand to SEQ ID NO: 2112696
auuccacagaacuucuccg

SEQ ID NO: 2112698 - RNA, 19 nt, Artificial Sequence
  Description of Artificial Sequence: Synthetic oligonucleotide
  Sense strand starting at position 2392 of SEQ ID NO: 1882331
ggagaaguucuguggaauc

SEQ ID NO: 2112699 - RNA, 19 nt, Artificial Sequence
  Description of Artificial Sequence: Synthetic oligonucleotide
  Antisense strand to SEQ ID NO: 2112698
gauuccacagaacuucucc

SEQ ID NO: 2112700 - RNA, 19 nt, Artificial Sequence
  Description of Artificial Sequence: Synthetic oligonucleotide
  Sense strand starting at position 2394 of SEQ ID NO: 1882331
agaaguucuguggaauccu

SEQ ID NO: 2112701 - RNA, 19 nt, Artificial Sequence
  Description of Artificial Sequence: Synthetic oligonucleotide
  Antisense strand to SEQ ID NO: 2112700
aggauuccacagaacuucu

SEQ ID NO: 2112702 - RNA, 19 nt, Artificial Sequence
  Description of Artificial Sequence: Synthetic oligonucleotide
  Sense strand starting at position 2507 of SEQ ID NO: 1882331
cuuauaacguaucugaaac

SEQ ID NO: 2112703 - RNA, 19 nt, Artificial Sequence
  Description of Artificial Sequence: Synthetic oligonucleotide
  Antisense strand to SEQ ID NO: 2112702
guuucagauacguuauaag

SEQ ID NO: 2112704 - RNA, 19 nt, Artificial Sequence
  Description of Artificial Sequence: Synthetic oligonucleotide
  Sense strand starting at position 2553 of SEQ ID NO: 1882331
ugguccaagaccuggaaau

SEQ ID NO: 2112705 - RNA, 19 nt, Artificial Sequence
  Description of Artificial Sequence: Synthetic oligonucleotide
  Antisense strand to SEQ ID NO: 2112704
auuuccaggucuuggacca

SEQ ID NO: 2112706 - RNA, 19 nt, Artificial Sequence
  Description of Artificial Sequence: Synthetic oligonucleotide
  Sense strand starting at position 2636 of SEQ ID NO: 1882331
augagaucacacuggcgua

SEQ ID NO: 2112707 - RNA, 19 nt, Artificial Sequence
  Description of Artificial Sequence: Synthetic oligonucleotide
  Antisense strand to SEQ ID NO: 2112706
uacgccagugugaucucau

SEQ ID NO: 2112708 - RNA, 19 nt, Artificial Sequence
  Description of Artificial Sequence: Synthetic oligonucleotide
  Sense strand starting at position 2915 of SEQ ID NO: 1882331
ccugaauggcugugggauc

SEQ ID NO: 2112709 - RNA, 19 nt, Artificial Sequence
  Description of Artificial Sequence: Synthetic oligonucleotide
  Antisense strand to SEQ ID NO: 2112708
gaucccacagccauucagg

SEQ ID NO: 2112710 - RNA, 19 nt, Artificial Sequence
  Description of Artificial Sequence: Synthetic oligonucleotide
  Sense strand starting at position 2999 of SEQ ID NO: 1882331
ggaauaaggucaucuuuga

SEQ ID NO: 2112711 - RNA, 19 nt, Artificial Sequence
  Description of Artificial Sequence: Synthetic oligonucleotide
  Antisense strand to SEQ ID NO: 2112710
ucaaagaugaccuuauucc

SEQ ID NO: 2112712 - RNA, 19 nt, Artificial Sequence
  Description of Artificial Sequence: Synthetic oligonucleotide
  Sense strand starting at position 3029 of SEQ ID NO: 1882331
aucaucaagcauggugauu

SEQ ID NO: 2112713 - RNA, 19 nt, Artificial Sequence
  Description of Artificial Sequence: Synthetic oligonucleotide
  Antisense strand to SEQ ID NO: 2112712
aaucaccaugcuugaugau

SEQ ID NO: 2112714 - RNA, 19 nt, Artificial Sequence
  Description of Artificial Sequence: Synthetic oligonucleotide
  Sense strand starting at position 3205 of SEQ ID NO: 1882331
aggaaagguauauguguua

SEQ ID NO: 2112715 - RNA, 19 nt, Artificial Sequence
  Description of Artificial Sequence: Synthetic oligonucleotide
  Antisense strand to SEQ ID NO: 2112714
uaacacauauaccuuuccu

SEQ ID NO: 2112716 - RNA, 19 nt, Artificial Sequence
  Description of Artificial Sequence: Synthetic oligonucleotide
  Sense strand starting at position 3442 of SEQ ID NO: 1882331
acaccuuaucaaugguguu

SEQ ID NO: 2112717 - RNA, 19 nt, Artificial Sequence
  Description of Artificial Sequence: Synthetic oligonucleotide
  Antisense strand to SEQ ID NO: 2112716
aacaccauugauaaggugu

SEQ ID NO: 2112718 - RNA, 19 nt, Artificial Sequence
  Description of Artificial Sequence: Synthetic oligonucleotide
  Sense strand starting at position 3513 of SEQ ID NO: 1882331
cucccucuuccauagguuu

SEQ ID NO: 2112719 - RNA, 19 nt, Artificial Sequence
  Description of Artificial Sequence: Synthetic oligonucleotide
  Antisense strand to SEQ ID NO: 2112718
aaaccuauggaagagggag

SEQ ID NO: 2112720 - RNA, 19 nt, Artificial Sequence
  Description of Artificial Sequence: Synthetic oligonucleotide
  Sense strand starting at position 3599 of SEQ ID NO: 1882331
ugugaaauuuccuagggaa

SEQ ID NO: 2112721 - RNA, 19 nt, Artificial Sequence
  Description of Artificial Sequence: Synthetic oligonucleotide
  Antisense strand to SEQ ID NO: 2112720
uucccuaggaaauuucaca

SEQ ID NO: 2112722 - RNA, 19 nt, Artificial Sequence
  Description of Artificial Sequence: Synthetic oligonucleotide
  Sense strand starting at position 3602 of SEQ ID NO: 1882331
gaaauuuccuagggaaugu

SEQ ID NO: 2112723 - RNA, 19 nt, Artificial Sequence
  Description of Artificial Sequence: Synthetic oligonucleotide
  Antisense strand to SEQ ID NO: 2112722
acauucccuaggaaauuuc

SEQ ID NO: 2112724 - RNA, 19 nt, Artificial Sequence
  Description of Artificial Sequence: Synthetic oligonucleotide
  Sense strand starting at position 3678 of SEQ ID NO: 1882331
ccuacuaagggcuaguaaa

SEQ ID NO: 2112725 - RNA, 19 nt, Artificial Sequence
  Description of Artificial Sequence: Synthetic oligonucleotide
  Antisense strand to SEQ ID NO: 2112724
uuuacuagcccuuaguagg

SEQ ID NO: 2112726 - RNA, 19 nt, Artificial Sequence
  Description of Artificial Sequence: Synthetic oligonucleotide
  Sense strand starting at position 3712 of SEQ ID NO: 1882331
uacaguguuccacacugga

SEQ ID NO: 2112727 - RNA, 19 nt, Artificial Sequence
  Description of Artificial Sequence: Synthetic oligonucleotide
  Antisense strand to SEQ ID NO: 2112726
uccaguguggaacacugua

SEQ ID NO: 2112728 - RNA, 19 nt, Artificial Sequence
  Description of Artificial Sequence: Synthetic oligonucleotide
  Sense strand starting at position 3835 of SEQ ID NO: 1882331
gguggaaacuucuuuccuu

SEQ ID NO: 2112729 - RNA, 19 nt, Artificial Sequence
  Description of Artificial Sequence: Synthetic oligonucleotide
  Antisense strand to SEQ ID NO: 2112728
aaggaaagaaguuuccacc

SEQ ID NO: 2112730 - RNA, 19 nt, Artificial Sequence
  Description of Artificial Sequence: Synthetic oligonucleotide
  Sense strand starting at position 3836 of SEQ ID NO: 1882331
guggaaacuucuuuccuug

SEQ ID NO: 2112731 - RNA, 19 nt, Artificial Sequence
  Description of Artificial Sequence: Synthetic oligonucleotide
  Antisense strand to SEQ ID NO: 2112730
caaggaaagaaguuuccac

SEQ ID NO: 2112732 - RNA, 19 nt, Artificial Sequence
  Description of Artificial Sequence: Synthetic oligonucleotide
  Sense strand starting at position 3848 of SEQ ID NO: 1882331
uuccuugucuacuucuaga

SEQ ID NO: 2112733 - RNA, 19 nt, Artificial Sequence
  Description of Artificial Sequence: Synthetic oligonucleotide
  Antisense strand to SEQ ID NO: 2112732
ucuagaaguagacaaggaa

SEQ ID NO: 2112734 - RNA, 19 nt, Artificial Sequence
  Description of Artificial Sequence: Synthetic oligonucleotide
  Sense strand starting at position 3874 of SEQ ID NO: 1882331
uccuucuacuaguugauua

SEQ ID NO: 2112735 - RNA, 19 nt, Artificial Sequence
  Description of Artificial Sequence: Synthetic oligonucleotide
  Antisense strand to SEQ ID NO: 2112734
uaaucaacuaguagaagga

SEQ ID NO: 2112736 - RNA, 19 nt, Artificial Sequence
  Description of Artificial Sequence: Synthetic oligonucleotide
  Sense strand starting at position 3882 of SEQ ID NO: 1882331
cuaguugauuaugcuuaaa

SEQ ID NO: 2112737 - RNA, 19 nt, Artificial Sequence
  Description of Artificial Sequence: Synthetic oligonucleotide
  Antisense strand to SEQ ID NO: 2112736
uuuaagcauaaucaacuag

SEQ ID NO: 2112738 - RNA, 19 nt, Artificial Sequence
  Description of Artificial Sequence: Synthetic oligonucleotide
  Sense strand starting at position 3884 of SEQ ID NO: 1882331
aguugauuaugcuuaaaga

SEQ ID NO: 2112739 - RNA, 19 nt, Artificial Sequence
  Description of Artificial Sequence: Synthetic oligonucleotide
  Antisense strand to SEQ ID NO: 2112738
ucuuuaagcauaaucaacu

SEQ ID NO: 2112740 - RNA, 19 nt, Artificial Sequence
  Description of Artificial Sequence: Synthetic oligonucleotide
  Sense strand starting at position 3885 of SEQ ID NO: 1882331
guugauuaugcuuaaagau

SEQ ID NO: 2112741 - RNA, 19 nt, Artificial Sequence
  Description of Artificial Sequence: Synthetic oligonucleotide
  Antisense strand to SEQ ID NO: 2112740
aucuuuaagcauaaucaac

SEQ ID NO: 2112742 - RNA, 19 nt, Artificial Sequence
  Description of Artificial Sequence: Synthetic oligonucleotide
  Sense strand starting at position 3922 of SEQ ID NO: 1882331
gcagacuugccucuguguu

SEQ ID NO: 2112743 - RNA, 19 nt, Artificial Sequence
  Description of Artificial Sequence: Synthetic oligonucleotide
  Antisense strand to SEQ ID NO: 2112742
aacacagaggcaagucugc

SEQ ID NO: 2112744 - RNA, 19 nt, Artificial Sequence
  Description of Artificial Sequence: Synthetic oligonucleotide
  Sense strand starting at position 165 of SEQ ID NO: 1882332
auugaacacguuuaguuua

SEQ ID NO: 2112745 - RNA, 19 nt, Artificial Sequence
  Description of Artificial Sequence: Synthetic oligonucleotide
  Antisense strand to SEQ ID NO: 2112744
uaaacuaaacguguucaau

SEQ ID NO: 2112746 - RNA, 19 nt, Artificial Sequence
  Description of Artificial Sequence: Synthetic oligonucleotide
  Sense strand starting at position 168 of SEQ ID NO: 1882332
gaacacguuuaguuuauuu

SEQ ID NO: 2112747 - RNA, 19 nt, Artificial Sequence
  Description of Artificial Sequence: Synthetic oligonucleotide
  Antisense strand to SEQ ID NO: 2112746
aaauaaacuaaacguguuc

SEQ ID NO: 2112748 - RNA, 19 nt, Artificial Sequence
  Description of Artificial Sequence: Synthetic oligonucleotide
  Sense strand starting at position 179 of SEQ ID NO: 1882332
guuuauuucgccuaacuug

SEQ ID NO: 2112749 - RNA, 19 nt, Artificial Sequence
  Description of Artificial Sequence: Synthetic oligonucleotide
  Antisense strand to SEQ ID NO: 2112748
caaguuaggcgaaauaaac

SEQ ID NO: 2112750 - RNA, 19 nt, Artificial Sequence
  Description of Artificial Sequence: Synthetic oligonucleotide
  Sense strand starting at position 576 of SEQ ID NO: 1882332
ggguaugauauagguaucu

SEQ ID NO: 2112751 - RNA, 19 nt, Artificial Sequence
  Description of Artificial Sequence: Synthetic oligonucleotide
  Antisense strand to SEQ ID NO: 2112750
agauaccuauaucauaccc

SEQ ID NO: 2112752 - RNA, 19 nt, Artificial Sequence
  Description of Artificial Sequence: Synthetic oligonucleotide
  Sense strand starting at position 585 of SEQ ID NO: 1882332
auagguaucuuuguuuaga

SEQ ID NO: 2112753 - RNA, 19 nt, Artificial Sequence
  Description of Artificial Sequence: Synthetic oligonucleotide
  Antisense strand to SEQ ID NO: 2112752
ucuaaacaaagauaccuau

SEQ ID NO: 2112754 - RNA, 19 nt, Artificial Sequence
  Description of Artificial Sequence: Synthetic oligonucleotide
  Sense strand starting at position 587 of SEQ ID NO: 1882332
agguaucuuuguuuagaga

SEQ ID NO: 2112755 - RNA, 19 nt, Artificial Sequence
  Description of Artificial Sequence: Synthetic oligonucleotide
  Antisense strand to SEQ ID NO: 2112754
ucucuaaacaaagauaccu

SEQ ID NO: 2112756 - RNA, 19 nt, Artificial Sequence
  Description of Artificial Sequence: Synthetic oligonucleotide
  Sense strand starting at position 588 of SEQ ID NO: 1882332
gguaucuuuguuuagagaa

SEQ ID NO: 2112757 - RNA, 19 nt, Artificial Sequence
  Description of Artificial Sequence: Synthetic oligonucleotide
  Antisense strand to SEQ ID NO: 2112756
uucucuaaacaaagauacc

SEQ ID NO: 2112758 - RNA, 19 nt, Artificial Sequence
  Description of Artificial Sequence: Synthetic oligonucleotide
  Sense strand starting at position 603 of SEQ ID NO: 1882332
agaagaacaugcucaucua

SEQ ID NO: 2112759 - RNA, 19 nt, Artificial Sequence
  Description of Artificial Sequence: Synthetic oligonucleotide
  Antisense strand to SEQ ID NO: 2112758
uagaugagcauguucuucu

SEQ ID NO: 2112760 - RNA, 19 nt, Artificial Sequence
  Description of Artificial Sequence: Synthetic oligonucleotide
  Sense strand starting at position 665 of SEQ ID NO: 1882332
aggagauagcuguauugca

SEQ ID NO: 2112761 - RNA, 19 nt, Artificial Sequence
  Description of Artificial Sequence: Synthetic oligonucleotide
  Antisense strand to SEQ ID NO: 2112760
ugcaauacagcuaucuccu

SEQ ID NO: 2112762 - RNA, 19 nt, Artificial Sequence
  Description of Artificial Sequence: Synthetic oligonucleotide
  Sense strand starting at position 805 of SEQ ID NO: 1882332
augcauaguaguuagggau

SEQ ID NO: 2112763 - RNA, 19 nt, Artificial Sequence
  Description of Artificial Sequence: Synthetic oligonucleotide
  Antisense strand to SEQ ID NO: 2112762
aucccuaacuacuaugcau

SEQ ID NO: 2112764 - RNA, 19 nt, Artificial Sequence
  Description of Artificial Sequence: Synthetic oligonucleotide
  Sense strand starting at position 936 of SEQ ID NO: 1882332
aauugaaggcaaugugaca

SEQ ID NO: 2112765 - RNA, 19 nt, Artificial Sequence
  Description of Artificial Sequence: Synthetic oligonucleotide
  Antisense strand to SEQ ID NO: 2112764
ugucacauugccuucaauu

SEQ ID NO: 2112766 - RNA, 19 nt, Artificial Sequence
  Description of Artificial Sequence: Synthetic oligonucleotide
  Sense strand starting at position 950 of SEQ ID NO: 1882332
ugacaacugcaguaaaugu

SEQ ID NO: 2112767 - RNA, 19 nt, Artificial Sequence
  Description of Artificial Sequence: Synthetic oligonucleotide
  Antisense strand to SEQ ID NO: 2112766
acauuuacugcaguuguca

SEQ ID NO: 2112768 - RNA, 19 nt, Artificial Sequence
  Description of Artificial Sequence: Synthetic oligonucleotide
  Sense strand starting at position 1034 of SEQ ID NO: 1882332
ucacauugaugauauuuga

SEQ ID NO: 2112769 - RNA, 19 nt, Artificial Sequence
  Description of Artificial Sequence: Synthetic oligonucleotide
  Antisense strand to SEQ ID NO: 2112768
ucaaauaucaucaauguga

SEQ ID NO: 2112770 - RNA, 19 nt, Artificial Sequence
  Description of Artificial Sequence: Synthetic oligonucleotide
  Sense strand starting at position 1146 of SEQ ID NO: 1882332
cacagaaguguuuauaagu

SEQ ID NO: 2112771 - RNA, 19 nt, Artificial Sequence
  Description of Artificial Sequence: Synthetic oligonucleotide
  Antisense strand to SEQ ID NO: 2112770
acuuauaaacacuucugug

SEQ ID NO: 2112772 - RNA, 19 nt, Artificial Sequence
  Description of Artificial Sequence: Synthetic oligonucleotide
  Sense strand starting at position 1165 of SEQ ID NO: 1882332
gugacugagucaguaggau

SEQ ID NO: 2112773 - RNA, 19 nt, Artificial Sequence
  Description of Artificial Sequence: Synthetic oligonucleotide
  Antisense strand to SEQ ID NO: 2112772
auccuacugacucagucac

SEQ ID NO: 2112774 - RNA, 19 nt, Artificial Sequence
  Description of Artificial Sequence: Synthetic oligonucleotide
  Sense strand starting at position 1256 of SEQ ID NO: 1882332
ugagccauccuguaagaag

SEQ ID NO: 2112775 - RNA, 19 nt, Artificial Sequence
  Description of Artificial Sequence: Synthetic oligonucleotide
  Antisense strand to SEQ ID NO: 2112774
cuucuuacaggauggcuca

SEQ ID NO: 2112776 - RNA, 19 nt, Artificial Sequence
  Description of Artificial Sequence: Synthetic oligonucleotide
  Sense strand starting at position 1399 of SEQ ID NO: 1882332
ugaguauuacagugauuga

SEQ ID NO: 2112777 - RNA, 19 nt, Artificial Sequence
  Description of Artificial Sequence: Synthetic oligonucleotide
  Antisense strand to SEQ ID NO: 2112776
ucaaucacuguaauacuca

SEQ ID NO: 2112778 - RNA, 19 nt, Artificial Sequence
  Description of Artificial Sequence: Synthetic oligonucleotide
  Sense strand starting at position 1402 of SEQ ID NO: 1882332
guauuacagugauugauua

SEQ ID NO: 2112779 - RNA, 19 nt, Artificial Sequence
  Description of Artificial Sequence: Synthetic oligonucleotide
  Antisense strand to SEQ ID NO: 2112778
uaaucaaucacuguaauac

SEQ ID NO: 2112780 - RNA, 19 nt, Artificial Sequence
  Description of Artificial Sequence: Synthetic oligonucleotide
  Sense strand starting at position 1406 of SEQ ID NO: 1882332
uacagugauugauuaugaa

SEQ ID NO: 2112781 - RNA, 19 nt, Artificial Sequence
  Description of Artificial Sequence: Synthetic oligonucleotide
  Antisense strand to SEQ ID NO: 2112780
uucauaaucaaucacugua

SEQ ID NO: 2112782 - RNA, 19 nt, Artificial Sequence
  Description of Artificial Sequence: Synthetic oligonucleotide
  Sense strand starting at position 1472 of SEQ ID NO: 1882332
agucgacauaagcaugaua

SEQ ID NO: 2112783 - RNA, 19 nt, Artificial Sequence
  Description of Artificial Sequence: Synthetic oligonucleotide
  Antisense strand to SEQ ID NO: 2112782
uaucaugcuuaugucgacu

SEQ ID NO: 2112784 - RNA, 19 nt, Artificial Sequence
  Description of Artificial Sequence: Synthetic oligonucleotide
  Sense strand starting at position 1474 of SEQ ID NO: 1882332
ucgacauaagcaugauaua

SEQ ID NO: 2112785 - RNA, 19 nt, Artificial Sequence
  Description of Artificial Sequence: Synthetic oligonucleotide
  Antisense strand to SEQ ID NO: 2112784
uauaucaugcuuaugucga

SEQ ID NO: 2112786 - RNA, 19 nt, Artificial Sequence
  Description of Artificial Sequence: Synthetic oligonucleotide
  Sense strand starting at position 1623 of SEQ ID NO: 1882332
ucuauauucucaguggauc

SEQ ID NO: 2112787 - RNA, 19 nt, Artificial Sequence
  Description of Artificial Sequence: Synthetic oligonucleotide
  Antisense strand to SEQ ID NO: 2112786
gauccacugagaauauaga

SEQ ID NO: 2112788 - RNA, 19 nt, Artificial Sequence
  Description of Artificial Sequence: Synthetic oligonucleotide
  Sense strand starting at position 1624 of SEQ ID NO: 1882332
cuauauucucaguggauca

SEQ ID NO: 2112789 - RNA, 19 nt, Artificial Sequence
  Description of Artificial Sequence: Synthetic oligonucleotide
  Antisense strand to SEQ ID NO: 2112788
ugauccacugagaauauag

SEQ ID NO: 2112790 - RNA, 19 nt, Artificial Sequence
  Description of Artificial Sequence: Synthetic oligonucleotide
  Sense strand starting at position 2057 of SEQ ID NO: 1882332
uuccaauauccagggaagu

SEQ ID NO: 2112791 - RNA, 19 nt, Artificial Sequence
  Description of Artificial Sequence: Synthetic oligonucleotide
  Antisense strand to SEQ ID NO: 2112790
acuucccuggauauuggaa

SEQ ID NO: 2112792 - RNA, 19 nt, Artificial Sequence
  Description of Artificial Sequence: Synthetic oligonucleotide
  Sense strand starting at position 2058 of SEQ ID NO: 1882332
uccaauauccagggaagua

SEQ ID NO: 2112793 - RNA, 19 nt, Artificial Sequence
  Description of Artificial Sequence: Synthetic oligonucleotide
  Antisense strand to SEQ ID NO: 2112792
uacuucccuggauauugga

SEQ ID NO: 2112794 - RNA, 19 nt, Artificial Sequence
  Description of Artificial Sequence: Synthetic oligonucleotide
  Sense strand starting at position 2105 of SEQ ID NO: 1882332
uccuuucugggccaaucaa

SEQ ID NO: 2112795 - RNA, 19 nt, Artificial Sequence
  Description of Artificial Sequence: Synthetic oligonucleotide
  Antisense strand to SEQ ID NO: 2112794
uugauuggcccagaaagga

SEQ ID NO: 2112796 - RNA, 19 nt, Artificial Sequence
  Description of Artificial Sequence: Synthetic oligonucleotide
  Sense strand starting at position 2138 of SEQ ID NO: 1882332
ggagauagguuccuaguag

SEQ ID NO: 2112797 - RNA, 19 nt, Artificial Sequence
  Description of Artificial Sequence: Synthetic oligonucleotide
  Antisense strand to SEQ ID NO: 2112796
cuacuaggaaccuaucucc

SEQ ID NO: 2112798 - RNA, 19 nt, Artificial Sequence
  Description of Artificial Sequence: Synthetic oligonucleotide
  Sense strand starting at position 2184 of SEQ ID NO: 1882332
ggacauuucuuagaagaua

SEQ ID NO: 2112799 - RNA, 19 nt, Artificial Sequence
  Description of Artificial Sequence: Synthetic oligonucleotide
  Antisense strand to SEQ ID NO: 2112798
uaucuucuaagaaaugucc

SEQ ID NO: 2112800 - RNA, 19 nt, Artificial Sequence
  Description of Artificial Sequence: Synthetic oligonucleotide
  Sense strand starting at position 2279 of SEQ ID NO: 1882332
caaggucuccuuugggaga

SEQ ID NO: 2112801 - RNA, 19 nt, Artificial Sequence
  Description of Artificial Sequence: Synthetic oligonucleotide
  Antisense strand to SEQ ID NO: 2112800
ucucccaaaggagaccuug

SEQ ID NO: 2112802 - RNA, 19 nt, Artificial Sequence
  Description of Artificial Sequence: Synthetic oligonucleotide
  Sense strand starting at position 2477 of SEQ ID NO: 1882332
uggcuuuaacacugaagga

SEQ ID NO: 2112803 - RNA, 19 nt, Artificial Sequence
  Description of Artificial Sequence: Synthetic oligonucleotide
  Antisense strand to SEQ ID NO: 2112802
uccuucaguguuaaagcca

SEQ ID NO: 2112804 - RNA, 19 nt, Artificial Sequence
  Description of Artificial Sequence: Synthetic oligonucleotide
  Sense strand starting at position 2583 of SEQ ID NO: 1882332
ucccaaagauagcuguuaa

SEQ ID NO: 2112805 - RNA, 19 nt, Artificial Sequence
  Description of Artificial Sequence: Synthetic oligonucleotide
  Antisense strand to SEQ ID NO: 2112804
uuaacagcuaucuuuggga

SEQ ID NO: 2112806 - RNA, 19 nt, Artificial Sequence
  Description of Artificial Sequence: Synthetic oligonucleotide
  Sense strand starting at position 2701 of SEQ ID NO: 1882332
ggugaaugugacuggaaau

SEQ ID NO: 2112807 - RNA, 19 nt, Artificial Sequence
  Description of Artificial Sequence: Synthetic oligonucleotide
  Antisense strand to SEQ ID NO: 2112806
auuuccagucacauucacc

SEQ ID NO: 2112808 - RNA, 19 nt, Artificial Sequence
  Description of Artificial Sequence: Synthetic oligonucleotide
  Sense strand starting at position 2702 of SEQ ID NO: 1882332
gugaaugugacuggaaauc

SEQ ID NO: 2112809 - RNA, 19 nt, Artificial Sequence
  Description of Artificial Sequence: Synthetic oligonucleotide
  Antisense strand to SEQ ID NO: 2112808
gauuuccagucacauucac

SEQ ID NO: 2112810 - RNA, 19 nt, Artificial Sequence
  Description of Artificial Sequence: Synthetic oligonucleotide
  Sense strand starting at position 2992 of SEQ ID NO: 1882332
ucuuguacuggucaagauc

SEQ ID NO: 2112811 - RNA, 19 nt, Artificial Sequence
  Description of Artificial Sequence: Synthetic oligonucleotide
  Antisense strand to SEQ ID NO: 2112810
gaucuugaccaguacaaga

SEQ ID NO: 2112812 - RNA, 19 nt, Artificial Sequence
  Description of Artificial Sequence: Synthetic oligonucleotide
  Sense strand starting at position 3001 of SEQ ID NO: 1882332
ggucaagaucuguagugag

SEQ ID NO: 2112813 - RNA, 19 nt, Artificial Sequence
  Description of Artificial Sequence: Synthetic oligonucleotide
  Antisense strand to SEQ ID NO: 2112812
cucacuacagaucuugacc

SEQ ID NO: 2112814 - RNA, 19 nt, Artificial Sequence
  Description of Artificial Sequence: Synthetic oligonucleotide
  Sense strand starting at position 3015 of SEQ ID NO: 1882332
gugagaaauuuggagcaga

SEQ ID NO: 2112815 - RNA, 19 nt, Artificial Sequence
  Description of Artificial Sequence: Synthetic oligonucleotide
  Antisense strand to SEQ ID NO: 2112814
ucugcuccaaauuucucac

SEQ ID NO: 2112816 - RNA, 19 nt, Artificial Sequence
  Description of Artificial Sequence: Synthetic oligonucleotide
  Sense strand starting at position 3033 of SEQ ID NO: 1882332
auaaacucugcacagagua

SEQ ID NO: 2112817 - RNA, 19 nt, Artificial Sequence
  Description of Artificial Sequence: Synthetic oligonucleotide
  Antisense strand to SEQ ID NO: 2112816
uacucugugcagaguuuau

SEQ ID NO: 2112818 - RNA, 19 nt, Artificial Sequence
  Description of Artificial Sequence: Synthetic oligonucleotide
  Sense strand starting at position 3043 of SEQ ID NO: 1882332
cacagaguacuggguacau

SEQ ID NO: 2112819 - RNA, 19 nt, Artificial Sequence
  Description of Artificial Sequence: Synthetic oligonucleotide
  Antisense strand to SEQ ID NO: 2112818
auguacccaguacucugug

SEQ ID NO: 2112820 - RNA, 19 nt, Artificial Sequence
  Description of Artificial Sequence: Synthetic oligonucleotide
  Sense strand starting at position 3071 of SEQ ID NO: 1882332
ggagaaagcagauggguuu

SEQ ID NO: 2112821 - RNA, 19 nt, Artificial Sequence
  Description of Artificial Sequence: Synthetic oligonucleotide
  Antisense strand to SEQ ID NO: 2112820
aaacccaucugcuuucucc

SEQ ID NO: 2112822 - RNA, 19 nt, Artificial Sequence
  Description of Artificial Sequence: Synthetic oligonucleotide
  Sense strand starting at position 3813 of SEQ ID NO: 1882332
ggacucucauaugcuauau

SEQ ID NO: 2112823 - RNA, 19 nt, Artificial Sequence
  Description of Artificial Sequence: Synthetic oligonucleotide
  Antisense strand to SEQ ID NO: 2112822
auauagcauaugagagucc

SEQ ID NO: 2112824 - RNA, 19 nt, Artificial Sequence
  Description of Artificial Sequence: Synthetic oligonucleotide
  Sense strand starting at position 135 of SEQ ID NO: 1882333
guuacaucaguuuagcaaa

SEQ ID NO: 2112825 - RNA, 19 nt, Artificial Sequence
  Description of Artificial Sequence: Synthetic oligonucleotide
  Antisense strand to SEQ ID NO: 2112824
uuugcuaaacugauguaac

SEQ ID NO: 2112826 - RNA, 19 nt, Artificial Sequence
  Description of Artificial Sequence: Synthetic oligonucleotide
  Sense strand starting at position 201 of SEQ ID NO: 1882333
gauccuuugcuguaaagcu

SEQ ID NO: 2112827 - RNA, 19 nt, Artificial Sequence
  Description of Artificial Sequence: Synthetic oligonucleotide
  Antisense strand to SEQ ID NO: 2112826
agcuuuacagcaaaggauc

SEQ ID NO: 2112828 - RNA, 19 nt, Artificial Sequence
  Description of Artificial Sequence: Synthetic oligonucleotide
  Sense strand starting at position 410 of SEQ ID NO: 1882333
gguauaaucuaauuggcuu

SEQ ID NO: 2112829 - RNA, 19 nt, Artificial Sequence
  Description of Artificial Sequence: Synthetic oligonucleotide
  Antisense strand to SEQ ID NO: 2112828
aagccaauuagauuauacc

SEQ ID NO: 2112830 - RNA, 19 nt, Artificial Sequence
  Description of Artificial Sequence: Synthetic oligonucleotide
  Sense strand starting at position 416 of SEQ ID NO: 1882333
aucuaauuggcuuacagua

SEQ ID NO: 2112831 - RNA, 19 nt, Artificial Sequence
  Description of Artificial Sequence: Synthetic oligonucleotide
  Antisense strand to SEQ ID NO: 2112830
uacuguaagccaauuagau

SEQ ID NO: 2112832 - RNA, 19 nt, Artificial Sequence
  Description of Artificial Sequence: Synthetic oligonucleotide
  Sense strand starting at position 425 of SEQ ID NO: 1882333
gcuuacaguaauggauagu

SEQ ID NO: 2112833 - RNA, 19 nt, Artificial Sequence
  Description of Artificial Sequence: Synthetic oligonucleotide
  Antisense strand to SEQ ID NO: 2112832
acuauccauuacuguaagc

SEQ ID NO: 2112834 - RNA, 19 nt, Artificial Sequence
  Description of Artificial Sequence: Synthetic oligonucleotide
  Sense strand starting at position 431 of SEQ ID NO: 1882333
aguaauggauaguugaaau

SEQ ID NO: 2112835 - RNA, 19 nt, Artificial Sequence
  Description of Artificial Sequence: Synthetic oligonucleotide
  Antisense strand to SEQ ID NO: 2112834
auuucaacuauccauuacu

SEQ ID NO: 2112836 - RNA, 19 nt, Artificial Sequence
  Description of Artificial Sequence: Synthetic oligonucleotide
  Sense strand starting at position 451 of SEQ ID NO: 1882333
auaugaauugauggcauau

SEQ ID NO: 2112837 - RNA, 19 nt, Artificial Sequence
  Description of Artificial Sequence: Synthetic oligonucleotide
  Antisense strand to SEQ ID NO: 2112836
auaugccaucaauucauau

SEQ ID NO: 2112838 - RNA, 19 nt, Artificial Sequence
  Description of Artificial Sequence: Synthetic oligonucleotide
  Sense strand starting at position 547 of SEQ ID NO: 1882333
gagacuucuuaucuggaua

SEQ ID NO: 2112839 - RNA, 19 nt, Artificial Sequence
  Description of Artificial Sequence: Synthetic oligonucleotide
  Antisense strand to SEQ ID NO: 2112838
uauccagauaagaagucuc

SEQ ID NO: 2112840 - RNA, 19 nt, Artificial Sequence
  Description of Artificial Sequence: Synthetic oligonucleotide
  Sense strand starting at position 1217 of SEQ ID NO: 1882333
uuuccagaucugcgaaauu

SEQ ID NO: 2112841 - RNA, 19 nt, Artificial Sequence
  Description of Artificial Sequence: Synthetic oligonucleotide
  Antisense strand to SEQ ID NO: 2112840
aauuucgcagaucuggaaa

SEQ ID NO: 2112842 - RNA, 19 nt, Artificial Sequence
  Description of Artificial Sequence: Synthetic oligonucleotide
  Sense strand starting at position 1883 of SEQ ID NO: 1882333
caaggaaugucccuguaga

SEQ ID NO: 2112843 - RNA, 19 nt, Artificial Sequence
  Description of Artificial Sequence: Synthetic oligonucleotide
  Antisense strand to SEQ ID NO: 2112842
ucuacagggacauuccuug

SEQ ID NO: 2112844 - RNA, 19 nt, Artificial Sequence
  Description of Artificial Sequence: Synthetic oligonucleotide
  Sense strand starting at position 1884 of SEQ ID NO: 1882333
aaggaaugucccuguagaa

SEQ ID NO: 2112845 - RNA, 19 nt, Artificial Sequence
  Description of Artificial Sequence: Synthetic oligonucleotide
  Antisense strand to SEQ ID NO: 2112844
uucuacagggacauuccuu

SEQ ID NO: 2112846 - RNA, 19 nt, Artificial Sequence
  Description of Artificial Sequence: Synthetic oligonucleotide
  Sense strand starting at position 1986 of SEQ ID NO: 1882333
caccgaaacugauugcaga

SEQ ID NO: 2112847 - RNA, 19 nt, Artificial Sequence
  Description of Artificial Sequence: Synthetic oligonucleotide
  Antisense strand to SEQ ID NO: 2112846
ucugcaaucaguuucggug

SEQ ID NO: 2112848 - RNA, 19 nt, Artificial Sequence
  Description of Artificial Sequence: Synthetic oligonucleotide
  Sense strand starting at position 1987 of SEQ ID NO: 1882333
accgaaacugauugcagau

SEQ ID NO: 2112849 - RNA, 19 nt, Artificial Sequence
  Description of Artificial Sequence: Synthetic oligonucleotide
  Antisense strand to SEQ ID NO: 2112848
aucugcaaucaguuucggu

SEQ ID NO: 2112850 - RNA, 19 nt, Artificial Sequence
  Description of Artificial Sequence: Synthetic oligonucleotide
  Sense strand starting at position 1989 of SEQ ID NO: 1882333
cgaaacugauugcagauuu

SEQ ID NO: 2112851 - RNA, 19 nt, Artificial Sequence
  Description of Artificial Sequence: Synthetic oligonucleotide
  Antisense strand to SEQ ID NO: 2112850
aaaucugcaaucaguuucg

SEQ ID NO: 2112852 - RNA, 19 nt, Artificial Sequence
  Description of Artificial Sequence: Synthetic oligonucleotide
  Sense strand starting at position 2051 of SEQ ID NO: 1882333
gcaccagaccuggguuuaa

SEQ ID NO: 2112853 - RNA, 19 nt, Artificial Sequence
  Description of Artificial Sequence: Synthetic oligonucleotide
  Antisense strand to SEQ ID NO: 2112852
uuaaacccaggucuggugc

SEQ ID NO: 2112854 - RNA, 19 nt, Artificial Sequence
  Description of Artificial Sequence: Synthetic oligonucleotide
  Sense strand starting at position 2068 of SEQ ID NO: 1882333
aagagagcuugaguugagu

SEQ ID NO: 2112855 - RNA, 19 nt, Artificial Sequence
  Description of Artificial Sequence: Synthetic oligonucleotide
  Antisense strand to SEQ ID NO: 2112854
acucaacucaagcucucuu

SEQ ID NO: 2112856 - RNA, 19 nt, Artificial Sequence
  Description of Artificial Sequence: Synthetic oligonucleotide
  Sense strand starting at position 2070 of SEQ ID NO: 1882333
gagagcuugaguugaguuu

SEQ ID NO: 2112857 - RNA, 19 nt, Artificial Sequence
  Description of Artificial Sequence: Synthetic oligonucleotide
  Antisense strand to SEQ ID NO: 2112856
aaacucaacucaagcucuc

SEQ ID NO: 2112858 - RNA, 19 nt, Artificial Sequence
  Description of Artificial Sequence: Synthetic oligonucleotide
  Sense strand starting at position 2071 of SEQ ID NO: 1882333
agagcuugaguugaguuua

SEQ ID NO: 2112859 - RNA, 19 nt, Artificial Sequence
  Description of Artificial Sequence: Synthetic oligonucleotide
  Antisense strand to SEQ ID NO: 2112858
uaaacucaacucaagcucu

SEQ ID NO: 2112860 - RNA, 19 nt, Artificial Sequence
  Description of Artificial Sequence: Synthetic oligonucleotide
  Sense strand starting at position 2076 of SEQ ID NO: 1882333
uugaguugaguuuagugaa

SEQ ID NO: 2112861 - RNA, 19 nt, Artificial Sequence
  Description of Artificial Sequence: Synthetic oligonucleotide
  Antisense strand to SEQ ID NO: 2112860
uucacuaaacucaacucaa

SEQ ID NO: 2112862 - RNA, 19 nt, Artificial Sequence
  Description of Artificial Sequence: Synthetic oligonucleotide
  Sense strand starting at position 2152 of SEQ ID NO: 1882333
agauauuucugcccaguuu

SEQ ID NO: 2112863 - RNA, 19 nt, Artificial Sequence
  Description of Artificial Sequence: Synthetic oligonucleotide
  Antisense strand to SEQ ID NO: 2112862
aaacugggcagaaauaucu

SEQ ID NO: 2112864 - RNA, 19 nt, Artificial Sequence
  Description of Artificial Sequence: Synthetic oligonucleotide
  Sense strand starting at position 2435 of SEQ ID NO: 1882333
auaccaugucaucauguca

SEQ ID NO: 2112865 - RNA, 19 nt, Artificial Sequence
  Description of Artificial Sequence: Synthetic oligonucleotide
  Antisense strand to SEQ ID NO: 2112864
ugacaugaugacaugguau

SEQ ID NO: 2112866 - RNA, 19 nt, Artificial Sequence
  Description of Artificial Sequence: Synthetic oligonucleotide
  Sense strand starting at position 2634 of SEQ ID NO: 1882333
aaggaaacgcuuugccaua

SEQ ID NO: 2112867 - RNA, 19 nt, Artificial Sequence
  Description of Artificial Sequence: Synthetic oligonucleotide
  Antisense strand to SEQ ID NO: 2112866
uauggcaaagcguuuccuu

SEQ ID NO: 2112868 - RNA, 19 nt, Artificial Sequence
  Description of Artificial Sequence: Synthetic oligonucleotide
  Sense strand starting at position 2635 of SEQ ID NO: 1882333
aggaaacgcuuugccauaa

SEQ ID NO: 2112869 - RNA, 19 nt, Artificial Sequence
  Description of Artificial Sequence: Synthetic oligonucleotide
  Antisense strand to SEQ ID NO: 2112868
uuauggcaaagcguuuccu

SEQ ID NO: 2112870 - RNA, 19 nt, Artificial Sequence
  Description of Artificial Sequence: Synthetic oligonucleotide
  Sense strand starting at position 2682 of SEQ ID NO: 1882333
ggccaccugugaccaauua

SEQ ID NO: 2112871 - RNA, 19 nt, Artificial Sequence
  Description of Artificial Sequence: Synthetic oligonucleotide
  Antisense strand to SEQ ID NO: 2112870
uaauuggucacagguggcc

SEQ ID NO: 2112872 - RNA, 19 nt, Artificial Sequence
  Description of Artificial Sequence: Synthetic oligonucleotide
  Sense strand starting at position 2683 of SEQ ID NO: 1882333
gccaccugugaccaauuau

SEQ ID NO: 2112873 - RNA, 19 nt, Artificial Sequence
  Description of Artificial Sequence: Synthetic oligonucleotide
  Antisense strand to SEQ ID NO: 2112872
auaauuggucacagguggc

SEQ ID NO: 2112874 - RNA, 19 nt, Artificial Sequence
  Description of Artificial Sequence: Synthetic oligonucleotide
  Sense strand starting at position 2727 of SEQ ID NO: 1882333
gacugaguguaaucaggug

SEQ ID NO: 2112875 - RNA, 19 nt, Artificial Sequence
  Description of Artificial Sequence: Synthetic oligonucleotide
  Antisense strand to SEQ ID NO: 2112874
caccugauuacacucaguc

SEQ ID NO: 2112876 - RNA, 19 nt, Artificial Sequence
  Description of Artificial Sequence: Synthetic oligonucleotide
  Sense strand starting at position 2735 of SEQ ID NO: 1882333
guaaucaggugucuuccaa

SEQ ID NO: 2112877 - RNA, 19 nt, Artificial Sequence
  Description of Artificial Sequence: Synthetic oligonucleotide
  Antisense strand to SEQ ID NO: 2112876
uuggaagacaccugauuac

SEQ ID NO: 2112878 - RNA, 19 nt, Artificial Sequence
  Description of Artificial Sequence: Synthetic oligonucleotide
  Sense strand starting at position 2868 of SEQ ID NO: 1882333
uuguguaacucuguaauuu

SEQ ID NO: 2112879 - RNA, 19 nt, Artificial Sequence
  Description of Artificial Sequence: Synthetic oligonucleotide
  Antisense strand to SEQ ID NO: 2112878
aaauuacagaguuacacaa

SEQ ID NO: 2112880 - RNA, 19 nt, Artificial Sequence
  Description of Artificial Sequence: Synthetic oligonucleotide
  Sense strand starting at position 3098 of SEQ ID NO: 1882333
cugaaauugcugcaaugac

SEQ ID NO: 2112881 - RNA, 19 nt, Artificial Sequence
  Description of Artificial Sequence: Synthetic oligonucleotide
  Antisense strand to SEQ ID NO: 2112880
gucauugcagcaauuucag

SEQ ID NO: 2112882 - RNA, 19 nt, Artificial Sequence
  Description of Artificial Sequence: Synthetic oligonucleotide
  Sense strand starting at position 3106 of SEQ ID NO: 1882333
gcugcaaugacuggauucu

SEQ ID NO: 2112883 - RNA, 19 nt, Artificial Sequence
  Description of Artificial Sequence: Synthetic oligonucleotide
  Antisense strand to SEQ ID NO: 2112882
agaauccagucauugcagc

SEQ ID NO: 2112884 - RNA, 19 nt, Artificial Sequence
  Description of Artificial Sequence: Synthetic oligonucleotide
  Sense strand starting at position 3107 of SEQ ID NO: 1882333
cugcaaugacuggauucua

SEQ ID NO: 2112885 - RNA, 19 nt, Artificial Sequence
  Description of Artificial Sequence: Synthetic oligonucleotide
  Antisense strand to SEQ ID NO: 2112884
uagaauccagucauugcag

SEQ ID NO: 2112886 - RNA, 19 nt, Artificial Sequence
  Description of Artificial Sequence: Synthetic oligonucleotide
  Sense strand starting at position 3158 of SEQ ID NO: 1882333
cugauagacauucguagaa

SEQ ID NO: 2112887 - RNA, 19 nt, Artificial Sequence
  Description of Artificial Sequence: Synthetic oligonucleotide
  Antisense strand to SEQ ID NO: 2112886
uucuacgaaugucuaucag

SEQ ID NO: 2112888 - RNA, 19 nt, Artificial Sequence
  Description of Artificial Sequence: Synthetic oligonucleotide
  Sense strand starting at position 3178 of SEQ ID NO: 1882333
ugggauugcuggguacuca

SEQ ID NO: 2112889 - RNA, 19 nt, Artificial Sequence
  Description of Artificial Sequence: Synthetic oligonucleotide
  Antisense strand to SEQ ID NO: 2112888
ugaguacccagcaauccca

SEQ ID NO: 2112890 - RNA, 19 nt, Artificial Sequence
  Description of Artificial Sequence: Synthetic oligonucleotide
  Sense strand starting at position 3179 of SEQ ID NO: 1882333
gggauugcuggguacucau

SEQ ID NO: 2112891 - RNA, 19 nt, Artificial Sequence
  Description of Artificial Sequence: Synthetic oligonucleotide
  Antisense strand to SEQ ID NO: 2112890
augaguacccagcaauccc

SEQ ID NO: 2112892 - RNA, 19 nt, Artificial Sequence
  Description of Artificial Sequence: Synthetic oligonucleotide
  Sense strand starting at position 3232 of SEQ ID NO: 1882333
ugcccauaccgugaaaucu

SEQ ID NO: 2112893 - RNA, 19 nt, Artificial Sequence
  Description of Artificial Sequence: Synthetic oligonucleotide
  Antisense strand to SEQ ID NO: 2112892
agauuucacgguaugggca

SEQ ID NO: 2112894 - RNA, 19 nt, Artificial Sequence
  Description of Artificial Sequence: Synthetic oligonucleotide
  Sense strand starting at position 3252 of SEQ ID NO: 1882333
agaccuagauuguuaagau

SEQ ID NO: 2112895 - RNA, 19 nt, Artificial Sequence
  Description of Artificial Sequence: Synthetic oligonucleotide
  Antisense strand to SEQ ID NO: 2112894
aucuuaacaaucuaggucu

SEQ ID NO: 2112896 - RNA, 19 nt, Artificial Sequence
  Description of Artificial Sequence: Synthetic oligonucleotide
  Sense strand starting at position 3383 of SEQ ID NO: 1882333
gggaaagugccuugaggua

SEQ ID NO: 2112897 - RNA, 19 nt, Artificial Sequence
  Description of Artificial Sequence: Synthetic oligonucleotide
  Antisense strand to SEQ ID NO: 2112896
uaccucaaggcacuuuccc

SEQ ID NO: 2112898 - RNA, 19 nt, Artificial Sequence
  Description of Artificial Sequence: Synthetic oligonucleotide
  Sense strand starting at position 3530 of SEQ ID NO: 1882333
ugugaauccagagagcuua

SEQ ID NO: 2112899 - RNA, 19 nt, Artificial Sequence
  Description of Artificial Sequence: Synthetic oligonucleotide
  Antisense strand to SEQ ID NO: 2112898
uaagcucucuggauucaca

SEQ ID NO: 2112900 - RNA, 19 nt, Artificial Sequence
  Description of Artificial Sequence: Synthetic oligonucleotide
  Sense strand starting at position 3620 of SEQ ID NO: 1882333
gggcuuucuaagggaugca

SEQ ID NO: 2112901 - RNA, 19 nt, Artificial Sequence
  Description of Artificial Sequence: Synthetic oligonucleotide
  Antisense strand to SEQ ID NO: 2112900
ugcaucccuuagaaagccc

SEQ ID NO: 2112902 - RNA, 19 nt, Artificial Sequence
  Description of Artificial Sequence: Synthetic oligonucleotide
  Sense strand starting at position 3857 of SEQ ID NO: 1882333
caagauugagcucaggcau

SEQ ID NO: 2112903 - RNA, 19 nt, Artificial Sequence
  Description of Artificial Sequence: Synthetic oligonucleotide
  Antisense strand to SEQ ID NO: 2112902
augccugagcucaaucuug

SEQ ID NO: 2112904 - RNA, 19 nt, Artificial Sequence
  Description of Artificial Sequence: Synthetic oligonucleotide
  Sense strand starting at position 1 of SEQ ID NO: 1882334
uggcuuggauucuggagau

SEQ ID NO: 2112905 - RNA, 19 nt, Artificial Sequence
  Description of Artificial Sequence: Synthetic oligonucleotide
  Antisense strand to SEQ ID NO: 2112904
aucuccagaauccaagcca

SEQ ID NO: 2112906 - RNA, 19 nt, Artificial Sequence
  Description of Artificial Sequence: Synthetic oligonucleotide
  Sense strand starting at position 126 of SEQ ID NO: 1882334
ucaaucauacguugcauua

SEQ ID NO: 2112907 - RNA, 19 nt, Artificial Sequence
  Description of Artificial Sequence: Synthetic oligonucleotide
  Antisense strand to SEQ ID NO: 2112906
uaaugcaacguaugauuga

SEQ ID NO: 2112908 - RNA, 19 nt, Artificial Sequence
  Description of Artificial Sequence: Synthetic oligonucleotide
  Sense strand starting at position 128 of SEQ ID NO: 1882334
aaucauacguugcauuaga

SEQ ID NO: 2112909 - RNA, 19 nt, Artificial Sequence
  Description of Artificial Sequence: Synthetic oligonucleotide
  Antisense strand to SEQ ID NO: 2112908
ucuaaugcaacguaugauu

SEQ ID NO: 2112910 - RNA, 19 nt, Artificial Sequence
  Description of Artificial Sequence: Synthetic oligonucleotide
  Sense strand starting at position 174 of SEQ ID NO: 1882334
ucauuacuugucuguauua

SEQ ID NO: 2112911 - RNA, 19 nt, Artificial Sequence
  Description of Artificial Sequence: Synthetic oligonucleotide
  Antisense strand to SEQ ID NO: 2112910
uaauacagacaaguaauga

SEQ ID NO: 2112912 - RNA, 19 nt, Artificial Sequence
  Description of Artificial Sequence: Synthetic oligonucleotide
  Sense strand starting at position 237 of SEQ ID NO: 1882334
cccuccugguguugauuua

SEQ ID NO: 2112913 - RNA, 19 nt, Artificial Sequence
  Description of Artificial Sequence: Synthetic oligonucleotide
  Antisense strand to SEQ ID NO: 2112912
uaaaucaacaccaggaggg

SEQ ID NO: 2112914 - RNA, 19 nt, Artificial Sequence
  Description of Artificial Sequence: Synthetic oligonucleotide
  Sense strand starting at position 314 of SEQ ID NO: 1882334
ugauaauuauucuucgaac

SEQ ID NO: 2112915 - RNA, 19 nt, Artificial Sequence
  Description of Artificial Sequence: Synthetic oligonucleotide
  Antisense strand to SEQ ID NO: 2112914
guucgaagaauaauuauca

SEQ ID NO: 2112916 - RNA, 19 nt, Artificial Sequence
  Description of Artificial Sequence: Synthetic oligonucleotide
  Sense strand starting at position 325 of SEQ ID NO: 1882334
cuucgaacccaguaaugau

SEQ ID NO: 2112917 - RNA, 19 nt, Artificial Sequence
  Description of Artificial Sequence: Synthetic oligonucleotide
  Antisense strand to SEQ ID NO: 2112916
aucauuacuggguucgaag

SEQ ID NO: 2112918 - RNA, 19 nt, Artificial Sequence
  Description of Artificial Sequence: Synthetic oligonucleotide
  Sense strand starting at position 328 of SEQ ID NO: 1882334
cgaacccaguaaugauuua

SEQ ID NO: 2112919 - RNA, 19 nt, Artificial Sequence
  Description of Artificial Sequence: Synthetic oligonucleotide
  Antisense strand to SEQ ID NO: 2112918
uaaaucauuacuggguucg

SEQ ID NO: 2112920 - RNA, 19 nt, Artificial Sequence
  Description of Artificial Sequence: Synthetic oligonucleotide
  Sense strand starting at position 406 of SEQ ID NO: 1882334
aggccuaagcugugguaaa

SEQ ID NO: 2112921 - RNA, 19 nt, Artificial Sequence
  Description of Artificial Sequence: Synthetic oligonucleotide
  Antisense strand to SEQ ID NO: 2112920
uuuaccacagcuuaggccu

SEQ ID NO: 2112922 - RNA, 19 nt, Artificial Sequence
  Description of Artificial Sequence: Synthetic oligonucleotide
  Sense strand starting at position 407 of SEQ ID NO: 1882334
ggccuaagcugugguaaac

SEQ ID NO: 2112923 - RNA, 19 nt, Artificial Sequence
  Description of Artificial Sequence: Synthetic oligonucleotide
  Antisense strand to SEQ ID NO: 2112922
guuuaccacagcuuaggcc

SEQ ID NO: 2112924 - RNA, 19 nt, Artificial Sequence
  Description of Artificial Sequence: Synthetic oligonucleotide
  Sense strand starting at position 546 of SEQ ID NO: 1882334
gcaccugugcucggaggaa

SEQ ID NO: 2112925 - RNA, 19 nt, Artificial Sequence
  Description of Artificial Sequence: Synthetic oligonucleotide
  Antisense strand to SEQ ID NO: 2112924
uuccuccgagcacaggugc

SEQ ID NO: 2112926 - RNA, 19 nt, Artificial Sequence
  Description of Artificial Sequence: Synthetic oligonucleotide
  Sense strand starting at position 842 of SEQ ID NO: 1882334
cacgggucgucgugcuaga

SEQ ID NO: 2112927 - RNA, 19 nt, Artificial Sequence
  Description of Artificial Sequence: Synthetic oligonucleotide
  Antisense strand to SEQ ID NO: 2112926
ucuagcacgacgacccgug

SEQ ID NO: 2112928 - RNA, 19 nt, Artificial Sequence
  Description of Artificial Sequence: Synthetic oligonucleotide
  Sense strand starting at position 845 of SEQ ID NO: 1882334
gggucgucgugcuagacuu

SEQ ID NO: 2112929 - RNA, 19 nt, Artificial Sequence
  Description of Artificial Sequence: Synthetic oligonucleotide
  Antisense strand to SEQ ID NO: 2112928
aagucuagcacgacgaccc

SEQ ID NO: 2112930 - RNA, 19 nt, Artificial Sequence
  Description of Artificial Sequence: Synthetic oligonucleotide
  Sense strand starting at position 2002 of SEQ ID NO: 1882334
aagugaguuuccuggugaa

SEQ ID NO: 2112931 - RNA, 19 nt, Artificial Sequence
  Description of Artificial Sequence: Synthetic oligonucleotide
  Antisense strand to SEQ ID NO: 2112930
uucaccaggaaacucacuu

SEQ ID NO: 2112932 - RNA, 19 nt, Artificial Sequence
  Description of Artificial Sequence: Synthetic oligonucleotide
  Sense strand starting at position 2056 of SEQ ID NO: 1882334
gccgcuuucuccugaagga

SEQ ID NO: 2112933 - RNA, 19 nt, Artificial Sequence
  Description of Artificial Sequence: Synthetic oligonucleotide
  Antisense strand to SEQ ID NO: 2112932
uccuucaggagaaagcggc

SEQ ID NO: 2112934 - RNA, 19 nt, Artificial Sequence
  Description of Artificial Sequence: Synthetic oligonucleotide
  Sense strand starting at position 2057 of SEQ ID NO: 1882334
ccgcuuucuccugaaggaa

SEQ ID NO: 2112935 - RNA, 19 nt, Artificial Sequence
  Description of Artificial Sequence: Synthetic oligonucleotide
  Antisense strand to SEQ ID NO: 2112934
uuccuucaggagaaagcgg

SEQ ID NO: 2112936 - RNA, 19 nt, Artificial Sequence
  Description of Artificial Sequence: Synthetic oligonucleotide
  Sense strand starting at position 2134 of SEQ ID NO: 1882334
cgcccucugcaagaaucuu

SEQ ID NO: 2112937 - RNA, 19 nt, Artificial Sequence
  Description of Artificial Sequence: Synthetic oligonucleotide
  Antisense strand to SEQ ID NO: 2112936
aagauucuugcagagggcg

SEQ ID NO: 2112938 - RNA, 19 nt, Artificial Sequence
  Description of Artificial Sequence: Synthetic oligonucleotide
  Sense strand starting at position 2283 of SEQ ID NO: 1882334
gaggcaucgccacaucacu

SEQ ID NO: 2112939 - RNA, 19 nt, Artificial Sequence
  Description of Artificial Sequence: Synthetic oligonucleotide
  Antisense strand to SEQ ID NO: 2112938
agugauguggcgaugccuc

SEQ ID NO: 2112940 - RNA, 19 nt, Artificial Sequence
  Description of Artificial Sequence: Synthetic oligonucleotide
  Sense strand starting at position 2291 of SEQ ID NO: 1882334
gccacaucacuggguggaa

SEQ ID NO: 2112941 - RNA, 19 nt, Artificial Sequence
  Description of Artificial Sequence: Synthetic oligonucleotide
  Antisense strand to SEQ ID NO: 2112940
uuccacccagugauguggc

SEQ ID NO: 2112942 - RNA, 19 nt, Artificial Sequence
  Description of Artificial Sequence: Synthetic oligonucleotide
  Sense strand starting at position 2419 of SEQ ID NO: 1882334
ggcgcgaugcggugagaau

SEQ ID NO: 2112943 - RNA, 19 nt, Artificial Sequence
  Description of Artificial Sequence: Synthetic oligonucleotide
  Antisense strand to SEQ ID NO: 2112942
auucucaccgcaucgcgcc

SEQ ID NO: 2112944 - RNA, 19 nt, Artificial Sequence
  Description of Artificial Sequence: Synthetic oligonucleotide
  Sense strand starting at position 2940 of SEQ ID NO: 1882334
gugguugugucccagcacu

SEQ ID NO: 2112945 - RNA, 19 nt, Artificial Sequence
  Description of Artificial Sequence: Synthetic oligonucleotide
  Antisense strand to SEQ ID NO: 2112944
agugcugggacacaaccac

SEQ ID NO: 2112946 - RNA, 19 nt, Artificial Sequence
  Description of Artificial Sequence: Synthetic oligonucleotide
  Sense strand starting at position 2973 of SEQ ID NO: 1882334
gacccucagugcuaagaau

SEQ ID NO: 2112947 - RNA, 19 nt, Artificial Sequence
  Description of Artificial Sequence: Synthetic oligonucleotide
  Antisense strand to SEQ ID NO: 2112946
auucuuagcacugaggguc

SEQ ID NO: 2112948 - RNA, 19 nt, Artificial Sequence
  Description of Artificial Sequence: Synthetic oligonucleotide
  Sense strand starting at position 3003 of SEQ ID NO: 1882334
cccggaaaguuccauggga

SEQ ID NO: 2112949 - RNA, 19 nt, Artificial Sequence
  Description of Artificial Sequence: Synthetic oligonucleotide
  Antisense strand to SEQ ID NO: 2112948
ucccauggaacuuuccggg

SEQ ID NO: 2112950 - RNA, 19 nt, Artificial Sequence
  Description of Artificial Sequence: Synthetic oligonucleotide
  Sense strand starting at position 3005 of SEQ ID NO: 1882334
cggaaaguuccaugggaca

SEQ ID NO: 2112951 - RNA, 19 nt, Artificial Sequence
  Description of Artificial Sequence: Synthetic oligonucleotide
  Antisense strand to SEQ ID NO: 2112950
ugucccauggaacuuuccg

SEQ ID NO: 2112952 - RNA, 19 nt, Artificial Sequence
  Description of Artificial Sequence: Synthetic oligonucleotide
  Sense strand starting at position 3034 of SEQ ID NO: 1882334
aggaguugcugggugguaa

SEQ ID NO: 2112953 - RNA, 19 nt, Artificial Sequence
  Description of Artificial Sequence: Synthetic oligonucleotide
  Antisense strand to SEQ ID NO: 2112952
uuaccacccagcaacuccu

SEQ ID NO: 2112954 - RNA, 19 nt, Artificial Sequence
  Description of Artificial Sequence: Synthetic oligonucleotide
  Sense strand starting at position 3035 of SEQ ID NO: 1882334
ggaguugcugggugguaau

SEQ ID NO: 2112955 - RNA, 19 nt, Artificial Sequence
  Description of Artificial Sequence: Synthetic oligonucleotide
  Antisense strand to SEQ ID NO: 2112954
auuaccacccagcaacucc

SEQ ID NO: 2112956 - RNA, 19 nt, Artificial Sequence
  Description of Artificial Sequence: Synthetic oligonucleotide
  Sense strand starting at position 3179 of SEQ ID NO: 1882334
gcgcuaagccuagaacuca

SEQ ID NO: 2112957 - RNA, 19 nt, Artificial Sequence
  Description of Artificial Sequence: Synthetic oligonucleotide
  Antisense strand to SEQ ID NO: 2112956
ugaguucuaggcuuagcgc

SEQ ID NO: 2112958 - RNA, 19 nt, Artificial Sequence
  Description of Artificial Sequence: Synthetic oligonucleotide
  Sense strand starting at position 3278 of SEQ ID NO: 1882334
aguacagcguuccaaggau

SEQ ID NO: 2112959 - RNA, 19 nt, Artificial Sequence
  Description of Artificial Sequence: Synthetic oligonucleotide
  Antisense strand to SEQ ID NO: 2112958
auccuuggaacgcuguacu

SEQ ID NO: 2112960 - RNA, 19 nt, Artificial Sequence
  Description of Artificial Sequence: Synthetic oligonucleotide
  Sense strand starting at position 3608 of SEQ ID NO: 1882334
aaaggaaugcagugucauu

SEQ ID NO: 2112961 - RNA, 19 nt, Artificial Sequence
  Description of Artificial Sequence: Synthetic oligonucleotide
  Antisense strand to SEQ ID NO: 2112960
aaugacacugcauuccuuu

SEQ ID NO: 2112962 - RNA, 19 nt, Artificial Sequence
  Description of Artificial Sequence: Synthetic oligonucleotide
  Sense strand starting at position 3619 of SEQ ID NO: 1882334
gugucauugccacagagag

SEQ ID NO: 2112963 - RNA, 19 nt, Artificial Sequence
  Description of Artificial Sequence: Synthetic oligonucleotide
  Antisense strand to SEQ ID NO: 2112962
cucucuguggcaaugacac

SEQ ID NO: 2112964 - RNA, 19 nt, Artificial Sequence
  Description of Artificial Sequence: Synthetic oligonucleotide
  Sense strand starting at position 3733 of SEQ ID NO: 1882334
gggauuccagccgggagaa

SEQ ID NO: 2112965 - RNA, 19 nt, Artificial Sequence
  Description of Artificial Sequence: Synthetic oligonucleotide
  Antisense strand to SEQ ID NO: 2112964
uucucccggcuggaauccc

SEQ ID NO: 2112966 - RNA, 19 nt, Artificial Sequence
  Description of Artificial Sequence: Synthetic oligonucleotide
  Sense strand starting at position 3843 of SEQ ID NO: 1882334
ugguccuucucugaaggga

SEQ ID NO: 2112967 - RNA, 19 nt, Artificial Sequence
  Description of Artificial Sequence: Synthetic oligonucleotide
  Antisense strand to SEQ ID NO: 2112966
ucccuucagagaaggacca

SEQ ID NO: 2112968 - RNA, 19 nt, Artificial Sequence
  Description of Artificial Sequence: Synthetic oligonucleotide
  Sense strand starting at position 3890 of SEQ ID NO: 1882334
gcccuagugacucagggau

SEQ ID NO: 2112969 - RNA, 19 nt, Artificial Sequence
  Description of Artificial Sequence: Synthetic oligonucleotide
  Antisense strand to SEQ ID NO: 2112968
aucccugagucacuagggc

SEQ ID NO: 2112970 - RNA, 19 nt, Artificial Sequence
  Description of Artificial Sequence: Synthetic oligonucleotide
  Sense strand starting at position 3913 of SEQ ID NO: 1882334
cuuggcuucccugaaggaa

SEQ ID NO: 2112971 - RNA, 19 nt, Artificial Sequence
  Description of Artificial Sequence: Synthetic oligonucleotide
  Antisense strand to SEQ ID NO: 2112970
uuccuucagggaagccaag

SEQ ID NO: 2112972 - RNA, 19 nt, Artificial Sequence
  Description of Artificial Sequence: Synthetic oligonucleotide
  Sense strand starting at position 180 of SEQ ID NO: 1882335
agcuuagagguuugacucu

SEQ ID NO: 2112973 - RNA, 19 nt, Artificial Sequence
  Description of Artificial Sequence: Synthetic oligonucleotide
  Antisense strand to SEQ ID NO: 2112972
agagucaaaccucuaagcu

SEQ ID NO: 2112974 - RNA, 19 nt, Artificial Sequence
  Description of Artificial Sequence: Synthetic oligonucleotide
  Sense strand starting at position 186 of SEQ ID NO: 1882335
gagguuugacucugucuca

SEQ ID NO: 2112975 - RNA, 19 nt, Artificial Sequence
  Description of Artificial Sequence: Synthetic oligonucleotide
  Antisense strand to SEQ ID NO: 2112974
ugagacagagucaaaccuc

SEQ ID NO: 2112976 - RNA, 19 nt, Artificial Sequence
  Description of Artificial Sequence: Synthetic oligonucleotide
  Sense strand starting at position 196 of SEQ ID NO: 1882335
ucugucucagguugaaaug

SEQ ID NO: 2112977 - RNA, 19 nt, Artificial Sequence
  Description of Artificial Sequence: Synthetic oligonucleotide
  Antisense strand to SEQ ID NO: 2112976
cauuucaaccugagacaga

SEQ ID NO: 2112978 - RNA, 19 nt, Artificial Sequence
  Description of Artificial Sequence: Synthetic oligonucleotide
  Sense strand starting at position 197 of SEQ ID NO: 1882335
cugucucagguugaaauga

SEQ ID NO: 2112979 - RNA, 19 nt, Artificial Sequence
  Description of Artificial Sequence: Synthetic oligonucleotide
  Antisense strand to SEQ ID NO: 2112978
ucauuucaaccugagacag

SEQ ID NO: 2112980 - RNA, 19 nt, Artificial Sequence
  Description of Artificial Sequence: Synthetic oligonucleotide
  Sense strand starting at position 334 of SEQ ID NO: 1882335
augcucuauguugaaggaa

SEQ ID NO: 2112981 - RNA, 19 nt, Artificial Sequence
  Description of Artificial Sequence: Synthetic oligonucleotide
  Antisense strand to SEQ ID NO: 2112980
uuccuucaacauagagcau

SEQ ID NO: 2112982 - RNA, 19 nt, Artificial Sequence
  Description of Artificial Sequence: Synthetic oligonucleotide
  Sense strand starting at position 337 of SEQ ID NO: 1882335
cucuauguugaaggaacaa

SEQ ID NO: 2112983 - RNA, 19 nt, Artificial Sequence
  Description of Artificial Sequence: Synthetic oligonucleotide
  Antisense strand to SEQ ID NO: 2112982
uuguuccuucaacauagag

SEQ ID NO: 2112984 - RNA, 19 nt, Artificial Sequence
  Description of Artificial Sequence: Synthetic oligonucleotide
  Sense strand starting at position 787 of SEQ ID NO: 1882335
gaagaaagaugaggaguua

SEQ ID NO: 2112985 - RNA, 19 nt, Artificial Sequence
  Description of Artificial Sequence: Synthetic oligonucleotide
  Antisense strand to SEQ ID NO: 2112984
uaacuccucaucuuucuuc

SEQ ID NO: 2112986 - RNA, 19 nt, Artificial Sequence
  Description of Artificial Sequence: Synthetic oligonucleotide
  Sense strand starting at position 801 of SEQ ID NO: 1882335
aguuaacaagccuggagaa

SEQ ID NO: 2112987 - RNA, 19 nt, Artificial Sequence
  Description of Artificial Sequence: Synthetic oligonucleotide
  Antisense strand to SEQ ID NO: 2112986
uucuccaggcuuguuaacu

SEQ ID NO: 2112988 - RNA, 19 nt, Artificial Sequence
  Description of Artificial Sequence: Synthetic oligonucleotide
  Sense strand starting at position 873 of SEQ ID NO: 1882335
auaccugaguucuuggcau

SEQ ID NO: 2112989 - RNA, 19 nt, Artificial Sequence
  Description of Artificial Sequence: Synthetic oligonucleotide
  Antisense strand to SEQ ID NO: 2112988
augccaagaacucagguau

SEQ ID NO: 2112990 - RNA, 19 nt, Artificial Sequence
  Description of Artificial Sequence: Synthetic oligonucleotide
  Sense strand starting at position 875 of SEQ ID NO: 1882335
accugaguucuuggcaucu

SEQ ID NO: 2112991 - RNA, 19 nt, Artificial Sequence
  Description of Artificial Sequence: Synthetic oligonucleotide
  Antisense strand to SEQ ID NO: 2112990
agaugccaagaacucaggu

SEQ ID NO: 2112992 - RNA, 19 nt, Artificial Sequence
  Description of Artificial Sequence: Synthetic oligonucleotide
  Sense strand starting at position 914 of SEQ ID NO: 1882335
uagggacgugauuguacaa

SEQ ID NO: 2112993 - RNA, 19 nt, Artificial Sequence
  Description of Artificial Sequence: Synthetic oligonucleotide
  Antisense strand to SEQ ID NO: 2112992
uuguacaaucacgucccua

SEQ ID NO: 2112994 - RNA, 19 nt, Artificial Sequence
  Description of Artificial Sequence: Synthetic oligonucleotide
  Sense strand starting at position 985 of SEQ ID NO: 1882335
aaugaaagguuuccuguaa

SEQ ID NO: 2112995 - RNA, 19 nt, Artificial Sequence
  Description of Artificial Sequence: Synthetic oligonucleotide
  Antisense strand to SEQ ID NO: 2112994
uuacaggaaaccuuucauu

SEQ ID NO: 2112996 - RNA, 19 nt, Artificial Sequence
  Description of Artificial Sequence: Synthetic oligonucleotide
  Sense strand starting at position 986 of SEQ ID NO: 1882335
augaaagguuuccuguaaa

SEQ ID NO: 2112997 - RNA, 19 nt, Artificial Sequence
  Description of Artificial Sequence: Synthetic oligonucleotide
  Antisense strand to SEQ ID NO: 2112996
uuuacaggaaaccuuucau

SEQ ID NO: 2112998 - RNA, 19 nt, Artificial Sequence
  Description of Artificial Sequence: Synthetic oligonucleotide
  Sense strand starting at position 989 of SEQ ID NO: 1882335
aaagguuuccuguaaaugu

SEQ ID NO: 2112999 - RNA, 19 nt, Artificial Sequence
  Description of Artificial Sequence: Synthetic oligonucleotide
  Antisense strand to SEQ ID NO: 2112998
acauuuacaggaaaccuuu

SEQ ID NO: 2113000 - RNA, 19 nt, Artificial Sequence
  Description of Artificial Sequence: Synthetic oligonucleotide
  Sense strand starting at position 996 of SEQ ID NO: 1882335
uccuguaaauguccgaaca

SEQ ID NO: 2113001 - RNA, 19 nt, Artificial Sequence
  Description of Artificial Sequence: Synthetic oligonucleotide
  Antisense strand to SEQ ID NO: 2113000
uguucggacauuuacagga

SEQ ID NO: 2113002 - RNA, 19 nt, Artificial Sequence
  Description of Artificial Sequence: Synthetic oligonucleotide
  Sense strand starting at position 997 of SEQ ID NO: 1882335
ccuguaaauguccgaacaa

SEQ ID NO: 2113003 - RNA, 19 nt, Artificial Sequence
  Description of Artificial Sequence: Synthetic oligonucleotide
  Antisense strand to SEQ ID NO: 2113002
uuguucggacauuuacagg

SEQ ID NO: 2113004 - RNA, 19 nt, Artificial Sequence
  Description of Artificial Sequence: Synthetic oligonucleotide
  Sense strand starting at position 1023 of SEQ ID NO: 1882335
gggucugugcaggaauaca

SEQ ID NO: 2113005 - RNA, 19 nt, Artificial Sequence
  Description of Artificial Sequence: Synthetic oligonucleotide
  Antisense strand to SEQ ID NO: 2113004
uguauuccugcacagaccc

SEQ ID NO: 2113006 - RNA, 19 nt, Artificial Sequence
  Description of Artificial Sequence: Synthetic oligonucleotide
  Sense strand starting at position 1034 of SEQ ID NO: 1882335
ggaauacaccaaugauguu

SEQ ID NO: 2113007 - RNA, 19 nt, Artificial Sequence
  Description of Artificial Sequence: Synthetic oligonucleotide
  Antisense strand to SEQ ID NO: 2113006
aacaucauugguguauucc

SEQ ID NO: 2113008 - RNA, 19 nt, Artificial Sequence
  Description of Artificial Sequence: Synthetic oligonucleotide
  Sense strand starting at position 1090 of SEQ ID NO: 1882335
ccguuucccugccuaagau

SEQ ID NO: 2113009 - RNA, 19 nt, Artificial Sequence
  Description of Artificial Sequence: Synthetic oligonucleotide
  Antisense strand to SEQ ID NO: 2113008
aucuuaggcagggaaacgg

SEQ ID NO: 2113010 - RNA, 19 nt, Artificial Sequence
  Description of Artificial Sequence: Synthetic oligonucleotide
  Sense strand starting at position 1143 of SEQ ID NO: 1882335
gauccauaaggcuguccaa

SEQ ID NO: 2113011 - RNA, 19 nt, Artificial Sequence
  Description of Artificial Sequence: Synthetic oligonucleotide
  Antisense strand to SEQ ID NO: 2113010
uuggacagccuuauggauc

SEQ ID NO: 2113012 - RNA, 19 nt, Artificial Sequence
  Description of Artificial Sequence: Synthetic oligonucleotide
  Sense strand starting at position 1450 of SEQ ID NO: 1882335
aggugccuucucuacugaa

SEQ ID NO: 2113013 - RNA, 19 nt, Artificial Sequence
  Description of Artificial Sequence: Synthetic oligonucleotide
  Antisense strand to SEQ ID NO: 2113012
uucaguagagaaggcaccu

SEQ ID NO: 2113014 - RNA, 19 nt, Artificial Sequence
  Description of Artificial Sequence: Synthetic oligonucleotide
  Sense strand starting at position 1470 of SEQ ID NO: 1882335
uggaaucauuucugaaaua

SEQ ID NO: 2113015 - RNA, 19 nt, Artificial Sequence
  Description of Artificial Sequence: Synthetic oligonucleotide
  Antisense strand to SEQ ID NO: 2113014
uauuucagaaaugauucca

SEQ ID NO: 2113016 - RNA, 19 nt, Artificial Sequence
  Description of Artificial Sequence: Synthetic oligonucleotide
  Sense strand starting at position 1471 of SEQ ID NO: 1882335
ggaaucauuucugaaauaa

SEQ ID NO: 2113017 - RNA, 19 nt, Artificial Sequence
  Description of Artificial Sequence: Synthetic oligonucleotide
  Antisense strand to SEQ ID NO: 2113016
uuauuucagaaaugauucc

SEQ ID NO: 2113018 - RNA, 19 nt, Artificial Sequence
  Description of Artificial Sequence: Synthetic oligonucleotide
  Sense strand starting at position 1495 of SEQ ID NO: 1882335
ucuuguuaacaaugugucu

SEQ ID NO: 2113019 - RNA, 19 nt, Artificial Sequence
  Description of Artificial Sequence: Synthetic oligonucleotide
  Antisense strand to SEQ ID NO: 2113018
agacacauuguuaacaaga

SEQ ID NO: 2113020 - RNA, 19 nt, Artificial Sequence
  Description of Artificial Sequence: Synthetic oligonucleotide
  Sense strand starting at position 1498 of SEQ ID NO: 1882335
uguuaacaaugugucugau

SEQ ID NO: 2113021 - RNA, 19 nt, Artificial Sequence
  Description of Artificial Sequence: Synthetic oligonucleotide
  Antisense strand to SEQ ID NO: 2113020
aucagacacauuguuaaca

SEQ ID NO: 2113022 - RNA, 19 nt, Artificial Sequence
  Description of Artificial Sequence: Synthetic oligonucleotide
  Sense strand starting at position 1500 of SEQ ID NO: 1882335
uuaacaaugugucugauac

SEQ ID NO: 2113023 - RNA, 19 nt, Artificial Sequence
  Description of Artificial Sequence: Synthetic oligonucleotide
  Antisense strand to SEQ ID NO: 2113022
guaucagacacauuguuaa

SEQ ID NO: 2113024 - RNA, 19 nt, Artificial Sequence
  Description of Artificial Sequence: Synthetic oligonucleotide
  Sense strand starting at position 1567 of SEQ ID NO: 1882335
ugcuauugcgaagauugua

SEQ ID NO: 2113025 - RNA, 19 nt, Artificial Sequence
  Description of Artificial Sequence: Synthetic oligonucleotide
  Antisense strand to SEQ ID NO: 2113024
uacaaucuucgcaauagca

SEQ ID NO: 2113026 - RNA, 19 nt, Artificial Sequence
  Description of Artificial Sequence: Synthetic oligonucleotide
  Sense strand starting at position 1662 of SEQ ID NO: 1882335
accauuagaucugucaaga

SEQ ID NO: 2113027 - RNA, 19 nt, Artificial Sequence
  Description of Artificial Sequence: Synthetic oligonucleotide
  Antisense strand to SEQ ID NO: 2113026
ucuugacagaucuaauggu

SEQ ID NO: 2113028 - RNA, 19 nt, Artificial Sequence
  Description of Artificial Sequence: Synthetic oligonucleotide
  Sense strand starting at position 1751 of SEQ ID NO: 1882335
agauuaacuaguugagagu

SEQ ID NO: 2113029 - RNA, 19 nt, Artificial Sequence
  Description of Artificial Sequence: Synthetic oligonucleotide
  Antisense strand to SEQ ID NO: 2113028
acucucaacuaguuaaucu

SEQ ID NO: 2113030 - RNA, 19 nt, Artificial Sequence
  Description of Artificial Sequence: Synthetic oligonucleotide
  Sense strand starting at position 1831 of SEQ ID NO: 1882335
ucaugugagucucuuugaa

SEQ ID NO: 2113031 - RNA, 19 nt, Artificial Sequence
  Description of Artificial Sequence: Synthetic oligonucleotide
  Antisense strand to SEQ ID NO: 2113030
uucaaagagacucacauga

SEQ ID NO: 2113032 - RNA, 19 nt, Artificial Sequence
  Description of Artificial Sequence: Synthetic oligonucleotide
  Sense strand starting at position 1833 of SEQ ID NO: 1882335
augugagucucuuugaagu

SEQ ID NO: 2113033 - RNA, 19 nt, Artificial Sequence
  Description of Artificial Sequence: Synthetic oligonucleotide
  Antisense strand to SEQ ID NO: 2113032
acuucaaagagacucacau

SEQ ID NO: 2113034 - RNA, 19 nt, Artificial Sequence
  Description of Artificial Sequence: Synthetic oligonucleotide
  Sense strand starting at position 1993 of SEQ ID NO: 1882335
cugcaaauccuacggauga

SEQ ID NO: 2113035 - RNA, 19 nt, Artificial Sequence
  Description of Artificial Sequence: Synthetic oligonucleotide
  Antisense strand to SEQ ID NO: 2113034
ucauccguaggauuugcag

SEQ ID NO: 2113036 - RNA, 19 nt, Artificial Sequence
  Description of Artificial Sequence: Synthetic oligonucleotide
  Sense strand starting at position 1995 of SEQ ID NO: 1882335
gcaaauccuacggaugaca

SEQ ID NO: 2113037 - RNA, 19 nt, Artificial Sequence
  Description of Artificial Sequence: Synthetic oligonucleotide
  Antisense strand to SEQ ID NO: 2113036
ugucauccguaggauuugc

SEQ ID NO: 2113038 - RNA, 19 nt, Artificial Sequence
  Description of Artificial Sequence: Synthetic oligonucleotide
  Sense strand starting at position 3754 of SEQ ID NO: 1882335
aagggauugcuuuaguaau

SEQ ID NO: 2113039 - RNA, 19 nt, Artificial Sequence
  Description of Artificial Sequence: Synthetic oligonucleotide
  Antisense strand to SEQ ID NO: 2113038
auuacuaaagcaaucccuu

SEQ ID NO: 2113040 - RNA, 19 nt, Artificial Sequence
  Description of Artificial Sequence: Synthetic oligonucleotide
  Sense strand starting at position 3756 of SEQ ID NO: 1882335
gggauugcuuuaguaauuc

SEQ ID NO: 2113041 - RNA, 19 nt, Artificial Sequence
  Description of Artificial Sequence: Synthetic oligonucleotide
  Antisense strand to SEQ ID NO: 2113040
gaauuacuaaagcaauccc

SEQ ID NO: 2113042 - RNA, 19 nt, Artificial Sequence
  Description of Artificial Sequence: Synthetic oligonucleotide
  Sense strand starting at position 3768 of SEQ ID NO: 1882335
guaauuccaugauccaugu

SEQ ID NO: 2113043 - RNA, 19 nt, Artificial Sequence
  Description of Artificial Sequence: Synthetic oligonucleotide
  Antisense strand to SEQ ID NO: 2113042
acauggaucauggaauuac

SEQ ID NO: 2113044 - RNA, 19 nt, Artificial Sequence
  Description of Artificial Sequence: Synthetic oligonucleotide
  Sense strand starting at position 3779 of SEQ ID NO: 1882335
auccauguugcuggaaaca

SEQ ID NO: 2113045 - RNA, 19 nt, Artificial Sequence
  Description of Artificial Sequence: Synthetic oligonucleotide
  Antisense strand to SEQ ID NO: 2113044
uguuuccagcaacauggau

SEQ ID NO: 2113046 - RNA, 19 nt, Artificial Sequence
  Description of Artificial Sequence: Synthetic oligonucleotide
  Sense strand starting at position 3876 of SEQ ID NO: 1882335
guuuaauaacaaugaaagc

SEQ ID NO: 2113047 - RNA, 19 nt, Artificial Sequence
  Description of Artificial Sequence: Synthetic oligonucleotide
  Antisense strand to SEQ ID NO: 2113046
gcuuucauuguuauuaaac

SEQ ID NO: 2113048 - RNA, 19 nt, Artificial Sequence
  Description of Artificial Sequence: Synthetic oligonucleotide
  Sense strand starting at position 3948 of SEQ ID NO: 1882335
agacauuuaucagaaacug

SEQ ID NO: 2113049 - RNA, 19 nt, Artificial Sequence
  Description of Artificial Sequence: Synthetic oligonucleotide
  Antisense strand to SEQ ID NO: 2113048
caguuucugauaaaugucu

SEQ ID NO: 2113050 - RNA, 19 nt, Artificial Sequence
  Description of Artificial Sequence: Synthetic oligonucleotide
  Sense strand starting at position 3981 of SEQ ID NO: 1882335
aaguuaagugauugauuac

SEQ ID NO: 2113051 - RNA, 19 nt, Artificial Sequence
  Description of Artificial Sequence: Synthetic oligonucleotide
  Antisense strand to SEQ ID NO: 2113050
guaaucaaucacuuaacuu

SEQ ID NO: 2113052 - RNA, 19 nt, Artificial Sequence
  Description of Artificial Sequence: Synthetic oligonucleotide
  Sense strand starting at position 736 of SEQ ID NO: 1882336
augaucucuuauguggauu

SEQ ID NO: 2113053 - RNA, 19 nt, Artificial Sequence
  Description of Artificial Sequence: Synthetic oligonucleotide
  Antisense strand to SEQ ID NO: 2113052
aauccacauaagagaucau

SEQ ID NO: 2113054 - RNA, 19 nt, Artificial Sequence
  Description of Artificial Sequence: Synthetic oligonucleotide
  Sense strand starting at position 739 of SEQ ID NO: 1882336
aucucuuauguggauucua

SEQ ID NO: 2113055 - RNA, 19 nt, Artificial Sequence
  Description of Artificial Sequence: Synthetic oligonucleotide
  Antisense strand to SEQ ID NO: 2113054
uagaauccacauaagagau

SEQ ID NO: 2113056 - RNA, 19 nt, Artificial Sequence
  Description of Artificial Sequence: Synthetic oligonucleotide
  Sense strand starting at position 803 of SEQ ID NO: 1882336
gguggagacguauggaaau

SEQ ID NO: 2113057 - RNA, 19 nt, Artificial Sequence
  Description of Artificial Sequence: Synthetic oligonucleotide
  Antisense strand to SEQ ID NO: 2113056
auuuccauacgucuccacc

SEQ ID NO: 2113058 - RNA, 19 nt, Artificial Sequence
  Description of Artificial Sequence: Synthetic oligonucleotide
  Sense strand starting at position 809 of SEQ ID NO: 1882336
gacguauggaaaugguuaa

SEQ ID NO: 2113059 - RNA, 19 nt, Artificial Sequence
  Description of Artificial Sequence: Synthetic oligonucleotide
  Antisense strand to SEQ ID NO: 2113058
uuaaccauuuccauacguc

SEQ ID NO: 2113060 - RNA, 19 nt, Artificial Sequence
  Description of Artificial Sequence: Synthetic oligonucleotide
  Sense strand starting at position 824 of SEQ ID NO: 1882336
uuaagauguuggucaaagg

SEQ ID NO: 2113061 - RNA, 19 nt, Artificial Sequence
  Description of Artificial Sequence: Synthetic oligonucleotide
  Antisense strand to SEQ ID NO: 2113060
ccuuugaccaacaucuuaa

SEQ ID NO: 2113062 - RNA, 19 nt, Artificial Sequence
  Description of Artificial Sequence: Synthetic oligonucleotide
  Sense strand starting at position 852 of SEQ ID NO: 1882336
ugcaguucuauaggaugaa

SEQ ID NO: 2113063 - RNA, 19 nt, Artificial Sequence
  Description of Artificial Sequence: Synthetic oligonucleotide
  Antisense strand to SEQ ID NO: 2113062
uucauccuauagaacugca

SEQ ID NO: 2113064 - RNA, 19 nt, Artificial Sequence
  Description of Artificial Sequence: Synthetic oligonucleotide
  Sense strand starting at position 878 of SEQ ID NO: 1882336
agagauguaaugcauagca

SEQ ID NO: 2113065 - RNA, 19 nt, Artificial Sequence
  Description of Artificial Sequence: Synthetic oligonucleotide
  Antisense strand to SEQ ID NO: 2113064
ugcuaugcauuacaucucu

SEQ ID NO: 2113066 - RNA, 19 nt, Artificial Sequence
  Description of Artificial Sequence: Synthetic oligonucleotide
  Sense strand starting at position 880 of SEQ ID NO: 1882336
agauguaaugcauagcaua

SEQ ID NO: 2113067 - RNA, 19 nt, Artificial Sequence
  Description of Artificial Sequence: Synthetic oligonucleotide
  Antisense strand to SEQ ID NO: 2113066
uaugcuaugcauuacaucu

SEQ ID NO: 2113068 - RNA, 19 nt, Artificial Sequence
  Description of Artificial Sequence: Synthetic oligonucleotide
  Sense strand starting at position 925 of SEQ ID NO: 1882336
uggaaacuugcggagagua

SEQ ID NO: 2113069 - RNA, 19 nt, Artificial Sequence
  Description of Artificial Sequence: Synthetic oligonucleotide
  Antisense strand to SEQ ID NO: 2113068
uacucuccgcaaguuucca

SEQ ID NO: 2113070 - RNA, 19 nt, Artificial Sequence
  Description of Artificial Sequence: Synthetic oligonucleotide
  Sense strand starting at position 927 of SEQ ID NO: 1882336
gaaacuugcggagaguaca

SEQ ID NO: 2113071 - RNA, 19 nt, Artificial Sequence
  Description of Artificial Sequence: Synthetic oligonucleotide
  Antisense strand to SEQ ID NO: 2113070
uguacucuccgcaaguuuc

SEQ ID NO: 2113072 - RNA, 19 nt, Artificial Sequence
  Description of Artificial Sequence: Synthetic oligonucleotide
  Sense strand starting at position 1005 of SEQ ID NO: 1882336
uuagcuugacuguagaaau

SEQ ID NO: 2113073 - RNA, 19 nt, Artificial Sequence
  Description of Artificial Sequence: Synthetic oligonucleotide
  Antisense strand to SEQ ID NO: 2113072
auuucuacagucaagcuaa

SEQ ID NO: 2113074 - RNA, 19 nt, Artificial Sequence
  Description of Artificial Sequence: Synthetic oligonucleotide
  Sense strand starting at position 1593 of SEQ ID NO: 1882336
guaauccucccagggauuc

SEQ ID NO: 2113075 - RNA, 19 nt, Artificial Sequence
  Description of Artificial Sequence: Synthetic oligonucleotide
  Antisense strand to SEQ ID NO: 2113074
gaaucccugggaggauuac

SEQ ID NO: 2113076 - RNA, 19 nt, Artificial Sequence
  Description of Artificial Sequence: Synthetic oligonucleotide
  Sense strand starting at position 1777 of SEQ ID NO: 1882336
gagcgucugcccuuuccua

SEQ ID NO: 2113077 - RNA, 19 nt, Artificial Sequence
  Description of Artificial Sequence: Synthetic oligonucleotide
  Antisense strand to SEQ ID NO: 2113076
uaggaaagggcagacgcuc

SEQ ID NO: 2113078 - RNA, 19 nt, Artificial Sequence
  Description of Artificial Sequence: Synthetic oligonucleotide
  Sense strand starting at position 1791 of SEQ ID NO: 1882336
uccuaagucuccuuggaaa

SEQ ID NO: 2113079 - RNA, 19 nt, Artificial Sequence
  Description of Artificial Sequence: Synthetic oligonucleotide
  Antisense strand to SEQ ID NO: 2113078
uuuccaaggagacuuagga

SEQ ID NO: 2113080 - RNA, 19 nt, Artificial Sequence
  Description of Artificial Sequence: Synthetic oligonucleotide
  Sense strand starting at position 1793 of SEQ ID NO: 1882336
cuaagucuccuuggaaaga

SEQ ID NO: 2113081 - RNA, 19 nt, Artificial Sequence
  Description of Artificial Sequence: Synthetic oligonucleotide
  Antisense strand to SEQ ID NO: 2113080
ucuuuccaaggagacuuag

SEQ ID NO: 2113082 - RNA, 19 nt, Artificial Sequence
  Description of Artificial Sequence: Synthetic oligonucleotide
  Sense strand starting at position 1809 of SEQ ID NO: 1882336
agaaguauucgcuuucguu

SEQ ID NO: 2113083 - RNA, 19 nt, Artificial Sequence
  Description of Artificial Sequence: Synthetic oligonucleotide
  Antisense strand to SEQ ID NO: 2113082
aacgaaagcgaauacuucu

SEQ ID NO: 2113084 - RNA, 19 nt, Artificial Sequence
  Description of Artificial Sequence: Synthetic oligonucleotide
  Sense strand starting at position 1810 of SEQ ID NO: 1882336
gaaguauucgcuuucguuu

SEQ ID NO: 2113085 - RNA, 19 nt, Artificial Sequence
  Description of Artificial Sequence: Synthetic oligonucleotide
  Antisense strand to SEQ ID NO: 2113084
aaacgaaagcgaauacuuc

SEQ ID NO: 2113086 - RNA, 19 nt, Artificial Sequence
  Description of Artificial Sequence: Synthetic oligonucleotide
  Sense strand starting at position 2011 of SEQ ID NO: 1882336
uaaggagugaccggaagua

SEQ ID NO: 2113087 - RNA, 19 nt, Artificial Sequence
  Description of Artificial Sequence: Synthetic oligonucleotide
  Antisense strand to SEQ ID NO: 2113086
uacuuccggucacuccuua

SEQ ID NO: 2113088 - RNA, 19 nt, Artificial Sequence
  Description of Artificial Sequence: Synthetic oligonucleotide
  Sense strand starting at position 2210 of SEQ ID NO: 1882336
uggaauuguguacacaguu

SEQ ID NO: 2113089 - RNA, 19 nt, Artificial Sequence
  Description of Artificial Sequence: Synthetic oligonucleotide
  Antisense strand to SEQ ID NO: 2113088
aacuguguacacaauucca

SEQ ID NO: 2113090 - RNA, 19 nt, Artificial Sequence
  Description of Artificial Sequence: Synthetic oligonucleotide
  Sense strand starting at position 2339 of SEQ ID NO: 1882336
gucgaucucagguaaagaa

SEQ ID NO: 2113091 - RNA, 19 nt, Artificial Sequence
  Description of Artificial Sequence: Synthetic oligonucleotide
  Antisense strand to SEQ ID NO: 2113090
uucuuuaccugagaucgac

SEQ ID NO: 2113092 - RNA, 19 nt, Artificial Sequence
  Description of Artificial Sequence: Synthetic oligonucleotide
  Sense strand starting at position 2388 of SEQ ID NO: 1882336
uguucuuaggaucaucgau

SEQ ID NO: 2113093 - RNA, 19 nt, Artificial Sequence
  Description of Artificial Sequence: Synthetic oligonucleotide
  Antisense strand to SEQ ID NO: 2113092
aucgaugauccuaagaaca

SEQ ID NO: 2113094 - RNA, 19 nt, Artificial Sequence
  Description of Artificial Sequence: Synthetic oligonucleotide
  Sense strand starting at position 2461 of SEQ ID NO: 1882336
ggugauaagcauugaacuc

SEQ ID NO: 2113095 - RNA, 19 nt, Artificial Sequence
  Description of Artificial Sequence: Synthetic oligonucleotide
  Antisense strand to SEQ ID NO: 2113094
gaguucaaugcuuaucacc

SEQ ID NO: 2113096 - RNA, 19 nt, Artificial Sequence
  Description of Artificial Sequence: Synthetic oligonucleotide
  Sense strand starting at position 2992 of SEQ ID NO: 1882336
ggaggugaguggaauuaag

SEQ ID NO: 2113097 - RNA, 19 nt, Artificial Sequence
  Description of Artificial Sequence: Synthetic oligonucleotide
  Antisense strand to SEQ ID NO: 2113096
cuuaauuccacucaccucc

SEQ ID NO: 2113098 - RNA, 19 nt, Artificial Sequence
  Description of Artificial Sequence: Synthetic oligonucleotide
  Sense strand starting at position 3001 of SEQ ID NO: 1882336
uggaauuaagcugagcaca

SEQ ID NO: 2113099 - RNA, 19 nt, Artificial Sequence
  Description of Artificial Sequence: Synthetic oligonucleotide
  Antisense strand to SEQ ID NO: 2113098
ugugcucagcuuaauucca

SEQ ID NO: 2113100 - RNA, 19 nt, Artificial Sequence
  Description of Artificial Sequence: Synthetic oligonucleotide
  Sense strand starting at position 3003 of SEQ ID NO: 1882336
gaauuaagcugagcacaga

SEQ ID NO: 2113101 - RNA, 19 nt, Artificial Sequence
  Description of Artificial Sequence: Synthetic oligonucleotide
  Antisense strand to SEQ ID NO: 2113100
ucugugcucagcuuaauuc

SEQ ID NO: 2113102 - RNA, 19 nt, Artificial Sequence
  Description of Artificial Sequence: Synthetic oligonucleotide
  Sense strand starting at position 3030 of SEQ ID NO: 1882336
ucuugagaucuguauuccu

SEQ ID NO: 2113103 - RNA, 19 nt, Artificial Sequence
  Description of Artificial Sequence: Synthetic oligonucleotide
  Antisense strand to SEQ ID NO: 2113102
aggaauacagaucucaaga

SEQ ID NO: 2113104 - RNA, 19 nt, Artificial Sequence
  Description of Artificial Sequence: Synthetic oligonucleotide
  Sense strand starting at position 3033 of SEQ ID NO: 1882336
ugagaucuguauuccuaaa

SEQ ID NO: 2113105 - RNA, 19 nt, Artificial Sequence
  Description of Artificial Sequence: Synthetic oligonucleotide
  Antisense strand to SEQ ID NO: 2113104
uuuaggaauacagaucuca

SEQ ID NO: 2113106 - RNA, 19 nt, Artificial Sequence
  Description of Artificial Sequence: Synthetic oligonucleotide
  Sense strand starting at position 3035 of SEQ ID NO: 1882336
agaucuguauuccuaaaug

SEQ ID NO: 2113107 - RNA, 19 nt, Artificial Sequence
  Description of Artificial Sequence: Synthetic oligonucleotide
  Antisense strand to SEQ ID NO: 2113106
cauuuaggaauacagaucu

SEQ ID NO: 2113108 - RNA, 19 nt, Artificial Sequence
  Description of Artificial Sequence: Synthetic oligonucleotide
  Sense strand starting at position 3285 of SEQ ID NO: 1882336
augguaaacugauugcaau

SEQ ID NO: 2113109 - RNA, 19 nt, Artificial Sequence
  Description of Artificial Sequence: Synthetic oligonucleotide
  Antisense strand to SEQ ID NO: 2113108
auugcaaucaguuuaccau

SEQ ID NO: 2113110 - RNA, 19 nt, Artificial Sequence
  Description of Artificial Sequence: Synthetic oligonucleotide
  Sense strand starting at position 3286 of SEQ ID NO: 1882336
ugguaaacugauugcaaug

SEQ ID NO: 2113111 - RNA, 19 nt, Artificial Sequence
  Description of Artificial Sequence: Synthetic oligonucleotide
  Antisense strand to SEQ ID NO: 2113110
cauugcaaucaguuuacca

SEQ ID NO: 2113112 - RNA, 19 nt, Artificial Sequence
  Description of Artificial Sequence: Synthetic oligonucleotide
  Sense strand starting at position 3353 of SEQ ID NO: 1882336
cugacaugagauugcaagu

SEQ ID NO: 2113113 - RNA, 19 nt, Artificial Sequence
  Description of Artificial Sequence: Synthetic oligonucleotide
  Antisense strand to SEQ ID NO: 2113112
acuugcaaucucaugucag

SEQ ID NO: 2113114 - RNA, 19 nt, Artificial Sequence
  Description of Artificial Sequence: Synthetic oligonucleotide
  Sense strand starting at position 3392 of SEQ ID NO: 1882336
uguccuaugaggcagugaa

SEQ ID NO: 2113115 - RNA, 19 nt, Artificial Sequence
  Description of Artificial Sequence: Synthetic oligonucleotide
  Antisense strand to SEQ ID NO: 2113114
uucacugccucauaggaca

SEQ ID NO: 2113116 - RNA, 19 nt, Artificial Sequence
  Description of Artificial Sequence: Synthetic oligonucleotide
  Sense strand starting at position 3411 of SEQ ID NO: 1882336
aacuauggccuuugggauu

SEQ ID NO: 2113117 - RNA, 19 nt, Artificial Sequence
  Description of Artificial Sequence: Synthetic oligonucleotide
  Antisense strand to SEQ ID NO: 2113116
aaucccaaaggccauaguu

SEQ ID NO: 2113118 - RNA, 19 nt, Artificial Sequence
  Description of Artificial Sequence: Synthetic oligonucleotide
  Sense strand starting at position 3444 of SEQ ID NO: 1882336
gacagaaacuaguugcauc

SEQ ID NO: 2113119 - RNA, 19 nt, Artificial Sequence
  Description of Artificial Sequence: Synthetic oligonucleotide
  Antisense strand to SEQ ID NO: 2113118
gaugcaacuaguuucuguc

SEQ ID NO: 2113120 - RNA, 19 nt, Artificial Sequence
  Description of Artificial Sequence: Synthetic oligonucleotide
  Sense strand starting at position 3540 of SEQ ID NO: 1882336
aguaaauagugaccuccaa

SEQ ID NO: 2113121 - RNA, 19 nt, Artificial Sequence
  Description of Artificial Sequence: Synthetic oligonucleotide
  Antisense strand to SEQ ID NO: 2113120
uuggaggucacuauuuacu

SEQ ID NO: 2113122 - RNA, 19 nt, Artificial Sequence
  Description of Artificial Sequence: Synthetic oligonucleotide
  Sense strand starting at position 3726 of SEQ ID NO: 1882336
uccugaucaguugaaggua

SEQ ID NO: 2113123 - RNA, 19 nt, Artificial Sequence
  Description of Artificial Sequence: Synthetic oligonucleotide
  Antisense strand to SEQ ID NO: 2113122
uaccuucaacugaucagga

SEQ ID NO: 2113124 - RNA, 19 nt, Artificial Sequence
  Description of Artificial Sequence: Synthetic oligonucleotide
  Sense strand starting at position 3729 of SEQ ID NO: 1882336
ugaucaguugaagguauua

SEQ ID NO: 2113125 - RNA, 19 nt, Artificial Sequence
  Description of Artificial Sequence: Synthetic oligonucleotide
  Antisense strand to SEQ ID NO: 2113124
uaauaccuucaacugauca

SEQ ID NO: 2113126 - RNA, 19 nt, Artificial Sequence
  Description of Artificial Sequence: Synthetic oligonucleotide
  Sense strand starting at position 3909 of SEQ ID NO: 1882336
guauaaaguaagggauagu

SEQ ID NO: 2113127 - RNA, 19 nt, Artificial Sequence
  Description of Artificial Sequence: Synthetic oligonucleotide
  Antisense strand to SEQ ID NO: 2113126
acuaucccuuacuuuauac

SEQ ID NO: 2113128 - RNA, 19 nt, Artificial Sequence
  Description of Artificial Sequence: Synthetic oligonucleotide
  Sense strand starting at position 3918 of SEQ ID NO: 1882336
aagggauaguuagcuacaa

SEQ ID NO: 2113129 - RNA, 19 nt, Artificial Sequence
  Description of Artificial Sequence: Synthetic oligonucleotide
  Antisense strand to SEQ ID NO: 2113128
uuguagcuaacuaucccuu

SEQ ID NO: 2113130 - RNA, 19 nt, Artificial Sequence
  Description of Artificial Sequence: Synthetic oligonucleotide
  Sense strand starting at position 3933 of SEQ ID NO: 1882336
acaacauaccaacgaguua

SEQ ID NO: 2113131 - RNA, 19 nt, Artificial Sequence
  Description of Artificial Sequence: Synthetic oligonucleotide
  Antisense strand to SEQ ID NO: 2113130
uaacucguugguauguugu

SEQ ID NO: 2113132 - RNA, 19 nt, Artificial Sequence
  Description of Artificial Sequence: Synthetic oligonucleotide
  Sense strand starting at position 13 of SEQ ID NO: 1882337
ugauuacauuugggaucua

SEQ ID NO: 2113133 - RNA, 19 nt, Artificial Sequence
  Description of Artificial Sequence: Synthetic oligonucleotide
  Antisense strand to SEQ ID NO: 2113132
uagaucccaaauguaauca

SEQ ID NO: 2113134 - RNA, 19 nt, Artificial Sequence
  Description of Artificial Sequence: Synthetic oligonucleotide
  Sense strand starting at position 43 of SEQ ID NO: 1882337
gggcauggcagugaucacu

SEQ ID NO: 2113135 - RNA, 19 nt, Artificial Sequence
  Description of Artificial Sequence: Synthetic oligonucleotide
  Antisense strand to SEQ ID NO: 2113134
agugaucacugccaugccc

SEQ ID NO: 2113136 - RNA, 19 nt, Artificial Sequence
  Description of Artificial Sequence: Synthetic oligonucleotide
  Sense strand starting at position 46 of SEQ ID NO: 1882337
cauggcagugaucacuuaa

SEQ ID NO: 2113137 - RNA, 19 nt, Artificial Sequence
  Description of Artificial Sequence: Synthetic oligonucleotide
  Antisense strand to SEQ ID NO: 2113136
uuaagugaucacugccaug

SEQ ID NO: 2113138 - RNA, 19 nt, Artificial Sequence
  Description of Artificial Sequence: Synthetic oligonucleotide
  Sense strand starting at position 234 of SEQ ID NO: 1882337
uugcauagacuuugcaaua

SEQ ID NO: 2113139 - RNA, 19 nt, Artificial Sequence
  Description of Artificial Sequence: Synthetic oligonucleotide
  Antisense strand to SEQ ID NO: 2113138
uauugcaaagucuaugcaa

SEQ ID NO: 2113140 - RNA, 19 nt, Artificial Sequence
  Description of Artificial Sequence: Synthetic oligonucleotide
  Sense strand starting at position 255 of SEQ ID NO: 1882337
gggagcugcagauaacuau

SEQ ID NO: 2113141 - RNA, 19 nt, Artificial Sequence
  Description of Artificial Sequence: Synthetic oligonucleotide
  Antisense strand to SEQ ID NO: 2113140
auaguuaucugcagcuccc

SEQ ID NO: 2113142 - RNA, 19 nt, Artificial Sequence
  Description of Artificial Sequence: Synthetic oligonucleotide
  Sense strand starting at position 259 of SEQ ID NO: 1882337
gcugcagauaacuauagga

SEQ ID NO: 2113143 - RNA, 19 nt, Artificial Sequence
  Description of Artificial Sequence: Synthetic oligonucleotide
  Antisense strand to SEQ ID NO: 2113142
uccuauaguuaucugcagc

SEQ ID NO: 2113144 - RNA, 19 nt, Artificial Sequence
  Description of Artificial Sequence: Synthetic oligonucleotide
  Sense strand starting at position 331 of SEQ ID NO: 1882337
cugucuuuaggaugaguca

SEQ ID NO: 2113145 - RNA, 19 nt, Artificial Sequence
  Description of Artificial Sequence: Synthetic oligonucleotide
  Antisense strand to SEQ ID NO: 2113144
ugacucauccuaaagacag

SEQ ID NO: 2113146 - RNA, 19 nt, Artificial Sequence
  Description of Artificial Sequence: Synthetic oligonucleotide
  Sense strand starting at position 332 of SEQ ID NO: 1882337
ugucuuuaggaugagucau

SEQ ID NO: 2113147 - RNA, 19 nt, Artificial Sequence
  Description of Artificial Sequence: Synthetic oligonucleotide
  Antisense strand to SEQ ID NO: 2113146
augacucauccuaaagaca

SEQ ID NO: 2113148 - RNA, 19 nt, Artificial Sequence
  Description of Artificial Sequence: Synthetic oligonucleotide
  Sense strand starting at position 334 of SEQ ID NO: 1882337
ucuuuaggaugagucauaa

SEQ ID NO: 2113149 - RNA, 19 nt, Artificial Sequence
  Description of Artificial Sequence: Synthetic oligonucleotide
  Antisense strand to SEQ ID NO: 2113148
uuaugacucauccuaaaga

SEQ ID NO: 2113150 - RNA, 19 nt, Artificial Sequence
  Description of Artificial Sequence: Synthetic oligonucleotide
  Sense strand starting at position 584 of SEQ ID NO: 1882337
ucucacuugucagcagaaa

SEQ ID NO: 2113151 - RNA, 19 nt, Artificial Sequence
  Description of Artificial Sequence: Synthetic oligonucleotide
  Antisense strand to SEQ ID NO: 2113150
uuucugcugacaagugaga

SEQ ID NO: 2113152 - RNA, 19 nt, Artificial Sequence
  Description of Artificial Sequence: Synthetic oligonucleotide
  Sense strand starting at position 585 of SEQ ID NO: 1882337
cucacuugucagcagaaau

SEQ ID NO: 2113153 - RNA, 19 nt, Artificial Sequence
  Description of Artificial Sequence: Synthetic oligonucleotide
  Antisense strand to SEQ ID NO: 2113152
auuucugcugacaagugag

SEQ ID NO: 2113154 - RNA, 19 nt, Artificial Sequence
  Description of Artificial Sequence: Synthetic oligonucleotide
  Sense strand starting at position 743 of SEQ ID NO: 1882337
gucagucgucuugucuaua

SEQ ID NO: 2113155 - RNA, 19 nt, Artificial Sequence
  Description of Artificial Sequence: Synthetic oligonucleotide
  Antisense strand to SEQ ID NO: 2113154
uauagacaagacgacugac

SEQ ID NO: 2113156 - RNA, 19 nt, Artificial Sequence
  Description of Artificial Sequence: Synthetic oligonucleotide
  Sense strand starting at position 748 of SEQ ID NO: 1882337
ucgucuugucuauaaucaa

SEQ ID NO: 2113157 - RNA, 19 nt, Artificial Sequence
  Description of Artificial Sequence: Synthetic oligonucleotide
  Antisense strand to SEQ ID NO: 2113156
uugauuauagacaagacga

SEQ ID NO: 2113158 - RNA, 19 nt, Artificial Sequence
  Description of Artificial Sequence: Synthetic oligonucleotide
  Sense strand starting at position 791 of SEQ ID NO: 1882337
ucaguaaucuggcuguaga

SEQ ID NO: 2113159 - RNA, 19 nt, Artificial Sequence
  Description of Artificial Sequence: Synthetic oligonucleotide
  Antisense strand to SEQ ID NO: 2113158
ucuacagccagauuacuga

SEQ ID NO: 2113160 - RNA, 19 nt, Artificial Sequence
  Description of Artificial Sequence: Synthetic oligonucleotide
  Sense strand starting at position 792 of SEQ ID NO: 1882337
caguaaucuggcuguagau

SEQ ID NO: 2113161 - RNA, 19 nt, Artificial Sequence
  Description of Artificial Sequence: Synthetic oligonucleotide
  Antisense strand to SEQ ID NO: 2113160
aucuacagccagauuacug

SEQ ID NO: 2113162 - RNA, 19 nt, Artificial Sequence
  Description of Artificial Sequence: Synthetic oligonucleotide
  Sense strand starting at position 1042 of SEQ ID NO: 1882337
uuguuuagucugcaacuga

SEQ ID NO: 2113163 - RNA, 19 nt, Artificial Sequence
  Description of Artificial Sequence: Synthetic oligonucleotide
  Antisense strand to SEQ ID NO: 2113162
ucaguugcagacuaaacaa

SEQ ID NO: 2113164 - RNA, 19 nt, Artificial Sequence
  Description of Artificial Sequence: Synthetic oligonucleotide
  Sense strand starting at position 1074 of SEQ ID NO: 1882337
aucucaagcuugguuauau

SEQ ID NO: 2113165 - RNA, 19 nt, Artificial Sequence
  Description of Artificial Sequence: Synthetic oligonucleotide
  Antisense strand to SEQ ID NO: 2113164
auauaaccaagcuugagau

SEQ ID NO: 2113166 - RNA, 19 nt, Artificial Sequence
  Description of Artificial Sequence: Synthetic oligonucleotide
  Sense strand starting at position 1075 of SEQ ID NO: 1882337
ucucaagcuugguuauauc

SEQ ID NO: 2113167 - RNA, 19 nt, Artificial Sequence
  Description of Artificial Sequence: Synthetic oligonucleotide
  Antisense strand to SEQ ID NO: 2113166
gauauaaccaagcuugaga

SEQ ID NO: 2113168 - RNA, 19 nt, Artificial Sequence
  Description of Artificial Sequence: Synthetic oligonucleotide
  Sense strand starting at position 1087 of SEQ ID NO: 1882337
uuauaucugcugcagauua

SEQ ID NO: 2113169 - RNA, 19 nt, Artificial Sequence
  Description of Artificial Sequence: Synthetic oligonucleotide
  Antisense strand to SEQ ID NO: 2113168
uaaucugcagcagauauaa

SEQ ID NO: 2113170 - RNA, 19 nt, Artificial Sequence
  Description of Artificial Sequence: Synthetic oligonucleotide
  Sense strand starting at position 1089 of SEQ ID NO: 1882337
auaucugcugcagauuauu

SEQ ID NO: 2113171 - RNA, 19 nt, Artificial Sequence
  Description of Artificial Sequence: Synthetic oligonucleotide
  Antisense strand to SEQ ID NO: 2113170
aauaaucugcagcagauau

SEQ ID NO: 2113172 - RNA, 19 nt, Artificial Sequence
  Description of Artificial Sequence: Synthetic oligonucleotide
  Sense strand starting at position 2353 of SEQ ID NO: 1882337
uuauaugcauuugagagaa

SEQ ID NO: 2113173 - RNA, 19 nt, Artificial Sequence
  Description of Artificial Sequence: Synthetic oligonucleotide
  Antisense strand to SEQ ID NO: 2113172
uucucucaaaugcauauaa

SEQ ID NO: 2113174 - RNA, 19 nt, Artificial Sequence
  Description of Artificial Sequence: Synthetic oligonucleotide
  Sense strand starting at position 2402 of SEQ ID NO: 1882337
auaccaguuccuugggcaa

SEQ ID NO: 2113175 - RNA, 19 nt, Artificial Sequence
  Description of Artificial Sequence: Synthetic oligonucleotide
  Antisense strand to SEQ ID NO: 2113174
uugcccaaggaacugguau

SEQ ID NO: 2113176 - RNA, 19 nt, Artificial Sequence
  Description of Artificial Sequence: Synthetic oligonucleotide
  Sense strand starting at position 2553 of SEQ ID NO: 1882337
agaauaauaugagauagag

SEQ ID NO: 2113177 - RNA, 19 nt, Artificial Sequence
  Description of Artificial Sequence: Synthetic oligonucleotide
  Antisense strand to SEQ ID NO: 2113176
cucuaucucauauuauucu

SEQ ID NO: 2113178 - RNA, 19 nt, Artificial Sequence
  Description of Artificial Sequence: Synthetic oligonucleotide
  Sense strand starting at position 2635 of SEQ ID NO: 1882337
gggcuauagacucaugucu

SEQ ID NO: 2113179 - RNA, 19 nt, Artificial Sequence
  Description of Artificial Sequence: Synthetic oligonucleotide
  Antisense strand to SEQ ID NO: 2113178
agacaugagucuauagccc

SEQ ID NO: 2113180 - RNA, 19 nt, Artificial Sequence
  Description of Artificial Sequence: Synthetic oligonucleotide
  Sense strand starting at position 2650 of SEQ ID NO: 1882337
gucugcacucucuggagaa

SEQ ID NO: 2113181 - RNA, 19 nt, Artificial Sequence
  Description of Artificial Sequence: Synthetic oligonucleotide
  Antisense strand to SEQ ID NO: 2113180
uucuccagagagugcagac

SEQ ID NO: 2113182 - RNA, 19 nt, Artificial Sequence
  Description of Artificial Sequence: Synthetic oligonucleotide
  Sense strand starting at position 2728 of SEQ ID NO: 1882337
cuuccacuucugugaggau

SEQ ID NO: 2113183 - RNA, 19 nt, Artificial Sequence
  Description of Artificial Sequence: Synthetic oligonucleotide
  Antisense strand to SEQ ID NO: 2113182
auccucacagaaguggaag

SEQ ID NO: 2113184 - RNA, 19 nt, Artificial Sequence
  Description of Artificial Sequence: Synthetic oligonucleotide
  Sense strand starting at position 2748 of SEQ ID NO: 1882337
auagcaugacucuggcaga

SEQ ID NO: 2113185 - RNA, 19 nt, Artificial Sequence
  Description of Artificial Sequence: Synthetic oligonucleotide
  Antisense strand to SEQ ID NO: 2113184
ucugccagagucaugcuau

SEQ ID NO: 2113186 - RNA, 19 nt, Artificial Sequence
  Description of Artificial Sequence: Synthetic oligonucleotide
  Sense strand starting at position 2753 of SEQ ID NO: 1882337
augacucuggcagaguuaa

SEQ ID NO: 2113187 - RNA, 19 nt, Artificial Sequence
  Description of Artificial Sequence: Synthetic oligonucleotide
  Antisense strand to SEQ ID NO: 2113186
uuaacucugccagagucau

SEQ ID NO: 2113188 - RNA, 19 nt, Artificial Sequence
  Description of Artificial Sequence: Synthetic oligonucleotide
  Sense strand starting at position 2827 of SEQ ID NO: 1882337
augcuuugggcagagacau

SEQ ID NO: 2113189 - RNA, 19 nt, Artificial Sequence
  Description of Artificial Sequence: Synthetic oligonucleotide
  Antisense strand to SEQ ID NO: 2113188
augucucugcccaaagcau

SEQ ID NO: 2113190 - RNA, 19 nt, Artificial Sequence
  Description of Artificial Sequence: Synthetic oligonucleotide
  Sense strand starting at position 2914 of SEQ ID NO: 1882337
ccagcaucacagugagagu

SEQ ID NO: 2113191 - RNA, 19 nt, Artificial Sequence
  Description of Artificial Sequence: Synthetic oligonucleotide
  Antisense strand to SEQ ID NO: 2113190
acucucacugugaugcugg

SEQ ID NO: 2113192 - RNA, 19 nt, Artificial Sequence
  Description of Artificial Sequence: Synthetic oligonucleotide
  Sense strand starting at position 2963 of SEQ ID NO: 1882337
cagggacuugcacauguaa

SEQ ID NO: 2113193 - RNA, 19 nt, Artificial Sequence
  Description of Artificial Sequence: Synthetic oligonucleotide
  Antisense strand to SEQ ID NO: 2113192
uuacaugugcaagucccug

SEQ ID NO: 2113194 - RNA, 19 nt, Artificial Sequence
  Description of Artificial Sequence: Synthetic oligonucleotide
  Sense strand starting at position 2965 of SEQ ID NO: 1882337
gggacuugcacauguaauu

SEQ ID NO: 2113195 - RNA, 19 nt, Artificial Sequence
  Description of Artificial Sequence: Synthetic oligonucleotide
  Antisense strand to SEQ ID NO: 2113194
aauuacaugugcaaguccc

SEQ ID NO: 2113196 - RNA, 19 nt, Artificial Sequence
  Description of Artificial Sequence: Synthetic oligonucleotide
  Sense strand starting at position 3013 of SEQ ID NO: 1882337
cccaaagagguggguuaaa

SEQ ID NO: 2113197 - RNA, 19 nt, Artificial Sequence
  Description of Artificial Sequence: Synthetic oligonucleotide
  Antisense strand to SEQ ID NO: 2113196
uuuaacccaccucuuuggg

SEQ ID NO: 2113198 - RNA, 19 nt, Artificial Sequence
  Description of Artificial Sequence: Synthetic oligonucleotide
  Sense strand starting at position 3036 of SEQ ID NO: 1882337
agugaaacuuuagcaauua

SEQ ID NO: 2113199 - RNA, 19 nt, Artificial Sequence
  Description of Artificial Sequence: Synthetic oligonucleotide
  Antisense strand to SEQ ID NO: 2113198
uaauugcuaaaguuucacu

SEQ ID NO: 2113200 - RNA, 19 nt, Artificial Sequence
  Description of Artificial Sequence: Synthetic oligonucleotide
  Sense strand starting at position 3485 of SEQ ID NO: 1882337
agucuuuaccuguaucucu

SEQ ID NO: 2113201 - RNA, 19 nt, Artificial Sequence
  Description of Artificial Sequence: Synthetic oligonucleotide
  Antisense strand to SEQ ID NO: 2113200
agagauacagguaaagacu

SEQ ID NO: 2113202 - RNA, 19 nt, Artificial Sequence
  Description of Artificial Sequence: Synthetic oligonucleotide
  Sense strand starting at position 3493 of SEQ ID NO: 1882337
ccuguaucucucgagugac

SEQ ID NO: 2113203 - RNA, 19 nt, Artificial Sequence
  Description of Artificial Sequence: Synthetic oligonucleotide
  Antisense strand to SEQ ID NO: 2113202
gucacucgagagauacagg

SEQ ID NO: 2113204 - RNA, 19 nt, Artificial Sequence
  Description of Artificial Sequence: Synthetic oligonucleotide
  Sense strand starting at position 3667 of SEQ ID NO: 1882337
cugaaagaugacugugagu

SEQ ID NO: 2113205 - RNA, 19 nt, Artificial Sequence
  Description of Artificial Sequence: Synthetic oligonucleotide
  Antisense strand to SEQ ID NO: 2113204
acucacagucaucuuucag

SEQ ID NO: 2113206 - RNA, 19 nt, Artificial Sequence
  Description of Artificial Sequence: Synthetic oligonucleotide
  Sense strand starting at position 3669 of SEQ ID NO: 1882337
gaaagaugacugugaguua

SEQ ID NO: 2113207 - RNA, 19 nt, Artificial Sequence
  Description of Artificial Sequence: Synthetic oligonucleotide
  Antisense strand to SEQ ID NO: 2113206
uaacucacagucaucuuuc

SEQ ID NO: 2113208 - RNA, 19 nt, Artificial Sequence
  Description of Artificial Sequence: Synthetic oligonucleotide
  Sense strand starting at position 3672 of SEQ ID NO: 1882337
agaugacugugaguuaaga

SEQ ID NO: 2113209 - RNA, 19 nt, Artificial Sequence
  Description of Artificial Sequence: Synthetic oligonucleotide
  Antisense strand to SEQ ID NO: 2113208
ucuuaacucacagucaucu

SEQ ID NO: 2113210 - RNA, 19 nt, Artificial Sequence
  Description of Artificial Sequence: Synthetic oligonucleotide
  Sense strand starting at position 3894 of SEQ ID NO: 1882337
guauuuaguucccuagcuu

SEQ ID NO: 2113211 - RNA, 19 nt, Artificial Sequence
  Description of Artificial Sequence: Synthetic oligonucleotide
  Antisense strand to SEQ ID NO: 2113210
aagcuagggaacuaaauac

SEQ ID NO: 2113212 - RNA, 19 nt, Artificial Sequence
  Description of Artificial Sequence: Synthetic oligonucleotide
  Sense strand starting at position 105 of SEQ ID NO: 1882338
gaaagcaguuaugucagau

SEQ ID NO: 2113213 - RNA, 19 nt, Artificial Sequence
  Description of Artificial Sequence: Synthetic oligonucleotide
  Antisense strand to SEQ ID NO: 2113212
aucugacauaacugcuuuc

SEQ ID NO: 2113214 - RNA, 19 nt, Artificial Sequence
  Description of Artificial Sequence: Synthetic oligonucleotide
  Sense strand starting at position 111 of SEQ ID NO: 1882338
aguuaugucagauauguga

SEQ ID NO: 2113215 - RNA, 19 nt, Artificial Sequence
  Description of Artificial Sequence: Synthetic oligonucleotide
  Antisense strand to SEQ ID NO: 2113214
ucacauaucugacauaacu

SEQ ID NO: 2113216 - RNA, 19 nt, Artificial Sequence
  Description of Artificial Sequence: Synthetic oligonucleotide
  Sense strand starting at position 392 of SEQ ID NO: 1882338
uggcaauaucacgaaguua

SEQ ID NO: 2113217 - RNA, 19 nt, Artificial Sequence
  Description of Artificial Sequence: Synthetic oligonucleotide
  Antisense strand to SEQ ID NO: 2113216
uaacuucgugauauugcca

SEQ ID NO: 2113218 - RNA, 19 nt, Artificial Sequence
  Description of Artificial Sequence: Synthetic oligonucleotide
  Sense strand starting at position 795 of SEQ ID NO: 1882338
cggacauacucucuuauuc

SEQ ID NO: 2113219 - RNA, 19 nt, Artificial Sequence
  Description of Artificial Sequence: Synthetic oligonucleotide
  Antisense strand to SEQ ID NO: 2113218
gaauaagagaguauguccg

SEQ ID NO: 2113220 - RNA, 19 nt, Artificial Sequence
  Description of Artificial Sequence: Synthetic oligonucleotide
  Sense strand starting at position 894 of SEQ ID NO: 1882338
cucauauuaguaugaacag

SEQ ID NO: 2113221 - RNA, 19 nt, Artificial Sequence
  Description of Artificial Sequence: Synthetic oligonucleotide
  Antisense strand to SEQ ID NO: 2113220
cuguucauacuaauaugag

SEQ ID NO: 2113222 - RNA, 19 nt, Artificial Sequence
  Description of Artificial Sequence: Synthetic oligonucleotide
  Sense strand starting at position 924 of SEQ ID NO: 1882338
auaucuucugccuaaagga

SEQ ID NO: 2113223 - RNA, 19 nt, Artificial Sequence
  Description of Artificial Sequence: Synthetic oligonucleotide
  Antisense strand to SEQ ID NO: 2113222
uccuuuaggcagaagauau

SEQ ID NO: 2113224 - RNA, 19 nt, Artificial Sequence
  Description of Artificial Sequence: Synthetic oligonucleotide
  Sense strand starting at position 1259 of SEQ ID NO: 1882338
cuuucuuagcaugguggaa

SEQ ID NO: 2113225 - RNA, 19 nt, Artificial Sequence
  Description of Artificial Sequence: Synthetic oligonucleotide
  Antisense strand to SEQ ID NO: 2113224
uuccaccaugcuaagaaag

SEQ ID NO: 2113226 - RNA, 19 nt, Artificial Sequence
  Description of Artificial Sequence: Synthetic oligonucleotide
  Sense strand starting at position 1451 of SEQ ID NO: 1882338
ugaccagugaacugaguaa

SEQ ID NO: 2113227 - RNA, 19 nt, Artificial Sequence
  Description of Artificial Sequence: Synthetic oligonucleotide
  Antisense strand to SEQ ID NO: 2113226
uuacucaguucacugguca

SEQ ID NO: 2113228 - RNA, 19 nt, Artificial Sequence
  Description of Artificial Sequence: Synthetic oligonucleotide
  Sense strand starting at position 2355 of SEQ ID NO: 1882338
ccugcuuccuggguagaau

SEQ ID NO: 2113229 - RNA, 19 nt, Artificial Sequence
  Description of Artificial Sequence: Synthetic oligonucleotide
  Antisense strand to SEQ ID NO: 2113228
auucuacccaggaagcagg

SEQ ID NO: 2113230 - RNA, 19 nt, Artificial Sequence
  Description of Artificial Sequence: Synthetic oligonucleotide
  Sense strand starting at position 2356 of SEQ ID NO: 1882338
cugcuuccuggguagaauu

SEQ ID NO: 2113231 - RNA, 19 nt, Artificial Sequence
  Description of Artificial Sequence: Synthetic oligonucleotide
  Antisense strand to SEQ ID NO: 2113230
aauucuacccaggaagcag

SEQ ID NO: 2113232 - RNA, 19 nt, Artificial Sequence
  Description of Artificial Sequence: Synthetic oligonucleotide
  Sense strand starting at position 2364 of SEQ ID NO: 1882338
uggguagaauuugagaacu

SEQ ID NO: 2113233 - RNA, 19 nt, Artificial Sequence
  Description of Artificial Sequence: Synthetic oligonucleotide
  Antisense strand to SEQ ID NO: 2113232
aguucucaaauucuaccca

SEQ ID NO: 2113234 - RNA, 19 nt, Artificial Sequence
  Description of Artificial Sequence: Synthetic oligonucleotide
  Sense strand starting at position 2366 of SEQ ID NO: 1882338
gguagaauuugagaacuuu

SEQ ID NO: 2113235 - RNA, 19 nt, Artificial Sequence
  Description of Artificial Sequence: Synthetic oligonucleotide
  Antisense strand to SEQ ID NO: 2113234
aaaguucucaaauucuacc

SEQ ID NO: 2113236 - RNA, 19 nt, Artificial Sequence
  Description of Artificial Sequence: Synthetic oligonucleotide
  Sense strand starting at position 2391 of SEQ ID NO: 1882338
uuccaugcggucuacuuaa

SEQ ID NO: 2113237 - RNA, 19 nt, Artificial Sequence
  Description of Artificial Sequence: Synthetic oligonucleotide
  Antisense strand to SEQ ID NO: 2113236
uuaaguagaccgcauggaa

SEQ ID NO: 2113238 - RNA, 19 nt, Artificial Sequence
  Description of Artificial Sequence: Synthetic oligonucleotide
  Sense strand starting at position 2445 of SEQ ID NO: 1882338
ggccuucugacuuaggaau

SEQ ID NO: 2113239 - RNA, 19 nt, Artificial Sequence
  Description of Artificial Sequence: Synthetic oligonucleotide
  Antisense strand to SEQ ID NO: 2113238
auuccuaagucagaaggcc

SEQ ID NO: 2113240 - RNA, 19 nt, Artificial Sequence
  Description of Artificial Sequence: Synthetic oligonucleotide
  Sense strand starting at position 2580 of SEQ ID NO: 1882338
gcauuuauccugcaagcug

SEQ ID NO: 2113241 - RNA, 19 nt, Artificial Sequence
  Description of Artificial Sequence: Synthetic oligonucleotide
  Antisense strand to SEQ ID NO: 2113240
cagcuugcaggauaaaugc

SEQ ID NO: 2113242 - RNA, 19 nt, Artificial Sequence
  Description of Artificial Sequence: Synthetic oligonucleotide
  Sense strand starting at position 2617 of SEQ ID NO: 1882338
aagcuuguugcaucuguuu

SEQ ID NO: 2113243 - RNA, 19 nt, Artificial Sequence
  Description of Artificial Sequence: Synthetic oligonucleotide
  Antisense strand to SEQ ID NO: 2113242
aaacagaugcaacaagcuu

SEQ ID NO: 2113244 - RNA, 19 nt, Artificial Sequence
  Description of Artificial Sequence: Synthetic oligonucleotide
  Sense strand starting at position 2633 of SEQ ID NO: 1882338
uuugucuuuggagguaaag

SEQ ID NO: 2113245 - RNA, 19 nt, Artificial Sequence
  Description of Artificial Sequence: Synthetic oligonucleotide
  Antisense strand to SEQ ID NO: 2113244
cuuuaccuccaaagacaaa

SEQ ID NO: 2113246 - RNA, 19 nt, Artificial Sequence
  Description of Artificial Sequence: Synthetic oligonucleotide
  Sense strand starting at position 2642 of SEQ ID NO: 1882338
ggagguaaaggugguguua

SEQ ID NO: 2113247 - RNA, 19 nt, Artificial Sequence
  Description of Artificial Sequence: Synthetic oligonucleotide
  Antisense strand to SEQ ID NO: 2113246
uaacaccaccuuuaccucc

SEQ ID NO: 2113248 - RNA, 19 nt, Artificial Sequence
  Description of Artificial Sequence: Synthetic oligonucleotide
  Sense strand starting at position 2721 of SEQ ID NO: 1882338
ggacauugguaagugaaau

SEQ ID NO: 2113249 - RNA, 19 nt, Artificial Sequence
  Description of Artificial Sequence: Synthetic oligonucleotide
  Antisense strand to SEQ ID NO: 2113248
auuucacuuaccaaugucc

SEQ ID NO: 2113250 - RNA, 19 nt, Artificial Sequence
  Description of Artificial Sequence: Synthetic oligonucleotide
  Sense strand starting at position 2838 of SEQ ID NO: 1882338
agacuugauaaggguuacu

SEQ ID NO: 2113251 - RNA, 19 nt, Artificial Sequence
  Description of Artificial Sequence: Synthetic oligonucleotide
  Antisense strand to SEQ ID NO: 2113250
aguaacccuuaucaagucu

SEQ ID NO: 2113252 - RNA, 19 nt, Artificial Sequence
  Description of Artificial Sequence: Synthetic oligonucleotide
  Sense strand starting at position 2848 of SEQ ID NO: 1882338
aggguuacuuccuccagca

SEQ ID NO: 2113253 - RNA, 19 nt, Artificial Sequence
  Description of Artificial Sequence: Synthetic oligonucleotide
  Antisense strand to SEQ ID NO: 2113252
ugcuggaggaaguaacccu

SEQ ID NO: 2113254 - RNA, 19 nt, Artificial Sequence
  Description of Artificial Sequence: Synthetic oligonucleotide
  Sense strand starting at position 2943 of SEQ ID NO: 1882338
uauugugugcugucgcaga

SEQ ID NO: 2113255 - RNA, 19 nt, Artificial Sequence
  Description of Artificial Sequence: Synthetic oligonucleotide
  Antisense strand to SEQ ID NO: 2113254
ucugcgacagcacacaaua

SEQ ID NO: 2113256 - RNA, 19 nt, Artificial Sequence
  Description of Artificial Sequence: Synthetic oligonucleotide
  Sense strand starting at position 2956 of SEQ ID NO: 1882338
cgcagaaguuggacguuua

SEQ ID NO: 2113257 - RNA, 19 nt, Artificial Sequence
  Description of Artificial Sequence: Synthetic oligonucleotide
  Antisense strand to SEQ ID NO: 2113256
uaaacguccaacuucugcg

SEQ ID NO: 2113258 - RNA, 19 nt, Artificial Sequence
  Description of Artificial Sequence: Synthetic oligonucleotide
  Sense strand starting at position 3016 of SEQ ID NO: 1882338
cugacuuccuugucauuau

SEQ ID NO: 2113259 - RNA, 19 nt, Artificial Sequence
  Description of Artificial Sequence: Synthetic oligonucleotide
  Antisense strand to SEQ ID NO: 2113258
auaaugacaaggaagucag

SEQ ID NO: 2113260 - RNA, 19 nt, Artificial Sequence
  Description of Artificial Sequence: Synthetic oligonucleotide
  Sense strand starting at position 3056 of SEQ ID NO: 1882338
gguagaguucugggcuaca

SEQ ID NO: 2113261 - RNA, 19 nt, Artificial Sequence
  Description of Artificial Sequence: Synthetic oligonucleotide
  Antisense strand to SEQ ID NO: 2113260
uguagcccagaacucuacc

SEQ ID NO: 2113262 - RNA, 19 nt, Artificial Sequence
  Description of Artificial Sequence: Synthetic oligonucleotide
  Sense strand starting at position 3080 of SEQ ID NO: 1882338
ggguucagagaguguaaga

SEQ ID NO: 2113263 - RNA, 19 nt, Artificial Sequence
  Description of Artificial Sequence: Synthetic oligonucleotide
  Antisense strand to SEQ ID NO: 2113262
ucuuacacucucugaaccc

SEQ ID NO: 2113264 - RNA, 19 nt, Artificial Sequence
  Description of Artificial Sequence: Synthetic oligonucleotide
  Sense strand starting at position 3096 of SEQ ID NO: 1882338
agacaaguaucuguucuca

SEQ ID NO: 2113265 - RNA, 19 nt, Artificial Sequence
  Description of Artificial Sequence: Synthetic oligonucleotide
  Antisense strand to SEQ ID NO: 2113264
ugagaacagauacuugucu

SEQ ID NO: 2113266 - RNA, 19 nt, Artificial Sequence
  Description of Artificial Sequence: Synthetic oligonucleotide
  Sense strand starting at position 3098 of SEQ ID NO: 1882338
acaaguaucuguucucauu

SEQ ID NO: 2113267 - RNA, 19 nt, Artificial Sequence
  Description of Artificial Sequence: Synthetic oligonucleotide
  Antisense strand to SEQ ID NO: 2113266
aaugagaacagauacuugu

SEQ ID NO: 2113268 - RNA, 19 nt, Artificial Sequence
  Description of Artificial Sequence: Synthetic oligonucleotide
  Sense strand starting at position 3120 of SEQ ID NO: 1882338
cucuguaacucuguauauu

SEQ ID NO: 2113269 - RNA, 19 nt, Artificial Sequence
  Description of Artificial Sequence: Synthetic oligonucleotide
  Antisense strand to SEQ ID NO: 2113268
aauauacagaguuacagag

SEQ ID NO: 2113270 - RNA, 19 nt, Artificial Sequence
  Description of Artificial Sequence: Synthetic oligonucleotide
  Sense strand starting at position 3121 of SEQ ID NO: 1882338
ucuguaacucuguauauua

SEQ ID NO: 2113271 - RNA, 19 nt, Artificial Sequence
  Description of Artificial Sequence: Synthetic oligonucleotide
  Antisense strand to SEQ ID NO: 2113270
uaauauacagaguuacaga

SEQ ID NO: 2113272 - RNA, 19 nt, Artificial Sequence
  Description of Artificial Sequence: Synthetic oligonucleotide
  Sense strand starting at position 3145 of SEQ ID NO: 1882338
gccacauguggccaaugaa

SEQ ID NO: 2113273 - RNA, 19 nt, Artificial Sequence
  Description of Artificial Sequence: Synthetic oligonucleotide
  Antisense strand to SEQ ID NO: 2113272
uucauuggccacauguggc

SEQ ID NO: 2113274 - RNA, 19 nt, Artificial Sequence
  Description of Artificial Sequence: Synthetic oligonucleotide
  Sense strand starting at position 3560 of SEQ ID NO: 1882338
gugguuaaaggcuacugua

SEQ ID NO: 2113275 - RNA, 19 nt, Artificial Sequence
  Description of Artificial Sequence: Synthetic oligonucleotide
  Antisense strand to SEQ ID NO: 2113274
uacaguagccuuuaaccac

SEQ ID NO: 2113276 - RNA, 19 nt, Artificial Sequence
  Description of Artificial Sequence: Synthetic oligonucleotide
  Sense strand starting at position 3646 of SEQ ID NO: 1882338
uggagaugcaaagguaaua

SEQ ID NO: 2113277 - RNA, 19 nt, Artificial Sequence
  Description of Artificial Sequence: Synthetic oligonucleotide
  Antisense strand to SEQ ID NO: 2113276
uauuaccuuugcaucucca

SEQ ID NO: 2113278 - RNA, 19 nt, Artificial Sequence
  Description of Artificial Sequence: Synthetic oligonucleotide
  Sense strand starting at position 3730 of SEQ ID NO: 1882338
uagagugacuggcuguaua

SEQ ID NO: 2113279 - RNA, 19 nt, Artificial Sequence
  Description of Artificial Sequence: Synthetic oligonucleotide
  Antisense strand to SEQ ID NO: 2113278
uauacagccagucacucua

SEQ ID NO: 2113280 - RNA, 19 nt, Artificial Sequence
  Description of Artificial Sequence: Synthetic oligonucleotide
  Sense strand starting at position 3759 of SEQ ID NO: 1882338
gugaguucagaggagguga

SEQ ID NO: 2113281 - RNA, 19 nt, Artificial Sequence
  Description of Artificial Sequence: Synthetic oligonucleotide
  Antisense strand to SEQ ID NO: 2113280
ucaccuccucugaacucac

SEQ ID NO: 2113282 - RNA, 19 nt, Artificial Sequence
  Description of Artificial Sequence: Synthetic oligonucleotide
  Sense strand starting at position 3767 of SEQ ID NO: 1882338
agaggaggugaucguucau

SEQ ID NO: 2113283 - RNA, 19 nt, Artificial Sequence
  Description of Artificial Sequence: Synthetic oligonucleotide
  Antisense strand to SEQ ID NO: 2113282
augaacgaucaccuccucu

SEQ ID NO: 2113284 - RNA, 19 nt, Artificial Sequence
  Description of Artificial Sequence: Synthetic oligonucleotide
  Sense strand starting at position 3824 of SEQ ID NO: 1882338
ucaagaugcagguguuaau

SEQ ID NO: 2113285 - RNA, 19 nt, Artificial Sequence
  Description of Artificial Sequence: Synthetic oligonucleotide
  Antisense strand to SEQ ID NO: 2113284
auuaacaccugcaucuuga

SEQ ID NO: 2113286 - RNA, 19 nt, Artificial Sequence
  Description of Artificial Sequence: Synthetic oligonucleotide
  Sense strand starting at position 3843 of SEQ ID NO: 1882338
aacagugaccagugcaaau

SEQ ID NO: 2113287 - RNA, 19 nt, Artificial Sequence
  Description of Artificial Sequence: Synthetic oligonucleotide
  Antisense strand to SEQ ID NO: 2113286
auuugcacuggucacuguu

SEQ ID NO: 2113288 - RNA, 19 nt, Artificial Sequence
  Description of Artificial Sequence: Synthetic oligonucleotide
  Sense strand starting at position 3914 of SEQ ID NO: 1882338
aguauauaaugugucagac

SEQ ID NO: 2113289 - RNA, 19 nt, Artificial Sequence
  Description of Artificial Sequence: Synthetic oligonucleotide
  Antisense strand to SEQ ID NO: 2113288
gucugacacauuauauacu

SEQ ID NO: 2113290 - RNA, 19 nt, Artificial Sequence
  Description of Artificial Sequence: Synthetic oligonucleotide
  Sense strand starting at position 3971 of SEQ ID NO: 1882338
guugccauauuacuuagau

SEQ ID NO: 2113291 - RNA, 19 nt, Artificial Sequence
  Description of Artificial Sequence: Synthetic oligonucleotide
  Antisense strand to SEQ ID NO: 2113290
aucuaaguaauauggcaac

SEQ ID NO: 2113292 - RNA, 19 nt, Artificial Sequence
  Description of Artificial Sequence: Synthetic oligonucleotide
  Sense strand starting at position 10 of SEQ ID NO: 1882339
acugcugggaugcaugaaa

SEQ ID NO: 2113293 - RNA, 19 nt, Artificial Sequence
  Description of Artificial Sequence: Synthetic oligonucleotide
  Antisense strand to SEQ ID NO: 2113292
uuucaugcaucccagcagu

SEQ ID NO: 2113294 - RNA, 19 nt, Artificial Sequence
  Description of Artificial Sequence: Synthetic oligonucleotide
  Sense strand starting at position 19 of SEQ ID NO: 1882339
augcaugaaacaugggauu

SEQ ID NO: 2113295 - RNA, 19 nt, Artificial Sequence
  Description of Artificial Sequence: Synthetic oligonucleotide
  Antisense strand to SEQ ID NO: 2113294
aaucccauguuucaugcau

SEQ ID NO: 2113296 - RNA, 19 nt, Artificial Sequence
  Description of Artificial Sequence: Synthetic oligonucleotide
  Sense strand starting at position 51 of SEQ ID NO: 1882339
ugcucacuaugugugauau

SEQ ID NO: 2113297 - RNA, 19 nt, Artificial Sequence
  Description of Artificial Sequence: Synthetic oligonucleotide
  Antisense strand to SEQ ID NO: 2113296
auaucacacauagugagca

SEQ ID NO: 2113298 - RNA, 19 nt, Artificial Sequence
  Description of Artificial Sequence: Synthetic oligonucleotide
  Sense strand starting at position 63 of SEQ ID NO: 1882339
gugauauuccuauagauuc

SEQ ID NO: 2113299 - RNA, 19 nt, Artificial Sequence
  Description of Artificial Sequence: Synthetic oligonucleotide
  Antisense strand to SEQ ID NO: 2113298
gaaucuauaggaauaucac

SEQ ID NO: 2113300 - RNA, 19 nt, Artificial Sequence
  Description of Artificial Sequence: Synthetic oligonucleotide
  Sense strand starting at position 113 of SEQ ID NO: 1882339
cugaauuguugauucccau

SEQ ID NO: 2113301 - RNA, 19 nt, Artificial Sequence
  Description of Artificial Sequence: Synthetic oligonucleotide
  Antisense strand to SEQ ID NO: 2113300
augggaaucaacaauucag

SEQ ID NO: 2113302 - RNA, 19 nt, Artificial Sequence
  Description of Artificial Sequence: Synthetic oligonucleotide
  Sense strand starting at position 144 of SEQ ID NO: 1882339
cauggugaucacuguauau

SEQ ID NO: 2113303 - RNA, 19 nt, Artificial Sequence
  Description of Artificial Sequence: Synthetic oligonucleotide
  Antisense strand to SEQ ID NO: 2113302
auauacagugaucaccaug

SEQ ID NO: 2113304 - RNA, 19 nt, Artificial Sequence
  Description of Artificial Sequence: Synthetic oligonucleotide
  Sense strand starting at position 155 of SEQ ID NO: 1882339
cuguauaugcugcauuacu

SEQ ID NO: 2113305 - RNA, 19 nt, Artificial Sequence
  Description of Artificial Sequence: Synthetic oligonucleotide
  Antisense strand to SEQ ID NO: 2113304
aguaaugcagcauauacag

SEQ ID NO: 2113306 - RNA, 19 nt, Artificial Sequence
  Description of Artificial Sequence: Synthetic oligonucleotide
  Sense strand starting at position 175 of SEQ ID NO: 1882339
aauacauauuuacgagagu

SEQ ID NO: 2113307 - RNA, 19 nt, Artificial Sequence
  Description of Artificial Sequence: Synthetic oligonucleotide
  Antisense strand to SEQ ID NO: 2113306
acucucguaaauauguauu

SEQ ID NO: 2113308 - RNA, 19 nt, Artificial Sequence
  Description of Artificial Sequence: Synthetic oligonucleotide
  Sense strand starting at position 420 of SEQ ID NO: 1882339
aggagaaauucuggagaua

SEQ ID NO: 2113309 - RNA, 19 nt, Artificial Sequence
  Description of Artificial Sequence: Synthetic oligonucleotide
  Antisense strand to SEQ ID NO: 2113308
uaucuccagaauuucuccu

SEQ ID NO: 2113310 - RNA, 19 nt, Artificial Sequence
  Description of Artificial Sequence: Synthetic oligonucleotide
  Sense strand starting at position 639 of SEQ ID NO: 1882339
aaacuucugguccagcaga

SEQ ID NO: 2113311 - RNA, 19 nt, Artificial Sequence
  Description of Artificial Sequence: Synthetic oligonucleotide
  Antisense strand to SEQ ID NO: 2113310
ucugcuggaccagaaguuu

SEQ ID NO: 2113312 - RNA, 19 nt, Artificial Sequence
  Description of Artificial Sequence: Synthetic oligonucleotide
  Sense strand starting at position 696 of SEQ ID NO: 1882339
agcggacuugagggaugaa

SEQ ID NO: 2113313 - RNA, 19 nt, Artificial Sequence
  Description of Artificial Sequence: Synthetic oligonucleotide
  Antisense strand to SEQ ID NO: 2113312
uucaucccucaaguccgcu

SEQ ID NO: 2113314 - RNA, 19 nt, Artificial Sequence
  Description of Artificial Sequence: Synthetic oligonucleotide
  Sense strand starting at position 838 of SEQ ID NO: 1882339
aggauaucaccuggagugu

SEQ ID NO: 2113315 - RNA, 19 nt, Artificial Sequence
  Description of Artificial Sequence: Synthetic oligonucleotide
  Antisense strand to SEQ ID NO: 2113314
acacuccaggugauauccu

SEQ ID NO: 2113316 - RNA, 19 nt, Artificial Sequence
  Description of Artificial Sequence: Synthetic oligonucleotide
  Sense strand starting at position 839 of SEQ ID NO: 1882339
ggauaucaccuggaguguu

SEQ ID NO: 2113317 - RNA, 19 nt, Artificial Sequence
  Description of Artificial Sequence: Synthetic oligonucleotide
  Antisense strand to SEQ ID NO: 2113316
aacacuccaggugauaucc

SEQ ID NO: 2113318 - RNA, 19 nt, Artificial Sequence
  Description of Artificial Sequence: Synthetic oligonucleotide
  Sense strand starting at position 847 of SEQ ID NO: 1882339
ccuggaguguucuccugag

SEQ ID NO: 2113319 - RNA, 19 nt, Artificial Sequence
  Description of Artificial Sequence: Synthetic oligonucleotide
  Antisense strand to SEQ ID NO: 2113318
cucaggagaacacuccagg

SEQ ID NO: 2113320 - RNA, 19 nt, Artificial Sequence
  Description of Artificial Sequence: Synthetic oligonucleotide
  Sense strand starting at position 851 of SEQ ID NO: 1882339
gaguguucuccugagacac

SEQ ID NO: 2113321 - RNA, 19 nt, Artificial Sequence
  Description of Artificial Sequence: Synthetic oligonucleotide
  Antisense strand to SEQ ID NO: 2113320
gugucucaggagaacacuc

SEQ ID NO: 2113322 - RNA, 19 nt, Artificial Sequence
  Description of Artificial Sequence: Synthetic oligonucleotide
  Sense strand starting at position 2040 of SEQ ID NO: 1882339
ggguaacagcucgagcuuu

SEQ ID NO: 2113323 - RNA, 19 nt, Artificial Sequence
  Description of Artificial Sequence: Synthetic oligonucleotide
  Antisense strand to SEQ ID NO: 2113322
aaagcucgagcuguuaccc

SEQ ID NO: 2113324 - RNA, 19 nt, Artificial Sequence
  Description of Artificial Sequence: Synthetic oligonucleotide
  Sense strand starting at position 2181 of SEQ ID NO: 1882339
cgggauaucugguccucca

SEQ ID NO: 2113325 - RNA, 19 nt, Artificial Sequence
  Description of Artificial Sequence: Synthetic oligonucleotide
  Antisense strand to SEQ ID NO: 2113324
uggaggaccagauaucccg

SEQ ID NO: 2113326 - RNA, 19 nt, Artificial Sequence
  Description of Artificial Sequence: Synthetic oligonucleotide
  Sense strand starting at position 2247 of SEQ ID NO: 1882339
cuugauaaaugagaaucuu

SEQ ID NO: 2113327 - RNA, 19 nt, Artificial Sequence
  Description of Artificial Sequence: Synthetic oligonucleotide
  Antisense strand to SEQ ID NO: 2113326
aagauucucauuuaucaag

SEQ ID NO: 2113328 - RNA, 19 nt, Artificial Sequence
  Description of Artificial Sequence: Synthetic oligonucleotide
  Sense strand starting at position 2271 of SEQ ID NO: 1882339
gcccacugguagguagaaa

SEQ ID NO: 2113329 - RNA, 19 nt, Artificial Sequence
  Description of Artificial Sequence: Synthetic oligonucleotide
  Antisense strand to SEQ ID NO: 2113328
uuucuaccuaccagugggc

SEQ ID NO: 2113330 - RNA, 19 nt, Artificial Sequence
  Description of Artificial Sequence: Synthetic oligonucleotide
  Sense strand starting at position 2295 of SEQ ID NO: 1882339
gacgucauguaucccugaa

SEQ ID NO: 2113331 - RNA, 19 nt, Artificial Sequence
  Description of Artificial Sequence: Synthetic oligonucleotide
  Antisense strand to SEQ ID NO: 2113330
uucagggauacaugacguc

SEQ ID NO: 2113332 - RNA, 19 nt, Artificial Sequence
  Description of Artificial Sequence: Synthetic oligonucleotide
  Sense strand starting at position 2297 of SEQ ID NO: 1882339
cgucauguaucccugaaug

SEQ ID NO: 2113333 - RNA, 19 nt, Artificial Sequence
  Description of Artificial Sequence: Synthetic oligonucleotide
  Antisense strand to SEQ ID NO: 2113332
cauucagggauacaugacg

SEQ ID NO: 2113334 - RNA, 19 nt, Artificial Sequence
  Description of Artificial Sequence: Synthetic oligonucleotide
  Sense strand starting at position 2393 of SEQ ID NO: 1882339
uuccgaaccucaucuaaga

SEQ ID NO: 2113335 - RNA, 19 nt, Artificial Sequence
  Description of Artificial Sequence: Synthetic oligonucleotide
  Antisense strand to SEQ ID NO: 2113334
ucuuagaugagguucggaa

SEQ ID NO: 2113336 - RNA, 19 nt, Artificial Sequence
  Description of Artificial Sequence: Synthetic oligonucleotide
  Sense strand starting at position 2781 of SEQ ID NO: 1882339
agacguggagcguacaaau

SEQ ID NO: 2113337 - RNA, 19 nt, Artificial Sequence
  Description of Artificial Sequence: Synthetic oligonucleotide
  Antisense strand to SEQ ID NO: 2113336
auuuguacgcuccacgucu

SEQ ID NO: 2113338 - RNA, 19 nt, Artificial Sequence
  Description of Artificial Sequence: Synthetic oligonucleotide
  Sense strand starting at position 2867 of SEQ ID NO: 1882339
uuacucuuacuguaacgua

SEQ ID NO: 2113339 - RNA, 19 nt, Artificial Sequence
  Description of Artificial Sequence: Synthetic oligonucleotide
  Antisense strand to SEQ ID NO: 2113338
uacguuacaguaagaguaa

SEQ ID NO: 2113340 - RNA, 19 nt, Artificial Sequence
  Description of Artificial Sequence: Synthetic oligonucleotide
  Sense strand starting at position 2880 of SEQ ID NO: 1882339
aacguauuggcuugaaacu

SEQ ID NO: 2113341 - RNA, 19 nt, Artificial Sequence
  Description of Artificial Sequence: Synthetic oligonucleotide
  Antisense strand to SEQ ID NO: 2113340
aguuucaagccaauacguu

SEQ ID NO: 2113342 - RNA, 19 nt, Artificial Sequence
  Description of Artificial Sequence: Synthetic oligonucleotide
  Sense strand starting at position 2998 of SEQ ID NO: 1882339
uaaugagaguaacuauagu

SEQ ID NO: 2113343 - RNA, 19 nt, Artificial Sequence
  Description of Artificial Sequence: Synthetic oligonucleotide
  Antisense strand to SEQ ID NO: 2113342
acuauaguuacucucauua

SEQ ID NO: 2113344 - RNA, 19 nt, Artificial Sequence
  Description of Artificial Sequence: Synthetic oligonucleotide
  Sense strand starting at position 3063 of SEQ ID NO: 1882339
uguguaucgggaggagaua

SEQ ID NO: 2113345 - RNA, 19 nt, Artificial Sequence
  Description of Artificial Sequence: Synthetic oligonucleotide
  Antisense strand to SEQ ID NO: 2113344
uaucuccucccgauacaca

SEQ ID NO: 2113346 - RNA, 19 nt, Artificial Sequence
  Description of Artificial Sequence: Synthetic oligonucleotide
  Sense strand starting at position 3064 of SEQ ID NO: 1882339
guguaucgggaggagauau

SEQ ID NO: 2113347 - RNA, 19 nt, Artificial Sequence
  Description of Artificial Sequence: Synthetic oligonucleotide
  Antisense strand to SEQ ID NO: 2113346
auaucuccucccgauacac

SEQ ID NO: 2113348 - RNA, 19 nt, Artificial Sequence
  Description of Artificial Sequence: Synthetic oligonucleotide
  Sense strand starting at position 3097 of SEQ ID NO: 1882339
uauguagagagguggaaau

SEQ ID NO: 2113349 - RNA, 19 nt, Artificial Sequence
  Description of Artificial Sequence: Synthetic oligonucleotide
  Antisense strand to SEQ ID NO: 2113348
auuuccaccucucuacaua

SEQ ID NO: 2113350 - RNA, 19 nt, Artificial Sequence
  Description of Artificial Sequence: Synthetic oligonucleotide
  Sense strand starting at position 3374 of SEQ ID NO: 1882339
cgggcucuuugauuaauaa

SEQ ID NO: 2113351 - RNA, 19 nt, Artificial Sequence
  Description of Artificial Sequence: Synthetic oligonucleotide
  Antisense strand to SEQ ID NO: 2113350
uuauuaaucaaagagcccg

SEQ ID NO: 2113352 - RNA, 19 nt, Artificial Sequence
  Description of Artificial Sequence: Synthetic oligonucleotide
  Sense strand starting at position 3436 of SEQ ID NO: 1882339
gggcaaugccagugauucu

SEQ ID NO: 2113353 - RNA, 19 nt, Artificial Sequence
  Description of Artificial Sequence: Synthetic oligonucleotide
  Antisense strand to SEQ ID NO: 2113352
agaaucacuggcauugccc

SEQ ID NO: 2113354 - RNA, 19 nt, Artificial Sequence
  Description of Artificial Sequence: Synthetic oligonucleotide
  Sense strand starting at position 3437 of SEQ ID NO: 1882339
ggcaaugccagugauucuu

SEQ ID NO: 2113355 - RNA, 19 nt, Artificial Sequence
  Description of Artificial Sequence: Synthetic oligonucleotide
  Antisense strand to SEQ ID NO: 2113354
aagaaucacuggcauugcc

SEQ ID NO: 2113356 - RNA, 19 nt, Artificial Sequence
  Description of Artificial Sequence: Synthetic oligonucleotide
  Sense strand starting at position 3443 of SEQ ID NO: 1882339
gccagugauucuuuccuga

SEQ ID NO: 2113357 - RNA, 19 nt, Artificial Sequence
  Description of Artificial Sequence: Synthetic oligonucleotide
  Antisense strand to SEQ ID NO: 2113356
ucaggaaagaaucacuggc

SEQ ID NO: 2113358 - RNA, 19 nt, Artificial Sequence
  Description of Artificial Sequence: Synthetic oligonucleotide
  Sense strand starting at position 3453 of SEQ ID NO: 1882339
cuuuccugauuugacagaa

SEQ ID NO: 2113359 - RNA, 19 nt, Artificial Sequence
  Description of Artificial Sequence: Synthetic oligonucleotide
  Antisense strand to SEQ ID NO: 2113358
uucugucaaaucaggaaag

SEQ ID NO: 2113360 - RNA, 19 nt, Artificial Sequence
  Description of Artificial Sequence: Synthetic oligonucleotide
  Sense strand starting at position 3724 of SEQ ID NO: 1882339
cuucuuaccuugcugagaa

SEQ ID NO: 2113361 - RNA, 19 nt, Artificial Sequence
  Description of Artificial Sequence: Synthetic oligonucleotide
  Antisense strand to SEQ ID NO: 2113360
uucucagcaagguaagaag

SEQ ID NO: 2113362 - RNA, 19 nt, Artificial Sequence
  Description of Artificial Sequence: Synthetic oligonucleotide
  Sense strand starting at position 3726 of SEQ ID NO: 1882339
ucuuaccuugcugagaauu

SEQ ID NO: 2113363 - RNA, 19 nt, Artificial Sequence
  Description of Artificial Sequence: Synthetic oligonucleotide
  Antisense strand to SEQ ID NO: 2113362
aauucucagcaagguaaga

SEQ ID NO: 2113364 - RNA, 19 nt, Artificial Sequence
  Description of Artificial Sequence: Synthetic oligonucleotide
  Sense strand starting at position 3772 of SEQ ID NO: 1882339
cugaaauuccagcauugac

SEQ ID NO: 2113365 - RNA, 19 nt, Artificial Sequence
  Description of Artificial Sequence: Synthetic oligonucleotide
  Antisense strand to SEQ ID NO: 2113364
gucaaugcuggaauuucag

SEQ ID NO: 2113366 - RNA, 19 nt, Artificial Sequence
  Description of Artificial Sequence: Synthetic oligonucleotide
  Sense strand starting at position 3843 of SEQ ID NO: 1882339
gauggaauguaauauugag

SEQ ID NO: 2113367 - RNA, 19 nt, Artificial Sequence
  Description of Artificial Sequence: Synthetic oligonucleotide
  Antisense strand to SEQ ID NO: 2113366
cucaauauuacauuccauc

SEQ ID NO: 2113368 - RNA, 19 nt, Artificial Sequence
  Description of Artificial Sequence: Synthetic oligonucleotide
  Sense strand starting at position 3869 of SEQ ID NO: 1882339
auuacuuaggcaugggaua

SEQ ID NO: 2113369 - RNA, 19 nt, Artificial Sequence
  Description of Artificial Sequence: Synthetic oligonucleotide
  Antisense strand to SEQ ID NO: 2113368
uaucccaugccuaaguaau

SEQ ID NO: 2113370 - RNA, 19 nt, Artificial Sequence
  Description of Artificial Sequence: Synthetic oligonucleotide
  Sense strand starting at position 3966 of SEQ ID NO: 1882339
ugauacaauugucuacaga

SEQ ID NO: 2113371 - RNA, 19 nt, Artificial Sequence
  Description of Artificial Sequence: Synthetic oligonucleotide
  Antisense strand to SEQ ID NO: 2113370
ucuguagacaauuguauca

SEQ ID NO: 2113372 - RNA, 19 nt, Artificial Sequence
  Description of Artificial Sequence: Synthetic oligonucleotide
  Sense strand starting at position 222 of SEQ ID NO: 1882340
cuaagagacuuacugcaca

SEQ ID NO: 2113373 - RNA, 19 nt, Artificial Sequence
  Description of Artificial Sequence: Synthetic oligonucleotide
  Antisense strand to SEQ ID NO: 2113372
ugugcaguaagucucuuag

SEQ ID NO: 2113374 - RNA, 19 nt, Artificial Sequence
  Description of Artificial Sequence: Synthetic oligonucleotide
  Sense strand starting at position 227 of SEQ ID NO: 1882340
agacuuacugcacaauguu

SEQ ID NO: 2113375 - RNA, 19 nt, Artificial Sequence
  Description of Artificial Sequence: Synthetic oligonucleotide
  Antisense strand to SEQ ID NO: 2113374
aacauugugcaguaagucu

SEQ ID NO: 2113376 - RNA, 19 nt, Artificial Sequence
  Description of Artificial Sequence: Synthetic oligonucleotide
  Sense strand starting at position 269 of SEQ ID NO: 1882340
ugugcuggugcuccauauu

SEQ ID NO: 2113377 - RNA, 19 nt, Artificial Sequence
  Description of Artificial Sequence: Synthetic oligonucleotide
  Antisense strand to SEQ ID NO: 2113376
aauauggagcaccagcaca

SEQ ID NO: 2113378 - RNA, 19 nt, Artificial Sequence
  Description of Artificial Sequence: Synthetic oligonucleotide
  Sense strand starting at position 272 of SEQ ID NO: 1882340
gcuggugcuccauauuaag

SEQ ID NO: 2113379 - RNA, 19 nt, Artificial Sequence
  Description of Artificial Sequence: Synthetic oligonucleotide
  Antisense strand to SEQ ID NO: 2113378
cuuaauauggagcaccagc

SEQ ID NO: 2113380 - RNA, 19 nt, Artificial Sequence
  Description of Artificial Sequence: Synthetic oligonucleotide
  Sense strand starting at position 354 of SEQ ID NO: 1882340
gggcuuuccaugggcaaau

SEQ ID NO: 2113381 - RNA, 19 nt, Artificial Sequence
  Description of Artificial Sequence: Synthetic oligonucleotide
  Antisense strand to SEQ ID NO: 2113380
auuugcccauggaaagccc

SEQ ID NO: 2113382 - RNA, 19 nt, Artificial Sequence
  Description of Artificial Sequence: Synthetic oligonucleotide
  Sense strand starting at position 365 of SEQ ID NO: 1882340
gggcaaaucuggccaugac

SEQ ID NO: 2113383 - RNA, 19 nt, Artificial Sequence
  Description of Artificial Sequence: Synthetic oligonucleotide
  Antisense strand to SEQ ID NO: 2113382
gucauggccagauuugccc

SEQ ID NO: 2113384 - RNA, 19 nt, Artificial Sequence
  Description of Artificial Sequence: Synthetic oligonucleotide
  Sense strand starting at position 403 of SEQ ID NO: 1882340
cagcucuuugcuguguuua

SEQ ID NO: 2113385 - RNA, 19 nt, Artificial Sequence
  Description of Artificial Sequence: Synthetic oligonucleotide
  Antisense strand to SEQ ID NO: 2113384
uaaacacagcaaagagcug

SEQ ID NO: 2113386 - RNA, 19 nt, Artificial Sequence
  Description of Artificial Sequence: Synthetic oligonucleotide
  Sense strand starting at position 426 of SEQ ID NO: 1882340
ucauguaaacuuggguuau

SEQ ID NO: 2113387 - RNA, 19 nt, Artificial Sequence
  Description of Artificial Sequence: Synthetic oligonucleotide
  Antisense strand to SEQ ID NO: 2113386
auaacccaaguuuacauga

SEQ ID NO: 2113388 - RNA, 19 nt, Artificial Sequence
  Description of Artificial Sequence: Synthetic oligonucleotide
  Sense strand starting at position 430 of SEQ ID NO: 1882340
guaaacuuggguuauucca

SEQ ID NO: 2113389 - RNA, 19 nt, Artificial Sequence
  Description of Artificial Sequence: Synthetic oligonucleotide
  Antisense strand to SEQ ID NO: 2113388
uggaauaacccaaguuuac

SEQ ID NO: 2113390 - RNA, 19 nt, Artificial Sequence
  Description of Artificial Sequence: Synthetic oligonucleotide
  Sense strand starting at position 438 of SEQ ID NO: 1882340
ggguuauuccaauaauugu

SEQ ID NO: 2113391 - RNA, 19 nt, Artificial Sequence
  Description of Artificial Sequence: Synthetic oligonucleotide
  Antisense strand to SEQ ID NO: 2113390
acaauuauuggaauaaccc

SEQ ID NO: 2113392 - RNA, 19 nt, Artificial Sequence
  Description of Artificial Sequence: Synthetic oligonucleotide
  Sense strand starting at position 638 of SEQ ID NO: 1882340
guacaaaucuuagucuaca

SEQ ID NO: 2113393 - RNA, 19 nt, Artificial Sequence
  Description of Artificial Sequence: Synthetic oligonucleotide
  Antisense strand to SEQ ID NO: 2113392
uguagacuaagauuuguac

SEQ ID NO: 2113394 - RNA, 19 nt, Artificial Sequence
  Description of Artificial Sequence: Synthetic oligonucleotide
  Sense strand starting at position 655 of SEQ ID NO: 1882340
cagaaaugucgacaagcua

SEQ ID NO: 2113395 - RNA, 19 nt, Artificial Sequence
  Description of Artificial Sequence: Synthetic oligonucleotide
  Antisense strand to SEQ ID NO: 2113394
uagcuugucgacauuucug

SEQ ID NO: 2113396 - RNA, 19 nt, Artificial Sequence
  Description of Artificial Sequence: Synthetic oligonucleotide
  Sense strand starting at position 749 of SEQ ID NO: 1882340
uuacuuucucugugaccca

SEQ ID NO: 2113397 - RNA, 19 nt, Artificial Sequence
  Description of Artificial Sequence: Synthetic oligonucleotide
  Antisense strand to SEQ ID NO: 2113396
ugggucacagagaaaguaa

SEQ ID NO: 2113398 - RNA, 19 nt, Artificial Sequence
  Description of Artificial Sequence: Synthetic oligonucleotide
  Sense strand starting at position 1282 of SEQ ID NO: 1882340
gugagaggguuaagaaaga

SEQ ID NO: 2113399 - RNA, 19 nt, Artificial Sequence
  Description of Artificial Sequence: Synthetic oligonucleotide
  Antisense strand to SEQ ID NO: 2113398
ucuuucuuaacccucucac

SEQ ID NO: 2113400 - RNA, 19 nt, Artificial Sequence
  Description of Artificial Sequence: Synthetic oligonucleotide
  Sense strand starting at position 1459 of SEQ ID NO: 1882340
aaggaaguauuagaaagau

SEQ ID NO: 2113401 - RNA, 19 nt, Artificial Sequence
  Description of Artificial Sequence: Synthetic oligonucleotide
  Antisense strand to SEQ ID NO: 2113400
aucuuucuaauacuuccuu

SEQ ID NO: 2113402 - RNA, 19 nt, Artificial Sequence
  Description of Artificial Sequence: Synthetic oligonucleotide
  Sense strand starting at position 1502 of SEQ ID NO: 1882340
gcuggcaccacugagauau

SEQ ID NO: 2113403 - RNA, 19 nt, Artificial Sequence
  Description of Artificial Sequence: Synthetic oligonucleotide
  Antisense strand to SEQ ID NO: 2113402
auaucucaguggugccagc

SEQ ID NO: 2113404 - RNA, 19 nt, Artificial Sequence
  Description of Artificial Sequence: Synthetic oligonucleotide
  Sense strand starting at position 1504 of SEQ ID NO: 1882340
uggcaccacugagauauuu

SEQ ID NO: 2113405 - RNA, 19 nt, Artificial Sequence
  Description of Artificial Sequence: Synthetic oligonucleotide
  Antisense strand to SEQ ID NO: 2113404
aaauaucucaguggugcca

SEQ ID NO: 2113406 - RNA, 19 nt, Artificial Sequence
  Description of Artificial Sequence: Synthetic oligonucleotide
  Sense strand starting at position 1517 of SEQ ID NO: 1882340
auauuugucugggagaccu

SEQ ID NO: 2113407 - RNA, 19 nt, Artificial Sequence
  Description of Artificial Sequence: Synthetic oligonucleotide
  Antisense strand to SEQ ID NO: 2113406
aggucucccagacaaauau

SEQ ID NO: 2113408 - RNA, 19 nt, Artificial Sequence
  Description of Artificial Sequence: Synthetic oligonucleotide
  Sense strand starting at position 1587 of SEQ ID NO: 1882340
gcaucagauccugggaaca

SEQ ID NO: 2113409 - RNA, 19 nt, Artificial Sequence
  Description of Artificial Sequence: Synthetic oligonucleotide
  Antisense strand to SEQ ID NO: 2113408
uguucccaggaucugaugc

SEQ ID NO: 2113410 - RNA, 19 nt, Artificial Sequence
  Description of Artificial Sequence: Synthetic oligonucleotide
  Sense strand starting at position 1678 of SEQ ID NO: 1882340
ugaggagauucugcucuau

SEQ ID NO: 2113411 - RNA, 19 nt, Artificial Sequence
  Description of Artificial Sequence: Synthetic oligonucleotide
  Antisense strand to SEQ ID NO: 2113410
auagagcagaaucuccuca

SEQ ID NO: 2113412 - RNA, 19 nt, Artificial Sequence
  Description of Artificial Sequence: Synthetic oligonucleotide
  Sense strand starting at position 1738 of SEQ ID NO: 1882340
cucugaaucgaccaguaag

SEQ ID NO: 2113413 - RNA, 19 nt, Artificial Sequence
  Description of Artificial Sequence: Synthetic oligonucleotide
  Antisense strand to SEQ ID NO: 2113412
cuuacuggucgauucagag

SEQ ID NO: 2113414 - RNA, 19 nt, Artificial Sequence
  Description of Artificial Sequence: Synthetic oligonucleotide
  Sense strand starting at position 1885 of SEQ ID NO: 1882340
uugagcaccuccuugaaga

SEQ ID NO: 2113415 - RNA, 19 nt, Artificial Sequence
  Description of Artificial Sequence: Synthetic oligonucleotide
  Antisense strand to SEQ ID NO: 2113414
ucuucaaggaggugcucaa

SEQ ID NO: 2113416 - RNA, 19 nt, Artificial Sequence
  Description of Artificial Sequence: Synthetic oligonucleotide
  Sense strand starting at position 1899 of SEQ ID NO: 1882340
gaagaagucuuccucaugu

SEQ ID NO: 2113417 - RNA, 19 nt, Artificial Sequence
  Description of Artificial Sequence: Synthetic oligonucleotide
  Antisense strand to SEQ ID NO: 2113416
acaugaggaagacuucuuc

SEQ ID NO: 2113418 - RNA, 19 nt, Artificial Sequence
  Description of Artificial Sequence: Synthetic oligonucleotide
  Sense strand starting at position 1901 of SEQ ID NO: 1882340
agaagucuuccucaugucu

SEQ ID NO: 2113419 - RNA, 19 nt, Artificial Sequence
  Description of Artificial Sequence: Synthetic oligonucleotide
  Antisense strand to SEQ ID NO: 2113418
agacaugaggaagacuucu

SEQ ID NO: 2113420 - RNA, 19 nt, Artificial Sequence
  Description of Artificial Sequence: Synthetic oligonucleotide
  Sense strand starting at position 2007 of SEQ ID NO: 1882340
cugucuucucauuagccua

SEQ ID NO: 2113421 - RNA, 19 nt, Artificial Sequence
  Description of Artificial Sequence: Synthetic oligonucleotide
  Antisense strand to SEQ ID NO: 2113420
uaggcuaaugagaagacag

SEQ ID NO: 2113422 - RNA, 19 nt, Artificial Sequence
  Description of Artificial Sequence: Synthetic oligonucleotide
  Sense strand starting at position 2052 of SEQ ID NO: 1882340
acucacauccacuguagua

SEQ ID NO: 2113423 - RNA, 19 nt, Artificial Sequence
  Description of Artificial Sequence: Synthetic oligonucleotide
  Antisense strand to SEQ ID NO: 2113422
uacuacaguggaugugagu

SEQ ID NO: 2113424 - RNA, 19 nt, Artificial Sequence
  Description of Artificial Sequence: Synthetic oligonucleotide
  Sense strand starting at position 2149 of SEQ ID NO: 1882340
cuggcuccuggguaaucau

SEQ ID NO: 2113425 - RNA, 19 nt, Artificial Sequence
  Description of Artificial Sequence: Synthetic oligonucleotide
  Antisense strand to SEQ ID NO: 2113424
augauuacccaggagccag

SEQ ID NO: 2113426 - RNA, 19 nt, Artificial Sequence
  Description of Artificial Sequence: Synthetic oligonucleotide
  Sense strand starting at position 2178 of SEQ ID NO: 1882340
acaaauuaguuaucaguga

SEQ ID NO: 2113427 - RNA, 19 nt, Artificial Sequence
  Description of Artificial Sequence: Synthetic oligonucleotide
  Antisense strand to SEQ ID NO: 2113426
ucacugauaacuaauuugu

SEQ ID NO: 2113428 - RNA, 19 nt, Artificial Sequence
  Description of Artificial Sequence: Synthetic oligonucleotide
  Sense strand starting at position 2182 of SEQ ID NO: 1882340
auuaguuaucagugaaaca

SEQ ID NO: 2113429 - RNA, 19 nt, Artificial Sequence
  Description of Artificial Sequence: Synthetic oligonucleotide
  Antisense strand to SEQ ID NO: 2113428
uguuucacugauaacuaau

SEQ ID NO: 2113430 - RNA, 19 nt, Artificial Sequence
  Description of Artificial Sequence: Synthetic oligonucleotide
  Sense strand starting at position 2225 of SEQ ID NO: 1882340
uuguauuuccacugcugga

SEQ ID NO: 2113431 - RNA, 19 nt, Artificial Sequence
  Description of Artificial Sequence: Synthetic oligonucleotide
  Antisense strand to SEQ ID NO: 2113430
uccagcaguggaaauacaa

SEQ ID NO: 2113432 - RNA, 19 nt, Artificial Sequence
  Description of Artificial Sequence: Synthetic oligonucleotide
  Sense strand starting at position 2300 of SEQ ID NO: 1882340
cagaucucgccugagaguu

SEQ ID NO: 2113433 - RNA, 19 nt, Artificial Sequence
  Description of Artificial Sequence: Synthetic oligonucleotide
  Antisense strand to SEQ ID NO: 2113432
aacucucaggcgagaucug

SEQ ID NO: 2113434 - RNA, 19 nt, Artificial Sequence
  Description of Artificial Sequence: Synthetic oligonucleotide
  Sense strand starting at position 2328 of SEQ ID NO: 1882340
guaacucugcccuggaaag

SEQ ID NO: 2113435 - RNA, 19 nt, Artificial Sequence
  Description of Artificial Sequence: Synthetic oligonucleotide
  Antisense strand to SEQ ID NO: 2113434
cuuuccagggcagaguuac

SEQ ID NO: 2113436 - RNA, 19 nt, Artificial Sequence
  Description of Artificial Sequence: Synthetic oligonucleotide
  Sense strand starting at position 2383 of SEQ ID NO: 1882340
agguuccuuuagccuaaau

SEQ ID NO: 2113437 - RNA, 19 nt, Artificial Sequence
  Description of Artificial Sequence: Synthetic oligonucleotide
  Antisense strand to SEQ ID NO: 2113436
auuuaggcuaaaggaaccu

SEQ ID NO: 2113438 - RNA, 19 nt, Artificial Sequence
  Description of Artificial Sequence: Synthetic oligonucleotide
  Sense strand starting at position 2488 of SEQ ID NO: 1882340
ccagcaagauugcuggaaa

SEQ ID NO: 2113439 - RNA, 19 nt, Artificial Sequence
  Description of Artificial Sequence: Synthetic oligonucleotide
  Antisense strand to SEQ ID NO: 2113438
uuuccagcaaucuugcugg

SEQ ID NO: 2113440 - RNA, 19 nt, Artificial Sequence
  Description of Artificial Sequence: Synthetic oligonucleotide
  Sense strand starting at position 2491 of SEQ ID NO: 1882340
gcaagauugcuggaaacca

SEQ ID NO: 2113441 - RNA, 19 nt, Artificial Sequence
  Description of Artificial Sequence: Synthetic oligonucleotide
  Antisense strand to SEQ ID NO: 2113440
ugguuuccagcaaucuugc

SEQ ID NO: 2113442 - RNA, 19 nt, Artificial Sequence
  Description of Artificial Sequence: Synthetic oligonucleotide
  Sense strand starting at position 2881 of SEQ ID NO: 1882340
guggaacaccuacaucuuu

SEQ ID NO: 2113443 - RNA, 19 nt, Artificial Sequence
  Description of Artificial Sequence: Synthetic oligonucleotide
  Antisense strand to SEQ ID NO: 2113442
aaagauguagguguuccac

SEQ ID NO: 2113444 - RNA, 19 nt, Artificial Sequence
  Description of Artificial Sequence: Synthetic oligonucleotide
  Sense strand starting at position 3492 of SEQ ID NO: 1882340
ucuguugcuccagggaaca

SEQ ID NO: 2113445 - RNA, 19 nt, Artificial Sequence
  Description of Artificial Sequence: Synthetic oligonucleotide
  Antisense strand to SEQ ID NO: 2113444
uguucccuggagcaacaga

SEQ ID NO: 2113446 - RNA, 19 nt, Artificial Sequence
  Description of Artificial Sequence: Synthetic oligonucleotide
  Sense strand starting at position 3528 of SEQ ID NO: 1882340
gagauaaggucagcucugu

SEQ ID NO: 2113447 - RNA, 19 nt, Artificial Sequence
  Description of Artificial Sequence: Synthetic oligonucleotide
  Antisense strand to SEQ ID NO: 2113446
acagagcugaccuuaucuc

SEQ ID NO: 2113448 - RNA, 19 nt, Artificial Sequence
  Description of Artificial Sequence: Synthetic oligonucleotide
  Sense strand starting at position 3669 of SEQ ID NO: 1882340
cauaauggucuccaacgga

SEQ ID NO: 2113449 - RNA, 19 nt, Artificial Sequence
  Description of Artificial Sequence: Synthetic oligonucleotide
  Antisense strand to SEQ ID NO: 2113448
uccguuggagaccauuaug

SEQ ID NO: 2113450 - RNA, 19 nt, Artificial Sequence
  Description of Artificial Sequence: Synthetic oligonucleotide
  Sense strand starting at position 3849 of SEQ ID NO: 1882340
ugggcuagccucugaagaa

SEQ ID NO: 2113451 - RNA, 19 nt, Artificial Sequence
  Description of Artificial Sequence: Synthetic oligonucleotide
  Antisense strand to SEQ ID NO: 2113450
uucuucagaggcuagccca

SEQ ID NO: 2113452 - RNA, 19 nt, Artificial Sequence
  Description of Artificial Sequence: Synthetic oligonucleotide
  Sense strand starting at position 395 of SEQ ID NO: 1882341
uccugugugcaagaaauaa

SEQ ID NO: 2113453 - RNA, 19 nt, Artificial Sequence
  Description of Artificial Sequence: Synthetic oligonucleotide
  Antisense strand to SEQ ID NO: 2113452
uuauuucuugcacacagga

SEQ ID NO: 2113454 - RNA, 19 nt, Artificial Sequence
  Description of Artificial Sequence: Synthetic oligonucleotide
  Sense strand starting at position 399 of SEQ ID NO: 1882341
gugugcaagaaauaaaugu

SEQ ID NO: 2113455 - RNA, 19 nt, Artificial Sequence
  Description of Artificial Sequence: Synthetic oligonucleotide
  Antisense strand to SEQ ID NO: 2113454
acauuuauuucuugcacac

SEQ ID NO: 2113456 - RNA, 19 nt, Artificial Sequence
  Description of Artificial Sequence: Synthetic oligonucleotide
  Sense strand starting at position 444 of SEQ ID NO: 1882341
uaggauuguuuguuacaca

SEQ ID NO: 2113457 - RNA, 19 nt, Artificial Sequence
  Description of Artificial Sequence: Synthetic oligonucleotide
  Antisense strand to SEQ ID NO: 2113456
uguguaacaaacaauccua

SEQ ID NO: 2113458 - RNA, 19 nt, Artificial Sequence
  Description of Artificial Sequence: Synthetic oligonucleotide
  Sense strand starting at position 510 of SEQ ID NO: 1882341
ugauucuucgcuguugcaa

SEQ ID NO: 2113459 - RNA, 19 nt, Artificial Sequence
  Description of Artificial Sequence: Synthetic oligonucleotide
  Antisense strand to SEQ ID NO: 2113458
uugcaacagcgaagaauca

SEQ ID NO: 2113460 - RNA, 19 nt, Artificial Sequence
  Description of Artificial Sequence: Synthetic oligonucleotide
  Sense strand starting at position 511 of SEQ ID NO: 1882341
gauucuucgcuguugcaac

SEQ ID NO: 2113461 - RNA, 19 nt, Artificial Sequence
  Description of Artificial Sequence: Synthetic oligonucleotide
  Antisense strand to SEQ ID NO: 2113460
guugcaacagcgaagaauc

SEQ ID NO: 2113462 - RNA, 19 nt, Artificial Sequence
  Description of Artificial Sequence: Synthetic oligonucleotide
  Sense strand starting at position 584 of SEQ ID NO: 1882341
aguuaaugcugauuugcuu

SEQ ID NO: 2113463 - RNA, 19 nt, Artificial Sequence
  Description of Artificial Sequence: Synthetic oligonucleotide
  Antisense strand to SEQ ID NO: 2113462
aagcaaaucagcauuaacu

SEQ ID NO: 2113464 - RNA, 19 nt, Artificial Sequence
  Description of Artificial Sequence: Synthetic oligonucleotide
  Sense strand starting at position 807 of SEQ ID NO: 1882341
guuaaucugucaccauaca

SEQ ID NO: 2113465 - RNA, 19 nt, Artificial Sequence
  Description of Artificial Sequence: Synthetic oligonucleotide
  Antisense strand to SEQ ID NO: 2113464
uguauggugacagauuaac

SEQ ID NO: 2113466 - RNA, 19 nt, Artificial Sequence
  Description of Artificial Sequence: Synthetic oligonucleotide
  Sense strand starting at position 911 of SEQ ID NO: 1882341
uccuguccuagggaaugua

SEQ ID NO: 2113467 - RNA, 19 nt, Artificial Sequence
  Description of Artificial Sequence: Synthetic oligonucleotide
  Antisense strand to SEQ ID NO: 2113466
uacauucccuaggacagga

SEQ ID NO: 2113468 - RNA, 19 nt, Artificial Sequence
  Description of Artificial Sequence: Synthetic oligonucleotide
  Sense strand starting at position 921 of SEQ ID NO: 1882341
gggaauguauacgcugaga

SEQ ID NO: 2113469 - RNA, 19 nt, Artificial Sequence
  Description of Artificial Sequence: Synthetic oligonucleotide
  Antisense strand to SEQ ID NO: 2113468
ucucagcguauacauuccc

SEQ ID NO: 2113470 - RNA, 19 nt, Artificial Sequence
  Description of Artificial Sequence: Synthetic oligonucleotide
  Sense strand starting at position 923 of SEQ ID NO: 1882341
gaauguauacgcugagaca

SEQ ID NO: 2113471 - RNA, 19 nt, Artificial Sequence
  Description of Artificial Sequence: Synthetic oligonucleotide
  Antisense strand to SEQ ID NO: 2113470
ugucucagcguauacauuc

SEQ ID NO: 2113472 - RNA, 19 nt, Artificial Sequence
  Description of Artificial Sequence: Synthetic oligonucleotide
  Sense strand starting at position 924 of SEQ ID NO: 1882341
aauguauacgcugagacaa

SEQ ID NO: 2113473 - RNA, 19 nt, Artificial Sequence
  Description of Artificial Sequence: Synthetic oligonucleotide
  Antisense strand to SEQ ID NO: 2113472
uugucucagcguauacauu

SEQ ID NO: 2113474 - RNA, 19 nt, Artificial Sequence
  Description of Artificial Sequence: Synthetic oligonucleotide
  Sense strand starting at position 967 of SEQ ID NO: 1882341
cauaucaaggugugucaaa

SEQ ID NO: 2113475 - RNA, 19 nt, Artificial Sequence
  Description of Artificial Sequence: Synthetic oligonucleotide
  Antisense strand to SEQ ID NO: 2113474
uuugacacaccuugauaug

SEQ ID NO: 2113476 - RNA, 19 nt, Artificial Sequence
  Description of Artificial Sequence: Synthetic oligonucleotide
  Sense strand starting at position 974 of SEQ ID NO: 1882341
aggugugucaaaggacaga

SEQ ID NO: 2113477 - RNA, 19 nt, Artificial Sequence
  Description of Artificial Sequence: Synthetic oligonucleotide
  Antisense strand to SEQ ID NO: 2113476
ucuguccuuugacacaccu

SEQ ID NO: 2113478 - RNA, 19 nt, Artificial Sequence
  Description of Artificial Sequence: Synthetic oligonucleotide
  Sense strand starting at position 1085 of SEQ ID NO: 1882341
uagcuagagagaugugagu

SEQ ID NO: 2113479 - RNA, 19 nt, Artificial Sequence
  Description of Artificial Sequence: Synthetic oligonucleotide
  Antisense strand to SEQ ID NO: 2113478
acucacaucucucuagcua

SEQ ID NO: 2113480 - RNA, 19 nt, Artificial Sequence
  Description of Artificial Sequence: Synthetic oligonucleotide
  Sense strand starting at position 1087 of SEQ ID NO: 1882341
gcuagagagaugugaguga

SEQ ID NO: 2113481 - RNA, 19 nt, Artificial Sequence
  Description of Artificial Sequence: Synthetic oligonucleotide
  Antisense strand to SEQ ID NO: 2113480
ucacucacaucucucuagc

SEQ ID NO: 2113482 - RNA, 19 nt, Artificial Sequence
  Description of Artificial Sequence: Synthetic oligonucleotide
  Sense strand starting at position 1280 of SEQ ID NO: 1882341
uggugaaggccucacugua

SEQ ID NO: 2113483 - RNA, 19 nt, Artificial Sequence
  Description of Artificial Sequence: Synthetic oligonucleotide
  Antisense strand to SEQ ID NO: 2113482
uacagugaggccuucacca

SEQ ID NO: 2113484 - RNA, 19 nt, Artificial Sequence
  Description of Artificial Sequence: Synthetic oligonucleotide
  Sense strand starting at position 1318 of SEQ ID NO: 1882341
agguaauugcguuagagaa

SEQ ID NO: 2113485 - RNA, 19 nt, Artificial Sequence
  Description of Artificial Sequence: Synthetic oligonucleotide
  Antisense strand to SEQ ID NO: 2113484
uucucuaacgcaauuaccu

SEQ ID NO: 2113486 - RNA, 19 nt, Artificial Sequence
  Description of Artificial Sequence: Synthetic oligonucleotide
  Sense strand starting at position 1663 of SEQ ID NO: 1882341
augagucuggugcaucuaa

SEQ ID NO: 2113487 - RNA, 19 nt, Artificial Sequence
  Description of Artificial Sequence: Synthetic oligonucleotide
  Antisense strand to SEQ ID NO: 2113486
uuagaugcaccagacucau

SEQ ID NO: 2113488 - RNA, 19 nt, Artificial Sequence
  Description of Artificial Sequence: Synthetic oligonucleotide
  Sense strand starting at position 1724 of SEQ ID NO: 1882341
acgucuuugcugccaguca

SEQ ID NO: 2113489 - RNA, 19 nt, Artificial Sequence
  Description of Artificial Sequence: Synthetic oligonucleotide
  Antisense strand to SEQ ID NO: 2113488
ugacuggcagcaaagacgu

SEQ ID NO: 2113490 - RNA, 19 nt, Artificial Sequence
  Description of Artificial Sequence: Synthetic oligonucleotide
  Sense strand starting at position 1735 of SEQ ID NO: 1882341
gccagucagcaugauagaa

SEQ ID NO: 2113491 - RNA, 19 nt, Artificial Sequence
  Description of Artificial Sequence: Synthetic oligonucleotide
  Antisense strand to SEQ ID NO: 2113490
uucuaucaugcugacuggc

SEQ ID NO: 2113492 - RNA, 19 nt, Artificial Sequence
  Description of Artificial Sequence: Synthetic oligonucleotide
  Sense strand starting at position 2024 of SEQ ID NO: 1882341
gucagauuccugggaguua

SEQ ID NO: 2113493 - RNA, 19 nt, Artificial Sequence
  Description of Artificial Sequence: Synthetic oligonucleotide
  Antisense strand to SEQ ID NO: 2113492
uaacucccaggaaucugac

SEQ ID NO: 2113494 - RNA, 19 nt, Artificial Sequence
  Description of Artificial Sequence: Synthetic oligonucleotide
  Sense strand starting at position 2058 of SEQ ID NO: 1882341
agcuuuggucagguguguu

SEQ ID NO: 2113495 - RNA, 19 nt, Artificial Sequence
  Description of Artificial Sequence: Synthetic oligonucleotide
  Antisense strand to SEQ ID NO: 2113494
aacacaccugaccaaagcu

SEQ ID NO: 2113496 - RNA, 19 nt, Artificial Sequence
  Description of Artificial Sequence: Synthetic oligonucleotide
  Sense strand starting at position 2141 of SEQ ID NO: 1882341
uugugagcuaggcagauau

SEQ ID NO: 2113497 - RNA, 19 nt, Artificial Sequence
  Description of Artificial Sequence: Synthetic oligonucleotide
  Antisense strand to SEQ ID NO: 2113496
auaucugccuagcucacaa

SEQ ID NO: 2113498 - RNA, 19 nt, Artificial Sequence
  Description of Artificial Sequence: Synthetic oligonucleotide
  Sense strand starting at position 2151 of SEQ ID NO: 1882341
ggcagauauucucuagaag

SEQ ID NO: 2113499 - RNA, 19 nt, Artificial Sequence
  Description of Artificial Sequence: Synthetic oligonucleotide
  Antisense strand to SEQ ID NO: 2113498
cuucuagagaauaucugcc

SEQ ID NO: 2113500 - RNA, 19 nt, Artificial Sequence
  Description of Artificial Sequence: Synthetic oligonucleotide
  Sense strand starting at position 2170 of SEQ ID NO: 1882341
gugccuaacgcaguuacua

SEQ ID NO: 2113501 - RNA, 19 nt, Artificial Sequence
  Description of Artificial Sequence: Synthetic oligonucleotide
  Antisense strand to SEQ ID NO: 2113500
uaguaacugcguuaggcac

SEQ ID NO: 2113502 - RNA, 19 nt, Artificial Sequence
  Description of Artificial Sequence: Synthetic oligonucleotide
  Sense strand starting at position 2234 of SEQ ID NO: 1882341
aguucucaucuguaaauga

SEQ ID NO: 2113503 - RNA, 19 nt, Artificial Sequence
  Description of Artificial Sequence: Synthetic oligonucleotide
  Antisense strand to SEQ ID NO: 2113502
ucauuuacagaugagaacu

SEQ ID NO: 2113504 - RNA, 19 nt, Artificial Sequence
  Description of Artificial Sequence: Synthetic oligonucleotide
  Sense strand starting at position 2241 of SEQ ID NO: 1882341
aucuguaaaugagagauuu

SEQ ID NO: 2113505 - RNA, 19 nt, Artificial Sequence
  Description of Artificial Sequence: Synthetic oligonucleotide
  Antisense strand to SEQ ID NO: 2113504
aaaucucucauuuacagau

SEQ ID NO: 2113506 - RNA, 19 nt, Artificial Sequence
  Description of Artificial Sequence: Synthetic oligonucleotide
  Sense strand starting at position 2315 of SEQ ID NO: 1882341
ggacuacagugaucccuau

SEQ ID NO: 2113507 - RNA, 19 nt, Artificial Sequence
  Description of Artificial Sequence: Synthetic oligonucleotide
  Antisense strand to SEQ ID NO: 2113506
auagggaucacuguagucc

SEQ ID NO: 2113508 - RNA, 19 nt, Artificial Sequence
  Description of Artificial Sequence: Synthetic oligonucleotide
  Sense strand starting at position 2675 of SEQ ID NO: 1882341
ugauucugguguccagaau

SEQ ID NO: 2113509 - RNA, 19 nt, Artificial Sequence
  Description of Artificial Sequence: Synthetic oligonucleotide
  Antisense strand to SEQ ID NO: 2113508
auucuggacaccagaauca

SEQ ID NO: 2113510 - RNA, 19 nt, Artificial Sequence
  Description of Artificial Sequence: Synthetic oligonucleotide
  Sense strand starting at position 2676 of SEQ ID NO: 1882341
gauucugguguccagaauc

SEQ ID NO: 2113511 - RNA, 19 nt, Artificial Sequence
  Description of Artificial Sequence: Synthetic oligonucleotide
  Antisense strand to SEQ ID NO: 2113510
gauucuggacaccagaauc

SEQ ID NO: 2113512 - RNA, 19 nt, Artificial Sequence
  Description of Artificial Sequence: Synthetic oligonucleotide
  Sense strand starting at position 2809 of SEQ ID NO: 1882341
gagggauauuguguauaaa

SEQ ID NO: 2113513 - RNA, 19 nt, Artificial Sequence
  Description of Artificial Sequence: Synthetic oligonucleotide
  Antisense strand to SEQ ID NO: 2113512
uuuauacacaauaucccuc

SEQ ID NO: 2113514 - RNA, 19 nt, Artificial Sequence
  Description of Artificial Sequence: Synthetic oligonucleotide
  Sense strand starting at position 2849 of SEQ ID NO: 1882341
auauuuguggugugcuaac

SEQ ID NO: 2113515 - RNA, 19 nt, Artificial Sequence
  Description of Artificial Sequence: Synthetic oligonucleotide
  Antisense strand to SEQ ID NO: 2113514
guuagcacaccacaaauau

SEQ ID NO: 2113516 - RNA, 19 nt, Artificial Sequence
  Description of Artificial Sequence: Synthetic oligonucleotide
  Sense strand starting at position 3006 of SEQ ID NO: 1882341
aggucacacaguugaugaa

SEQ ID NO: 2113517 - RNA, 19 nt, Artificial Sequence
  Description of Artificial Sequence: Synthetic oligonucleotide
  Antisense strand to SEQ ID NO: 2113516
uucaucaacugugugaccu

SEQ ID NO: 2113518 - RNA, 19 nt, Artificial Sequence
  Description of Artificial Sequence: Synthetic oligonucleotide
  Sense strand starting at position 3120 of SEQ ID NO: 1882341
cuaagaccucucggauaag

SEQ ID NO: 2113519 - RNA, 19 nt, Artificial Sequence
  Description of Artificial Sequence: Synthetic oligonucleotide
  Antisense strand to SEQ ID NO: 2113518
cuuauccgagaggucuuag

SEQ ID NO: 2113520 - RNA, 19 nt, Artificial Sequence
  Description of Artificial Sequence: Synthetic oligonucleotide
  Sense strand starting at position 3129 of SEQ ID NO: 1882341
cucggauaagcugaacauu

SEQ ID NO: 2113521 - RNA, 19 nt, Artificial Sequence
  Description of Artificial Sequence: Synthetic oligonucleotide
  Antisense strand to SEQ ID NO: 2113520
aauguucagcuuauccgag

SEQ ID NO: 2113522 - RNA, 19 nt, Artificial Sequence
  Description of Artificial Sequence: Synthetic oligonucleotide
  Sense strand starting at position 3241 of SEQ ID NO: 1882341
aucugugggcuguaaauga

SEQ ID NO: 2113523 - RNA, 19 nt, Artificial Sequence
  Description of Artificial Sequence: Synthetic oligonucleotide
  Antisense strand to SEQ ID NO: 2113522
ucauuuacagcccacagau

SEQ ID NO: 2113524 - RNA, 19 nt, Artificial Sequence
  Description of Artificial Sequence: Synthetic oligonucleotide
  Sense strand starting at position 3443 of SEQ ID NO: 1882341
augagcuucuucucaggaa

SEQ ID NO: 2113525 - RNA, 19 nt, Artificial Sequence
  Description of Artificial Sequence: Synthetic oligonucleotide
  Antisense strand to SEQ ID NO: 2113524
uuccugagaagaagcucau

SEQ ID NO: 2113526 - RNA, 19 nt, Artificial Sequence
  Description of Artificial Sequence: Synthetic oligonucleotide
  Sense strand starting at position 3617 of SEQ ID NO: 1882341
ucacuauggcuagggacau

SEQ ID NO: 2113527 - RNA, 19 nt, Artificial Sequence
  Description of Artificial Sequence: Synthetic oligonucleotide
  Antisense strand to SEQ ID NO: 2113526
augucccuagccauaguga

SEQ ID NO: 2113528 - RNA, 19 nt, Artificial Sequence
  Description of Artificial Sequence: Synthetic oligonucleotide
  Sense strand starting at position 3677 of SEQ ID NO: 1882341
ccaugugaacagugggagu

SEQ ID NO: 2113529 - RNA, 19 nt, Artificial Sequence
  Description of Artificial Sequence: Synthetic oligonucleotide
  Antisense strand to SEQ ID NO: 2113528
acucccacuguucacaugg

SEQ ID NO: 2113530 - RNA, 19 nt, Artificial Sequence
  Description of Artificial Sequence: Synthetic oligonucleotide
  Sense strand starting at position 3690 of SEQ ID NO: 1882341
gggaguggaucuguuauaa

SEQ ID NO: 2113531 - RNA, 19 nt, Artificial Sequence
  Description of Artificial Sequence: Synthetic oligonucleotide
  Antisense strand to SEQ ID NO: 2113530
uuauaacagauccacuccc

SEQ ID NO: 2113532 - RNA, 19 nt, Artificial Sequence
  Description of Artificial Sequence: Synthetic oligonucleotide
  Sense strand starting at position 150 of SEQ ID NO: 1882342
uauuucuaacuguguucga

SEQ ID NO: 2113533 - RNA, 19 nt, Artificial Sequence
  Description of Artificial Sequence: Synthetic oligonucleotide
  Antisense strand to SEQ ID NO: 2113532
ucgaacacaguuagaaaua

SEQ ID NO: 2113534 - RNA, 19 nt, Artificial Sequence
  Description of Artificial Sequence: Synthetic oligonucleotide
  Sense strand starting at position 151 of SEQ ID NO: 1882342
auuucuaacuguguucgaa

SEQ ID NO: 2113535 - RNA, 19 nt, Artificial Sequence
  Description of Artificial Sequence: Synthetic oligonucleotide
  Antisense strand to SEQ ID NO: 2113534
uucgaacacaguuagaaau

SEQ ID NO: 2113536 - RNA, 19 nt, Artificial Sequence
  Description of Artificial Sequence: Synthetic oligonucleotide
  Sense strand starting at position 166 of SEQ ID NO: 1882342
cgaagcuuucuacaaacuu

SEQ ID NO: 2113537 - RNA, 19 nt, Artificial Sequence
  Description of Artificial Sequence: Synthetic oligonucleotide
  Antisense strand to SEQ ID NO: 2113536
aaguuuguagaaagcuucg

SEQ ID NO: 2113538 - RNA, 19 nt, Artificial Sequence
  Description of Artificial Sequence: Synthetic oligonucleotide
  Sense strand starting at position 241 of SEQ ID NO: 1882342
uggcauaagccacagauca

SEQ ID NO: 2113539 - RNA, 19 nt, Artificial Sequence
  Description of Artificial Sequence: Synthetic oligonucleotide
  Antisense strand to SEQ ID NO: 2113538
ugaucuguggcuuaugcca

SEQ ID NO: 2113540 - RNA, 19 nt, Artificial Sequence
  Description of Artificial Sequence: Synthetic oligonucleotide
  Sense strand starting at position 440 of SEQ ID NO: 1882342
guuagcuuaguuuguauuu

SEQ ID NO: 2113541 - RNA, 19 nt, Artificial Sequence
  Description of Artificial Sequence: Synthetic oligonucleotide
  Antisense strand to SEQ ID NO: 2113540
aaauacaaacuaagcuaac

SEQ ID NO: 2113542 - RNA, 19 nt, Artificial Sequence
  Description of Artificial Sequence: Synthetic oligonucleotide
  Sense strand starting at position 447 of SEQ ID NO: 1882342
uaguuuguauuucuggcaa

SEQ ID NO: 2113543 - RNA, 19 nt, Artificial Sequence
  Description of Artificial Sequence: Synthetic oligonucleotide
  Antisense strand to SEQ ID NO: 2113542
uugccagaaauacaaacua

SEQ ID NO: 2113544 - RNA, 19 nt, Artificial Sequence
  Description of Artificial Sequence: Synthetic oligonucleotide
  Sense strand starting at position 466 of SEQ ID NO: 1882342
agauaacauuuagagcauu

SEQ ID NO: 2113545 - RNA, 19 nt, Artificial Sequence
  Description of Artificial Sequence: Synthetic oligonucleotide
  Antisense strand to SEQ ID NO: 2113544
aaugcucuaaauguuaucu

SEQ ID NO: 2113546 - RNA, 19 nt, Artificial Sequence
  Description of Artificial Sequence: Synthetic oligonucleotide
  Sense strand starting at position 495 of SEQ ID NO: 1882342
gguuaagaugcccaaaggu

SEQ ID NO: 2113547 - RNA, 19 nt, Artificial Sequence
  Description of Artificial Sequence: Synthetic oligonucleotide
  Antisense strand to SEQ ID NO: 2113546
accuuugggcaucuuaacc

SEQ ID NO: 2113548 - RNA, 19 nt, Artificial Sequence
  Description of Artificial Sequence: Synthetic oligonucleotide
  Sense strand starting at position 544 of SEQ ID NO: 1882342
gaugucaaguagcuuauuu

SEQ ID NO: 2113549 - RNA, 19 nt, Artificial Sequence
  Description of Artificial Sequence: Synthetic oligonucleotide
  Antisense strand to SEQ ID NO: 2113548
aaauaagcuacuugacauc

SEQ ID NO: 2113550 - RNA, 19 nt, Artificial Sequence
  Description of Artificial Sequence: Synthetic oligonucleotide
  Sense strand starting at position 1165 of SEQ ID NO: 1882342
aauugucuucuugggaaga

SEQ ID NO: 2113551 - RNA, 19 nt, Artificial Sequence
  Description of Artificial Sequence: Synthetic oligonucleotide
  Antisense strand to SEQ ID NO: 2113550
ucuucccaagaagacaauu

SEQ ID NO: 2113552 - RNA, 19 nt, Artificial Sequence
  Description of Artificial Sequence: Synthetic oligonucleotide
  Sense strand starting at position 1214 of SEQ ID NO: 1882342
ugaauuggccuuggugaau

SEQ ID NO: 2113553 - RNA, 19 nt, Artificial Sequence
  Description of Artificial Sequence: Synthetic oligonucleotide
  Antisense strand to SEQ ID NO: 2113552
auucaccaaggccaauuca

SEQ ID NO: 2113554 - RNA, 19 nt, Artificial Sequence
  Description of Artificial Sequence: Synthetic oligonucleotide
  Sense strand starting at position 1254 of SEQ ID NO: 1882342
gggugaaugugaaaucgau

SEQ ID NO: 2113555 - RNA, 19 nt, Artificial Sequence
  Description of Artificial Sequence: Synthetic oligonucleotide
  Antisense strand to SEQ ID NO: 2113554
aucgauuucacauucaccc

SEQ ID NO: 2113556 - RNA, 19 nt, Artificial Sequence
  Description of Artificial Sequence: Synthetic oligonucleotide
  Sense strand starting at position 1258 of SEQ ID NO: 1882342
gaaugugaaaucgaugggu

SEQ ID NO: 2113557 - RNA, 19 nt, Artificial Sequence
  Description of Artificial Sequence: Synthetic oligonucleotide
  Antisense strand to SEQ ID NO: 2113556
acccaucgauuucacauuc

SEQ ID NO: 2113558 - RNA, 19 nt, Artificial Sequence
  Description of Artificial Sequence: Synthetic oligonucleotide
  Sense strand starting at position 1278 of SEQ ID NO: 1882342
ugcugaggaguagguauaa

SEQ ID NO: 2113559 - RNA, 19 nt, Artificial Sequence
  Description of Artificial Sequence: Synthetic oligonucleotide
  Antisense strand to SEQ ID NO: 2113558
uuauaccuacuccucagca

SEQ ID NO: 2113560 - RNA, 19 nt, Artificial Sequence
  Description of Artificial Sequence: Synthetic oligonucleotide
  Sense strand starting at position 1289 of SEQ ID NO: 1882342
agguauaaucucugccuca

SEQ ID NO: 2113561 - RNA, 19 nt, Artificial Sequence
  Description of Artificial Sequence: Synthetic oligonucleotide
  Antisense strand to SEQ ID NO: 2113560
ugaggcagagauuauaccu

SEQ ID NO: 2113562 - RNA, 19 nt, Artificial Sequence
  Description of Artificial Sequence: Synthetic oligonucleotide
  Sense strand starting at position 1670 of SEQ ID NO: 1882342
cucuauuaggacgggaaca

SEQ ID NO: 2113563 - RNA, 19 nt, Artificial Sequence
  Description of Artificial Sequence: Synthetic oligonucleotide
  Antisense strand to SEQ ID NO: 2113562
uguucccguccuaauagag

SEQ ID NO: 2113564 - RNA, 19 nt, Artificial Sequence
  Description of Artificial Sequence: Synthetic oligonucleotide
  Sense strand starting at position 1671 of SEQ ID NO: 1882342
ucuauuaggacgggaacau

SEQ ID NO: 2113565 - RNA, 19 nt, Artificial Sequence
  Description of Artificial Sequence: Synthetic oligonucleotide
  Antisense strand to SEQ ID NO: 2113564
auguucccguccuaauaga

SEQ ID NO: 2113566 - RNA, 19 nt, Artificial Sequence
  Description of Artificial Sequence: Synthetic oligonucleotide
  Sense strand starting at position 1901 of SEQ ID NO: 1882342
aagugaggguucucuccaa

SEQ ID NO: 2113567 - RNA, 19 nt, Artificial Sequence
  Description of Artificial Sequence: Synthetic oligonucleotide
  Antisense strand to SEQ ID NO: 2113566
uuggagagaacccucacuu

SEQ ID NO: 2113568 - RNA, 19 nt, Artificial Sequence
  Description of Artificial Sequence: Synthetic oligonucleotide
  Sense strand starting at position 1976 of SEQ ID NO: 1882342
cuacucugggcuugaugau

SEQ ID NO: 2113569 - RNA, 19 nt, Artificial Sequence
  Description of Artificial Sequence: Synthetic oligonucleotide
  Antisense strand to SEQ ID NO: 2113568
aucaucaagcccagaguag

SEQ ID NO: 2113570 - RNA, 19 nt, Artificial Sequence
  Description of Artificial Sequence: Synthetic oligonucleotide
  Sense strand starting at position 2095 of SEQ ID NO: 1882342
gauaucuugugaguuaggu

SEQ ID NO: 2113571 - RNA, 19 nt, Artificial Sequence
  Description of Artificial Sequence: Synthetic oligonucleotide
  Antisense strand to SEQ ID NO: 2113570
accuaacucacaagauauc

SEQ ID NO: 2113572 - RNA, 19 nt, Artificial Sequence
  Description of Artificial Sequence: Synthetic oligonucleotide
  Sense strand starting at position 2103 of SEQ ID NO: 1882342
gugaguuaggugcagaaua

SEQ ID NO: 2113573 - RNA, 19 nt, Artificial Sequence
  Description of Artificial Sequence: Synthetic oligonucleotide
  Antisense strand to SEQ ID NO: 2113572
uauucugcaccuaacucac

SEQ ID NO: 2113574 - RNA, 19 nt, Artificial Sequence
  Description of Artificial Sequence: Synthetic oligonucleotide
  Sense strand starting at position 2105 of SEQ ID NO: 1882342
gaguuaggugcagaauaga

SEQ ID NO: 2113575 - RNA, 19 nt, Artificial Sequence
  Description of Artificial Sequence: Synthetic oligonucleotide
  Antisense strand to SEQ ID NO: 2113574
ucuauucugcaccuaacuc

SEQ ID NO: 2113576 - RNA, 19 nt, Artificial Sequence
  Description of Artificial Sequence: Synthetic oligonucleotide
  Sense strand starting at position 2211 of SEQ ID NO: 1882342
gggagacuuacacgauuau

SEQ ID NO: 2113577 - RNA, 19 nt, Artificial Sequence
  Description of Artificial Sequence: Synthetic oligonucleotide
  Antisense strand to SEQ ID NO: 2113576
auaaucguguaagucuccc

SEQ ID NO: 2113578 - RNA, 19 nt, Artificial Sequence
  Description of Artificial Sequence: Synthetic oligonucleotide
  Sense strand starting at position 2590 of SEQ ID NO: 1882342
aggaaugggccaugucuca

SEQ ID NO: 2113579 - RNA, 19 nt, Artificial Sequence
  Description of Artificial Sequence: Synthetic oligonucleotide
  Antisense strand to SEQ ID NO: 2113578
ugagacauggcccauuccu

SEQ ID NO: 2113580 - RNA, 19 nt, Artificial Sequence
  Description of Artificial Sequence: Synthetic oligonucleotide
  Sense strand starting at position 2786 of SEQ ID NO: 1882342
gaggaauucugggaaacag

SEQ ID NO: 2113581 - RNA, 19 nt, Artificial Sequence
  Description of Artificial Sequence: Synthetic oligonucleotide
  Antisense strand to SEQ ID NO: 2113580
cuguuucccagaauuccuc

SEQ ID NO: 2113582 - RNA, 19 nt, Artificial Sequence
  Description of Artificial Sequence: Synthetic oligonucleotide
  Sense strand starting at position 2795 of SEQ ID NO: 1882342
ugggaaacaguguggaaua

SEQ ID NO: 2113583 - RNA, 19 nt, Artificial Sequence
  Description of Artificial Sequence: Synthetic oligonucleotide
  Antisense strand to SEQ ID NO: 2113582
uauuccacacuguuuccca

SEQ ID NO: 2113584 - RNA, 19 nt, Artificial Sequence
  Description of Artificial Sequence: Synthetic oligonucleotide
  Sense strand starting at position 2861 of SEQ ID NO: 1882342
gagagcaucuccucucagu

SEQ ID NO: 2113585 - RNA, 19 nt, Artificial Sequence
  Description of Artificial Sequence: Synthetic oligonucleotide
  Antisense strand to SEQ ID NO: 2113584
acugagaggagaugcucuc

SEQ ID NO: 2113586 - RNA, 19 nt, Artificial Sequence
  Description of Artificial Sequence: Synthetic oligonucleotide
  Sense strand starting at position 2907 of SEQ ID NO: 1882342
gggaauaacucucuggcca

SEQ ID NO: 2113587 - RNA, 19 nt, Artificial Sequence
  Description of Artificial Sequence: Synthetic oligonucleotide
  Antisense strand to SEQ ID NO: 2113586
uggccagagaguuauuccc

SEQ ID NO: 2113588 - RNA, 19 nt, Artificial Sequence
  Description of Artificial Sequence: Synthetic oligonucleotide
  Sense strand starting at position 2938 of SEQ ID NO: 1882342
gaaagagcuuggccucaaa

SEQ ID NO: 2113589 - RNA, 19 nt, Artificial Sequence
  Description of Artificial Sequence: Synthetic oligonucleotide
  Antisense strand to SEQ ID NO: 2113588
uuugaggccaagcucuuuc

SEQ ID NO: 2113590 - RNA, 19 nt, Artificial Sequence
  Description of Artificial Sequence: Synthetic oligonucleotide
  Sense strand starting at position 3037 of SEQ ID NO: 1882342
gcaucugcuaggcaagaua

SEQ ID NO: 2113591 - RNA, 19 nt, Artificial Sequence
  Description of Artificial Sequence: Synthetic oligonucleotide
  Antisense strand to SEQ ID NO: 2113590
uaucuugccuagcagaugc

SEQ ID NO: 2113592 - RNA, 19 nt, Artificial Sequence
  Description of Artificial Sequence: Synthetic oligonucleotide
  Sense strand starting at position 3040 of SEQ ID NO: 1882342
ucugcuaggcaagauauca

SEQ ID NO: 2113593 - RNA, 19 nt, Artificial Sequence
  Description of Artificial Sequence: Synthetic oligonucleotide
  Antisense strand to SEQ ID NO: 2113592
ugauaucuugccuagcaga

SEQ ID NO: 2113594 - RNA, 19 nt, Artificial Sequence
  Description of Artificial Sequence: Synthetic oligonucleotide
  Sense strand starting at position 3062 of SEQ ID NO: 1882342
acgaacaucuaggcugaua

SEQ ID NO: 2113595 - RNA, 19 nt, Artificial Sequence
  Description of Artificial Sequence: Synthetic oligonucleotide
  Antisense strand to SEQ ID NO: 2113594
uaucagccuagauguucgu

SEQ ID NO: 2113596 - RNA, 19 nt, Artificial Sequence
  Description of Artificial Sequence: Synthetic oligonucleotide
  Sense strand starting at position 3064 of SEQ ID NO: 1882342
gaacaucuaggcugauaga

SEQ ID NO: 2113597 - RNA, 19 nt, Artificial Sequence
  Description of Artificial Sequence: Synthetic oligonucleotide
  Antisense strand to SEQ ID NO: 2113596
ucuaucagccuagauguuc

SEQ ID NO: 2113598 - RNA, 19 nt, Artificial Sequence
  Description of Artificial Sequence: Synthetic oligonucleotide
  Sense strand starting at position 3235 of SEQ ID NO: 1882342
cugauauugcagcaugaca

SEQ ID NO: 2113599 - RNA, 19 nt, Artificial Sequence
  Description of Artificial Sequence: Synthetic oligonucleotide
  Antisense strand to SEQ ID NO: 2113598
ugucaugcugcaauaucag

SEQ ID NO: 2113600 - RNA, 19 nt, Artificial Sequence
  Description of Artificial Sequence: Synthetic oligonucleotide
  Sense strand starting at position 3237 of SEQ ID NO: 1882342
gauauugcagcaugacauu

SEQ ID NO: 2113601 - RNA, 19 nt, Artificial Sequence
  Description of Artificial Sequence: Synthetic oligonucleotide
  Antisense strand to SEQ ID NO: 2113600
aaugucaugcugcaauauc

SEQ ID NO: 2113602 - RNA, 19 nt, Artificial Sequence
  Description of Artificial Sequence: Synthetic oligonucleotide
  Sense strand starting at position 3452 of SEQ ID NO: 1882342
gggaguugaugguccucau

SEQ ID NO: 2113603 - RNA, 19 nt, Artificial Sequence
  Description of Artificial Sequence: Synthetic oligonucleotide
  Antisense strand to SEQ ID NO: 2113602
augaggaccaucaacuccc

SEQ ID NO: 2113604 - RNA, 19 nt, Artificial Sequence
  Description of Artificial Sequence: Synthetic oligonucleotide
  Sense strand starting at position 3744 of SEQ ID NO: 1882342
agacuauacccauguuacu

SEQ ID NO: 2113605 - RNA, 19 nt, Artificial Sequence
  Description of Artificial Sequence: Synthetic oligonucleotide
  Antisense strand to SEQ ID NO: 2113604
aguaacauggguauagucu

SEQ ID NO: 2113606 - RNA, 19 nt, Artificial Sequence
  Description of Artificial Sequence: Synthetic oligonucleotide
  Sense strand starting at position 3770 of SEQ ID NO: 1882342
uugguaucuauuuggcagu

SEQ ID NO: 2113607 - RNA, 19 nt, Artificial Sequence
  Description of Artificial Sequence: Synthetic oligonucleotide
  Antisense strand to SEQ ID NO: 2113606
acugccaaauagauaccaa

SEQ ID NO: 2113608 - RNA, 19 nt, Artificial Sequence
  Description of Artificial Sequence: Synthetic oligonucleotide
  Sense strand starting at position 3916 of SEQ ID NO: 1882342
cccagaagguucuuccuua

SEQ ID NO: 2113609 - RNA, 19 nt, Artificial Sequence
  Description of Artificial Sequence: Synthetic oligonucleotide
  Antisense strand to SEQ ID NO: 2113608
uaaggaagaaccuucuggg

SEQ ID NO: 2113610 - RNA, 19 nt, Artificial Sequence
  Description of Artificial Sequence: Synthetic oligonucleotide
  Sense strand starting at position 3917 of SEQ ID NO: 1882342
ccagaagguucuuccuuau

SEQ ID NO: 2113611 - RNA, 19 nt, Artificial Sequence
  Description of Artificial Sequence: Synthetic oligonucleotide
  Antisense strand to SEQ ID NO: 2113610
auaaggaagaaccuucugg

SEQ ID NO: 2113612 - RNA, 19 nt, Artificial Sequence
  Description of Artificial Sequence: Synthetic oligonucleotide
  Sense strand starting at position 382 of SEQ ID NO: 1882343
aaaggaaagguuggguuau

SEQ ID NO: 2113613 - RNA, 19 nt, Artificial Sequence
  Description of Artificial Sequence: Synthetic oligonucleotide
  Antisense strand to SEQ ID NO: 2113612
auaacccaaccuuuccuuu

SEQ ID NO: 2113614 - RNA, 19 nt, Artificial Sequence
  Description of Artificial Sequence: Synthetic oligonucleotide
  Sense strand starting at position 829 of SEQ ID NO: 1882343
cagaguuacuggcugggaa

SEQ ID NO: 2113615 - RNA, 19 nt, Artificial Sequence
  Description of Artificial Sequence: Synthetic oligonucleotide
  Antisense strand to SEQ ID NO: 2113614
uucccagccaguaacucug

SEQ ID NO: 2113616 - RNA, 19 nt, Artificial Sequence
  Description of Artificial Sequence: Synthetic oligonucleotide
  Sense strand starting at position 830 of SEQ ID NO: 1882343
agaguuacuggcugggaaa

SEQ ID NO: 2113617 - RNA, 19 nt, Artificial Sequence
  Description of Artificial Sequence: Synthetic oligonucleotide
  Antisense strand to SEQ ID NO: 2113616
uuucccagccaguaacucu

SEQ ID NO: 2113618 - RNA, 19 nt, Artificial Sequence
  Description of Artificial Sequence: Synthetic oligonucleotide
  Sense strand starting at position 831 of SEQ ID NO: 1882343
gaguuacuggcugggaaag

SEQ ID NO: 2113619 - RNA, 19 nt, Artificial Sequence
  Description of Artificial Sequence: Synthetic oligonucleotide
  Antisense strand to SEQ ID NO: 2113618
cuuucccagccaguaacuc

SEQ ID NO: 2113620 - RNA, 19 nt, Artificial Sequence
  Description of Artificial Sequence: Synthetic oligonucleotide
  Sense strand starting at position 1016 of SEQ ID NO: 1882343
uuccuacucgacugaaaga

SEQ ID NO: 2113621 - RNA, 19 nt, Artificial Sequence
  Description of Artificial Sequence: Synthetic oligonucleotide
  Antisense strand to SEQ ID NO: 2113620
ucuuucagucgaguaggaa

SEQ ID NO: 2113622 - RNA, 19 nt, Artificial Sequence
  Description of Artificial Sequence: Synthetic oligonucleotide
  Sense strand starting at position 1288 of SEQ ID NO: 1882343
agagucugguccuugggaa

SEQ ID NO: 2113623 - RNA, 19 nt, Artificial Sequence
  Description of Artificial Sequence: Synthetic oligonucleotide
  Antisense strand to SEQ ID NO: 2113622
uucccaaggaccagacucu

SEQ ID NO: 2113624 - RNA, 19 nt, Artificial Sequence
  Description of Artificial Sequence: Synthetic oligonucleotide
  Sense strand starting at position 1391 of SEQ ID NO: 1882343
cugagagucucuuugacua

SEQ ID NO: 2113625 - RNA, 19 nt, Artificial Sequence
  Description of Artificial Sequence: Synthetic oligonucleotide
  Antisense strand to SEQ ID NO: 2113624
uagucaaagagacucucag

SEQ ID NO: 2113626 - RNA, 19 nt, Artificial Sequence
  Description of Artificial Sequence: Synthetic oligonucleotide
  Sense strand starting at position 1661 of SEQ ID NO: 1882343
guauaugagccagagucca

SEQ ID NO: 2113627 - RNA, 19 nt, Artificial Sequence
  Description of Artificial Sequence: Synthetic oligonucleotide
  Antisense strand to SEQ ID NO: 2113626
uggacucuggcucauauac

SEQ ID NO: 2113628 - RNA, 19 nt, Artificial Sequence
  Description of Artificial Sequence: Synthetic oligonucleotide
  Sense strand starting at position 1726 of SEQ ID NO: 1882343
uggauucucaaugguugau

SEQ ID NO: 2113629 - RNA, 19 nt, Artificial Sequence
  Description of Artificial Sequence: Synthetic oligonucleotide
  Antisense strand to SEQ ID NO: 2113628
aucaaccauugagaaucca

SEQ ID NO: 2113630 - RNA, 19 nt, Artificial Sequence
  Description of Artificial Sequence: Synthetic oligonucleotide
  Sense strand starting at position 1728 of SEQ ID NO: 1882343
gauucucaaugguugauga

SEQ ID NO: 2113631 - RNA, 19 nt, Artificial Sequence
  Description of Artificial Sequence: Synthetic oligonucleotide
  Antisense strand to SEQ ID NO: 2113630
ucaucaaccauugagaauc

SEQ ID NO: 2113632 - RNA, 19 nt, Artificial Sequence
  Description of Artificial Sequence: Synthetic oligonucleotide
  Sense strand starting at position 1729 of SEQ ID NO: 1882343
auucucaaugguugaugaa

SEQ ID NO: 2113633 - RNA, 19 nt, Artificial Sequence
  Description of Artificial Sequence: Synthetic oligonucleotide
  Antisense strand to SEQ ID NO: 2113632
uucaucaaccauugagaau

SEQ ID NO: 2113634 - RNA, 19 nt, Artificial Sequence
  Description of Artificial Sequence: Synthetic oligonucleotide
  Sense strand starting at position 1835 of SEQ ID NO: 1882343
ccagaaaccuggcccuaau

SEQ ID NO: 2113635 - RNA, 19 nt, Artificial Sequence
  Description of Artificial Sequence: Synthetic oligonucleotide
  Antisense strand to SEQ ID NO: 2113634
auuagggccagguuucugg

SEQ ID NO: 2113636 - RNA, 19 nt, Artificial Sequence
  Description of Artificial Sequence: Synthetic oligonucleotide
  Sense strand starting at position 1858 of SEQ ID NO: 1882343
guaggaugagguuacucuu

SEQ ID NO: 2113637 - RNA, 19 nt, Artificial Sequence
  Description of Artificial Sequence: Synthetic oligonucleotide
  Antisense strand to SEQ ID NO: 2113636
aagaguaaccucauccuac

SEQ ID NO: 2113638 - RNA, 19 nt, Artificial Sequence
  Description of Artificial Sequence: Synthetic oligonucleotide
  Sense strand starting at position 1871 of SEQ ID NO: 1882343
acucuuugccucuguauuu

SEQ ID NO: 2113639 - RNA, 19 nt, Artificial Sequence
  Description of Artificial Sequence: Synthetic oligonucleotide
  Antisense strand to SEQ ID NO: 2113638
aaauacagaggcaaagagu

SEQ ID NO: 2113640 - RNA, 19 nt, Artificial Sequence
  Description of Artificial Sequence: Synthetic oligonucleotide
  Sense strand starting at position 1896 of SEQ ID NO: 1882343
uagggcuaugguuauaaua

SEQ ID NO: 2113641 - RNA, 19 nt, Artificial Sequence
  Description of Artificial Sequence: Synthetic oligonucleotide
  Antisense strand to SEQ ID NO: 2113640
uauuauaaccauagcccua

SEQ ID NO: 2113642 - RNA, 19 nt, Artificial Sequence
  Description of Artificial Sequence: Synthetic oligonucleotide
  Sense strand starting at position 2150 of SEQ ID NO: 1882343
cuuuguuuccacguggcau

SEQ ID NO: 2113643 - RNA, 19 nt, Artificial Sequence
  Description of Artificial Sequence: Synthetic oligonucleotide
  Antisense strand to SEQ ID NO: 2113642
augccacguggaaacaaag

SEQ ID NO: 2113644 - RNA, 19 nt, Artificial Sequence
  Description of Artificial Sequence: Synthetic oligonucleotide
  Sense strand starting at position 2281 of SEQ ID NO: 1882343
gauccugagaguugggauu

SEQ ID NO: 2113645 - RNA, 19 nt, Artificial Sequence
  Description of Artificial Sequence: Synthetic oligonucleotide
  Antisense strand to SEQ ID NO: 2113644
aaucccaacucucaggauc

SEQ ID NO: 2113646 - RNA, 19 nt, Artificial Sequence
  Description of Artificial Sequence: Synthetic oligonucleotide
  Sense strand starting at position 2360 of SEQ ID NO: 1882343
auugaauagcagcaaucuu

SEQ ID NO: 2113647 - RNA, 19 nt, Artificial Sequence
  Description of Artificial Sequence: Synthetic oligonucleotide
  Antisense strand to SEQ ID NO: 2113646
aagauugcugcuauucaau

SEQ ID NO: 2113648 - RNA, 19 nt, Artificial Sequence
  Description of Artificial Sequence: Synthetic oligonucleotide
  Sense strand starting at position 2515 of SEQ ID NO: 1882343
ccauaauagguuugauagg

SEQ ID NO: 2113649 - RNA, 19 nt, Artificial Sequence
  Description of Artificial Sequence: Synthetic oligonucleotide
  Antisense strand to SEQ ID NO: 2113648
ccuaucaaaccuauuaugg

SEQ ID NO: 2113650 - RNA, 19 nt, Artificial Sequence
  Description of Artificial Sequence: Synthetic oligonucleotide
  Sense strand starting at position 2520 of SEQ ID NO: 1882343
auagguuugauagguacua

SEQ ID NO: 2113651 - RNA, 19 nt, Artificial Sequence
  Description of Artificial Sequence: Synthetic oligonucleotide
  Antisense strand to SEQ ID NO: 2113650
uaguaccuaucaaaccuau

SEQ ID NO: 2113652 - RNA, 19 nt, Artificial Sequence
  Description of Artificial Sequence: Synthetic oligonucleotide
  Sense strand starting at position 2521 of SEQ ID NO: 1882343
uagguuugauagguacuaa

SEQ ID NO: 2113653 - RNA, 19 nt, Artificial Sequence
  Description of Artificial Sequence: Synthetic oligonucleotide
  Antisense strand to SEQ ID NO: 2113652
uuaguaccuaucaaaccua

SEQ ID NO: 2113654 - RNA, 19 nt, Artificial Sequence
  Description of Artificial Sequence: Synthetic oligonucleotide
  Sense strand starting at position 2618 of SEQ ID NO: 1882343
gguacauguauuugugagu

SEQ ID NO: 2113655 - RNA, 19 nt, Artificial Sequence
  Description of Artificial Sequence: Synthetic oligonucleotide
  Antisense strand to SEQ ID NO: 2113654
acucacaaauacauguacc

SEQ ID NO: 2113656 - RNA, 19 nt, Artificial Sequence
  Description of Artificial Sequence: Synthetic oligonucleotide
  Sense strand starting at position 2619 of SEQ ID NO: 1882343
guacauguauuugugaguu

SEQ ID NO: 2113657 - RNA, 19 nt, Artificial Sequence
  Description of Artificial Sequence: Synthetic oligonucleotide
  Antisense strand to SEQ ID NO: 2113656
aacucacaaauacauguac

SEQ ID NO: 2113658 - RNA, 19 nt, Artificial Sequence
  Description of Artificial Sequence: Synthetic oligonucleotide
  Sense strand starting at position 2623 of SEQ ID NO: 1882343
auguauuugugaguuccuu

SEQ ID NO: 2113659 - RNA, 19 nt, Artificial Sequence
  Description of Artificial Sequence: Synthetic oligonucleotide
  Antisense strand to SEQ ID NO: 2113658
aaggaacucacaaauacau

SEQ ID NO: 2113660 - RNA, 19 nt, Artificial Sequence
  Description of Artificial Sequence: Synthetic oligonucleotide
  Sense strand starting at position 2754 of SEQ ID NO: 1882343
gucuucugagagugaacaa

SEQ ID NO: 2113661 - RNA, 19 nt, Artificial Sequence
  Description of Artificial Sequence: Synthetic oligonucleotide
  Antisense strand to SEQ ID NO: 2113660
uuguucacucucagaagac

SEQ ID NO: 2113662 - RNA, 19 nt, Artificial Sequence
  Description of Artificial Sequence: Synthetic oligonucleotide
  Sense strand starting at position 2778 of SEQ ID NO: 1882343
uuuacucuaccagggaaau

SEQ ID NO: 2113663 - RNA, 19 nt, Artificial Sequence
  Description of Artificial Sequence: Synthetic oligonucleotide
  Antisense strand to SEQ ID NO: 2113662
auuucccugguagaguaaa

SEQ ID NO: 2113664 - RNA, 19 nt, Artificial Sequence
  Description of Artificial Sequence: Synthetic oligonucleotide
  Sense strand starting at position 2854 of SEQ ID NO: 1882343
uaaugauguccuuagugau

SEQ ID NO: 2113665 - RNA, 19 nt, Artificial Sequence
  Description of Artificial Sequence: Synthetic oligonucleotide
  Antisense strand to SEQ ID NO: 2113664
aucacuaaggacaucauua

SEQ ID NO: 2113666 - RNA, 19 nt, Artificial Sequence
  Description of Artificial Sequence: Synthetic oligonucleotide
  Sense strand starting at position 2871 of SEQ ID NO: 1882343
auaguugcuauggaaguau

SEQ ID NO: 2113667 - RNA, 19 nt, Artificial Sequence
  Description of Artificial Sequence: Synthetic oligonucleotide
  Antisense strand to SEQ ID NO: 2113666
auacuuccauagcaacuau

SEQ ID NO: 2113668 - RNA, 19 nt, Artificial Sequence
  Description of Artificial Sequence: Synthetic oligonucleotide
  Sense strand starting at position 2932 of SEQ ID NO: 1882343
ccucuuuaguguguauuua

SEQ ID NO: 2113669 - RNA, 19 nt, Artificial Sequence
  Description of Artificial Sequence: Synthetic oligonucleotide
  Antisense strand to SEQ ID NO: 2113668
uaaauacacacuaaagagg

SEQ ID NO: 2113670 - RNA, 19 nt, Artificial Sequence
  Description of Artificial Sequence: Synthetic oligonucleotide
  Sense strand starting at position 3198 of SEQ ID NO: 1882343
cucuaauaccaaugugaug

SEQ ID NO: 2113671 - RNA, 19 nt, Artificial Sequence
  Description of Artificial Sequence: Synthetic oligonucleotide
  Antisense strand to SEQ ID NO: 2113670
caucacauugguauuagag

SEQ ID NO: 2113672 - RNA, 19 nt, Artificial Sequence
  Description of Artificial Sequence: Synthetic oligonucleotide
  Sense strand starting at position 3558 of SEQ ID NO: 1882343
gaauguauaguuuggagac

SEQ ID NO: 2113673 - RNA, 19 nt, Artificial Sequence
  Description of Artificial Sequence: Synthetic oligonucleotide
  Antisense strand to SEQ ID NO: 2113672
gucuccaaacuauacauuc

SEQ ID NO: 2113674 - RNA, 19 nt, Artificial Sequence
  Description of Artificial Sequence: Synthetic oligonucleotide
  Sense strand starting at position 3676 of SEQ ID NO: 1882343
acuugauaggauuguuaug

SEQ ID NO: 2113675 - RNA, 19 nt, Artificial Sequence
  Description of Artificial Sequence: Synthetic oligonucleotide
  Antisense strand to SEQ ID NO: 2113674
cauaacaauccuaucaagu

SEQ ID NO: 2113676 - RNA, 19 nt, Artificial Sequence
  Description of Artificial Sequence: Synthetic oligonucleotide
  Sense strand starting at position 3678 of SEQ ID NO: 1882343
uugauaggauuguuaugag

SEQ ID NO: 2113677 - RNA, 19 nt, Artificial Sequence
  Description of Artificial Sequence: Synthetic oligonucleotide
  Antisense strand to SEQ ID NO: 2113676
cucauaacaauccuaucaa

SEQ ID NO: 2113678 - RNA, 19 nt, Artificial Sequence
  Description of Artificial Sequence: Synthetic oligonucleotide
  Sense strand starting at position 3685 of SEQ ID NO: 1882343
gauuguuaugagggucaug

SEQ ID NO: 2113679 - RNA, 19 nt, Artificial Sequence
  Description of Artificial Sequence: Synthetic oligonucleotide
  Antisense strand to SEQ ID NO: 2113678
caugacccucauaacaauc

SEQ ID NO: 2113680 - RNA, 19 nt, Artificial Sequence
  Description of Artificial Sequence: Synthetic oligonucleotide
  Sense strand starting at position 3688 of SEQ ID NO: 1882343
uguuaugagggucauguga

SEQ ID NO: 2113681 - RNA, 19 nt, Artificial Sequence
  Description of Artificial Sequence: Synthetic oligonucleotide
  Antisense strand to SEQ ID NO: 2113680
ucacaugacccucauaaca

SEQ ID NO: 2113682 - RNA, 19 nt, Artificial Sequence
  Description of Artificial Sequence: Synthetic oligonucleotide
  Sense strand starting at position 3696 of SEQ ID NO: 1882343
gggucaugugauuaaugua

SEQ ID NO: 2113683 - RNA, 19 nt, Artificial Sequence
  Description of Artificial Sequence: Synthetic oligonucleotide
  Antisense strand to SEQ ID NO: 2113682
uacauuaaucacaugaccc

SEQ ID NO: 2113684 - RNA, 19 nt, Artificial Sequence
  Description of Artificial Sequence: Synthetic oligonucleotide
  Sense strand starting at position 3701 of SEQ ID NO: 1882343
augugauuaauguauguga

SEQ ID NO: 2113685 - RNA, 19 nt, Artificial Sequence
  Description of Artificial Sequence: Synthetic oligonucleotide
  Antisense strand to SEQ ID NO: 2113684
ucacauacauuaaucacau

SEQ ID NO: 2113686 - RNA, 19 nt, Artificial Sequence
  Description of Artificial Sequence: Synthetic oligonucleotide
  Sense strand starting at position 3704 of SEQ ID NO: 1882343
ugauuaauguaugugaaag

SEQ ID NO: 2113687 - RNA, 19 nt, Artificial Sequence
  Description of Artificial Sequence: Synthetic oligonucleotide
  Antisense strand to SEQ ID NO: 2113686
cuuucacauacauuaauca

SEQ ID NO: 2113688 - RNA, 19 nt, Artificial Sequence
  Description of Artificial Sequence: Synthetic oligonucleotide
  Sense strand starting at position 3811 of SEQ ID NO: 1882343
ccuggaugucuauggagaa

SEQ ID NO: 2113689 - RNA, 19 nt, Artificial Sequence
  Description of Artificial Sequence: Synthetic oligonucleotide
  Antisense strand to SEQ ID NO: 2113688
uucuccauagacauccagg

SEQ ID NO: 2113690 - RNA, 19 nt, Artificial Sequence
  Description of Artificial Sequence: Synthetic oligonucleotide
  Sense strand starting at position 3980 of SEQ ID NO: 1882343
gggacaguaugacuuuaau

SEQ ID NO: 2113691 - RNA, 19 nt, Artificial Sequence
  Description of Artificial Sequence: Synthetic oligonucleotide
  Antisense strand to SEQ ID NO: 2113690
auuaaagucauacuguccc

SEQ ID NO: 2113692 - RNA, 19 nt, Artificial Sequence
  Description of Artificial Sequence: Synthetic oligonucleotide
  Sense strand starting at position 178 of SEQ ID NO: 1882344
agcugcaagucuuuaauuu

SEQ ID NO: 2113693 - RNA, 19 nt, Artificial Sequence
  Description of Artificial Sequence: Synthetic oligonucleotide
  Antisense strand to SEQ ID NO: 2113692
aaauuaaagacuugcagcu

SEQ ID NO: 2113694 - RNA, 19 nt, Artificial Sequence
  Description of Artificial Sequence: Synthetic oligonucleotide
  Sense strand starting at position 207 of SEQ ID NO: 1882344
gugguuaucacaggaguaa

SEQ ID NO: 2113695 - RNA, 19 nt, Artificial Sequence
  Description of Artificial Sequence: Synthetic oligonucleotide
  Antisense strand to SEQ ID NO: 2113694
uuacuccugugauaaccac

SEQ ID NO: 2113696 - RNA, 19 nt, Artificial Sequence
  Description of Artificial Sequence: Synthetic oligonucleotide
  Sense strand starting at position 222 of SEQ ID NO: 1882344
guaaaugggaaguauugua

SEQ ID NO: 2113697 - RNA, 19 nt, Artificial Sequence
  Description of Artificial Sequence: Synthetic oligonucleotide
  Antisense strand to SEQ ID NO: 2113696
uacaauacuucccauuuac

SEQ ID NO: 2113698 - RNA, 19 nt, Artificial Sequence
  Description of Artificial Sequence: Synthetic oligonucleotide
  Sense strand starting at position 278 of SEQ ID NO: 1882344
aguacuacuccagauaguc

SEQ ID NO: 2113699 - RNA, 19 nt, Artificial Sequence
  Description of Artificial Sequence: Synthetic oligonucleotide
  Antisense strand to SEQ ID NO: 2113698
gacuaucuggaguaguacu

SEQ ID NO: 2113700 - RNA, 19 nt, Artificial Sequence
  Description of Artificial Sequence: Synthetic oligonucleotide
  Sense strand starting at position 335 of SEQ ID NO: 1882344
cugacaugguagucagaga

SEQ ID NO: 2113701 - RNA, 19 nt, Artificial Sequence
  Description of Artificial Sequence: Synthetic oligonucleotide
  Antisense strand to SEQ ID NO: 2113700
ucucugacuaccaugucag

SEQ ID NO: 2113702 - RNA, 19 nt, Artificial Sequence
  Description of Artificial Sequence: Synthetic oligonucleotide
  Sense strand starting at position 351 of SEQ ID NO: 1882344
agaagagccaggugacauu

SEQ ID NO: 2113703 - RNA, 19 nt, Artificial Sequence
  Description of Artificial Sequence: Synthetic oligonucleotide
  Antisense strand to SEQ ID NO: 2113702
aaugucaccuggcucuucu

SEQ ID NO: 2113704 - RNA, 19 nt, Artificial Sequence
  Description of Artificial Sequence: Synthetic oligonucleotide
  Sense strand starting at position 626 of SEQ ID NO: 1882344
ucagguucuaaugggauca

SEQ ID NO: 2113705 - RNA, 19 nt, Artificial Sequence
  Description of Artificial Sequence: Synthetic oligonucleotide
  Antisense strand to SEQ ID NO: 2113704
ugaucccauuagaaccuga

SEQ ID NO: 2113706 - RNA, 19 nt, Artificial Sequence
  Description of Artificial Sequence: Synthetic oligonucleotide
  Sense strand starting at position 653 of SEQ ID NO: 1882344
gcugaaugcaacuauguag

SEQ ID NO: 2113707 - RNA, 19 nt, Artificial Sequence
  Description of Artificial Sequence: Synthetic oligonucleotide
  Antisense strand to SEQ ID NO: 2113706
cuacauaguugcauucagc

SEQ ID NO: 2113708 - RNA, 19 nt, Artificial Sequence
  Description of Artificial Sequence: Synthetic oligonucleotide
  Sense strand starting at position 656 of SEQ ID NO: 1882344
gaaugcaacuauguagaga

SEQ ID NO: 2113709 - RNA, 19 nt, Artificial Sequence
  Description of Artificial Sequence: Synthetic oligonucleotide
  Antisense strand to SEQ ID NO: 2113708
ucucuacauaguugcauuc

SEQ ID NO: 2113710 - RNA, 19 nt, Artificial Sequence
  Description of Artificial Sequence: Synthetic oligonucleotide
  Sense strand starting at position 842 of SEQ ID NO: 1882344
cgauaugagcuauacauau

SEQ ID NO: 2113711 - RNA, 19 nt, Artificial Sequence
  Description of Artificial Sequence: Synthetic oligonucleotide
  Antisense strand to SEQ ID NO: 2113710
auauguauagcucauaucg

SEQ ID NO: 2113712 - RNA, 19 nt, Artificial Sequence
  Description of Artificial Sequence: Synthetic oligonucleotide
  Sense strand starting at position 923 of SEQ ID NO: 1882344
cacauuauacagugacgau

SEQ ID NO: 2113713 - RNA, 19 nt, Artificial Sequence
  Description of Artificial Sequence: Synthetic oligonucleotide
  Antisense strand to SEQ ID NO: 2113712
aucgucacuguauaaugug

SEQ ID NO: 2113714 - RNA, 19 nt, Artificial Sequence
  Description of Artificial Sequence: Synthetic oligonucleotide
  Sense strand starting at position 937 of SEQ ID NO: 1882344
acgauauggcaucacugaa

SEQ ID NO: 2113715 - RNA, 19 nt, Artificial Sequence
  Description of Artificial Sequence: Synthetic oligonucleotide
  Antisense strand to SEQ ID NO: 2113714
uucagugaugccauaucgu

SEQ ID NO: 2113716 - RNA, 19 nt, Artificial Sequence
  Description of Artificial Sequence: Synthetic oligonucleotide
  Sense strand starting at position 1152 of SEQ ID NO: 1882344
augcuacccuuucugaaga

SEQ ID NO: 2113717 - RNA, 19 nt, Artificial Sequence
  Description of Artificial Sequence: Synthetic oligonucleotide
  Antisense strand to SEQ ID NO: 2113716
ucuucagaaaggguagcau

SEQ ID NO: 2113718 - RNA, 19 nt, Artificial Sequence
  Description of Artificial Sequence: Synthetic oligonucleotide
  Sense strand starting at position 1194 of SEQ ID NO: 1882344
guccauaacugacuggauu

SEQ ID NO: 2113719 - RNA, 19 nt, Artificial Sequence
  Description of Artificial Sequence: Synthetic oligonucleotide
  Antisense strand to SEQ ID NO: 2113718
aauccagucaguuauggac

SEQ ID NO: 2113720 - RNA, 19 nt, Artificial Sequence
  Description of Artificial Sequence: Synthetic oligonucleotide
  Sense strand starting at position 1353 of SEQ ID NO: 1882344
uauuacaucucagugguga

SEQ ID NO: 2113721 - RNA, 19 nt, Artificial Sequence
  Description of Artificial Sequence: Synthetic oligonucleotide
  Antisense strand to SEQ ID NO: 2113720
ucaccacugagauguaaua

SEQ ID NO: 2113722 - RNA, 19 nt, Artificial Sequence
  Description of Artificial Sequence: Synthetic oligonucleotide
  Sense strand starting at position 1354 of SEQ ID NO: 1882344
auuacaucucaguggugau

SEQ ID NO: 2113723 - RNA, 19 nt, Artificial Sequence
  Description of Artificial Sequence: Synthetic oligonucleotide
  Antisense strand to SEQ ID NO: 2113722
aucaccacugagauguaau

SEQ ID NO: 2113724 - RNA, 19 nt, Artificial Sequence
  Description of Artificial Sequence: Synthetic oligonucleotide
  Sense strand starting at position 2104 of SEQ ID NO: 1882344
gccggaguugagagugcuu

SEQ ID NO: 2113725 - RNA, 19 nt, Artificial Sequence
  Description of Artificial Sequence: Synthetic oligonucleotide
  Antisense strand to SEQ ID NO: 2113724
aagcacucucaacuccggc

SEQ ID NO: 2113726 - RNA, 19 nt, Artificial Sequence
  Description of Artificial Sequence: Synthetic oligonucleotide
  Sense strand starting at position 2370 of SEQ ID NO: 1882344
agaaggagcguucgaggaa

SEQ ID NO: 2113727 - RNA, 19 nt, Artificial Sequence
  Description of Artificial Sequence: Synthetic oligonucleotide
  Antisense strand to SEQ ID NO: 2113726
uuccucgaacgcuccuucu

SEQ ID NO: 2113728 - RNA, 19 nt, Artificial Sequence
  Description of Artificial Sequence: Synthetic oligonucleotide
  Sense strand starting at position 2374 of SEQ ID NO: 1882344
ggagcguucgaggaaugga

SEQ ID NO: 2113729 - RNA, 19 nt, Artificial Sequence
  Description of Artificial Sequence: Synthetic oligonucleotide
  Antisense strand to SEQ ID NO: 2113728
uccauuccucgaacgcucc

SEQ ID NO: 2113730 - RNA, 19 nt, Artificial Sequence
  Description of Artificial Sequence: Synthetic oligonucleotide
  Sense strand starting at position 2403 of SEQ ID NO: 1882344
auggaagaaacgggugauu

SEQ ID NO: 2113731 - RNA, 19 nt, Artificial Sequence
  Description of Artificial Sequence: Synthetic oligonucleotide
  Antisense strand to SEQ ID NO: 2113730
aaucacccguuucuuccau

SEQ ID NO: 2113732 - RNA, 19 nt, Artificial Sequence
  Description of Artificial Sequence: Synthetic oligonucleotide
  Sense strand starting at position 2593 of SEQ ID NO: 1882344
ggagaacugucagucaccu

SEQ ID NO: 2113733 - RNA, 19 nt, Artificial Sequence
  Description of Artificial Sequence: Synthetic oligonucleotide
  Antisense strand to SEQ ID NO: 2113732
aggugacugacaguucucc

SEQ ID NO: 2113734 - RNA, 19 nt, Artificial Sequence
  Description of Artificial Sequence: Synthetic oligonucleotide
  Sense strand starting at position 2647 of SEQ ID NO: 1882344
ccucguuccguguuuauua

SEQ ID NO: 2113735 - RNA, 19 nt, Artificial Sequence
  Description of Artificial Sequence: Synthetic oligonucleotide
  Antisense strand to SEQ ID NO: 2113734
uaauaaacacggaacgagg

SEQ ID NO: 2113736 - RNA, 19 nt, Artificial Sequence
  Description of Artificial Sequence: Synthetic oligonucleotide
  Sense strand starting at position 2693 of SEQ ID NO: 1882344
cuccauuuggcuugcagua

SEQ ID NO: 2113737 - RNA, 19 nt, Artificial Sequence
  Description of Artificial Sequence: Synthetic oligonucleotide
  Antisense strand to SEQ ID NO: 2113736
uacugcaagccaaauggag

SEQ ID NO: 2113738 - RNA, 19 nt, Artificial Sequence
  Description of Artificial Sequence: Synthetic oligonucleotide
  Sense strand starting at position 2852 of SEQ ID NO: 1882344
aaugauuuggugcgcuaac

SEQ ID NO: 2113739 - RNA, 19 nt, Artificial Sequence
  Description of Artificial Sequence: Synthetic oligonucleotide
  Antisense strand to SEQ ID NO: 2113738
guuagcgcaccaaaucauu

SEQ ID NO: 2113740 - RNA, 19 nt, Artificial Sequence
  Description of Artificial Sequence: Synthetic oligonucleotide
  Sense strand starting at position 2853 of SEQ ID NO: 1882344
augauuuggugcgcuaaca

SEQ ID NO: 2113741 - RNA, 19 nt, Artificial Sequence
  Description of Artificial Sequence: Synthetic oligonucleotide
  Antisense strand to SEQ ID NO: 2113740
uguuagcgcaccaaaucau

SEQ ID NO: 2113742 - RNA, 19 nt, Artificial Sequence
  Description of Artificial Sequence: Synthetic oligonucleotide
  Sense strand starting at position 2915 of SEQ ID NO: 1882344
aucagaagccuagaauugu

SEQ ID NO: 2113743 - RNA, 19 nt, Artificial Sequence
  Description of Artificial Sequence: Synthetic oligonucleotide
  Antisense strand to SEQ ID NO: 2113742
acaauucuaggcuucugau

SEQ ID NO: 2113744 - RNA, 19 nt, Artificial Sequence
  Description of Artificial Sequence: Synthetic oligonucleotide
  Sense strand starting at position 3004 of SEQ ID NO: 1882344
uaauuuagacagcguuauu

SEQ ID NO: 2113745 - RNA, 19 nt, Artificial Sequence
  Description of Artificial Sequence: Synthetic oligonucleotide
  Antisense strand to SEQ ID NO: 2113744
aauaacgcugucuaaauua

SEQ ID NO: 2113746 - RNA, 19 nt, Artificial Sequence
  Description of Artificial Sequence: Synthetic oligonucleotide
  Sense strand starting at position 3115 of SEQ ID NO: 1882344
uccaccuuuguguaaugau

SEQ ID NO: 2113747 - RNA, 19 nt, Artificial Sequence
  Description of Artificial Sequence: Synthetic oligonucleotide
  Antisense strand to SEQ ID NO: 2113746
aucauuacacaaaggugga

SEQ ID NO: 2113748 - RNA, 19 nt, Artificial Sequence
  Description of Artificial Sequence: Synthetic oligonucleotide
  Sense strand starting at position 3127 of SEQ ID NO: 1882344
uaaugauguguguacaaag

SEQ ID NO: 2113749 - RNA, 19 nt, Artificial Sequence
  Description of Artificial Sequence: Synthetic oligonucleotide
  Antisense strand to SEQ ID NO: 2113748
cuuuguacacacaucauua

SEQ ID NO: 2113750 - RNA, 19 nt, Artificial Sequence
  Description of Artificial Sequence: Synthetic oligonucleotide
  Sense strand starting at position 3186 of SEQ ID NO: 1882344
caccauaggccaugauuga

SEQ ID NO: 2113751 - RNA, 19 nt, Artificial Sequence
  Description of Artificial Sequence: Synthetic oligonucleotide
  Antisense strand to SEQ ID NO: 2113750
ucaaucauggccuauggug

SEQ ID NO: 2113752 - RNA, 19 nt, Artificial Sequence
  Description of Artificial Sequence: Synthetic oligonucleotide
  Sense strand starting at position 3410 of SEQ ID NO: 1882344
ucaauaggucauuguaacu

SEQ ID NO: 2113753 - RNA, 19 nt, Artificial Sequence
  Description of Artificial Sequence: Synthetic oligonucleotide
  Antisense strand to SEQ ID NO: 2113752
aguuacaaugaccuauuga

SEQ ID NO: 2113754 - RNA, 19 nt, Artificial Sequence
  Description of Artificial Sequence: Synthetic oligonucleotide
  Sense strand starting at position 3415 of SEQ ID NO: 1882344
aggucauuguaacucaaca

SEQ ID NO: 2113755 - RNA, 19 nt, Artificial Sequence
  Description of Artificial Sequence: Synthetic oligonucleotide
  Antisense strand to SEQ ID NO: 2113754
uguugaguuacaaugaccu

SEQ ID NO: 2113756 - RNA, 19 nt, Artificial Sequence
  Description of Artificial Sequence: Synthetic oligonucleotide
  Sense strand starting at position 3511 of SEQ ID NO: 1882344
uugaauaucuguguugaau

SEQ ID NO: 2113757 - RNA, 19 nt, Artificial Sequence
  Description of Artificial Sequence: Synthetic oligonucleotide
  Antisense strand to SEQ ID NO: 2113756
auucaacacagauauucaa

SEQ ID NO: 2113758 - RNA, 19 nt, Artificial Sequence
  Description of Artificial Sequence: Synthetic oligonucleotide
  Sense strand starting at position 3536 of SEQ ID NO: 1882344
agaggccucaggcaauuau

SEQ ID NO: 2113759 - RNA, 19 nt, Artificial Sequence
  Description of Artificial Sequence: Synthetic oligonucleotide
  Antisense strand to SEQ ID NO: 2113758
auaauugccugaggccucu

SEQ ID NO: 2113760 - RNA, 19 nt, Artificial Sequence
  Description of Artificial Sequence: Synthetic oligonucleotide
  Sense strand starting at position 3720 of SEQ ID NO: 1882344
uuuagaugaugguuaguau

SEQ ID NO: 2113761 - RNA, 19 nt, Artificial Sequence
  Description of Artificial Sequence: Synthetic oligonucleotide
  Antisense strand to SEQ ID NO: 2113760
auacuaaccaucaucuaaa

SEQ ID NO: 2113762 - RNA, 19 nt, Artificial Sequence
  Description of Artificial Sequence: Synthetic oligonucleotide
  Sense strand starting at position 3734 of SEQ ID NO: 1882344
aguaucagucauuaauguu

SEQ ID NO: 2113763 - RNA, 19 nt, Artificial Sequence
  Description of Artificial Sequence: Synthetic oligonucleotide
  Antisense strand to SEQ ID NO: 2113762
aacauuaaugacugauacu

SEQ ID NO: 2113764 - RNA, 19 nt, Artificial Sequence
  Description of Artificial Sequence: Synthetic oligonucleotide
  Sense strand starting at position 3786 of SEQ ID NO: 1882344
ugaucacaguuauuaggua

SEQ ID NO: 2113765 - RNA, 19 nt, Artificial Sequence
  Description of Artificial Sequence: Synthetic oligonucleotide
  Antisense strand to SEQ ID NO: 2113764
uaccuaauaacugugauca

SEQ ID NO: 2113766 - RNA, 19 nt, Artificial Sequence
  Description of Artificial Sequence: Synthetic oligonucleotide
  Sense strand starting at position 3804 of SEQ ID NO: 1882344
aucagaggucuuuaucagu

SEQ ID NO: 2113767 - RNA, 19 nt, Artificial Sequence
  Description of Artificial Sequence: Synthetic oligonucleotide
  Antisense strand to SEQ ID NO: 2113766
acugauaaagaccucugau

SEQ ID NO: 2113768 - RNA, 19 nt, Artificial Sequence
  Description of Artificial Sequence: Synthetic oligonucleotide
  Sense strand starting at position 3824 of SEQ ID NO: 1882344
acacuuucucaccagugau

SEQ ID NO: 2113769 - RNA, 19 nt, Artificial Sequence
  Description of Artificial Sequence: Synthetic oligonucleotide
  Antisense strand to SEQ ID NO: 2113768
aucacuggugagaaagugu

SEQ ID NO: 2113770 - RNA, 19 nt, Artificial Sequence
  Description of Artificial Sequence: Synthetic oligonucleotide
  Sense strand starting at position 3969 of SEQ ID NO: 1882344
aguagcaaugucgguauuu

SEQ ID NO: 2113771 - RNA, 19 nt, Artificial Sequence
  Description of Artificial Sequence: Synthetic oligonucleotide
  Antisense strand to SEQ ID NO: 2113770
aaauaccgacauugcuacu

SEQ ID NO: 2113772 - RNA, 19 nt, Artificial Sequence
  Description of Artificial Sequence: Synthetic oligonucleotide
  Sense strand starting at position 313 of SEQ ID NO: 1882345
gcuggaauagcagaucagu

SEQ ID NO: 2113773 - RNA, 19 nt, Artificial Sequence
  Description of Artificial Sequence: Synthetic oligonucleotide
  Antisense strand to SEQ ID NO: 2113772
acugaucugcuauuccagc

SEQ ID NO: 2113774 - RNA, 19 nt, Artificial Sequence
  Description of Artificial Sequence: Synthetic oligonucleotide
  Sense strand starting at position 347 of SEQ ID NO: 1882345
uuuagugggcaugaugaua

SEQ ID NO: 2113775 - RNA, 19 nt, Artificial Sequence
  Description of Artificial Sequence: Synthetic oligonucleotide
  Antisense strand to SEQ ID NO: 2113774
uaucaucaugcccacuaaa

SEQ ID NO: 2113776 - RNA, 19 nt, Artificial Sequence
  Description of Artificial Sequence: Synthetic oligonucleotide
  Sense strand starting at position 479 of SEQ ID NO: 1882345
cuccauuaacugugauaga

SEQ ID NO: 2113777 - RNA, 19 nt, Artificial Sequence
  Description of Artificial Sequence: Synthetic oligonucleotide
  Antisense strand to SEQ ID NO: 2113776
ucuaucacaguuaauggag

SEQ ID NO: 2113778 - RNA, 19 nt, Artificial Sequence
  Description of Artificial Sequence: Synthetic oligonucleotide
  Sense strand starting at position 555 of SEQ ID NO: 1882345
agaccuaaguaugucagua

SEQ ID NO: 2113779 - RNA, 19 nt, Artificial Sequence
  Description of Artificial Sequence: Synthetic oligonucleotide
  Antisense strand to SEQ ID NO: 2113778
uacugacauacuuaggucu

SEQ ID NO: 2113780 - RNA, 19 nt, Artificial Sequence
  Description of Artificial Sequence: Synthetic oligonucleotide
  Sense strand starting at position 616 of SEQ ID NO: 1882345
aagcaagucgguuauuaga

SEQ ID NO: 2113781 - RNA, 19 nt, Artificial Sequence
  Description of Artificial Sequence: Synthetic oligonucleotide
  Antisense strand to SEQ ID NO: 2113780
ucuaauaaccgacuugcuu

SEQ ID NO: 2113782 - RNA, 19 nt, Artificial Sequence
  Description of Artificial Sequence: Synthetic oligonucleotide
  Sense strand starting at position 672 of SEQ ID NO: 1882345
uaaacaugugauuggcuca

SEQ ID NO: 2113783 - RNA, 19 nt, Artificial Sequence
  Description of Artificial Sequence: Synthetic oligonucleotide
  Antisense strand to SEQ ID NO: 2113782
ugagccaaucacauguuua

SEQ ID NO: 2113784 - RNA, 19 nt, Artificial Sequence
  Description of Artificial Sequence: Synthetic oligonucleotide
  Sense strand starting at position 1031 of SEQ ID NO: 1882345
ccagcuuaacgguaaauua

SEQ ID NO: 2113785 - RNA, 19 nt, Artificial Sequence
  Description of Artificial Sequence: Synthetic oligonucleotide
  Antisense strand to SEQ ID NO: 2113784
uaauuuaccguuaagcugg

SEQ ID NO: 2113786 - RNA, 19 nt, Artificial Sequence
  Description of Artificial Sequence: Synthetic oligonucleotide
  Sense strand starting at position 1100 of SEQ ID NO: 1882345
ggcauuacugcagacuaag

SEQ ID NO: 2113787 - RNA, 19 nt, Artificial Sequence
  Description of Artificial Sequence: Synthetic oligonucleotide
  Antisense strand to SEQ ID NO: 2113786
cuuagucugcaguaaugcc

SEQ ID NO: 2113788 - RNA, 19 nt, Artificial Sequence
  Description of Artificial Sequence: Synthetic oligonucleotide
  Sense strand starting at position 1326 of SEQ ID NO: 1882345
uuuaguugcgcucuauauu

SEQ ID NO: 2113789 - RNA, 19 nt, Artificial Sequence
  Description of Artificial Sequence: Synthetic oligonucleotide
  Antisense strand to SEQ ID NO: 2113788
aauauagagcgcaacuaaa

SEQ ID NO: 2113790 - RNA, 19 nt, Artificial Sequence
  Description of Artificial Sequence: Synthetic oligonucleotide
  Sense strand starting at position 1409 of SEQ ID NO: 1882345
uuucuugggucauuaaaua

SEQ ID NO: 2113791 - RNA, 19 nt, Artificial Sequence
  Description of Artificial Sequence: Synthetic oligonucleotide
  Antisense strand to SEQ ID NO: 2113790
uauuuaaugacccaagaaa

SEQ ID NO: 2113792 - RNA, 19 nt, Artificial Sequence
  Description of Artificial Sequence: Synthetic oligonucleotide
  Sense strand starting at position 1577 of SEQ ID NO: 1882345
ggaaauguaacgugagaau

SEQ ID NO: 2113793 - RNA, 19 nt, Artificial Sequence
  Description of Artificial Sequence: Synthetic oligonucleotide
  Antisense strand to SEQ ID NO: 2113792
auucucacguuacauuucc

SEQ ID NO: 2113794 - RNA, 19 nt, Artificial Sequence
  Description of Artificial Sequence: Synthetic oligonucleotide
  Sense strand starting at position 1612 of SEQ ID NO: 1882345
auaagugagaaucgcuuaa

SEQ ID NO: 2113795 - RNA, 19 nt, Artificial Sequence
  Description of Artificial Sequence: Synthetic oligonucleotide
  Antisense strand to SEQ ID NO: 2113794
uuaagcgauucucacuuau

SEQ ID NO: 2113796 - RNA, 19 nt, Artificial Sequence
  Description of Artificial Sequence: Synthetic oligonucleotide
  Sense strand starting at position 1614 of SEQ ID NO: 1882345
aagugagaaucgcuuaauu

SEQ ID NO: 2113797 - RNA, 19 nt, Artificial Sequence
  Description of Artificial Sequence: Synthetic oligonucleotide
  Antisense strand to SEQ ID NO: 2113796
aauuaagcgauucucacuu

SEQ ID NO: 2113798 - RNA, 19 nt, Artificial Sequence
  Description of Artificial Sequence: Synthetic oligonucleotide
  Sense strand starting at position 1616 of SEQ ID NO: 1882345
gugagaaucgcuuaauuag

SEQ ID NO: 2113799 - RNA, 19 nt, Artificial Sequence
  Description of Artificial Sequence: Synthetic oligonucleotide
  Antisense strand to SEQ ID NO: 2113798
cuaauuaagcgauucucac

SEQ ID NO: 2113800 - RNA, 19 nt, Artificial Sequence
  Description of Artificial Sequence: Synthetic oligonucleotide
  Sense strand starting at position 2372 of SEQ ID NO: 1882345
gaucgauggcgaugaacua

SEQ ID NO: 2113801 - RNA, 19 nt, Artificial Sequence
  Description of Artificial Sequence: Synthetic oligonucleotide
  Antisense strand to SEQ ID NO: 2113800
uaguucaucgccaucgauc

SEQ ID NO: 2113802 - RNA, 19 nt, Artificial Sequence
  Description of Artificial Sequence: Synthetic oligonucleotide
  Sense strand starting at position 2384 of SEQ ID NO: 1882345
ugaacuauaacgcgaagga

SEQ ID NO: 2113803 - RNA, 19 nt, Artificial Sequence
  Description of Artificial Sequence: Synthetic oligonucleotide
  Antisense strand to SEQ ID NO: 2113802
uccuucgcguuauaguuca

SEQ ID NO: 2113804 - RNA, 19 nt, Artificial Sequence
  Description of Artificial Sequence: Synthetic oligonucleotide
  Sense strand starting at position 2385 of SEQ ID NO: 1882345
gaacuauaacgcgaaggau

SEQ ID NO: 2113805 - RNA, 19 nt, Artificial Sequence
  Description of Artificial Sequence: Synthetic oligonucleotide
  Antisense strand to SEQ ID NO: 2113804
auccuucgcguuauaguuc

SEQ ID NO: 2113806 - RNA, 19 nt, Artificial Sequence
  Description of Artificial Sequence: Synthetic oligonucleotide
  Sense strand starting at position 2783 of SEQ ID NO: 1882345
ccugaauuugcagguuugu

SEQ ID NO: 2113807 - RNA, 19 nt, Artificial Sequence
  Description of Artificial Sequence: Synthetic oligonucleotide
  Antisense strand to SEQ ID NO: 2113806
acaaaccugcaaauucagg

SEQ ID NO: 2113808 - RNA, 19 nt, Artificial Sequence
  Description of Artificial Sequence: Synthetic oligonucleotide
  Sense strand starting at position 2808 of SEQ ID NO: 1882345
uuugucuugcucgagauuu

SEQ ID NO: 2113809 - RNA, 19 nt, Artificial Sequence
  Description of Artificial Sequence: Synthetic oligonucleotide
  Antisense strand to SEQ ID NO: 2113808
aaaucucgagcaagacaaa

SEQ ID NO: 2113810 - RNA, 19 nt, Artificial Sequence
  Description of Artificial Sequence: Synthetic oligonucleotide
  Sense strand starting at position 2833 of SEQ ID NO: 1882345
gagcaaauccacggaauga

SEQ ID NO: 2113811 - RNA, 19 nt, Artificial Sequence
  Description of Artificial Sequence: Synthetic oligonucleotide
  Antisense strand to SEQ ID NO: 2113810
ucauuccguggauuugcuc

SEQ ID NO: 2113812 - RNA, 19 nt, Artificial Sequence
  Description of Artificial Sequence: Synthetic oligonucleotide
  Sense strand starting at position 2984 of SEQ ID NO: 1882345
gggcaauuguaacuaggua

SEQ ID NO: 2113813 - RNA, 19 nt, Artificial Sequence
  Description of Artificial Sequence: Synthetic oligonucleotide
  Antisense strand to SEQ ID NO: 2113812
uaccuaguuacaauugccc

SEQ ID NO: 2113814 - RNA, 19 nt, Artificial Sequence
  Description of Artificial Sequence: Synthetic oligonucleotide
  Sense strand starting at position 2989 of SEQ ID NO: 1882345
auuguaacuagguagaugu

SEQ ID NO: 2113815 - RNA, 19 nt, Artificial Sequence
  Description of Artificial Sequence: Synthetic oligonucleotide
  Antisense strand to SEQ ID NO: 2113814
acaucuaccuaguuacaau

SEQ ID NO: 2113816 - RNA, 19 nt, Artificial Sequence
  Description of Artificial Sequence: Synthetic oligonucleotide
  Sense strand starting at position 3015 of SEQ ID NO: 1882345
agugaauugacagggucaa

SEQ ID NO: 2113817 - RNA, 19 nt, Artificial Sequence
  Description of Artificial Sequence: Synthetic oligonucleotide
  Antisense strand to SEQ ID NO: 2113816
uugacccugucaauucacu

SEQ ID NO: 2113818 - RNA, 19 nt, Artificial Sequence
  Description of Artificial Sequence: Synthetic oligonucleotide
  Sense strand starting at position 3016 of SEQ ID NO: 1882345
gugaauugacagggucaaa

SEQ ID NO: 2113819 - RNA, 19 nt, Artificial Sequence
  Description of Artificial Sequence: Synthetic oligonucleotide
  Antisense strand to SEQ ID NO: 2113818
uuugacccugucaauucac

SEQ ID NO: 2113820 - RNA, 19 nt, Artificial Sequence
  Description of Artificial Sequence: Synthetic oligonucleotide
  Sense strand starting at position 3040 of SEQ ID NO: 1882345
auuaccuuugugggaagua

SEQ ID NO: 2113821 - RNA, 19 nt, Artificial Sequence
  Description of Artificial Sequence: Synthetic oligonucleotide
  Antisense strand to SEQ ID NO: 2113820
uacuucccacaaagguaau

SEQ ID NO: 2113822 - RNA, 19 nt, Artificial Sequence
  Description of Artificial Sequence: Synthetic oligonucleotide
  Sense strand starting at position 3104 of SEQ ID NO: 1882345
accagagucguagagguau

SEQ ID NO: 2113823 - RNA, 19 nt, Artificial Sequence
  Description of Artificial Sequence: Synthetic oligonucleotide
  Antisense strand to SEQ ID NO: 2113822
auaccucuacgacucuggu

SEQ ID NO: 2113824 - RNA, 19 nt, Artificial Sequence
  Description of Artificial Sequence: Synthetic oligonucleotide
  Sense strand starting at position 3112 of SEQ ID NO: 1882345
cguagagguauugacgauu

SEQ ID NO: 2113825 - RNA, 19 nt, Artificial Sequence
  Description of Artificial Sequence: Synthetic oligonucleotide
  Antisense strand to SEQ ID NO: 2113824
aaucgucaauaccucuacg

SEQ ID NO: 2113826 - RNA, 19 nt, Artificial Sequence
  Description of Artificial Sequence: Synthetic oligonucleotide
  Sense strand starting at position 3152 of SEQ ID NO: 1882345
auguuaucaggucacauau

SEQ ID NO: 2113827 - RNA, 19 nt, Artificial Sequence
  Description of Artificial Sequence: Synthetic oligonucleotide
  Antisense strand to SEQ ID NO: 2113826
auaugugaccugauaacau

SEQ ID NO: 2113828 - RNA, 19 nt, Artificial Sequence
  Description of Artificial Sequence: Synthetic oligonucleotide
  Sense strand starting at position 3179 of SEQ ID NO: 1882345
augacaaaugugcauagua

SEQ ID NO: 2113829 - RNA, 19 nt, Artificial Sequence
  Description of Artificial Sequence: Synthetic oligonucleotide
  Antisense strand to SEQ ID NO: 2113828
uacuaugcacauuugucau

SEQ ID NO: 2113830 - RNA, 19 nt, Artificial Sequence
  Description of Artificial Sequence: Synthetic oligonucleotide
  Sense strand starting at position 3181 of SEQ ID NO: 1882345
gacaaaugugcauaguacu

SEQ ID NO: 2113831 - RNA, 19 nt, Artificial Sequence
  Description of Artificial Sequence: Synthetic oligonucleotide
  Antisense strand to SEQ ID NO: 2113830
aguacuaugcacauuuguc

SEQ ID NO: 2113832 - RNA, 19 nt, Artificial Sequence
  Description of Artificial Sequence: Synthetic oligonucleotide
  Sense strand starting at position 3424 of SEQ ID NO: 1882345
ugauauuaacuuugcugaa

SEQ ID NO: 2113833 - RNA, 19 nt, Artificial Sequence
  Description of Artificial Sequence: Synthetic oligonucleotide
  Antisense strand to SEQ ID NO: 2113832
uucagcaaaguuaauauca

SEQ ID NO: 2113834 - RNA, 19 nt, Artificial Sequence
  Description of Artificial Sequence: Synthetic oligonucleotide
  Sense strand starting at position 3426 of SEQ ID NO: 1882345
auauuaacuuugcugaaug

SEQ ID NO: 2113835 - RNA, 19 nt, Artificial Sequence
  Description of Artificial Sequence: Synthetic oligonucleotide
  Antisense strand to SEQ ID NO: 2113834
cauucagcaaaguuaauau

SEQ ID NO: 2113836 - RNA, 19 nt, Artificial Sequence
  Description of Artificial Sequence: Synthetic oligonucleotide
  Sense strand starting at position 3485 of SEQ ID NO: 1882345
ucgaaagcacaguaucuuu

SEQ ID NO: 2113837 - RNA, 19 nt, Artificial Sequence
  Description of Artificial Sequence: Synthetic oligonucleotide
  Antisense strand to SEQ ID NO: 2113836
aaagauacugugcuuucga

SEQ ID NO: 2113838 - RNA, 19 nt, Artificial Sequence
  Description of Artificial Sequence: Synthetic oligonucleotide
  Sense strand starting at position 3524 of SEQ ID NO: 1882345
uugacaguacacuguauua

SEQ ID NO: 2113839 - RNA, 19 nt, Artificial Sequence
  Description of Artificial Sequence: Synthetic oligonucleotide
  Antisense strand to SEQ ID NO: 2113838
uaauacaguguacugucaa

SEQ ID NO: 2113840 - RNA, 19 nt, Artificial Sequence
  Description of Artificial Sequence: Synthetic oligonucleotide
  Sense strand starting at position 3543 of SEQ ID NO: 1882345
auauauacucuauaggugu

SEQ ID NO: 2113841 - RNA, 19 nt, Artificial Sequence
  Description of Artificial Sequence: Synthetic oligonucleotide
  Antisense strand to SEQ ID NO: 2113840
acaccuauagaguauauau

SEQ ID NO: 2113842 - RNA, 19 nt, Artificial Sequence
  Description of Artificial Sequence: Synthetic oligonucleotide
  Sense strand starting at position 3551 of SEQ ID NO: 1882345
ucuauagguguccaguauu

SEQ ID NO: 2113843 - RNA, 19 nt, Artificial Sequence
  Description of Artificial Sequence: Synthetic oligonucleotide
  Antisense strand to SEQ ID NO: 2113842
aauacuggacaccuauaga

SEQ ID NO: 2113844 - RNA, 19 nt, Artificial Sequence
  Description of Artificial Sequence: Synthetic oligonucleotide
  Sense strand starting at position 3554 of SEQ ID NO: 1882345
auagguguccaguauuaag

SEQ ID NO: 2113845 - RNA, 19 nt, Artificial Sequence
  Description of Artificial Sequence: Synthetic oligonucleotide
  Antisense strand to SEQ ID NO: 2113844
cuuaauacuggacaccuau

SEQ ID NO: 2113846 - RNA, 19 nt, Artificial Sequence
  Description of Artificial Sequence: Synthetic oligonucleotide
  Sense strand starting at position 3585 of SEQ ID NO: 1882345
uuucuugcauaucugagaa

SEQ ID NO: 2113847 - RNA, 19 nt, Artificial Sequence
  Description of Artificial Sequence: Synthetic oligonucleotide
  Antisense strand to SEQ ID NO: 2113846
uucucagauaugcaagaaa

SEQ ID NO: 2113848 - RNA, 19 nt, Artificial Sequence
  Description of Artificial Sequence: Synthetic oligonucleotide
  Sense strand starting at position 3642 of SEQ ID NO: 1882345
aguaccaaguucucuugau

SEQ ID NO: 2113849 - RNA, 19 nt, Artificial Sequence
  Description of Artificial Sequence: Synthetic oligonucleotide
  Antisense strand to SEQ ID NO: 2113848
aucaagagaacuugguacu

SEQ ID NO: 2113850 - RNA, 19 nt, Artificial Sequence
  Description of Artificial Sequence: Synthetic oligonucleotide
  Sense strand starting at position 3790 of SEQ ID NO: 1882345
uuuaauuugcaguguuauc

SEQ ID NO: 2113851 - RNA, 19 nt, Artificial Sequence
  Description of Artificial Sequence: Synthetic oligonucleotide
  Antisense strand to SEQ ID NO: 2113850
gauaacacugcaaauuaaa

SEQ ID NO: 2113852 - RNA, 19 nt, Artificial Sequence
  Description of Artificial Sequence: Synthetic oligonucleotide
  Sense strand starting at position 9 of SEQ ID NO: 1882346
ggcgauuaugcaggcauuu

SEQ ID NO: 2113853 - RNA, 19 nt, Artificial Sequence
  Description of Artificial Sequence: Synthetic oligonucleotide
  Antisense strand to SEQ ID NO: 2113852
aaaugccugcauaaucgcc

SEQ ID NO: 2113854 - RNA, 19 nt, Artificial Sequence
  Description of Artificial Sequence: Synthetic oligonucleotide
  Sense strand starting at position 19 of SEQ ID NO: 1882346
caggcauuucgcuauugcu

SEQ ID NO: 2113855 - RNA, 19 nt, Artificial Sequence
  Description of Artificial Sequence: Synthetic oligonucleotide
  Antisense strand to SEQ ID NO: 2113854
agcaauagcgaaaugccug

SEQ ID NO: 2113856 - RNA, 19 nt, Artificial Sequence
  Description of Artificial Sequence: Synthetic oligonucleotide
  Sense strand starting at position 581 of SEQ ID NO: 1882346
cuuauuacgcuuuaaaugu

SEQ ID NO: 2113857 - RNA, 19 nt, Artificial Sequence
  Description of Artificial Sequence: Synthetic oligonucleotide
  Antisense strand to SEQ ID NO: 2113856
acauuuaaagcguaauaag

SEQ ID NO: 2113858 - RNA, 19 nt, Artificial Sequence
  Description of Artificial Sequence: Synthetic oligonucleotide
  Sense strand starting at position 689 of SEQ ID NO: 1882346
gcuugugagauggguagaa

SEQ ID NO: 2113859 - RNA, 19 nt, Artificial Sequence
  Description of Artificial Sequence: Synthetic oligonucleotide
  Antisense strand to SEQ ID NO: 2113858
uucuacccaucucacaagc

SEQ ID NO: 2113860 - RNA, 19 nt, Artificial Sequence
  Description of Artificial Sequence: Synthetic oligonucleotide
  Sense strand starting at position 820 of SEQ ID NO: 1882346
ccugcuuacaugugaggaa

SEQ ID NO: 2113861 - RNA, 19 nt, Artificial Sequence
  Description of Artificial Sequence: Synthetic oligonucleotide
  Antisense strand to SEQ ID NO: 2113860
uuccucacauguaagcagg

SEQ ID NO: 2113862 - RNA, 19 nt, Artificial Sequence
  Description of Artificial Sequence: Synthetic oligonucleotide
  Sense strand starting at position 980 of SEQ ID NO: 1882346
ccaggaccgucugcauaaa

SEQ ID NO: 2113863 - RNA, 19 nt, Artificial Sequence
  Description of Artificial Sequence: Synthetic oligonucleotide
  Antisense strand to SEQ ID NO: 2113862
uuuaugcagacgguccugg

SEQ ID NO: 2113864 - RNA, 19 nt, Artificial Sequence
  Description of Artificial Sequence: Synthetic oligonucleotide
  Sense strand starting at position 981 of SEQ ID NO: 1882346
caggaccgucugcauaaau

SEQ ID NO: 2113865 - RNA, 19 nt, Artificial Sequence
  Description of Artificial Sequence: Synthetic oligonucleotide
  Antisense strand to SEQ ID NO: 2113864
auuuaugcagacgguccug

SEQ ID NO: 2113866 - RNA, 19 nt, Artificial Sequence
  Description of Artificial Sequence: Synthetic oligonucleotide
  Sense strand starting at position 1058 of SEQ ID NO: 1882346
gccuuugucagggcguuaa

SEQ ID NO: 2113867 - RNA, 19 nt, Artificial Sequence
  Description of Artificial Sequence: Synthetic oligonucleotide
  Antisense strand to SEQ ID NO: 2113866
uuaacgcccugacaaaggc

SEQ ID NO: 2113868 - RNA, 19 nt, Artificial Sequence
  Description of Artificial Sequence: Synthetic oligonucleotide
  Sense strand starting at position 1094 of SEQ ID NO: 1882346
caaagcuuauccgugggau

SEQ ID NO: 2113869 - RNA, 19 nt, Artificial Sequence
  Description of Artificial Sequence: Synthetic oligonucleotide
  Antisense strand to SEQ ID NO: 2113868
aucccacggauaagcuuug

SEQ ID NO: 2113870 - RNA, 19 nt, Artificial Sequence
  Description of Artificial Sequence: Synthetic oligonucleotide
  Sense strand starting at position 1095 of SEQ ID NO: 1882346
aaagcuuauccgugggauu

SEQ ID NO: 2113871 - RNA, 19 nt, Artificial Sequence
  Description of Artificial Sequence: Synthetic oligonucleotide
  Antisense strand to SEQ ID NO: 2113870
aaucccacggauaagcuuu

SEQ ID NO: 2113872 - RNA, 19 nt, Artificial Sequence
  Description of Artificial Sequence: Synthetic oligonucleotide
  Sense strand starting at position 1146 of SEQ ID NO: 1882346
gggcccgauucauugagga

SEQ ID NO: 2113873 - RNA, 19 nt, Artificial Sequence
  Description of Artificial Sequence: Synthetic oligonucleotide
  Antisense strand to SEQ ID NO: 2113872
uccucaaugaaucgggccc

SEQ ID NO: 2113874 - RNA, 19 nt, Artificial Sequence
  Description of Artificial Sequence: Synthetic oligonucleotide
  Sense strand starting at position 1160 of SEQ ID NO: 1882346
gaggaucuugccugucaga

SEQ ID NO: 2113875 - RNA, 19 nt, Artificial Sequence
  Description of Artificial Sequence: Synthetic oligonucleotide
  Antisense strand to SEQ ID NO: 2113874
ucugacaggcaagauccuc

SEQ ID NO: 2113876 - RNA, 19 nt, Artificial Sequence
  Description of Artificial Sequence: Synthetic oligonucleotide
  Sense strand starting at position 1407 of SEQ ID NO: 1882346
gcaugacucugggucacaa

SEQ ID NO: 2113877 - RNA, 19 nt, Artificial Sequence
  Description of Artificial Sequence: Synthetic oligonucleotide
  Antisense strand to SEQ ID NO: 2113876
uugugacccagagucaugc

SEQ ID NO: 2113878 - RNA, 19 nt, Artificial Sequence
  Description of Artificial Sequence: Synthetic oligonucleotide
  Sense strand starting at position 1535 of SEQ ID NO: 1882346
gagacaggucuagguugaa

SEQ ID NO: 2113879 - RNA, 19 nt, Artificial Sequence
  Description of Artificial Sequence: Synthetic oligonucleotide
  Antisense strand to SEQ ID NO: 2113878
uucaaccuagaccugucuc

SEQ ID NO: 2113880 - RNA, 19 nt, Artificial Sequence
  Description of Artificial Sequence: Synthetic oligonucleotide
  Sense strand starting at position 1557 of SEQ ID NO: 1882346
cuaagugagcgagggaaau

SEQ ID NO: 2113881 - RNA, 19 nt, Artificial Sequence
  Description of Artificial Sequence: Synthetic oligonucleotide
  Antisense strand to SEQ ID NO: 2113880
auuucccucgcucacuuag

SEQ ID NO: 2113882 - RNA, 19 nt, Artificial Sequence
  Description of Artificial Sequence: Synthetic oligonucleotide
  Sense strand starting at position 1756 of SEQ ID NO: 1882346
ggcaauauucugugcaaag

SEQ ID NO: 2113883 - RNA, 19 nt, Artificial Sequence
  Description of Artificial Sequence: Synthetic oligonucleotide
  Antisense strand to SEQ ID NO: 2113882
cuuugcacagaauauugcc

SEQ ID NO: 2113884 - RNA, 19 nt, Artificial Sequence
  Description of Artificial Sequence: Synthetic oligonucleotide
  Sense strand starting at position 1757 of SEQ ID NO: 1882346
gcaauauucugugcaaaga

SEQ ID NO: 2113885 - RNA, 19 nt, Artificial Sequence
  Description of Artificial Sequence: Synthetic oligonucleotide
  Antisense strand to SEQ ID NO: 2113884
ucuuugcacagaauauugc

SEQ ID NO: 2113886 - RNA, 19 nt, Artificial Sequence
  Description of Artificial Sequence: Synthetic oligonucleotide
  Sense strand starting at position 1776 of SEQ ID NO: 1882346
acagguuggaaaugucagu

SEQ ID NO: 2113887 - RNA, 19 nt, Artificial Sequence
  Description of Artificial Sequence: Synthetic oligonucleotide
  Antisense strand to SEQ ID NO: 2113886
acugacauuuccaaccugu

SEQ ID NO: 2113888 - RNA, 19 nt, Artificial Sequence
  Description of Artificial Sequence: Synthetic oligonucleotide
  Sense strand starting at position 1798 of SEQ ID NO: 1882346
cagucauauuauguauggu

SEQ ID NO: 2113889 - RNA, 19 nt, Artificial Sequence
  Description of Artificial Sequence: Synthetic oligonucleotide
  Antisense strand to SEQ ID NO: 2113888
accauacauaauaugacug

SEQ ID NO: 2113890 - RNA, 19 nt, Artificial Sequence
  Description of Artificial Sequence: Synthetic oligonucleotide
  Sense strand starting at position 1799 of SEQ ID NO: 1882346
agucauauuauguaugguu

SEQ ID NO: 2113891 - RNA, 19 nt, Artificial Sequence
  Description of Artificial Sequence: Synthetic oligonucleotide
  Antisense strand to SEQ ID NO: 2113890
aaccauacauaauaugacu

SEQ ID NO: 2113892 - RNA, 19 nt, Artificial Sequence
  Description of Artificial Sequence: Synthetic oligonucleotide
  Sense strand starting at position 1831 of SEQ ID NO: 1882346
cugggauugcuguaaauaa

SEQ ID NO: 2113893 - RNA, 19 nt, Artificial Sequence
  Description of Artificial Sequence: Synthetic oligonucleotide
  Antisense strand to SEQ ID NO: 2113892
uuauuuacagcaaucccag

SEQ ID NO: 2113894 - RNA, 19 nt, Artificial Sequence
  Description of Artificial Sequence: Synthetic oligonucleotide
  Sense strand starting at position 1971 of SEQ ID NO: 1882346
gggaaacaggcauguuuca

SEQ ID NO: 2113895 - RNA, 19 nt, Artificial Sequence
  Description of Artificial Sequence: Synthetic oligonucleotide
  Antisense strand to SEQ ID NO: 2113894
ugaaacaugccuguuuccc

SEQ ID NO: 2113896 - RNA, 19 nt, Artificial Sequence
  Description of Artificial Sequence: Synthetic oligonucleotide
  Sense strand starting at position 2665 of SEQ ID NO: 1882346
gggugaagcgucgugaugu

SEQ ID NO: 2113897 - RNA, 19 nt, Artificial Sequence
  Description of Artificial Sequence: Synthetic oligonucleotide
  Antisense strand to SEQ ID NO: 2113896
acaucacgacgcuucaccc

SEQ ID NO: 2113898 - RNA, 19 nt, Artificial Sequence
  Description of Artificial Sequence: Synthetic oligonucleotide
  Sense strand starting at position 2671 of SEQ ID NO: 1882346
agcgucgugaugucugcaa

SEQ ID NO: 2113899 - RNA, 19 nt, Artificial Sequence
  Description of Artificial Sequence: Synthetic oligonucleotide
  Antisense strand to SEQ ID NO: 2113898
uugcagacaucacgacgcu

SEQ ID NO: 2113900 - RNA, 19 nt, Artificial Sequence
  Description of Artificial Sequence: Synthetic oligonucleotide
  Sense strand starting at position 2862 of SEQ ID NO: 1882346
uuccaaacggguuaaugau

SEQ ID NO: 2113901 - RNA, 19 nt, Artificial Sequence
  Description of Artificial Sequence: Synthetic oligonucleotide
  Antisense strand to SEQ ID NO: 2113900
aucauuaacccguuuggaa

SEQ ID NO: 2113902 - RNA, 19 nt, Artificial Sequence
  Description of Artificial Sequence: Synthetic oligonucleotide
  Sense strand starting at position 2869 of SEQ ID NO: 1882346
cggguuaaugauugauucu

SEQ ID NO: 2113903 - RNA, 19 nt, Artificial Sequence
  Description of Artificial Sequence: Synthetic oligonucleotide
  Antisense strand to SEQ ID NO: 2113902
agaaucaaucauuaacccg

SEQ ID NO: 2113904 - RNA, 19 nt, Artificial Sequence
  Description of Artificial Sequence: Synthetic oligonucleotide
  Sense strand starting at position 2878 of SEQ ID NO: 1882346
gauugauucuaggcuugaa

SEQ ID NO: 2113905 - RNA, 19 nt, Artificial Sequence
  Description of Artificial Sequence: Synthetic oligonucleotide
  Antisense strand to SEQ ID NO: 2113904
uucaagccuagaaucaauc

SEQ ID NO: 2113906 - RNA, 19 nt, Artificial Sequence
  Description of Artificial Sequence: Synthetic oligonucleotide
  Sense strand starting at position 2881 of SEQ ID NO: 1882346
ugauucuaggcuugaaaca

SEQ ID NO: 2113907 - RNA, 19 nt, Artificial Sequence
  Description of Artificial Sequence: Synthetic oligonucleotide
  Antisense strand to SEQ ID NO: 2113906
uguuucaagccuagaauca

SEQ ID NO: 2113908 - RNA, 19 nt, Artificial Sequence
  Description of Artificial Sequence: Synthetic oligonucleotide
  Sense strand starting at position 2922 of SEQ ID NO: 1882346
ucacaaauggccuagaguu

SEQ ID NO: 2113909 - RNA, 19 nt, Artificial Sequence
  Description of Artificial Sequence: Synthetic oligonucleotide
  Antisense strand to SEQ ID NO: 2113908
aacucuaggccauuuguga

SEQ ID NO: 2113910 - RNA, 19 nt, Artificial Sequence
  Description of Artificial Sequence: Synthetic oligonucleotide
  Sense strand starting at position 3200 of SEQ ID NO: 1882346
gcaugugccaucuagagau

SEQ ID NO: 2113911 - RNA, 19 nt, Artificial Sequence
  Description of Artificial Sequence: Synthetic oligonucleotide
  Antisense strand to SEQ ID NO: 2113910
aucucuagauggcacaugc

SEQ ID NO: 2113912 - RNA, 19 nt, Artificial Sequence
  Description of Artificial Sequence: Synthetic oligonucleotide
  Sense strand starting at position 3202 of SEQ ID NO: 1882346
augugccaucuagagauua

SEQ ID NO: 2113913 - RNA, 19 nt, Artificial Sequence
  Description of Artificial Sequence: Synthetic oligonucleotide
  Antisense strand to SEQ ID NO: 2113912
uaaucucuagauggcacau

SEQ ID NO: 2113914 - RNA, 19 nt, Artificial Sequence
  Description of Artificial Sequence: Synthetic oligonucleotide
  Sense strand starting at position 3234 of SEQ ID NO: 1882346
gacagcaagucuucuagau

SEQ ID NO: 2113915 - RNA, 19 nt, Artificial Sequence
  Description of Artificial Sequence: Synthetic oligonucleotide
  Antisense strand to SEQ ID NO: 2113914
aucuagaagacuugcuguc

SEQ ID NO: 2113916 - RNA, 19 nt, Artificial Sequence
  Description of Artificial Sequence: Synthetic oligonucleotide
  Sense strand starting at position 3313 of SEQ ID NO: 1882346
uggcuacuugcucauaauu

SEQ ID NO: 2113917 - RNA, 19 nt, Artificial Sequence
  Description of Artificial Sequence: Synthetic oligonucleotide
  Antisense strand to SEQ ID NO: 2113916
aauuaugagcaaguagcca

SEQ ID NO: 2113918 - RNA, 19 nt, Artificial Sequence
  Description of Artificial Sequence: Synthetic oligonucleotide
  Sense strand starting at position 3321 of SEQ ID NO: 1882346
ugcucauaauuagcaugaa

SEQ ID NO: 2113919 - RNA, 19 nt, Artificial Sequence
  Description of Artificial Sequence: Synthetic oligonucleotide
  Antisense strand to SEQ ID NO: 2113918
uucaugcuaauuaugagca

SEQ ID NO: 2113920 - RNA, 19 nt, Artificial Sequence
  Description of Artificial Sequence: Synthetic oligonucleotide
  Sense strand starting at position 3435 of SEQ ID NO: 1882346
uuucucauccuagacugua

SEQ ID NO: 2113921 - RNA, 19 nt, Artificial Sequence
  Description of Artificial Sequence: Synthetic oligonucleotide
  Antisense strand to SEQ ID NO: 2113920
uacagucuaggaugagaaa

SEQ ID NO: 2113922 - RNA, 19 nt, Artificial Sequence
  Description of Artificial Sequence: Synthetic oligonucleotide
  Sense strand starting at position 3467 of SEQ ID NO: 1882346
caggaacagugucuuuauu

SEQ ID NO: 2113923 - RNA, 19 nt, Artificial Sequence
  Description of Artificial Sequence: Synthetic oligonucleotide
  Antisense strand to SEQ ID NO: 2113922
aauaaagacacuguuccug

SEQ ID NO: 2113924 - RNA, 19 nt, Artificial Sequence
  Description of Artificial Sequence: Synthetic oligonucleotide
  Sense strand starting at position 3873 of SEQ ID NO: 1882346
aaacgugaugaugguugaa

SEQ ID NO: 2113925 - RNA, 19 nt, Artificial Sequence
  Description of Artificial Sequence: Synthetic oligonucleotide
  Antisense strand to SEQ ID NO: 2113924
uucaaccaucaucacguuu

SEQ ID NO: 2113926 - RNA, 19 nt, Artificial Sequence
  Description of Artificial Sequence: Synthetic oligonucleotide
  Sense strand starting at position 3875 of SEQ ID NO: 1882346
acgugaugaugguugaauu

SEQ ID NO: 2113927 - RNA, 19 nt, Artificial Sequence
  Description of Artificial Sequence: Synthetic oligonucleotide
  Antisense strand to SEQ ID NO: 2113926
aauucaaccaucaucacgu

SEQ ID NO: 2113928 - RNA, 19 nt, Artificial Sequence
  Description of Artificial Sequence: Synthetic oligonucleotide
  Sense strand starting at position 3876 of SEQ ID NO: 1882346
cgugaugaugguugaauuc

SEQ ID NO: 2113929 - RNA, 19 nt, Artificial Sequence
  Description of Artificial Sequence: Synthetic oligonucleotide
  Antisense strand to SEQ ID NO: 2113928
gaauucaaccaucaucacg

SEQ ID NO: 2113930 - RNA, 19 nt, Artificial Sequence
  Description of Artificial Sequence: Synthetic oligonucleotide
  Sense strand starting at position 3885 of SEQ ID NO: 1882346
gguugaauuccacaguagc

SEQ ID NO: 2113931 - RNA, 19 nt, Artificial Sequence
  Description of Artificial Sequence: Synthetic oligonucleotide
  Antisense strand to SEQ ID NO: 2113930
gcuacuguggaauucaacc

SEQ ID NO: 2113932 - RNA, 19 nt, Artificial Sequence
  Description of Artificial Sequence: Synthetic oligonucleotide
  Sense strand starting at position 45 of SEQ ID NO: 1882347
caaagagauguuggucaga

SEQ ID NO: 2113933 - RNA, 19 nt, Artificial Sequence
  Description of Artificial Sequence: Synthetic oligonucleotide
  Antisense strand to SEQ ID NO: 2113932
ucugaccaacaucucuuug

SEQ ID NO: 2113934 - RNA, 19 nt, Artificial Sequence
  Description of Artificial Sequence: Synthetic oligonucleotide
  Sense strand starting at position 47 of SEQ ID NO: 1882347
aagagauguuggucagagg

SEQ ID NO: 2113935 - RNA, 19 nt, Artificial Sequence
  Description of Artificial Sequence: Synthetic oligonucleotide
  Antisense strand to SEQ ID NO: 2113934
ccucugaccaacaucucuu

SEQ ID NO: 2113936 - RNA, 19 nt, Artificial Sequence
  Description of Artificial Sequence: Synthetic oligonucleotide
  Sense strand starting at position 102 of SEQ ID NO: 1882347
agaccuauugugcaacuga

SEQ ID NO: 2113937 - RNA, 19 nt, Artificial Sequence
  Description of Artificial Sequence: Synthetic oligonucleotide
  Antisense strand to SEQ ID NO: 2113936
ucaguugcacaauaggucu

SEQ ID NO: 2113938 - RNA, 19 nt, Artificial Sequence
  Description of Artificial Sequence: Synthetic oligonucleotide
  Sense strand starting at position 110 of SEQ ID NO: 1882347
ugugcaacugaugacuaua

SEQ ID NO: 2113939 - RNA, 19 nt, Artificial Sequence
  Description of Artificial Sequence: Synthetic oligonucleotide
  Antisense strand to SEQ ID NO: 2113938
uauagucaucaguugcaca

SEQ ID NO: 2113940 - RNA, 19 nt, Artificial Sequence
  Description of Artificial Sequence: Synthetic oligonucleotide
  Sense strand starting at position 133 of SEQ ID NO: 1882347
auaacaauagguuguguua

SEQ ID NO: 2113941 - RNA, 19 nt, Artificial Sequence
  Description of Artificial Sequence: Synthetic oligonucleotide
  Antisense strand to SEQ ID NO: 2113940
uaacacaaccuauuguuau

SEQ ID NO: 2113942 - RNA, 19 nt, Artificial Sequence
  Description of Artificial Sequence: Synthetic oligonucleotide
  Sense strand starting at position 343 of SEQ ID NO: 1882347
aagcaaugguacucauagu

SEQ ID NO: 2113943 - RNA, 19 nt, Artificial Sequence
  Description of Artificial Sequence: Synthetic oligonucleotide
  Antisense strand to SEQ ID NO: 2113942
acuaugaguaccauugcuu

SEQ ID NO: 2113944 - RNA, 19 nt, Artificial Sequence
  Description of Artificial Sequence: Synthetic oligonucleotide
  Sense strand starting at position 671 of SEQ ID NO: 1882347
cuggguuucucuucugaau

SEQ ID NO: 2113945 - RNA, 19 nt, Artificial Sequence
  Description of Artificial Sequence: Synthetic oligonucleotide
  Antisense strand to SEQ ID NO: 2113944
auucagaagagaaacccag

SEQ ID NO: 2113946 - RNA, 19 nt, Artificial Sequence
  Description of Artificial Sequence: Synthetic oligonucleotide
  Sense strand starting at position 677 of SEQ ID NO: 1882347
uucucuucugaaugagagu

SEQ ID NO: 2113947 - RNA, 19 nt, Artificial Sequence
  Description of Artificial Sequence: Synthetic oligonucleotide
  Antisense strand to SEQ ID NO: 2113946
acucucauucagaagagaa

SEQ ID NO: 2113948 - RNA, 19 nt, Artificial Sequence
  Description of Artificial Sequence: Synthetic oligonucleotide
  Sense strand starting at position 688 of SEQ ID NO: 1882347
augagaguuuaagccaaca

SEQ ID NO: 2113949 - RNA, 19 nt, Artificial Sequence
  Description of Artificial Sequence: Synthetic oligonucleotide
  Antisense strand to SEQ ID NO: 2113948
uguuggcuuaaacucucau

SEQ ID NO: 2113950 - RNA, 19 nt, Artificial Sequence
  Description of Artificial Sequence: Synthetic oligonucleotide
  Sense strand starting at position 874 of SEQ ID NO: 1882347
aggcuaguauuaucauaaa

SEQ ID NO: 2113951 - RNA, 19 nt, Artificial Sequence
  Description of Artificial Sequence: Synthetic oligonucleotide
  Antisense strand to SEQ ID NO: 2113950
uuuaugauaauacuagccu

SEQ ID NO: 2113952 - RNA, 19 nt, Artificial Sequence
  Description of Artificial Sequence: Synthetic oligonucleotide
  Sense strand starting at position 959 of SEQ ID NO: 1882347
aaauccgauuugggaaaga

SEQ ID NO: 2113953 - RNA, 19 nt, Artificial Sequence
  Description of Artificial Sequence: Synthetic oligonucleotide
  Antisense strand to SEQ ID NO: 2113952
ucuuucccaaaucggauuu

SEQ ID NO: 2113954 - RNA, 19 nt, Artificial Sequence
  Description of Artificial Sequence: Synthetic oligonucleotide
  Sense strand starting at position 1122 of SEQ ID NO: 1882347
cugauuauuggaugcaaga

SEQ ID NO: 2113955 - RNA, 19 nt, Artificial Sequence
  Description of Artificial Sequence: Synthetic oligonucleotide
  Antisense strand to SEQ ID NO: 2113954
ucuugcauccaauaaucag

SEQ ID NO: 2113956 - RNA, 19 nt, Artificial Sequence
  Description of Artificial Sequence: Synthetic oligonucleotide
  Sense strand starting at position 1307 of SEQ ID NO: 1882347
ugacgcaggaguuaaguaa

SEQ ID NO: 2113957 - RNA, 19 nt, Artificial Sequence
  Description of Artificial Sequence: Synthetic oligonucleotide
  Antisense strand to SEQ ID NO: 2113956
uuacuuaacuccugcguca

SEQ ID NO: 2113958 - RNA, 19 nt, Artificial Sequence
  Description of Artificial Sequence: Synthetic oligonucleotide
  Sense strand starting at position 1339 of SEQ ID NO: 1882347
cacagaaaugugggucuuu

SEQ ID NO: 2113959 - RNA, 19 nt, Artificial Sequence
  Description of Artificial Sequence: Synthetic oligonucleotide
  Antisense strand to SEQ ID NO: 2113958
aaagacccacauuucugug

SEQ ID NO: 2113960 - RNA, 19 nt, Artificial Sequence
  Description of Artificial Sequence: Synthetic oligonucleotide
  Sense strand starting at position 1350 of SEQ ID NO: 1882347
gggucuuucccucagugau

SEQ ID NO: 2113961 - RNA, 19 nt, Artificial Sequence
  Description of Artificial Sequence: Synthetic oligonucleotide
  Antisense strand to SEQ ID NO: 2113960
aucacugagggaaagaccc

SEQ ID NO: 2113962 - RNA, 19 nt, Artificial Sequence
  Description of Artificial Sequence: Synthetic oligonucleotide
  Sense strand starting at position 1741 of SEQ ID NO: 1882347
ugugauauauggcugagac

SEQ ID NO: 2113963 - RNA, 19 nt, Artificial Sequence
  Description of Artificial Sequence: Synthetic oligonucleotide
  Antisense strand to SEQ ID NO: 2113962
gucucagccauauaucaca

SEQ ID NO: 2113964 - RNA, 19 nt, Artificial Sequence
  Description of Artificial Sequence: Synthetic oligonucleotide
  Sense strand starting at position 1742 of SEQ ID NO: 1882347
gugauauauggcugagacu

SEQ ID NO: 2113965 - RNA, 19 nt, Artificial Sequence
  Description of Artificial Sequence: Synthetic oligonucleotide
  Antisense strand to SEQ ID NO: 2113964
agucucagccauauaucac

SEQ ID NO: 2113966 - RNA, 19 nt, Artificial Sequence
  Description of Artificial Sequence: Synthetic oligonucleotide
  Sense strand starting at position 1899 of SEQ ID NO: 1882347
uaggcuguuuaacucagau

SEQ ID NO: 2113967 - RNA, 19 nt, Artificial Sequence
  Description of Artificial Sequence: Synthetic oligonucleotide
  Antisense strand to SEQ ID NO: 2113966
aucugaguuaaacagccua

SEQ ID NO: 2113968 - RNA, 19 nt, Artificial Sequence
  Description of Artificial Sequence: Synthetic oligonucleotide
  Sense strand starting at position 1901 of SEQ ID NO: 1882347
ggcuguuuaacucagauga

SEQ ID NO: 2113969 - RNA, 19 nt, Artificial Sequence
  Description of Artificial Sequence: Synthetic oligonucleotide
  Antisense strand to SEQ ID NO: 2113968
ucaucugaguuaaacagcc

SEQ ID NO: 2113970 - RNA, 19 nt, Artificial Sequence
  Description of Artificial Sequence: Synthetic oligonucleotide
  Sense strand starting at position 2009 of SEQ ID NO: 1882347
aaaguaacuucgucuuaga

SEQ ID NO: 2113971 - RNA, 19 nt, Artificial Sequence
  Description of Artificial Sequence: Synthetic oligonucleotide
  Antisense strand to SEQ ID NO: 2113970
ucuaagacgaaguuacuuu

SEQ ID NO: 2113972 - RNA, 19 nt, Artificial Sequence
  Description of Artificial Sequence: Synthetic oligonucleotide
  Sense strand starting at position 2503 of SEQ ID NO: 1882347
gggugcaggugaucuauuu

SEQ ID NO: 2113973 - RNA, 19 nt, Artificial Sequence
  Description of Artificial Sequence: Synthetic oligonucleotide
  Antisense strand to SEQ ID NO: 2113972
aaauagaucaccugcaccc

SEQ ID NO: 2113974 - RNA, 19 nt, Artificial Sequence
  Description of Artificial Sequence: Synthetic oligonucleotide
  Sense strand starting at position 2583 of SEQ ID NO: 1882347
agccgacaaggaugaauua

SEQ ID NO: 2113975 - RNA, 19 nt, Artificial Sequence
  Description of Artificial Sequence: Synthetic oligonucleotide
  Antisense strand to SEQ ID NO: 2113974
uaauucauccuugucggcu

SEQ ID NO: 2113976 - RNA, 19 nt, Artificial Sequence
  Description of Artificial Sequence: Synthetic oligonucleotide
  Sense strand starting at position 2642 of SEQ ID NO: 1882347
ucagaaucuuccguggaau

SEQ ID NO: 2113977 - RNA, 19 nt, Artificial Sequence
  Description of Artificial Sequence: Synthetic oligonucleotide
  Antisense strand to SEQ ID NO: 2113976
auuccacggaagauucuga

SEQ ID NO: 2113978 - RNA, 19 nt, Artificial Sequence
  Description of Artificial Sequence: Synthetic oligonucleotide
  Sense strand starting at position 2643 of SEQ ID NO: 1882347
cagaaucuuccguggaauc

SEQ ID NO: 2113979 - RNA, 19 nt, Artificial Sequence
  Description of Artificial Sequence: Synthetic oligonucleotide
  Antisense strand to SEQ ID NO: 2113978
gauuccacggaagauucug

SEQ ID NO: 2113980 - RNA, 19 nt, Artificial Sequence
  Description of Artificial Sequence: Synthetic oligonucleotide
  Sense strand starting at position 2644 of SEQ ID NO: 1882347
agaaucuuccguggaaucu

SEQ ID NO: 2113981 - RNA, 19 nt, Artificial Sequence
  Description of Artificial Sequence: Synthetic oligonucleotide
  Antisense strand to SEQ ID NO: 2113980
agauuccacggaagauucu

SEQ ID NO: 2113982 - RNA, 19 nt, Artificial Sequence
  Description of Artificial Sequence: Synthetic oligonucleotide
  Sense strand starting at position 2645 of SEQ ID NO: 1882347
gaaucuuccguggaaucuu

SEQ ID NO: 2113983 - RNA, 19 nt, Artificial Sequence
  Description of Artificial Sequence: Synthetic oligonucleotide
  Antisense strand to SEQ ID NO: 2113982
aagauuccacggaagauuc

SEQ ID NO: 2113984 - RNA, 19 nt, Artificial Sequence
  Description of Artificial Sequence: Synthetic oligonucleotide
  Sense strand starting at position 3018 of SEQ ID NO: 1882347
ggaaacaguuccuucuuua

SEQ ID NO: 2113985 - RNA, 19 nt, Artificial Sequence
  Description of Artificial Sequence: Synthetic oligonucleotide
  Antisense strand to SEQ ID NO: 2113984
uaaagaaggaacuguuucc

SEQ ID NO: 2113986 - RNA, 19 nt, Artificial Sequence
  Description of Artificial Sequence: Synthetic oligonucleotide
  Sense strand starting at position 3077 of SEQ ID NO: 1882347
guguuaaauccugccugcu

SEQ ID NO: 2113987 - RNA, 19 nt, Artificial Sequence
  Description of Artificial Sequence: Synthetic oligonucleotide
  Antisense strand to SEQ ID NO: 2113986
agcaggcaggauuuaacac

SEQ ID NO: 2113988 - RNA, 19 nt, Artificial Sequence
  Description of Artificial Sequence: Synthetic oligonucleotide
  Sense strand starting at position 3098 of SEQ ID NO: 1882347
acuagcauucuguaucuuu

SEQ ID NO: 2113989 - RNA, 19 nt, Artificial Sequence
  Description of Artificial Sequence: Synthetic oligonucleotide
  Antisense strand to SEQ ID NO: 2113988
aaagauacagaaugcuagu

SEQ ID NO: 2113990 - RNA, 19 nt, Artificial Sequence
  Description of Artificial Sequence: Synthetic oligonucleotide
  Sense strand starting at position 3237 of SEQ ID NO: 1882347
uguucuuuccaggaucuca

SEQ ID NO: 2113991 - RNA, 19 nt, Artificial Sequence
  Description of Artificial Sequence: Synthetic oligonucleotide
  Antisense strand to SEQ ID NO: 2113990
ugagauccuggaaagaaca

SEQ ID NO: 2113992 - RNA, 19 nt, Artificial Sequence
  Description of Artificial Sequence: Synthetic oligonucleotide
  Sense strand starting at position 3247 of SEQ ID NO: 1882347
aggaucucagaauguuauc

SEQ ID NO: 2113993 - RNA, 19 nt, Artificial Sequence
  Description of Artificial Sequence: Synthetic oligonucleotide
  Antisense strand to SEQ ID NO: 2113992
gauaacauucugagauccu

SEQ ID NO: 2113994 - RNA, 19 nt, Artificial Sequence
  Description of Artificial Sequence: Synthetic oligonucleotide
  Sense strand starting at position 3278 of SEQ ID NO: 1882347
agaguuauugcagaugcaa

SEQ ID NO: 2113995 - RNA, 19 nt, Artificial Sequence
  Description of Artificial Sequence: Synthetic oligonucleotide
  Antisense strand to SEQ ID NO: 2113994
uugcaucugcaauaacucu

SEQ ID NO: 2113996 - RNA, 19 nt, Artificial Sequence
  Description of Artificial Sequence: Synthetic oligonucleotide
  Sense strand starting at position 3289 of SEQ ID NO: 1882347
agaugcaacuaguuaagau

SEQ ID NO: 2113997 - RNA, 19 nt, Artificial Sequence
  Description of Artificial Sequence: Synthetic oligonucleotide
  Antisense strand to SEQ ID NO: 2113996
aucuuaacuaguugcaucu

SEQ ID NO: 2113998 - RNA, 19 nt, Artificial Sequence
  Description of Artificial Sequence: Synthetic oligonucleotide
  Sense strand starting at position 3319 of SEQ ID NO: 1882347
ggaguaggaugagccuuua

SEQ ID NO: 2113999 - RNA, 19 nt, Artificial Sequence
  Description of Artificial Sequence: Synthetic oligonucleotide
  Antisense strand to SEQ ID NO: 2113998
uaaaggcucauccuacucc

SEQ ID NO: 2114000 - RNA, 19 nt, Artificial Sequence
  Description of Artificial Sequence: Synthetic oligonucleotide
  Sense strand starting at position 3642 of SEQ ID NO: 1882347
uuaugacagcucugggaac

SEQ ID NO: 2114001 - RNA, 19 nt, Artificial Sequence
  Description of Artificial Sequence: Synthetic oligonucleotide
  Antisense strand to SEQ ID NO: 2114000
guucccagagcugucauaa

SEQ ID NO: 2114002 - RNA, 19 nt, Artificial Sequence
  Description of Artificial Sequence: Synthetic oligonucleotide
  Sense strand starting at position 3760 of SEQ ID NO: 1882347
guggguuuauccuucagag

SEQ ID NO: 2114003 - RNA, 19 nt, Artificial Sequence
  Description of Artificial Sequence: Synthetic oligonucleotide
  Antisense strand to SEQ ID NO: 2114002
cucugaaggauaaacccac

SEQ ID NO: 2114004 - RNA, 19 nt, Artificial Sequence
  Description of Artificial Sequence: Synthetic oligonucleotide
  Sense strand starting at position 3803 of SEQ ID NO: 1882347
gggugaauagacuguccuu

SEQ ID NO: 2114005 - RNA, 19 nt, Artificial Sequence
  Description of Artificial Sequence: Synthetic oligonucleotide
  Antisense strand to SEQ ID NO: 2114004
aaggacagucuauucaccc

SEQ ID NO: 2114006 - RNA, 19 nt, Artificial Sequence
  Description of Artificial Sequence: Synthetic oligonucleotide
  Sense strand starting at position 3839 of SEQ ID NO: 1882347
cuaacuugaugacuagcaa

SEQ ID NO: 2114007 - RNA, 19 nt, Artificial Sequence
  Description of Artificial Sequence: Synthetic oligonucleotide
  Antisense strand to SEQ ID NO: 2114006
uugcuagucaucaaguuag

SEQ ID NO: 2114008 - RNA, 19 nt, Artificial Sequence
  Description of Artificial Sequence: Synthetic oligonucleotide
  Sense strand starting at position 3927 of SEQ ID NO: 1882347
guuaaacucugcuuaagga

SEQ ID NO: 2114009 - RNA, 19 nt, Artificial Sequence
  Description of Artificial Sequence: Synthetic oligonucleotide
  Antisense strand to SEQ ID NO: 2114008
uccuuaagcagaguuuaac

SEQ ID NO: 2114010 - RNA, 19 nt, Artificial Sequence
  Description of Artificial Sequence: Synthetic oligonucleotide
  Sense strand starting at position 3940 of SEQ ID NO: 1882347
uaaggaggcucuuuaagaa

SEQ ID NO: 2114011 - RNA, 19 nt, Artificial Sequence
  Description of Artificial Sequence: Synthetic oligonucleotide
  Antisense strand to SEQ ID NO: 2114010
uucuuaaagagccuccuua

SEQ ID NO: 2114012 - RNA, 19 nt, Artificial Sequence
  Description of Artificial Sequence: Synthetic oligonucleotide
  Sense strand starting at position 53 of SEQ ID NO: 1882348
gcauaacuacuuugaaaga

SEQ ID NO: 2114013 - RNA, 19 nt, Artificial Sequence
  Description of Artificial Sequence: Synthetic oligonucleotide
  Antisense strand to SEQ ID NO: 2114012
ucuuucaaaguaguuaugc

SEQ ID NO: 2114014 - RNA, 19 nt, Artificial Sequence
  Description of Artificial Sequence: Synthetic oligonucleotide
  Sense strand starting at position 146 of SEQ ID NO: 1882348
ucaagcaugccugaagaua

SEQ ID NO: 2114015 - RNA, 19 nt, Artificial Sequence
  Description of Artificial Sequence: Synthetic oligonucleotide
  Antisense strand to SEQ ID NO: 2114014
uaucuucaggcaugcuuga

SEQ ID NO: 2114016 - RNA, 19 nt, Artificial Sequence
  Description of Artificial Sequence: Synthetic oligonucleotide
  Sense strand starting at position 335 of SEQ ID NO: 1882348
ugauauuuaugucauggaa

SEQ ID NO: 2114017 - RNA, 19 nt, Artificial Sequence
  Description of Artificial Sequence: Synthetic oligonucleotide
  Antisense strand to SEQ ID NO: 2114016
uuccaugacauaaauauca

SEQ ID NO: 2114018 - RNA, 19 nt, Artificial Sequence
  Description of Artificial Sequence: Synthetic oligonucleotide
  Sense strand starting at position 337 of SEQ ID NO: 1882348
auauuuaugucauggaaac

SEQ ID NO: 2114019 - RNA, 19 nt, Artificial Sequence
  Description of Artificial Sequence: Synthetic oligonucleotide
  Antisense strand to SEQ ID NO: 2114018
guuuccaugacauaaauau

SEQ ID NO: 2114020 - RNA, 19 nt, Artificial Sequence
  Description of Artificial Sequence: Synthetic oligonucleotide
  Sense strand starting at position 397 of SEQ ID NO: 1882348
uugaaugggccuuguauaa

SEQ ID NO: 2114021 - RNA, 19 nt, Artificial Sequence
  Description of Artificial Sequence: Synthetic oligonucleotide
  Antisense strand to SEQ ID NO: 2114020
uuauacaaggcccauucaa

SEQ ID NO: 2114022 - RNA, 19 nt, Artificial Sequence
  Description of Artificial Sequence: Synthetic oligonucleotide
  Sense strand starting at position 453 of SEQ ID NO: 1882348
guaaacagauuccuugagu

SEQ ID NO: 2114023 - RNA, 19 nt, Artificial Sequence
  Description of Artificial Sequence: Synthetic oligonucleotide
  Antisense strand to SEQ ID NO: 2114022
acucaaggaaucuguuuac

SEQ ID NO: 2114024 - RNA, 19 nt, Artificial Sequence
  Description of Artificial Sequence: Synthetic oligonucleotide
  Sense strand starting at position 470 of SEQ ID NO: 1882348
gucuuaaaccaaggaucuu

SEQ ID NO: 2114025 - RNA, 19 nt, Artificial Sequence
  Description of Artificial Sequence: Synthetic oligonucleotide
  Antisense strand to SEQ ID NO: 2114024
aagauccuugguuuaagac

SEQ ID NO: 2114026 - RNA, 19 nt, Artificial Sequence
  Description of Artificial Sequence: Synthetic oligonucleotide
  Sense strand starting at position 482 of SEQ ID NO: 1882348
ggaucuuaaucuuugguau

SEQ ID NO: 2114027 - RNA, 19 nt, Artificial Sequence
  Description of Artificial Sequence: Synthetic oligonucleotide
  Antisense strand to SEQ ID NO: 2114026
auaccaaagauuaagaucc

SEQ ID NO: 2114028 - RNA, 19 nt, Artificial Sequence
  Description of Artificial Sequence: Synthetic oligonucleotide
  Sense strand starting at position 515 of SEQ ID NO: 1882348
uuccaugaagcagaguuau

SEQ ID NO: 2114029 - RNA, 19 nt, Artificial Sequence
  Description of Artificial Sequence: Synthetic oligonucleotide
  Antisense strand to SEQ ID NO: 2114028
auaacucugcuucauggaa

SEQ ID NO: 2114030 - RNA, 19 nt, Artificial Sequence
  Description of Artificial Sequence: Synthetic oligonucleotide
  Sense strand starting at position 537 of SEQ ID NO: 1882348
ggaugcugccagcaaauga

SEQ ID NO: 2114031 - RNA, 19 nt, Artificial Sequence
  Description of Artificial Sequence: Synthetic oligonucleotide
  Antisense strand to SEQ ID NO: 2114030
ucauuugcuggcagcaucc

SEQ ID NO: 2114032 - RNA, 19 nt, Artificial Sequence
  Description of Artificial Sequence: Synthetic oligonucleotide
  Sense strand starting at position 568 of SEQ ID NO: 1882348
aucugucgucaucaucaua

SEQ ID NO: 2114033 - RNA, 19 nt, Artificial Sequence
  Description of Artificial Sequence: Synthetic oligonucleotide
  Antisense strand to SEQ ID NO: 2114032
uaugaugaugacgacagau

SEQ ID NO: 2114034 - RNA, 19 nt, Artificial Sequence
  Description of Artificial Sequence: Synthetic oligonucleotide
  Sense strand starting at position 571 of SEQ ID NO: 1882348
ugucgucaucaucauagaa

SEQ ID NO: 2114035 - RNA, 19 nt, Artificial Sequence
  Description of Artificial Sequence: Synthetic oligonucleotide
  Antisense strand to SEQ ID NO: 2114034
uucuaugaugaugacgaca

SEQ ID NO: 2114036 - RNA, 19 nt, Artificial Sequence
  Description of Artificial Sequence: Synthetic oligonucleotide
  Sense strand starting at position 588 of SEQ ID NO: 1882348
aacuuacuauggucuggua

SEQ ID NO: 2114037 - RNA, 19 nt, Artificial Sequence
  Description of Artificial Sequence: Synthetic oligonucleotide
  Antisense strand to SEQ ID NO: 2114036
uaccagaccauaguaaguu

SEQ ID NO: 2114038 - RNA, 19 nt, Artificial Sequence
  Description of Artificial Sequence: Synthetic oligonucleotide
  Sense strand starting at position 810 of SEQ ID NO: 1882348
aggaaucugugacugucaa

SEQ ID NO: 2114039 - RNA, 19 nt, Artificial Sequence
  Description of Artificial Sequence: Synthetic oligonucleotide
  Antisense strand to SEQ ID NO: 2114038
uugacagucacagauuccu

SEQ ID NO: 2114040 - RNA, 19 nt, Artificial Sequence
  Description of Artificial Sequence: Synthetic oligonucleotide
  Sense strand starting at position 811 of SEQ ID NO: 1882348
ggaaucugugacugucaau

SEQ ID NO: 2114041 - RNA, 19 nt, Artificial Sequence
  Description of Artificial Sequence: Synthetic oligonucleotide
  Antisense strand to SEQ ID NO: 2114040
auugacagucacagauucc

SEQ ID NO: 2114042 - RNA, 19 nt, Artificial Sequence
  Description of Artificial Sequence: Synthetic oligonucleotide
  Sense strand starting at position 817 of SEQ ID NO: 1882348
ugugacugucaauaugaau

SEQ ID NO: 2114043 - RNA, 19 nt, Artificial Sequence
  Description of Artificial Sequence: Synthetic oligonucleotide
  Antisense strand to SEQ ID NO: 2114042
auucauauugacagucaca

SEQ ID NO: 2114044 - RNA, 19 nt, Artificial Sequence
  Description of Artificial Sequence: Synthetic oligonucleotide
  Sense strand starting at position 888 of SEQ ID NO: 1882348
uuucuuagcugauuuggua

SEQ ID NO: 2114045 - RNA, 19 nt, Artificial Sequence
  Description of Artificial Sequence: Synthetic oligonucleotide
  Antisense strand to SEQ ID NO: 2114044
uaccaaaucagcuaagaaa

SEQ ID NO: 2114046 - RNA, 19 nt, Artificial Sequence
  Description of Artificial Sequence: Synthetic oligonucleotide
  Sense strand starting at position 900 of SEQ ID NO: 1882348
uuugguaaugacuaacagu

SEQ ID NO: 2114047 - RNA, 19 nt, Artificial Sequence
  Description of Artificial Sequence: Synthetic oligonucleotide
  Antisense strand to SEQ ID NO: 2114046
acuguuagucauuaccaaa

SEQ ID NO: 2114048 - RNA, 19 nt, Artificial Sequence
  Description of Artificial Sequence: Synthetic oligonucleotide
  Sense strand starting at position 1088 of SEQ ID NO: 1882348
agaaauccauagcuaagua

SEQ ID NO: 2114049 - RNA, 19 nt, Artificial Sequence
  Description of Artificial Sequence: Synthetic oligonucleotide
  Antisense strand to SEQ ID NO: 2114048
uacuuagcuauggauuucu

SEQ ID NO: 2114050 - RNA, 19 nt, Artificial Sequence
  Description of Artificial Sequence: Synthetic oligonucleotide
  Sense strand starting at position 1092 of SEQ ID NO: 1882348
auccauagcuaaguaguua

SEQ ID NO: 2114051 - RNA, 19 nt, Artificial Sequence
  Description of Artificial Sequence: Synthetic oligonucleotide
  Antisense strand to SEQ ID NO: 2114050
uaacuacuuagcuauggau

SEQ ID NO: 2114052 - RNA, 19 nt, Artificial Sequence
  Description of Artificial Sequence: Synthetic oligonucleotide
  Sense strand starting at position 1116 of SEQ ID NO: 1882348
caauuacaguuguuagagu

SEQ ID NO: 2114053 - RNA, 19 nt, Artificial Sequence
  Description of Artificial Sequence: Synthetic oligonucleotide
  Antisense strand to SEQ ID NO: 2114052
acucuaacaacuguaauug

SEQ ID NO: 2114054 - RNA, 19 nt, Artificial Sequence
  Description of Artificial Sequence: Synthetic oligonucleotide
  Sense strand starting at position 1146 of SEQ ID NO: 1882348
gcuggacaaaguugaauau

SEQ ID NO: 2114055 - RNA, 19 nt, Artificial Sequence
  Description of Artificial Sequence: Synthetic oligonucleotide
  Antisense strand to SEQ ID NO: 2114054
auauucaacuuuguccagc

SEQ ID NO: 2114056 - RNA, 19 nt, Artificial Sequence
  Description of Artificial Sequence: Synthetic oligonucleotide
  Sense strand starting at position 1516 of SEQ ID NO: 1882348
cuaagacaucaucguauau

SEQ ID NO: 2114057 - RNA, 19 nt, Artificial Sequence
  Description of Artificial Sequence: Synthetic oligonucleotide
  Antisense strand to SEQ ID NO: 2114056
auauacgaugaugucuuag

SEQ ID NO: 2114058 - RNA, 19 nt, Artificial Sequence
  Description of Artificial Sequence: Synthetic oligonucleotide
  Sense strand starting at position 1575 of SEQ ID NO: 1882348
uuuaaagaggcuuguuaua

SEQ ID NO: 2114059 - RNA, 19 nt, Artificial Sequence
  Description of Artificial Sequence: Synthetic oligonucleotide
  Antisense strand to SEQ ID NO: 2114058
uauaacaagccucuuuaaa

SEQ ID NO: 2114060 - RNA, 19 nt, Artificial Sequence
  Description of Artificial Sequence: Synthetic oligonucleotide
  Sense strand starting at position 1603 of SEQ ID NO: 1882348
cuuacaaggucauuguacu

SEQ ID NO: 2114061 - RNA, 19 nt, Artificial Sequence
  Description of Artificial Sequence: Synthetic oligonucleotide
  Antisense strand to SEQ ID NO: 2114060
aguacaaugaccuuguaag

SEQ ID NO: 2114062 - RNA, 19 nt, Artificial Sequence
  Description of Artificial Sequence: Synthetic oligonucleotide
  Sense strand starting at position 1638 of SEQ ID NO: 1882348
uuauauggaaguuguagaa

SEQ ID NO: 2114063 - RNA, 19 nt, Artificial Sequence
  Description of Artificial Sequence: Synthetic oligonucleotide
  Antisense strand to SEQ ID NO: 2114062
uucuacaacuuccauauaa

SEQ ID NO: 2114064 - RNA, 19 nt, Artificial Sequence
  Description of Artificial Sequence: Synthetic oligonucleotide
  Sense strand starting at position 1648 of SEQ ID NO: 1882348
guuguagaacuuugggauu

SEQ ID NO: 2114065 - RNA, 19 nt, Artificial Sequence
  Description of Artificial Sequence: Synthetic oligonucleotide
  Antisense strand to SEQ ID NO: 2114064
aaucccaaaguucuacaac

SEQ ID NO: 2114066 - RNA, 19 nt, Artificial Sequence
  Description of Artificial Sequence: Synthetic oligonucleotide
  Sense strand starting at position 1713 of SEQ ID NO: 1882348
agaagauacuuugucuuag

SEQ ID NO: 2114067 - RNA, 19 nt, Artificial Sequence
  Description of Artificial Sequence: Synthetic oligonucleotide
  Antisense strand to SEQ ID NO: 2114066
cuaagacaaaguaucuucu

SEQ ID NO: 2114068 - RNA, 19 nt, Artificial Sequence
  Description of Artificial Sequence: Synthetic oligonucleotide
  Sense strand starting at position 1714 of SEQ ID NO: 1882348
gaagauacuuugucuuagu

SEQ ID NO: 2114069 - RNA, 19 nt, Artificial Sequence
  Description of Artificial Sequence: Synthetic oligonucleotide
  Antisense strand to SEQ ID NO: 2114068
acuaagacaaaguaucuuc

SEQ ID NO: 2114070 - RNA, 19 nt, Artificial Sequence
  Description of Artificial Sequence: Synthetic oligonucleotide
  Sense strand starting at position 2138 of SEQ ID NO: 1882348
ccauguaguccagaugcau

SEQ ID NO: 2114071 - RNA, 19 nt, Artificial Sequence
  Description of Artificial Sequence: Synthetic oligonucleotide
  Antisense strand to SEQ ID NO: 2114070
augcaucuggacuacaugg

SEQ ID NO: 2114072 - RNA, 19 nt, Artificial Sequence
  Description of Artificial Sequence: Synthetic oligonucleotide
  Sense strand starting at position 2299 of SEQ ID NO: 1882348
aggcuugaggcucacaaau

SEQ ID NO: 2114073 - RNA, 19 nt, Artificial Sequence
  Description of Artificial Sequence: Synthetic oligonucleotide
  Antisense strand to SEQ ID NO: 2114072
auuugugagccucaagccu

SEQ ID NO: 2114074 - RNA, 19 nt, Artificial Sequence
  Description of Artificial Sequence: Synthetic oligonucleotide
  Sense strand starting at position 2381 of SEQ ID NO: 1882348
gguggguaaugggauuuga

SEQ ID NO: 2114075 - RNA, 19 nt, Artificial Sequence
  Description of Artificial Sequence: Synthetic oligonucleotide
  Antisense strand to SEQ ID NO: 2114074
ucaaaucccauuacccacc

SEQ ID NO: 2114076 - RNA, 19 nt, Artificial Sequence
  Description of Artificial Sequence: Synthetic oligonucleotide
  Sense strand starting at position 2656 of SEQ ID NO: 1882348
aaacgucccucucuagaga

SEQ ID NO: 2114077 - RNA, 19 nt, Artificial Sequence
  Description of Artificial Sequence: Synthetic oligonucleotide
  Antisense strand to SEQ ID NO: 2114076
ucucuagagagggacguuu

SEQ ID NO: 2114078 - RNA, 19 nt, Artificial Sequence
  Description of Artificial Sequence: Synthetic oligonucleotide
  Sense strand starting at position 2659 of SEQ ID NO: 1882348
cgucccucucuagagaaua

SEQ ID NO: 2114079 - RNA, 19 nt, Artificial Sequence
  Description of Artificial Sequence: Synthetic oligonucleotide
  Antisense strand to SEQ ID NO: 2114078
uauucucuagagagggacg

SEQ ID NO: 2114080 - RNA, 19 nt, Artificial Sequence
  Description of Artificial Sequence: Synthetic oligonucleotide
  Sense strand starting at position 2803 of SEQ ID NO: 1882348
gaggcuagagauuguuaag

SEQ ID NO: 2114081 - RNA, 19 nt, Artificial Sequence
  Description of Artificial Sequence: Synthetic oligonucleotide
  Antisense strand to SEQ ID NO: 2114080
cuuaacaaucucuagccuc

SEQ ID NO: 2114082 - RNA, 19 nt, Artificial Sequence
  Description of Artificial Sequence: Synthetic oligonucleotide
  Sense strand starting at position 2920 of SEQ ID NO: 1882348
agucaauaaugucuuacca

SEQ ID NO: 2114083 - RNA, 19 nt, Artificial Sequence
  Description of Artificial Sequence: Synthetic oligonucleotide
  Antisense strand to SEQ ID NO: 2114082
ugguaagacauuauugacu

SEQ ID NO: 2114084 - RNA, 19 nt, Artificial Sequence
  Description of Artificial Sequence: Synthetic oligonucleotide
  Sense strand starting at position 3010 of SEQ ID NO: 1882348
guaugugugauacacauau

SEQ ID NO: 2114085 - RNA, 19 nt, Artificial Sequence
  Description of Artificial Sequence: Synthetic oligonucleotide
  Antisense strand to SEQ ID NO: 2114084
auauguguaucacacauac

SEQ ID NO: 2114086 - RNA, 19 nt, Artificial Sequence
  Description of Artificial Sequence: Synthetic oligonucleotide
  Sense strand starting at position 3153 of SEQ ID NO: 1882348
agaggaauugcucagcuuu

SEQ ID NO: 2114087 - RNA, 19 nt, Artificial Sequence
  Description of Artificial Sequence: Synthetic oligonucleotide
  Antisense strand to SEQ ID NO: 2114086
aaagcugagcaauuccucu

SEQ ID NO: 2114088 - RNA, 19 nt, Artificial Sequence
  Description of Artificial Sequence: Synthetic oligonucleotide
  Sense strand starting at position 3444 of SEQ ID NO: 1882348
gacuguauauguguauaaa

SEQ ID NO: 2114089 - RNA, 19 nt, Artificial Sequence
  Description of Artificial Sequence: Synthetic oligonucleotide
  Antisense strand to SEQ ID NO: 2114088
uuuauacacauauacaguc

SEQ ID NO: 2114090 - RNA, 19 nt, Artificial Sequence
  Description of Artificial Sequence: Synthetic oligonucleotide
  Sense strand starting at position 3622 of SEQ ID NO: 1882348
guauauguguauguagaga

SEQ ID NO: 2114091 - RNA, 19 nt, Artificial Sequence
  Description of Artificial Sequence: Synthetic oligonucleotide
  Antisense strand to SEQ ID NO: 2114090
ucucuacauacacauauac

SEQ ID NO: 2114092 - RNA, 19 nt, Artificial Sequence
  Description of Artificial Sequence: Synthetic oligonucleotide
  Sense strand starting at position 162 of SEQ ID NO: 1882349
cucuuaacaguuuaguaaa

SEQ ID NO: 2114093 - RNA, 19 nt, Artificial Sequence
  Description of Artificial Sequence: Synthetic oligonucleotide
  Antisense strand to SEQ ID NO: 2114092
uuuacuaaacuguuaagag

SEQ ID NO: 2114094 - RNA, 19 nt, Artificial Sequence
  Description of Artificial Sequence: Synthetic oligonucleotide
  Sense strand starting at position 196 of SEQ ID NO: 1882349
agaugacccucuuuaggau

SEQ ID NO: 2114095 - RNA, 19 nt, Artificial Sequence
  Description of Artificial Sequence: Synthetic oligonucleotide
  Antisense strand to SEQ ID NO: 2114094
auccuaaagagggucaucu

SEQ ID NO: 2114096 - RNA, 19 nt, Artificial Sequence
  Description of Artificial Sequence: Synthetic oligonucleotide
  Sense strand starting at position 231 of SEQ ID NO: 1882349
cugucucuuuaaccaggaa

SEQ ID NO: 2114097 - RNA, 19 nt, Artificial Sequence
  Description of Artificial Sequence: Synthetic oligonucleotide
  Antisense strand to SEQ ID NO: 2114096
uuccugguuaaagagacag

SEQ ID NO: 2114098 - RNA, 19 nt, Artificial Sequence
  Description of Artificial Sequence: Synthetic oligonucleotide
  Sense strand starting at position 234 of SEQ ID NO: 1882349
ucucuuuaaccaggaaugu

SEQ ID NO: 2114099 - RNA, 19 nt, Artificial Sequence
  Description of Artificial Sequence: Synthetic oligonucleotide
  Antisense strand to SEQ ID NO: 2114098
acauuccugguuaaagaga

SEQ ID NO: 2114100 - RNA, 19 nt, Artificial Sequence
  Description of Artificial Sequence: Synthetic oligonucleotide
  Sense strand starting at position 276 of SEQ ID NO: 1882349
cucucaaaugcuggauaua

SEQ ID NO: 2114101 - RNA, 19 nt, Artificial Sequence
  Description of Artificial Sequence: Synthetic oligonucleotide
  Antisense strand to SEQ ID NO: 2114100
uauauccagcauuugagag

SEQ ID NO: 2114102 - RNA, 19 nt, Artificial Sequence
  Description of Artificial Sequence: Synthetic oligonucleotide
  Sense strand starting at position 306 of SEQ ID NO: 1882349
guaaaugacagcugguaga

SEQ ID NO: 2114103 - RNA, 19 nt, Artificial Sequence
  Description of Artificial Sequence: Synthetic oligonucleotide
  Antisense strand to SEQ ID NO: 2114102
ucuaccagcugucauuuac

SEQ ID NO: 2114104 - RNA, 19 nt, Artificial Sequence
  Description of Artificial Sequence: Synthetic oligonucleotide
  Sense strand starting at position 352 of SEQ ID NO: 1882349
aacauuccucccgagguua

SEQ ID NO: 2114105 - RNA, 19 nt, Artificial Sequence
  Description of Artificial Sequence: Synthetic oligonucleotide
  Antisense strand to SEQ ID NO: 2114104
uaaccucgggaggaauguu

SEQ ID NO: 2114106 - RNA, 19 nt, Artificial Sequence
  Description of Artificial Sequence: Synthetic oligonucleotide
  Sense strand starting at position 375 of SEQ ID NO: 1882349
uuuauugcucuaugggaua

SEQ ID NO: 2114107 - RNA, 19 nt, Artificial Sequence
  Description of Artificial Sequence: Synthetic oligonucleotide
  Antisense strand to SEQ ID NO: 2114106
uaucccauagagcaauaaa

SEQ ID NO: 2114108 - RNA, 19 nt, Artificial Sequence
  Description of Artificial Sequence: Synthetic oligonucleotide
  Sense strand starting at position 380 of SEQ ID NO: 1882349
ugcucuaugggauauuaac

SEQ ID NO: 2114109 - RNA, 19 nt, Artificial Sequence
  Description of Artificial Sequence: Synthetic oligonucleotide
  Antisense strand to SEQ ID NO: 2114108
guuaauaucccauagagca

SEQ ID NO: 2114110 - RNA, 19 nt, Artificial Sequence
  Description of Artificial Sequence: Synthetic oligonucleotide
  Sense strand starting at position 386 of SEQ ID NO: 1882349
augggauauuaaccaguuu

SEQ ID NO: 2114111 - RNA, 19 nt, Artificial Sequence
  Description of Artificial Sequence: Synthetic oligonucleotide
  Antisense strand to SEQ ID NO: 2114110
aaacugguuaauaucccau

SEQ ID NO: 2114112 - RNA, 19 nt, Artificial Sequence
  Description of Artificial Sequence: Synthetic oligonucleotide
  Sense strand starting at position 493 of SEQ ID NO: 1882349
uugguucccuaauuaauga

SEQ ID NO: 2114113 - RNA, 19 nt, Artificial Sequence
  Description of Artificial Sequence: Synthetic oligonucleotide
  Antisense strand to SEQ ID NO: 2114112
ucauuaauuagggaaccaa

SEQ ID NO: 2114114 - RNA, 19 nt, Artificial Sequence
  Description of Artificial Sequence: Synthetic oligonucleotide
  Sense strand starting at position 500 of SEQ ID NO: 1882349
ccuaauuaaugagcuaagu

SEQ ID NO: 2114115 - RNA, 19 nt, Artificial Sequence
  Description of Artificial Sequence: Synthetic oligonucleotide
  Antisense strand to SEQ ID NO: 2114114
acuuagcucauuaauuagg

SEQ ID NO: 2114116 - RNA, 19 nt, Artificial Sequence
  Description of Artificial Sequence: Synthetic oligonucleotide
  Sense strand starting at position 607 of SEQ ID NO: 1882349
uagguauaagccugagagu

SEQ ID NO: 2114117 - RNA, 19 nt, Artificial Sequence
  Description of Artificial Sequence: Synthetic oligonucleotide
  Antisense strand to SEQ ID NO: 2114116
acucucaggcuuauaccua

SEQ ID NO: 2114118 - RNA, 19 nt, Artificial Sequence
  Description of Artificial Sequence: Synthetic oligonucleotide
  Sense strand starting at position 608 of SEQ ID NO: 1882349
agguauaagccugagagua

SEQ ID NO: 2114119 - RNA, 19 nt, Artificial Sequence
  Description of Artificial Sequence: Synthetic oligonucleotide
  Antisense strand to SEQ ID NO: 2114118
uacucucaggcuuauaccu

SEQ ID NO: 2114120 - RNA, 19 nt, Artificial Sequence
  Description of Artificial Sequence: Synthetic oligonucleotide
  Sense strand starting at position 662 of SEQ ID NO: 1882349
uaugcuuaccaguaugaga

SEQ ID NO: 2114121 - RNA, 19 nt, Artificial Sequence
  Description of Artificial Sequence: Synthetic oligonucleotide
  Antisense strand to SEQ ID NO: 2114120
ucucauacugguaagcaua

SEQ ID NO: 2114122 - RNA, 19 nt, Artificial Sequence
  Description of Artificial Sequence: Synthetic oligonucleotide
  Sense strand starting at position 664 of SEQ ID NO: 1882349
ugcuuaccaguaugagauu

SEQ ID NO: 2114123 - RNA, 19 nt, Artificial Sequence
  Description of Artificial Sequence: Synthetic oligonucleotide
  Antisense strand to SEQ ID NO: 2114122
aaucucauacugguaagca

SEQ ID NO: 2114124 - RNA, 19 nt, Artificial Sequence
  Description of Artificial Sequence: Synthetic oligonucleotide
  Sense strand starting at position 715 of SEQ ID NO: 1882349
ucuggaaaugaaugagucu

SEQ ID NO: 2114125 - RNA, 19 nt, Artificial Sequence
  Description of Artificial Sequence: Synthetic oligonucleotide
  Antisense strand to SEQ ID NO: 2114124
agacucauucauuuccaga

SEQ ID NO: 2114126 - RNA, 19 nt, Artificial Sequence
  Description of Artificial Sequence: Synthetic oligonucleotide
  Sense strand starting at position 718 of SEQ ID NO: 1882349
ggaaaugaaugagucuugu

SEQ ID NO: 2114127 - RNA, 19 nt, Artificial Sequence
  Description of Artificial Sequence: Synthetic oligonucleotide
  Antisense strand to SEQ ID NO: 2114126
acaagacucauucauuucc

SEQ ID NO: 2114128 - RNA, 19 nt, Artificial Sequence
  Description of Artificial Sequence: Synthetic oligonucleotide
  Sense strand starting at position 744 of SEQ ID NO: 1882349
gcaauaucugauuacugca

SEQ ID NO: 2114129 - RNA, 19 nt, Artificial Sequence
  Description of Artificial Sequence: Synthetic oligonucleotide
  Antisense strand to SEQ ID NO: 2114128
ugcaguaaucagauauugc

SEQ ID NO: 2114130 - RNA, 19 nt, Artificial Sequence
  Description of Artificial Sequence: Synthetic oligonucleotide
  Sense strand starting at position 764 of SEQ ID NO: 1882349
uuccauuaccucugagguu

SEQ ID NO: 2114131 - RNA, 19 nt, Artificial Sequence
  Description of Artificial Sequence: Synthetic oligonucleotide
  Antisense strand to SEQ ID NO: 2114130
aaccucagagguaauggaa

SEQ ID NO: 2114132 - RNA, 19 nt, Artificial Sequence
  Description of Artificial Sequence: Synthetic oligonucleotide
  Sense strand starting at position 801 of SEQ ID NO: 1882349
gagucaaggucucugagag

SEQ ID NO: 2114133 - RNA, 19 nt, Artificial Sequence
  Description of Artificial Sequence: Synthetic oligonucleotide
  Antisense strand to SEQ ID NO: 2114132
cucucagagaccuugacuc

SEQ ID NO: 2114134 - RNA, 19 nt, Artificial Sequence
  Description of Artificial Sequence: Synthetic oligonucleotide
  Sense strand starting at position 802 of SEQ ID NO: 1882349
agucaaggucucugagaga

SEQ ID NO: 2114135 - RNA, 19 nt, Artificial Sequence
  Description of Artificial Sequence: Synthetic oligonucleotide
  Antisense strand to SEQ ID NO: 2114134
ucucucagagaccuugacu

SEQ ID NO: 2114136 - RNA, 19 nt, Artificial Sequence
  Description of Artificial Sequence: Synthetic oligonucleotide
  Sense strand starting at position 845 of SEQ ID NO: 1882349
cuuuguaauauauggagag

SEQ ID NO: 2114137 - RNA, 19 nt, Artificial Sequence
  Description of Artificial Sequence: Synthetic oligonucleotide
  Antisense strand to SEQ ID NO: 2114136
cucuccauauauuacaaag

SEQ ID NO: 2114138 - RNA, 19 nt, Artificial Sequence
  Description of Artificial Sequence: Synthetic oligonucleotide
  Sense strand starting at position 1244 of SEQ ID NO: 1882349
ugauaaaguuacuugagac

SEQ ID NO: 2114139 - RNA, 19 nt, Artificial Sequence
  Description of Artificial Sequence: Synthetic oligonucleotide
  Antisense strand to SEQ ID NO: 2114138
gucucaaguaacuuuauca

SEQ ID NO: 2114140 - RNA, 19 nt, Artificial Sequence
  Description of Artificial Sequence: Synthetic oligonucleotide
  Sense strand starting at position 1309 of SEQ ID NO: 1882349
ugauuaaucuuucuggguc

SEQ ID NO: 2114141 - RNA, 19 nt, Artificial Sequence
  Description of Artificial Sequence: Synthetic oligonucleotide
  Antisense strand to SEQ ID NO: 2114140
gacccagaaagauuaauca

SEQ ID NO: 2114142 - RNA, 19 nt, Artificial Sequence
  Description of Artificial Sequence: Synthetic oligonucleotide
  Sense strand starting at position 1312 of SEQ ID NO: 1882349
uuaaucuuucugggucuca

SEQ ID NO: 2114143 - RNA, 19 nt, Artificial Sequence
  Description of Artificial Sequence: Synthetic oligonucleotide
  Antisense strand to SEQ ID NO: 2114142
ugagacccagaaagauuaa

SEQ ID NO: 2114144 - RNA, 19 nt, Artificial Sequence
  Description of Artificial Sequence: Synthetic oligonucleotide
  Sense strand starting at position 1464 of SEQ ID NO: 1882349
aggugucagcuacauaaau

SEQ ID NO: 2114145 - RNA, 19 nt, Artificial Sequence
  Description of Artificial Sequence: Synthetic oligonucleotide
  Antisense strand to SEQ ID NO: 2114144
auuuauguagcugacaccu

SEQ ID NO: 2114146 - RNA, 19 nt, Artificial Sequence
  Description of Artificial Sequence: Synthetic oligonucleotide
  Sense strand starting at position 1649 of SEQ ID NO: 1882349
uugcaaaugccucagcaga

SEQ ID NO: 2114147 - RNA, 19 nt, Artificial Sequence
  Description of Artificial Sequence: Synthetic oligonucleotide
  Antisense strand to SEQ ID NO: 2114146
ucugcugaggcauuugcaa

SEQ ID NO: 2114148 - RNA, 19 nt, Artificial Sequence
  Description of Artificial Sequence: Synthetic oligonucleotide
  Sense strand starting at position 2021 of SEQ ID NO: 1882349
gcgcaaguccucccgggau

SEQ ID NO: 2114149 - RNA, 19 nt, Artificial Sequence
  Description of Artificial Sequence: Synthetic oligonucleotide
  Antisense strand to SEQ ID NO: 2114148
aucccgggaggacuugcgc

SEQ ID NO: 2114150 - RNA, 19 nt, Artificial Sequence
  Description of Artificial Sequence: Synthetic oligonucleotide
  Sense strand starting at position 2780 of SEQ ID NO: 1882349
ggaggucagggcuaugguu

SEQ ID NO: 2114151 - RNA, 19 nt, Artificial Sequence
  Description of Artificial Sequence: Synthetic oligonucleotide
  Antisense strand to SEQ ID NO: 2114150
aaccauagcccugaccucc

SEQ ID NO: 2114152 - RNA, 19 nt, Artificial Sequence
  Description of Artificial Sequence: Synthetic oligonucleotide
  Sense strand starting at position 2993 of SEQ ID NO: 1882349
acacucugcuucuuggaga

SEQ ID NO: 2114153 - RNA, 19 nt, Artificial Sequence
  Description of Artificial Sequence: Synthetic oligonucleotide
  Antisense strand to SEQ ID NO: 2114152
ucuccaagaagcagagugu

SEQ ID NO: 2114154 - RNA, 19 nt, Artificial Sequence
  Description of Artificial Sequence: Synthetic oligonucleotide
  Sense strand starting at position 3007 of SEQ ID NO: 1882349
ggagaacacguaugcuaua

SEQ ID NO: 2114155 - RNA, 19 nt, Artificial Sequence
  Description of Artificial Sequence: Synthetic oligonucleotide
  Antisense strand to SEQ ID NO: 2114154
uauagcauacguguucucc

SEQ ID NO: 2114156 - RNA, 19 nt, Artificial Sequence
  Description of Artificial Sequence: Synthetic oligonucleotide
  Sense strand starting at position 3008 of SEQ ID NO: 1882349
gagaacacguaugcuauaa

SEQ ID NO: 2114157 - RNA, 19 nt, Artificial Sequence
  Description of Artificial Sequence: Synthetic oligonucleotide
  Antisense strand to SEQ ID NO: 2114156
uuauagcauacguguucuc

SEQ ID NO: 2114158 - RNA, 19 nt, Artificial Sequence
  Description of Artificial Sequence: Synthetic oligonucleotide
  Sense strand starting at position 3012 of SEQ ID NO: 1882349
acacguaugcuauaaagug

SEQ ID NO: 2114159 - RNA, 19 nt, Artificial Sequence
  Description of Artificial Sequence: Synthetic oligonucleotide
  Antisense strand to SEQ ID NO: 2114158
cacuuuauagcauacgugu

SEQ ID NO: 2114160 - RNA, 19 nt, Artificial Sequence
  Description of Artificial Sequence: Synthetic oligonucleotide
  Sense strand starting at position 3027 of SEQ ID NO: 1882349
agugaaauggccggguaca

SEQ ID NO: 2114161 - RNA, 19 nt, Artificial Sequence
  Description of Artificial Sequence: Synthetic oligonucleotide
  Antisense strand to SEQ ID NO: 2114160
uguacccggccauuucacu

SEQ ID NO: 2114162 - RNA, 19 nt, Artificial Sequence
  Description of Artificial Sequence: Synthetic oligonucleotide
  Sense strand starting at position 3098 of SEQ ID NO: 1882349
cgaaucugugcauagggaa

SEQ ID NO: 2114163 - RNA, 19 nt, Artificial Sequence
  Description of Artificial Sequence: Synthetic oligonucleotide
  Antisense strand to SEQ ID NO: 2114162
uucccuaugcacagauucg

SEQ ID NO: 2114164 - RNA, 19 nt, Artificial Sequence
  Description of Artificial Sequence: Synthetic oligonucleotide
  Sense strand starting at position 3279 of SEQ ID NO: 1882349
cggcuuucuguggauauuu

SEQ ID NO: 2114165 - RNA, 19 nt, Artificial Sequence
  Description of Artificial Sequence: Synthetic oligonucleotide
  Antisense strand to SEQ ID NO: 2114164
aaauauccacagaaagccg

SEQ ID NO: 2114166 - RNA, 19 nt, Artificial Sequence
  Description of Artificial Sequence: Synthetic oligonucleotide
  Sense strand starting at position 3317 of SEQ ID NO: 1882349
cuacguggaauuugccaua

SEQ ID NO: 2114167 - RNA, 19 nt, Artificial Sequence
  Description of Artificial Sequence: Synthetic oligonucleotide
  Antisense strand to SEQ ID NO: 2114166
uauggcaaauuccacguag

SEQ ID NO: 2114168 - RNA, 19 nt, Artificial Sequence
  Description of Artificial Sequence: Synthetic oligonucleotide
  Sense strand starting at position 3492 of SEQ ID NO: 1882349
cuuuguaaccuguauuauu

SEQ ID NO: 2114169 - RNA, 19 nt, Artificial Sequence
  Description of Artificial Sequence: Synthetic oligonucleotide
  Antisense strand to SEQ ID NO: 2114168
aauaauacagguuacaaag

SEQ ID NO: 2114170 - RNA, 19 nt, Artificial Sequence
  Description of Artificial Sequence: Synthetic oligonucleotide
  Sense strand starting at position 3545 of SEQ ID NO: 1882349
agugucaucgucgugaacu

SEQ ID NO: 2114171 - RNA, 19 nt, Artificial Sequence
  Description of Artificial Sequence: Synthetic oligonucleotide
  Antisense strand to SEQ ID NO: 2114170
aguucacgacgaugacacu

SEQ ID NO: 2114172 - RNA, 19 nt, Artificial Sequence
  Description of Artificial Sequence: Synthetic oligonucleotide
  Sense strand starting at position 34 of SEQ ID NO: 1882350
gagagaauugugcagaguu

SEQ ID NO: 2114173 - RNA, 19 nt, Artificial Sequence
  Description of Artificial Sequence: Synthetic oligonucleotide
  Antisense strand to SEQ ID NO: 2114172
aacucugcacaauucucuc

SEQ ID NO: 2114174 - RNA, 19 nt, Artificial Sequence
  Description of Artificial Sequence: Synthetic oligonucleotide
  Sense strand starting at position 118 of SEQ ID NO: 1882350
gaggcccaggucuguaaau

SEQ ID NO: 2114175 - RNA, 19 nt, Artificial Sequence
  Description of Artificial Sequence: Synthetic oligonucleotide
  Antisense strand to SEQ ID NO: 2114174
auuuacagaccugggccuc

SEQ ID NO: 2114176 - RNA, 19 nt, Artificial Sequence
  Description of Artificial Sequence: Synthetic oligonucleotide
  Sense strand starting at position 120 of SEQ ID NO: 1882350
ggcccaggucuguaaauca

SEQ ID NO: 2114177 - RNA, 19 nt, Artificial Sequence
  Description of Artificial Sequence: Synthetic oligonucleotide
  Antisense strand to SEQ ID NO: 2114176
ugauuuacagaccugggcc

SEQ ID NO: 2114178 - RNA, 19 nt, Artificial Sequence
  Description of Artificial Sequence: Synthetic oligonucleotide
  Sense strand starting at position 198 of SEQ ID NO: 1882350
cuucuucguccaggacuaa

SEQ ID NO: 2114179 - RNA, 19 nt, Artificial Sequence
  Description of Artificial Sequence: Synthetic oligonucleotide
  Antisense strand to SEQ ID NO: 2114178
uuaguccuggacgaagaag

SEQ ID NO: 2114180 - RNA, 19 nt, Artificial Sequence
  Description of Artificial Sequence: Synthetic oligonucleotide
  Sense strand starting at position 272 of SEQ ID NO: 1882350
gcagcucuguugguaaugu

SEQ ID NO: 2114181 - RNA, 19 nt, Artificial Sequence
  Description of Artificial Sequence: Synthetic oligonucleotide
  Antisense strand to SEQ ID NO: 2114180
acauuaccaacagagcugc

SEQ ID NO: 2114182 - RNA, 19 nt, Artificial Sequence
  Description of Artificial Sequence: Synthetic oligonucleotide
  Sense strand starting at position 280 of SEQ ID NO: 1882350
guugguaaugugugcuugu

SEQ ID NO: 2114183 - RNA, 19 nt, Artificial Sequence
  Description of Artificial Sequence: Synthetic oligonucleotide
  Antisense strand to SEQ ID NO: 2114182
acaagcacacauuaccaac

SEQ ID NO: 2114184 - RNA, 19 nt, Artificial Sequence
  Description of Artificial Sequence: Synthetic oligonucleotide
  Sense strand starting at position 281 of SEQ ID NO: 1882350
uugguaaugugugcuuguu

SEQ ID NO: 2114185 - RNA, 19 nt, Artificial Sequence
  Description of Artificial Sequence: Synthetic oligonucleotide
  Antisense strand to SEQ ID NO: 2114184
aacaagcacacauuaccaa

SEQ ID NO: 2114186 - RNA, 19 nt, Artificial Sequence
  Description of Artificial Sequence: Synthetic oligonucleotide
  Sense strand starting at position 430 of SEQ ID NO: 1882350
ccugcaguacagcguuauu

SEQ ID NO: 2114187 - RNA, 19 nt, Artificial Sequence
  Description of Artificial Sequence: Synthetic oligonucleotide
  Antisense strand to SEQ ID NO: 2114186
aauaacgcuguacugcagg

SEQ ID NO: 2114188 - RNA, 19 nt, Artificial Sequence
  Description of Artificial Sequence: Synthetic oligonucleotide
  Sense strand starting at position 433 of SEQ ID NO: 1882350
gcaguacagcguuauuagu

SEQ ID NO: 2114189 - RNA, 19 nt, Artificial Sequence
  Description of Artificial Sequence: Synthetic oligonucleotide
  Antisense strand to SEQ ID NO: 2114188
acuaauaacgcuguacugc

SEQ ID NO: 2114190 - RNA, 19 nt, Artificial Sequence
  Description of Artificial Sequence: Synthetic oligonucleotide
  Sense strand starting at position 508 of SEQ ID NO: 1882350
uaggaagucuauggagauu

SEQ ID NO: 2114191 - RNA, 19 nt, Artificial Sequence
  Description of Artificial Sequence: Synthetic oligonucleotide
  Antisense strand to SEQ ID NO: 2114190
aaucuccauagacuuccua

SEQ ID NO: 2114192 - RNA, 19 nt, Artificial Sequence
  Description of Artificial Sequence: Synthetic oligonucleotide
  Sense strand starting at position 800 of SEQ ID NO: 1882350
acaccauucugagcgcaaa

SEQ ID NO: 2114193 - RNA, 19 nt, Artificial Sequence
  Description of Artificial Sequence: Synthetic oligonucleotide
  Antisense strand to SEQ ID NO: 2114192
uuugcgcucagaauggugu

SEQ ID NO: 2114194 - RNA, 19 nt, Artificial Sequence
  Description of Artificial Sequence: Synthetic oligonucleotide
  Sense strand starting at position 906 of SEQ ID NO: 1882350
agagaaacgucuuuaaaug

SEQ ID NO: 2114195 - RNA, 19 nt, Artificial Sequence
  Description of Artificial Sequence: Synthetic oligonucleotide
  Antisense strand to SEQ ID NO: 2114194
cauuuaaagacguuucucu

SEQ ID NO: 2114196 - RNA, 19 nt, Artificial Sequence
  Description of Artificial Sequence: Synthetic oligonucleotide
  Sense strand starting at position 907 of SEQ ID NO: 1882350
gagaaacgucuuuaaaugc

SEQ ID NO: 2114197 - RNA, 19 nt, Artificial Sequence
  Description of Artificial Sequence: Synthetic oligonucleotide
  Antisense strand to SEQ ID NO: 2114196
gcauuuaaagacguuucuc

SEQ ID NO: 2114198 - RNA, 19 nt, Artificial Sequence
  Description of Artificial Sequence: Synthetic oligonucleotide
  Sense strand starting at position 1059 of SEQ ID NO: 1882350
ggucguucagguugaaaga

SEQ ID NO: 2114199 - RNA, 19 nt, Artificial Sequence
  Description of Artificial Sequence: Synthetic oligonucleotide
  Antisense strand to SEQ ID NO: 2114198
ucuuucaaccugaacgacc

SEQ ID NO: 2114200 - RNA, 19 nt, Artificial Sequence
  Description of Artificial Sequence: Synthetic oligonucleotide
  Sense strand starting at position 1068 of SEQ ID NO: 1882350
gguugaaagacuggucgaa

SEQ ID NO: 2114201 - RNA, 19 nt, Artificial Sequence
  Description of Artificial Sequence: Synthetic oligonucleotide
  Antisense strand to SEQ ID NO: 2114200
uucgaccagucuuucaacc

SEQ ID NO: 2114202 - RNA, 19 nt, Artificial Sequence
  Description of Artificial Sequence: Synthetic oligonucleotide
  Sense strand starting at position 1070 of SEQ ID NO: 1882350
uugaaagacuggucgaaau

SEQ ID NO: 2114203 - RNA, 19 nt, Artificial Sequence
  Description of Artificial Sequence: Synthetic oligonucleotide
  Antisense strand to SEQ ID NO: 2114202
auuucgaccagucuuucaa

SEQ ID NO: 2114204 - RNA, 19 nt, Artificial Sequence
  Description of Artificial Sequence: Synthetic oligonucleotide
  Sense strand starting at position 1081 of SEQ ID NO: 1882350
gucgaaauuacgcgggcau

SEQ ID NO: 2114205 - RNA, 19 nt, Artificial Sequence
  Description of Artificial Sequence: Synthetic oligonucleotide
  Antisense strand to SEQ ID NO: 2114204
augcccgcguaauuucgac

SEQ ID NO: 2114206 - RNA, 19 nt, Artificial Sequence
  Description of Artificial Sequence: Synthetic oligonucleotide
  Sense strand starting at position 1083 of SEQ ID NO: 1882350
cgaaauuacgcgggcauga

SEQ ID NO: 2114207 - RNA, 19 nt, Artificial Sequence
  Description of Artificial Sequence: Synthetic oligonucleotide
  Antisense strand to SEQ ID NO: 2114206
ucaugcccgcguaauuucg

SEQ ID NO: 2114208 - RNA, 19 nt, Artificial Sequence
  Description of Artificial Sequence: Synthetic oligonucleotide
  Sense strand starting at position 1565 of SEQ ID NO: 1882350
agaauauguuugcugcuuu

SEQ ID NO: 2114209 - RNA, 19 nt, Artificial Sequence
  Description of Artificial Sequence: Synthetic oligonucleotide
  Antisense strand to SEQ ID NO: 2114208
aaagcagcaaacauauucu

SEQ ID NO: 2114210 - RNA, 19 nt, Artificial Sequence
  Description of Artificial Sequence: Synthetic oligonucleotide
  Sense strand starting at position 2059 of SEQ ID NO: 1882350
ggguguguuuguagggaga

SEQ ID NO: 2114211 - RNA, 19 nt, Artificial Sequence
  Description of Artificial Sequence: Synthetic oligonucleotide
  Antisense strand to SEQ ID NO: 2114210
ucucccuacaaacacaccc

SEQ ID NO: 2114212 - RNA, 19 nt, Artificial Sequence
  Description of Artificial Sequence: Synthetic oligonucleotide
  Sense strand starting at position 2158 of SEQ ID NO: 1882350
cgucuguuccgagggagga

SEQ ID NO: 2114213 - RNA, 19 nt, Artificial Sequence
  Description of Artificial Sequence: Synthetic oligonucleotide
  Antisense strand to SEQ ID NO: 2114212
uccucccucggaacagacg

SEQ ID NO: 2114214 - RNA, 19 nt, Artificial Sequence
  Description of Artificial Sequence: Synthetic oligonucleotide
  Sense strand starting at position 2565 of SEQ ID NO: 1882350
guucuagcaggguacaaua

SEQ ID NO: 2114215 - RNA, 19 nt, Artificial Sequence
  Description of Artificial Sequence: Synthetic oligonucleotide
  Antisense strand to SEQ ID NO: 2114214
uauuguacccugcuagaac

SEQ ID NO: 2114216 - RNA, 19 nt, Artificial Sequence
  Description of Artificial Sequence: Synthetic oligonucleotide
  Sense strand starting at position 2576 of SEQ ID NO: 1882350
guacaauagaccuguggac

SEQ ID NO: 2114217 - RNA, 19 nt, Artificial Sequence
  Description of Artificial Sequence: Synthetic oligonucleotide
  Antisense strand to SEQ ID NO: 2114216
guccacaggucuauuguac

SEQ ID NO: 2114218 - RNA, 19 nt, Artificial Sequence
  Description of Artificial Sequence: Synthetic oligonucleotide
  Sense strand starting at position 2858 of SEQ ID NO: 1882350
gaggcuugauccuuaucug

SEQ ID NO: 2114219 - RNA, 19 nt, Artificial Sequence
  Description of Artificial Sequence: Synthetic oligonucleotide
  Antisense strand to SEQ ID NO: 2114218
cagauaaggaucaagccuc

SEQ ID NO: 2114220 - RNA, 19 nt, Artificial Sequence
  Description of Artificial Sequence: Synthetic oligonucleotide
  Sense strand starting at position 2859 of SEQ ID NO: 1882350
aggcuugauccuuaucuga

SEQ ID NO: 2114221 - RNA, 19 nt, Artificial Sequence
  Description of Artificial Sequence: Synthetic oligonucleotide
  Antisense strand to SEQ ID NO: 2114220
ucagauaaggaucaagccu

SEQ ID NO: 2114222 - RNA, 19 nt, Artificial Sequence
  Description of Artificial Sequence: Synthetic oligonucleotide
  Sense strand starting at position 2861 of SEQ ID NO: 1882350
gcuugauccuuaucugagg

SEQ ID NO: 2114223 - RNA, 19 nt, Artificial Sequence
  Description of Artificial Sequence: Synthetic oligonucleotide
  Antisense strand to SEQ ID NO: 2114222
ccucagauaaggaucaagc

SEQ ID NO: 2114224 - RNA, 19 nt, Artificial Sequence
  Description of Artificial Sequence: Synthetic oligonucleotide
  Sense strand starting at position 2867 of SEQ ID NO: 1882350
uccuuaucugagggacacu

SEQ ID NO: 2114225 - RNA, 19 nt, Artificial Sequence
  Description of Artificial Sequence: Synthetic oligonucleotide
  Antisense strand to SEQ ID NO: 2114224
agugucccucagauaagga

SEQ ID NO: 2114226 - RNA, 19 nt, Artificial Sequence
  Description of Artificial Sequence: Synthetic oligonucleotide
  Sense strand starting at position 2972 of SEQ ID NO: 1882350
ggucucaucucugucuuga

SEQ ID NO: 2114227 - RNA, 19 nt, Artificial Sequence
  Description of Artificial Sequence: Synthetic oligonucleotide
  Antisense strand to SEQ ID NO: 2114226
ucaagacagagaugagacc

SEQ ID NO: 2114228 - RNA, 19 nt, Artificial Sequence
  Description of Artificial Sequence: Synthetic oligonucleotide
  Sense strand starting at position 3034 of SEQ ID NO: 1882350
uacccaugguucuuggaca

SEQ ID NO: 2114229 - RNA, 19 nt, Artificial Sequence
  Description of Artificial Sequence: Synthetic oligonucleotide
  Antisense strand to SEQ ID NO: 2114228
uguccaagaaccaugggua

SEQ ID NO: 2114230 - RNA, 19 nt, Artificial Sequence
  Description of Artificial Sequence: Synthetic oligonucleotide
  Sense strand starting at position 3116 of SEQ ID NO: 1882350
cgggcucagucacuuauau

SEQ ID NO: 2114231 - RNA, 19 nt, Artificial Sequence
  Description of Artificial Sequence: Synthetic oligonucleotide
  Antisense strand to SEQ ID NO: 2114230
auauaagugacugagcccg

SEQ ID NO: 2114232 - RNA, 19 nt, Artificial Sequence
  Description of Artificial Sequence: Synthetic oligonucleotide
  Sense strand starting at position 3120 of SEQ ID NO: 1882350
cucagucacuuauaugaug

SEQ ID NO: 2114233 - RNA, 19 nt, Artificial Sequence
  Description of Artificial Sequence: Synthetic oligonucleotide
  Antisense strand to SEQ ID NO: 2114232
caucauauaagugacugag

SEQ ID NO: 2114234 - RNA, 19 nt, Artificial Sequence
  Description of Artificial Sequence: Synthetic oligonucleotide
  Sense strand starting at position 3129 of SEQ ID NO: 1882350
uuauaugaugugugaccuu

SEQ ID NO: 2114235 - RNA, 19 nt, Artificial Sequence
  Description of Artificial Sequence: Synthetic oligonucleotide
  Antisense strand to SEQ ID NO: 2114234
aaggucacacaucauauaa

SEQ ID NO: 2114236 - RNA, 19 nt, Artificial Sequence
  Description of Artificial Sequence: Synthetic oligonucleotide
  Sense strand starting at position 3275 of SEQ ID NO: 1882350
ggcuuugcuguccuuaagu

SEQ ID NO: 2114237 - RNA, 19 nt, Artificial Sequence
  Description of Artificial Sequence: Synthetic oligonucleotide
  Antisense strand to SEQ ID NO: 2114236
acuuaaggacagcaaagcc

SEQ ID NO: 2114238 - RNA, 19 nt, Artificial Sequence
  Description of Artificial Sequence: Synthetic oligonucleotide
  Sense strand starting at position 3438 of SEQ ID NO: 1882350
cauagaaugcccugaguuu

SEQ ID NO: 2114239 - RNA, 19 nt, Artificial Sequence
  Description of Artificial Sequence: Synthetic oligonucleotide
  Antisense strand to SEQ ID NO: 2114238
aaacucagggcauucuaug

SEQ ID NO: 2114240 - RNA, 19 nt, Artificial Sequence
  Description of Artificial Sequence: Synthetic oligonucleotide
  Sense strand starting at position 3466 of SEQ ID NO: 1882350
agagguuuauggucacuua

SEQ ID NO: 2114241 - RNA, 19 nt, Artificial Sequence
  Description of Artificial Sequence: Synthetic oligonucleotide
  Antisense strand to SEQ ID NO: 2114240
uaagugaccauaaaccucu

SEQ ID NO: 2114242 - RNA, 19 nt, Artificial Sequence
  Description of Artificial Sequence: Synthetic oligonucleotide
  Sense strand starting at position 3467 of SEQ ID NO: 1882350
gagguuuauggucacuuag

SEQ ID NO: 2114243 - RNA, 19 nt, Artificial Sequence
  Description of Artificial Sequence: Synthetic oligonucleotide
  Antisense strand to SEQ ID NO: 2114242
cuaagugaccauaaaccuc

SEQ ID NO: 2114244 - RNA, 19 nt, Artificial Sequence
  Description of Artificial Sequence: Synthetic oligonucleotide
  Sense strand starting at position 3469 of SEQ ID NO: 1882350
gguuuauggucacuuagca

SEQ ID NO: 2114245 - RNA, 19 nt, Artificial Sequence
  Description of Artificial Sequence: Synthetic oligonucleotide
  Antisense strand to SEQ ID NO: 2114244
ugcuaagugaccauaaacc

SEQ ID NO: 2114246 - RNA, 19 nt, Artificial Sequence
  Description of Artificial Sequence: Synthetic oligonucleotide
  Sense strand starting at position 3477 of SEQ ID NO: 1882350
gucacuuagcauugccauu

SEQ ID NO: 2114247 - RNA, 19 nt, Artificial Sequence
  Description of Artificial Sequence: Synthetic oligonucleotide
  Antisense strand to SEQ ID NO: 2114246
aauggcaaugcuaagugac

SEQ ID NO: 2114248 - RNA, 19 nt, Artificial Sequence
  Description of Artificial Sequence: Synthetic oligonucleotide
  Sense strand starting at position 3488 of SEQ ID NO: 1882350
uugccauucgcuugccaga

SEQ ID NO: 2114249 - RNA, 19 nt, Artificial Sequence
  Description of Artificial Sequence: Synthetic oligonucleotide
  Antisense strand to SEQ ID NO: 2114248
ucuggcaagcgaauggcaa

SEQ ID NO: 2114250 - RNA, 19 nt, Artificial Sequence
  Description of Artificial Sequence: Synthetic oligonucleotide
  Sense strand starting at position 3490 of SEQ ID NO: 1882350
gccauucgcuugccagaca

SEQ ID NO: 2114251 - RNA, 19 nt, Artificial Sequence
  Description of Artificial Sequence: Synthetic oligonucleotide
  Antisense strand to SEQ ID NO: 2114250
ugucuggcaagcgaauggc

SEQ ID NO: 2114252 - RNA, 19 nt, Artificial Sequence
  Description of Artificial Sequence: Synthetic oligonucleotide
  Sense strand starting at position 46 of SEQ ID NO: 1882352
uguuuaagacaguaauguu

SEQ ID NO: 2114253 - RNA, 19 nt, Artificial Sequence
  Description of Artificial Sequence: Synthetic oligonucleotide
  Antisense strand to SEQ ID NO: 2114252
aacauuacugucuuaaaca

SEQ ID NO: 2114254 - RNA, 19 nt, Artificial Sequence
  Description of Artificial Sequence: Synthetic oligonucleotide
  Sense strand starting at position 105 of SEQ ID NO: 1882352
gaguuugagcaacgaacaa

SEQ ID NO: 2114255 - RNA, 19 nt, Artificial Sequence
  Description of Artificial Sequence: Synthetic oligonucleotide
  Antisense strand to SEQ ID NO: 2114254
uuguucguugcucaaacuc

SEQ ID NO: 2114256 - RNA, 19 nt, Artificial Sequence
  Description of Artificial Sequence: Synthetic oligonucleotide
  Sense strand starting at position 150 of SEQ ID NO: 1882352
cagaguaggcuuugagacu

SEQ ID NO: 2114257 - RNA, 19 nt, Artificial Sequence
  Description of Artificial Sequence: Synthetic oligonucleotide
  Antisense strand to SEQ ID NO: 2114256
agucucaaagccuacucug

SEQ ID NO: 2114258 - RNA, 19 nt, Artificial Sequence
  Description of Artificial Sequence: Synthetic oligonucleotide
  Sense strand starting at position 188 of SEQ ID NO: 1882352
gaagaugauuuaggacaga

SEQ ID NO: 2114259 - RNA, 19 nt, Artificial Sequence
  Description of Artificial Sequence: Synthetic oligonucleotide
  Antisense strand to SEQ ID NO: 2114258
ucuguccuaaaucaucuuc

SEQ ID NO: 2114260 - RNA, 19 nt, Artificial Sequence
  Description of Artificial Sequence: Synthetic oligonucleotide
  Sense strand starting at position 320 of SEQ ID NO: 1882352
ggccaaacucaaugauuga

SEQ ID NO: 2114261 - RNA, 19 nt, Artificial Sequence
  Description of Artificial Sequence: Synthetic oligonucleotide
  Antisense strand to SEQ ID NO: 2114260
ucaaucauugaguuuggcc

SEQ ID NO: 2114262 - RNA, 19 nt, Artificial Sequence
  Description of Artificial Sequence: Synthetic oligonucleotide
  Sense strand starting at position 400 of SEQ ID NO: 1882352
aaccuuuaggcugaacgua

SEQ ID NO: 2114263 - RNA, 19 nt, Artificial Sequence
  Description of Artificial Sequence: Synthetic oligonucleotide
  Antisense strand to SEQ ID NO: 2114262
uacguucagccuaaagguu

SEQ ID NO: 2114264 - RNA, 19 nt, Artificial Sequence
  Description of Artificial Sequence: Synthetic oligonucleotide
  Sense strand starting at position 496 of SEQ ID NO: 1882352
uuaaauaauugucuggaca

SEQ ID NO: 2114265 - RNA, 19 nt, Artificial Sequence
  Description of Artificial Sequence: Synthetic oligonucleotide
  Antisense strand to SEQ ID NO: 2114264
uguccagacaauuauuuaa

SEQ ID NO: 2114266 - RNA, 19 nt, Artificial Sequence
  Description of Artificial Sequence: Synthetic oligonucleotide
  Sense strand starting at position 739 of SEQ ID NO: 1882352
aacaaaggucugugacuca

SEQ ID NO: 2114267 - RNA, 19 nt, Artificial Sequence
  Description of Artificial Sequence: Synthetic oligonucleotide
  Antisense strand to SEQ ID NO: 2114266
ugagucacagaccuuuguu

SEQ ID NO: 2114268 - RNA, 19 nt, Artificial Sequence
  Description of Artificial Sequence: Synthetic oligonucleotide
  Sense strand starting at position 742 of SEQ ID NO: 1882352
aaaggucugugacucaauc

SEQ ID NO: 2114269 - RNA, 19 nt, Artificial Sequence
  Description of Artificial Sequence: Synthetic oligonucleotide
  Antisense strand to SEQ ID NO: 2114268
gauugagucacagaccuuu

SEQ ID NO: 2114270 - RNA, 19 nt, Artificial Sequence
  Description of Artificial Sequence: Synthetic oligonucleotide
  Sense strand starting at position 751 of SEQ ID NO: 1882352
ugacucaauccaggacagu

SEQ ID NO: 2114271 - RNA, 19 nt, Artificial Sequence
  Description of Artificial Sequence: Synthetic oligonucleotide
  Antisense strand to SEQ ID NO: 2114270
acuguccuggauugaguca

SEQ ID NO: 2114272 - RNA, 19 nt, Artificial Sequence
  Description of Artificial Sequence: Synthetic oligonucleotide
  Sense strand starting at position 980 of SEQ ID NO: 1882352
ucuguaaucuaaguuccua

SEQ ID NO: 2114273 - RNA, 19 nt, Artificial Sequence
  Description of Artificial Sequence: Synthetic oligonucleotide
  Antisense strand to SEQ ID NO: 2114272
uaggaacuuagauuacaga

SEQ ID NO: 2114274 - RNA, 19 nt, Artificial Sequence
  Description of Artificial Sequence: Synthetic oligonucleotide
  Sense strand starting at position 1048 of SEQ ID NO: 1882352
aggcuuucucuguaggaua

SEQ ID NO: 2114275 - RNA, 19 nt, Artificial Sequence
  Description of Artificial Sequence: Synthetic oligonucleotide
  Antisense strand to SEQ ID NO: 2114274
uauccuacagagaaagccu

SEQ ID NO: 2114276 - RNA, 19 nt, Artificial Sequence
  Description of Artificial Sequence: Synthetic oligonucleotide
  Sense strand starting at position 1053 of SEQ ID NO: 1882352
uucucuguaggauagcaaa

SEQ ID NO: 2114277 - RNA, 19 nt, Artificial Sequence
  Description of Artificial Sequence: Synthetic oligonucleotide
  Antisense strand to SEQ ID NO: 2114276
uuugcuauccuacagagaa

SEQ ID NO: 2114278 - RNA, 19 nt, Artificial Sequence
  Description of Artificial Sequence: Synthetic oligonucleotide
  Sense strand starting at position 1358 of SEQ ID NO: 1882352
gauacagcccugugggauu

SEQ ID NO: 2114279 - RNA, 19 nt, Artificial Sequence
  Description of Artificial Sequence: Synthetic oligonucleotide
  Antisense strand to SEQ ID NO: 2114278
aaucccacagggcuguauc

SEQ ID NO: 2114280 - RNA, 19 nt, Artificial Sequence
  Description of Artificial Sequence: Synthetic oligonucleotide
  Sense strand starting at position 1386 of SEQ ID NO: 1882352
cccagucauauguaaggua

SEQ ID NO: 2114281 - RNA, 19 nt, Artificial Sequence
  Description of Artificial Sequence: Synthetic oligonucleotide
  Antisense strand to SEQ ID NO: 2114280
uaccuuacauaugacuggg

SEQ ID NO: 2114282 - RNA, 19 nt, Artificial Sequence
  Description of Artificial Sequence: Synthetic oligonucleotide
  Sense strand starting at position 2594 of SEQ ID NO: 1882352
gugugucuuuguauuggga

SEQ ID NO: 2114283 - RNA, 19 nt, Artificial Sequence
  Description of Artificial Sequence: Synthetic oligonucleotide
  Antisense strand to SEQ ID NO: 2114282
ucccaauacaaagacacac

SEQ ID NO: 2114284 - RNA, 19 nt, Artificial Sequence
  Description of Artificial Sequence: Synthetic oligonucleotide
  Sense strand starting at position 2745 of SEQ ID NO: 1882352
ugagcaaaguugguaacuu

SEQ ID NO: 2114285 - RNA, 19 nt, Artificial Sequence
  Description of Artificial Sequence: Synthetic oligonucleotide
  Antisense strand to SEQ ID NO: 2114284
aaguuaccaacuuugcuca

SEQ ID NO: 2114286 - RNA, 19 nt, Artificial Sequence
  Description of Artificial Sequence: Synthetic oligonucleotide
  Sense strand starting at position 2797 of SEQ ID NO: 1882352
agccucgguccuuauuaaa

SEQ ID NO: 2114287 - RNA, 19 nt, Artificial Sequence
  Description of Artificial Sequence: Synthetic oligonucleotide
  Antisense strand to SEQ ID NO: 2114286
uuuaauaaggaccgaggcu

SEQ ID NO: 2114288 - RNA, 19 nt, Artificial Sequence
  Description of Artificial Sequence: Synthetic oligonucleotide
  Sense strand starting at position 2838 of SEQ ID NO: 1882352
accugagguuauuuguguu

SEQ ID NO: 2114289 - RNA, 19 nt, Artificial Sequence
  Description of Artificial Sequence: Synthetic oligonucleotide
  Antisense strand to SEQ ID NO: 2114288
aacacaaauaaccucaggu

SEQ ID NO: 2114290 - RNA, 19 nt, Artificial Sequence
  Description of Artificial Sequence: Synthetic oligonucleotide
  Sense strand starting at position 2846 of SEQ ID NO: 1882352
uuauuuguguuguuccaag

SEQ ID NO: 2114291 - RNA, 19 nt, Artificial Sequence
  Description of Artificial Sequence: Synthetic oligonucleotide
  Antisense strand to SEQ ID NO: 2114290
cuuggaacaacacaaauaa

SEQ ID NO: 2114292 - RNA, 19 nt, Artificial Sequence
  Description of Artificial Sequence: Synthetic oligonucleotide
  Sense strand starting at position 2876 of SEQ ID NO: 1882352
ggaacuccuuugcuuggaa

SEQ ID NO: 2114293 - RNA, 19 nt, Artificial Sequence
  Description of Artificial Sequence: Synthetic oligonucleotide
  Antisense strand to SEQ ID NO: 2114292
uuccaagcaaaggaguucc

SEQ ID NO: 2114294 - RNA, 19 nt, Artificial Sequence
  Description of Artificial Sequence: Synthetic oligonucleotide
  Sense strand starting at position 2901 of SEQ ID NO: 1882352
uauagagcgcgugcugaau

SEQ ID NO: 2114295 - RNA, 19 nt, Artificial Sequence
  Description of Artificial Sequence: Synthetic oligonucleotide
  Antisense strand to SEQ ID NO: 2114294
auucagcacgcgcucuaua

SEQ ID NO: 2114296 - RNA, 19 nt, Artificial Sequence
  Description of Artificial Sequence: Synthetic oligonucleotide
  Sense strand starting at position 2907 of SEQ ID NO: 1882352
gcgcgugcugaauucaaag

SEQ ID NO: 2114297 - RNA, 19 nt, Artificial Sequence
  Description of Artificial Sequence: Synthetic oligonucleotide
  Antisense strand to SEQ ID NO: 2114296
cuuugaauucagcacgcgc

SEQ ID NO: 2114298 - RNA, 19 nt, Artificial Sequence
  Description of Artificial Sequence: Synthetic oligonucleotide
  Sense strand starting at position 2949 of SEQ ID NO: 1882352
ggguauauuugggaguaua

SEQ ID NO: 2114299 - RNA, 19 nt, Artificial Sequence
  Description of Artificial Sequence: Synthetic oligonucleotide
  Antisense strand to SEQ ID NO: 2114298
uauacucccaaauauaccc

SEQ ID NO: 2114300 - RNA, 19 nt, Artificial Sequence
  Description of Artificial Sequence: Synthetic oligonucleotide
  Sense strand starting at position 2984 of SEQ ID NO: 1882352
acaguauguguuuaccaau

SEQ ID NO: 2114301 - RNA, 19 nt, Artificial Sequence
  Description of Artificial Sequence: Synthetic oligonucleotide
  Antisense strand to SEQ ID NO: 2114300
auugguaaacacauacugu

SEQ ID NO: 2114302 - RNA, 19 nt, Artificial Sequence
  Description of Artificial Sequence: Synthetic oligonucleotide
  Sense strand starting at position 3117 of SEQ ID NO: 1882352
cguugacucugauccaaga

SEQ ID NO: 2114303 - RNA, 19 nt, Artificial Sequence
  Description of Artificial Sequence: Synthetic oligonucleotide
  Antisense strand to SEQ ID NO: 2114302
ucuuggaucagagucaacg

SEQ ID NO: 2114304 - RNA, 19 nt, Artificial Sequence
  Description of Artificial Sequence: Synthetic oligonucleotide
  Sense strand starting at position 3156 of SEQ ID NO: 1882352
cugauaucgguguagauua

SEQ ID NO: 2114305 - RNA, 19 nt, Artificial Sequence
  Description of Artificial Sequence: Synthetic oligonucleotide
  Antisense strand to SEQ ID NO: 2114304
uaaucuacaccgauaucag

SEQ ID NO: 2114306 - RNA, 19 nt, Artificial Sequence
  Description of Artificial Sequence: Synthetic oligonucleotide
  Sense strand starting at position 3158 of SEQ ID NO: 1882352
gauaucgguguagauuaau

SEQ ID NO: 2114307 - RNA, 19 nt, Artificial Sequence
  Description of Artificial Sequence: Synthetic oligonucleotide
  Antisense strand to SEQ ID NO: 2114306
auuaaucuacaccgauauc

SEQ ID NO: 2114308 - RNA, 19 nt, Artificial Sequence
  Description of Artificial Sequence: Synthetic oligonucleotide
  Sense strand starting at position 3242 of SEQ ID NO: 1882352
acuguuuguucuuuagaga

SEQ ID NO: 2114309 - RNA, 19 nt, Artificial Sequence
  Description of Artificial Sequence: Synthetic oligonucleotide
  Antisense strand to SEQ ID NO: 2114308
ucucuaaagaacaaacagu

SEQ ID NO: 2114310 - RNA, 19 nt, Artificial Sequence
  Description of Artificial Sequence: Synthetic oligonucleotide
  Sense strand starting at position 3243 of SEQ ID NO: 1882352
cuguuuguucuuuagagac

SEQ ID NO: 2114311 - RNA, 19 nt, Artificial Sequence
  Description of Artificial Sequence: Synthetic oligonucleotide
  Antisense strand to SEQ ID NO: 2114310
gucucuaaagaacaaacag

SEQ ID NO: 2114312 - RNA, 19 nt, Artificial Sequence
  Description of Artificial Sequence: Synthetic oligonucleotide
  Sense strand starting at position 3560 of SEQ ID NO: 1882352
ucuggaaaugguggaguuu

SEQ ID NO: 2114313 - RNA, 19 nt, Artificial Sequence
  Description of Artificial Sequence: Synthetic oligonucleotide
  Antisense strand to SEQ ID NO: 2114312
aaacuccaccauuuccaga

SEQ ID NO: 2114314 - RNA, 19 nt, Artificial Sequence
  Description of Artificial Sequence: Synthetic oligonucleotide
  Sense strand starting at position 3572 of SEQ ID NO: 1882352
ggaguuucgugaaugcugu

SEQ ID NO: 2114315 - RNA, 19 nt, Artificial Sequence
  Description of Artificial Sequence: Synthetic oligonucleotide
  Antisense strand to SEQ ID NO: 2114314
acagcauucacgaaacucc

SEQ ID NO: 2114316 - RNA, 19 nt, Artificial Sequence
  Description of Artificial Sequence: Synthetic oligonucleotide
  Sense strand starting at position 3578 of SEQ ID NO: 1882352
ucgugaaugcuguaagaga

SEQ ID NO: 2114317 - RNA, 19 nt, Artificial Sequence
  Description of Artificial Sequence: Synthetic oligonucleotide
  Antisense strand to SEQ ID NO: 2114316
ucucuuacagcauucacga

SEQ ID NO: 2114318 - RNA, 19 nt, Artificial Sequence
  Description of Artificial Sequence: Synthetic oligonucleotide
  Sense strand starting at position 3587 of SEQ ID NO: 1882352
cuguaagagaacugaaguu

SEQ ID NO: 2114319 - RNA, 19 nt, Artificial Sequence
  Description of Artificial Sequence: Synthetic oligonucleotide
  Antisense strand to SEQ ID NO: 2114318
aacuucaguucucuuacag

SEQ ID NO: 2114320 - RNA, 19 nt, Artificial Sequence
  Description of Artificial Sequence: Synthetic oligonucleotide
  Sense strand starting at position 3612 of SEQ ID NO: 1882352
auaggcaaacuuuaaugua

SEQ ID NO: 2114321 - RNA, 19 nt, Artificial Sequence
  Description of Artificial Sequence: Synthetic oligonucleotide
  Antisense strand to SEQ ID NO: 2114320
uacauuaaaguuugccuau

SEQ ID NO: 2114322 - RNA, 19 nt, Artificial Sequence
  Description of Artificial Sequence: Synthetic oligonucleotide
  Sense strand starting at position 3684 of SEQ ID NO: 1882352
uugggagacuucuucuaaa

SEQ ID NO: 2114323 - RNA, 19 nt, Artificial Sequence
  Description of Artificial Sequence: Synthetic oligonucleotide
  Antisense strand to SEQ ID NO: 2114322
uuuagaagaagucucccaa

SEQ ID NO: 2114324 - RNA, 19 nt, Artificial Sequence
  Description of Artificial Sequence: Synthetic oligonucleotide
  Sense strand starting at position 3765 of SEQ ID NO: 1882352
guacuuuaaggucaccaaa

SEQ ID NO: 2114325 - RNA, 19 nt, Artificial Sequence
  Description of Artificial Sequence: Synthetic oligonucleotide
  Antisense strand to SEQ ID NO: 2114324
uuuggugaccuuaaaguac

SEQ ID NO: 2114326 - RNA, 19 nt, Artificial Sequence
  Description of Artificial Sequence: Synthetic oligonucleotide
  Sense strand starting at position 3851 of SEQ ID NO: 1882352
agcgcuaugcuauucugua

SEQ ID NO: 2114327 - RNA, 19 nt, Artificial Sequence
  Description of Artificial Sequence: Synthetic oligonucleotide
  Antisense strand to SEQ ID NO: 2114326
uacagaauagcauagcgcu

SEQ ID NO: 2114328 - RNA, 19 nt, Artificial Sequence
  Description of Artificial Sequence: Synthetic oligonucleotide
  Sense strand starting at position 3938 of SEQ ID NO: 1882352
uauggaaugucauuguauu

SEQ ID NO: 2114329 - RNA, 19 nt, Artificial Sequence
  Description of Artificial Sequence: Synthetic oligonucleotide
  Antisense strand to SEQ ID NO: 2114328
aauacaaugacauuccaua

SEQ ID NO: 2114330 - RNA, 19 nt, Artificial Sequence
  Description of Artificial Sequence: Synthetic oligonucleotide
  Sense strand starting at position 3983 of SEQ ID NO: 1882352
ugagucaaaggcuguauaa

SEQ ID NO: 2114331 - RNA, 19 nt, Artificial Sequence
  Description of Artificial Sequence: Synthetic oligonucleotide
  Antisense strand to SEQ ID NO: 2114330
uuauacagccuuugacuca

SEQ ID NO: 2114332 - RNA, 19 nt, Artificial Sequence
  Description of Artificial Sequence: Synthetic oligonucleotide
  Sense strand starting at position 54 of SEQ ID NO: 1882351
ccaaacuucgaguggaaua

SEQ ID NO: 2114333 - RNA, 19 nt, Artificial Sequence
  Description of Artificial Sequence: Synthetic oligonucleotide
  Antisense strand to SEQ ID NO: 2114332
uauuccacucgaaguuugg

SEQ ID NO: 2114334 - RNA, 19 nt, Artificial Sequence
  Description of Artificial Sequence: Synthetic oligonucleotide
  Sense strand starting at position 59 of SEQ ID NO: 1882351
cuucgaguggaauaucaac

SEQ ID NO: 2114335 - RNA, 19 nt, Artificial Sequence
  Description of Artificial Sequence: Synthetic oligonucleotide
  Antisense strand to SEQ ID NO: 2114334
guugauauuccacucgaag

SEQ ID NO: 2114336 - RNA, 19 nt, Artificial Sequence
  Description of Artificial Sequence: Synthetic oligonucleotide
  Sense strand starting at position 115 of SEQ ID NO: 1882351
uccacaagagauugaguuu

SEQ ID NO: 2114337 - RNA, 19 nt, Artificial Sequence
  Description of Artificial Sequence: Synthetic oligonucleotide
  Antisense strand to SEQ ID NO: 2114336
aaacucaaucucuugugga

SEQ ID NO: 2114338 - RNA, 19 nt, Artificial Sequence
  Description of Artificial Sequence: Synthetic oligonucleotide
  Sense strand starting at position 130 of SEQ ID NO: 1882351
guuuguguaguuuacauuu

SEQ ID NO: 2114339 - RNA, 19 nt, Artificial Sequence
  Description of Artificial Sequence: Synthetic oligonucleotide
  Antisense strand to SEQ ID NO: 2114338
aaauguaaacuacacaaac

SEQ ID NO: 2114340 - RNA, 19 nt, Artificial Sequence
  Description of Artificial Sequence: Synthetic oligonucleotide
  Sense strand starting at position 239 of SEQ ID NO: 1882351
ugccuuugugugucuuuaa

SEQ ID NO: 2114341 - RNA, 19 nt, Artificial Sequence
  Description of Artificial Sequence: Synthetic oligonucleotide
  Antisense strand to SEQ ID NO: 2114340
uuaaagacacacaaaggca

SEQ ID NO: 2114342 - RNA, 19 nt, Artificial Sequence
  Description of Artificial Sequence: Synthetic oligonucleotide
  Sense strand starting at position 261 of SEQ ID NO: 1882351
acguaacagauuuguguua

SEQ ID NO: 2114343 - RNA, 19 nt, Artificial Sequence
  Description of Artificial Sequence: Synthetic oligonucleotide
  Antisense strand to SEQ ID NO: 2114342
uaacacaaaucuguuacgu

SEQ ID NO: 2114344 - RNA, 19 nt, Artificial Sequence
  Description of Artificial Sequence: Synthetic oligonucleotide
  Sense strand starting at position 262 of SEQ ID NO: 1882351
cguaacagauuuguguuau

SEQ ID NO: 2114345 - RNA, 19 nt, Artificial Sequence
  Description of Artificial Sequence: Synthetic oligonucleotide
  Antisense strand to SEQ ID NO: 2114344
auaacacaaaucuguuacg

SEQ ID NO: 2114346 - RNA, 19 nt, Artificial Sequence
  Description of Artificial Sequence: Synthetic oligonucleotide
  Sense strand starting at position 361 of SEQ ID NO: 1882351
ugucuuauggcagagacaa

SEQ ID NO: 2114347 - RNA, 19 nt, Artificial Sequence
  Description of Artificial Sequence: Synthetic oligonucleotide
  Antisense strand to SEQ ID NO: 2114346
uugucucugccauaagaca

SEQ ID NO: 2114348 - RNA, 19 nt, Artificial Sequence
  Description of Artificial Sequence: Synthetic oligonucleotide
  Sense strand starting at position 733 of SEQ ID NO: 1882351
gggaaugguagguaauguu

SEQ ID NO: 2114349 - RNA, 19 nt, Artificial Sequence
  Description of Artificial Sequence: Synthetic oligonucleotide
  Antisense strand to SEQ ID NO: 2114348
aacauuaccuaccauuccc

SEQ ID NO: 2114350 - RNA, 19 nt, Artificial Sequence
  Description of Artificial Sequence: Synthetic oligonucleotide
  Sense strand starting at position 770 of SEQ ID NO: 1882351
uugggugaucuccaccaau

SEQ ID NO: 2114351 - RNA, 19 nt, Artificial Sequence
  Description of Artificial Sequence: Synthetic oligonucleotide
  Antisense strand to SEQ ID NO: 2114350
auugguggagaucacccaa

SEQ ID NO: 2114352 - RNA, 19 nt, Artificial Sequence
  Description of Artificial Sequence: Synthetic oligonucleotide
  Sense strand starting at position 873 of SEQ ID NO: 1882351
gaguaagugacuugguuaa

SEQ ID NO: 2114353 - RNA, 19 nt, Artificial Sequence
  Description of Artificial Sequence: Synthetic oligonucleotide
  Antisense strand to SEQ ID NO: 2114352
uuaaccaagucacuuacuc

SEQ ID NO: 2114354 - RNA, 19 nt, Artificial Sequence
  Description of Artificial Sequence: Synthetic oligonucleotide
  Sense strand starting at position 875 of SEQ ID NO: 1882351
guaagugacuugguuaaga

SEQ ID NO: 2114355 - RNA, 19 nt, Artificial Sequence
  Description of Artificial Sequence: Synthetic oligonucleotide
  Antisense strand to SEQ ID NO: 2114354
ucuuaaccaagucacuuac

SEQ ID NO: 2114356 - RNA, 19 nt, Artificial Sequence
  Description of Artificial Sequence: Synthetic oligonucleotide
  Sense strand starting at position 1211 of SEQ ID NO: 1882351
ccgcgugaugcaucccaaa

SEQ ID NO: 2114357 - RNA, 19 nt, Artificial Sequence
  Description of Artificial Sequence: Synthetic oligonucleotide
  Antisense strand to SEQ ID NO: 2114356
uuugggaugcaucacgcgg

SEQ ID NO: 2114358 - RNA, 19 nt, Artificial Sequence
  Description of Artificial Sequence: Synthetic oligonucleotide
  Sense strand starting at position 1610 of SEQ ID NO: 1882351
gcguggacacguucuggua

SEQ ID NO: 2114359 - RNA, 19 nt, Artificial Sequence
  Description of Artificial Sequence: Synthetic oligonucleotide
  Antisense strand to SEQ ID NO: 2114358
uaccagaacguguccacgc

SEQ ID NO: 2114360 - RNA, 19 nt, Artificial Sequence
  Description of Artificial Sequence: Synthetic oligonucleotide
  Sense strand starting at position 1656 of SEQ ID NO: 1882351
agagcucuccugggaaggu

SEQ ID NO: 2114361 - RNA, 19 nt, Artificial Sequence
  Description of Artificial Sequence: Synthetic oligonucleotide
  Antisense strand to SEQ ID NO: 2114360
accuucccaggagagcucu

SEQ ID NO: 2114362 - RNA, 19 nt, Artificial Sequence
  Description of Artificial Sequence: Synthetic oligonucleotide
  Sense strand starting at position 2489 of SEQ ID NO: 1882351
gugauauaugcauauacuu

SEQ ID NO: 2114363 - RNA, 19 nt, Artificial Sequence
  Description of Artificial Sequence: Synthetic oligonucleotide
  Antisense strand to SEQ ID NO: 2114362
aaguauaugcauauaucac

SEQ ID NO: 2114364 - RNA, 19 nt, Artificial Sequence
  Description of Artificial Sequence: Synthetic oligonucleotide
  Sense strand starting at position 2700 of SEQ ID NO: 1882351
acaguaguggcuuaauuga

SEQ ID NO: 2114365 - RNA, 19 nt, Artificial Sequence
  Description of Artificial Sequence: Synthetic oligonucleotide
  Antisense strand to SEQ ID NO: 2114364
ucaauuaagccacuacugu

SEQ ID NO: 2114366 - RNA, 19 nt, Artificial Sequence
  Description of Artificial Sequence: Synthetic oligonucleotide
  Sense strand starting at position 2739 of SEQ ID NO: 1882351
uugaacauucgggaguguu

SEQ ID NO: 2114367 - RNA, 19 nt, Artificial Sequence
  Description of Artificial Sequence: Synthetic oligonucleotide
  Antisense strand to SEQ ID NO: 2114366
aacacucccgaauguucaa

SEQ ID NO: 2114368 - RNA, 19 nt, Artificial Sequence
  Description of Artificial Sequence: Synthetic oligonucleotide
  Sense strand starting at position 2851 of SEQ ID NO: 1882351
aagggugauuaucuaaugu

SEQ ID NO: 2114369 - RNA, 19 nt, Artificial Sequence
  Description of Artificial Sequence: Synthetic oligonucleotide
  Antisense strand to SEQ ID NO: 2114368
acauuagauaaucacccuu

SEQ ID NO: 2114370 - RNA, 19 nt, Artificial Sequence
  Description of Artificial Sequence: Synthetic oligonucleotide
  Sense strand starting at position 2901 of SEQ ID NO: 1882351
agcuccuuucuuuaaagga

SEQ ID NO: 2114371 - RNA, 19 nt, Artificial Sequence
  Description of Artificial Sequence: Synthetic oligonucleotide
  Antisense strand to SEQ ID NO: 2114370
uccuuuaaagaaaggagcu

SEQ ID NO: 2114372 - RNA, 19 nt, Artificial Sequence
  Description of Artificial Sequence: Synthetic oligonucleotide
  Sense strand starting at position 2959 of SEQ ID NO: 1882351
aguugaagucaaugaaaug

SEQ ID NO: 2114373 - RNA, 19 nt, Artificial Sequence
  Description of Artificial Sequence: Synthetic oligonucleotide
  Antisense strand to SEQ ID NO: 2114372
cauuucauugacuucaacu

SEQ ID NO: 2114374 - RNA, 19 nt, Artificial Sequence
  Description of Artificial Sequence: Synthetic oligonucleotide
  Sense strand starting at position 2971 of SEQ ID NO: 1882351
ugaaaugaaugucucuuua

SEQ ID NO: 2114375 - RNA, 19 nt, Artificial Sequence
  Description of Artificial Sequence: Synthetic oligonucleotide
  Antisense strand to SEQ ID NO: 2114374
uaaagagacauucauuuca

SEQ ID NO: 2114376 - RNA, 19 nt, Artificial Sequence
  Description of Artificial Sequence: Synthetic oligonucleotide
  Sense strand starting at position 2975 of SEQ ID NO: 1882351
augaaugucucuuuagaag

SEQ ID NO: 2114377 - RNA, 19 nt, Artificial Sequence
  Description of Artificial Sequence: Synthetic oligonucleotide
  Antisense strand to SEQ ID NO: 2114376
cuucuaaagagacauucau

SEQ ID NO: 2114378 - RNA, 19 nt, Artificial Sequence
  Description of Artificial Sequence: Synthetic oligonucleotide
  Sense strand starting at position 3057 of SEQ ID NO: 1882351
gaagauuagaguggaaugu

SEQ ID NO: 2114379 - RNA, 19 nt, Artificial Sequence
  Description of Artificial Sequence: Synthetic oligonucleotide
  Antisense strand to SEQ ID NO: 2114378
acauuccacucuaaucuuc

SEQ ID NO: 2114380 - RNA, 19 nt, Artificial Sequence
  Description of Artificial Sequence: Synthetic oligonucleotide
  Sense strand starting at position 3067 of SEQ ID NO: 1882351
guggaauguguuuauauau

SEQ ID NO: 2114381 - RNA, 19 nt, Artificial Sequence
  Description of Artificial Sequence: Synthetic oligonucleotide
  Antisense strand to SEQ ID NO: 2114380
auauauaaacacauuccac

SEQ ID NO: 2114382 - RNA, 19 nt, Artificial Sequence
  Description of Artificial Sequence: Synthetic oligonucleotide
  Sense strand starting at position 3128 of SEQ ID NO: 1882351
guagcauuuauuggucugu

SEQ ID NO: 2114383 - RNA, 19 nt, Artificial Sequence
  Description of Artificial Sequence: Synthetic oligonucleotide
  Antisense strand to SEQ ID NO: 2114382
acagaccaauaaaugcuac

SEQ ID NO: 2114384 - RNA, 19 nt, Artificial Sequence
  Description of Artificial Sequence: Synthetic oligonucleotide
  Sense strand starting at position 3130 of SEQ ID NO: 1882351
agcauuuauuggucuguua

SEQ ID NO: 2114385 - RNA, 19 nt, Artificial Sequence
  Description of Artificial Sequence: Synthetic oligonucleotide
  Antisense strand to SEQ ID NO: 2114384
uaacagaccaauaaaugcu

SEQ ID NO: 2114386 - RNA, 19 nt, Artificial Sequence
  Description of Artificial Sequence: Synthetic oligonucleotide
  Sense strand starting at position 3193 of SEQ ID NO: 1882351
uucuuuacagaguauuacu

SEQ ID NO: 2114387 - RNA, 19 nt, Artificial Sequence
  Description of Artificial Sequence: Synthetic oligonucleotide
  Antisense strand to SEQ ID NO: 2114386
aguaauacucuguaaagaa

SEQ ID NO: 2114388 - RNA, 19 nt, Artificial Sequence
  Description of Artificial Sequence: Synthetic oligonucleotide
  Sense strand starting at position 3339 of SEQ ID NO: 1882351
gccguuaauaguuugcuua

SEQ ID NO: 2114389 - RNA, 19 nt, Artificial Sequence
  Description of Artificial Sequence: Synthetic oligonucleotide
  Antisense strand to SEQ ID NO: 2114388
uaagcaaacuauuaacggc

SEQ ID NO: 2114390 - RNA, 19 nt, Artificial Sequence
  Description of Artificial Sequence: Synthetic oligonucleotide
  Sense strand starting at position 3358 of SEQ ID NO: 1882351
uguugcuauuucuuaaggu

SEQ ID NO: 2114391 - RNA, 19 nt, Artificial Sequence
  Description of Artificial Sequence: Synthetic oligonucleotide
  Antisense strand to SEQ ID NO: 2114390
accuuaagaaauagcaaca

SEQ ID NO: 2114392 - RNA, 19 nt, Artificial Sequence
  Description of Artificial Sequence: Synthetic oligonucleotide
  Sense strand starting at position 3467 of SEQ ID NO: 1882351
ccuacuggaugcucauaaa

SEQ ID NO: 2114393 - RNA, 19 nt, Artificial Sequence
  Description of Artificial Sequence: Synthetic oligonucleotide
  Antisense strand to SEQ ID NO: 2114392
uuuaugagcauccaguagg

SEQ ID NO: 2114394 - RNA, 19 nt, Artificial Sequence
  Description of Artificial Sequence: Synthetic oligonucleotide
  Sense strand starting at position 3645 of SEQ ID NO: 1882351
acuguugacuuucuaggaa

SEQ ID NO: 2114395 - RNA, 19 nt, Artificial Sequence
  Description of Artificial Sequence: Synthetic oligonucleotide
  Antisense strand to SEQ ID NO: 2114394
uuccuagaaagucaacagu

SEQ ID NO: 2114396 - RNA, 19 nt, Artificial Sequence
  Description of Artificial Sequence: Synthetic oligonucleotide
  Sense strand starting at position 3657 of SEQ ID NO: 1882351
cuaggaaguuacuccuaua

SEQ ID NO: 2114397 - RNA, 19 nt, Artificial Sequence
  Description of Artificial Sequence: Synthetic oligonucleotide
  Antisense strand to SEQ ID NO: 2114396
uauaggaguaacuuccuag

SEQ ID NO: 2114398 - RNA, 19 nt, Artificial Sequence
  Description of Artificial Sequence: Synthetic oligonucleotide
  Sense strand starting at position 3779 of SEQ ID NO: 1882351
guuacagugccuucuuguu

SEQ ID NO: 2114399 - RNA, 19 nt, Artificial Sequence
  Description of Artificial Sequence: Synthetic oligonucleotide
  Antisense strand to SEQ ID NO: 2114398
aacaagaaggcacuguaac

SEQ ID NO: 2114400 - RNA, 19 nt, Artificial Sequence
  Description of Artificial Sequence: Synthetic oligonucleotide
  Sense strand starting at position 3800 of SEQ ID NO: 1882351
agguaaauagacugauucu

SEQ ID NO: 2114401 - RNA, 19 nt, Artificial Sequence
  Description of Artificial Sequence: Synthetic oligonucleotide
  Antisense strand to SEQ ID NO: 2114400
agaaucagucuauuuaccu

SEQ ID NO: 2114402 - RNA, 19 nt, Artificial Sequence
  Description of Artificial Sequence: Synthetic oligonucleotide
  Sense strand starting at position 3825 of SEQ ID NO: 1882351
cguaaauuaacagagagcu

SEQ ID NO: 2114403 - RNA, 19 nt, Artificial Sequence
  Description of Artificial Sequence: Synthetic oligonucleotide
  Antisense strand to SEQ ID NO: 2114402
agcucucuguuaauuuacg

SEQ ID NO: 2114404 - RNA, 19 nt, Artificial Sequence
  Description of Artificial Sequence: Synthetic oligonucleotide
  Sense strand starting at position 3865 of SEQ ID NO: 1882351
aguguuuaagagcaaggau

SEQ ID NO: 2114405 - RNA, 19 nt, Artificial Sequence
  Description of Artificial Sequence: Synthetic oligonucleotide
  Antisense strand to SEQ ID NO: 2114404
auccuugcucuuaaacacu

SEQ ID NO: 2114406 - RNA, 19 nt, Artificial Sequence
  Description of Artificial Sequence: Synthetic oligonucleotide
  Sense strand starting at position 3868 of SEQ ID NO: 1882351
guuuaagagcaaggauucu

SEQ ID NO: 2114407 - RNA, 19 nt, Artificial Sequence
  Description of Artificial Sequence: Synthetic oligonucleotide
  Antisense strand to SEQ ID NO: 2114406
agaauccuugcucuuaaac

SEQ ID NO: 2114408 - RNA, 19 nt, Artificial Sequence
  Description of Artificial Sequence: Synthetic oligonucleotide
  Sense strand starting at position 3919 of SEQ ID NO: 1882351
ugggauuugaggcguguca

SEQ ID NO: 2114409 - RNA, 19 nt, Artificial Sequence
  Description of Artificial Sequence: Synthetic oligonucleotide
  Antisense strand to SEQ ID NO: 2114408
ugacacgccucaaauccca

SEQ ID NO: 2114410 - RNA, 19 nt, Artificial Sequence
  Description of Artificial Sequence: Synthetic oligonucleotide
  Sense strand starting at position 3956 of SEQ ID NO: 1882351
ggaccaagcugccuaauaa

SEQ ID NO: 2114411 - RNA, 19 nt, Artificial Sequence
  Description of Artificial Sequence: Synthetic oligonucleotide
  Antisense strand to SEQ ID NO: 2114410
uuauuaggcagcuuggucc

SEQ ID NO: 2114412 - RNA, 19 nt, Artificial Sequence
  Description of Artificial Sequence: Synthetic oligonucleotide
  Sense strand starting at position 14 of SEQ ID NO: 1882353
aagaguggaucuguaaacu

SEQ ID NO: 2114413 - RNA, 19 nt, Artificial Sequence
  Description of Artificial Sequence: Synthetic oligonucleotide
  Antisense strand to SEQ ID NO: 2114412
aguuuacagauccacucuu

SEQ ID NO: 2114414 - RNA, 19 nt, Artificial Sequence
  Description of Artificial Sequence: Synthetic oligonucleotide
  Sense strand starting at position 32 of SEQ ID NO: 1882353
uacggacuuugguugauaa

SEQ ID NO: 2114415 - RNA, 19 nt, Artificial Sequence
  Description of Artificial Sequence: Synthetic oligonucleotide
  Antisense strand to SEQ ID NO: 2114414
uuaucaaccaaaguccgua

SEQ ID NO: 2114416 - RNA, 19 nt, Artificial Sequence
  Description of Artificial Sequence: Synthetic oligonucleotide
  Sense strand starting at position 33 of SEQ ID NO: 1882353
acggacuuugguugauaau

SEQ ID NO: 2114417 - RNA, 19 nt, Artificial Sequence
  Description of Artificial Sequence: Synthetic oligonucleotide
  Antisense strand to SEQ ID NO: 2114416
auuaucaaccaaaguccgu

SEQ ID NO: 2114418 - RNA, 19 nt, Artificial Sequence
  Description of Artificial Sequence: Synthetic oligonucleotide
  Sense strand starting at position 34 of SEQ ID NO: 1882353
cggacuuugguugauaaug

SEQ ID NO: 2114419 - RNA, 19 nt, Artificial Sequence
  Description of Artificial Sequence: Synthetic oligonucleotide
  Antisense strand to SEQ ID NO: 2114418
cauuaucaaccaaaguccg

SEQ ID NO: 2114420 - RNA, 19 nt, Artificial Sequence
  Description of Artificial Sequence: Synthetic oligonucleotide
  Sense strand starting at position 51 of SEQ ID NO: 1882353
uguuguguucauguagcuu

SEQ ID NO: 2114421 - RNA, 19 nt, Artificial Sequence
  Description of Artificial Sequence: Synthetic oligonucleotide
  Antisense strand to SEQ ID NO: 2114420
aagcuacaugaacacaaca

SEQ ID NO: 2114422 - RNA, 19 nt, Artificial Sequence
  Description of Artificial Sequence: Synthetic oligonucleotide
  Sense strand starting at position 98 of SEQ ID NO: 1882353
uuugauagucagggagacu

SEQ ID NO: 2114423 - RNA, 19 nt, Artificial Sequence
  Description of Artificial Sequence: Synthetic oligonucleotide
  Antisense strand to SEQ ID NO: 2114422
agucucccugacuaucaaa

SEQ ID NO: 2114424 - RNA, 19 nt, Artificial Sequence
  Description of Artificial Sequence: Synthetic oligonucleotide
  Sense strand starting at position 325 of SEQ ID NO: 1882353
cuuucuuuacuauagguua

SEQ ID NO: 2114425 - RNA, 19 nt, Artificial Sequence
  Description of Artificial Sequence: Synthetic oligonucleotide
  Antisense strand to SEQ ID NO: 2114424
uaaccuauaguaaagaaag

SEQ ID NO: 2114426 - RNA, 19 nt, Artificial Sequence
  Description of Artificial Sequence: Synthetic oligonucleotide
  Sense strand starting at position 358 of SEQ ID NO: 1882353
cuaauagaguugccaugaa

SEQ ID NO: 2114427 - RNA, 19 nt, Artificial Sequence
  Description of Artificial Sequence: Synthetic oligonucleotide
  Antisense strand to SEQ ID NO: 2114426
uucauggcaacucuauuag

SEQ ID NO: 2114428 - RNA, 19 nt, Artificial Sequence
  Description of Artificial Sequence: Synthetic oligonucleotide
  Sense strand starting at position 362 of SEQ ID NO: 1882353
uagaguugccaugaaagug

SEQ ID NO: 2114429 - RNA, 19 nt, Artificial Sequence
  Description of Artificial Sequence: Synthetic oligonucleotide
  Antisense strand to SEQ ID NO: 2114428
cacuuucauggcaacucua

SEQ ID NO: 2114430 - RNA, 19 nt, Artificial Sequence
  Description of Artificial Sequence: Synthetic oligonucleotide
  Sense strand starting at position 367 of SEQ ID NO: 1882353
uugccaugaaagugaaaug

SEQ ID NO: 2114431 - RNA, 19 nt, Artificial Sequence
  Description of Artificial Sequence: Synthetic oligonucleotide
  Antisense strand to SEQ ID NO: 2114430
cauuucacuuucauggcaa

SEQ ID NO: 2114432 - RNA, 19 nt, Artificial Sequence
  Description of Artificial Sequence: Synthetic oligonucleotide
  Sense strand starting at position 615 of SEQ ID NO: 1882353
uguucuucucaagguaaac

SEQ ID NO: 2114433 - RNA, 19 nt, Artificial Sequence
  Description of Artificial Sequence: Synthetic oligonucleotide
  Antisense strand to SEQ ID NO: 2114432
guuuaccuugagaagaaca

SEQ ID NO: 2114434 - RNA, 19 nt, Artificial Sequence
  Description of Artificial Sequence: Synthetic oligonucleotide
  Sense strand starting at position 788 of SEQ ID NO: 1882353
uauauuugguguuaggaaa

SEQ ID NO: 2114435 - RNA, 19 nt, Artificial Sequence
  Description of Artificial Sequence: Synthetic oligonucleotide
  Antisense strand to SEQ ID NO: 2114434
uuuccuaacaccaaauaua

SEQ ID NO: 2114436 - RNA, 19 nt, Artificial Sequence
  Description of Artificial Sequence: Synthetic oligonucleotide
  Sense strand starting at position 895 of SEQ ID NO: 1882353
ucauuuaguucucagauua

SEQ ID NO: 2114437 - RNA, 19 nt, Artificial Sequence
  Description of Artificial Sequence: Synthetic oligonucleotide
  Antisense strand to SEQ ID NO: 2114436
uaaucugagaacuaaauga

SEQ ID NO: 2114438 - RNA, 19 nt, Artificial Sequence
  Description of Artificial Sequence: Synthetic oligonucleotide
  Sense strand starting at position 959 of SEQ ID NO: 1882353
uugcuucuauaagcugaaa

SEQ ID NO: 2114439 - RNA, 19 nt, Artificial Sequence
  Description of Artificial Sequence: Synthetic oligonucleotide
  Antisense strand to SEQ ID NO: 2114438
uuucagcuuauagaagcaa

SEQ ID NO: 2114440 - RNA, 19 nt, Artificial Sequence
  Description of Artificial Sequence: Synthetic oligonucleotide
  Sense strand starting at position 1009 of SEQ ID NO: 1882353
auaaauagucccuguuaag

SEQ ID NO: 2114441 - RNA, 19 nt, Artificial Sequence
  Description of Artificial Sequence: Synthetic oligonucleotide
  Antisense strand to SEQ ID NO: 2114440
cuuaacagggacuauuuau

SEQ ID NO: 2114442 - RNA, 19 nt, Artificial Sequence
  Description of Artificial Sequence: Synthetic oligonucleotide
  Sense strand starting at position 1026 of SEQ ID NO: 1882353
agaugaaagucaucaguuu

SEQ ID NO: 2114443 - RNA, 19 nt, Artificial Sequence
  Description of Artificial Sequence: Synthetic oligonucleotide
  Antisense strand to SEQ ID NO: 2114442
aaacugaugacuuucaucu

SEQ ID NO: 2114444 - RNA, 19 nt, Artificial Sequence
  Description of Artificial Sequence: Synthetic oligonucleotide
  Sense strand starting at position 1032 of SEQ ID NO: 1882353
aagucaucaguuugacgaa

SEQ ID NO: 2114445 - RNA, 19 nt, Artificial Sequence
  Description of Artificial Sequence: Synthetic oligonucleotide
  Antisense strand to SEQ ID NO: 2114444
uucgucaaacugaugacuu

SEQ ID NO: 2114446 - RNA, 19 nt, Artificial Sequence
  Description of Artificial Sequence: Synthetic oligonucleotide
  Sense strand starting at position 1039 of SEQ ID NO: 1882353
caguuugacgaagauucua

SEQ ID NO: 2114447 - RNA, 19 nt, Artificial Sequence
  Description of Artificial Sequence: Synthetic oligonucleotide
  Antisense strand to SEQ ID NO: 2114446
uagaaucuucgucaaacug

SEQ ID NO: 2114448 - RNA, 19 nt, Artificial Sequence
  Description of Artificial Sequence: Synthetic oligonucleotide
  Sense strand starting at position 1103 of SEQ ID NO: 1882353
ggaugcuuuacuuggaaag

SEQ ID NO: 2114449 - RNA, 19 nt, Artificial Sequence
  Description of Artificial Sequence: Synthetic oligonucleotide
  Antisense strand to SEQ ID NO: 2114448
cuuuccaaguaaagcaucc

SEQ ID NO: 2114450 - RNA, 19 nt, Artificial Sequence
  Description of Artificial Sequence: Synthetic oligonucleotide
  Sense strand starting at position 1104 of SEQ ID NO: 1882353
gaugcuuuacuuggaaaga

SEQ ID NO: 2114451 - RNA, 19 nt, Artificial Sequence
  Description of Artificial Sequence: Synthetic oligonucleotide
  Antisense strand to SEQ ID NO: 2114450
ucuuuccaaguaaagcauc

SEQ ID NO: 2114452 - RNA, 19 nt, Artificial Sequence
  Description of Artificial Sequence: Synthetic oligonucleotide
  Sense strand starting at position 1126 of SEQ ID NO: 1882353
gggauccuggagugcauua

SEQ ID NO: 2114453 - RNA, 19 nt, Artificial Sequence
  Description of Artificial Sequence: Synthetic oligonucleotide
  Antisense strand to SEQ ID NO: 2114452
uaaugcacuccaggauccc

SEQ ID NO: 2114454 - RNA, 19 nt, Artificial Sequence
  Description of Artificial Sequence: Synthetic oligonucleotide
  Sense strand starting at position 1131 of SEQ ID NO: 1882353
ccuggagugcauuagacau

SEQ ID NO: 2114455 - RNA, 19 nt, Artificial Sequence
  Description of Artificial Sequence: Synthetic oligonucleotide
  Antisense strand to SEQ ID NO: 2114454
augucuaaugcacuccagg

SEQ ID NO: 2114456 - RNA, 19 nt, Artificial Sequence
  Description of Artificial Sequence: Synthetic oligonucleotide
  Sense strand starting at position 1384 of SEQ ID NO: 1882353
uucugaaauuguguuuaug

SEQ ID NO: 2114457 - RNA, 19 nt, Artificial Sequence
  Description of Artificial Sequence: Synthetic oligonucleotide
  Antisense strand to SEQ ID NO: 2114456
cauaaacacaauuucagaa

SEQ ID NO: 2114458 - RNA, 19 nt, Artificial Sequence
  Description of Artificial Sequence: Synthetic oligonucleotide
  Sense strand starting at position 1509 of SEQ ID NO: 1882353
guggguaagugaagaauga

SEQ ID NO: 2114459 - RNA, 19 nt, Artificial Sequence
  Description of Artificial Sequence: Synthetic oligonucleotide
  Antisense strand to SEQ ID NO: 2114458
ucauucuucacuuacccac

SEQ ID NO: 2114460 - RNA, 19 nt, Artificial Sequence
  Description of Artificial Sequence: Synthetic oligonucleotide
  Sense strand starting at position 1513 of SEQ ID NO: 1882353
guaagugaagaaugauugu

SEQ ID NO: 2114461 - RNA, 19 nt, Artificial Sequence
  Description of Artificial Sequence: Synthetic oligonucleotide
  Antisense strand to SEQ ID NO: 2114460
acaaucauucuucacuuac

SEQ ID NO: 2114462 - RNA, 19 nt, Artificial Sequence
  Description of Artificial Sequence: Synthetic oligonucleotide
  Sense strand starting at position 1552 of SEQ ID NO: 1882353
aucguaauauuguuaucag

SEQ ID NO: 2114463 - RNA, 19 nt, Artificial Sequence
  Description of Artificial Sequence: Synthetic oligonucleotide
  Antisense strand to SEQ ID NO: 2114462
cugauaacaauauuacgau

SEQ ID NO: 2114464 - RNA, 19 nt, Artificial Sequence
  Description of Artificial Sequence: Synthetic oligonucleotide
  Sense strand starting at position 1603 of SEQ ID NO: 1882353
cggcuuauuuaugcagcaa

SEQ ID NO: 2114465 - RNA, 19 nt, Artificial Sequence
  Description of Artificial Sequence: Synthetic oligonucleotide
  Antisense strand to SEQ ID NO: 2114464
uugcugcauaaauaagccg

SEQ ID NO: 2114466 - RNA, 19 nt, Artificial Sequence
  Description of Artificial Sequence: Synthetic oligonucleotide
  Sense strand starting at position 1673 of SEQ ID NO: 1882353
cucagauuggucugcacac

SEQ ID NO: 2114467 - RNA, 19 nt, Artificial Sequence
  Description of Artificial Sequence: Synthetic oligonucleotide
  Antisense strand to SEQ ID NO: 2114466
gugugcagaccaaucugag

SEQ ID NO: 2114468 - RNA, 19 nt, Artificial Sequence
  Description of Artificial Sequence: Synthetic oligonucleotide
  Sense strand starting at position 1742 of SEQ ID NO: 1882353
auucucuugccaugagacu

SEQ ID NO: 2114469 - RNA, 19 nt, Artificial Sequence
  Description of Artificial Sequence: Synthetic oligonucleotide
  Antisense strand to SEQ ID NO: 2114468
agucucauggcaagagaau

SEQ ID NO: 2114470 - RNA, 19 nt, Artificial Sequence
  Description of Artificial Sequence: Synthetic oligonucleotide
  Sense strand starting at position 1808 of SEQ ID NO: 1882353
ccauuugaguugcuuuauu

SEQ ID NO: 2114471 - RNA, 19 nt, Artificial Sequence
  Description of Artificial Sequence: Synthetic oligonucleotide
  Antisense strand to SEQ ID NO: 2114470
aauaaagcaacucaaaugg

SEQ ID NO: 2114472 - RNA, 19 nt, Artificial Sequence
  Description of Artificial Sequence: Synthetic oligonucleotide
  Sense strand starting at position 1850 of SEQ ID NO: 1882353
ggguuaacuuuguugagca

SEQ ID NO: 2114473 - RNA, 19 nt, Artificial Sequence
  Description of Artificial Sequence: Synthetic oligonucleotide
  Antisense strand to SEQ ID NO: 2114472
ugcucaacaaaguuaaccc

SEQ ID NO: 2114474 - RNA, 19 nt, Artificial Sequence
  Description of Artificial Sequence: Synthetic oligonucleotide
  Sense strand starting at position 1855 of SEQ ID NO: 1882353
aacuuuguugagcaacaga

SEQ ID NO: 2114475 - RNA, 19 nt, Artificial Sequence
  Description of Artificial Sequence: Synthetic oligonucleotide
  Antisense strand to SEQ ID NO: 2114474
ucuguugcucaacaaaguu

SEQ ID NO: 2114476 - RNA, 19 nt, Artificial Sequence
  Description of Artificial Sequence: Synthetic oligonucleotide
  Sense strand starting at position 1991 of SEQ ID NO: 1882353
caggucugauggcugcaaa

SEQ ID NO: 2114477 - RNA, 19 nt, Artificial Sequence
  Description of Artificial Sequence: Synthetic oligonucleotide
  Antisense strand to SEQ ID NO: 2114476
uuugcagccaucagaccug

SEQ ID NO: 2114478 - RNA, 19 nt, Artificial Sequence
  Description of Artificial Sequence: Synthetic oligonucleotide
  Sense strand starting at position 2170 of SEQ ID NO: 1882353
ggcucagacaucugguaag

SEQ ID NO: 2114479 - RNA, 19 nt, Artificial Sequence
  Description of Artificial Sequence: Synthetic oligonucleotide
  Antisense strand to SEQ ID NO: 2114478
cuuaccagaugucugagcc

SEQ ID NO: 2114480 - RNA, 19 nt, Artificial Sequence
  Description of Artificial Sequence: Synthetic oligonucleotide
  Sense strand starting at position 2522 of SEQ ID NO: 1882353
ggagguuggcccgaugagu

SEQ ID NO: 2114481 - RNA, 19 nt, Artificial Sequence
  Description of Artificial Sequence: Synthetic oligonucleotide
  Antisense strand to SEQ ID NO: 2114480
acucaucgggccaaccucc

SEQ ID NO: 2114482 - RNA, 19 nt, Artificial Sequence
  Description of Artificial Sequence: Synthetic oligonucleotide
  Sense strand starting at position 3232 of SEQ ID NO: 1882353
gaggaugacgccugugauc

SEQ ID NO: 2114483 - RNA, 19 nt, Artificial Sequence
  Description of Artificial Sequence: Synthetic oligonucleotide
  Antisense strand to SEQ ID NO: 2114482
gaucacaggcgucauccuc

SEQ ID NO: 2114484 - RNA, 19 nt, Artificial Sequence
  Description of Artificial Sequence: Synthetic oligonucleotide
  Sense strand starting at position 3647 of SEQ ID NO: 1882353
ugaauuauagcagaaugca

SEQ ID NO: 2114485 - RNA, 19 nt, Artificial Sequence
  Description of Artificial Sequence: Synthetic oligonucleotide
  Antisense strand to SEQ ID NO: 2114484
ugcauucugcuauaauuca

SEQ ID NO: 2114486 - RNA, 19 nt, Artificial Sequence
  Description of Artificial Sequence: Synthetic oligonucleotide
  Sense strand starting at position 3682 of SEQ ID NO: 1882353
uguuucuuacaaugggaua

SEQ ID NO: 2114487 - RNA, 19 nt, Artificial Sequence
  Description of Artificial Sequence: Synthetic oligonucleotide
  Antisense strand to SEQ ID NO: 2114486
uaucccauuguaagaaaca

SEQ ID NO: 2114488 - RNA, 19 nt, Artificial Sequence
  Description of Artificial Sequence: Synthetic oligonucleotide
  Sense strand starting at position 3683 of SEQ ID NO: 1882353
guuucuuacaaugggauag

SEQ ID NO: 2114489 - RNA, 19 nt, Artificial Sequence
  Description of Artificial Sequence: Synthetic oligonucleotide
  Antisense strand to SEQ ID NO: 2114488
cuaucccauuguaagaaac

SEQ ID NO: 2114490 - RNA, 19 nt, Artificial Sequence
  Description of Artificial Sequence: Synthetic oligonucleotide
  Sense strand starting at position 3889 of SEQ ID NO: 1882353
ggcuuuaggaaauguagga

SEQ ID NO: 2114491 - RNA, 19 nt, Artificial Sequence
  Description of Artificial Sequence: Synthetic oligonucleotide
  Antisense strand to SEQ ID NO: 2114490
uccuacauuuccuaaagcc

SEQ ID NO: 2114492 - RNA, 19 nt, Artificial Sequence
  Description of Artificial Sequence: Synthetic oligonucleotide
  Sense strand starting at position 177 of SEQ ID NO: 1882354
ggaugucuuaggugacauc

SEQ ID NO: 2114493 - RNA, 19 nt, Artificial Sequence
  Description of Artificial Sequence: Synthetic oligonucleotide
  Antisense strand to SEQ ID NO: 2114492
gaugucaccuaagacaucc

SEQ ID NO: 2114494 - RNA, 19 nt, Artificial Sequence
  Description of Artificial Sequence: Synthetic oligonucleotide
  Sense strand starting at position 240 of SEQ ID NO: 1882354
uccugaagauuaucaggua

SEQ ID NO: 2114495 - RNA, 19 nt, Artificial Sequence
  Description of Artificial Sequence: Synthetic oligonucleotide
  Antisense strand to SEQ ID NO: 2114494
uaccugauaaucuucagga

SEQ ID NO: 2114496 - RNA, 19 nt, Artificial Sequence
  Description of Artificial Sequence: Synthetic oligonucleotide
  Sense strand starting at position 355 of SEQ ID NO: 1882354
aagcgccuccgucuuuaaa

SEQ ID NO: 2114497 - RNA, 19 nt, Artificial Sequence
  Description of Artificial Sequence: Synthetic oligonucleotide
  Antisense strand to SEQ ID NO: 2114496
uuuaaagacggaggcgcuu

SEQ ID NO: 2114498 - RNA, 19 nt, Artificial Sequence
  Description of Artificial Sequence: Synthetic oligonucleotide
  Sense strand starting at position 664 of SEQ ID NO: 1882354
aggaacuguuccuucuuua

SEQ ID NO: 2114499 - RNA, 19 nt, Artificial Sequence
  Description of Artificial Sequence: Synthetic oligonucleotide
  Antisense strand to SEQ ID NO: 2114498
uaaagaaggaacaguuccu

SEQ ID NO: 2114500 - RNA, 19 nt, Artificial Sequence
  Description of Artificial Sequence: Synthetic oligonucleotide
  Sense strand starting at position 744 of SEQ ID NO: 1882354
aagugaagucaaugaaugu

SEQ ID NO: 2114501 - RNA, 19 nt, Artificial Sequence
  Description of Artificial Sequence: Synthetic oligonucleotide
  Antisense strand to SEQ ID NO: 2114500
acauucauugacuucacuu

SEQ ID NO: 2114502 - RNA, 19 nt, Artificial Sequence
  Description of Artificial Sequence: Synthetic oligonucleotide
  Sense strand starting at position 745 of SEQ ID NO: 1882354
agugaagucaaugaauguu

SEQ ID NO: 2114503 - RNA, 19 nt, Artificial Sequence
  Description of Artificial Sequence: Synthetic oligonucleotide
  Antisense strand to SEQ ID NO: 2114502
aacauucauugacuucacu

SEQ ID NO: 2114504 - RNA, 19 nt, Artificial Sequence
  Description of Artificial Sequence: Synthetic oligonucleotide
  Sense strand starting at position 748 of SEQ ID NO: 1882354
gaagucaaugaauguuuau

SEQ ID NO: 2114505 - RNA, 19 nt, Artificial Sequence
  Description of Artificial Sequence: Synthetic oligonucleotide
  Antisense strand to SEQ ID NO: 2114504
auaaacauucauugacuuc

SEQ ID NO: 2114506 - RNA, 19 nt, Artificial Sequence
  Description of Artificial Sequence: Synthetic oligonucleotide
  Sense strand starting at position 757 of SEQ ID NO: 1882354
gaauguuuaugggcacaaa

SEQ ID NO: 2114507 - RNA, 19 nt, Artificial Sequence
  Description of Artificial Sequence: Synthetic oligonucleotide
  Antisense strand to SEQ ID NO: 2114506
uuugugcccauaaacauuc

SEQ ID NO: 2114508 - RNA, 19 nt, Artificial Sequence
  Description of Artificial Sequence: Synthetic oligonucleotide
  Sense strand starting at position 955 of SEQ ID NO: 1882354
auagucaucuaccuauaga

SEQ ID NO: 2114509 - RNA, 19 nt, Artificial Sequence
  Description of Artificial Sequence: Synthetic oligonucleotide
  Antisense strand to SEQ ID NO: 2114508
ucuauagguagaugacuau

SEQ ID NO: 2114510 - RNA, 19 nt, Artificial Sequence
  Description of Artificial Sequence: Synthetic oligonucleotide
  Sense strand starting at position 1070 of SEQ ID NO: 1882354
gguaaauagccauguggaa

SEQ ID NO: 2114511 - RNA, 19 nt, Artificial Sequence
  Description of Artificial Sequence: Synthetic oligonucleotide
  Antisense strand to SEQ ID NO: 2114510
uuccacauggcuauuuacc

SEQ ID NO: 2114512 - RNA, 19 nt, Artificial Sequence
  Description of Artificial Sequence: Synthetic oligonucleotide
  Sense strand starting at position 1299 of SEQ ID NO: 1882354
gcaugcauuugucuuccau

SEQ ID NO: 2114513 - RNA, 19 nt, Artificial Sequence
  Description of Artificial Sequence: Synthetic oligonucleotide
  Antisense strand to SEQ ID NO: 2114512
auggaagacaaaugcaugc

SEQ ID NO: 2114514 - RNA, 19 nt, Artificial Sequence
  Description of Artificial Sequence: Synthetic oligonucleotide
  Sense strand starting at position 1322 of SEQ ID NO: 1882354
acauaaaggccggauagua

SEQ ID NO: 2114515 - RNA, 19 nt, Artificial Sequence
  Description of Artificial Sequence: Synthetic oligonucleotide
  Antisense strand to SEQ ID NO: 2114514
uacuauccggccuuuaugu

SEQ ID NO: 2114516 - RNA, 19 nt, Artificial Sequence
  Description of Artificial Sequence: Synthetic oligonucleotide
  Sense strand starting at position 1331 of SEQ ID NO: 1882354
ccggauaguacugauggua

SEQ ID NO: 2114517 - RNA, 19 nt, Artificial Sequence
  Description of Artificial Sequence: Synthetic oligonucleotide
  Antisense strand to SEQ ID NO: 2114516
uaccaucaguacuauccgg

SEQ ID NO: 2114518 - RNA, 19 nt, Artificial Sequence
  Description of Artificial Sequence: Synthetic oligonucleotide
  Sense strand starting at position 1334 of SEQ ID NO: 1882354
gauaguacugaugguaucu

SEQ ID NO: 2114519 - RNA, 19 nt, Artificial Sequence
  Description of Artificial Sequence: Synthetic oligonucleotide
  Antisense strand to SEQ ID NO: 2114518
agauaccaucaguacuauc

SEQ ID NO: 2114520 - RNA, 19 nt, Artificial Sequence
  Description of Artificial Sequence: Synthetic oligonucleotide
  Sense strand starting at position 1343 of SEQ ID NO: 1882354
gaugguaucugcuuaagaa

SEQ ID NO: 2114521 - RNA, 19 nt, Artificial Sequence
  Description of Artificial Sequence: Synthetic oligonucleotide
  Antisense strand to SEQ ID NO: 2114520
uucuuaagcagauaccauc

SEQ ID NO: 2114522 - RNA, 19 nt, Artificial Sequence
  Description of Artificial Sequence: Synthetic oligonucleotide
  Sense strand starting at position 1344 of SEQ ID NO: 1882354
augguaucugcuuaagaac

SEQ ID NO: 2114523 - RNA, 19 nt, Artificial Sequence
  Description of Artificial Sequence: Synthetic oligonucleotide
  Antisense strand to SEQ ID NO: 2114522
guucuuaagcagauaccau

SEQ ID NO: 2114524 - RNA, 19 nt, Artificial Sequence
  Description of Artificial Sequence: Synthetic oligonucleotide
  Sense strand starting at position 1715 of SEQ ID NO: 1882354
ugggaaagacuguguauaa

SEQ ID NO: 2114525 - RNA, 19 nt, Artificial Sequence
  Description of Artificial Sequence: Synthetic oligonucleotide
  Antisense strand to SEQ ID NO: 2114524
uuauacacagucuuuccca

SEQ ID NO: 2114526 - RNA, 19 nt, Artificial Sequence
  Description of Artificial Sequence: Synthetic oligonucleotide
  Sense strand starting at position 1716 of SEQ ID NO: 1882354
gggaaagacuguguauaac

SEQ ID NO: 2114527 - RNA, 19 nt, Artificial Sequence
  Description of Artificial Sequence: Synthetic oligonucleotide
  Antisense strand to SEQ ID NO: 2114526
guuauacacagucuuuccc

SEQ ID NO: 2114528 - RNA, 19 nt, Artificial Sequence
  Description of Artificial Sequence: Synthetic oligonucleotide
  Sense strand starting at position 1756 of SEQ ID NO: 1882354
caguuugauggugacuaga

SEQ ID NO: 2114529 - RNA, 19 nt, Artificial Sequence
  Description of Artificial Sequence: Synthetic oligonucleotide
  Antisense strand to SEQ ID NO: 2114528
ucuagucaccaucaaacug

SEQ ID NO: 2114530 - RNA, 19 nt, Artificial Sequence
  Description of Artificial Sequence: Synthetic oligonucleotide
  Sense strand starting at position 1758 of SEQ ID NO: 1882354
guuugauggugacuagauu

SEQ ID NO: 2114531 - RNA, 19 nt, Artificial Sequence
  Description of Artificial Sequence: Synthetic oligonucleotide
  Antisense strand to SEQ ID NO: 2114530
aaucuagucaccaucaaac

SEQ ID NO: 2114532 - RNA, 19 nt, Artificial Sequence
  Description of Artificial Sequence: Synthetic oligonucleotide
  Sense strand starting at position 1764 of SEQ ID NO: 1882354
uggugacuagauuagaguu

SEQ ID NO: 2114533 - RNA, 19 nt, Artificial Sequence
  Description of Artificial Sequence: Synthetic oligonucleotide
  Antisense strand to SEQ ID NO: 2114532
aacucuaaucuagucacca

SEQ ID NO: 2114534 - RNA, 19 nt, Artificial Sequence
  Description of Artificial Sequence: Synthetic oligonucleotide
  Sense strand starting at position 1995 of SEQ ID NO: 1882354
ugcugaugcccauaauuga

SEQ ID NO: 2114535 - RNA, 19 nt, Artificial Sequence
  Description of Artificial Sequence: Synthetic oligonucleotide
  Antisense strand to SEQ ID NO: 2114534
ucaauuaugggcaucagca

SEQ ID NO: 2114536 - RNA, 19 nt, Artificial Sequence
  Description of Artificial Sequence: Synthetic oligonucleotide
  Sense strand starting at position 2003 of SEQ ID NO: 1882354
cccauaauugaaggcagau

SEQ ID NO: 2114537 - RNA, 19 nt, Artificial Sequence
  Description of Artificial Sequence: Synthetic oligonucleotide
  Antisense strand to SEQ ID NO: 2114536
aucugccuucaauuauggg

SEQ ID NO: 2114538 - RNA, 19 nt, Artificial Sequence
  Description of Artificial Sequence: Synthetic oligonucleotide
  Sense strand starting at position 2017 of SEQ ID NO: 1882354
cagauauuccgaggaaacc

SEQ ID NO: 2114539 - RNA, 19 nt, Artificial Sequence
  Description of Artificial Sequence: Synthetic oligonucleotide
  Antisense strand to SEQ ID NO: 2114538
gguuuccucggaauaucug

SEQ ID NO: 2114540 - RNA, 19 nt, Artificial Sequence
  Description of Artificial Sequence: Synthetic oligonucleotide
  Sense strand starting at position 2441 of SEQ ID NO: 1882354
uggugaugaccucauagug

SEQ ID NO: 2114541 - RNA, 19 nt, Artificial Sequence
  Description of Artificial Sequence: Synthetic oligonucleotide
  Antisense strand to SEQ ID NO: 2114540
cacuaugaggucaucacca

SEQ ID NO: 2114542 - RNA, 19 nt, Artificial Sequence
  Description of Artificial Sequence: Synthetic oligonucleotide
  Sense strand starting at position 2473 of SEQ ID NO: 1882354
uguuguugcauuuguggaa

SEQ ID NO: 2114543 - RNA, 19 nt, Artificial Sequence
  Description of Artificial Sequence: Synthetic oligonucleotide
  Antisense strand to SEQ ID NO: 2114542
uuccacaaaugcaacaaca

SEQ ID NO: 2114544 - RNA, 19 nt, Artificial Sequence
  Description of Artificial Sequence: Synthetic oligonucleotide
  Sense strand starting at position 2578 of SEQ ID NO: 1882354
agcucuaagacggaauagu

SEQ ID NO: 2114545 - RNA, 19 nt, Artificial Sequence
  Description of Artificial Sequence: Synthetic oligonucleotide
  Antisense strand to SEQ ID NO: 2114544
acuauuccgucuuagagcu

SEQ ID NO: 2114546 - RNA, 19 nt, Artificial Sequence
  Description of Artificial Sequence: Synthetic oligonucleotide
  Sense strand starting at position 2725 of SEQ ID NO: 1882354
cuaggugaugcuuauacca

SEQ ID NO: 2114547 - RNA, 19 nt, Artificial Sequence
  Description of Artificial Sequence: Synthetic oligonucleotide
  Antisense strand to SEQ ID NO: 2114546
ugguauaagcaucaccuag

SEQ ID NO: 2114548 - RNA, 19 nt, Artificial Sequence
  Description of Artificial Sequence: Synthetic oligonucleotide
  Sense strand starting at position 2828 of SEQ ID NO: 1882354
aggucucuauuugagagaa

SEQ ID NO: 2114549 - RNA, 19 nt, Artificial Sequence
  Description of Artificial Sequence: Synthetic oligonucleotide
  Antisense strand to SEQ ID NO: 2114548
uucucucaaauagagaccu

SEQ ID NO: 2114550 - RNA, 19 nt, Artificial Sequence
  Description of Artificial Sequence: Synthetic oligonucleotide
  Sense strand starting at position 2830 of SEQ ID NO: 1882354
gucucuauuugagagaaga

SEQ ID NO: 2114551 - RNA, 19 nt, Artificial Sequence
  Description of Artificial Sequence: Synthetic oligonucleotide
  Antisense strand to SEQ ID NO: 2114550
ucuucucucaaauagagac

SEQ ID NO: 2114552 - RNA, 19 nt, Artificial Sequence
  Description of Artificial Sequence: Synthetic oligonucleotide
  Sense strand starting at position 2900 of SEQ ID NO: 1882354
auugcauucucaucaugag

SEQ ID NO: 2114553 - RNA, 19 nt, Artificial Sequence
  Description of Artificial Sequence: Synthetic oligonucleotide
  Antisense strand to SEQ ID NO: 2114552
cucaugaugagaaugcaau

SEQ ID NO: 2114554 - RNA, 19 nt, Artificial Sequence
  Description of Artificial Sequence: Synthetic oligonucleotide
  Sense strand starting at position 2951 of SEQ ID NO: 1882354
aggcaauuggcucagggaa

SEQ ID NO: 2114555 - RNA, 19 nt, Artificial Sequence
  Description of Artificial Sequence: Synthetic oligonucleotide
  Antisense strand to SEQ ID NO: 2114554
uucccugagccaauugccu

SEQ ID NO: 2114556 - RNA, 19 nt, Artificial Sequence
  Description of Artificial Sequence: Synthetic oligonucleotide
  Sense strand starting at position 3028 of SEQ ID NO: 1882354
uagucugcugaucauaaga

SEQ ID NO: 2114557 - RNA, 19 nt, Artificial Sequence
  Description of Artificial Sequence: Synthetic oligonucleotide
  Antisense strand to SEQ ID NO: 2114556
ucuuaugaucagcagacua

SEQ ID NO: 2114558 - RNA, 19 nt, Artificial Sequence
  Description of Artificial Sequence: Synthetic oligonucleotide
  Sense strand starting at position 3262 of SEQ ID NO: 1882354
uugagauaugguuguuaag

SEQ ID NO: 2114559 - RNA, 19 nt, Artificial Sequence
  Description of Artificial Sequence: Synthetic oligonucleotide
  Antisense strand to SEQ ID NO: 2114558
cuuaacaaccauaucucaa

SEQ ID NO: 2114560 - RNA, 19 nt, Artificial Sequence
  Description of Artificial Sequence: Synthetic oligonucleotide
  Sense strand starting at position 3264 of SEQ ID NO: 1882354
gagauaugguuguuaagag

SEQ ID NO: 2114561 - RNA, 19 nt, Artificial Sequence
  Description of Artificial Sequence: Synthetic oligonucleotide
  Antisense strand to SEQ ID NO: 2114560
cucuuaacaaccauaucuc

SEQ ID NO: 2114562 - RNA, 19 nt, Artificial Sequence
  Description of Artificial Sequence: Synthetic oligonucleotide
  Sense strand starting at position 3346 of SEQ ID NO: 1882354
uccagucaucugcauauau

SEQ ID NO: 2114563 - RNA, 19 nt, Artificial Sequence
  Description of Artificial Sequence: Synthetic oligonucleotide
  Antisense strand to SEQ ID NO: 2114562
auauaugcagaugacugga

SEQ ID NO: 2114564 - RNA, 19 nt, Artificial Sequence
  Description of Artificial Sequence: Synthetic oligonucleotide
  Sense strand starting at position 3357 of SEQ ID NO: 1882354
gcauauauuccucauggca

SEQ ID NO: 2114565 - RNA, 19 nt, Artificial Sequence
  Description of Artificial Sequence: Synthetic oligonucleotide
  Antisense strand to SEQ ID NO: 2114564
ugccaugaggaauauaugc

SEQ ID NO: 2114566 - RNA, 19 nt, Artificial Sequence
  Description of Artificial Sequence: Synthetic oligonucleotide
  Sense strand starting at position 3586 of SEQ ID NO: 1882354
ugccuagauguccacacaa

SEQ ID NO: 2114567 - RNA, 19 nt, Artificial Sequence
  Description of Artificial Sequence: Synthetic oligonucleotide
  Antisense strand to SEQ ID NO: 2114566
uuguguggacaucuaggca

SEQ ID NO: 2114568 - RNA, 19 nt, Artificial Sequence
  Description of Artificial Sequence: Synthetic oligonucleotide
  Sense strand starting at position 3880 of SEQ ID NO: 1882354
uuaucuucucuuugaugga

SEQ ID NO: 2114569 - RNA, 19 nt, Artificial Sequence
  Description of Artificial Sequence: Synthetic oligonucleotide
  Antisense strand to SEQ ID NO: 2114568
uccaucaaagagaagauaa

SEQ ID NO: 2114570 - RNA, 19 nt, Artificial Sequence
  Description of Artificial Sequence: Synthetic oligonucleotide
  Sense strand starting at position 3884 of SEQ ID NO: 1882354
cuucucuuugauggaacaa

SEQ ID NO: 2114571 - RNA, 19 nt, Artificial Sequence
  Description of Artificial Sequence: Synthetic oligonucleotide
  Antisense strand to SEQ ID NO: 2114570
uuguuccaucaaagagaag

SEQ ID NO: 2114572 - RNA, 19 nt, Artificial Sequence
  Description of Artificial Sequence: Synthetic oligonucleotide
  Sense strand starting at position 469 of SEQ ID NO: 1882355
gggauaagcugaccuccua

SEQ ID NO: 2114573 - RNA, 19 nt, Artificial Sequence
  Description of Artificial Sequence: Synthetic oligonucleotide
  Antisense strand to SEQ ID NO: 2114572
uaggaggucagcuuauccc

SEQ ID NO: 2114574 - RNA, 19 nt, Artificial Sequence
  Description of Artificial Sequence: Synthetic oligonucleotide
  Sense strand starting at position 484 of SEQ ID NO: 1882355
ccuagagaucuugguggaa

SEQ ID NO: 2114575 - RNA, 19 nt, Artificial Sequence
  Description of Artificial Sequence: Synthetic oligonucleotide
  Antisense strand to SEQ ID NO: 2114574
uuccaccaagaucucuagg

SEQ ID NO: 2114576 - RNA, 19 nt, Artificial Sequence
  Description of Artificial Sequence: Synthetic oligonucleotide
  Sense strand starting at position 487 of SEQ ID NO: 1882355
agagaucuugguggaaugu

SEQ ID NO: 2114577 - RNA, 19 nt, Artificial Sequence
  Description of Artificial Sequence: Synthetic oligonucleotide
  Antisense strand to SEQ ID NO: 2114576
acauuccaccaagaucucu

SEQ ID NO: 2114578 - RNA, 19 nt, Artificial Sequence
  Description of Artificial Sequence: Synthetic oligonucleotide
  Sense strand starting at position 493 of SEQ ID NO: 1882355
cuugguggaaugugaaauc

SEQ ID NO: 2114579 - RNA, 19 nt, Artificial Sequence
  Description of Artificial Sequence: Synthetic oligonucleotide
  Antisense strand to SEQ ID NO: 2114578
gauuucacauuccaccaag

SEQ ID NO: 2114580 - RNA, 19 nt, Artificial Sequence
  Description of Artificial Sequence: Synthetic oligonucleotide
  Sense strand starting at position 505 of SEQ ID NO: 1882355
ugaaauccaucuucuugga

SEQ ID NO: 2114581 - RNA, 19 nt, Artificial Sequence
  Description of Artificial Sequence: Synthetic oligonucleotide
  Antisense strand to SEQ ID NO: 2114580
uccaagaagauggauuuca

SEQ ID NO: 2114582 - RNA, 19 nt, Artificial Sequence
  Description of Artificial Sequence: Synthetic oligonucleotide
  Sense strand starting at position 644 of SEQ ID NO: 1882355
gccugaucaguuuauacug

SEQ ID NO: 2114583 - RNA, 19 nt, Artificial Sequence
  Description of Artificial Sequence: Synthetic oligonucleotide
  Antisense strand to SEQ ID NO: 2114582
caguauaaacugaucaggc

SEQ ID NO: 2114584 - RNA, 19 nt, Artificial Sequence
  Description of Artificial Sequence: Synthetic oligonucleotide
  Sense strand starting at position 732 of SEQ ID NO: 1882355
ggugaugggcuugguauuu

SEQ ID NO: 2114585 - RNA, 19 nt, Artificial Sequence
  Description of Artificial Sequence: Synthetic oligonucleotide
  Antisense strand to SEQ ID NO: 2114584
aaauaccaagcccaucacc

SEQ ID NO: 2114586 - RNA, 19 nt, Artificial Sequence
  Description of Artificial Sequence: Synthetic oligonucleotide
  Sense strand starting at position 805 of SEQ ID NO: 1882355
aggcauacaguuuauuagu

SEQ ID NO: 2114587 - RNA, 19 nt, Artificial Sequence
  Description of Artificial Sequence: Synthetic oligonucleotide
  Antisense strand to SEQ ID NO: 2114586
acuaauaaacuguaugccu

SEQ ID NO: 2114588 - RNA, 19 nt, Artificial Sequence
  Description of Artificial Sequence: Synthetic oligonucleotide
  Sense strand starting at position 1046 of SEQ ID NO: 1882355
agcauauuauccucaaggu

SEQ ID NO: 2114589 - RNA, 19 nt, Artificial Sequence
  Description of Artificial Sequence: Synthetic oligonucleotide
  Antisense strand to SEQ ID NO: 2114588
accuugaggauaauaugcu

SEQ ID NO: 2114590 - RNA, 19 nt, Artificial Sequence
  Description of Artificial Sequence: Synthetic oligonucleotide
  Sense strand starting at position 1047 of SEQ ID NO: 1882355
gcauauuauccucaagguu

SEQ ID NO: 2114591 - RNA, 19 nt, Artificial Sequence
  Description of Artificial Sequence: Synthetic oligonucleotide
  Antisense strand to SEQ ID NO: 2114590
aaccuugaggauaauaugc

SEQ ID NO: 2114592 - RNA, 19 nt, Artificial Sequence
  Description of Artificial Sequence: Synthetic oligonucleotide
  Sense strand starting at position 1200 of SEQ ID NO: 1882355
ugaauaaugugccuaugaa

SEQ ID NO: 2114593 - RNA, 19 nt, Artificial Sequence
  Description of Artificial Sequence: Synthetic oligonucleotide
  Antisense strand to SEQ ID NO: 2114592
uucauaggcacauuauuca

SEQ ID NO: 2114594 - RNA, 19 nt, Artificial Sequence
  Description of Artificial Sequence: Synthetic oligonucleotide
  Sense strand starting at position 1210 of SEQ ID NO: 1882355
gccuaugaacgugaauaua

SEQ ID NO: 2114595 - RNA, 19 nt, Artificial Sequence
  Description of Artificial Sequence: Synthetic oligonucleotide
  Antisense strand to SEQ ID NO: 2114594
uauauucacguucauaggc

SEQ ID NO: 2114596 - RNA, 19 nt, Artificial Sequence
  Description of Artificial Sequence: Synthetic oligonucleotide
  Sense strand starting at position 1414 of SEQ ID NO: 1882355
agaguuacaggcuauauau

SEQ ID NO: 2114597 - RNA, 19 nt, Artificial Sequence
  Description of Artificial Sequence: Synthetic oligonucleotide
  Antisense strand to SEQ ID NO: 2114596
auauauagccuguaacucu

SEQ ID NO: 2114598 - RNA, 19 nt, Artificial Sequence
  Description of Artificial Sequence: Synthetic oligonucleotide
  Sense strand starting at position 1476 of SEQ ID NO: 1882355
ucucauuagcuuuggaaac

SEQ ID NO: 2114599 - RNA, 19 nt, Artificial Sequence
  Description of Artificial Sequence: Synthetic oligonucleotide
  Antisense strand to SEQ ID NO: 2114598
guuuccaaagcuaaugaga

SEQ ID NO: 2114600 - RNA, 19 nt, Artificial Sequence
  Description of Artificial Sequence: Synthetic oligonucleotide
  Sense strand starting at position 1519 of SEQ ID NO: 1882355
gucuguuuccucuacauga

SEQ ID NO: 2114601 - RNA, 19 nt, Artificial Sequence
  Description of Artificial Sequence: Synthetic oligonucleotide
  Antisense strand to SEQ ID NO: 2114600
ucauguagaggaaacagac

SEQ ID NO: 2114602 - RNA, 19 nt, Artificial Sequence
  Description of Artificial Sequence: Synthetic oligonucleotide
  Sense strand starting at position 1521 of SEQ ID NO: 1882355
cuguuuccucuacaugaga

SEQ ID NO: 2114603 - RNA, 19 nt, Artificial Sequence
  Description of Artificial Sequence: Synthetic oligonucleotide
  Antisense strand to SEQ ID NO: 2114602
ucucauguagaggaaacag

SEQ ID NO: 2114604 - RNA, 19 nt, Artificial Sequence
  Description of Artificial Sequence: Synthetic oligonucleotide
  Sense strand starting at position 1628 of SEQ ID NO: 1882355
gcuuaugaauuuguagcua

SEQ ID NO: 2114605 - RNA, 19 nt, Artificial Sequence
  Description of Artificial Sequence: Synthetic oligonucleotide
  Antisense strand to SEQ ID NO: 2114604
uagcuacaaauucauaagc

SEQ ID NO: 2114606 - RNA, 19 nt, Artificial Sequence
  Description of Artificial Sequence: Synthetic oligonucleotide
  Sense strand starting at position 1723 of SEQ ID NO: 1882355
ucugaauaugcuuauguga

SEQ ID NO: 2114607 - RNA, 19 nt, Artificial Sequence
  Description of Artificial Sequence: Synthetic oligonucleotide
  Antisense strand to SEQ ID NO: 2114606
ucacauaagcauauucaga

SEQ ID NO: 2114608 - RNA, 19 nt, Artificial Sequence
  Description of Artificial Sequence: Synthetic oligonucleotide
  Sense strand starting at position 1726 of SEQ ID NO: 1882355
gaauaugcuuaugugagga

SEQ ID NO: 2114609 - RNA, 19 nt, Artificial Sequence
  Description of Artificial Sequence: Synthetic oligonucleotide
  Antisense strand to SEQ ID NO: 2114608
uccucacauaagcauauuc

SEQ ID NO: 2114610 - RNA, 19 nt, Artificial Sequence
  Description of Artificial Sequence: Synthetic oligonucleotide
  Sense strand starting at position 1731 of SEQ ID NO: 1882355
ugcuuaugugaggagacau

SEQ ID NO: 2114611 - RNA, 19 nt, Artificial Sequence
  Description of Artificial Sequence: Synthetic oligonucleotide
  Antisense strand to SEQ ID NO: 2114610
augucuccucacauaagca

SEQ ID NO: 2114612 - RNA, 19 nt, Artificial Sequence
  Description of Artificial Sequence: Synthetic oligonucleotide
  Sense strand starting at position 1754 of SEQ ID NO: 1882355
agaggauucuugcucagac

SEQ ID NO: 2114613 - RNA, 19 nt, Artificial Sequence
  Description of Artificial Sequence: Synthetic oligonucleotide
  Antisense strand to SEQ ID NO: 2114612
gucugagcaagaauccucu

SEQ ID NO: 2114614 - RNA, 19 nt, Artificial Sequence
  Description of Artificial Sequence: Synthetic oligonucleotide
  Sense strand starting at position 1794 of SEQ ID NO: 1882355
agauguuaaauuggaaguu

SEQ ID NO: 2114615 - RNA, 19 nt, Artificial Sequence
  Description of Artificial Sequence: Synthetic oligonucleotide
  Antisense strand to SEQ ID NO: 2114614
aacuuccaauuuaacaucu

SEQ ID NO: 2114616 - RNA, 19 nt, Artificial Sequence
  Description of Artificial Sequence: Synthetic oligonucleotide
  Sense strand starting at position 1858 of SEQ ID NO: 1882355
ggguuaagauuugggaaag

SEQ ID NO: 2114617 - RNA, 19 nt, Artificial Sequence
  Description of Artificial Sequence: Synthetic oligonucleotide
  Antisense strand to SEQ ID NO: 2114616
cuuucccaaaucuuaaccc

SEQ ID NO: 2114618 - RNA, 19 nt, Artificial Sequence
  Description of Artificial Sequence: Synthetic oligonucleotide
  Sense strand starting at position 2009 of SEQ ID NO: 1882355
acaauuauuugugaaguca

SEQ ID NO: 2114619 - RNA, 19 nt, Artificial Sequence
  Description of Artificial Sequence: Synthetic oligonucleotide
  Antisense strand to SEQ ID NO: 2114618
ugacuucacaaauaauugu

SEQ ID NO: 2114620 - RNA, 19 nt, Artificial Sequence
  Description of Artificial Sequence: Synthetic oligonucleotide
  Sense strand starting at position 2095 of SEQ ID NO: 1882355
ucaggaaauucccucugga

SEQ ID NO: 2114621 - RNA, 19 nt, Artificial Sequence
  Description of Artificial Sequence: Synthetic oligonucleotide
  Antisense strand to SEQ ID NO: 2114620
uccagagggaauuuccuga

SEQ ID NO: 2114622 - RNA, 19 nt, Artificial Sequence
  Description of Artificial Sequence: Synthetic oligonucleotide
  Sense strand starting at position 2329 of SEQ ID NO: 1882355
cugcgauaacaugaggacu

SEQ ID NO: 2114623 - RNA, 19 nt, Artificial Sequence
  Description of Artificial Sequence: Synthetic oligonucleotide
  Antisense strand to SEQ ID NO: 2114622
aguccucauguuaucgcag

SEQ ID NO: 2114624 - RNA, 19 nt, Artificial Sequence
  Description of Artificial Sequence: Synthetic oligonucleotide
  Sense strand starting at position 2536 of SEQ ID NO: 1882355
gugugaccauuugcucuau

SEQ ID NO: 2114625 - RNA, 19 nt, Artificial Sequence
  Description of Artificial Sequence: Synthetic oligonucleotide
  Antisense strand to SEQ ID NO: 2114624
auagagcaaauggucacac

SEQ ID NO: 2114626 - RNA, 19 nt, Artificial Sequence
  Description of Artificial Sequence: Synthetic oligonucleotide
  Sense strand starting at position 2754 of SEQ ID NO: 1882355
aggugacagagcuguggaa

SEQ ID NO: 2114627 - RNA, 19 nt, Artificial Sequence
  Description of Artificial Sequence: Synthetic oligonucleotide
  Antisense strand to SEQ ID NO: 2114626
uuccacagcucugucaccu

SEQ ID NO: 2114628 - RNA, 19 nt, Artificial Sequence
  Description of Artificial Sequence: Synthetic oligonucleotide
  Sense strand starting at position 2784 of SEQ ID NO: 1882355
aaagauguggccugaaagu

SEQ ID NO: 2114629 - RNA, 19 nt, Artificial Sequence
  Description of Artificial Sequence: Synthetic oligonucleotide
  Antisense strand to SEQ ID NO: 2114628
acuuucaggccacaucuuu

SEQ ID NO: 2114630 - RNA, 19 nt, Artificial Sequence
  Description of Artificial Sequence: Synthetic oligonucleotide
  Sense strand starting at position 2976 of SEQ ID NO: 1882355
ugaaauaugcugcauuaga

SEQ ID NO: 2114631 - RNA, 19 nt, Artificial Sequence
  Description of Artificial Sequence: Synthetic oligonucleotide
  Antisense strand to SEQ ID NO: 2114630
ucuaaugcagcauauuuca

SEQ ID NO: 2114632 - RNA, 19 nt, Artificial Sequence
  Description of Artificial Sequence: Synthetic oligonucleotide
  Sense strand starting at position 3316 of SEQ ID NO: 1882355
aguccuauacauugacuuu

SEQ ID NO: 2114633 - RNA, 19 nt, Artificial Sequence
  Description of Artificial Sequence: Synthetic oligonucleotide
  Antisense strand to SEQ ID NO: 2114632
aaagucaauguauaggacu

SEQ ID NO: 2114634 - RNA, 19 nt, Artificial Sequence
  Description of Artificial Sequence: Synthetic oligonucleotide
  Sense strand starting at position 3559 of SEQ ID NO: 1882355
ccuuacauggagugguaaa

SEQ ID NO: 2114635 - RNA, 19 nt, Artificial Sequence
  Description of Artificial Sequence: Synthetic oligonucleotide
  Antisense strand to SEQ ID NO: 2114634
uuuaccacuccauguaagg

SEQ ID NO: 2114636 - RNA, 19 nt, Artificial Sequence
  Description of Artificial Sequence: Synthetic oligonucleotide
  Sense strand starting at position 3560 of SEQ ID NO: 1882355
cuuacauggagugguaaau

SEQ ID NO: 2114637 - RNA, 19 nt, Artificial Sequence
  Description of Artificial Sequence: Synthetic oligonucleotide
  Antisense strand to SEQ ID NO: 2114636
auuuaccacuccauguaag

SEQ ID NO: 2114638 - RNA, 19 nt, Artificial Sequence
  Description of Artificial Sequence: Synthetic oligonucleotide
  Sense strand starting at position 3571 of SEQ ID NO: 1882355
ugguaaauugcggacaucu

SEQ ID NO: 2114639 - RNA, 19 nt, Artificial Sequence
  Description of Artificial Sequence: Synthetic oligonucleotide
  Antisense strand to SEQ ID NO: 2114638
agauguccgcaauuuacca

SEQ ID NO: 2114640 - RNA, 19 nt, Artificial Sequence
  Description of Artificial Sequence: Synthetic oligonucleotide
  Sense strand starting at position 3573 of SEQ ID NO: 1882355
guaaauugcggacaucuga

SEQ ID NO: 2114641 - RNA, 19 nt, Artificial Sequence
  Description of Artificial Sequence: Synthetic oligonucleotide
  Antisense strand to SEQ ID NO: 2114640
ucagauguccgcaauuuac

SEQ ID NO: 2114642 - RNA, 19 nt, Artificial Sequence
  Description of Artificial Sequence: Synthetic oligonucleotide
  Sense strand starting at position 3693 of SEQ ID NO: 1882355
gagaaacggcucuggguaa

SEQ ID NO: 2114643 - RNA, 19 nt, Artificial Sequence
  Description of Artificial Sequence: Synthetic oligonucleotide
  Antisense strand to SEQ ID NO: 2114642
uuacccagagccguuucuc

SEQ ID NO: 2114644 - RNA, 19 nt, Artificial Sequence
  Description of Artificial Sequence: Synthetic oligonucleotide
  Sense strand starting at position 3881 of SEQ ID NO: 1882355
gcuuucuuauuagugaaau

SEQ ID NO: 2114645 - RNA, 19 nt, Artificial Sequence
  Description of Artificial Sequence: Synthetic oligonucleotide
  Antisense strand to SEQ ID NO: 2114644
auuucacuaauaagaaagc

SEQ ID NO: 2114646 - RNA, 19 nt, Artificial Sequence
  Description of Artificial Sequence: Synthetic oligonucleotide
  Sense strand starting at position 3887 of SEQ ID NO: 1882355
uuauuagugaaauguggau

SEQ ID NO: 2114647 - RNA, 19 nt, Artificial Sequence
  Description of Artificial Sequence: Synthetic oligonucleotide
  Antisense strand to SEQ ID NO: 2114646
auccacauuucacuaauaa

SEQ ID NO: 2114648 - RNA, 19 nt, Artificial Sequence
  Description of Artificial Sequence: Synthetic oligonucleotide
  Sense strand starting at position 3889 of SEQ ID NO: 1882355
auuagugaaauguggauaa

SEQ ID NO: 2114649 - RNA, 19 nt, Artificial Sequence
  Description of Artificial Sequence: Synthetic oligonucleotide
  Antisense strand to SEQ ID NO: 2114648
uuauccacauuucacuaau

SEQ ID NO: 2114650 - RNA, 19 nt, Artificial Sequence
  Description of Artificial Sequence: Synthetic oligonucleotide
  Sense strand starting at position 3969 of SEQ ID NO: 1882355
ugucauugugaugauguga

SEQ ID NO: 2114651 - RNA, 19 nt, Artificial Sequence
  Description of Artificial Sequence: Synthetic oligonucleotide
  Antisense strand to SEQ ID NO: 2114650
ucacaucaucacaaugaca

SEQ ID NO: 2114652 - RNA, 19 nt, Artificial Sequence
  Description of Artificial Sequence: Synthetic oligonucleotide
  Sense strand starting at position 96 of SEQ ID NO: 1882356
cccagucauucuguaugaa

SEQ ID NO: 2114653 - RNA, 19 nt, Artificial Sequence
  Description of Artificial Sequence: Synthetic oligonucleotide
  Antisense strand to SEQ ID NO: 2114652
uucauacagaaugacuggg

SEQ ID NO: 2114654 - RNA, 19 nt, Artificial Sequence
  Description of Artificial Sequence: Synthetic oligonucleotide
  Sense strand starting at position 97 of SEQ ID NO: 1882356
ccagucauucuguaugaau

SEQ ID NO: 2114655 - RNA, 19 nt, Artificial Sequence
  Description of Artificial Sequence: Synthetic oligonucleotide
  Antisense strand to SEQ ID NO: 2114654
auucauacagaaugacugg

SEQ ID NO: 2114656 - RNA, 19 nt, Artificial Sequence
  Description of Artificial Sequence: Synthetic oligonucleotide
  Sense strand starting at position 99 of SEQ ID NO: 1882356
agucauucuguaugaaucu

SEQ ID NO: 2114657 - RNA, 19 nt, Artificial Sequence
  Description of Artificial Sequence: Synthetic oligonucleotide
  Antisense strand to SEQ ID NO: 2114656
agauucauacagaaugacu

SEQ ID NO: 2114658 - RNA, 19 nt, Artificial Sequence
  Description of Artificial Sequence: Synthetic oligonucleotide
  Sense strand starting at position 108 of SEQ ID NO: 1882356
guaugaaucuaaguugacu

SEQ ID NO: 2114659 - RNA, 19 nt, Artificial Sequence
  Description of Artificial Sequence: Synthetic oligonucleotide
  Antisense strand to SEQ ID NO: 2114658
agucaacuuagauucauac

SEQ ID NO: 2114660 - RNA, 19 nt, Artificial Sequence
  Description of Artificial Sequence: Synthetic oligonucleotide
  Sense strand starting at position 205 of SEQ ID NO: 1882356
uuuggcuguguuuaucauu

SEQ ID NO: 2114661 - RNA, 19 nt, Artificial Sequence
  Description of Artificial Sequence: Synthetic oligonucleotide
  Antisense strand to SEQ ID NO: 2114660
aaugauaaacacagccaaa

SEQ ID NO: 2114662 - RNA, 19 nt, Artificial Sequence
  Description of Artificial Sequence: Synthetic oligonucleotide
  Sense strand starting at position 210 of SEQ ID NO: 1882356
cuguguuuaucauugacac

SEQ ID NO: 2114663 - RNA, 19 nt, Artificial Sequence
  Description of Artificial Sequence: Synthetic oligonucleotide
  Antisense strand to SEQ ID NO: 2114662
gugucaaugauaaacacag

SEQ ID NO: 2114664 - RNA, 19 nt, Artificial Sequence
  Description of Artificial Sequence: Synthetic oligonucleotide
  Sense strand starting at position 211 of SEQ ID NO: 1882356
uguguuuaucauugacacc

SEQ ID NO: 2114665 - RNA, 19 nt, Artificial Sequence
  Description of Artificial Sequence: Synthetic oligonucleotide
  Antisense strand to SEQ ID NO: 2114664
ggugucaaugauaaacaca

SEQ ID NO: 2114666 - RNA, 19 nt, Artificial Sequence
  Description of Artificial Sequence: Synthetic oligonucleotide
  Sense strand starting at position 252 of SEQ ID NO: 1882356
uugguuucucaagaagcca

SEQ ID NO: 2114667 - RNA, 19 nt, Artificial Sequence
  Description of Artificial Sequence: Synthetic oligonucleotide
  Antisense strand to SEQ ID NO: 2114666
uggcuucuugagaaaccaa

SEQ ID NO: 2114668 - RNA, 19 nt, Artificial Sequence
  Description of Artificial Sequence: Synthetic oligonucleotide
  Sense strand starting at position 395 of SEQ ID NO: 1882356
uagcauuagugaucaggaa

SEQ ID NO: 2114669 - RNA, 19 nt, Artificial Sequence
  Description of Artificial Sequence: Synthetic oligonucleotide
  Antisense strand to SEQ ID NO: 2114668
uuccugaucacuaaugcua

SEQ ID NO: 2114670 - RNA, 19 nt, Artificial Sequence
  Description of Artificial Sequence: Synthetic oligonucleotide
  Sense strand starting at position 614 of SEQ ID NO: 1882356
cucauauaaguguacucau

SEQ ID NO: 2114671 - RNA, 19 nt, Artificial Sequence
  Description of Artificial Sequence: Synthetic oligonucleotide
  Antisense strand to SEQ ID NO: 2114670
augaguacacuuauaugag

SEQ ID NO: 2114672 - RNA, 19 nt, Artificial Sequence
  Description of Artificial Sequence: Synthetic oligonucleotide
  Sense strand starting at position 764 of SEQ ID NO: 1882356
gcacguuugguuuauacau

SEQ ID NO: 2114673 - RNA, 19 nt, Artificial Sequence
  Description of Artificial Sequence: Synthetic oligonucleotide
  Antisense strand to SEQ ID NO: 2114672
auguauaaaccaaacgugc

SEQ ID NO: 2114674 - RNA, 19 nt, Artificial Sequence
  Description of Artificial Sequence: Synthetic oligonucleotide
  Sense strand starting at position 783 of SEQ ID NO: 1882356
ucagcugucaaugaacguu

SEQ ID NO: 2114675 - RNA, 19 nt, Artificial Sequence
  Description of Artificial Sequence: Synthetic oligonucleotide
  Antisense strand to SEQ ID NO: 2114674
aacguucauugacagcuga

SEQ ID NO: 2114676 - RNA, 19 nt, Artificial Sequence
  Description of Artificial Sequence: Synthetic oligonucleotide
  Sense strand starting at position 888 of SEQ ID NO: 1882356
ucacuuuauuguguuauac

SEQ ID NO: 2114677 - RNA, 19 nt, Artificial Sequence
  Description of Artificial Sequence: Synthetic oligonucleotide
  Antisense strand to SEQ ID NO: 2114676
guauaacacaauaaaguga

SEQ ID NO: 2114678 - RNA, 19 nt, Artificial Sequence
  Description of Artificial Sequence: Synthetic oligonucleotide
  Sense strand starting at position 943 of SEQ ID NO: 1882356
uugguaguccugcaucaaa

SEQ ID NO: 2114679 - RNA, 19 nt, Artificial Sequence
  Description of Artificial Sequence: Synthetic oligonucleotide
  Antisense strand to SEQ ID NO: 2114678
uuugaugcaggacuaccaa

SEQ ID NO: 2114680 - RNA, 19 nt, Artificial Sequence
  Description of Artificial Sequence: Synthetic oligonucleotide
  Sense strand starting at position 946 of SEQ ID NO: 1882356
guaguccugcaucaaauaa

SEQ ID NO: 2114681 - RNA, 19 nt, Artificial Sequence
  Description of Artificial Sequence: Synthetic oligonucleotide
  Antisense strand to SEQ ID NO: 2114680
uuauuugaugcaggacuac

SEQ ID NO: 2114682 - RNA, 19 nt, Artificial Sequence
  Description of Artificial Sequence: Synthetic oligonucleotide
  Sense strand starting at position 957 of SEQ ID NO: 1882356
ucaaauaagucucuuagga

SEQ ID NO: 2114683 - RNA, 19 nt, Artificial Sequence
  Description of Artificial Sequence: Synthetic oligonucleotide
  Antisense strand to SEQ ID NO: 2114682
uccuaagagacuuauuuga

SEQ ID NO: 2114684 - RNA, 19 nt, Artificial Sequence
  Description of Artificial Sequence: Synthetic oligonucleotide
  Sense strand starting at position 1073 of SEQ ID NO: 1882356
acuuguuacagugaccagu

SEQ ID NO: 2114685 - RNA, 19 nt, Artificial Sequence
  Description of Artificial Sequence: Synthetic oligonucleotide
  Antisense strand to SEQ ID NO: 2114684
acuggucacuguaacaagu

SEQ ID NO: 2114686 - RNA, 19 nt, Artificial Sequence
  Description of Artificial Sequence: Synthetic oligonucleotide
  Sense strand starting at position 1086 of SEQ ID NO: 1882356
accagugaucccugauguc

SEQ ID NO: 2114687 - RNA, 19 nt, Artificial Sequence
  Description of Artificial Sequence: Synthetic oligonucleotide
  Antisense strand to SEQ ID NO: 2114686
gacaucagggaucacuggu

SEQ ID NO: 2114688 - RNA, 19 nt, Artificial Sequence
  Description of Artificial Sequence: Synthetic oligonucleotide
  Sense strand starting at position 1095 of SEQ ID NO: 1882356
cccugaugucacuauugua

SEQ ID NO: 2114689 - RNA, 19 nt, Artificial Sequence
  Description of Artificial Sequence: Synthetic oligonucleotide
  Antisense strand to SEQ ID NO: 2114688
uacaauagugacaucaggg

SEQ ID NO: 2114690 - RNA, 19 nt, Artificial Sequence
  Description of Artificial Sequence: Synthetic oligonucleotide
  Sense strand starting at position 1181 of SEQ ID NO: 1882356
uugugacugcuccaacaau

SEQ ID NO: 2114691 - RNA, 19 nt, Artificial Sequence
  Description of Artificial Sequence: Synthetic oligonucleotide
  Antisense strand to SEQ ID NO: 2114690
auuguuggagcagucacaa

SEQ ID NO: 2114692 - RNA, 19 nt, Artificial Sequence
  Description of Artificial Sequence: Synthetic oligonucleotide
  Sense strand starting at position 1256 of SEQ ID NO: 1882356
uugaaauuaggccaaguca

SEQ ID NO: 2114693 - RNA, 19 nt, Artificial Sequence
  Description of Artificial Sequence: Synthetic oligonucleotide
  Antisense strand to SEQ ID NO: 2114692
ugacuuggccuaauuucaa

SEQ ID NO: 2114694 - RNA, 19 nt, Artificial Sequence
  Description of Artificial Sequence: Synthetic oligonucleotide
  Sense strand starting at position 1381 of SEQ ID NO: 1882356
acagcugagauaggucaaa

SEQ ID NO: 2114695 - RNA, 19 nt, Artificial Sequence
  Description of Artificial Sequence: Synthetic oligonucleotide
  Antisense strand to SEQ ID NO: 2114694
uuugaccuaucucagcugu

SEQ ID NO: 2114696 - RNA, 19 nt, Artificial Sequence
  Description of Artificial Sequence: Synthetic oligonucleotide
  Sense strand starting at position 1407 of SEQ ID NO: 1882356
ccucuugugccaguuagca

SEQ ID NO: 2114697 - RNA, 19 nt, Artificial Sequence
  Description of Artificial Sequence: Synthetic oligonucleotide
  Antisense strand to SEQ ID NO: 2114696
ugcuaacuggcacaagagg

SEQ ID NO: 2114698 - RNA, 19 nt, Artificial Sequence
  Description of Artificial Sequence: Synthetic oligonucleotide
  Sense strand starting at position 1423 of SEQ ID NO: 1882356
gcaaguugugaaugcaaac

SEQ ID NO: 2114699 - RNA, 19 nt, Artificial Sequence
  Description of Artificial Sequence: Synthetic oligonucleotide
  Antisense strand to SEQ ID NO: 2114698
guuugcauucacaacuugc

SEQ ID NO: 2114700 - RNA, 19 nt, Artificial Sequence
  Description of Artificial Sequence: Synthetic oligonucleotide
  Sense strand starting at position 1534 of SEQ ID NO: 1882356
uuuaguagucugcauagau

SEQ ID NO: 2114701 - RNA, 19 nt, Artificial Sequence
  Description of Artificial Sequence: Synthetic oligonucleotide
  Antisense strand to SEQ ID NO: 2114700
aucuaugcagacuacuaaa

SEQ ID NO: 2114702 - RNA, 19 nt, Artificial Sequence
  Description of Artificial Sequence: Synthetic oligonucleotide
  Sense strand starting at position 1670 of SEQ ID NO: 1882356
gaaguugcuccaggagguu

SEQ ID NO: 2114703 - RNA, 19 nt, Artificial Sequence
  Description of Artificial Sequence: Synthetic oligonucleotide
  Antisense strand to SEQ ID NO: 2114702
aaccuccuggagcaacuuc

SEQ ID NO: 2114704 - RNA, 19 nt, Artificial Sequence
  Description of Artificial Sequence: Synthetic oligonucleotide
  Sense strand starting at position 2020 of SEQ ID NO: 1882356
ccgagauuucaacguugca

SEQ ID NO: 2114705 - RNA, 19 nt, Artificial Sequence
  Description of Artificial Sequence: Synthetic oligonucleotide
  Antisense strand to SEQ ID NO: 2114704
ugcaacguugaaaucucgg

SEQ ID NO: 2114706 - RNA, 19 nt, Artificial Sequence
  Description of Artificial Sequence: Synthetic oligonucleotide
  Sense strand starting at position 2231 of SEQ ID NO: 1882356
cgcccaaguagugagaaua

SEQ ID NO: 2114707 - RNA, 19 nt, Artificial Sequence
  Description of Artificial Sequence: Synthetic oligonucleotide
  Antisense strand to SEQ ID NO: 2114706
uauucucacuacuugggcg

SEQ ID NO: 2114708 - RNA, 19 nt, Artificial Sequence
  Description of Artificial Sequence: Synthetic oligonucleotide
  Sense strand starting at position 2331 of SEQ ID NO: 1882356
ugaguuuguguguauccaa

SEQ ID NO: 2114709 - RNA, 19 nt, Artificial Sequence
  Description of Artificial Sequence: Synthetic oligonucleotide
  Antisense strand to SEQ ID NO: 2114708
uuggauacacacaaacuca

SEQ ID NO: 2114710 - RNA, 19 nt, Artificial Sequence
  Description of Artificial Sequence: Synthetic oligonucleotide
  Sense strand starting at position 2715 of SEQ ID NO: 1882356
uaguuugcugcauagauga

SEQ ID NO: 2114711 - RNA, 19 nt, Artificial Sequence
  Description of Artificial Sequence: Synthetic oligonucleotide
  Antisense strand to SEQ ID NO: 2114710
ucaucuaugcagcaaacua

SEQ ID NO: 2114712 - RNA, 19 nt, Artificial Sequence
  Description of Artificial Sequence: Synthetic oligonucleotide
  Sense strand starting at position 3035 of SEQ ID NO: 1882356
agcuaucaucgaugggcau

SEQ ID NO: 2114713 - RNA, 19 nt, Artificial Sequence
  Description of Artificial Sequence: Synthetic oligonucleotide
  Antisense strand to SEQ ID NO: 2114712
augcccaucgaugauagcu

SEQ ID NO: 2114714 - RNA, 19 nt, Artificial Sequence
  Description of Artificial Sequence: Synthetic oligonucleotide
  Sense strand starting at position 3108 of SEQ ID NO: 1882356
gugcaaguaucuuuaugac

SEQ ID NO: 2114715 - RNA, 19 nt, Artificial Sequence
  Description of Artificial Sequence: Synthetic oligonucleotide
  Antisense strand to SEQ ID NO: 2114714
gucauaaagauacuugcac

SEQ ID NO: 2114716 - RNA, 19 nt, Artificial Sequence
  Description of Artificial Sequence: Synthetic oligonucleotide
  Sense strand starting at position 3182 of SEQ ID NO: 1882356
ugguaauucugcuucuaaa

SEQ ID NO: 2114717 - RNA, 19 nt, Artificial Sequence
  Description of Artificial Sequence: Synthetic oligonucleotide
  Antisense strand to SEQ ID NO: 2114716
uuuagaagcagaauuacca

SEQ ID NO: 2114718 - RNA, 19 nt, Artificial Sequence
  Description of Artificial Sequence: Synthetic oligonucleotide
  Sense strand starting at position 3192 of SEQ ID NO: 1882356
gcuucuaaaucacugagga

SEQ ID NO: 2114719 - RNA, 19 nt, Artificial Sequence
  Description of Artificial Sequence: Synthetic oligonucleotide
  Antisense strand to SEQ ID NO: 2114718
uccucagugauuuagaagc

SEQ ID NO: 2114720 - RNA, 19 nt, Artificial Sequence
  Description of Artificial Sequence: Synthetic oligonucleotide
  Sense strand starting at position 3379 of SEQ ID NO: 1882356
uuucucuaaggaugauuga

SEQ ID NO: 2114721 - RNA, 19 nt, Artificial Sequence
  Description of Artificial Sequence: Synthetic oligonucleotide
  Antisense strand to SEQ ID NO: 2114720
ucaaucauccuuagagaaa

SEQ ID NO: 2114722 - RNA, 19 nt, Artificial Sequence
  Description of Artificial Sequence: Synthetic oligonucleotide
  Sense strand starting at position 3465 of SEQ ID NO: 1882356
guccuuugcucacuauuua

SEQ ID NO: 2114723 - RNA, 19 nt, Artificial Sequence
  Description of Artificial Sequence: Synthetic oligonucleotide
  Antisense strand to SEQ ID NO: 2114722
uaaauagugagcaaaggac

SEQ ID NO: 2114724 - RNA, 19 nt, Artificial Sequence
  Description of Artificial Sequence: Synthetic oligonucleotide
  Sense strand starting at position 3514 of SEQ ID NO: 1882356
ugucuaacuuccuuguaga

SEQ ID NO: 2114725 - RNA, 19 nt, Artificial Sequence
  Description of Artificial Sequence: Synthetic oligonucleotide
  Antisense strand to SEQ ID NO: 2114724
ucuacaaggaaguuagaca

SEQ ID NO: 2114726 - RNA, 19 nt, Artificial Sequence
  Description of Artificial Sequence: Synthetic oligonucleotide
  Sense strand starting at position 3515 of SEQ ID NO: 1882356
gucuaacuuccuuguagac

SEQ ID NO: 2114727 - RNA, 19 nt, Artificial Sequence
  Description of Artificial Sequence: Synthetic oligonucleotide
  Antisense strand to SEQ ID NO: 2114726
gucuacaaggaaguuagac

SEQ ID NO: 2114728 - RNA, 19 nt, Artificial Sequence
  Description of Artificial Sequence: Synthetic oligonucleotide
  Sense strand starting at position 3546 of SEQ ID NO: 1882356
acguuuguuagauggauaa

SEQ ID NO: 2114729 - RNA, 19 nt, Artificial Sequence
  Description of Artificial Sequence: Synthetic oligonucleotide
  Antisense strand to SEQ ID NO: 2114728
uuauccaucuaacaaacgu

SEQ ID NO: 2114730 - RNA, 19 nt, Artificial Sequence
  Description of Artificial Sequence: Synthetic oligonucleotide
  Sense strand starting at position 3725 of SEQ ID NO: 1882356
cuauguucugaaugaugua

SEQ ID NO: 2114731 - RNA, 19 nt, Artificial Sequence
  Description of Artificial Sequence: Synthetic oligonucleotide
  Antisense strand to SEQ ID NO: 2114730
uacaucauucagaacauag

SEQ ID NO: 2114732 - RNA, 19 nt, Artificial Sequence
  Description of Artificial Sequence: Synthetic oligonucleotide
  Sense strand starting at position 98 of SEQ ID NO: 1882357
ugcuauauccucuagagau

SEQ ID NO: 2114733 - RNA, 19 nt, Artificial Sequence
  Description of Artificial Sequence: Synthetic oligonucleotide
  Antisense strand to SEQ ID NO: 2114732
aucucuagaggauauagca

SEQ ID NO: 2114734 - RNA, 19 nt, Artificial Sequence
  Description of Artificial Sequence: Synthetic oligonucleotide
  Sense strand starting at position 151 of SEQ ID NO: 1882357
acugcacaugauugaauaa

SEQ ID NO: 2114735 - RNA, 19 nt, Artificial Sequence
  Description of Artificial Sequence: Synthetic oligonucleotide
  Antisense strand to SEQ ID NO: 2114734
uuauucaaucaugugcagu

SEQ ID NO: 2114736 - RNA, 19 nt, Artificial Sequence
  Description of Artificial Sequence: Synthetic oligonucleotide
  Sense strand starting at position 195 of SEQ ID NO: 1882357
ucuguaauacaucaugcga

SEQ ID NO: 2114737 - RNA, 19 nt, Artificial Sequence
  Description of Artificial Sequence: Synthetic oligonucleotide
  Antisense strand to SEQ ID NO: 2114736
ucgcaugauguauuacaga

SEQ ID NO: 2114738 - RNA, 19 nt, Artificial Sequence
  Description of Artificial Sequence: Synthetic oligonucleotide
  Sense strand starting at position 395 of SEQ ID NO: 1882357
uagauagaacuguguaaag

SEQ ID NO: 2114739 - RNA, 19 nt, Artificial Sequence
  Description of Artificial Sequence: Synthetic oligonucleotide
  Antisense strand to SEQ ID NO: 2114738
cuuuacacaguucuaucua

SEQ ID NO: 2114740 - RNA, 19 nt, Artificial Sequence
  Description of Artificial Sequence: Synthetic oligonucleotide
  Sense strand starting at position 418 of SEQ ID NO: 1882357
acggaucauugauucucau

SEQ ID NO: 2114741 - RNA, 19 nt, Artificial Sequence
  Description of Artificial Sequence: Synthetic oligonucleotide
  Antisense strand to SEQ ID NO: 2114740
augagaaucaaugauccgu

SEQ ID NO: 2114742 - RNA, 19 nt, Artificial Sequence
  Description of Artificial Sequence: Synthetic oligonucleotide
  Sense strand starting at position 501 of SEQ ID NO: 1882357
uccuuauaagguggaaauu

SEQ ID NO: 2114743 - RNA, 19 nt, Artificial Sequence
  Description of Artificial Sequence: Synthetic oligonucleotide
  Antisense strand to SEQ ID NO: 2114742
aauuuccaccuuauaagga

SEQ ID NO: 2114744 - RNA, 19 nt, Artificial Sequence
  Description of Artificial Sequence: Synthetic oligonucleotide
  Sense strand starting at position 615 of SEQ ID NO: 1882357
aauugaugugcccaaguau

SEQ ID NO: 2114745 - RNA, 19 nt, Artificial Sequence
  Description of Artificial Sequence: Synthetic oligonucleotide
  Antisense strand to SEQ ID NO: 2114744
auacuugggcacaucaauu

SEQ ID NO: 2114746 - RNA, 19 nt, Artificial Sequence
  Description of Artificial Sequence: Synthetic oligonucleotide
  Sense strand starting at position 753 of SEQ ID NO: 1882357
cucauuccuguugagauca

SEQ ID NO: 2114747 - RNA, 19 nt, Artificial Sequence
  Description of Artificial Sequence: Synthetic oligonucleotide
  Antisense strand to SEQ ID NO: 2114746
ugaucucaacaggaaugag

SEQ ID NO: 2114748 - RNA, 19 nt, Artificial Sequence
  Description of Artificial Sequence: Synthetic oligonucleotide
  Sense strand starting at position 763 of SEQ ID NO: 1882357
uugagaucaagccagugau

SEQ ID NO: 2114749 - RNA, 19 nt, Artificial Sequence
  Description of Artificial Sequence: Synthetic oligonucleotide
  Antisense strand to SEQ ID NO: 2114748
aucacuggcuugaucucaa

SEQ ID NO: 2114750 - RNA, 19 nt, Artificial Sequence
  Description of Artificial Sequence: Synthetic oligonucleotide
  Sense strand starting at position 766 of SEQ ID NO: 1882357
agaucaagccagugauuga

SEQ ID NO: 2114751 - RNA, 19 nt, Artificial Sequence
  Description of Artificial Sequence: Synthetic oligonucleotide
  Antisense strand to SEQ ID NO: 2114750
ucaaucacuggcuugaucu

SEQ ID NO: 2114752 - RNA, 19 nt, Artificial Sequence
  Description of Artificial Sequence: Synthetic oligonucleotide
  Sense strand starting at position 769 of SEQ ID NO: 1882357
ucaagccagugauugagau

SEQ ID NO: 2114753 - RNA, 19 nt, Artificial Sequence
  Description of Artificial Sequence: Synthetic oligonucleotide
  Antisense strand to SEQ ID NO: 2114752
aucucaaucacuggcuuga

SEQ ID NO: 2114754 - RNA, 19 nt, Artificial Sequence
  Description of Artificial Sequence: Synthetic oligonucleotide
  Sense strand starting at position 770 of SEQ ID NO: 1882357
caagccagugauugagauu

SEQ ID NO: 2114755 - RNA, 19 nt, Artificial Sequence
  Description of Artificial Sequence: Synthetic oligonucleotide
  Antisense strand to SEQ ID NO: 2114754
aaucucaaucacuggcuug

SEQ ID NO: 2114756 - RNA, 19 nt, Artificial Sequence
  Description of Artificial Sequence: Synthetic oligonucleotide
  Sense strand starting at position 781 of SEQ ID NO: 1882357
uugagauuaggauggaugu

SEQ ID NO: 2114757 - RNA, 19 nt, Artificial Sequence
  Description of Artificial Sequence: Synthetic oligonucleotide
  Antisense strand to SEQ ID NO: 2114756
acauccauccuaaucucaa

SEQ ID NO: 2114758 - RNA, 19 nt, Artificial Sequence
  Description of Artificial Sequence: Synthetic oligonucleotide
  Sense strand starting at position 958 of SEQ ID NO: 1882357
acggguguccuggaaauag

SEQ ID NO: 2114759 - RNA, 19 nt, Artificial Sequence
  Description of Artificial Sequence: Synthetic oligonucleotide
  Antisense strand to SEQ ID NO: 2114758
cuauuuccaggacacccgu

SEQ ID NO: 2114760 - RNA, 19 nt, Artificial Sequence
  Description of Artificial Sequence: Synthetic oligonucleotide
  Sense strand starting at position 1002 of SEQ ID NO: 1882357
uuggcaauuguagaguaau

SEQ ID NO: 2114761 - RNA, 19 nt, Artificial Sequence
  Description of Artificial Sequence: Synthetic oligonucleotide
  Antisense strand to SEQ ID NO: 2114760
auuacucuacaauugccaa

SEQ ID NO: 2114762 - RNA, 19 nt, Artificial Sequence
  Description of Artificial Sequence: Synthetic oligonucleotide
  Sense strand starting at position 1135 of SEQ ID NO: 1882357
ggaagaaauuaugaauaca

SEQ ID NO: 2114763 - RNA, 19 nt, Artificial Sequence
  Description of Artificial Sequence: Synthetic oligonucleotide
  Antisense strand to SEQ ID NO: 2114762
uguauucauaauuucuucc

SEQ ID NO: 2114764 - RNA, 19 nt, Artificial Sequence
  Description of Artificial Sequence: Synthetic oligonucleotide
  Sense strand starting at position 1158 of SEQ ID NO: 1882357
cagagagguuaccuuguga

SEQ ID NO: 2114765 - RNA, 19 nt, Artificial Sequence
  Description of Artificial Sequence: Synthetic oligonucleotide
  Antisense strand to SEQ ID NO: 2114764
ucacaagguaaccucucug

SEQ ID NO: 2114766 - RNA, 19 nt, Artificial Sequence
  Description of Artificial Sequence: Synthetic oligonucleotide
  Sense strand starting at position 1309 of SEQ ID NO: 1882357
ugagaagucuugucugaug

SEQ ID NO: 2114767 - RNA, 19 nt, Artificial Sequence
  Description of Artificial Sequence: Synthetic oligonucleotide
  Antisense strand to SEQ ID NO: 2114766
caucagacaagacuucuca

SEQ ID NO: 2114768 - RNA, 19 nt, Artificial Sequence
  Description of Artificial Sequence: Synthetic oligonucleotide
  Sense strand starting at position 1374 of SEQ ID NO: 1882357
auuuaaucuuaugagagga

SEQ ID NO: 2114769 - RNA, 19 nt, Artificial Sequence
  Description of Artificial Sequence: Synthetic oligonucleotide
  Antisense strand to SEQ ID NO: 2114768
uccucucauaagauuaaau

SEQ ID NO: 2114770 - RNA, 19 nt, Artificial Sequence
  Description of Artificial Sequence: Synthetic oligonucleotide
  Sense strand starting at position 1460 of SEQ ID NO: 1882357
aagcacaaagguugucaaa

SEQ ID NO: 2114771 - RNA, 19 nt, Artificial Sequence
  Description of Artificial Sequence: Synthetic oligonucleotide
  Antisense strand to SEQ ID NO: 2114770
uuugacaaccuuugugcuu

SEQ ID NO: 2114772 - RNA, 19 nt, Artificial Sequence
  Description of Artificial Sequence: Synthetic oligonucleotide
  Sense strand starting at position 1462 of SEQ ID NO: 1882357
gcacaaagguugucaaaga

SEQ ID NO: 2114773 - RNA, 19 nt, Artificial Sequence
  Description of Artificial Sequence: Synthetic oligonucleotide
  Antisense strand to SEQ ID NO: 2114772
ucuuugacaaccuuugugc

SEQ ID NO: 2114774 - RNA, 19 nt, Artificial Sequence
  Description of Artificial Sequence: Synthetic oligonucleotide
  Sense strand starting at position 1498 of SEQ ID NO: 1882357
ucuaaauagugaucaagcu

SEQ ID NO: 2114775 - RNA, 19 nt, Artificial Sequence
  Description of Artificial Sequence: Synthetic oligonucleotide
  Antisense strand to SEQ ID NO: 2114774
agcuugaucacuauuuaga

SEQ ID NO: 2114776 - RNA, 19 nt, Artificial Sequence
  Description of Artificial Sequence: Synthetic oligonucleotide
  Sense strand starting at position 1499 of SEQ ID NO: 1882357
cuaaauagugaucaagcua

SEQ ID NO: 2114777 - RNA, 19 nt, Artificial Sequence
  Description of Artificial Sequence: Synthetic oligonucleotide
  Antisense strand to SEQ ID NO: 2114776
uagcuugaucacuauuuag

SEQ ID NO: 2114778 - RNA, 19 nt, Artificial Sequence
  Description of Artificial Sequence: Synthetic oligonucleotide
  Sense strand starting at position 1740 of SEQ ID NO: 1882357
aagauccaccagugauagu

SEQ ID NO: 2114779 - RNA, 19 nt, Artificial Sequence
  Description of Artificial Sequence: Synthetic oligonucleotide
  Antisense strand to SEQ ID NO: 2114778
acuaucacugguggaucuu

SEQ ID NO: 2114780 - RNA, 19 nt, Artificial Sequence
  Description of Artificial Sequence: Synthetic oligonucleotide
  Sense strand starting at position 1853 of SEQ ID NO: 1882357
ggauuaugccaggaauggu

SEQ ID NO: 2114781 - RNA, 19 nt, Artificial Sequence
  Description of Artificial Sequence: Synthetic oligonucleotide
  Antisense strand to SEQ ID NO: 2114780
accauuccuggcauaaucc

SEQ ID NO: 2114782 - RNA, 19 nt, Artificial Sequence
  Description of Artificial Sequence: Synthetic oligonucleotide
  Sense strand starting at position 2068 of SEQ ID NO: 1882357
aggaucaugcauuaugcaa

SEQ ID NO: 2114783 - RNA, 19 nt, Artificial Sequence
  Description of Artificial Sequence: Synthetic oligonucleotide
  Antisense strand to SEQ ID NO: 2114782
uugcauaaugcaugauccu

SEQ ID NO: 2114784 - RNA, 19 nt, Artificial Sequence
  Description of Artificial Sequence: Synthetic oligonucleotide
  Sense strand starting at position 2208 of SEQ ID NO: 1882357
cuagauggaugucuaguuu

SEQ ID NO: 2114785 - RNA, 19 nt, Artificial Sequence
  Description of Artificial Sequence: Synthetic oligonucleotide
  Antisense strand to SEQ ID NO: 2114784
aaacuagacauccaucuag

SEQ ID NO: 2114786 - RNA, 19 nt, Artificial Sequence
  Description of Artificial Sequence: Synthetic oligonucleotide
  Sense strand starting at position 2300 of SEQ ID NO: 1882357
agucaugacaggcauguua

SEQ ID NO: 2114787 - RNA, 19 nt, Artificial Sequence
  Description of Artificial Sequence: Synthetic oligonucleotide
  Antisense strand to SEQ ID NO: 2114786
uaacaugccugucaugacu

SEQ ID NO: 2114788 - RNA, 19 nt, Artificial Sequence
  Description of Artificial Sequence: Synthetic oligonucleotide
  Sense strand starting at position 2302 of SEQ ID NO: 1882357
ucaugacaggcauguuaca

SEQ ID NO: 2114789 - RNA, 19 nt, Artificial Sequence
  Description of Artificial Sequence: Synthetic oligonucleotide
  Antisense strand to SEQ ID NO: 2114788
uguaacaugccugucauga

SEQ ID NO: 2114790 - RNA, 19 nt, Artificial Sequence
  Description of Artificial Sequence: Synthetic oligonucleotide
  Sense strand starting at position 2323 of SEQ ID NO: 1882357
ggcuucuuuguacauaaua

SEQ ID NO: 2114791 - RNA, 19 nt, Artificial Sequence
  Description of Artificial Sequence: Synthetic oligonucleotide
  Antisense strand to SEQ ID NO: 2114790
uauuauguacaaagaagcc

SEQ ID NO: 2114792 - RNA, 19 nt, Artificial Sequence
  Description of Artificial Sequence: Synthetic oligonucleotide
  Sense strand starting at position 2424 of SEQ ID NO: 1882357
ucaagagauuaguccaauu

SEQ ID NO: 2114793 - RNA, 19 nt, Artificial Sequence
  Description of Artificial Sequence: Synthetic oligonucleotide
  Antisense strand to SEQ ID NO: 2114792
aauuggacuaaucucuuga

SEQ ID NO: 2114794 - RNA, 19 nt, Artificial Sequence
  Description of Artificial Sequence: Synthetic oligonucleotide
  Sense strand starting at position 2447 of SEQ ID NO: 1882357
uuuauuagccaguaugaau

SEQ ID NO: 2114795 - RNA, 19 nt, Artificial Sequence
  Description of Artificial Sequence: Synthetic oligonucleotide
  Antisense strand to SEQ ID NO: 2114794
auucauacuggcuaauaaa

SEQ ID NO: 2114796 - RNA, 19 nt, Artificial Sequence
  Description of Artificial Sequence: Synthetic oligonucleotide
  Sense strand starting at position 2528 of SEQ ID NO: 1882357
acauguucaugggugagau

SEQ ID NO: 2114797 - RNA, 19 nt, Artificial Sequence
  Description of Artificial Sequence: Synthetic oligonucleotide
  Antisense strand to SEQ ID NO: 2114796
aucucacccaugaacaugu

SEQ ID NO: 2114798 - RNA, 19 nt, Artificial Sequence
  Description of Artificial Sequence: Synthetic oligonucleotide
  Sense strand starting at position 2545 of SEQ ID NO: 1882357
auggucuggcaaugaaaga

SEQ ID NO: 2114799 - RNA, 19 nt, Artificial Sequence
  Description of Artificial Sequence: Synthetic oligonucleotide
  Antisense strand to SEQ ID NO: 2114798
ucuuucauugccagaccau

SEQ ID NO: 2114800 - RNA, 19 nt, Artificial Sequence
  Description of Artificial Sequence: Synthetic oligonucleotide
  Sense strand starting at position 2779 of SEQ ID NO: 1882357
ggcauagaaugauuauucu

SEQ ID NO: 2114801 - RNA, 19 nt, Artificial Sequence
  Description of Artificial Sequence: Synthetic oligonucleotide
  Antisense strand to SEQ ID NO: 2114800
agaauaaucauucuaugcc

SEQ ID NO: 2114802 - RNA, 19 nt, Artificial Sequence
  Description of Artificial Sequence: Synthetic oligonucleotide
  Sense strand starting at position 3560 of SEQ ID NO: 1882357
gcaaauggguaacuuauga

SEQ ID NO: 2114803 - RNA, 19 nt, Artificial Sequence
  Description of Artificial Sequence: Synthetic oligonucleotide
  Antisense strand to SEQ ID NO: 2114802
ucauaaguuacccauuugc

SEQ ID NO: 2114804 - RNA, 19 nt, Artificial Sequence
  Description of Artificial Sequence: Synthetic oligonucleotide
  Sense strand starting at position 3567 of SEQ ID NO: 1882357
gguaacuuaugaccauauu

SEQ ID NO: 2114805 - RNA, 19 nt, Artificial Sequence
  Description of Artificial Sequence: Synthetic oligonucleotide
  Antisense strand to SEQ ID NO: 2114804
aauauggucauaaguuacc

SEQ ID NO: 2114806 - RNA, 19 nt, Artificial Sequence
  Description of Artificial Sequence: Synthetic oligonucleotide
  Sense strand starting at position 3626 of SEQ ID NO: 1882357
ugguuugugcauuaaacag

SEQ ID NO: 2114807 - RNA, 19 nt, Artificial Sequence
  Description of Artificial Sequence: Synthetic oligonucleotide
  Antisense strand to SEQ ID NO: 2114806
cuguuuaaugcacaaacca

SEQ ID NO: 2114808 - RNA, 19 nt, Artificial Sequence
  Description of Artificial Sequence: Synthetic oligonucleotide
  Sense strand starting at position 3752 of SEQ ID NO: 1882357
ccaauagacuguguccaua

SEQ ID NO: 2114809 - RNA, 19 nt, Artificial Sequence
  Description of Artificial Sequence: Synthetic oligonucleotide
  Antisense strand to SEQ ID NO: 2114808
uauggacacagucuauugg

SEQ ID NO: 2114810 - RNA, 19 nt, Artificial Sequence
  Description of Artificial Sequence: Synthetic oligonucleotide
  Sense strand starting at position 3912 of SEQ ID NO: 1882357
aguauagaugcugaacuau

SEQ ID NO: 2114811 - RNA, 19 nt, Artificial Sequence
  Description of Artificial Sequence: Synthetic oligonucleotide
  Antisense strand to SEQ ID NO: 2114810
auaguucagcaucuauacu

SEQ ID NO: 2114812 - RNA, 19 nt, Artificial Sequence
  Description of Artificial Sequence: Synthetic oligonucleotide
  Sense strand starting at position 322 of SEQ ID NO: 1882358
gauggaaguuguuugcaga

SEQ ID NO: 2114813 - RNA, 19 nt, Artificial Sequence
  Description of Artificial Sequence: Synthetic oligonucleotide
  Antisense strand to SEQ ID NO: 2114812
ucugcaaacaacuuccauc

SEQ ID NO: 2114814 - RNA, 19 nt, Artificial Sequence
  Description of Artificial Sequence: Synthetic oligonucleotide
  Sense strand starting at position 444 of SEQ ID NO: 1882358
uguauaggucaaugguaua

SEQ ID NO: 2114815 - RNA, 19 nt, Artificial Sequence
  Description of Artificial Sequence: Synthetic oligonucleotide
  Antisense strand to SEQ ID NO: 2114814
uauaccauugaccuauaca

SEQ ID NO: 2114816 - RNA, 19 nt, Artificial Sequence
  Description of Artificial Sequence: Synthetic oligonucleotide
  Sense strand starting at position 503 of SEQ ID NO: 1882358
aggauauacugccuugaaa

SEQ ID NO: 2114817 - RNA, 19 nt, Artificial Sequence
  Description of Artificial Sequence: Synthetic oligonucleotide
  Antisense strand to SEQ ID NO: 2114816
uuucaaggcaguauauccu

SEQ ID NO: 2114818 - RNA, 19 nt, Artificial Sequence
  Description of Artificial Sequence: Synthetic oligonucleotide
  Sense strand starting at position 533 of SEQ ID NO: 1882358
caguguuauguugaaccua

SEQ ID NO: 2114819 - RNA, 19 nt, Artificial Sequence
  Description of Artificial Sequence: Synthetic oligonucleotide
  Antisense strand to SEQ ID NO: 2114818
uagguucaacauaacacug

SEQ ID NO: 2114820 - RNA, 19 nt, Artificial Sequence
  Description of Artificial Sequence: Synthetic oligonucleotide
  Sense strand starting at position 702 of SEQ ID NO: 1882358
ugcaauguugaauagcaua

SEQ ID NO: 2114821 - RNA, 19 nt, Artificial Sequence
  Description of Artificial Sequence: Synthetic oligonucleotide
  Antisense strand to SEQ ID NO: 2114820
uaugcuauucaacauugca

SEQ ID NO: 2114822 - RNA, 19 nt, Artificial Sequence
  Description of Artificial Sequence: Synthetic oligonucleotide
  Sense strand starting at position 874 of SEQ ID NO: 1882358
aauauaugggcacauuagu

SEQ ID NO: 2114823 - RNA, 19 nt, Artificial Sequence
  Description of Artificial Sequence: Synthetic oligonucleotide
  Antisense strand to SEQ ID NO: 2114822
acuaaugugcccauauauu

SEQ ID NO: 2114824 - RNA, 19 nt, Artificial Sequence
  Description of Artificial Sequence: Synthetic oligonucleotide
  Sense strand starting at position 881 of SEQ ID NO: 1882358
gggcacauuaguggaaaua

SEQ ID NO: 2114825 - RNA, 19 nt, Artificial Sequence
  Description of Artificial Sequence: Synthetic oligonucleotide
  Antisense strand to SEQ ID NO: 2114824
uauuuccacuaaugugccc

SEQ ID NO: 2114826 - RNA, 19 nt, Artificial Sequence
  Description of Artificial Sequence: Synthetic oligonucleotide
  Sense strand starting at position 1096 of SEQ ID NO: 1882358
gaguuaaauuagguuuacu

SEQ ID NO: 2114827 - RNA, 19 nt, Artificial Sequence
  Description of Artificial Sequence: Synthetic oligonucleotide
  Antisense strand to SEQ ID NO: 2114826
aguaaaccuaauuuaacuc

SEQ ID NO: 2114828 - RNA, 19 nt, Artificial Sequence
  Description of Artificial Sequence: Synthetic oligonucleotide
  Sense strand starting at position 1167 of SEQ ID NO: 1882358
augauauaaugugcaacua

SEQ ID NO: 2114829 - RNA, 19 nt, Artificial Sequence
  Description of Artificial Sequence: Synthetic oligonucleotide
  Antisense strand to SEQ ID NO: 2114828
uaguugcacauuauaucau

SEQ ID NO: 2114830 - RNA, 19 nt, Artificial Sequence
  Description of Artificial Sequence: Synthetic oligonucleotide
  Sense strand starting at position 1814 of SEQ ID NO: 1882358
caaauccaccagugggauu

SEQ ID NO: 2114831 - RNA, 19 nt, Artificial Sequence
  Description of Artificial Sequence: Synthetic oligonucleotide
  Antisense strand to SEQ ID NO: 2114830
aaucccacugguggauuug

SEQ ID NO: 2114832 - RNA, 19 nt, Artificial Sequence
  Description of Artificial Sequence: Synthetic oligonucleotide
  Sense strand starting at position 1993 of SEQ ID NO: 1882358
acguaucugcuauaaauuc

SEQ ID NO: 2114833 - RNA, 19 nt, Artificial Sequence
  Description of Artificial Sequence: Synthetic oligonucleotide
  Antisense strand to SEQ ID NO: 2114832
gaauuuauagcagauacgu

SEQ ID NO: 2114834 - RNA, 19 nt, Artificial Sequence
  Description of Artificial Sequence: Synthetic oligonucleotide
  Sense strand starting at position 2114 of SEQ ID NO: 1882358
cuuaguucugucuauaacc

SEQ ID NO: 2114835 - RNA, 19 nt, Artificial Sequence
  Description of Artificial Sequence: Synthetic oligonucleotide
  Antisense strand to SEQ ID NO: 2114834
gguuauagacagaacuaag

SEQ ID NO: 2114836 - RNA, 19 nt, Artificial Sequence
  Description of Artificial Sequence: Synthetic oligonucleotide
  Sense strand starting at position 2122 of SEQ ID NO: 1882358
ugucuauaaccucauagua

SEQ ID NO: 2114837 - RNA, 19 nt, Artificial Sequence
  Description of Artificial Sequence: Synthetic oligonucleotide
  Antisense strand to SEQ ID NO: 2114836
uacuaugagguuauagaca

SEQ ID NO: 2114838 - RNA, 19 nt, Artificial Sequence
  Description of Artificial Sequence: Synthetic oligonucleotide
  Sense strand starting at position 2206 of SEQ ID NO: 1882358
agguauguugcugauugga

SEQ ID NO: 2114839 - RNA, 19 nt, Artificial Sequence
  Description of Artificial Sequence: Synthetic oligonucleotide
  Antisense strand to SEQ ID NO: 2114838
uccaaucagcaacauaccu

SEQ ID NO: 2114840 - RNA, 19 nt, Artificial Sequence
  Description of Artificial Sequence: Synthetic oligonucleotide
  Sense strand starting at position 2222 of SEQ ID NO: 1882358
ggagcugccauguaaauaa

SEQ ID NO: 2114841 - RNA, 19 nt, Artificial Sequence
  Description of Artificial Sequence: Synthetic oligonucleotide
  Antisense strand to SEQ ID NO: 2114840
uuauuuacauggcagcucc

SEQ ID NO: 2114842 - RNA, 19 nt, Artificial Sequence
  Description of Artificial Sequence: Synthetic oligonucleotide
  Sense strand starting at position 2401 of SEQ ID NO: 1882358
gcgacuugcaguguuugau

SEQ ID NO: 2114843 - RNA, 19 nt, Artificial Sequence
  Description of Artificial Sequence: Synthetic oligonucleotide
  Antisense strand to SEQ ID NO: 2114842
aucaaacacugcaagucgc

SEQ ID NO: 2114844 - RNA, 19 nt, Artificial Sequence
  Description of Artificial Sequence: Synthetic oligonucleotide
  Sense strand starting at position 2516 of SEQ ID NO: 1882358
ucuuguucuuugguuauuu

SEQ ID NO: 2114845 - RNA, 19 nt, Artificial Sequence
  Description of Artificial Sequence: Synthetic oligonucleotide
  Antisense strand to SEQ ID NO: 2114844
aaauaaccaaagaacaaga

SEQ ID NO: 2114846 - RNA, 19 nt, Artificial Sequence
  Description of Artificial Sequence: Synthetic oligonucleotide
  Sense strand starting at position 2528 of SEQ ID NO: 1882358
guuauuugcugauccugau

SEQ ID NO: 2114847 - RNA, 19 nt, Artificial Sequence
  Description of Artificial Sequence: Synthetic oligonucleotide
  Antisense strand to SEQ ID NO: 2114846
aucaggaucagcaaauaac

SEQ ID NO: 2114848 - RNA, 19 nt, Artificial Sequence
  Description of Artificial Sequence: Synthetic oligonucleotide
  Sense strand starting at position 2532 of SEQ ID NO: 1882358
uuugcugauccugauaaac

SEQ ID NO: 2114849 - RNA, 19 nt, Artificial Sequence
  Description of Artificial Sequence: Synthetic oligonucleotide
  Antisense strand to SEQ ID NO: 2114848
guuuaucaggaucagcaaa

SEQ ID NO: 2114850 - RNA, 19 nt, Artificial Sequence
  Description of Artificial Sequence: Synthetic oligonucleotide
  Sense strand starting at position 2791 of SEQ ID NO: 1882358
uaguuugagcugugaagaa

SEQ ID NO: 2114851 - RNA, 19 nt, Artificial Sequence
  Description of Artificial Sequence: Synthetic oligonucleotide
  Antisense strand to SEQ ID NO: 2114850
uucuucacagcucaaacua

SEQ ID NO: 2114852 - RNA, 19 nt, Artificial Sequence
  Description of Artificial Sequence: Synthetic oligonucleotide
  Sense strand starting at position 2854 of SEQ ID NO: 1882358
accugaaaguucuuauagc

SEQ ID NO: 2114853 - RNA, 19 nt, Artificial Sequence
  Description of Artificial Sequence: Synthetic oligonucleotide
  Antisense strand to SEQ ID NO: 2114852
gcuauaagaacuuucaggu

SEQ ID NO: 2114854 - RNA, 19 nt, Artificial Sequence
  Description of Artificial Sequence: Synthetic oligonucleotide
  Sense strand starting at position 2878 of SEQ ID NO: 1882358
gcaagagaaucaucccaua

SEQ ID NO: 2114855 - RNA, 19 nt, Artificial Sequence
  Description of Artificial Sequence: Synthetic oligonucleotide
  Antisense strand to SEQ ID NO: 2114854
uaugggaugauucucuugc

SEQ ID NO: 2114856 - RNA, 19 nt, Artificial Sequence
  Description of Artificial Sequence: Synthetic oligonucleotide
  Sense strand starting at position 2897 of SEQ ID NO: 1882358
guuugauggcuguagaaga

SEQ ID NO: 2114857 - RNA, 19 nt, Artificial Sequence
  Description of Artificial Sequence: Synthetic oligonucleotide
  Antisense strand to SEQ ID NO: 2114856
ucuucuacagccaucaaac

SEQ ID NO: 2114858 - RNA, 19 nt, Artificial Sequence
  Description of Artificial Sequence: Synthetic oligonucleotide
  Sense strand starting at position 2908 of SEQ ID NO: 1882358
guagaagauacaugcuaga

SEQ ID NO: 2114859 - RNA, 19 nt, Artificial Sequence
  Description of Artificial Sequence: Synthetic oligonucleotide
  Antisense strand to SEQ ID NO: 2114858
ucuagcauguaucuucuac

SEQ ID NO: 2114860 - RNA, 19 nt, Artificial Sequence
  Description of Artificial Sequence: Synthetic oligonucleotide
  Sense strand starting at position 2956 of SEQ ID NO: 1882358
augugaauaacaugggcuu

SEQ ID NO: 2114861 - RNA, 19 nt, Artificial Sequence
  Description of Artificial Sequence: Synthetic oligonucleotide
  Antisense strand to SEQ ID NO: 2114860
aagcccauguuauucacau

SEQ ID NO: 2114862 - RNA, 19 nt, Artificial Sequence
  Description of Artificial Sequence: Synthetic oligonucleotide
  Sense strand starting at position 2957 of SEQ ID NO: 1882358
ugugaauaacaugggcuua

SEQ ID NO: 2114863 - RNA, 19 nt, Artificial Sequence
  Description of Artificial Sequence: Synthetic oligonucleotide
  Antisense strand to SEQ ID NO: 2114862
uaagcccauguuauucaca

SEQ ID NO: 2114864 - RNA, 19 nt, Artificial Sequence
  Description of Artificial Sequence: Synthetic oligonucleotide
  Sense strand starting at position 2958 of SEQ ID NO: 1882358
gugaauaacaugggcuuau

SEQ ID NO: 2114865 - RNA, 19 nt, Artificial Sequence
  Description of Artificial Sequence: Synthetic oligonucleotide
  Antisense strand to SEQ ID NO: 2114864
auaagcccauguuauucac

SEQ ID NO: 2114866 - RNA, 19 nt, Artificial Sequence
  Description of Artificial Sequence: Synthetic oligonucleotide
  Sense strand starting at position 3149 of SEQ ID NO: 1882358
auugguauugucuauccca

SEQ ID NO: 2114867 - RNA, 19 nt, Artificial Sequence
  Description of Artificial Sequence: Synthetic oligonucleotide
  Antisense strand to SEQ ID NO: 2114866
ugggauagacaauaccaau

SEQ ID NO: 2114868 - RNA, 19 nt, Artificial Sequence
  Description of Artificial Sequence: Synthetic oligonucleotide
  Sense strand starting at position 3152 of SEQ ID NO: 1882358
gguauugucuaucccaaua

SEQ ID NO: 2114869 - RNA, 19 nt, Artificial Sequence
  Description of Artificial Sequence: Synthetic oligonucleotide
  Antisense strand to SEQ ID NO: 2114868
uauugggauagacaauacc

SEQ ID NO: 2114870 - RNA, 19 nt, Artificial Sequence
  Description of Artificial Sequence: Synthetic oligonucleotide
  Sense strand starting at position 3314 of SEQ ID NO: 1882358
gguggugagaugugagaaa

SEQ ID NO: 2114871 - RNA, 19 nt, Artificial Sequence
  Description of Artificial Sequence: Synthetic oligonucleotide
  Antisense strand to SEQ ID NO: 2114870
uuucucacaucucaccacc

SEQ ID NO: 2114872 - RNA, 19 nt, Artificial Sequence
  Description of Artificial Sequence: Synthetic oligonucleotide
  Sense strand starting at position 3362 of SEQ ID NO: 1882358
augacaguauuaccaucua

SEQ ID NO: 2114873 - RNA, 19 nt, Artificial Sequence
  Description of Artificial Sequence: Synthetic oligonucleotide
  Antisense strand to SEQ ID NO: 2114872
uagaugguaauacugucau

SEQ ID NO: 2114874 - RNA, 19 nt, Artificial Sequence
  Description of Artificial Sequence: Synthetic oligonucleotide
  Sense strand starting at position 3416 of SEQ ID NO: 1882358
cacuguaaggcauaugaau

SEQ ID NO: 2114875 - RNA, 19 nt, Artificial Sequence
  Description of Artificial Sequence: Synthetic oligonucleotide
  Antisense strand to SEQ ID NO: 2114874
auucauaugccuuacagug

SEQ ID NO: 2114876 - RNA, 19 nt, Artificial Sequence
  Description of Artificial Sequence: Synthetic oligonucleotide
  Sense strand starting at position 3418 of SEQ ID NO: 1882358
cuguaaggcauaugaauag

SEQ ID NO: 2114877 - RNA, 19 nt, Artificial Sequence
  Description of Artificial Sequence: Synthetic oligonucleotide
  Antisense strand to SEQ ID NO: 2114876
cuauucauaugccuuacag

SEQ ID NO: 2114878 - RNA, 19 nt, Artificial Sequence
  Description of Artificial Sequence: Synthetic oligonucleotide
  Sense strand starting at position 3523 of SEQ ID NO: 1882358
auuauauggugccuagauc

SEQ ID NO: 2114879 - RNA, 19 nt, Artificial Sequence
  Description of Artificial Sequence: Synthetic oligonucleotide
  Antisense strand to SEQ ID NO: 2114878
gaucuaggcaccauauaau

SEQ ID NO: 2114880 - RNA, 19 nt, Artificial Sequence
  Description of Artificial Sequence: Synthetic oligonucleotide
  Sense strand starting at position 3524 of SEQ ID NO: 1882358
uuauauggugccuagauca

SEQ ID NO: 2114881 - RNA, 19 nt, Artificial Sequence
  Description of Artificial Sequence: Synthetic oligonucleotide
  Antisense strand to SEQ ID NO: 2114880
ugaucuaggcaccauauaa

SEQ ID NO: 2114882 - RNA, 19 nt, Artificial Sequence
  Description of Artificial Sequence: Synthetic oligonucleotide
  Sense strand starting at position 3534 of SEQ ID NO: 1882358
ccuagaucaucuguuuaug

SEQ ID NO: 2114883 - RNA, 19 nt, Artificial Sequence
  Description of Artificial Sequence: Synthetic oligonucleotide
  Antisense strand to SEQ ID NO: 2114882
cauaaacagaugaucuagg

SEQ ID NO: 2114884 - RNA, 19 nt, Artificial Sequence
  Description of Artificial Sequence: Synthetic oligonucleotide
  Sense strand starting at position 3537 of SEQ ID NO: 1882358
agaucaucuguuuauguau

SEQ ID NO: 2114885 - RNA, 19 nt, Artificial Sequence
  Description of Artificial Sequence: Synthetic oligonucleotide
  Antisense strand to SEQ ID NO: 2114884
auacauaaacagaugaucu

SEQ ID NO: 2114886 - RNA, 19 nt, Artificial Sequence
  Description of Artificial Sequence: Synthetic oligonucleotide
  Sense strand starting at position 3853 of SEQ ID NO: 1882358
uacauagauguuuauguga

SEQ ID NO: 2114887 - RNA, 19 nt, Artificial Sequence
  Description of Artificial Sequence: Synthetic oligonucleotide
  Antisense strand to SEQ ID NO: 2114886
ucacauaaacaucuaugua

SEQ ID NO: 2114888 - RNA, 19 nt, Artificial Sequence
  Description of Artificial Sequence: Synthetic oligonucleotide
  Sense strand starting at position 3923 of SEQ ID NO: 1882358
cauugugaacuugguauaa

SEQ ID NO: 2114889 - RNA, 19 nt, Artificial Sequence
  Description of Artificial Sequence: Synthetic oligonucleotide
  Antisense strand to SEQ ID NO: 2114888
uuauaccaaguucacaaug

SEQ ID NO: 2114890 - RNA, 19 nt, Artificial Sequence
  Description of Artificial Sequence: Synthetic oligonucleotide
  Sense strand starting at position 3935 of SEQ ID NO: 1882358
gguauaagagccuaaguau

SEQ ID NO: 2114891 - RNA, 19 nt, Artificial Sequence
  Description of Artificial Sequence: Synthetic oligonucleotide
  Antisense strand to SEQ ID NO: 2114890
auacuuaggcucuuauacc

SEQ ID NO: 2114892 - RNA, 19 nt, Artificial Sequence
  Description of Artificial Sequence: Synthetic oligonucleotide
  Sense strand starting at position 11 of SEQ ID NO: 1882359
auaaacuguguuugaauac

SEQ ID NO: 2114893 - RNA, 19 nt, Artificial Sequence
  Description of Artificial Sequence: Synthetic oligonucleotide
  Antisense strand to SEQ ID NO: 2114892
guauucaaacacaguuuau

SEQ ID NO: 2114894 - RNA, 19 nt, Artificial Sequence
  Description of Artificial Sequence: Synthetic oligonucleotide
  Sense strand starting at position 239 of SEQ ID NO: 1882359
uggaauaagccaugagcau

SEQ ID NO: 2114895 - RNA, 19 nt, Artificial Sequence
  Description of Artificial Sequence: Synthetic oligonucleotide
  Antisense strand to SEQ ID NO: 2114894
augcucauggcuuauucca

SEQ ID NO: 2114896 - RNA, 19 nt, Artificial Sequence
  Description of Artificial Sequence: Synthetic oligonucleotide
  Sense strand starting at position 240 of SEQ ID NO: 1882359
ggaauaagccaugagcauu

SEQ ID NO: 2114897 - RNA, 19 nt, Artificial Sequence
  Description of Artificial Sequence: Synthetic oligonucleotide
  Antisense strand to SEQ ID NO: 2114896
aaugcucauggcuuauucc

SEQ ID NO: 2114898 - RNA, 19 nt, Artificial Sequence
  Description of Artificial Sequence: Synthetic oligonucleotide
  Sense strand starting at position 246 of SEQ ID NO: 1882359
agccaugagcauuacugau

SEQ ID NO: 2114899 - RNA, 19 nt, Artificial Sequence
  Description of Artificial Sequence: Synthetic oligonucleotide
  Antisense strand to SEQ ID NO: 2114898
aucaguaaugcucauggcu

SEQ ID NO: 2114900 - RNA, 19 nt, Artificial Sequence
  Description of Artificial Sequence: Synthetic oligonucleotide
  Sense strand starting at position 460 of SEQ ID NO: 1882359
uuauuuauguacucgguuu

SEQ ID NO: 2114901 - RNA, 19 nt, Artificial Sequence
  Description of Artificial Sequence: Synthetic oligonucleotide
  Antisense strand to SEQ ID NO: 2114900
aaaccgaguacauaaauaa

SEQ ID NO: 2114902 - RNA, 19 nt, Artificial Sequence
  Description of Artificial Sequence: Synthetic oligonucleotide
  Sense strand starting at position 466 of SEQ ID NO: 1882359
auguacucgguuuacaaca

SEQ ID NO: 2114903 - RNA, 19 nt, Artificial Sequence
  Description of Artificial Sequence: Synthetic oligonucleotide
  Antisense strand to SEQ ID NO: 2114902
uguuguaaaccgaguacau

SEQ ID NO: 2114904 - RNA, 19 nt, Artificial Sequence
  Description of Artificial Sequence: Synthetic oligonucleotide
  Sense strand starting at position 631 of SEQ ID NO: 1882359
ucucaaauaguguacauua

SEQ ID NO: 2114905 - RNA, 19 nt, Artificial Sequence
  Description of Artificial Sequence: Synthetic oligonucleotide
  Antisense strand to SEQ ID NO: 2114904
uaauguacacuauuugaga

SEQ ID NO: 2114906 - RNA, 19 nt, Artificial Sequence
  Description of Artificial Sequence: Synthetic oligonucleotide
  Sense strand starting at position 659 of SEQ ID NO: 1882359
uuaucauaauuagugggaa

SEQ ID NO: 2114907 - RNA, 19 nt, Artificial Sequence
  Description of Artificial Sequence: Synthetic oligonucleotide
  Antisense strand to SEQ ID NO: 2114906
uucccacuaauuaugauaa

SEQ ID NO: 2114908 - RNA, 19 nt, Artificial Sequence
  Description of Artificial Sequence: Synthetic oligonucleotide
  Sense strand starting at position 765 of SEQ ID NO: 1882359
aaaguaauguuuguaagga

SEQ ID NO: 2114909 - RNA, 19 nt, Artificial Sequence
  Description of Artificial Sequence: Synthetic oligonucleotide
  Antisense strand to SEQ ID NO: 2114908
uccuuacaaacauuacuuu

SEQ ID NO: 2114910 - RNA, 19 nt, Artificial Sequence
  Description of Artificial Sequence: Synthetic oligonucleotide
  Sense strand starting at position 908 of SEQ ID NO: 1882359
aguuuaugcuaucugaauc

SEQ ID NO: 2114911 - RNA, 19 nt, Artificial Sequence
  Description of Artificial Sequence: Synthetic oligonucleotide
  Antisense strand to SEQ ID NO: 2114910
gauucagauagcauaaacu

SEQ ID NO: 2114912 - RNA, 19 nt, Artificial Sequence
  Description of Artificial Sequence: Synthetic oligonucleotide
  Sense strand starting at position 1012 of SEQ ID NO: 1882359
ccugaauaguugguauuau

SEQ ID NO: 2114913 - RNA, 19 nt, Artificial Sequence
  Description of Artificial Sequence: Synthetic oligonucleotide
  Antisense strand to SEQ ID NO: 2114912
auaauaccaacuauucagg

SEQ ID NO: 2114914 - RNA, 19 nt, Artificial Sequence
  Description of Artificial Sequence: Synthetic oligonucleotide
  Sense strand starting at position 1147 of SEQ ID NO: 1882359
cccacuaguaggugggaaa

SEQ ID NO: 2114915 - RNA, 19 nt, Artificial Sequence
  Description of Artificial Sequence: Synthetic oligonucleotide
  Antisense strand to SEQ ID NO: 2114914
uuucccaccuacuaguggg

SEQ ID NO: 2114916 - RNA, 19 nt, Artificial Sequence
  Description of Artificial Sequence: Synthetic oligonucleotide
  Sense strand starting at position 1543 of SEQ ID NO: 1882359
ggaugacgggugcaucaaa

SEQ ID NO: 2114917 - RNA, 19 nt, Artificial Sequence
  Description of Artificial Sequence: Synthetic oligonucleotide
  Antisense strand to SEQ ID NO: 2114916
uuugaugcacccgucaucc

SEQ ID NO: 2114918 - RNA, 19 nt, Artificial Sequence
  Description of Artificial Sequence: Synthetic oligonucleotide
  Sense strand starting at position 1810 of SEQ ID NO: 1882359
agaugcugacuggaguuua

SEQ ID NO: 2114919 - RNA, 19 nt, Artificial Sequence
  Description of Artificial Sequence: Synthetic oligonucleotide
  Antisense strand to SEQ ID NO: 2114918
uaaacuccagucagcaucu

SEQ ID NO: 2114920 - RNA, 19 nt, Artificial Sequence
  Description of Artificial Sequence: Synthetic oligonucleotide
  Sense strand starting at position 2066 of SEQ ID NO: 1882359
cugugaucccuugaacucu

SEQ ID NO: 2114921 - RNA, 19 nt, Artificial Sequence
  Description of Artificial Sequence: Synthetic oligonucleotide
  Antisense strand to SEQ ID NO: 2114920
agaguucaagggaucacag

SEQ ID NO: 2114922 - RNA, 19 nt, Artificial Sequence
  Description of Artificial Sequence: Synthetic oligonucleotide
  Sense strand starting at position 2104 of SEQ ID NO: 1882359
cacgauucucguucgguau

SEQ ID NO: 2114923 - RNA, 19 nt, Artificial Sequence
  Description of Artificial Sequence: Synthetic oligonucleotide
  Antisense strand to SEQ ID NO: 2114922
auaccgaacgagaaucgug

SEQ ID NO: 2114924 - RNA, 19 nt, Artificial Sequence
  Description of Artificial Sequence: Synthetic oligonucleotide
  Sense strand starting at position 2244 of SEQ ID NO: 1882359
gaaggaggaucacaugaga

SEQ ID NO: 2114925 - RNA, 19 nt, Artificial Sequence
  Description of Artificial Sequence: Synthetic oligonucleotide
  Antisense strand to SEQ ID NO: 2114924
ucucaugugauccuccuuc

SEQ ID NO: 2114926 - RNA, 19 nt, Artificial Sequence
  Description of Artificial Sequence: Synthetic oligonucleotide
  Sense strand starting at position 2408 of SEQ ID NO: 1882359
aggugucucagggaagcuu

SEQ ID NO: 2114927 - RNA, 19 nt, Artificial Sequence
  Description of Artificial Sequence: Synthetic oligonucleotide
  Antisense strand to SEQ ID NO: 2114926
aagcuucccugagacaccu

SEQ ID NO: 2114928 - RNA, 19 nt, Artificial Sequence
  Description of Artificial Sequence: Synthetic oligonucleotide
  Sense strand starting at position 2417 of SEQ ID NO: 1882359
agggaagcuucugucacaa

SEQ ID NO: 2114929 - RNA, 19 nt, Artificial Sequence
  Description of Artificial Sequence: Synthetic oligonucleotide
  Antisense strand to SEQ ID NO: 2114928
uugugacagaagcuucccu

SEQ ID NO: 2114930 - RNA, 19 nt, Artificial Sequence
  Description of Artificial Sequence: Synthetic oligonucleotide
  Sense strand starting at position 2475 of SEQ ID NO: 1882359
acaagucuccauggaauca

SEQ ID NO: 2114931 - RNA, 19 nt, Artificial Sequence
  Description of Artificial Sequence: Synthetic oligonucleotide
  Antisense strand to SEQ ID NO: 2114930
ugauuccauggagacuugu

SEQ ID NO: 2114932 - RNA, 19 nt, Artificial Sequence
  Description of Artificial Sequence: Synthetic oligonucleotide
  Sense strand starting at position 2669 of SEQ ID NO: 1882359
gguugaaugaguugcucaa

SEQ ID NO: 2114933 - RNA, 19 nt, Artificial Sequence
  Description of Artificial Sequence: Synthetic oligonucleotide
  Antisense strand to SEQ ID NO: 2114932
uugagcaacucauucaacc

SEQ ID NO: 2114934 - RNA, 19 nt, Artificial Sequence
  Description of Artificial Sequence: Synthetic oligonucleotide
  Sense strand starting at position 2673 of SEQ ID NO: 1882359
gaaugaguugcucaagguc

SEQ ID NO: 2114935 - RNA, 19 nt, Artificial Sequence
  Description of Artificial Sequence: Synthetic oligonucleotide
  Antisense strand to SEQ ID NO: 2114934
gaccuugagcaacucauuc

SEQ ID NO: 2114936 - RNA, 19 nt, Artificial Sequence
  Description of Artificial Sequence: Synthetic oligonucleotide
  Sense strand starting at position 2728 of SEQ ID NO: 1882359
aggacugccucucuccaaa

SEQ ID NO: 2114937 - RNA, 19 nt, Artificial Sequence
  Description of Artificial Sequence: Synthetic oligonucleotide
  Antisense strand to SEQ ID NO: 2114936
uuuggagagaggcaguccu

SEQ ID NO: 2114938 - RNA, 19 nt, Artificial Sequence
  Description of Artificial Sequence: Synthetic oligonucleotide
  Sense strand starting at position 2871 of SEQ ID NO: 1882359
ugugcaauggguugaaaca

SEQ ID NO: 2114939 - RNA, 19 nt, Artificial Sequence
  Description of Artificial Sequence: Synthetic oligonucleotide
  Antisense strand to SEQ ID NO: 2114938
uguuucaacccauugcaca

SEQ ID NO: 2114940 - RNA, 19 nt, Artificial Sequence
  Description of Artificial Sequence: Synthetic oligonucleotide
  Sense strand starting at position 3005 of SEQ ID NO: 1882359
ccauuugaugcaugcacuu

SEQ ID NO: 2114941 - RNA, 19 nt, Artificial Sequence
  Description of Artificial Sequence: Synthetic oligonucleotide
  Antisense strand to SEQ ID NO: 2114940
aagugcaugcaucaaaugg

SEQ ID NO: 2114942 - RNA, 19 nt, Artificial Sequence
  Description of Artificial Sequence: Synthetic oligonucleotide
  Sense strand starting at position 3054 of SEQ ID NO: 1882359
cugagaaagaaacguuaua

SEQ ID NO: 2114943 - RNA, 19 nt, Artificial Sequence
  Description of Artificial Sequence: Synthetic oligonucleotide
  Antisense strand to SEQ ID NO: 2114942
uauaacguuucuuucucag

SEQ ID NO: 2114944 - RNA, 19 nt, Artificial Sequence
  Description of Artificial Sequence: Synthetic oligonucleotide
  Sense strand starting at position 3599 of SEQ ID NO: 1882359
cauuacaguguuugaagca

SEQ ID NO: 2114945 - RNA, 19 nt, Artificial Sequence
  Description of Artificial Sequence: Synthetic oligonucleotide
  Antisense strand to SEQ ID NO: 2114944
ugcuucaaacacuguaaug

SEQ ID NO: 2114946 - RNA, 19 nt, Artificial Sequence
  Description of Artificial Sequence: Synthetic oligonucleotide
  Sense strand starting at position 3617 of SEQ ID NO: 1882359
aguucuaagcauuauggga

SEQ ID NO: 2114947 - RNA, 19 nt, Artificial Sequence
  Description of Artificial Sequence: Synthetic oligonucleotide
  Antisense strand to SEQ ID NO: 2114946
ucccauaaugcuuagaacu

SEQ ID NO: 2114948 - RNA, 19 nt, Artificial Sequence
  Description of Artificial Sequence: Synthetic oligonucleotide
  Sense strand starting at position 3652 of SEQ ID NO: 1882359
acugauaccuguccuagga

SEQ ID NO: 2114949 - RNA, 19 nt, Artificial Sequence
  Description of Artificial Sequence: Synthetic oligonucleotide
  Antisense strand to SEQ ID NO: 2114948
uccuaggacagguaucagu

SEQ ID NO: 2114950 - RNA, 19 nt, Artificial Sequence
  Description of Artificial Sequence: Synthetic oligonucleotide
  Sense strand starting at position 3656 of SEQ ID NO: 1882359
auaccuguccuaggauauu

SEQ ID NO: 2114951 - RNA, 19 nt, Artificial Sequence
  Description of Artificial Sequence: Synthetic oligonucleotide
  Antisense strand to SEQ ID NO: 2114950
aauauccuaggacagguau

SEQ ID NO: 2114952 - RNA, 19 nt, Artificial Sequence
  Description of Artificial Sequence: Synthetic oligonucleotide
  Sense strand starting at position 3758 of SEQ ID NO: 1882359
caaaucugauaagugugau

SEQ ID NO: 2114953 - RNA, 19 nt, Artificial Sequence
  Description of Artificial Sequence: Synthetic oligonucleotide
  Antisense strand to SEQ ID NO: 2114952
aucacacuuaucagauuug

SEQ ID NO: 2114954 - RNA, 19 nt, Artificial Sequence
  Description of Artificial Sequence: Synthetic oligonucleotide
  Sense strand starting at position 3761 of SEQ ID NO: 1882359
aucugauaagugugauguu

SEQ ID NO: 2114955 - RNA, 19 nt, Artificial Sequence
  Description of Artificial Sequence: Synthetic oligonucleotide
  Antisense strand to SEQ ID NO: 2114954
aacaucacacuuaucagau

SEQ ID NO: 2114956 - RNA, 19 nt, Artificial Sequence
  Description of Artificial Sequence: Synthetic oligonucleotide
  Sense strand starting at position 3797 of SEQ ID NO: 1882359
auuacucuccacugagaga

SEQ ID NO: 2114957 - RNA, 19 nt, Artificial Sequence
  Description of Artificial Sequence: Synthetic oligonucleotide
  Antisense strand to SEQ ID NO: 2114956
ucucucaguggagaguaau

SEQ ID NO: 2114958 - RNA, 19 nt, Artificial Sequence
  Description of Artificial Sequence: Synthetic oligonucleotide
  Sense strand starting at position 3880 of SEQ ID NO: 1882359
uggguaagaaguuguuaug

SEQ ID NO: 2114959 - RNA, 19 nt, Artificial Sequence
  Description of Artificial Sequence: Synthetic oligonucleotide
  Antisense strand to SEQ ID NO: 2114958
cauaacaacuucuuaccca

SEQ ID NO: 2114960 - RNA, 19 nt, Artificial Sequence
  Description of Artificial Sequence: Synthetic oligonucleotide
  Sense strand starting at position 3886 of SEQ ID NO: 1882359
agaaguuguuaugcagaua

SEQ ID NO: 2114961 - RNA, 19 nt, Artificial Sequence
  Description of Artificial Sequence: Synthetic oligonucleotide
  Antisense strand to SEQ ID NO: 2114960
uaucugcauaacaacuucu

SEQ ID NO: 2114962 - RNA, 19 nt, Artificial Sequence
  Description of Artificial Sequence: Synthetic oligonucleotide
  Sense strand starting at position 3891 of SEQ ID NO: 1882359
uuguuaugcagauauggag

SEQ ID NO: 2114963 - RNA, 19 nt, Artificial Sequence
  Description of Artificial Sequence: Synthetic oligonucleotide
  Antisense strand to SEQ ID NO: 2114962
cuccauaucugcauaacaa

SEQ ID NO: 2114964 - RNA, 19 nt, Artificial Sequence
  Description of Artificial Sequence: Synthetic oligonucleotide
  Sense strand starting at position 3906 of SEQ ID NO: 1882359
ggagcaugggcagaguuua

SEQ ID NO: 2114965 - RNA, 19 nt, Artificial Sequence
  Description of Artificial Sequence: Synthetic oligonucleotide
  Antisense strand to SEQ ID NO: 2114964
uaaacucugcccaugcucc

SEQ ID NO: 2114966 - RNA, 19 nt, Artificial Sequence
  Description of Artificial Sequence: Synthetic oligonucleotide
  Sense strand starting at position 3916 of SEQ ID NO: 1882359
cagaguuuagggcaguaga

SEQ ID NO: 2114967 - RNA, 19 nt, Artificial Sequence
  Description of Artificial Sequence: Synthetic oligonucleotide
  Antisense strand to SEQ ID NO: 2114966
ucuacugcccuaaacucug

SEQ ID NO: 2114968 - RNA, 19 nt, Artificial Sequence
  Description of Artificial Sequence: Synthetic oligonucleotide
  Sense strand starting at position 3969 of SEQ ID NO: 1882359
auaggcuauacauggugaa

SEQ ID NO: 2114969 - RNA, 19 nt, Artificial Sequence
  Description of Artificial Sequence: Synthetic oligonucleotide
  Antisense strand to SEQ ID NO: 2114968
uucaccauguauagccuau

SEQ ID NO: 2114970 - RNA, 19 nt, Artificial Sequence
  Description of Artificial Sequence: Synthetic oligonucleotide
  Sense strand starting at position 3970 of SEQ ID NO: 1882359
uaggcuauacauggugaaa

SEQ ID NO: 2114971 - RNA, 19 nt, Artificial Sequence
  Description of Artificial Sequence: Synthetic oligonucleotide
  Antisense strand to SEQ ID NO: 2114970
uuucaccauguauagccua

SEQ ID NO: 2114972 - RNA, 19 nt, Artificial Sequence
  Description of Artificial Sequence: Synthetic oligonucleotide
  Sense strand starting at position 251 of SEQ ID NO: 1882360
uguauuggucuacauauua

SEQ ID NO: 2114973 - RNA, 19 nt, Artificial Sequence
  Description of Artificial Sequence: Synthetic oligonucleotide
  Antisense strand to SEQ ID NO: 2114972
uaauauguagaccaauaca

SEQ ID NO: 2114974 - RNA, 19 nt, Artificial Sequence
  Description of Artificial Sequence: Synthetic oligonucleotide
  Sense strand starting at position 299 of SEQ ID NO: 1882360
ucaggaucauccuuaguau

SEQ ID NO: 2114975 - RNA, 19 nt, Artificial Sequence
  Description of Artificial Sequence: Synthetic oligonucleotide
  Antisense strand to SEQ ID NO: 2114974
auacuaaggaugauccuga

SEQ ID NO: 2114976 - RNA, 19 nt, Artificial Sequence
  Description of Artificial Sequence: Synthetic oligonucleotide
  Sense strand starting at position 302 of SEQ ID NO: 1882360
ggaucauccuuaguaugac

SEQ ID NO: 2114977 - RNA, 19 nt, Artificial Sequence
  Description of Artificial Sequence: Synthetic oligonucleotide
  Antisense strand to SEQ ID NO: 2114976
gucauacuaaggaugaucc

SEQ ID NO: 2114978 - RNA, 19 nt, Artificial Sequence
  Description of Artificial Sequence: Synthetic oligonucleotide
  Sense strand starting at position 311 of SEQ ID NO: 1882360
uuaguaugacaacgggaua

SEQ ID NO: 2114979 - RNA, 19 nt, Artificial Sequence
  Description of Artificial Sequence: Synthetic oligonucleotide
  Antisense strand to SEQ ID NO: 2114978
uaucccguugucauacuaa

SEQ ID NO: 2114980 - RNA, 19 nt, Artificial Sequence
  Description of Artificial Sequence: Synthetic oligonucleotide
  Sense strand starting at position 345 of SEQ ID NO: 1882360
gucauuaaaccuuggaaca

SEQ ID NO: 2114981 - RNA, 19 nt, Artificial Sequence
  Description of Artificial Sequence: Synthetic oligonucleotide
  Antisense strand to SEQ ID NO: 2114980
uguuccaagguuuaaugac

SEQ ID NO: 2114982 - RNA, 19 nt, Artificial Sequence
  Description of Artificial Sequence: Synthetic oligonucleotide
  Sense strand starting at position 405 of SEQ ID NO: 1882360
ugugaugcuacaugaagaa

SEQ ID NO: 2114983 - RNA, 19 nt, Artificial Sequence
  Description of Artificial Sequence: Synthetic oligonucleotide
  Antisense strand to SEQ ID NO: 2114982
uucuucauguagcaucaca

SEQ ID NO: 2114984 - RNA, 19 nt, Artificial Sequence
  Description of Artificial Sequence: Synthetic oligonucleotide
  Sense strand starting at position 512 of SEQ ID NO: 1882360
ggacagauuguggguugga

SEQ ID NO: 2114985 - RNA, 19 nt, Artificial Sequence
  Description of Artificial Sequence: Synthetic oligonucleotide
  Antisense strand to SEQ ID NO: 2114984
uccaacccacaaucugucc

SEQ ID NO: 2114986 - RNA, 19 nt, Artificial Sequence
  Description of Artificial Sequence: Synthetic oligonucleotide
  Sense strand starting at position 513 of SEQ ID NO: 1882360
gacagauuguggguuggaa

SEQ ID NO: 2114987 - RNA, 19 nt, Artificial Sequence
  Description of Artificial Sequence: Synthetic oligonucleotide
  Antisense strand to SEQ ID NO: 2114986
uuccaacccacaaucuguc

SEQ ID NO: 2114988 - RNA, 19 nt, Artificial Sequence
  Description of Artificial Sequence: Synthetic oligonucleotide
  Sense strand starting at position 515 of SEQ ID NO: 1882360
cagauuguggguuggaaga

SEQ ID NO: 2114989 - RNA, 19 nt, Artificial Sequence
  Description of Artificial Sequence: Synthetic oligonucleotide
  Antisense strand to SEQ ID NO: 2114988
ucuuccaacccacaaucug

SEQ ID NO: 2114990 - RNA, 19 nt, Artificial Sequence
  Description of Artificial Sequence: Synthetic oligonucleotide
  Sense strand starting at position 542 of SEQ ID NO: 1882360
cugaaugucaggcacagau

SEQ ID NO: 2114991 - RNA, 19 nt, Artificial Sequence
  Description of Artificial Sequence: Synthetic oligonucleotide
  Antisense strand to SEQ ID NO: 2114990
aucugugccugacauucag

SEQ ID NO: 2114992 - RNA, 19 nt, Artificial Sequence
  Description of Artificial Sequence: Synthetic oligonucleotide
  Sense strand starting at position 740 of SEQ ID NO: 1882360
cuuguauagauuggcaaga

SEQ ID NO: 2114993 - RNA, 19 nt, Artificial Sequence
  Description of Artificial Sequence: Synthetic oligonucleotide
  Antisense strand to SEQ ID NO: 2114992
ucuugccaaucuauacaag

SEQ ID NO: 2114994 - RNA, 19 nt, Artificial Sequence
  Description of Artificial Sequence: Synthetic oligonucleotide
  Sense strand starting at position 741 of SEQ ID NO: 1882360
uuguauagauuggcaagaa

SEQ ID NO: 2114995 - RNA, 19 nt, Artificial Sequence
  Description of Artificial Sequence: Synthetic oligonucleotide
  Antisense strand to SEQ ID NO: 2114994
uucuugccaaucuauacaa

SEQ ID NO: 2114996 - RNA, 19 nt, Artificial Sequence
  Description of Artificial Sequence: Synthetic oligonucleotide
  Sense strand starting at position 753 of SEQ ID NO: 1882360
gcaagaagagccuaaaggu

SEQ ID NO: 2114997 - RNA, 19 nt, Artificial Sequence
  Description of Artificial Sequence: Synthetic oligonucleotide
  Antisense strand to SEQ ID NO: 2114996
accuuuaggcucuucuugc

SEQ ID NO: 2114998 - RNA, 19 nt, Artificial Sequence
  Description of Artificial Sequence: Synthetic oligonucleotide
  Sense strand starting at position 994 of SEQ ID NO: 1882360
agugccauagcuggauuua

SEQ ID NO: 2114999 - RNA, 19 nt, Artificial Sequence
  Description of Artificial Sequence: Synthetic oligonucleotide
  Antisense strand to SEQ ID NO: 2114998
uaaauccagcuauggcacu

SEQ ID NO: 2115000 - RNA, 19 nt, Artificial Sequence
  Description of Artificial Sequence: Synthetic oligonucleotide
  Sense strand starting at position 1111 of SEQ ID NO: 1882360
acauguuagaggugcaaau

SEQ ID NO: 2115001 - RNA, 19 nt, Artificial Sequence
  Description of Artificial Sequence: Synthetic oligonucleotide
  Antisense strand to SEQ ID NO: 2115000
auuugcaccucuaacaugu

SEQ ID NO: 2115002 - RNA, 19 nt, Artificial Sequence
  Description of Artificial Sequence: Synthetic oligonucleotide
  Sense strand starting at position 1321 of SEQ ID NO: 1882360
guuacaugacagugagcaa

SEQ ID NO: 2115003 - RNA, 19 nt, Artificial Sequence
  Description of Artificial Sequence: Synthetic oligonucleotide
  Antisense strand to SEQ ID NO: 2115002
uugcucacugucauguaac

SEQ ID NO: 2115004 - RNA, 19 nt, Artificial Sequence
  Description of Artificial Sequence: Synthetic oligonucleotide
  Sense strand starting at position 1467 of SEQ ID NO: 1882360
uguaccaguucuuuaaaga

SEQ ID NO: 2115005 - RNA, 19 nt, Artificial Sequence
  Description of Artificial Sequence: Synthetic oligonucleotide
  Antisense strand to SEQ ID NO: 2115004
ucuuuaaagaacugguaca

SEQ ID NO: 2115006 - RNA, 19 nt, Artificial Sequence
  Description of Artificial Sequence: Synthetic oligonucleotide
  Sense strand starting at position 1468 of SEQ ID NO: 1882360
guaccaguucuuuaaagag

SEQ ID NO: 2115007 - RNA, 19 nt, Artificial Sequence
  Description of Artificial Sequence: Synthetic oligonucleotide
  Antisense strand to SEQ ID NO: 2115006
cucuuuaaagaacugguac

SEQ ID NO: 2115008 - RNA, 19 nt, Artificial Sequence
  Description of Artificial Sequence: Synthetic oligonucleotide
  Sense strand starting at position 1483 of SEQ ID NO: 1882360
agagcaaguagcuaugaua

SEQ ID NO: 2115009 - RNA, 19 nt, Artificial Sequence
  Description of Artificial Sequence: Synthetic oligonucleotide
  Antisense strand to SEQ ID NO: 2115008
uaucauagcuacuugcucu

SEQ ID NO: 2115010 - RNA, 19 nt, Artificial Sequence
  Description of Artificial Sequence: Synthetic oligonucleotide
  Sense strand starting at position 1531 of SEQ ID NO: 1882360
uuugguugucaacaucauu

SEQ ID NO: 2115011 - RNA, 19 nt, Artificial Sequence
  Description of Artificial Sequence: Synthetic oligonucleotide
  Antisense strand to SEQ ID NO: 2115010
aaugauguugacaaccaaa

SEQ ID NO: 2115012 - RNA, 19 nt, Artificial Sequence
  Description of Artificial Sequence: Synthetic oligonucleotide
  Sense strand starting at position 1582 of SEQ ID NO: 1882360
cuguccuugagauguggaa

SEQ ID NO: 2115013 - RNA, 19 nt, Artificial Sequence
  Description of Artificial Sequence: Synthetic oligonucleotide
  Antisense strand to SEQ ID NO: 2115012
uuccacaucucaaggacag

SEQ ID NO: 2115014 - RNA, 19 nt, Artificial Sequence
  Description of Artificial Sequence: Synthetic oligonucleotide
  Sense strand starting at position 1584 of SEQ ID NO: 1882360
guccuugagauguggaaug

SEQ ID NO: 2115015 - RNA, 19 nt, Artificial Sequence
  Description of Artificial Sequence: Synthetic oligonucleotide
  Antisense strand to SEQ ID NO: 2115014
cauuccacaucucaaggac

SEQ ID NO: 2115016 - RNA, 19 nt, Artificial Sequence
  Description of Artificial Sequence: Synthetic oligonucleotide
  Sense strand starting at position 1838 of SEQ ID NO: 1882360
ggauaaggcuuacuuuaca

SEQ ID NO: 2115017 - RNA, 19 nt, Artificial Sequence
  Description of Artificial Sequence: Synthetic oligonucleotide
  Antisense strand to SEQ ID NO: 2115016
uguaaaguaagccuuaucc

SEQ ID NO: 2115018 - RNA, 19 nt, Artificial Sequence
  Description of Artificial Sequence: Synthetic oligonucleotide
  Sense strand starting at position 1895 of SEQ ID NO: 1882360
uggcauucucugugagaaa

SEQ ID NO: 2115019 - RNA, 19 nt, Artificial Sequence
  Description of Artificial Sequence: Synthetic oligonucleotide
  Antisense strand to SEQ ID NO: 2115018
uuucucacagagaaugcca

SEQ ID NO: 2115020 - RNA, 19 nt, Artificial Sequence
  Description of Artificial Sequence: Synthetic oligonucleotide
  Sense strand starting at position 2169 of SEQ ID NO: 1882360
cugagcgagguuuaaacaa

SEQ ID NO: 2115021 - RNA, 19 nt, Artificial Sequence
  Description of Artificial Sequence: Synthetic oligonucleotide
  Antisense strand to SEQ ID NO: 2115020
uuguuuaaaccucgcucag

SEQ ID NO: 2115022 - RNA, 19 nt, Artificial Sequence
  Description of Artificial Sequence: Synthetic oligonucleotide
  Sense strand starting at position 2431 of SEQ ID NO: 1882360
uuugcagacucugcauuua

SEQ ID NO: 2115023 - RNA, 19 nt, Artificial Sequence
  Description of Artificial Sequence: Synthetic oligonucleotide
  Antisense strand to SEQ ID NO: 2115022
uaaaugcagagucugcaaa

SEQ ID NO: 2115024 - RNA, 19 nt, Artificial Sequence
  Description of Artificial Sequence: Synthetic oligonucleotide
  Sense strand starting at position 2818 of SEQ ID NO: 1882360
auuaaagguagugaguauu

SEQ ID NO: 2115025 - RNA, 19 nt, Artificial Sequence
  Description of Artificial Sequence: Synthetic oligonucleotide
  Antisense strand to SEQ ID NO: 2115024
aauacucacuaccuuuaau

SEQ ID NO: 2115026 - RNA, 19 nt, Artificial Sequence
  Description of Artificial Sequence: Synthetic oligonucleotide
  Sense strand starting at position 2886 of SEQ ID NO: 1882360
ucagaauaugcugaagcuu

SEQ ID NO: 2115027 - RNA, 19 nt, Artificial Sequence
  Description of Artificial Sequence: Synthetic oligonucleotide
  Antisense strand to SEQ ID NO: 2115026
aagcuucagcauauucuga

SEQ ID NO: 2115028 - RNA, 19 nt, Artificial Sequence
  Description of Artificial Sequence: Synthetic oligonucleotide
  Sense strand starting at position 2992 of SEQ ID NO: 1882360
cucacaaguuucuuaggau

SEQ ID NO: 2115029 - RNA, 19 nt, Artificial Sequence
  Description of Artificial Sequence: Synthetic oligonucleotide
  Antisense strand to SEQ ID NO: 2115028
auccuaagaaacuugugag

SEQ ID NO: 2115030 - RNA, 19 nt, Artificial Sequence
  Description of Artificial Sequence: Synthetic oligonucleotide
  Sense strand starting at position 3016 of SEQ ID NO: 1882360
cauaguuugagaugguaga

SEQ ID NO: 2115031 - RNA, 19 nt, Artificial Sequence
  Description of Artificial Sequence: Synthetic oligonucleotide
  Antisense strand to SEQ ID NO: 2115030
ucuaccaucucaaacuaug

SEQ ID NO: 2115032 - RNA, 19 nt, Artificial Sequence
  Description of Artificial Sequence: Synthetic oligonucleotide
  Sense strand starting at position 3082 of SEQ ID NO: 1882360
acaagaagugagugaaggu

SEQ ID NO: 2115033 - RNA, 19 nt, Artificial Sequence
  Description of Artificial Sequence: Synthetic oligonucleotide
  Antisense strand to SEQ ID NO: 2115032
accuucacucacuucuugu

SEQ ID NO: 2115034 - RNA, 19 nt, Artificial Sequence
  Description of Artificial Sequence: Synthetic oligonucleotide
  Sense strand starting at position 3602 of SEQ ID NO: 1882360
uggguuagagaaugcagaa

SEQ ID NO: 2115035 - RNA, 19 nt, Artificial Sequence
  Description of Artificial Sequence: Synthetic oligonucleotide
  Antisense strand to SEQ ID NO: 2115034
uucugcauucucuaaccca

SEQ ID NO: 2115036 - RNA, 19 nt, Artificial Sequence
  Description of Artificial Sequence: Synthetic oligonucleotide
  Sense strand starting at position 3631 of SEQ ID NO: 1882360
ugcaaucacuaggcuuaaa

SEQ ID NO: 2115037 - RNA, 19 nt, Artificial Sequence
  Description of Artificial Sequence: Synthetic oligonucleotide
  Antisense strand to SEQ ID NO: 2115036
uuuaagccuagugauugca

SEQ ID NO: 2115038 - RNA, 19 nt, Artificial Sequence
  Description of Artificial Sequence: Synthetic oligonucleotide
  Sense strand starting at position 3654 of SEQ ID NO: 1882360
ggcccaauucugcaucaau

SEQ ID NO: 2115039 - RNA, 19 nt, Artificial Sequence
  Description of Artificial Sequence: Synthetic oligonucleotide
  Antisense strand to SEQ ID NO: 2115038
auugaugcagaauugggcc

SEQ ID NO: 2115040 - RNA, 19 nt, Artificial Sequence
  Description of Artificial Sequence: Synthetic oligonucleotide
  Sense strand starting at position 3699 of SEQ ID NO: 1882360
ccagucuuagucuauaacu

SEQ ID NO: 2115041 - RNA, 19 nt, Artificial Sequence
  Description of Artificial Sequence: Synthetic oligonucleotide
  Antisense strand to SEQ ID NO: 2115040
aguuauagacuaagacugg

SEQ ID NO: 2115042 - RNA, 19 nt, Artificial Sequence
  Description of Artificial Sequence: Synthetic oligonucleotide
  Sense strand starting at position 3701 of SEQ ID NO: 1882360
agucuuagucuauaacuua

SEQ ID NO: 2115043 - RNA, 19 nt, Artificial Sequence
  Description of Artificial Sequence: Synthetic oligonucleotide
  Antisense strand to SEQ ID NO: 2115042
uaaguuauagacuaagacu

SEQ ID NO: 2115044 - RNA, 19 nt, Artificial Sequence
  Description of Artificial Sequence: Synthetic oligonucleotide
  Sense strand starting at position 3835 of SEQ ID NO: 1882360
gggugauugaaaugucaac

SEQ ID NO: 2115045 - RNA, 19 nt, Artificial Sequence
  Description of Artificial Sequence: Synthetic oligonucleotide
  Antisense strand to SEQ ID NO: 2115044
guugacauuucaaucaccc

SEQ ID NO: 2115046 - RNA, 19 nt, Artificial Sequence
  Description of Artificial Sequence: Synthetic oligonucleotide
  Sense strand starting at position 3841 of SEQ ID NO: 1882360
uugaaaugucaacggagau

SEQ ID NO: 2115047 - RNA, 19 nt, Artificial Sequence
  Description of Artificial Sequence: Synthetic oligonucleotide
  Antisense strand to SEQ ID NO: 2115046
aucuccguugacauuucaa

SEQ ID NO: 2115048 - RNA, 19 nt, Artificial Sequence
  Description of Artificial Sequence: Synthetic oligonucleotide
  Sense strand starting at position 3842 of SEQ ID NO: 1882360
ugaaaugucaacggagaug

SEQ ID NO: 2115049 - RNA, 19 nt, Artificial Sequence
  Description of Artificial Sequence: Synthetic oligonucleotide
  Antisense strand to SEQ ID NO: 2115048
caucuccguugacauuuca

SEQ ID NO: 2115050 - RNA, 19 nt, Artificial Sequence
  Description of Artificial Sequence: Synthetic oligonucleotide
  Sense strand starting at position 3847 of SEQ ID NO: 1882360
ugucaacggagaugugaau

SEQ ID NO: 2115051 - RNA, 19 nt, Artificial Sequence
  Description of Artificial Sequence: Synthetic oligonucleotide
  Antisense strand to SEQ ID NO: 2115050
auucacaucuccguugaca

SEQ ID NO: 2115052 - RNA, 19 nt, Artificial Sequence
  Description of Artificial Sequence: Synthetic oligonucleotide
  Sense strand starting at position 86 of SEQ ID NO: 1882361
ugacaaagaugcuuaucuu

SEQ ID NO: 2115053 - RNA, 19 nt, Artificial Sequence
  Description of Artificial Sequence: Synthetic oligonucleotide
  Antisense strand to SEQ ID NO: 2115052
aagauaagcaucuuuguca

SEQ ID NO: 2115054 - RNA, 19 nt, Artificial Sequence
  Description of Artificial Sequence: Synthetic oligonucleotide
  Sense strand starting at position 253 of SEQ ID NO: 1882361
gggauuguacaauguuagu

SEQ ID NO: 2115055 - RNA, 19 nt, Artificial Sequence
  Description of Artificial Sequence: Synthetic oligonucleotide
  Antisense strand to SEQ ID NO: 2115054
acuaacauuguacaauccc

SEQ ID NO: 2115056 - RNA, 19 nt, Artificial Sequence
  Description of Artificial Sequence: Synthetic oligonucleotide
  Sense strand starting at position 289 of SEQ ID NO: 1882361
ugcauaucugauggugaua

SEQ ID NO: 2115057 - RNA, 19 nt, Artificial Sequence
  Description of Artificial Sequence: Synthetic oligonucleotide
  Antisense strand to SEQ ID NO: 2115056
uaucaccaucagauaugca

SEQ ID NO: 2115058 - RNA, 19 nt, Artificial Sequence
  Description of Artificial Sequence: Synthetic oligonucleotide
  Sense strand starting at position 300 of SEQ ID NO: 1882361
uggugauacguguaacgac

SEQ ID NO: 2115059 - RNA, 19 nt, Artificial Sequence
  Description of Artificial Sequence: Synthetic oligonucleotide
  Antisense strand to SEQ ID NO: 2115058
gucguuacacguaucacca

SEQ ID NO: 2115060 - RNA, 19 nt, Artificial Sequence
  Description of Artificial Sequence: Synthetic oligonucleotide
  Sense strand starting at position 385 of SEQ ID NO: 1882361
uuaauaggguugucagaaa

SEQ ID NO: 2115061 - RNA, 19 nt, Artificial Sequence
  Description of Artificial Sequence: Synthetic oligonucleotide
  Antisense strand to SEQ ID NO: 2115060
uuucugacaacccuauuaa

SEQ ID NO: 2115062 - RNA, 19 nt, Artificial Sequence
  Description of Artificial Sequence: Synthetic oligonucleotide
  Sense strand starting at position 417 of SEQ ID NO: 1882361
agguaaacuugagcaaaga

SEQ ID NO: 2115063 - RNA, 19 nt, Artificial Sequence
  Description of Artificial Sequence: Synthetic oligonucleotide
  Antisense strand to SEQ ID NO: 2115062
ucuuugcucaaguuuaccu

SEQ ID NO: 2115064 - RNA, 19 nt, Artificial Sequence
  Description of Artificial Sequence: Synthetic oligonucleotide
  Sense strand starting at position 480 of SEQ ID NO: 1882361
gagaguuccagguggagga

SEQ ID NO: 2115065 - RNA, 19 nt, Artificial Sequence
  Description of Artificial Sequence: Synthetic oligonucleotide
  Antisense strand to SEQ ID NO: 2115064
uccuccaccuggaacucuc

SEQ ID NO: 2115066 - RNA, 19 nt, Artificial Sequence
  Description of Artificial Sequence: Synthetic oligonucleotide
  Sense strand starting at position 570 of SEQ ID NO: 1882361
cuaggagaguaauaggaaa

SEQ ID NO: 2115067 - RNA, 19 nt, Artificial Sequence
  Description of Artificial Sequence: Synthetic oligonucleotide
  Antisense strand to SEQ ID NO: 2115066
uuuccuauuacucuccuag

SEQ ID NO: 2115068 - RNA, 19 nt, Artificial Sequence
  Description of Artificial Sequence: Synthetic oligonucleotide
  Sense strand starting at position 665 of SEQ ID NO: 1882361
augguaugaucugccuuau

SEQ ID NO: 2115069 - RNA, 19 nt, Artificial Sequence
  Description of Artificial Sequence: Synthetic oligonucleotide
  Antisense strand to SEQ ID NO: 2115068
auaaggcagaucauaccau

SEQ ID NO: 2115070 - RNA, 19 nt, Artificial Sequence
  Description of Artificial Sequence: Synthetic oligonucleotide
  Sense strand starting at position 697 of SEQ ID NO: 1882361
aguugcugcacugagauaa

SEQ ID NO: 2115071 - RNA, 19 nt, Artificial Sequence
  Description of Artificial Sequence: Synthetic oligonucleotide
  Antisense strand to SEQ ID NO: 2115070
uuaucucagugcagcaacu

SEQ ID NO: 2115072 - RNA, 19 nt, Artificial Sequence
  Description of Artificial Sequence: Synthetic oligonucleotide
  Sense strand starting at position 806 of SEQ ID NO: 1882361
cagaaugguggcgguagaa

SEQ ID NO: 2115073 - RNA, 19 nt, Artificial Sequence
  Description of Artificial Sequence: Synthetic oligonucleotide
  Antisense strand to SEQ ID NO: 2115072
uucuaccgccaccauucug

SEQ ID NO: 2115074 - RNA, 19 nt, Artificial Sequence
  Description of Artificial Sequence: Synthetic oligonucleotide
  Sense strand starting at position 815 of SEQ ID NO: 1882361
ggcgguagaauugggaaga

SEQ ID NO: 2115075 - RNA, 19 nt, Artificial Sequence
  Description of Artificial Sequence: Synthetic oligonucleotide
  Antisense strand to SEQ ID NO: 2115074
ucuucccaauucuaccgcc

SEQ ID NO: 2115076 - RNA, 19 nt, Artificial Sequence
  Description of Artificial Sequence: Synthetic oligonucleotide
  Sense strand starting at position 869 of SEQ ID NO: 1882361
uuacuaaugguguggaucu

SEQ ID NO: 2115077 - RNA, 19 nt, Artificial Sequence
  Description of Artificial Sequence: Synthetic oligonucleotide
  Antisense strand to SEQ ID NO: 2115076
agauccacaccauuaguaa

SEQ ID NO: 2115078 - RNA, 19 nt, Artificial Sequence
  Description of Artificial Sequence: Synthetic oligonucleotide
  Sense strand starting at position 1106 of SEQ ID NO: 1882361
uggcuuugaucucugauua

SEQ ID NO: 2115079 - RNA, 19 nt, Artificial Sequence
  Description of Artificial Sequence: Synthetic oligonucleotide
  Antisense strand to SEQ ID NO: 2115078
uaaucagagaucaaagcca

SEQ ID NO: 2115080 - RNA, 19 nt, Artificial Sequence
  Description of Artificial Sequence: Synthetic oligonucleotide
  Sense strand starting at position 1107 of SEQ ID NO: 1882361
ggcuuugaucucugauuaa

SEQ ID NO: 2115081 - RNA, 19 nt, Artificial Sequence
  Description of Artificial Sequence: Synthetic oligonucleotide
  Antisense strand to SEQ ID NO: 2115080
uuaaucagagaucaaagcc

SEQ ID NO: 2115082 - RNA, 19 nt, Artificial Sequence
  Description of Artificial Sequence: Synthetic oligonucleotide
  Sense strand starting at position 1110 of SEQ ID NO: 1882361
uuugaucucugauuaaagg

SEQ ID NO: 2115083 - RNA, 19 nt, Artificial Sequence
  Description of Artificial Sequence: Synthetic oligonucleotide
  Antisense strand to SEQ ID NO: 2115082
ccuuuaaucagagaucaaa

SEQ ID NO: 2115084 - RNA, 19 nt, Artificial Sequence
  Description of Artificial Sequence: Synthetic oligonucleotide
  Sense strand starting at position 1131 of SEQ ID NO: 1882361
guggcucagcuuuaaacua

SEQ ID NO: 2115085 - RNA, 19 nt, Artificial Sequence
  Description of Artificial Sequence: Synthetic oligonucleotide
  Antisense strand to SEQ ID NO: 2115084
uaguuuaaagcugagccac

SEQ ID NO: 2115086 - RNA, 19 nt, Artificial Sequence
  Description of Artificial Sequence: Synthetic oligonucleotide
  Sense strand starting at position 1245 of SEQ ID NO: 1882361
guagacuaaucuuuguauc

SEQ ID NO: 2115087 - RNA, 19 nt, Artificial Sequence
  Description of Artificial Sequence: Synthetic oligonucleotide
  Antisense strand to SEQ ID NO: 2115086
gauacaaagauuagucuac

SEQ ID NO: 2115088 - RNA, 19 nt, Artificial Sequence
  Description of Artificial Sequence: Synthetic oligonucleotide
  Sense strand starting at position 1463 of SEQ ID NO: 1882361
cucgcucaacaggaauaau

SEQ ID NO: 2115089 - RNA, 19 nt, Artificial Sequence
  Description of Artificial Sequence: Synthetic oligonucleotide
  Antisense strand to SEQ ID NO: 2115088
auuauuccuguugagcgag

SEQ ID NO: 2115090 - RNA, 19 nt, Artificial Sequence
  Description of Artificial Sequence: Synthetic oligonucleotide
  Sense strand starting at position 1770 of SEQ ID NO: 1882361
aguguuguccgggcuuuca

SEQ ID NO: 2115091 - RNA, 19 nt, Artificial Sequence
  Description of Artificial Sequence: Synthetic oligonucleotide
  Antisense strand to SEQ ID NO: 2115090
ugaaagcccggacaacacu

SEQ ID NO: 2115092 - RNA, 19 nt, Artificial Sequence
  Description of Artificial Sequence: Synthetic oligonucleotide
  Sense strand starting at position 1772 of SEQ ID NO: 1882361
uguuguccgggcuuucauu

SEQ ID NO: 2115093 - RNA, 19 nt, Artificial Sequence
  Description of Artificial Sequence: Synthetic oligonucleotide
  Antisense strand to SEQ ID NO: 2115092
aaugaaagcccggacaaca

SEQ ID NO: 2115094 - RNA, 19 nt, Artificial Sequence
  Description of Artificial Sequence: Synthetic oligonucleotide
  Sense strand starting at position 1948 of SEQ ID NO: 1882361
gccgucacugagcaauaca

SEQ ID NO: 2115095 - RNA, 19 nt, Artificial Sequence
  Description of Artificial Sequence: Synthetic oligonucleotide
  Antisense strand to SEQ ID NO: 2115094
uguauugcucagugacggc

SEQ ID NO: 2115096 - RNA, 19 nt, Artificial Sequence
  Description of Artificial Sequence: Synthetic oligonucleotide
  Sense strand starting at position 2804 of SEQ ID NO: 1882361
acgcauucgauuuaagcua

SEQ ID NO: 2115097 - RNA, 19 nt, Artificial Sequence
  Description of Artificial Sequence: Synthetic oligonucleotide
  Antisense strand to SEQ ID NO: 2115096
uagcuuaaaucgaaugcgu

SEQ ID NO: 2115098 - RNA, 19 nt, Artificial Sequence
  Description of Artificial Sequence: Synthetic oligonucleotide
  Sense strand starting at position 2843 of SEQ ID NO: 1882361
guggccacacuuugauuaa

SEQ ID NO: 2115099 - RNA, 19 nt, Artificial Sequence
  Description of Artificial Sequence: Synthetic oligonucleotide
  Antisense strand to SEQ ID NO: 2115098
uuaaucaaaguguggccac

SEQ ID NO: 2115100 - RNA, 19 nt, Artificial Sequence
  Description of Artificial Sequence: Synthetic oligonucleotide
  Sense strand starting at position 2914 of SEQ ID NO: 1882361
ugagauuccaugcgauuaa

SEQ ID NO: 2115101 - RNA, 19 nt, Artificial Sequence
  Description of Artificial Sequence: Synthetic oligonucleotide
  Antisense strand to SEQ ID NO: 2115100
uuaaucgcauggaaucuca

SEQ ID NO: 2115102 - RNA, 19 nt, Artificial Sequence
  Description of Artificial Sequence: Synthetic oligonucleotide
  Sense strand starting at position 2954 of SEQ ID NO: 1882361
gcagaacuucuagaaccuu

SEQ ID NO: 2115103 - RNA, 19 nt, Artificial Sequence
  Description of Artificial Sequence: Synthetic oligonucleotide
  Antisense strand to SEQ ID NO: 2115102
aagguucuagaaguucugc

SEQ ID NO: 2115104 - RNA, 19 nt, Artificial Sequence
  Description of Artificial Sequence: Synthetic oligonucleotide
  Sense strand starting at position 3166 of SEQ ID NO: 1882361
gugcuucgugcagcagaga

SEQ ID NO: 2115105 - RNA, 19 nt, Artificial Sequence
  Description of Artificial Sequence: Synthetic oligonucleotide
  Antisense strand to SEQ ID NO: 2115104
ucucugcugcacgaagcac

SEQ ID NO: 2115106 - RNA, 19 nt, Artificial Sequence
  Description of Artificial Sequence: Synthetic oligonucleotide
  Sense strand starting at position 3221 of SEQ ID NO: 1882361
gggauucagcgguuccguu

SEQ ID NO: 2115107 - RNA, 19 nt, Artificial Sequence
  Description of Artificial Sequence: Synthetic oligonucleotide
  Antisense strand to SEQ ID NO: 2115106
aacggaaccgcugaauccc

SEQ ID NO: 2115108 - RNA, 19 nt, Artificial Sequence
  Description of Artificial Sequence: Synthetic oligonucleotide
  Sense strand starting at position 3238 of SEQ ID NO: 1882361
uucgucucucgguauuuau

SEQ ID NO: 2115109 - RNA, 19 nt, Artificial Sequence
  Description of Artificial Sequence: Synthetic oligonucleotide
  Antisense strand to SEQ ID NO: 2115108
auaaauaccgagagacgaa

SEQ ID NO: 2115110 - RNA, 19 nt, Artificial Sequence
  Description of Artificial Sequence: Synthetic oligonucleotide
  Sense strand starting at position 3348 of SEQ ID NO: 1882361
uugguaauacaguaguaga

SEQ ID NO: 2115111 - RNA, 19 nt, Artificial Sequence
  Description of Artificial Sequence: Synthetic oligonucleotide
  Antisense strand to SEQ ID NO: 2115110
ucuacuacuguauuaccaa

SEQ ID NO: 2115112 - RNA, 19 nt, Artificial Sequence
  Description of Artificial Sequence: Synthetic oligonucleotide
  Sense strand starting at position 3413 of SEQ ID NO: 1882361
agacuuuaacgguguauug

SEQ ID NO: 2115113 - RNA, 19 nt, Artificial Sequence
  Description of Artificial Sequence: Synthetic oligonucleotide
  Antisense strand to SEQ ID NO: 2115112
caauacaccguuaaagucu

SEQ ID NO: 2115114 - RNA, 19 nt, Artificial Sequence
  Description of Artificial Sequence: Synthetic oligonucleotide
  Sense strand starting at position 3415 of SEQ ID NO: 1882361
acuuuaacgguguauugaa

SEQ ID NO: 2115115 - RNA, 19 nt, Artificial Sequence
  Description of Artificial Sequence: Synthetic oligonucleotide
  Antisense strand to SEQ ID NO: 2115114
uucaauacaccguuaaagu

SEQ ID NO: 2115116 - RNA, 19 nt, Artificial Sequence
  Description of Artificial Sequence: Synthetic oligonucleotide
  Sense strand starting at position 3465 of SEQ ID NO: 1882361
ucaaguuacuguguaaauu

SEQ ID NO: 2115117 - RNA, 19 nt, Artificial Sequence
  Description of Artificial Sequence: Synthetic oligonucleotide
  Antisense strand to SEQ ID NO: 2115116
aauuuacacaguaacuuga

SEQ ID NO: 2115118 - RNA, 19 nt, Artificial Sequence
  Description of Artificial Sequence: Synthetic oligonucleotide
  Sense strand starting at position 3524 of SEQ ID NO: 1882361
cugcaauuccgugaaacug

SEQ ID NO: 2115119 - RNA, 19 nt, Artificial Sequence
  Description of Artificial Sequence: Synthetic oligonucleotide
  Antisense strand to SEQ ID NO: 2115118
caguuucacggaauugcag

SEQ ID NO: 2115120 - RNA, 19 nt, Artificial Sequence
  Description of Artificial Sequence: Synthetic oligonucleotide
  Sense strand starting at position 3572 of SEQ ID NO: 1882361
uagguugugcaugagcaaa

SEQ ID NO: 2115121 - RNA, 19 nt, Artificial Sequence
  Description of Artificial Sequence: Synthetic oligonucleotide
  Antisense strand to SEQ ID NO: 2115120
uuugcucaugcacaaccua

SEQ ID NO: 2115122 - RNA, 19 nt, Artificial Sequence
  Description of Artificial Sequence: Synthetic oligonucleotide
  Sense strand starting at position 3721 of SEQ ID NO: 1882361
gaggcauuauuauuguuac

SEQ ID NO: 2115123 - RNA, 19 nt, Artificial Sequence
  Description of Artificial Sequence: Synthetic oligonucleotide
  Antisense strand to SEQ ID NO: 2115122
guaacaauaauaaugccuc

SEQ ID NO: 2115124 - RNA, 19 nt, Artificial Sequence
  Description of Artificial Sequence: Synthetic oligonucleotide
  Sense strand starting at position 3732 of SEQ ID NO: 1882361
auuguuacuauugggagaa

SEQ ID NO: 2115125 - RNA, 19 nt, Artificial Sequence
  Description of Artificial Sequence: Synthetic oligonucleotide
  Antisense strand to SEQ ID NO: 2115124
uucucccaauaguaacaau

SEQ ID NO: 2115126 - RNA, 19 nt, Artificial Sequence
  Description of Artificial Sequence: Synthetic oligonucleotide
  Sense strand starting at position 3763 of SEQ ID NO: 1882361
gugagagauucuccacuca

SEQ ID NO: 2115127 - RNA, 19 nt, Artificial Sequence
  Description of Artificial Sequence: Synthetic oligonucleotide
  Antisense strand to SEQ ID NO: 2115126
ugaguggagaaucucucac

SEQ ID NO: 2115128 - RNA, 19 nt, Artificial Sequence
  Description of Artificial Sequence: Synthetic oligonucleotide
  Sense strand starting at position 3857 of SEQ ID NO: 1882361
aguaaugcuuccucaugga

SEQ ID NO: 2115129 - RNA, 19 nt, Artificial Sequence
  Description of Artificial Sequence: Synthetic oligonucleotide
  Antisense strand to SEQ ID NO: 2115128
uccaugaggaagcauuacu

SEQ ID NO: 2115130 - RNA, 19 nt, Artificial Sequence
  Description of Artificial Sequence: Synthetic oligonucleotide
  Sense strand starting at position 3931 of SEQ ID NO: 1882361
guagaaauugguggccuca

SEQ ID NO: 2115131 - RNA, 19 nt, Artificial Sequence
  Description of Artificial Sequence: Synthetic oligonucleotide
  Antisense strand to SEQ ID NO: 2115130
ugaggccaccaauuucuac

SEQ ID NO: 2115132 - RNA, 19 nt, Artificial Sequence
  Description of Artificial Sequence: Synthetic oligonucleotide
  Sense strand starting at position 105 of SEQ ID NO: 1882362
ugggcuggguaauccauua

SEQ ID NO: 2115133 - RNA, 19 nt, Artificial Sequence
  Description of Artificial Sequence: Synthetic oligonucleotide
  Antisense strand to SEQ ID NO: 2115132
uaauggauuacccagccca

SEQ ID NO: 2115134 - RNA, 19 nt, Artificial Sequence
  Description of Artificial Sequence: Synthetic oligonucleotide
  Sense strand starting at position 110 of SEQ ID NO: 1882362
uggguaauccauuaaaguu

SEQ ID NO: 2115135 - RNA, 19 nt, Artificial Sequence
  Description of Artificial Sequence: Synthetic oligonucleotide
  Antisense strand to SEQ ID NO: 2115134
aacuuuaauggauuaccca

SEQ ID NO: 2115136 - RNA, 19 nt, Artificial Sequence
  Description of Artificial Sequence: Synthetic oligonucleotide
  Sense strand starting at position 471 of SEQ ID NO: 1882362
ggcuucugugaacacuaau

SEQ ID NO: 2115137 - RNA, 19 nt, Artificial Sequence
  Description of Artificial Sequence: Synthetic oligonucleotide
  Antisense strand to SEQ ID NO: 2115136
auuaguguucacagaagcc

SEQ ID NO: 2115138 - RNA, 19 nt, Artificial Sequence
  Description of Artificial Sequence: Synthetic oligonucleotide
  Sense strand starting at position 573 of SEQ ID NO: 1882362
caaacaugugaucagagcu

SEQ ID NO: 2115139 - RNA, 19 nt, Artificial Sequence
  Description of Artificial Sequence: Synthetic oligonucleotide
  Antisense strand to SEQ ID NO: 2115138
agcucugaucacauguuug

SEQ ID NO: 2115140 - RNA, 19 nt, Artificial Sequence
  Description of Artificial Sequence: Synthetic oligonucleotide
  Sense strand starting at position 579 of SEQ ID NO: 1882362
ugugaucagagcuaggcaa

SEQ ID NO: 2115141 - RNA, 19 nt, Artificial Sequence
  Description of Artificial Sequence: Synthetic oligonucleotide
  Antisense strand to SEQ ID NO: 2115140
uugccuagcucugaucaca

SEQ ID NO: 2115142 - RNA, 19 nt, Artificial Sequence
  Description of Artificial Sequence: Synthetic oligonucleotide
  Sense strand starting at position 804 of SEQ ID NO: 1882362
uuaaguccugagcaucaua

SEQ ID NO: 2115143 - RNA, 19 nt, Artificial Sequence
  Description of Artificial Sequence: Synthetic oligonucleotide
  Antisense strand to SEQ ID NO: 2115142
uaugaugcucaggacuuaa

SEQ ID NO: 2115144 - RNA, 19 nt, Artificial Sequence
  Description of Artificial Sequence: Synthetic oligonucleotide
  Sense strand starting at position 807 of SEQ ID NO: 1882362
aguccugagcaucauacau

SEQ ID NO: 2115145 - RNA, 19 nt, Artificial Sequence
  Description of Artificial Sequence: Synthetic oligonucleotide
  Antisense strand to SEQ ID NO: 2115144
auguaugaugcucaggacu

SEQ ID NO: 2115146 - RNA, 19 nt, Artificial Sequence
  Description of Artificial Sequence: Synthetic oligonucleotide
  Sense strand starting at position 844 of SEQ ID NO: 1882362
ucugcacucugauuacaga

SEQ ID NO: 2115147 - RNA, 19 nt, Artificial Sequence
  Description of Artificial Sequence: Synthetic oligonucleotide
  Antisense strand to SEQ ID NO: 2115146
ucuguaaucagagugcaga

SEQ ID NO: 2115148 - RNA, 19 nt, Artificial Sequence
  Description of Artificial Sequence: Synthetic oligonucleotide
  Sense strand starting at position 845 of SEQ ID NO: 1882362
cugcacucugauuacagaa

SEQ ID NO: 2115149 - RNA, 19 nt, Artificial Sequence
  Description of Artificial Sequence: Synthetic oligonucleotide
  Antisense strand to SEQ ID NO: 2115148
uucuguaaucagagugcag

SEQ ID NO: 2115150 - RNA, 19 nt, Artificial Sequence
  Description of Artificial Sequence: Synthetic oligonucleotide
  Sense strand starting at position 860 of SEQ ID NO: 1882362
agaacacugucauuaagug

SEQ ID NO: 2115151 - RNA, 19 nt, Artificial Sequence
  Description of Artificial Sequence: Synthetic oligonucleotide
  Antisense strand to SEQ ID NO: 2115150
cacuuaaugacaguguucu

SEQ ID NO: 2115152 - RNA, 19 nt, Artificial Sequence
  Description of Artificial Sequence: Synthetic oligonucleotide
  Sense strand starting at position 869 of SEQ ID NO: 1882362
ucauuaagugagcaaauua

SEQ ID NO: 2115153 - RNA, 19 nt, Artificial Sequence
  Description of Artificial Sequence: Synthetic oligonucleotide
  Antisense strand to SEQ ID NO: 2115152
uaauuugcucacuuaauga

SEQ ID NO: 2115154 - RNA, 19 nt, Artificial Sequence
  Description of Artificial Sequence: Synthetic oligonucleotide
  Sense strand starting at position 994 of SEQ ID NO: 1882362
ucuugagacugauuaguac

SEQ ID NO: 2115155 - RNA, 19 nt, Artificial Sequence
  Description of Artificial Sequence: Synthetic oligonucleotide
  Antisense strand to SEQ ID NO: 2115154
guacuaaucagucucaaga

SEQ ID NO: 2115156 - RNA, 19 nt, Artificial Sequence
  Description of Artificial Sequence: Synthetic oligonucleotide
  Sense strand starting at position 997 of SEQ ID NO: 1882362
ugagacugauuaguacaau

SEQ ID NO: 2115157 - RNA, 19 nt, Artificial Sequence
  Description of Artificial Sequence: Synthetic oligonucleotide
  Antisense strand to SEQ ID NO: 2115156
auuguacuaaucagucuca

SEQ ID NO: 2115158 - RNA, 19 nt, Artificial Sequence
  Description of Artificial Sequence: Synthetic oligonucleotide
  Sense strand starting at position 1131 of SEQ ID NO: 1882362
cuaauauuuguaugugagc

SEQ ID NO: 2115159 - RNA, 19 nt, Artificial Sequence
  Description of Artificial Sequence: Synthetic oligonucleotide
  Antisense strand to SEQ ID NO: 2115158
gcucacauacaaauauuag

SEQ ID NO: 2115160 - RNA, 19 nt, Artificial Sequence
  Description of Artificial Sequence: Synthetic oligonucleotide
  Sense strand starting at position 1132 of SEQ ID NO: 1882362
uaauauuuguaugugagcu

SEQ ID NO: 2115161 - RNA, 19 nt, Artificial Sequence
  Description of Artificial Sequence: Synthetic oligonucleotide
  Antisense strand to SEQ ID NO: 2115160
agcucacauacaaauauua

SEQ ID NO: 2115162 - RNA, 19 nt, Artificial Sequence
  Description of Artificial Sequence: Synthetic oligonucleotide
  Sense strand starting at position 1205 of SEQ ID NO: 1882362
gagucugaacaucaguauu

SEQ ID NO: 2115163 - RNA, 19 nt, Artificial Sequence
  Description of Artificial Sequence: Synthetic oligonucleotide
  Antisense strand to SEQ ID NO: 2115162
aauacugauguucagacuc

SEQ ID NO: 2115164 - RNA, 19 nt, Artificial Sequence
  Description of Artificial Sequence: Synthetic oligonucleotide
  Sense strand starting at position 1207 of SEQ ID NO: 1882362
gucugaacaucaguauuau

SEQ ID NO: 2115165 - RNA, 19 nt, Artificial Sequence
  Description of Artificial Sequence: Synthetic oligonucleotide
  Antisense strand to SEQ ID NO: 2115164
auaauacugauguucagac

SEQ ID NO: 2115166 - RNA, 19 nt, Artificial Sequence
  Description of Artificial Sequence: Synthetic oligonucleotide
  Sense strand starting at position 1217 of SEQ ID NO: 1882362
caguauuaucaccaguggu

SEQ ID NO: 2115167 - RNA, 19 nt, Artificial Sequence
  Description of Artificial Sequence: Synthetic oligonucleotide
  Antisense strand to SEQ ID NO: 2115166
accacuggugauaauacug

SEQ ID NO: 2115168 - RNA, 19 nt, Artificial Sequence
  Description of Artificial Sequence: Synthetic oligonucleotide
  Sense strand starting at position 1220 of SEQ ID NO: 1882362
uauuaucaccaguggugga

SEQ ID NO: 2115169 - RNA, 19 nt, Artificial Sequence
  Description of Artificial Sequence: Synthetic oligonucleotide
  Antisense strand to SEQ ID NO: 2115168
uccaccacuggugauaaua

SEQ ID NO: 2115170 - RNA, 19 nt, Artificial Sequence
  Description of Artificial Sequence: Synthetic oligonucleotide
  Sense strand starting at position 1233 of SEQ ID NO: 1882362
gguggauuaggaugacacu

SEQ ID NO: 2115171 - RNA, 19 nt, Artificial Sequence
  Description of Artificial Sequence: Synthetic oligonucleotide
  Antisense strand to SEQ ID NO: 2115170
agugucauccuaauccacc

SEQ ID NO: 2115172 - RNA, 19 nt, Artificial Sequence
  Description of Artificial Sequence: Synthetic oligonucleotide
  Sense strand starting at position 1242 of SEQ ID NO: 1882362
ggaugacacuagucuauuc

SEQ ID NO: 2115173 - RNA, 19 nt, Artificial Sequence
  Description of Artificial Sequence: Synthetic oligonucleotide
  Antisense strand to SEQ ID NO: 2115172
gaauagacuagugucaucc

SEQ ID NO: 2115174 - RNA, 19 nt, Artificial Sequence
  Description of Artificial Sequence: Synthetic oligonucleotide
  Sense strand starting at position 1413 of SEQ ID NO: 1882362
gugguugaggcugaaacau

SEQ ID NO: 2115175 - RNA, 19 nt, Artificial Sequence
  Description of Artificial Sequence: Synthetic oligonucleotide
  Antisense strand to SEQ ID NO: 2115174
auguuucagccucaaccac

SEQ ID NO: 2115176 - RNA, 19 nt, Artificial Sequence
  Description of Artificial Sequence: Synthetic oligonucleotide
  Sense strand starting at position 1471 of SEQ ID NO: 1882362
ucugaaacagugggucuua

SEQ ID NO: 2115177 - RNA, 19 nt, Artificial Sequence
  Description of Artificial Sequence: Synthetic oligonucleotide
  Antisense strand to SEQ ID NO: 2115176
uaagacccacuguuucaga

SEQ ID NO: 2115178 - RNA, 19 nt, Artificial Sequence
  Description of Artificial Sequence: Synthetic oligonucleotide
  Sense strand starting at position 1481 of SEQ ID NO: 1882362
ugggucuuaccucagaugu

SEQ ID NO: 2115179 - RNA, 19 nt, Artificial Sequence
  Description of Artificial Sequence: Synthetic oligonucleotide
  Antisense strand to SEQ ID NO: 2115178
acaucugagguaagaccca

SEQ ID NO: 2115180 - RNA, 19 nt, Artificial Sequence
  Description of Artificial Sequence: Synthetic oligonucleotide
  Sense strand starting at position 2023 of SEQ ID NO: 1882362
gcagauaaaucugcauaug

SEQ ID NO: 2115181 - RNA, 19 nt, Artificial Sequence
  Description of Artificial Sequence: Synthetic oligonucleotide
  Antisense strand to SEQ ID NO: 2115180
cauaugcagauuuaucugc

SEQ ID NO: 2115182 - RNA, 19 nt, Artificial Sequence
  Description of Artificial Sequence: Synthetic oligonucleotide
  Sense strand starting at position 2047 of SEQ ID NO: 1882362
uaggguuauccuggguaca

SEQ ID NO: 2115183 - RNA, 19 nt, Artificial Sequence
  Description of Artificial Sequence: Synthetic oligonucleotide
  Antisense strand to SEQ ID NO: 2115182
uguacccaggauaacccua

SEQ ID NO: 2115184 - RNA, 19 nt, Artificial Sequence
  Description of Artificial Sequence: Synthetic oligonucleotide
  Sense strand starting at position 2048 of SEQ ID NO: 1882362
aggguuauccuggguacag

SEQ ID NO: 2115185 - RNA, 19 nt, Artificial Sequence
  Description of Artificial Sequence: Synthetic oligonucleotide
  Antisense strand to SEQ ID NO: 2115184
cuguacccaggauaacccu

SEQ ID NO: 2115186 - RNA, 19 nt, Artificial Sequence
  Description of Artificial Sequence: Synthetic oligonucleotide
  Sense strand starting at position 2050 of SEQ ID NO: 1882362
gguuauccuggguacaguu

SEQ ID NO: 2115187 - RNA, 19 nt, Artificial Sequence
  Description of Artificial Sequence: Synthetic oligonucleotide
  Antisense strand to SEQ ID NO: 2115186
aacuguacccaggauaacc

SEQ ID NO: 2115188 - RNA, 19 nt, Artificial Sequence
  Description of Artificial Sequence: Synthetic oligonucleotide
  Sense strand starting at position 2613 of SEQ ID NO: 1882362
ccauaaucauuugaggaag

SEQ ID NO: 2115189 - RNA, 19 nt, Artificial Sequence
  Description of Artificial Sequence: Synthetic oligonucleotide
  Antisense strand to SEQ ID NO: 2115188
cuuccucaaaugauuaugg

SEQ ID NO: 2115190 - RNA, 19 nt, Artificial Sequence
  Description of Artificial Sequence: Synthetic oligonucleotide
  Sense strand starting at position 2725 of SEQ ID NO: 1882362
agcaaugaguccucuacca

SEQ ID NO: 2115191 - RNA, 19 nt, Artificial Sequence
  Description of Artificial Sequence: Synthetic oligonucleotide
  Antisense strand to SEQ ID NO: 2115190
ugguagaggacucauugcu

SEQ ID NO: 2115192 - RNA, 19 nt, Artificial Sequence
  Description of Artificial Sequence: Synthetic oligonucleotide
  Sense strand starting at position 2760 of SEQ ID NO: 1882362
agugaucugaccggaagga

SEQ ID NO: 2115193 - RNA, 19 nt, Artificial Sequence
  Description of Artificial Sequence: Synthetic oligonucleotide
  Antisense strand to SEQ ID NO: 2115192
uccuuccggucagaucacu

SEQ ID NO: 2115194 - RNA, 19 nt, Artificial Sequence
  Description of Artificial Sequence: Synthetic oligonucleotide
  Sense strand starting at position 2809 of SEQ ID NO: 1882362
ugaauuugaugacauagau

SEQ ID NO: 2115195 - RNA, 19 nt, Artificial Sequence
  Description of Artificial Sequence: Synthetic oligonucleotide
  Antisense strand to SEQ ID NO: 2115194
aucuaugucaucaaauuca

SEQ ID NO: 2115196 - RNA, 19 nt, Artificial Sequence
  Description of Artificial Sequence: Synthetic oligonucleotide
  Sense strand starting at position 2875 of SEQ ID NO: 1882362
aacauugugcuagaaagca

SEQ ID NO: 2115197 - RNA, 19 nt, Artificial Sequence
  Description of Artificial Sequence: Synthetic oligonucleotide
  Antisense strand to SEQ ID NO: 2115196
ugcuuucuagcacaauguu

SEQ ID NO: 2115198 - RNA, 19 nt, Artificial Sequence
  Description of Artificial Sequence: Synthetic oligonucleotide
  Sense strand starting at position 3227 of SEQ ID NO: 1882362
uugugauaauugcucaaua

SEQ ID NO: 2115199 - RNA, 19 nt, Artificial Sequence
  Description of Artificial Sequence: Synthetic oligonucleotide
  Antisense strand to SEQ ID NO: 2115198
uauugagcaauuaucacaa

SEQ ID NO: 2115200 - RNA, 19 nt, Artificial Sequence
  Description of Artificial Sequence: Synthetic oligonucleotide
  Sense strand starting at position 3228 of SEQ ID NO: 1882362
ugugauaauugcucaauaa

SEQ ID NO: 2115201 - RNA, 19 nt, Artificial Sequence
  Description of Artificial Sequence: Synthetic oligonucleotide
  Antisense strand to SEQ ID NO: 2115200
uuauugagcaauuaucaca

SEQ ID NO: 2115202 - RNA, 19 nt, Artificial Sequence
  Description of Artificial Sequence: Synthetic oligonucleotide
  Sense strand starting at position 3229 of SEQ ID NO: 1882362
gugauaauugcucaauaaa

SEQ ID NO: 2115203 - RNA, 19 nt, Artificial Sequence
  Description of Artificial Sequence: Synthetic oligonucleotide
  Antisense strand to SEQ ID NO: 2115202
uuuauugagcaauuaucac

SEQ ID NO: 2115204 - RNA, 19 nt, Artificial Sequence
  Description of Artificial Sequence: Synthetic oligonucleotide
  Sense strand starting at position 3310 of SEQ ID NO: 1882362
gcaauaucugcugacaggu

SEQ ID NO: 2115205 - RNA, 19 nt, Artificial Sequence
  Description of Artificial Sequence: Synthetic oligonucleotide
  Antisense strand to SEQ ID NO: 2115204
accugucagcagauauugc

SEQ ID NO: 2115206 - RNA, 19 nt, Artificial Sequence
  Description of Artificial Sequence: Synthetic oligonucleotide
  Sense strand starting at position 3329 of SEQ ID NO: 1882362
ucagaagcuucuucuggaa

SEQ ID NO: 2115207 - RNA, 19 nt, Artificial Sequence
  Description of Artificial Sequence: Synthetic oligonucleotide
  Antisense strand to SEQ ID NO: 2115206
uuccagaagaagcuucuga

SEQ ID NO: 2115208 - RNA, 19 nt, Artificial Sequence
  Description of Artificial Sequence: Synthetic oligonucleotide
  Sense strand starting at position 3737 of SEQ ID NO: 1882362
gaaagagcucucgaugucu

SEQ ID NO: 2115209 - RNA, 19 nt, Artificial Sequence
  Description of Artificial Sequence: Synthetic oligonucleotide
  Antisense strand to SEQ ID NO: 2115208
agacaucgagagcucuuuc

SEQ ID NO: 2115210 - RNA, 19 nt, Artificial Sequence
  Description of Artificial Sequence: Synthetic oligonucleotide
  Sense strand starting at position 3791 of SEQ ID NO: 1882362
guaguauuggguuauaacu

SEQ ID NO: 2115211 - RNA, 19 nt, Artificial Sequence
  Description of Artificial Sequence: Synthetic oligonucleotide
  Antisense strand to SEQ ID NO: 2115210
aguuauaacccaauacuac

SEQ ID NO: 2115212 - RNA, 19 nt, Artificial Sequence
  Description of Artificial Sequence: Synthetic oligonucleotide
  Sense strand starting at position 146 of SEQ ID NO: 1882363
uugugcuaaguggaaauua

SEQ ID NO: 2115213 - RNA, 19 nt, Artificial Sequence
  Description of Artificial Sequence: Synthetic oligonucleotide
  Antisense strand to SEQ ID NO: 2115212
uaauuuccacuuagcacaa

SEQ ID NO: 2115214 - RNA, 19 nt, Artificial Sequence
  Description of Artificial Sequence: Synthetic oligonucleotide
  Sense strand starting at position 222 of SEQ ID NO: 1882363
cugcgucaugguguuguua

SEQ ID NO: 2115215 - RNA, 19 nt, Artificial Sequence
  Description of Artificial Sequence: Synthetic oligonucleotide
  Antisense strand to SEQ ID NO: 2115214
uaacaacaccaugacgcag

SEQ ID NO: 2115216 - RNA, 19 nt, Artificial Sequence
  Description of Artificial Sequence: Synthetic oligonucleotide
  Sense strand starting at position 241 of SEQ ID NO: 1882363
gguguaauuaaugaagguu

SEQ ID NO: 2115217 - RNA, 19 nt, Artificial Sequence
  Description of Artificial Sequence: Synthetic oligonucleotide
  Antisense strand to SEQ ID NO: 2115216
aaccuucauuaauuacacc

SEQ ID NO: 2115218 - RNA, 19 nt, Artificial Sequence
  Description of Artificial Sequence: Synthetic oligonucleotide
  Sense strand starting at position 326 of SEQ ID NO: 1882363
uagugacgacuuuauuaua

SEQ ID NO: 2115219 - RNA, 19 nt, Artificial Sequence
  Description of Artificial Sequence: Synthetic oligonucleotide
  Antisense strand to SEQ ID NO: 2115218
uauaauaaagucgucacua

SEQ ID NO: 2115220 - RNA, 19 nt, Artificial Sequence
  Description of Artificial Sequence: Synthetic oligonucleotide
  Sense strand starting at position 492 of SEQ ID NO: 1882363
acgacaauugcccaaugaa

SEQ ID NO: 2115221 - RNA, 19 nt, Artificial Sequence
  Description of Artificial Sequence: Synthetic oligonucleotide
  Antisense strand to SEQ ID NO: 2115220
uucauugggcaauugucgu

SEQ ID NO: 2115222 - RNA, 19 nt, Artificial Sequence
  Description of Artificial Sequence: Synthetic oligonucleotide
  Sense strand starting at position 551 of SEQ ID NO: 1882363
ucauguuacucucuggaaa

SEQ ID NO: 2115223 - RNA, 19 nt, Artificial Sequence
  Description of Artificial Sequence: Synthetic oligonucleotide
  Antisense strand to SEQ ID NO: 2115222
uuuccagagaguaacauga

SEQ ID NO: 2115224 - RNA, 19 nt, Artificial Sequence
  Description of Artificial Sequence: Synthetic oligonucleotide
  Sense strand starting at position 552 of SEQ ID NO: 1882363
cauguuacucucuggaaag

SEQ ID NO: 2115225 - RNA, 19 nt, Artificial Sequence
  Description of Artificial Sequence: Synthetic oligonucleotide
  Antisense strand to SEQ ID NO: 2115224
cuuuccagagaguaacaug

SEQ ID NO: 2115226 - RNA, 19 nt, Artificial Sequence
  Description of Artificial Sequence: Synthetic oligonucleotide
  Sense strand starting at position 705 of SEQ ID NO: 1882363
aacauacugucuuugagga

SEQ ID NO: 2115227 - RNA, 19 nt, Artificial Sequence
  Description of Artificial Sequence: Synthetic oligonucleotide
  Antisense strand to SEQ ID NO: 2115226
uccucaaagacaguauguu

SEQ ID NO: 2115228 - RNA, 19 nt, Artificial Sequence
  Description of Artificial Sequence: Synthetic oligonucleotide
  Sense strand starting at position 846 of SEQ ID NO: 1882363
uaguuaagccaaggagaga

SEQ ID NO: 2115229 - RNA, 19 nt, Artificial Sequence
  Description of Artificial Sequence: Synthetic oligonucleotide
  Antisense strand to SEQ ID NO: 2115228
ucucuccuuggcuuaacua

SEQ ID NO: 2115230 - RNA, 19 nt, Artificial Sequence
  Description of Artificial Sequence: Synthetic oligonucleotide
  Sense strand starting at position 893 of SEQ ID NO: 1882363
auguguugagguuaacaaa

SEQ ID NO: 2115231 - RNA, 19 nt, Artificial Sequence
  Description of Artificial Sequence: Synthetic oligonucleotide
  Antisense strand to SEQ ID NO: 2115230
uuuguuaaccucaacacau

SEQ ID NO: 2115232 - RNA, 19 nt, Artificial Sequence
  Description of Artificial Sequence: Synthetic oligonucleotide
  Sense strand starting at position 1027 of SEQ ID NO: 1882363
aguauuccauccuuggaau

SEQ ID NO: 2115233 - RNA, 19 nt, Artificial Sequence
  Description of Artificial Sequence: Synthetic oligonucleotide
  Antisense strand to SEQ ID NO: 2115232
auuccaaggauggaauacu

SEQ ID NO: 2115234 - RNA, 19 nt, Artificial Sequence
  Description of Artificial Sequence: Synthetic oligonucleotide
  Sense strand starting at position 1038 of SEQ ID NO: 1882363
cuuggaauacuccgagaag

SEQ ID NO: 2115235 - RNA, 19 nt, Artificial Sequence
  Description of Artificial Sequence: Synthetic oligonucleotide
  Antisense strand to SEQ ID NO: 2115234
cuucucggaguauuccaag

SEQ ID NO: 2115236 - RNA, 19 nt, Artificial Sequence
  Description of Artificial Sequence: Synthetic oligonucleotide
  Sense strand starting at position 1067 of SEQ ID NO: 1882363
gaaguuggauugccugaaa

SEQ ID NO: 2115237 - RNA, 19 nt, Artificial Sequence
  Description of Artificial Sequence: Synthetic oligonucleotide
  Antisense strand to SEQ ID NO: 2115236
uuucaggcaauccaacuuc

SEQ ID NO: 2115238 - RNA, 19 nt, Artificial Sequence
  Description of Artificial Sequence: Synthetic oligonucleotide
  Sense strand starting at position 1218 of SEQ ID NO: 1882363
ggaguguuucuaggaggga

SEQ ID NO: 2115239 - RNA, 19 nt, Artificial Sequence
  Description of Artificial Sequence: Synthetic oligonucleotide
  Antisense strand to SEQ ID NO: 2115238
ucccuccuagaaacacucc

SEQ ID NO: 2115240 - RNA, 19 nt, Artificial Sequence
  Description of Artificial Sequence: Synthetic oligonucleotide
  Sense strand starting at position 1221 of SEQ ID NO: 1882363
guguuucuaggagggaaca

SEQ ID NO: 2115241 - RNA, 19 nt, Artificial Sequence
  Description of Artificial Sequence: Synthetic oligonucleotide
  Antisense strand to SEQ ID NO: 2115240
uguucccuccuagaaacac

SEQ ID NO: 2115242 - RNA, 19 nt, Artificial Sequence
  Description of Artificial Sequence: Synthetic oligonucleotide
  Sense strand starting at position 1496 of SEQ ID NO: 1882363
augguauggcuucagauga

SEQ ID NO: 2115243 - RNA, 19 nt, Artificial Sequence
  Description of Artificial Sequence: Synthetic oligonucleotide
  Antisense strand to SEQ ID NO: 2115242
ucaucugaagccauaccau

SEQ ID NO: 2115244 - RNA, 19 nt, Artificial Sequence
  Description of Artificial Sequence: Synthetic oligonucleotide
  Sense strand starting at position 1511 of SEQ ID NO: 1882363
augacaaacggauguuauu

SEQ ID NO: 2115245 - RNA, 19 nt, Artificial Sequence
  Description of Artificial Sequence: Synthetic oligonucleotide
  Antisense strand to SEQ ID NO: 2115244
aauaacauccguuugucau

SEQ ID NO: 2115246 - RNA, 19 nt, Artificial Sequence
  Description of Artificial Sequence: Synthetic oligonucleotide
  Sense strand starting at position 1535 of SEQ ID NO: 1882363
uuacuuccgggugagacaa

SEQ ID NO: 2115247 - RNA, 19 nt, Artificial Sequence
  Description of Artificial Sequence: Synthetic oligonucleotide
  Antisense strand to SEQ ID NO: 2115246
uugucucacccggaaguaa

SEQ ID NO: 2115248 - RNA, 19 nt, Artificial Sequence
  Description of Artificial Sequence: Synthetic oligonucleotide
  Sense strand starting at position 1845 of SEQ ID NO: 1882363
aaggaaauguccuuguuaa

SEQ ID NO: 2115249 - RNA, 19 nt, Artificial Sequence
  Description of Artificial Sequence: Synthetic oligonucleotide
  Antisense strand to SEQ ID NO: 2115248
uuaacaaggacauuuccuu

SEQ ID NO: 2115250 - RNA, 19 nt, Artificial Sequence
  Description of Artificial Sequence: Synthetic oligonucleotide
  Sense strand starting at position 1846 of SEQ ID NO: 1882363
aggaaauguccuuguuaaa

SEQ ID NO: 2115251 - RNA, 19 nt, Artificial Sequence
  Description of Artificial Sequence: Synthetic oligonucleotide
  Antisense strand to SEQ ID NO: 2115250
uuuaacaaggacauuuccu

SEQ ID NO: 2115252 - RNA, 19 nt, Artificial Sequence
  Description of Artificial Sequence: Synthetic oligonucleotide
  Sense strand starting at position 2090 of SEQ ID NO: 1882363
guucuuacccaaugaugga

SEQ ID NO: 2115253 - RNA, 19 nt, Artificial Sequence
  Description of Artificial Sequence: Synthetic oligonucleotide
  Antisense strand to SEQ ID NO: 2115252
uccaucauuggguaagaac

SEQ ID NO: 2115254 - RNA, 19 nt, Artificial Sequence
  Description of Artificial Sequence: Synthetic oligonucleotide
  Sense strand starting at position 2094 of SEQ ID NO: 1882363
uuacccaaugauggauauu

SEQ ID NO: 2115255 - RNA, 19 nt, Artificial Sequence
  Description of Artificial Sequence: Synthetic oligonucleotide
  Antisense strand to SEQ ID NO: 2115254
aauauccaucauuggguaa

SEQ ID NO: 2115256 - RNA, 19 nt, Artificial Sequence
  Description of Artificial Sequence: Synthetic oligonucleotide
  Sense strand starting at position 2103 of SEQ ID NO: 1882363
gauggauauuauguguuaa

SEQ ID NO: 2115257 - RNA, 19 nt, Artificial Sequence
  Description of Artificial Sequence: Synthetic oligonucleotide
  Antisense strand to SEQ ID NO: 2115256
uuaacacauaauauccauc

SEQ ID NO: 2115258 - RNA, 19 nt, Artificial Sequence
  Description of Artificial Sequence: Synthetic oligonucleotide
  Sense strand starting at position 2104 of SEQ ID NO: 1882363
auggauauuauguguuaag

SEQ ID NO: 2115259 - RNA, 19 nt, Artificial Sequence
  Description of Artificial Sequence: Synthetic oligonucleotide
  Antisense strand to SEQ ID NO: 2115258
cuuaacacauaauauccau

SEQ ID NO: 2115260 - RNA, 19 nt, Artificial Sequence
  Description of Artificial Sequence: Synthetic oligonucleotide
  Sense strand starting at position 2113 of SEQ ID NO: 1882363
auguguuaagcuucgcuaa

SEQ ID NO: 2115261 - RNA, 19 nt, Artificial Sequence
  Description of Artificial Sequence: Synthetic oligonucleotide
  Antisense strand to SEQ ID NO: 2115260
uuagcgaagcuuaacacau

SEQ ID NO: 2115262 - RNA, 19 nt, Artificial Sequence
  Description of Artificial Sequence: Synthetic oligonucleotide
  Sense strand starting at position 2177 of SEQ ID NO: 1882363
ucgucaucugaacaaauug

SEQ ID NO: 2115263 - RNA, 19 nt, Artificial Sequence
  Description of Artificial Sequence: Synthetic oligonucleotide
  Antisense strand to SEQ ID NO: 2115262
caauuuguucagaugacga

SEQ ID NO: 2115264 - RNA, 19 nt, Artificial Sequence
  Description of Artificial Sequence: Synthetic oligonucleotide
  Sense strand starting at position 2429 of SEQ ID NO: 1882363
cuuuaaagauguucuugag

SEQ ID NO: 2115265 - RNA, 19 nt, Artificial Sequence
  Description of Artificial Sequence: Synthetic oligonucleotide
  Antisense strand to SEQ ID NO: 2115264
cucaagaacaucuuuaaag

SEQ ID NO: 2115266 - RNA, 19 nt, Artificial Sequence
  Description of Artificial Sequence: Synthetic oligonucleotide
  Sense strand starting at position 2892 of SEQ ID NO: 1882363
uggaccuuagcccaauaua

SEQ ID NO: 2115267 - RNA, 19 nt, Artificial Sequence
  Description of Artificial Sequence: Synthetic oligonucleotide
  Antisense strand to SEQ ID NO: 2115266
uauauugggcuaaggucca

SEQ ID NO: 2115268 - RNA, 19 nt, Artificial Sequence
  Description of Artificial Sequence: Synthetic oligonucleotide
  Sense strand starting at position 3006 of SEQ ID NO: 1882363
gaggccuuagaaugaaauc

SEQ ID NO: 2115269 - RNA, 19 nt, Artificial Sequence
  Description of Artificial Sequence: Synthetic oligonucleotide
  Antisense strand to SEQ ID NO: 2115268
gauuucauucuaaggccuc

SEQ ID NO: 2115270 - RNA, 19 nt, Artificial Sequence
  Description of Artificial Sequence: Synthetic oligonucleotide
  Sense strand starting at position 3162 of SEQ ID NO: 1882363
uauggucagguauauugua

SEQ ID NO: 2115271 - RNA, 19 nt, Artificial Sequence
  Description of Artificial Sequence: Synthetic oligonucleotide
  Antisense strand to SEQ ID NO: 2115270
uacaauauaccugaccaua

SEQ ID NO: 2115272 - RNA, 19 nt, Artificial Sequence
  Description of Artificial Sequence: Synthetic oligonucleotide
  Sense strand starting at position 3230 of SEQ ID NO: 1882363
ggccuuacggacuauauca

SEQ ID NO: 2115273 - RNA, 19 nt, Artificial Sequence
  Description of Artificial Sequence: Synthetic oligonucleotide
  Antisense strand to SEQ ID NO: 2115272
ugauauaguccguaaggcc

SEQ ID NO: 2115274 - RNA, 19 nt, Artificial Sequence
  Description of Artificial Sequence: Synthetic oligonucleotide
  Sense strand starting at position 3284 of SEQ ID NO: 1882363
acaugcuaucaaggauaca

SEQ ID NO: 2115275 - RNA, 19 nt, Artificial Sequence
  Description of Artificial Sequence: Synthetic oligonucleotide
  Antisense strand to SEQ ID NO: 2115274
uguauccuugauagcaugu

SEQ ID NO: 2115276 - RNA, 19 nt, Artificial Sequence
  Description of Artificial Sequence: Synthetic oligonucleotide
  Sense strand starting at position 3300 of SEQ ID NO: 1882363
acauacuaucaaggugacu

SEQ ID NO: 2115277 - RNA, 19 nt, Artificial Sequence
  Description of Artificial Sequence: Synthetic oligonucleotide
  Antisense strand to SEQ ID NO: 2115276
agucaccuugauaguaugu

SEQ ID NO: 2115278 - RNA, 19 nt, Artificial Sequence
  Description of Artificial Sequence: Synthetic oligonucleotide
  Sense strand starting at position 3477 of SEQ ID NO: 1882363
ucaguuaggguggaauauu

SEQ ID NO: 2115279 - RNA, 19 nt, Artificial Sequence
  Description of Artificial Sequence: Synthetic oligonucleotide
  Antisense strand to SEQ ID NO: 2115278
aauauuccacccuaacuga

SEQ ID NO: 2115280 - RNA, 19 nt, Artificial Sequence
  Description of Artificial Sequence: Synthetic oligonucleotide
  Sense strand starting at position 3508 of SEQ ID NO: 1882363
uuggaauucucugugggag

SEQ ID NO: 2115281 - RNA, 19 nt, Artificial Sequence
  Description of Artificial Sequence: Synthetic oligonucleotide
  Antisense strand to SEQ ID NO: 2115280
cucccacagagaauuccaa

SEQ ID NO: 2115282 - RNA, 19 nt, Artificial Sequence
  Description of Artificial Sequence: Synthetic oligonucleotide
  Sense strand starting at position 3509 of SEQ ID NO: 1882363
uggaauucucugugggaga

SEQ ID NO: 2115283 - RNA, 19 nt, Artificial Sequence
  Description of Artificial Sequence: Synthetic oligonucleotide
  Antisense strand to SEQ ID NO: 2115282
ucucccacagagaauucca

SEQ ID NO: 2115284 - RNA, 19 nt, Artificial Sequence
  Description of Artificial Sequence: Synthetic oligonucleotide
  Sense strand starting at position 3511 of SEQ ID NO: 1882363
gaauucucugugggagauu

SEQ ID NO: 2115285 - RNA, 19 nt, Artificial Sequence
  Description of Artificial Sequence: Synthetic oligonucleotide
  Antisense strand to SEQ ID NO: 2115284
aaucucccacagagaauuc

SEQ ID NO: 2115286 - RNA, 19 nt, Artificial Sequence
  Description of Artificial Sequence: Synthetic oligonucleotide
  Sense strand starting at position 3525 of SEQ ID NO: 1882363
agauuugugucuucccuca

SEQ ID NO: 2115287 - RNA, 19 nt, Artificial Sequence
  Description of Artificial Sequence: Synthetic oligonucleotide
  Antisense strand to SEQ ID NO: 2115286
ugagggaagacacaaaucu

SEQ ID NO: 2115288 - RNA, 19 nt, Artificial Sequence
  Description of Artificial Sequence: Synthetic oligonucleotide
  Sense strand starting at position 3527 of SEQ ID NO: 1882363
auuugugucuucccucaca

SEQ ID NO: 2115289 - RNA, 19 nt, Artificial Sequence
  Description of Artificial Sequence: Synthetic oligonucleotide
  Antisense strand to SEQ ID NO: 2115288
ugugagggaagacacaaau

SEQ ID NO: 2115290 - RNA, 19 nt, Artificial Sequence
  Description of Artificial Sequence: Synthetic oligonucleotide
  Sense strand starting at position 3790 of SEQ ID NO: 1882363
guccuagagucagcuauuu

SEQ ID NO: 2115291 - RNA, 19 nt, Artificial Sequence
  Description of Artificial Sequence: Synthetic oligonucleotide
  Antisense strand to SEQ ID NO: 2115290
aaauagcugacucuaggac

SEQ ID NO: 2115292 - RNA, 19 nt, Artificial Sequence
  Description of Artificial Sequence: Synthetic oligonucleotide
  Sense strand starting at position 21 of SEQ ID NO: 1882364
caguacgccugacuaauuu

SEQ ID NO: 2115293 - RNA, 19 nt, Artificial Sequence
  Description of Artificial Sequence: Synthetic oligonucleotide
  Antisense strand to SEQ ID NO: 2115292
aaauuagucaggcguacug

SEQ ID NO: 2115294 - RNA, 19 nt, Artificial Sequence
  Description of Artificial Sequence: Synthetic oligonucleotide
  Sense strand starting at position 250 of SEQ ID NO: 1882364
gggacacucgauugaucag

SEQ ID NO: 2115295 - RNA, 19 nt, Artificial Sequence
  Description of Artificial Sequence: Synthetic oligonucleotide
  Antisense strand to SEQ ID NO: 2115294
cugaucaaucgaguguccc

SEQ ID NO: 2115296 - RNA, 19 nt, Artificial Sequence
  Description of Artificial Sequence: Synthetic oligonucleotide
  Sense strand starting at position 251 of SEQ ID NO: 1882364
ggacacucgauugaucagu

SEQ ID NO: 2115297 - RNA, 19 nt, Artificial Sequence
  Description of Artificial Sequence: Synthetic oligonucleotide
  Antisense strand to SEQ ID NO: 2115296
acugaucaaucgagugucc

SEQ ID NO: 2115298 - RNA, 19 nt, Artificial Sequence
  Description of Artificial Sequence: Synthetic oligonucleotide
  Sense strand starting at position 257 of SEQ ID NO: 1882364
ucgauugaucaguaucaau

SEQ ID NO: 2115299 - RNA, 19 nt, Artificial Sequence
  Description of Artificial Sequence: Synthetic oligonucleotide
  Antisense strand to SEQ ID NO: 2115298
auugauacugaucaaucga

SEQ ID NO: 2115300 - RNA, 19 nt, Artificial Sequence
  Description of Artificial Sequence: Synthetic oligonucleotide
  Sense strand starting at position 446 of SEQ ID NO: 1882364
ggaacauucccaggugacu

SEQ ID NO: 2115301 - RNA, 19 nt, Artificial Sequence
  Description of Artificial Sequence: Synthetic oligonucleotide
  Antisense strand to SEQ ID NO: 2115300
agucaccugggaauguucc

SEQ ID NO: 2115302 - RNA, 19 nt, Artificial Sequence
  Description of Artificial Sequence: Synthetic oligonucleotide
  Sense strand starting at position 484 of SEQ ID NO: 1882364
ugaguugaaucuuugagau

SEQ ID NO: 2115303 - RNA, 19 nt, Artificial Sequence
  Description of Artificial Sequence: Synthetic oligonucleotide
  Antisense strand to SEQ ID NO: 2115302
aucucaaagauucaacuca

SEQ ID NO: 2115304 - RNA, 19 nt, Artificial Sequence
  Description of Artificial Sequence: Synthetic oligonucleotide
  Sense strand starting at position 551 of SEQ ID NO: 1882364
cacagaguuucuucuggaa

SEQ ID NO: 2115305 - RNA, 19 nt, Artificial Sequence
  Description of Artificial Sequence: Synthetic oligonucleotide
  Antisense strand to SEQ ID NO: 2115304
uuccagaagaaacucugug

SEQ ID NO: 2115306 - RNA, 19 nt, Artificial Sequence
  Description of Artificial Sequence: Synthetic oligonucleotide
  Sense strand starting at position 662 of SEQ ID NO: 1882364
ugucaacauuaaucgggaa

SEQ ID NO: 2115307 - RNA, 19 nt, Artificial Sequence
  Description of Artificial Sequence: Synthetic oligonucleotide
  Antisense strand to SEQ ID NO: 2115306
uucccgauuaauguugaca

SEQ ID NO: 2115308 - RNA, 19 nt, Artificial Sequence
  Description of Artificial Sequence: Synthetic oligonucleotide
  Sense strand starting at position 663 of SEQ ID NO: 1882364
gucaacauuaaucgggaaa

SEQ ID NO: 2115309 - RNA, 19 nt, Artificial Sequence
  Description of Artificial Sequence: Synthetic oligonucleotide
  Antisense strand to SEQ ID NO: 2115308
uuucccgauuaauguugac

SEQ ID NO: 2115310 - RNA, 19 nt, Artificial Sequence
  Description of Artificial Sequence: Synthetic oligonucleotide
  Sense strand starting at position 795 of SEQ ID NO: 1882364
agcuguggucuggaaagga

SEQ ID NO: 2115311 - RNA, 19 nt, Artificial Sequence
  Description of Artificial Sequence: Synthetic oligonucleotide
  Antisense strand to SEQ ID NO: 2115310
uccuuuccagaccacagcu

SEQ ID NO: 2115312 - RNA, 19 nt, Artificial Sequence
  Description of Artificial Sequence: Synthetic oligonucleotide
  Sense strand starting at position 937 of SEQ ID NO: 1882364
gagagaagucucugcagag

SEQ ID NO: 2115313 - RNA, 19 nt, Artificial Sequence
  Description of Artificial Sequence: Synthetic oligonucleotide
  Antisense strand to SEQ ID NO: 2115312
cucugcagagacuucucuc

SEQ ID NO: 2115314 - RNA, 19 nt, Artificial Sequence
  Description of Artificial Sequence: Synthetic oligonucleotide
  Sense strand starting at position 938 of SEQ ID NO: 1882364
agagaagucucugcagaga

SEQ ID NO: 2115315 - RNA, 19 nt, Artificial Sequence
  Description of Artificial Sequence: Synthetic oligonucleotide
  Antisense strand to SEQ ID NO: 2115314
ucucugcagagacuucucu

SEQ ID NO: 2115316 - RNA, 19 nt, Artificial Sequence
  Description of Artificial Sequence: Synthetic oligonucleotide
  Sense strand starting at position 1006 of SEQ ID NO: 1882364
auggaaaugccugaggguu

SEQ ID NO: 2115317 - RNA, 19 nt, Artificial Sequence
  Description of Artificial Sequence: Synthetic oligonucleotide
  Antisense strand to SEQ ID NO: 2115316
aacccucaggcauuuccau

SEQ ID NO: 2115318 - RNA, 19 nt, Artificial Sequence
  Description of Artificial Sequence: Synthetic oligonucleotide
  Sense strand starting at position 1189 of SEQ ID NO: 1882364
gcugauauucuacaucaag

SEQ ID NO: 2115319 - RNA, 19 nt, Artificial Sequence
  Description of Artificial Sequence: Synthetic oligonucleotide
  Antisense strand to SEQ ID NO: 2115318
cuugauguagaauaucagc

SEQ ID NO: 2115320 - RNA, 19 nt, Artificial Sequence
  Description of Artificial Sequence: Synthetic oligonucleotide
  Sense strand starting at position 1479 of SEQ ID NO: 1882364
ggucauuaaccugggagua

SEQ ID NO: 2115321 - RNA, 19 nt, Artificial Sequence
  Description of Artificial Sequence: Synthetic oligonucleotide
  Antisense strand to SEQ ID NO: 2115320
uacucccagguuaaugacc

SEQ ID NO: 2115322 - RNA, 19 nt, Artificial Sequence
  Description of Artificial Sequence: Synthetic oligonucleotide
  Sense strand starting at position 2266 of SEQ ID NO: 1882364
guuaaaugauaagcccaaa

SEQ ID NO: 2115323 - RNA, 19 nt, Artificial Sequence
  Description of Artificial Sequence: Synthetic oligonucleotide
  Antisense strand to SEQ ID NO: 2115322
uuugggcuuaucauuuaac

SEQ ID NO: 2115324 - RNA, 19 nt, Artificial Sequence
  Description of Artificial Sequence: Synthetic oligonucleotide
  Sense strand starting at position 2325 of SEQ ID NO: 1882364
cacagaguucuagacuguu

SEQ ID NO: 2115325 - RNA, 19 nt, Artificial Sequence
  Description of Artificial Sequence: Synthetic oligonucleotide
  Antisense strand to SEQ ID NO: 2115324
aacagucuagaacucugug

SEQ ID NO: 2115326 - RNA, 19 nt, Artificial Sequence
  Description of Artificial Sequence: Synthetic oligonucleotide
  Sense strand starting at position 2328 of SEQ ID NO: 1882364
agaguucuagacuguuaga

SEQ ID NO: 2115327 - RNA, 19 nt, Artificial Sequence
  Description of Artificial Sequence: Synthetic oligonucleotide
  Antisense strand to SEQ ID NO: 2115326
ucuaacagucuagaacucu

SEQ ID NO: 2115328 - RNA, 19 nt, Artificial Sequence
  Description of Artificial Sequence: Synthetic oligonucleotide
  Sense strand starting at position 2338 of SEQ ID NO: 1882364
acuguuagaaugugaagag

SEQ ID NO: 2115329 - RNA, 19 nt, Artificial Sequence
  Description of Artificial Sequence: Synthetic oligonucleotide
  Antisense strand to SEQ ID NO: 2115328
cucuucacauucuaacagu

SEQ ID NO: 2115330 - RNA, 19 nt, Artificial Sequence
  Description of Artificial Sequence: Synthetic oligonucleotide
  Sense strand starting at position 2347 of SEQ ID NO: 1882364
augugaagagccuggaaau

SEQ ID NO: 2115331 - RNA, 19 nt, Artificial Sequence
  Description of Artificial Sequence: Synthetic oligonucleotide
  Antisense strand to SEQ ID NO: 2115330
auuuccaggcucuucacau

SEQ ID NO: 2115332 - RNA, 19 nt, Artificial Sequence
  Description of Artificial Sequence: Synthetic oligonucleotide
  Sense strand starting at position 2348 of SEQ ID NO: 1882364
ugugaagagccuggaaauc

SEQ ID NO: 2115333 - RNA, 19 nt, Artificial Sequence
  Description of Artificial Sequence: Synthetic oligonucleotide
  Antisense strand to SEQ ID NO: 2115332
gauuuccaggcucuucaca

SEQ ID NO: 2115334 - RNA, 19 nt, Artificial Sequence
  Description of Artificial Sequence: Synthetic oligonucleotide
  Sense strand starting at position 2371 of SEQ ID NO: 1882364
ugcugcuaacaucauugaa

SEQ ID NO: 2115335 - RNA, 19 nt, Artificial Sequence
  Description of Artificial Sequence: Synthetic oligonucleotide
  Antisense strand to SEQ ID NO: 2115334
uucaaugauguuagcagca

SEQ ID NO: 2115336 - RNA, 19 nt, Artificial Sequence
  Description of Artificial Sequence: Synthetic oligonucleotide
  Sense strand starting at position 2373 of SEQ ID NO: 1882364
cugcuaacaucauugaaga

SEQ ID NO: 2115337 - RNA, 19 nt, Artificial Sequence
  Description of Artificial Sequence: Synthetic oligonucleotide
  Antisense strand to SEQ ID NO: 2115336
ucuucaaugauguuagcag

SEQ ID NO: 2115338 - RNA, 19 nt, Artificial Sequence
  Description of Artificial Sequence: Synthetic oligonucleotide
  Sense strand starting at position 2374 of SEQ ID NO: 1882364
ugcuaacaucauugaagag

SEQ ID NO: 2115339 - RNA, 19 nt, Artificial Sequence
  Description of Artificial Sequence: Synthetic oligonucleotide
  Antisense strand to SEQ ID NO: 2115338
cucuucaaugauguuagca

SEQ ID NO: 2115340 - RNA, 19 nt, Artificial Sequence
  Description of Artificial Sequence: Synthetic oligonucleotide
  Sense strand starting at position 2542 of SEQ ID NO: 1882364
gacauuaagugagcuggau

SEQ ID NO: 2115341 - RNA, 19 nt, Artificial Sequence
  Description of Artificial Sequence: Synthetic oligonucleotide
  Antisense strand to SEQ ID NO: 2115340
auccagcucacuuaauguc

SEQ ID NO: 2115342 - RNA, 19 nt, Artificial Sequence
  Description of Artificial Sequence: Synthetic oligonucleotide
  Sense strand starting at position 2610 of SEQ ID NO: 1882364
aucuguguccuggaacuaa

SEQ ID NO: 2115343 - RNA, 19 nt, Artificial Sequence
  Description of Artificial Sequence: Synthetic oligonucleotide
  Antisense strand to SEQ ID NO: 2115342
uuaguuccaggacacagau

SEQ ID NO: 2115344 - RNA, 19 nt, Artificial Sequence
  Description of Artificial Sequence: Synthetic oligonucleotide
  Sense strand starting at position 2614 of SEQ ID NO: 1882364
guguccuggaacuaaguaa

SEQ ID NO: 2115345 - RNA, 19 nt, Artificial Sequence
  Description of Artificial Sequence: Synthetic oligonucleotide
  Antisense strand to SEQ ID NO: 2115344
uuacuuaguuccaggacac

SEQ ID NO: 2115346 - RNA, 19 nt, Artificial Sequence
  Description of Artificial Sequence: Synthetic oligonucleotide
  Sense strand starting at position 3100 of SEQ ID NO: 1882364
aaaugaaacguugauagca

SEQ ID NO: 2115347 - RNA, 19 nt, Artificial Sequence
  Description of Artificial Sequence: Synthetic oligonucleotide
  Antisense strand to SEQ ID NO: 2115346
ugcuaucaacguuucauuu

SEQ ID NO: 2115348 - RNA, 19 nt, Artificial Sequence
  Description of Artificial Sequence: Synthetic oligonucleotide
  Sense strand starting at position 3227 of SEQ ID NO: 1882364
guuaaugucacagggaaau

SEQ ID NO: 2115349 - RNA, 19 nt, Artificial Sequence
  Description of Artificial Sequence: Synthetic oligonucleotide
  Antisense strand to SEQ ID NO: 2115348
auuucccugugacauuaac

SEQ ID NO: 2115350 - RNA, 19 nt, Artificial Sequence
  Description of Artificial Sequence: Synthetic oligonucleotide
  Sense strand starting at position 3304 of SEQ ID NO: 1882364
gccaauucccagcagaacu

SEQ ID NO: 2115351 - RNA, 19 nt, Artificial Sequence
  Description of Artificial Sequence: Synthetic oligonucleotide
  Antisense strand to SEQ ID NO: 2115350
aguucugcugggaauuggc

SEQ ID NO: 2115352 - RNA, 19 nt, Artificial Sequence
  Description of Artificial Sequence: Synthetic oligonucleotide
  Sense strand starting at position 3346 of SEQ ID NO: 1882364
gggacuuugcuaugaacag

SEQ ID NO: 2115353 - RNA, 19 nt, Artificial Sequence
  Description of Artificial Sequence: Synthetic oligonucleotide
  Antisense strand to SEQ ID NO: 2115352
cuguucauagcaaaguccc

SEQ ID NO: 2115354 - RNA, 19 nt, Artificial Sequence
  Description of Artificial Sequence: Synthetic oligonucleotide
  Sense strand starting at position 3361 of SEQ ID NO: 1882364
acagcaucugcugagauau

SEQ ID NO: 2115355 - RNA, 19 nt, Artificial Sequence
  Description of Artificial Sequence: Synthetic oligonucleotide
  Antisense strand to SEQ ID NO: 2115354
auaucucagcagaugcugu

SEQ ID NO: 2115356 - RNA, 19 nt, Artificial Sequence
  Description of Artificial Sequence: Synthetic oligonucleotide
  Sense strand starting at position 3560 of SEQ ID NO: 1882364
ucaggaggauccucaguau

SEQ ID NO: 2115357 - RNA, 19 nt, Artificial Sequence
  Description of Artificial Sequence: Synthetic oligonucleotide
  Antisense strand to SEQ ID NO: 2115356
auacugaggauccuccuga

SEQ ID NO: 2115358 - RNA, 19 nt, Artificial Sequence
  Description of Artificial Sequence: Synthetic oligonucleotide
  Sense strand starting at position 3590 of SEQ ID NO: 1882364
uacuguauuuaagaugaag

SEQ ID NO: 2115359 - RNA, 19 nt, Artificial Sequence
  Description of Artificial Sequence: Synthetic oligonucleotide
  Antisense strand to SEQ ID NO: 2115358
cuucaucuuaaauacagua

SEQ ID NO: 2115360 - RNA, 19 nt, Artificial Sequence
  Description of Artificial Sequence: Synthetic oligonucleotide
  Sense strand starting at position 3629 of SEQ ID NO: 1882364
gaguaaucaucuuuaugag

SEQ ID NO: 2115361 - RNA, 19 nt, Artificial Sequence
  Description of Artificial Sequence: Synthetic oligonucleotide
  Antisense strand to SEQ ID NO: 2115360
cucauaaagaugauuacuc

SEQ ID NO: 2115362 - RNA, 19 nt, Artificial Sequence
  Description of Artificial Sequence: Synthetic oligonucleotide
  Sense strand starting at position 3630 of SEQ ID NO: 1882364
aguaaucaucuuuaugagu

SEQ ID NO: 2115363 - RNA, 19 nt, Artificial Sequence
  Description of Artificial Sequence: Synthetic oligonucleotide
  Antisense strand to SEQ ID NO: 2115362
acucauaaagaugauuacu

SEQ ID NO: 2115364 - RNA, 19 nt, Artificial Sequence
  Description of Artificial Sequence: Synthetic oligonucleotide
  Sense strand starting at position 3643 of SEQ ID NO: 1882364
augaguauuauccgaagau

SEQ ID NO: 2115365 - RNA, 19 nt, Artificial Sequence
  Description of Artificial Sequence: Synthetic oligonucleotide
  Antisense strand to SEQ ID NO: 2115364
aucuucggauaauacucau

SEQ ID NO: 2115366 - RNA, 19 nt, Artificial Sequence
  Description of Artificial Sequence: Synthetic oligonucleotide
  Sense strand starting at position 3761 of SEQ ID NO: 1882364
caguauuugugguuacuuu

SEQ ID NO: 2115367 - RNA, 19 nt, Artificial Sequence
  Description of Artificial Sequence: Synthetic oligonucleotide
  Antisense strand to SEQ ID NO: 2115366
aaaguaaccacaaauacug

SEQ ID NO: 2115368 - RNA, 19 nt, Artificial Sequence
  Description of Artificial Sequence: Synthetic oligonucleotide
  Sense strand starting at position 3772 of SEQ ID NO: 1882364
guuacuuuggcagaugaag

SEQ ID NO: 2115369 - RNA, 19 nt, Artificial Sequence
  Description of Artificial Sequence: Synthetic oligonucleotide
  Antisense strand to SEQ ID NO: 2115368
cuucaucugccaaaguaac

SEQ ID NO: 2115370 - RNA, 19 nt, Artificial Sequence
  Description of Artificial Sequence: Synthetic oligonucleotide
  Sense strand starting at position 3835 of SEQ ID NO: 1882364
aaguguucgguggaaauaa

SEQ ID NO: 2115371 - RNA, 19 nt, Artificial Sequence
  Description of Artificial Sequence: Synthetic oligonucleotide
  Antisense strand to SEQ ID NO: 2115370
uuauuuccaccgaacacuu

SEQ ID NO: 2115372 - RNA, 19 nt, Artificial Sequence
  Description of Artificial Sequence: Synthetic oligonucleotide
  Sense strand starting at position 218 of SEQ ID NO: 1882365
uugugagagcuugagcaga

SEQ ID NO: 2115373 - RNA, 19 nt, Artificial Sequence
  Description of Artificial Sequence: Synthetic oligonucleotide
  Antisense strand to SEQ ID NO: 2115372
ucugcucaagcucucacaa

SEQ ID NO: 2115374 - RNA, 19 nt, Artificial Sequence
  Description of Artificial Sequence: Synthetic oligonucleotide
  Sense strand starting at position 341 of SEQ ID NO: 1882365
auauuugccuuugcaugau

SEQ ID NO: 2115375 - RNA, 19 nt, Artificial Sequence
  Description of Artificial Sequence: Synthetic oligonucleotide
  Antisense strand to SEQ ID NO: 2115374
aucaugcaaaggcaaauau

SEQ ID NO: 2115376 - RNA, 19 nt, Artificial Sequence
  Description of Artificial Sequence: Synthetic oligonucleotide
  Sense strand starting at position 388 of SEQ ID NO: 1882365
cugcaagagcuuugggaga

SEQ ID NO: 2115377 - RNA, 19 nt, Artificial Sequence
  Description of Artificial Sequence: Synthetic oligonucleotide
  Antisense strand to SEQ ID NO: 2115376
ucucccaaagcucuugcag

SEQ ID NO: 2115378 - RNA, 19 nt, Artificial Sequence
  Description of Artificial Sequence: Synthetic oligonucleotide
  Sense strand starting at position 402 of SEQ ID NO: 1882365
ggagaauuacauuguuagc

SEQ ID NO: 2115379 - RNA, 19 nt, Artificial Sequence
  Description of Artificial Sequence: Synthetic oligonucleotide
  Antisense strand to SEQ ID NO: 2115378
gcuaacaauguaauucucc

SEQ ID NO: 2115380 - RNA, 19 nt, Artificial Sequence
  Description of Artificial Sequence: Synthetic oligonucleotide
  Sense strand starting at position 599 of SEQ ID NO: 1882365
agaucaaccuguccuguga

SEQ ID NO: 2115381 - RNA, 19 nt, Artificial Sequence
  Description of Artificial Sequence: Synthetic oligonucleotide
  Antisense strand to SEQ ID NO: 2115380
ucacaggacagguugaucu

SEQ ID NO: 2115382 - RNA, 19 nt, Artificial Sequence
  Description of Artificial Sequence: Synthetic oligonucleotide
  Sense strand starting at position 603 of SEQ ID NO: 1882365
caaccuguccugugaauga

SEQ ID NO: 2115383 - RNA, 19 nt, Artificial Sequence
  Description of Artificial Sequence: Synthetic oligonucleotide
  Antisense strand to SEQ ID NO: 2115382
ucauucacaggacagguug

SEQ ID NO: 2115384 - RNA, 19 nt, Artificial Sequence
  Description of Artificial Sequence: Synthetic oligonucleotide
  Sense strand starting at position 608 of SEQ ID NO: 1882365
uguccugugaaugaguauu

SEQ ID NO: 2115385 - RNA, 19 nt, Artificial Sequence
  Description of Artificial Sequence: Synthetic oligonucleotide
  Antisense strand to SEQ ID NO: 2115384
aauacucauucacaggaca

SEQ ID NO: 2115386 - RNA, 19 nt, Artificial Sequence
  Description of Artificial Sequence: Synthetic oligonucleotide
  Sense strand starting at position 652 of SEQ ID NO: 1882365
ucagcaauuuccuuguaug

SEQ ID NO: 2115387 - RNA, 19 nt, Artificial Sequence
  Description of Artificial Sequence: Synthetic oligonucleotide
  Antisense strand to SEQ ID NO: 2115386
cauacaaggaaauugcuga

SEQ ID NO: 2115388 - RNA, 19 nt, Artificial Sequence
  Description of Artificial Sequence: Synthetic oligonucleotide
  Sense strand starting at position 738 of SEQ ID NO: 1882365
auagacaauuuaggagauu

SEQ ID NO: 2115389 - RNA, 19 nt, Artificial Sequence
  Description of Artificial Sequence: Synthetic oligonucleotide
  Antisense strand to SEQ ID NO: 2115388
aaucuccuaaauugucuau

SEQ ID NO: 2115390 - RNA, 19 nt, Artificial Sequence
  Description of Artificial Sequence: Synthetic oligonucleotide
  Sense strand starting at position 788 of SEQ ID NO: 1882365
gacuguugacauggagacu

SEQ ID NO: 2115391 - RNA, 19 nt, Artificial Sequence
  Description of Artificial Sequence: Synthetic oligonucleotide
  Antisense strand to SEQ ID NO: 2115390
agucuccaugucaacaguc

SEQ ID NO: 2115392 - RNA, 19 nt, Artificial Sequence
  Description of Artificial Sequence: Synthetic oligonucleotide
  Sense strand starting at position 800 of SEQ ID NO: 1882365
ggagacuuuccaugaccuu

SEQ ID NO: 2115393 - RNA, 19 nt, Artificial Sequence
  Description of Artificial Sequence: Synthetic oligonucleotide
  Antisense strand to SEQ ID NO: 2115392
aaggucauggaaagucucc

SEQ ID NO: 2115394 - RNA, 19 nt, Artificial Sequence
  Description of Artificial Sequence: Synthetic oligonucleotide
  Sense strand starting at position 849 of SEQ ID NO: 1882365
ucugguucucaucaguauu

SEQ ID NO: 2115395 - RNA, 19 nt, Artificial Sequence
  Description of Artificial Sequence: Synthetic oligonucleotide
  Antisense strand to SEQ ID NO: 2115394
aauacugaugagaaccaga

SEQ ID NO: 2115396 - RNA, 19 nt, Artificial Sequence
  Description of Artificial Sequence: Synthetic oligonucleotide
  Sense strand starting at position 852 of SEQ ID NO: 1882365
gguucucaucaguauugag

SEQ ID NO: 2115397 - RNA, 19 nt, Artificial Sequence
  Description of Artificial Sequence: Synthetic oligonucleotide
  Antisense strand to SEQ ID NO: 2115396
cucaauacugaugagaacc

SEQ ID NO: 2115398 - RNA, 19 nt, Artificial Sequence
  Description of Artificial Sequence: Synthetic oligonucleotide
  Sense strand starting at position 972 of SEQ ID NO: 1882365
gaagcauuagggcaaguua

SEQ ID NO: 2115399 - RNA, 19 nt, Artificial Sequence
  Description of Artificial Sequence: Synthetic oligonucleotide
  Antisense strand to SEQ ID NO: 2115398
uaacuugcccuaaugcuuc

SEQ ID NO: 2115400 - RNA, 19 nt, Artificial Sequence
  Description of Artificial Sequence: Synthetic oligonucleotide
  Sense strand starting at position 1110 of SEQ ID NO: 1882365
cauaaugaauguguaguau

SEQ ID NO: 2115401 - RNA, 19 nt, Artificial Sequence
  Description of Artificial Sequence: Synthetic oligonucleotide
  Antisense strand to SEQ ID NO: 2115400
auacuacacauucauuaug

SEQ ID NO: 2115402 - RNA, 19 nt, Artificial Sequence
  Description of Artificial Sequence: Synthetic oligonucleotide
  Sense strand starting at position 1118 of SEQ ID NO: 1882365
auguguaguauuugauucu

SEQ ID NO: 2115403 - RNA, 19 nt, Artificial Sequence
  Description of Artificial Sequence: Synthetic oligonucleotide
  Antisense strand to SEQ ID NO: 2115402
agaaucaaauacuacacau

SEQ ID NO: 2115404 - RNA, 19 nt, Artificial Sequence
  Description of Artificial Sequence: Synthetic oligonucleotide
  Sense strand starting at position 1441 of SEQ ID NO: 1882365
gccuguuauuuccugagca

SEQ ID NO: 2115405 - RNA, 19 nt, Artificial Sequence
  Description of Artificial Sequence: Synthetic oligonucleotide
  Antisense strand to SEQ ID NO: 2115404
ugcucaggaaauaacaggc

SEQ ID NO: 2115406 - RNA, 19 nt, Artificial Sequence
  Description of Artificial Sequence: Synthetic oligonucleotide
  Sense strand starting at position 1443 of SEQ ID NO: 1882365
cuguuauuuccugagcagc

SEQ ID NO: 2115407 - RNA, 19 nt, Artificial Sequence
  Description of Artificial Sequence: Synthetic oligonucleotide
  Antisense strand to SEQ ID NO: 2115406
gcugcucaggaaauaacag

SEQ ID NO: 2115408 - RNA, 19 nt, Artificial Sequence
  Description of Artificial Sequence: Synthetic oligonucleotide
  Sense strand starting at position 1445 of SEQ ID NO: 1882365
guuauuuccugagcagcac

SEQ ID NO: 2115409 - RNA, 19 nt, Artificial Sequence
  Description of Artificial Sequence: Synthetic oligonucleotide
  Antisense strand to SEQ ID NO: 2115408
gugcugcucaggaaauaac

SEQ ID NO: 2115410 - RNA, 19 nt, Artificial Sequence
  Description of Artificial Sequence: Synthetic oligonucleotide
  Sense strand starting at position 1563 of SEQ ID NO: 1882365
ggagucaggacauguauca

SEQ ID NO: 2115411 - RNA, 19 nt, Artificial Sequence
  Description of Artificial Sequence: Synthetic oligonucleotide
  Antisense strand to SEQ ID NO: 2115410
ugauacauguccugacucc

SEQ ID NO: 2115412 - RNA, 19 nt, Artificial Sequence
  Description of Artificial Sequence: Synthetic oligonucleotide
  Sense strand starting at position 1631 of SEQ ID NO: 1882365
acuggcuuacacuaugaua

SEQ ID NO: 2115413 - RNA, 19 nt, Artificial Sequence
  Description of Artificial Sequence: Synthetic oligonucleotide
  Antisense strand to SEQ ID NO: 2115412
uaucauaguguaagccagu

SEQ ID NO: 2115414 - RNA, 19 nt, Artificial Sequence
  Description of Artificial Sequence: Synthetic oligonucleotide
  Sense strand starting at position 1633 of SEQ ID NO: 1882365
uggcuuacacuaugauaag

SEQ ID NO: 2115415 - RNA, 19 nt, Artificial Sequence
  Description of Artificial Sequence: Synthetic oligonucleotide
  Antisense strand to SEQ ID NO: 2115414
cuuaucauaguguaagcca

SEQ ID NO: 2115416 - RNA, 19 nt, Artificial Sequence
  Description of Artificial Sequence: Synthetic oligonucleotide
  Sense strand starting at position 1677 of SEQ ID NO: 1882365
gucuuuggaguguaaauga

SEQ ID NO: 2115417 - RNA, 19 nt, Artificial Sequence
  Description of Artificial Sequence: Synthetic oligonucleotide
  Antisense strand to SEQ ID NO: 2115416
ucauuuacacuccaaagac

SEQ ID NO: 2115418 - RNA, 19 nt, Artificial Sequence
  Description of Artificial Sequence: Synthetic oligonucleotide
  Sense strand starting at position 1735 of SEQ ID NO: 1882365
aucagugaauggcuggaaa

SEQ ID NO: 2115419 - RNA, 19 nt, Artificial Sequence
  Description of Artificial Sequence: Synthetic oligonucleotide
  Antisense strand to SEQ ID NO: 2115418
uuuccagccauucacugau

SEQ ID NO: 2115420 - RNA, 19 nt, Artificial Sequence
  Description of Artificial Sequence: Synthetic oligonucleotide
  Sense strand starting at position 1737 of SEQ ID NO: 1882365
cagugaauggcuggaaaua

SEQ ID NO: 2115421 - RNA, 19 nt, Artificial Sequence
  Description of Artificial Sequence: Synthetic oligonucleotide
  Antisense strand to SEQ ID NO: 2115420
uauuuccagccauucacug

SEQ ID NO: 2115422 - RNA, 19 nt, Artificial Sequence
  Description of Artificial Sequence: Synthetic oligonucleotide
  Sense strand starting at position 1870 of SEQ ID NO: 1882365
agcauugaccuuugaauag

SEQ ID NO: 2115423 - RNA, 19 nt, Artificial Sequence
  Description of Artificial Sequence: Synthetic oligonucleotide
  Antisense strand to SEQ ID NO: 2115422
cuauucaaaggucaaugcu

SEQ ID NO: 2115424 - RNA, 19 nt, Artificial Sequence
  Description of Artificial Sequence: Synthetic oligonucleotide
  Sense strand starting at position 2041 of SEQ ID NO: 1882365
gucugaguaaguuguauuu

SEQ ID NO: 2115425 - RNA, 19 nt, Artificial Sequence
  Description of Artificial Sequence: Synthetic oligonucleotide
  Antisense strand to SEQ ID NO: 2115424
aaauacaacuuacucagac

SEQ ID NO: 2115426 - RNA, 19 nt, Artificial Sequence
  Description of Artificial Sequence: Synthetic oligonucleotide
  Sense strand starting at position 2066 of SEQ ID NO: 1882365
gcagacucugcucagacuu

SEQ ID NO: 2115427 - RNA, 19 nt, Artificial Sequence
  Description of Artificial Sequence: Synthetic oligonucleotide
  Antisense strand to SEQ ID NO: 2115426
aagucugagcagagucugc

SEQ ID NO: 2115428 - RNA, 19 nt, Artificial Sequence
  Description of Artificial Sequence: Synthetic oligonucleotide
  Sense strand starting at position 2154 of SEQ ID NO: 1882365
ucugcuaaaguguacauaa

SEQ ID NO: 2115429 - RNA, 19 nt, Artificial Sequence
  Description of Artificial Sequence: Synthetic oligonucleotide
  Antisense strand to SEQ ID NO: 2115428
uuauguacacuuuagcaga

SEQ ID NO: 2115430 - RNA, 19 nt, Artificial Sequence
  Description of Artificial Sequence: Synthetic oligonucleotide
  Sense strand starting at position 2214 of SEQ ID NO: 1882365
uugcguccucuguauuuaa

SEQ ID NO: 2115431 - RNA, 19 nt, Artificial Sequence
  Description of Artificial Sequence: Synthetic oligonucleotide
  Antisense strand to SEQ ID NO: 2115430
uuaaauacagaggacgcaa

SEQ ID NO: 2115432 - RNA, 19 nt, Artificial Sequence
  Description of Artificial Sequence: Synthetic oligonucleotide
  Sense strand starting at position 2253 of SEQ ID NO: 1882365
cacugaaaugucuguggaa

SEQ ID NO: 2115433 - RNA, 19 nt, Artificial Sequence
  Description of Artificial Sequence: Synthetic oligonucleotide
  Antisense strand to SEQ ID NO: 2115432
uuccacagacauuucagug

SEQ ID NO: 2115434 - RNA, 19 nt, Artificial Sequence
  Description of Artificial Sequence: Synthetic oligonucleotide
  Sense strand starting at position 2254 of SEQ ID NO: 1882365
acugaaaugucuguggaau

SEQ ID NO: 2115435 - RNA, 19 nt, Artificial Sequence
  Description of Artificial Sequence: Synthetic oligonucleotide
  Antisense strand to SEQ ID NO: 2115434
auuccacagacauuucagu

SEQ ID NO: 2115436 - RNA, 19 nt, Artificial Sequence
  Description of Artificial Sequence: Synthetic oligonucleotide
  Sense strand starting at position 2255 of SEQ ID NO: 1882365
cugaaaugucuguggaauu

SEQ ID NO: 2115437 - RNA, 19 nt, Artificial Sequence
  Description of Artificial Sequence: Synthetic oligonucleotide
  Antisense strand to SEQ ID NO: 2115436
aauuccacagacauuucag

SEQ ID NO: 2115438 - RNA, 19 nt, Artificial Sequence
  Description of Artificial Sequence: Synthetic oligonucleotide
  Sense strand starting at position 2339 of SEQ ID NO: 1882365
guguaacuucccuauccaa

SEQ ID NO: 2115439 - RNA, 19 nt, Artificial Sequence
  Description of Artificial Sequence: Synthetic oligonucleotide
  Antisense strand to SEQ ID NO: 2115438
uuggauagggaaguuacac

SEQ ID NO: 2115440 - RNA, 19 nt, Artificial Sequence
  Description of Artificial Sequence: Synthetic oligonucleotide
  Sense strand starting at position 2389 of SEQ ID NO: 1882365
gggaaugagucaccuccuu

SEQ ID NO: 2115441 - RNA, 19 nt, Artificial Sequence
  Description of Artificial Sequence: Synthetic oligonucleotide
  Antisense strand to SEQ ID NO: 2115440
aaggaggugacucauuccc

SEQ ID NO: 2115442 - RNA, 19 nt, Artificial Sequence
  Description of Artificial Sequence: Synthetic oligonucleotide
  Sense strand starting at position 3015 of SEQ ID NO: 1882365
guagaccacuauccagaau

SEQ ID NO: 2115443 - RNA, 19 nt, Artificial Sequence
  Description of Artificial Sequence: Synthetic oligonucleotide
  Antisense strand to SEQ ID NO: 2115442
auucuggauaguggucuac

SEQ ID NO: 2115444 - RNA, 19 nt, Artificial Sequence
  Description of Artificial Sequence: Synthetic oligonucleotide
  Sense strand starting at position 3204 of SEQ ID NO: 1882365
uguggaauccugugacaac

SEQ ID NO: 2115445 - RNA, 19 nt, Artificial Sequence
  Description of Artificial Sequence: Synthetic oligonucleotide
  Antisense strand to SEQ ID NO: 2115444
guugucacaggauuccaca

SEQ ID NO: 2115446 - RNA, 19 nt, Artificial Sequence
  Description of Artificial Sequence: Synthetic oligonucleotide
  Sense strand starting at position 3820 of SEQ ID NO: 1882365
accagaaauguauguaaau

SEQ ID NO: 2115447 - RNA, 19 nt, Artificial Sequence
  Description of Artificial Sequence: Synthetic oligonucleotide
  Antisense strand to SEQ ID NO: 2115446
auuuacauacauuucuggu

SEQ ID NO: 2115448 - RNA, 19 nt, Artificial Sequence
  Description of Artificial Sequence: Synthetic oligonucleotide
  Sense strand starting at position 3821 of SEQ ID NO: 1882365
ccagaaauguauguaaaua

SEQ ID NO: 2115449 - RNA, 19 nt, Artificial Sequence
  Description of Artificial Sequence: Synthetic oligonucleotide
  Antisense strand to SEQ ID NO: 2115448
uauuuacauacauuucugg

SEQ ID NO: 2115450 - RNA, 19 nt, Artificial Sequence
  Description of Artificial Sequence: Synthetic oligonucleotide
  Sense strand starting at position 3835 of SEQ ID NO: 1882365
aaauaugaggguugugacu

SEQ ID NO: 2115451 - RNA, 19 nt, Artificial Sequence
  Description of Artificial Sequence: Synthetic oligonucleotide
  Antisense strand to SEQ ID NO: 2115450
agucacaacccucauauuu

SEQ ID NO: 2115452 - RNA, 19 nt, Artificial Sequence
  Description of Artificial Sequence: Synthetic oligonucleotide
  Sense strand starting at position 59 of SEQ ID NO: 1882366
acccuuuaagucgguaaag

SEQ ID NO: 2115453 - RNA, 19 nt, Artificial Sequence
  Description of Artificial Sequence: Synthetic oligonucleotide
  Antisense strand to SEQ ID NO: 2115452
cuuuaccgacuuaaagggu

SEQ ID NO: 2115454 - RNA, 19 nt, Artificial Sequence
  Description of Artificial Sequence: Synthetic oligonucleotide
  Sense strand starting at position 69 of SEQ ID NO: 1882366
ucgguaaaggcauauggua

SEQ ID NO: 2115455 - RNA, 19 nt, Artificial Sequence
  Description of Artificial Sequence: Synthetic oligonucleotide
  Antisense strand to SEQ ID NO: 2115454
uaccauaugccuuuaccga

SEQ ID NO: 2115456 - RNA, 19 nt, Artificial Sequence
  Description of Artificial Sequence: Synthetic oligonucleotide
  Sense strand starting at position 78 of SEQ ID NO: 1882366
gcauaugguaugcaaguua

SEQ ID NO: 2115457 - RNA, 19 nt, Artificial Sequence
  Description of Artificial Sequence: Synthetic oligonucleotide
  Antisense strand to SEQ ID NO: 2115456
uaacuugcauaccauaugc

SEQ ID NO: 2115458 - RNA, 19 nt, Artificial Sequence
  Description of Artificial Sequence: Synthetic oligonucleotide
  Sense strand starting at position 235 of SEQ ID NO: 1882366
cccacccaugauugugaau

SEQ ID NO: 2115459 - RNA, 19 nt, Artificial Sequence
  Description of Artificial Sequence: Synthetic oligonucleotide
  Antisense strand to SEQ ID NO: 2115458
auucacaaucauggguggg

SEQ ID NO: 2115460 - RNA, 19 nt, Artificial Sequence
  Description of Artificial Sequence: Synthetic oligonucleotide
  Sense strand starting at position 244 of SEQ ID NO: 1882366
gauugugaauguuugggua

SEQ ID NO: 2115461 - RNA, 19 nt, Artificial Sequence
  Description of Artificial Sequence: Synthetic oligonucleotide
  Antisense strand to SEQ ID NO: 2115460
uacccaaacauucacaauc

SEQ ID NO: 2115462 - RNA, 19 nt, Artificial Sequence
  Description of Artificial Sequence: Synthetic oligonucleotide
  Sense strand starting at position 303 of SEQ ID NO: 1882366
gcaggacccauacgagaaa

SEQ ID NO: 2115463 - RNA, 19 nt, Artificial Sequence
  Description of Artificial Sequence: Synthetic oligonucleotide
  Antisense strand to SEQ ID NO: 2115462
uuucucguauggguccugc

SEQ ID NO: 2115464 - RNA, 19 nt, Artificial Sequence
  Description of Artificial Sequence: Synthetic oligonucleotide
  Sense strand starting at position 357 of SEQ ID NO: 1882366
cucauuccucaagagugau

SEQ ID NO: 2115465 - RNA, 19 nt, Artificial Sequence
  Description of Artificial Sequence: Synthetic oligonucleotide
  Antisense strand to SEQ ID NO: 2115464
aucacucuugaggaaugag

SEQ ID NO: 2115466 - RNA, 19 nt, Artificial Sequence
  Description of Artificial Sequence: Synthetic oligonucleotide
  Sense strand starting at position 395 of SEQ ID NO: 1882366
ggacaaggucagugguuga

SEQ ID NO: 2115467 - RNA, 19 nt, Artificial Sequence
  Description of Artificial Sequence: Synthetic oligonucleotide
  Antisense strand to SEQ ID NO: 2115466
ucaaccacugaccuugucc

SEQ ID NO: 2115468 - RNA, 19 nt, Artificial Sequence
  Description of Artificial Sequence: Synthetic oligonucleotide
  Sense strand starting at position 408 of SEQ ID NO: 1882366
gguugauacgaggaggcau

SEQ ID NO: 2115469 - RNA, 19 nt, Artificial Sequence
  Description of Artificial Sequence: Synthetic oligonucleotide
  Antisense strand to SEQ ID NO: 2115468
augccuccucguaucaacc

SEQ ID NO: 2115470 - RNA, 19 nt, Artificial Sequence
  Description of Artificial Sequence: Synthetic oligonucleotide
  Sense strand starting at position 509 of SEQ ID NO: 1882366
acgaaaucuccaugcacau

SEQ ID NO: 2115471 - RNA, 19 nt, Artificial Sequence
  Description of Artificial Sequence: Synthetic oligonucleotide
  Antisense strand to SEQ ID NO: 2115470
augugcauggagauuucgu

SEQ ID NO: 2115472 - RNA, 19 nt, Artificial Sequence
  Description of Artificial Sequence: Synthetic oligonucleotide
  Sense strand starting at position 533 of SEQ ID NO: 1882366
ugggcaaccuugucuauuu

SEQ ID NO: 2115473 - RNA, 19 nt, Artificial Sequence
  Description of Artificial Sequence: Synthetic oligonucleotide
  Antisense strand to SEQ ID NO: 2115472
aaauagacaagguugccca

SEQ ID NO: 2115474 - RNA, 19 nt, Artificial Sequence
  Description of Artificial Sequence: Synthetic oligonucleotide
  Sense strand starting at position 784 of SEQ ID NO: 1882366
gaaggagagaugugauugu

SEQ ID NO: 2115475 - RNA, 19 nt, Artificial Sequence
  Description of Artificial Sequence: Synthetic oligonucleotide
  Antisense strand to SEQ ID NO: 2115474
acaaucacaucucuccuuc

SEQ ID NO: 2115476 - RNA, 19 nt, Artificial Sequence
  Description of Artificial Sequence: Synthetic oligonucleotide
  Sense strand starting at position 839 of SEQ ID NO: 1882366
auugcaaguguguaggaaa

SEQ ID NO: 2115477 - RNA, 19 nt, Artificial Sequence
  Description of Artificial Sequence: Synthetic oligonucleotide
  Antisense strand to SEQ ID NO: 2115476
uuuccuacacacuugcaau

SEQ ID NO: 2115478 - RNA, 19 nt, Artificial Sequence
  Description of Artificial Sequence: Synthetic oligonucleotide
  Sense strand starting at position 846 of SEQ ID NO: 1882366
guguguaggaaacauaacu

SEQ ID NO: 2115479 - RNA, 19 nt, Artificial Sequence
  Description of Artificial Sequence: Synthetic oligonucleotide
  Antisense strand to SEQ ID NO: 2115478
aguuauguuuccuacacac

SEQ ID NO: 2115480 - RNA, 19 nt, Artificial Sequence
  Description of Artificial Sequence: Synthetic oligonucleotide
  Sense strand starting at position 864 of SEQ ID NO: 1882366
uuccuuguucuguagguga

SEQ ID NO: 2115481 - RNA, 19 nt, Artificial Sequence
  Description of Artificial Sequence: Synthetic oligonucleotide
  Antisense strand to SEQ ID NO: 2115480
ucaccuacagaacaaggaa

SEQ ID NO: 2115482 - RNA, 19 nt, Artificial Sequence
  Description of Artificial Sequence: Synthetic oligonucleotide
  Sense strand starting at position 880 of SEQ ID NO: 1882366
ugagcugaccucgaugaga

SEQ ID NO: 2115483 - RNA, 19 nt, Artificial Sequence
  Description of Artificial Sequence: Synthetic oligonucleotide
  Antisense strand to SEQ ID NO: 2115482
ucucaucgaggucagcuca

SEQ ID NO: 2115484 - RNA, 19 nt, Artificial Sequence
  Description of Artificial Sequence: Synthetic oligonucleotide
  Sense strand starting at position 882 of SEQ ID NO: 1882366
agcugaccucgaugagaag

SEQ ID NO: 2115485 - RNA, 19 nt, Artificial Sequence
  Description of Artificial Sequence: Synthetic oligonucleotide
  Antisense strand to SEQ ID NO: 2115484
cuucucaucgaggucagcu

SEQ ID NO: 2115486 - RNA, 19 nt, Artificial Sequence
  Description of Artificial Sequence: Synthetic oligonucleotide
  Sense strand starting at position 902 of SEQ ID NO: 1882366
cccauucugcacugacaga

SEQ ID NO: 2115487 - RNA, 19 nt, Artificial Sequence
  Description of Artificial Sequence: Synthetic oligonucleotide
  Antisense strand to SEQ ID NO: 2115486
ucugucagugcagaauggg

SEQ ID NO: 2115488 - RNA, 19 nt, Artificial Sequence
  Description of Artificial Sequence: Synthetic oligonucleotide
  Sense strand starting at position 947 of SEQ ID NO: 1882366
ugugauuccacaggagaca

SEQ ID NO: 2115489 - RNA, 19 nt, Artificial Sequence
  Description of Artificial Sequence: Synthetic oligonucleotide
  Antisense strand to SEQ ID NO: 2115488
ugucuccuguggaaucaca

SEQ ID NO: 2115490 - RNA, 19 nt, Artificial Sequence
  Description of Artificial Sequence: Synthetic oligonucleotide
  Sense strand starting at position 1107 of SEQ ID NO: 1882366
uuggguguccaggaaacgu

SEQ ID NO: 2115491 - RNA, 19 nt, Artificial Sequence
  Description of Artificial Sequence: Synthetic oligonucleotide
  Antisense strand to SEQ ID NO: 2115490
acguuuccuggacacccaa

SEQ ID NO: 2115492 - RNA, 19 nt, Artificial Sequence
  Description of Artificial Sequence: Synthetic oligonucleotide
  Sense strand starting at position 1124 of SEQ ID NO: 1882366
guuugauggcuccaggaca

SEQ ID NO: 2115493 - RNA, 19 nt, Artificial Sequence
  Description of Artificial Sequence: Synthetic oligonucleotide
  Antisense strand to SEQ ID NO: 2115492
uguccuggagccaucaaac

SEQ ID NO: 2115494 - RNA, 19 nt, Artificial Sequence
  Description of Artificial Sequence: Synthetic oligonucleotide
  Sense strand starting at position 1431 of SEQ ID NO: 1882366
guguuaucuguguucugcu

SEQ ID NO: 2115495 - RNA, 19 nt, Artificial Sequence
  Description of Artificial Sequence: Synthetic oligonucleotide
  Antisense strand to SEQ ID NO: 2115494
agcagaacacagauaacac

SEQ ID NO: 2115496 - RNA, 19 nt, Artificial Sequence
  Description of Artificial Sequence: Synthetic oligonucleotide
  Sense strand starting at position 1433 of SEQ ID NO: 1882366
guuaucuguguucugcuau

SEQ ID NO: 2115497 - RNA, 19 nt, Artificial Sequence
  Description of Artificial Sequence: Synthetic oligonucleotide
  Antisense strand to SEQ ID NO: 2115496
auagcagaacacagauaac

SEQ ID NO: 2115498 - RNA, 19 nt, Artificial Sequence
  Description of Artificial Sequence: Synthetic oligonucleotide
  Sense strand starting at position 1436 of SEQ ID NO: 1882366
aucuguguucugcuauguu

SEQ ID NO: 2115499 - RNA, 19 nt, Artificial Sequence
  Description of Artificial Sequence: Synthetic oligonucleotide
  Antisense strand to SEQ ID NO: 2115498
aacauagcagaacacagau

SEQ ID NO: 2115500 - RNA, 19 nt, Artificial Sequence
  Description of Artificial Sequence: Synthetic oligonucleotide
  Sense strand starting at position 2143 of SEQ ID NO: 1882366
cagguaguuucugugagag

SEQ ID NO: 2115501 - RNA, 19 nt, Artificial Sequence
  Description of Artificial Sequence: Synthetic oligonucleotide
  Antisense strand to SEQ ID NO: 2115500
cucucacagaaacuaccug

SEQ ID NO: 2115502 - RNA, 19 nt, Artificial Sequence
  Description of Artificial Sequence: Synthetic oligonucleotide
  Sense strand starting at position 2250 of SEQ ID NO: 1882366
uccaaauggucucugaagu

SEQ ID NO: 2115503 - RNA, 19 nt, Artificial Sequence
  Description of Artificial Sequence: Synthetic oligonucleotide
  Antisense strand to SEQ ID NO: 2115502
acuucagagaccauuugga

SEQ ID NO: 2115504 - RNA, 19 nt, Artificial Sequence
  Description of Artificial Sequence: Synthetic oligonucleotide
  Sense strand starting at position 2251 of SEQ ID NO: 1882366
ccaaauggucucugaaguc

SEQ ID NO: 2115505 - RNA, 19 nt, Artificial Sequence
  Description of Artificial Sequence: Synthetic oligonucleotide
  Antisense strand to SEQ ID NO: 2115504
gacuucagagaccauuugg

SEQ ID NO: 2115506 - RNA, 19 nt, Artificial Sequence
  Description of Artificial Sequence: Synthetic oligonucleotide
  Sense strand starting at position 2278 of SEQ ID NO: 1882366
cuguuaagagucuaugacu

SEQ ID NO: 2115507 - RNA, 19 nt, Artificial Sequence
  Description of Artificial Sequence: Synthetic oligonucleotide
  Antisense strand to SEQ ID NO: 2115506
agucauagacucuuaacag

SEQ ID NO: 2115508 - RNA, 19 nt, Artificial Sequence
  Description of Artificial Sequence: Synthetic oligonucleotide
  Sense strand starting at position 2283 of SEQ ID NO: 1882366
aagagucuaugacuacagu

SEQ ID NO: 2115509 - RNA, 19 nt, Artificial Sequence
  Description of Artificial Sequence: Synthetic oligonucleotide
  Antisense strand to SEQ ID NO: 2115508
acuguagucauagacucuu

SEQ ID NO: 2115510 - RNA, 19 nt, Artificial Sequence
  Description of Artificial Sequence: Synthetic oligonucleotide
  Sense strand starting at position 2306 of SEQ ID NO: 1882366
aggucaagguuggcugaua

SEQ ID NO: 2115511 - RNA, 19 nt, Artificial Sequence
  Description of Artificial Sequence: Synthetic oligonucleotide
  Antisense strand to SEQ ID NO: 2115510
uaucagccaaccuugaccu

SEQ ID NO: 2115512 - RNA, 19 nt, Artificial Sequence
  Description of Artificial Sequence: Synthetic oligonucleotide
  Sense strand starting at position 2307 of SEQ ID NO: 1882366
ggucaagguuggcugauau

SEQ ID NO: 2115513 - RNA, 19 nt, Artificial Sequence
  Description of Artificial Sequence: Synthetic oligonucleotide
  Antisense strand to SEQ ID NO: 2115512
auaucagccaaccuugacc

SEQ ID NO: 2115514 - RNA, 19 nt, Artificial Sequence
  Description of Artificial Sequence: Synthetic oligonucleotide
  Sense strand starting at position 2315 of SEQ ID NO: 1882366
uuggcugauauuggauauu

SEQ ID NO: 2115515 - RNA, 19 nt, Artificial Sequence
  Description of Artificial Sequence: Synthetic oligonucleotide
  Antisense strand to SEQ ID NO: 2115514
aauauccaauaucagccaa

SEQ ID NO: 2115516 - RNA, 19 nt, Artificial Sequence
  Description of Artificial Sequence: Synthetic oligonucleotide
  Sense strand starting at position 2767 of SEQ ID NO: 1882366
cuacacuuaguugaaaguu

SEQ ID NO: 2115517 - RNA, 19 nt, Artificial Sequence
  Description of Artificial Sequence: Synthetic oligonucleotide
  Antisense strand to SEQ ID NO: 2115516
aacuuucaacuaaguguag

SEQ ID NO: 2115518 - RNA, 19 nt, Artificial Sequence
  Description of Artificial Sequence: Synthetic oligonucleotide
  Sense strand starting at position 3350 of SEQ ID NO: 1882366
acaagcagaucugcaaauu

SEQ ID NO: 2115519 - RNA, 19 nt, Artificial Sequence
  Description of Artificial Sequence: Synthetic oligonucleotide
  Antisense strand to SEQ ID NO: 2115518
aauuugcagaucugcuugu

SEQ ID NO: 2115520 - RNA, 19 nt, Artificial Sequence
  Description of Artificial Sequence: Synthetic oligonucleotide
  Sense strand starting at position 3450 of SEQ ID NO: 1882366
ggaguuugcgccaggcaga

SEQ ID NO: 2115521 - RNA, 19 nt, Artificial Sequence
  Description of Artificial Sequence: Synthetic oligonucleotide
  Antisense strand to SEQ ID NO: 2115520
ucugccuggcgcaaacucc

SEQ ID NO: 2115522 - RNA, 19 nt, Artificial Sequence
  Description of Artificial Sequence: Synthetic oligonucleotide
  Sense strand starting at position 3480 of SEQ ID NO: 1882366
cagaucuguaaaugggagu

SEQ ID NO: 2115523 - RNA, 19 nt, Artificial Sequence
  Description of Artificial Sequence: Synthetic oligonucleotide
  Antisense strand to SEQ ID NO: 2115522
acucccauuuacagaucug

SEQ ID NO: 2115524 - RNA, 19 nt, Artificial Sequence
  Description of Artificial Sequence: Synthetic oligonucleotide
  Sense strand starting at position 3486 of SEQ ID NO: 1882366
uguaaaugggagugauaag

SEQ ID NO: 2115525 - RNA, 19 nt, Artificial Sequence
  Description of Artificial Sequence: Synthetic oligonucleotide
  Antisense strand to SEQ ID NO: 2115524
cuuaucacucccauuuaca

SEQ ID NO: 2115526 - RNA, 19 nt, Artificial Sequence
  Description of Artificial Sequence: Synthetic oligonucleotide
  Sense strand starting at position 3509 of SEQ ID NO: 1882366
cguggaggucucuaaggaa

SEQ ID NO: 2115527 - RNA, 19 nt, Artificial Sequence
  Description of Artificial Sequence: Synthetic oligonucleotide
  Antisense strand to SEQ ID NO: 2115526
uuccuuagagaccuccacg

SEQ ID NO: 2115528 - RNA, 19 nt, Artificial Sequence
  Description of Artificial Sequence: Synthetic oligonucleotide
  Sense strand starting at position 3666 of SEQ ID NO: 1882366
uacguauagucucuugaga

SEQ ID NO: 2115529 - RNA, 19 nt, Artificial Sequence
  Description of Artificial Sequence: Synthetic oligonucleotide
  Antisense strand to SEQ ID NO: 2115528
ucucaagagacuauacgua

SEQ ID NO: 2115530 - RNA, 19 nt, Artificial Sequence
  Description of Artificial Sequence: Synthetic oligonucleotide
  Sense strand starting at position 3983 of SEQ ID NO: 1882366
cguucuguggccgccaaau

SEQ ID NO: 2115531 - RNA, 19 nt, Artificial Sequence
  Description of Artificial Sequence: Synthetic oligonucleotide
  Antisense strand to SEQ ID NO: 2115530
auuuggcggccacagaacg

SEQ ID NO: 2115532 - RNA, 19 nt, Artificial Sequence
  Description of Artificial Sequence: Synthetic oligonucleotide
  Sense strand starting at position 20 of SEQ ID NO: 1882367
gguugauaauauccaguau

SEQ ID NO: 2115533 - RNA, 19 nt, Artificial Sequence
  Description of Artificial Sequence: Synthetic oligonucleotide
  Antisense strand to SEQ ID NO: 2115532
auacuggauauuaucaacc

SEQ ID NO: 2115534 - RNA, 19 nt, Artificial Sequence
  Description of Artificial Sequence: Synthetic oligonucleotide
  Sense strand starting at position 24 of SEQ ID NO: 1882367
gauaauauccaguauuggu

SEQ ID NO: 2115535 - RNA, 19 nt, Artificial Sequence
  Description of Artificial Sequence: Synthetic oligonucleotide
  Antisense strand to SEQ ID NO: 2115534
accaauacuggauauuauc

SEQ ID NO: 2115536 - RNA, 19 nt, Artificial Sequence
  Description of Artificial Sequence: Synthetic oligonucleotide
  Sense strand starting at position 31 of SEQ ID NO: 1882367
uccaguauuggugagcaua

SEQ ID NO: 2115537 - RNA, 19 nt, Artificial Sequence
  Description of Artificial Sequence: Synthetic oligonucleotide
  Antisense strand to SEQ ID NO: 2115536
uaugcucaccaauacugga

SEQ ID NO: 2115538 - RNA, 19 nt, Artificial Sequence
  Description of Artificial Sequence: Synthetic oligonucleotide
  Sense strand starting at position 34 of SEQ ID NO: 1882367
aguauuggugagcauacga

SEQ ID NO: 2115539 - RNA, 19 nt, Artificial Sequence
  Description of Artificial Sequence: Synthetic oligonucleotide
  Antisense strand to SEQ ID NO: 2115538
ucguaugcucaccaauacu

SEQ ID NO: 2115540 - RNA, 19 nt, Artificial Sequence
  Description of Artificial Sequence: Synthetic oligonucleotide
  Sense strand starting at position 165 of SEQ ID NO: 1882367
uuagaugucugaucuacau

SEQ ID NO: 2115541 - RNA, 19 nt, Artificial Sequence
  Description of Artificial Sequence: Synthetic oligonucleotide
  Antisense strand to SEQ ID NO: 2115540
auguagaucagacaucuaa

SEQ ID NO: 2115542 - RNA, 19 nt, Artificial Sequence
  Description of Artificial Sequence: Synthetic oligonucleotide
  Sense strand starting at position 190 of SEQ ID NO: 1882367
uugcauacaugcuuagaua

SEQ ID NO: 2115543 - RNA, 19 nt, Artificial Sequence
  Description of Artificial Sequence: Synthetic oligonucleotide
  Antisense strand to SEQ ID NO: 2115542
uaucuaagcauguaugcaa

SEQ ID NO: 2115544 - RNA, 19 nt, Artificial Sequence
  Description of Artificial Sequence: Synthetic oligonucleotide
  Sense strand starting at position 191 of SEQ ID NO: 1882367
ugcauacaugcuuagauau

SEQ ID NO: 2115545 - RNA, 19 nt, Artificial Sequence
  Description of Artificial Sequence: Synthetic oligonucleotide
  Antisense strand to SEQ ID NO: 2115544
auaucuaagcauguaugca

SEQ ID NO: 2115546 - RNA, 19 nt, Artificial Sequence
  Description of Artificial Sequence: Synthetic oligonucleotide
  Sense strand starting at position 313 of SEQ ID NO: 1882367
uacaguuagcauuguugaa

SEQ ID NO: 2115547 - RNA, 19 nt, Artificial Sequence
  Description of Artificial Sequence: Synthetic oligonucleotide
  Antisense strand to SEQ ID NO: 2115546
uucaacaaugcuaacugua

SEQ ID NO: 2115548 - RNA, 19 nt, Artificial Sequence
  Description of Artificial Sequence: Synthetic oligonucleotide
  Sense strand starting at position 315 of SEQ ID NO: 1882367
caguuagcauuguugaaua

SEQ ID NO: 2115549 - RNA, 19 nt, Artificial Sequence
  Description of Artificial Sequence: Synthetic oligonucleotide
  Antisense strand to SEQ ID NO: 2115548
uauucaacaaugcuaacug

SEQ ID NO: 2115550 - RNA, 19 nt, Artificial Sequence
  Description of Artificial Sequence: Synthetic oligonucleotide
  Sense strand starting at position 320 of SEQ ID NO: 1882367
agcauuguugaauagcaaa

SEQ ID NO: 2115551 - RNA, 19 nt, Artificial Sequence
  Description of Artificial Sequence: Synthetic oligonucleotide
  Antisense strand to SEQ ID NO: 2115550
uuugcuauucaacaaugcu

SEQ ID NO: 2115552 - RNA, 19 nt, Artificial Sequence
  Description of Artificial Sequence: Synthetic oligonucleotide
  Sense strand starting at position 464 of SEQ ID NO: 1882367
augaacuacuaugcagaau

SEQ ID NO: 2115553 - RNA, 19 nt, Artificial Sequence
  Description of Artificial Sequence: Synthetic oligonucleotide
  Antisense strand to SEQ ID NO: 2115552
auucugcauaguaguucau

SEQ ID NO: 2115554 - RNA, 19 nt, Artificial Sequence
  Description of Artificial Sequence: Synthetic oligonucleotide
  Sense strand starting at position 562 of SEQ ID NO: 1882367
augcaauguguauaauaug

SEQ ID NO: 2115555 - RNA, 19 nt, Artificial Sequence
  Description of Artificial Sequence: Synthetic oligonucleotide
  Antisense strand to SEQ ID NO: 2115554
cauauuauacacauugcau

SEQ ID NO: 2115556 - RNA, 19 nt, Artificial Sequence
  Description of Artificial Sequence: Synthetic oligonucleotide
  Sense strand starting at position 597 of SEQ ID NO: 1882367
cgaaacccuguguauguaa

SEQ ID NO: 2115557 - RNA, 19 nt, Artificial Sequence
  Description of Artificial Sequence: Synthetic oligonucleotide
  Antisense strand to SEQ ID NO: 2115556
uuacauacacaggguuucg

SEQ ID NO: 2115558 - RNA, 19 nt, Artificial Sequence
  Description of Artificial Sequence: Synthetic oligonucleotide
  Sense strand starting at position 674 of SEQ ID NO: 1882367
agagguugucucugagaua

SEQ ID NO: 2115559 - RNA, 19 nt, Artificial Sequence
  Description of Artificial Sequence: Synthetic oligonucleotide
  Antisense strand to SEQ ID NO: 2115558
uaucucagagacaaccucu

SEQ ID NO: 2115560 - RNA, 19 nt, Artificial Sequence
  Description of Artificial Sequence: Synthetic oligonucleotide
  Sense strand starting at position 679 of SEQ ID NO: 1882367
uugucucugagauagguuu

SEQ ID NO: 2115561 - RNA, 19 nt, Artificial Sequence
  Description of Artificial Sequence: Synthetic oligonucleotide
  Antisense strand to SEQ ID NO: 2115560
aaaccuaucucagagacaa

SEQ ID NO: 2115562 - RNA, 19 nt, Artificial Sequence
  Description of Artificial Sequence: Synthetic oligonucleotide
  Sense strand starting at position 733 of SEQ ID NO: 1882367
ugccuucuauauuucugua

SEQ ID NO: 2115563 - RNA, 19 nt, Artificial Sequence
  Description of Artificial Sequence: Synthetic oligonucleotide
  Antisense strand to SEQ ID NO: 2115562
uacagaaauauagaaggca

SEQ ID NO: 2115564 - RNA, 19 nt, Artificial Sequence
  Description of Artificial Sequence: Synthetic oligonucleotide
  Sense strand starting at position 932 of SEQ ID NO: 1882367
uaaugagaauggcauuuga

SEQ ID NO: 2115565 - RNA, 19 nt, Artificial Sequence
  Description of Artificial Sequence: Synthetic oligonucleotide
  Antisense strand to SEQ ID NO: 2115564
ucaaaugccauucucauua

SEQ ID NO: 2115566 - RNA, 19 nt, Artificial Sequence
  Description of Artificial Sequence: Synthetic oligonucleotide
  Sense strand starting at position 1080 of SEQ ID NO: 1882367
cuaguaugcauggaugagu

SEQ ID NO: 2115567 - RNA, 19 nt, Artificial Sequence
  Description of Artificial Sequence: Synthetic oligonucleotide
  Antisense strand to SEQ ID NO: 2115566
acucauccaugcauacuag

SEQ ID NO: 2115568 - RNA, 19 nt, Artificial Sequence
  Description of Artificial Sequence: Synthetic oligonucleotide
  Sense strand starting at position 1119 of SEQ ID NO: 1882367
aggaauuaagccgagcaca

SEQ ID NO: 2115569 - RNA, 19 nt, Artificial Sequence
  Description of Artificial Sequence: Synthetic oligonucleotide
  Antisense strand to SEQ ID NO: 2115568
ugugcucggcuuaauuccu

SEQ ID NO: 2115570 - RNA, 19 nt, Artificial Sequence
  Description of Artificial Sequence: Synthetic oligonucleotide
  Sense strand starting at position 1337 of SEQ ID NO: 1882367
auaucccuagauuguuauu

SEQ ID NO: 2115571 - RNA, 19 nt, Artificial Sequence
  Description of Artificial Sequence: Synthetic oligonucleotide
  Antisense strand to SEQ ID NO: 2115570
aauaacaaucuagggauau

SEQ ID NO: 2115572 - RNA, 19 nt, Artificial Sequence
  Description of Artificial Sequence: Synthetic oligonucleotide
  Sense strand starting at position 1502 of SEQ ID NO: 1882367
cgaaauaaauggucaccaa

SEQ ID NO: 2115573 - RNA, 19 nt, Artificial Sequence
  Description of Artificial Sequence: Synthetic oligonucleotide
  Antisense strand to SEQ ID NO: 2115572
uuggugaccauuuauuucg

SEQ ID NO: 2115574 - RNA, 19 nt, Artificial Sequence
  Description of Artificial Sequence: Synthetic oligonucleotide
  Sense strand starting at position 1578 of SEQ ID NO: 1882367
uuuggagacuucuuccuua

SEQ ID NO: 2115575 - RNA, 19 nt, Artificial Sequence
  Description of Artificial Sequence: Synthetic oligonucleotide
  Antisense strand to SEQ ID NO: 2115574
uaaggaagaagucuccaaa

SEQ ID NO: 2115576 - RNA, 19 nt, Artificial Sequence
  Description of Artificial Sequence: Synthetic oligonucleotide
  Sense strand starting at position 1581 of SEQ ID NO: 1882367
ggagacuucuuccuuaaga

SEQ ID NO: 2115577 - RNA, 19 nt, Artificial Sequence
  Description of Artificial Sequence: Synthetic oligonucleotide
  Antisense strand to SEQ ID NO: 2115576
ucuuaaggaagaagucucc

SEQ ID NO: 2115578 - RNA, 19 nt, Artificial Sequence
  Description of Artificial Sequence: Synthetic oligonucleotide
  Sense strand starting at position 1680 of SEQ ID NO: 1882367
uggcccaugcuuuaaauau

SEQ ID NO: 2115579 - RNA, 19 nt, Artificial Sequence
  Description of Artificial Sequence: Synthetic oligonucleotide
  Antisense strand to SEQ ID NO: 2115578
auauuuaaagcaugggcca

SEQ ID NO: 2115580 - RNA, 19 nt, Artificial Sequence
  Description of Artificial Sequence: Synthetic oligonucleotide
  Sense strand starting at position 1753 of SEQ ID NO: 1882367
uggucuggcccucaucaau

SEQ ID NO: 2115581 - RNA, 19 nt, Artificial Sequence
  Description of Artificial Sequence: Synthetic oligonucleotide
  Antisense strand to SEQ ID NO: 2115580
auugaugagggccagacca

SEQ ID NO: 2115582 - RNA, 19 nt, Artificial Sequence
  Description of Artificial Sequence: Synthetic oligonucleotide
  Sense strand starting at position 2133 of SEQ ID NO: 1882367
acagguugccuauagcaau

SEQ ID NO: 2115583 - RNA, 19 nt, Artificial Sequence
  Description of Artificial Sequence: Synthetic oligonucleotide
  Antisense strand to SEQ ID NO: 2115582
auugcuauaggcaaccugu

SEQ ID NO: 2115584 - RNA, 19 nt, Artificial Sequence
  Description of Artificial Sequence: Synthetic oligonucleotide
  Sense strand starting at position 2146 of SEQ ID NO: 1882367
agcaaucacucaguugauu

SEQ ID NO: 2115585 - RNA, 19 nt, Artificial Sequence
  Description of Artificial Sequence: Synthetic oligonucleotide
  Antisense strand to SEQ ID NO: 2115584
aaucaacugagugauugcu

SEQ ID NO: 2115586 - RNA, 19 nt, Artificial Sequence
  Description of Artificial Sequence: Synthetic oligonucleotide
  Sense strand starting at position 2157 of SEQ ID NO: 1882367
aguugauuccaacacaugu

SEQ ID NO: 2115587 - RNA, 19 nt, Artificial Sequence
  Description of Artificial Sequence: Synthetic oligonucleotide
  Antisense strand to SEQ ID NO: 2115586
acauguguuggaaucaacu

SEQ ID NO: 2115588 - RNA, 19 nt, Artificial Sequence
  Description of Artificial Sequence: Synthetic oligonucleotide
  Sense strand starting at position 2225 of SEQ ID NO: 1882367
acauuccuugcagagaagu

SEQ ID NO: 2115589 - RNA, 19 nt, Artificial Sequence
  Description of Artificial Sequence: Synthetic oligonucleotide
  Antisense strand to SEQ ID NO: 2115588
acuucucugcaaggaaugu

SEQ ID NO: 2115590 - RNA, 19 nt, Artificial Sequence
  Description of Artificial Sequence: Synthetic oligonucleotide
  Sense strand starting at position 2296 of SEQ ID NO: 1882367
gucucaauaguguaacaca

SEQ ID NO: 2115591 - RNA, 19 nt, Artificial Sequence
  Description of Artificial Sequence: Synthetic oligonucleotide
  Antisense strand to SEQ ID NO: 2115590
uguguuacacuauugagac

SEQ ID NO: 2115592 - RNA, 19 nt, Artificial Sequence
  Description of Artificial Sequence: Synthetic oligonucleotide
  Sense strand starting at position 2304 of SEQ ID NO: 1882367
aguguaacacaauggaaau

SEQ ID NO: 2115593 - RNA, 19 nt, Artificial Sequence
  Description of Artificial Sequence: Synthetic oligonucleotide
  Antisense strand to SEQ ID NO: 2115592
auuuccauuguguuacacu

SEQ ID NO: 2115594 - RNA, 19 nt, Artificial Sequence
  Description of Artificial Sequence: Synthetic oligonucleotide
  Sense strand starting at position 2355 of SEQ ID NO: 1882367
aaaugagguguccaguaug

SEQ ID NO: 2115595 - RNA, 19 nt, Artificial Sequence
  Description of Artificial Sequence: Synthetic oligonucleotide
  Antisense strand to SEQ ID NO: 2115594
cauacuggacaccucauuu

SEQ ID NO: 2115596 - RNA, 19 nt, Artificial Sequence
  Description of Artificial Sequence: Synthetic oligonucleotide
  Sense strand starting at position 2369 of SEQ ID NO: 1882367
guaugcagagcugauguau

SEQ ID NO: 2115597 - RNA, 19 nt, Artificial Sequence
  Description of Artificial Sequence: Synthetic oligonucleotide
  Antisense strand to SEQ ID NO: 2115596
auacaucagcucugcauac

SEQ ID NO: 2115598 - RNA, 19 nt, Artificial Sequence
  Description of Artificial Sequence: Synthetic oligonucleotide
  Sense strand starting at position 2582 of SEQ ID NO: 1882367
guaguucuaccuuaaguua

SEQ ID NO: 2115599 - RNA, 19 nt, Artificial Sequence
  Description of Artificial Sequence: Synthetic oligonucleotide
  Antisense strand to SEQ ID NO: 2115598
uaacuuaagguagaacuac

SEQ ID NO: 2115600 - RNA, 19 nt, Artificial Sequence
  Description of Artificial Sequence: Synthetic oligonucleotide
  Sense strand starting at position 2800 of SEQ ID NO: 1882367
uccugaucauuagugaucu

SEQ ID NO: 2115601 - RNA, 19 nt, Artificial Sequence
  Description of Artificial Sequence: Synthetic oligonucleotide
  Antisense strand to SEQ ID NO: 2115600
agaucacuaaugaucagga

SEQ ID NO: 2115602 - RNA, 19 nt, Artificial Sequence
  Description of Artificial Sequence: Synthetic oligonucleotide
  Sense strand starting at position 2804 of SEQ ID NO: 1882367
gaucauuagugaucuugaa

SEQ ID NO: 2115603 - RNA, 19 nt, Artificial Sequence
  Description of Artificial Sequence: Synthetic oligonucleotide
  Antisense strand to SEQ ID NO: 2115602
uucaagaucacuaaugauc

SEQ ID NO: 2115604 - RNA, 19 nt, Artificial Sequence
  Description of Artificial Sequence: Synthetic oligonucleotide
  Sense strand starting at position 3126 of SEQ ID NO: 1882367
gcgauuggccuugagaaau

SEQ ID NO: 2115605 - RNA, 19 nt, Artificial Sequence
  Description of Artificial Sequence: Synthetic oligonucleotide
  Antisense strand to SEQ ID NO: 2115604
auuucucaaggccaaucgc

SEQ ID NO: 2115606 - RNA, 19 nt, Artificial Sequence
  Description of Artificial Sequence: Synthetic oligonucleotide
  Sense strand starting at position 3132 of SEQ ID NO: 1882367
ggccuugagaaaugucuau

SEQ ID NO: 2115607 - RNA, 19 nt, Artificial Sequence
  Description of Artificial Sequence: Synthetic oligonucleotide
  Antisense strand to SEQ ID NO: 2115606
auagacauuucucaaggcc

SEQ ID NO: 2115608 - RNA, 19 nt, Artificial Sequence
  Description of Artificial Sequence: Synthetic oligonucleotide
  Sense strand starting at position 3235 of SEQ ID NO: 1882367
ccuugucagauguauggau

SEQ ID NO: 2115609 - RNA, 19 nt, Artificial Sequence
  Description of Artificial Sequence: Synthetic oligonucleotide
  Antisense strand to SEQ ID NO: 2115608
auccauacaucugacaagg

SEQ ID NO: 2115610 - RNA, 19 nt, Artificial Sequence
  Description of Artificial Sequence: Synthetic oligonucleotide
  Sense strand starting at position 3409 of SEQ ID NO: 1882367
agccaauguguugaaggau

SEQ ID NO: 2115611 - RNA, 19 nt, Artificial Sequence
  Description of Artificial Sequence: Synthetic oligonucleotide
  Antisense strand to SEQ ID NO: 2115610
auccuucaacacauuggcu

SEQ ID NO: 2115612 - RNA, 19 nt, Artificial Sequence
  Description of Artificial Sequence: Synthetic oligonucleotide
  Sense strand starting at position 8 of SEQ ID NO: 1882368
ccucauacccauuacgagu

SEQ ID NO: 2115613 - RNA, 19 nt, Artificial Sequence
  Description of Artificial Sequence: Synthetic oligonucleotide
  Antisense strand to SEQ ID NO: 2115612
acucguaauggguaugagg

SEQ ID NO: 2115614 - RNA, 19 nt, Artificial Sequence
  Description of Artificial Sequence: Synthetic oligonucleotide
  Sense strand starting at position 1290 of SEQ ID NO: 1882368
cggccuugacucuacacaa

SEQ ID NO: 2115615 - RNA, 19 nt, Artificial Sequence
  Description of Artificial Sequence: Synthetic oligonucleotide
  Antisense strand to SEQ ID NO: 2115614
uuguguagagucaaggccg

SEQ ID NO: 2115616 - RNA, 19 nt, Artificial Sequence
  Description of Artificial Sequence: Synthetic oligonucleotide
  Sense strand starting at position 1631 of SEQ ID NO: 1882368
gcagaaagacuucguagga

SEQ ID NO: 2115617 - RNA, 19 nt, Artificial Sequence
  Description of Artificial Sequence: Synthetic oligonucleotide
  Antisense strand to SEQ ID NO: 2115616
uccuacgaagucuuucugc

SEQ ID NO: 2115618 - RNA, 19 nt, Artificial Sequence
  Description of Artificial Sequence: Synthetic oligonucleotide
  Sense strand starting at position 1632 of SEQ ID NO: 1882368
cagaaagacuucguaggaa

SEQ ID NO: 2115619 - RNA, 19 nt, Artificial Sequence
  Description of Artificial Sequence: Synthetic oligonucleotide
  Antisense strand to SEQ ID NO: 2115618
uuccuacgaagucuuucug

SEQ ID NO: 2115620 - RNA, 19 nt, Artificial Sequence
  Description of Artificial Sequence: Synthetic oligonucleotide
  Sense strand starting at position 1635 of SEQ ID NO: 1882368
aaagacuucguaggaaaua

SEQ ID NO: 2115621 - RNA, 19 nt, Artificial Sequence
  Description of Artificial Sequence: Synthetic oligonucleotide
  Antisense strand to SEQ ID NO: 2115620
uauuuccuacgaagucuuu

SEQ ID NO: 2115622 - RNA, 19 nt, Artificial Sequence
  Description of Artificial Sequence: Synthetic oligonucleotide
  Sense strand starting at position 1796 of SEQ ID NO: 1882368
uuuagagagcauugguauc

SEQ ID NO: 2115623 - RNA, 19 nt, Artificial Sequence
  Description of Artificial Sequence: Synthetic oligonucleotide
  Antisense strand to SEQ ID NO: 2115622
gauaccaaugcucucuaaa

SEQ ID NO: 2115624 - RNA, 19 nt, Artificial Sequence
  Description of Artificial Sequence: Synthetic oligonucleotide
  Sense strand starting at position 1798 of SEQ ID NO: 1882368
uagagagcauugguaucuu

SEQ ID NO: 2115625 - RNA, 19 nt, Artificial Sequence
  Description of Artificial Sequence: Synthetic oligonucleotide
  Antisense strand to SEQ ID NO: 2115624
aagauaccaaugcucucua

SEQ ID NO: 2115626 - RNA, 19 nt, Artificial Sequence
  Description of Artificial Sequence: Synthetic oligonucleotide
  Sense strand starting at position 1903 of SEQ ID NO: 1882368
ugagguaaauuugagguca

SEQ ID NO: 2115627 - RNA, 19 nt, Artificial Sequence
  Description of Artificial Sequence: Synthetic oligonucleotide
  Antisense strand to SEQ ID NO: 2115626
ugaccucaaauuuaccuca

SEQ ID NO: 2115628 - RNA, 19 nt, Artificial Sequence
  Description of Artificial Sequence: Synthetic oligonucleotide
  Sense strand starting at position 1976 of SEQ ID NO: 1882368
uuuggaguaugagcaguaa

SEQ ID NO: 2115629 - RNA, 19 nt, Artificial Sequence
  Description of Artificial Sequence: Synthetic oligonucleotide
  Antisense strand to SEQ ID NO: 2115628
uuacugcucauacuccaaa

SEQ ID NO: 2115630 - RNA, 19 nt, Artificial Sequence
  Description of Artificial Sequence: Synthetic oligonucleotide
  Sense strand starting at position 1980 of SEQ ID NO: 1882368
gaguaugagcaguaacauu

SEQ ID NO: 2115631 - RNA, 19 nt, Artificial Sequence
  Description of Artificial Sequence: Synthetic oligonucleotide
  Antisense strand to SEQ ID NO: 2115630
aauguuacugcucauacuc

SEQ ID NO: 2115632 - RNA, 19 nt, Artificial Sequence
  Description of Artificial Sequence: Synthetic oligonucleotide
  Sense strand starting at position 2030 of SEQ ID NO: 1882368
ugcucaauggaguaguaac

SEQ ID NO: 2115633 - RNA, 19 nt, Artificial Sequence
  Description of Artificial Sequence: Synthetic oligonucleotide
  Antisense strand to SEQ ID NO: 2115632
guuacuacuccauugagca

SEQ ID NO: 2115634 - RNA, 19 nt, Artificial Sequence
  Description of Artificial Sequence: Synthetic oligonucleotide
  Sense strand starting at position 2038 of SEQ ID NO: 1882368
ggaguaguaaccuguuaua

SEQ ID NO: 2115635 - RNA, 19 nt, Artificial Sequence
  Description of Artificial Sequence: Synthetic oligonucleotide
  Antisense strand to SEQ ID NO: 2115634
uauaacagguuacuacucc

SEQ ID NO: 2115636 - RNA, 19 nt, Artificial Sequence
  Description of Artificial Sequence: Synthetic oligonucleotide
  Sense strand starting at position 2063 of SEQ ID NO: 1882368
ucacaaaggcuugguaaau

SEQ ID NO: 2115637 - RNA, 19 nt, Artificial Sequence
  Description of Artificial Sequence: Synthetic oligonucleotide
  Antisense strand to SEQ ID NO: 2115636
auuuaccaagccuuuguga

SEQ ID NO: 2115638 - RNA, 19 nt, Artificial Sequence
  Description of Artificial Sequence: Synthetic oligonucleotide
  Sense strand starting at position 2064 of SEQ ID NO: 1882368
cacaaaggcuugguaaaua

SEQ ID NO: 2115639 - RNA, 19 nt, Artificial Sequence
  Description of Artificial Sequence: Synthetic oligonucleotide
  Antisense strand to SEQ ID NO: 2115638
uauuuaccaagccuuugug

SEQ ID NO: 2115640 - RNA, 19 nt, Artificial Sequence
  Description of Artificial Sequence: Synthetic oligonucleotide
  Sense strand starting at position 2069 of SEQ ID NO: 1882368
aggcuugguaaauaguuua

SEQ ID NO: 2115641 - RNA, 19 nt, Artificial Sequence
  Description of Artificial Sequence: Synthetic oligonucleotide
  Antisense strand to SEQ ID NO: 2115640
uaaacuauuuaccaagccu

SEQ ID NO: 2115642 - RNA, 19 nt, Artificial Sequence
  Description of Artificial Sequence: Synthetic oligonucleotide
  Sense strand starting at position 2159 of SEQ ID NO: 1882368
aguccugucugauuuguag

SEQ ID NO: 2115643 - RNA, 19 nt, Artificial Sequence
  Description of Artificial Sequence: Synthetic oligonucleotide
  Antisense strand to SEQ ID NO: 2115642
cuacaaaucagacaggacu

SEQ ID NO: 2115644 - RNA, 19 nt, Artificial Sequence
  Description of Artificial Sequence: Synthetic oligonucleotide
  Sense strand starting at position 2405 of SEQ ID NO: 1882368
cuaaauugaucugcgauag

SEQ ID NO: 2115645 - RNA, 19 nt, Artificial Sequence
  Description of Artificial Sequence: Synthetic oligonucleotide
  Antisense strand to SEQ ID NO: 2115644
cuaucgcagaucaauuuag

SEQ ID NO: 2115646 - RNA, 19 nt, Artificial Sequence
  Description of Artificial Sequence: Synthetic oligonucleotide
  Sense strand starting at position 2470 of SEQ ID NO: 1882368
aggacuagauaugcauuau

SEQ ID NO: 2115647 - RNA, 19 nt, Artificial Sequence
  Description of Artificial Sequence: Synthetic oligonucleotide
  Antisense strand to SEQ ID NO: 2115646
auaaugcauaucuaguccu

SEQ ID NO: 2115648 - RNA, 19 nt, Artificial Sequence
  Description of Artificial Sequence: Synthetic oligonucleotide
  Sense strand starting at position 2654 of SEQ ID NO: 1882368
guuucuaaaguuuagagau

SEQ ID NO: 2115649 - RNA, 19 nt, Artificial Sequence
  Description of Artificial Sequence: Synthetic oligonucleotide
  Antisense strand to SEQ ID NO: 2115648
aucucuaaacuuuagaaac

SEQ ID NO: 2115650 - RNA, 19 nt, Artificial Sequence
  Description of Artificial Sequence: Synthetic oligonucleotide
  Sense strand starting at position 2752 of SEQ ID NO: 1882368
guugguguugguagugaug

SEQ ID NO: 2115651 - RNA, 19 nt, Artificial Sequence
  Description of Artificial Sequence: Synthetic oligonucleotide
  Antisense strand to SEQ ID NO: 2115650
caucacuaccaacaccaac

SEQ ID NO: 2115652 - RNA, 19 nt, Artificial Sequence
  Description of Artificial Sequence: Synthetic oligonucleotide
  Sense strand starting at position 2764 of SEQ ID NO: 1882368
agugaugggcucugaggaa

SEQ ID NO: 2115653 - RNA, 19 nt, Artificial Sequence
  Description of Artificial Sequence: Synthetic oligonucleotide
  Antisense strand to SEQ ID NO: 2115652
uuccucagagcccaucacu

SEQ ID NO: 2115654 - RNA, 19 nt, Artificial Sequence
  Description of Artificial Sequence: Synthetic oligonucleotide
  Sense strand starting at position 2793 of SEQ ID NO: 1882368
uguaauuuguugucaccac

SEQ ID NO: 2115655 - RNA, 19 nt, Artificial Sequence
  Description of Artificial Sequence: Synthetic oligonucleotide
  Antisense strand to SEQ ID NO: 2115654
guggugacaacaaauuaca

SEQ ID NO: 2115656 - RNA, 19 nt, Artificial Sequence
  Description of Artificial Sequence: Synthetic oligonucleotide
  Sense strand starting at position 2934 of SEQ ID NO: 1882368
ggaugcaagcuugauaagu

SEQ ID NO: 2115657 - RNA, 19 nt, Artificial Sequence
  Description of Artificial Sequence: Synthetic oligonucleotide
  Antisense strand to SEQ ID NO: 2115656
acuuaucaagcuugcaucc

SEQ ID NO: 2115658 - RNA, 19 nt, Artificial Sequence
  Description of Artificial Sequence: Synthetic oligonucleotide
  Sense strand starting at position 2945 of SEQ ID NO: 1882368
ugauaaguaggguggaaau

SEQ ID NO: 2115659 - RNA, 19 nt, Artificial Sequence
  Description of Artificial Sequence: Synthetic oligonucleotide
  Antisense strand to SEQ ID NO: 2115658
auuuccacccuacuuauca

SEQ ID NO: 2115660 - RNA, 19 nt, Artificial Sequence
  Description of Artificial Sequence: Synthetic oligonucleotide
  Sense strand starting at position 2971 of SEQ ID NO: 1882368
uugugauugugacuuaaua

SEQ ID NO: 2115661 - RNA, 19 nt, Artificial Sequence
  Description of Artificial Sequence: Synthetic oligonucleotide
  Antisense strand to SEQ ID NO: 2115660
uauuaagucacaaucacaa

SEQ ID NO: 2115662 - RNA, 19 nt, Artificial Sequence
  Description of Artificial Sequence: Synthetic oligonucleotide
  Sense strand starting at position 2973 of SEQ ID NO: 1882368
gugauugugacuuaauaug

SEQ ID NO: 2115663 - RNA, 19 nt, Artificial Sequence
  Description of Artificial Sequence: Synthetic oligonucleotide
  Antisense strand to SEQ ID NO: 2115662
cauauuaagucacaaucac

SEQ ID NO: 2115664 - RNA, 19 nt, Artificial Sequence
  Description of Artificial Sequence: Synthetic oligonucleotide
  Sense strand starting at position 3059 of SEQ ID NO: 1882368
gaaaucucugguggguuau

SEQ ID NO: 2115665 - RNA, 19 nt, Artificial Sequence
  Description of Artificial Sequence: Synthetic oligonucleotide
  Antisense strand to SEQ ID NO: 2115664
auaacccaccagagauuuc

SEQ ID NO: 2115666 - RNA, 19 nt, Artificial Sequence
  Description of Artificial Sequence: Synthetic oligonucleotide
  Sense strand starting at position 3060 of SEQ ID NO: 1882368
aaaucucugguggguuauu

SEQ ID NO: 2115667 - RNA, 19 nt, Artificial Sequence
  Description of Artificial Sequence: Synthetic oligonucleotide
  Antisense strand to SEQ ID NO: 2115666
aauaacccaccagagauuu

SEQ ID NO: 2115668 - RNA, 19 nt, Artificial Sequence
  Description of Artificial Sequence: Synthetic oligonucleotide
  Sense strand starting at position 3337 of SEQ ID NO: 1882368
aaaggagcuucuguaucaa

SEQ ID NO: 2115669 - RNA, 19 nt, Artificial Sequence
  Description of Artificial Sequence: Synthetic oligonucleotide
  Antisense strand to SEQ ID NO: 2115668
uugauacagaagcuccuuu

SEQ ID NO: 2115670 - RNA, 19 nt, Artificial Sequence
  Description of Artificial Sequence: Synthetic oligonucleotide
  Sense strand starting at position 3349 of SEQ ID NO: 1882368
guaucaaagaaucgugacu

SEQ ID NO: 2115671 - RNA, 19 nt, Artificial Sequence
  Description of Artificial Sequence: Synthetic oligonucleotide
  Antisense strand to SEQ ID NO: 2115670
agucacgauucuuugauac

SEQ ID NO: 2115672 - RNA, 19 nt, Artificial Sequence
  Description of Artificial Sequence: Synthetic oligonucleotide
  Sense strand starting at position 3354 of SEQ ID NO: 1882368
aaagaaucgugacuuuaag

SEQ ID NO: 2115673 - RNA, 19 nt, Artificial Sequence
  Description of Artificial Sequence: Synthetic oligonucleotide
  Antisense strand to SEQ ID NO: 2115672
cuuaaagucacgauucuuu

SEQ ID NO: 2115674 - RNA, 19 nt, Artificial Sequence
  Description of Artificial Sequence: Synthetic oligonucleotide
  Sense strand starting at position 3387 of SEQ ID NO: 1882368
uuggauugggaauggguua

SEQ ID NO: 2115675 - RNA, 19 nt, Artificial Sequence
  Description of Artificial Sequence: Synthetic oligonucleotide
  Antisense strand to SEQ ID NO: 2115674
uaacccauucccaauccaa

SEQ ID NO: 2115676 - RNA, 19 nt, Artificial Sequence
  Description of Artificial Sequence: Synthetic oligonucleotide
  Sense strand starting at position 3400 of SEQ ID NO: 1882368
ggguuauaucuguaguaau

SEQ ID NO: 2115677 - RNA, 19 nt, Artificial Sequence
  Description of Artificial Sequence: Synthetic oligonucleotide
  Antisense strand to SEQ ID NO: 2115676
auuacuacagauauaaccc

SEQ ID NO: 2115678 - RNA, 19 nt, Artificial Sequence
  Description of Artificial Sequence: Synthetic oligonucleotide
  Sense strand starting at position 3413 of SEQ ID NO: 1882368
aguaauagggucugaauua

SEQ ID NO: 2115679 - RNA, 19 nt, Artificial Sequence
  Description of Artificial Sequence: Synthetic oligonucleotide
  Antisense strand to SEQ ID NO: 2115678
uaauucagacccuauuacu

SEQ ID NO: 2115680 - RNA, 19 nt, Artificial Sequence
  Description of Artificial Sequence: Synthetic oligonucleotide
  Sense strand starting at position 3656 of SEQ ID NO: 1882368
guucucugcacguuaugua

SEQ ID NO: 2115681 - RNA, 19 nt, Artificial Sequence
  Description of Artificial Sequence: Synthetic oligonucleotide
  Antisense strand to SEQ ID NO: 2115680
uacauaacgugcagagaac

SEQ ID NO: 2115682 - RNA, 19 nt, Artificial Sequence
  Description of Artificial Sequence: Synthetic oligonucleotide
  Sense strand starting at position 3680 of SEQ ID NO: 1882368
cagguaacccuuuagguca

SEQ ID NO: 2115683 - RNA, 19 nt, Artificial Sequence
  Description of Artificial Sequence: Synthetic oligonucleotide
  Antisense strand to SEQ ID NO: 2115682
ugaccuaaaggguuaccug

SEQ ID NO: 2115684 - RNA, 19 nt, Artificial Sequence
  Description of Artificial Sequence: Synthetic oligonucleotide
  Sense strand starting at position 3687 of SEQ ID NO: 1882368
cccuuuaggucacugaaac

SEQ ID NO: 2115685 - RNA, 19 nt, Artificial Sequence
  Description of Artificial Sequence: Synthetic oligonucleotide
  Antisense strand to SEQ ID NO: 2115684
guuucagugaccuaaaggg

SEQ ID NO: 2115686 - RNA, 19 nt, Artificial Sequence
  Description of Artificial Sequence: Synthetic oligonucleotide
  Sense strand starting at position 3736 of SEQ ID NO: 1882368
uggauuagguauccuuaaa

SEQ ID NO: 2115687 - RNA, 19 nt, Artificial Sequence
  Description of Artificial Sequence: Synthetic oligonucleotide
  Antisense strand to SEQ ID NO: 2115686
uuuaaggauaccuaaucca

SEQ ID NO: 2115688 - RNA, 19 nt, Artificial Sequence
  Description of Artificial Sequence: Synthetic oligonucleotide
  Sense strand starting at position 3776 of SEQ ID NO: 1882368
aguuauuacuucucugacu

SEQ ID NO: 2115689 - RNA, 19 nt, Artificial Sequence
  Description of Artificial Sequence: Synthetic oligonucleotide
  Antisense strand to SEQ ID NO: 2115688
agucagagaaguaauaacu

SEQ ID NO: 2115690 - RNA, 19 nt, Artificial Sequence
  Description of Artificial Sequence: Synthetic oligonucleotide
  Sense strand starting at position 3889 of SEQ ID NO: 1882368
ugauacagcuaauuagaua

SEQ ID NO: 2115691 - RNA, 19 nt, Artificial Sequence
  Description of Artificial Sequence: Synthetic oligonucleotide
  Antisense strand to SEQ ID NO: 2115690
uaucuaauuagcuguauca

SEQ ID NO: 2115692 - RNA, 19 nt, Artificial Sequence
  Description of Artificial Sequence: Synthetic oligonucleotide
  Sense strand starting at position 32 of SEQ ID NO: 1882369
aggaaacucuaggaggaaa

SEQ ID NO: 2115693 - RNA, 19 nt, Artificial Sequence
  Description of Artificial Sequence: Synthetic oligonucleotide
  Antisense strand to SEQ ID NO: 2115692
uuuccuccuagaguuuccu

SEQ ID NO: 2115694 - RNA, 19 nt, Artificial Sequence
  Description of Artificial Sequence: Synthetic oligonucleotide
  Sense strand starting at position 91 of SEQ ID NO: 1882369
gagugugucagauggacau

SEQ ID NO: 2115695 - RNA, 19 nt, Artificial Sequence
  Description of Artificial Sequence: Synthetic oligonucleotide
  Antisense strand to SEQ ID NO: 2115694
auguccaucugacacacuc

SEQ ID NO: 2115696 - RNA, 19 nt, Artificial Sequence
  Description of Artificial Sequence: Synthetic oligonucleotide
  Sense strand starting at position 102 of SEQ ID NO: 1882369
auggacauguggcuagaau

SEQ ID NO: 2115697 - RNA, 19 nt, Artificial Sequence
  Description of Artificial Sequence: Synthetic oligonucleotide
  Antisense strand to SEQ ID NO: 2115696
auucuagccacauguccau

SEQ ID NO: 2115698 - RNA, 19 nt, Artificial Sequence
  Description of Artificial Sequence: Synthetic oligonucleotide
  Sense strand starting at position 103 of SEQ ID NO: 1882369
uggacauguggcuagaauc

SEQ ID NO: 2115699 - RNA, 19 nt, Artificial Sequence
  Description of Artificial Sequence: Synthetic oligonucleotide
  Antisense strand to SEQ ID NO: 2115698
gauucuagccacaugucca

SEQ ID NO: 2115700 - RNA, 19 nt, Artificial Sequence
  Description of Artificial Sequence: Synthetic oligonucleotide
  Sense strand starting at position 458 of SEQ ID NO: 1882369
gaagauagagccuguuugu

SEQ ID NO: 2115701 - RNA, 19 nt, Artificial Sequence
  Description of Artificial Sequence: Synthetic oligonucleotide
  Antisense strand to SEQ ID NO: 2115700
acaaacaggcucuaucuuc

SEQ ID NO: 2115702 - RNA, 19 nt, Artificial Sequence
  Description of Artificial Sequence: Synthetic oligonucleotide
  Sense strand starting at position 509 of SEQ ID NO: 1882369
ugagauugaugucuuuaau

SEQ ID NO: 2115703 - RNA, 19 nt, Artificial Sequence
  Description of Artificial Sequence: Synthetic oligonucleotide
  Antisense strand to SEQ ID NO: 2115702
auuaaagacaucaaucuca

SEQ ID NO: 2115704 - RNA, 19 nt, Artificial Sequence
  Description of Artificial Sequence: Synthetic oligonucleotide
  Sense strand starting at position 527 of SEQ ID NO: 1882369
ucuugucagaacggauaga

SEQ ID NO: 2115705 - RNA, 19 nt, Artificial Sequence
  Description of Artificial Sequence: Synthetic oligonucleotide
  Antisense strand to SEQ ID NO: 2115704
ucuauccguucugacaaga

SEQ ID NO: 2115706 - RNA, 19 nt, Artificial Sequence
  Description of Artificial Sequence: Synthetic oligonucleotide
  Sense strand starting at position 556 of SEQ ID NO: 1882369
aagaaaugaguacgguaga

SEQ ID NO: 2115707 - RNA, 19 nt, Artificial Sequence
  Description of Artificial Sequence: Synthetic oligonucleotide
  Antisense strand to SEQ ID NO: 2115706
ucuaccguacucauuucuu

SEQ ID NO: 2115708 - RNA, 19 nt, Artificial Sequence
  Description of Artificial Sequence: Synthetic oligonucleotide
  Sense strand starting at position 562 of SEQ ID NO: 1882369
ugaguacgguagagaaaug

SEQ ID NO: 2115709 - RNA, 19 nt, Artificial Sequence
  Description of Artificial Sequence: Synthetic oligonucleotide
  Antisense strand to SEQ ID NO: 2115708
cauuucucuaccguacuca

SEQ ID NO: 2115710 - RNA, 19 nt, Artificial Sequence
  Description of Artificial Sequence: Synthetic oligonucleotide
  Sense strand starting at position 619 of SEQ ID NO: 1882369
cagaauacguggccaaauc

SEQ ID NO: 2115711 - RNA, 19 nt, Artificial Sequence
  Description of Artificial Sequence: Synthetic oligonucleotide
  Antisense strand to SEQ ID NO: 2115710
gauuuggccacguauucug

SEQ ID NO: 2115712 - RNA, 19 nt, Artificial Sequence
  Description of Artificial Sequence: Synthetic oligonucleotide
  Sense strand starting at position 630 of SEQ ID NO: 1882369
gccaaaucucaaugggaca

SEQ ID NO: 2115713 - RNA, 19 nt, Artificial Sequence
  Description of Artificial Sequence: Synthetic oligonucleotide
  Antisense strand to SEQ ID NO: 2115712
ugucccauugagauuuggc

SEQ ID NO: 2115714 - RNA, 19 nt, Artificial Sequence
  Description of Artificial Sequence: Synthetic oligonucleotide
  Sense strand starting at position 726 of SEQ ID NO: 1882369
guaggcuucccugaucaug

SEQ ID NO: 2115715 - RNA, 19 nt, Artificial Sequence
  Description of Artificial Sequence: Synthetic oligonucleotide
  Antisense strand to SEQ ID NO: 2115714
caugaucagggaagccuac

SEQ ID NO: 2115716 - RNA, 19 nt, Artificial Sequence
  Description of Artificial Sequence: Synthetic oligonucleotide
  Sense strand starting at position 760 of SEQ ID NO: 1882369
uucuuuguccaucaucaga

SEQ ID NO: 2115717 - RNA, 19 nt, Artificial Sequence
  Description of Artificial Sequence: Synthetic oligonucleotide
  Antisense strand to SEQ ID NO: 2115716
ucugaugauggacaaagaa

SEQ ID NO: 2115718 - RNA, 19 nt, Artificial Sequence
  Description of Artificial Sequence: Synthetic oligonucleotide
  Sense strand starting at position 802 of SEQ ID NO: 1882369
gagagaaagaaguguguga

SEQ ID NO: 2115719 - RNA, 19 nt, Artificial Sequence
  Description of Artificial Sequence: Synthetic oligonucleotide
  Antisense strand to SEQ ID NO: 2115718
ucacacacuucuuucucuc

SEQ ID NO: 2115720 - RNA, 19 nt, Artificial Sequence
  Description of Artificial Sequence: Synthetic oligonucleotide
  Sense strand starting at position 804 of SEQ ID NO: 1882369
gagaaagaagugugugaag

SEQ ID NO: 2115721 - RNA, 19 nt, Artificial Sequence
  Description of Artificial Sequence: Synthetic oligonucleotide
  Antisense strand to SEQ ID NO: 2115720
cuucacacacuucuuucuc

SEQ ID NO: 2115722 - RNA, 19 nt, Artificial Sequence
  Description of Artificial Sequence: Synthetic oligonucleotide
  Sense strand starting at position 1035 of SEQ ID NO: 1882369
agaggcuuuagcgaacaaa

SEQ ID NO: 2115723 - RNA, 19 nt, Artificial Sequence
  Description of Artificial Sequence: Synthetic oligonucleotide
  Antisense strand to SEQ ID NO: 2115722
uuuguucgcuaaagccucu

SEQ ID NO: 2115724 - RNA, 19 nt, Artificial Sequence
  Description of Artificial Sequence: Synthetic oligonucleotide
  Sense strand starting at position 1038 of SEQ ID NO: 1882369
ggcuuuagcgaacaaagaa

SEQ ID NO: 2115725 - RNA, 19 nt, Artificial Sequence
  Description of Artificial Sequence: Synthetic oligonucleotide
  Antisense strand to SEQ ID NO: 2115724
uucuuuguucgcuaaagcc

SEQ ID NO: 2115726 - RNA, 19 nt, Artificial Sequence
  Description of Artificial Sequence: Synthetic oligonucleotide
  Sense strand starting at position 1092 of SEQ ID NO: 1882369
cacacacguguguaaauau

SEQ ID NO: 2115727 - RNA, 19 nt, Artificial Sequence
  Description of Artificial Sequence: Synthetic oligonucleotide
  Antisense strand to SEQ ID NO: 2115726
auauuuacacacgugugug

SEQ ID NO: 2115728 - RNA, 19 nt, Artificial Sequence
  Description of Artificial Sequence: Synthetic oligonucleotide
  Sense strand starting at position 1228 of SEQ ID NO: 1882369
uauauaugaugauagagga

SEQ ID NO: 2115729 - RNA, 19 nt, Artificial Sequence
  Description of Artificial Sequence: Synthetic oligonucleotide
  Antisense strand to SEQ ID NO: 2115728
uccucuaucaucauauaua

SEQ ID NO: 2115730 - RNA, 19 nt, Artificial Sequence
  Description of Artificial Sequence: Synthetic oligonucleotide
  Sense strand starting at position 1244 of SEQ ID NO: 1882369
ggauguagcauguaggaua

SEQ ID NO: 2115731 - RNA, 19 nt, Artificial Sequence
  Description of Artificial Sequence: Synthetic oligonucleotide
  Antisense strand to SEQ ID NO: 2115730
uauccuacaugcuacaucc

SEQ ID NO: 2115732 - RNA, 19 nt, Artificial Sequence
  Description of Artificial Sequence: Synthetic oligonucleotide
  Sense strand starting at position 1265 of SEQ ID NO: 1882369
ccuugagaaauggguugga

SEQ ID NO: 2115733 - RNA, 19 nt, Artificial Sequence
  Description of Artificial Sequence: Synthetic oligonucleotide
  Antisense strand to SEQ ID NO: 2115732
uccaacccauuucucaagg

SEQ ID NO: 2115734 - RNA, 19 nt, Artificial Sequence
  Description of Artificial Sequence: Synthetic oligonucleotide
  Sense strand starting at position 1269 of SEQ ID NO: 1882369
gagaaauggguuggaaugu

SEQ ID NO: 2115735 - RNA, 19 nt, Artificial Sequence
  Description of Artificial Sequence: Synthetic oligonucleotide
  Antisense strand to SEQ ID NO: 2115734
acauuccaacccauuucuc

SEQ ID NO: 2115736 - RNA, 19 nt, Artificial Sequence
  Description of Artificial Sequence: Synthetic oligonucleotide
  Sense strand starting at position 1416 of SEQ ID NO: 1882369
gaaacauuaggguguuaaa

SEQ ID NO: 2115737 - RNA, 19 nt, Artificial Sequence
  Description of Artificial Sequence: Synthetic oligonucleotide
  Antisense strand to SEQ ID NO: 2115736
uuuaacacccuaauguuuc

SEQ ID NO: 2115738 - RNA, 19 nt, Artificial Sequence
  Description of Artificial Sequence: Synthetic oligonucleotide
  Sense strand starting at position 1470 of SEQ ID NO: 1882369
aauaguggcggucauugaa

SEQ ID NO: 2115739 - RNA, 19 nt, Artificial Sequence
  Description of Artificial Sequence: Synthetic oligonucleotide
  Antisense strand to SEQ ID NO: 2115738
uucaaugaccgccacuauu

SEQ ID NO: 2115740 - RNA, 19 nt, Artificial Sequence
  Description of Artificial Sequence: Synthetic oligonucleotide
  Sense strand starting at position 1642 of SEQ ID NO: 1882369
aaggauaccuuagaugaga

SEQ ID NO: 2115741 - RNA, 19 nt, Artificial Sequence
  Description of Artificial Sequence: Synthetic oligonucleotide
  Antisense strand to SEQ ID NO: 2115740
ucucaucuaagguauccuu

SEQ ID NO: 2115742 - RNA, 19 nt, Artificial Sequence
  Description of Artificial Sequence: Synthetic oligonucleotide
  Sense strand starting at position 1775 of SEQ ID NO: 1882369
uuuggaaacccugguggau

SEQ ID NO: 2115743 - RNA, 19 nt, Artificial Sequence
  Description of Artificial Sequence: Synthetic oligonucleotide
  Antisense strand to SEQ ID NO: 2115742
auccaccaggguuuccaaa

SEQ ID NO: 2115744 - RNA, 19 nt, Artificial Sequence
  Description of Artificial Sequence: Synthetic oligonucleotide
  Sense strand starting at position 1788 of SEQ ID NO: 1882369
guggauucccagcaucaac

SEQ ID NO: 2115745 - RNA, 19 nt, Artificial Sequence
  Description of Artificial Sequence: Synthetic oligonucleotide
  Antisense strand to SEQ ID NO: 2115744
guugaugcugggaauccac

SEQ ID NO: 2115746 - RNA, 19 nt, Artificial Sequence
  Description of Artificial Sequence: Synthetic oligonucleotide
  Sense strand starting at position 1835 of SEQ ID NO: 1882369
gguucuuuccggcauuugu

SEQ ID NO: 2115747 - RNA, 19 nt, Artificial Sequence
  Description of Artificial Sequence: Synthetic oligonucleotide
  Antisense strand to SEQ ID NO: 2115746
acaaaugccggaaagaacc

SEQ ID NO: 2115748 - RNA, 19 nt, Artificial Sequence
  Description of Artificial Sequence: Synthetic oligonucleotide
  Sense strand starting at position 1925 of SEQ ID NO: 1882369
auaagacuuccuggaccca

SEQ ID NO: 2115749 - RNA, 19 nt, Artificial Sequence
  Description of Artificial Sequence: Synthetic oligonucleotide
  Antisense strand to SEQ ID NO: 2115748
uggguccaggaagucuuau

SEQ ID NO: 2115750 - RNA, 19 nt, Artificial Sequence
  Description of Artificial Sequence: Synthetic oligonucleotide
  Sense strand starting at position 1966 of SEQ ID NO: 1882369
gcgcccaucgcauugaaga

SEQ ID NO: 2115751 - RNA, 19 nt, Artificial Sequence
  Description of Artificial Sequence: Synthetic oligonucleotide
  Antisense strand to SEQ ID NO: 2115750
ucuucaaugcgaugggcgc

SEQ ID NO: 2115752 - RNA, 19 nt, Artificial Sequence
  Description of Artificial Sequence: Synthetic oligonucleotide
  Sense strand starting at position 2919 of SEQ ID NO: 1882369
agcgcuuucgaggaaggga

SEQ ID NO: 2115753 - RNA, 19 nt, Artificial Sequence
  Description of Artificial Sequence: Synthetic oligonucleotide
  Antisense strand to SEQ ID NO: 2115752
ucccuuccucgaaagcgcu

SEQ ID NO: 2115754 - RNA, 19 nt, Artificial Sequence
  Description of Artificial Sequence: Synthetic oligonucleotide
  Sense strand starting at position 2937 of SEQ ID NO: 1882369
agaucagcuuuauugaaca

SEQ ID NO: 2115755 - RNA, 19 nt, Artificial Sequence
  Description of Artificial Sequence: Synthetic oligonucleotide
  Antisense strand to SEQ ID NO: 2115754
uguucaauaaagcugaucu

SEQ ID NO: 2115756 - RNA, 19 nt, Artificial Sequence
  Description of Artificial Sequence: Synthetic oligonucleotide
  Sense strand starting at position 3341 of SEQ ID NO: 1882369
guuauaauacugcaguaau

SEQ ID NO: 2115757 - RNA, 19 nt, Artificial Sequence
  Description of Artificial Sequence: Synthetic oligonucleotide
  Antisense strand to SEQ ID NO: 2115756
auuacugcaguauuauaac

SEQ ID NO: 2115758 - RNA, 19 nt, Artificial Sequence
  Description of Artificial Sequence: Synthetic oligonucleotide
  Sense strand starting at position 3344 of SEQ ID NO: 1882369
auaauacugcaguaaugua

SEQ ID NO: 2115759 - RNA, 19 nt, Artificial Sequence
  Description of Artificial Sequence: Synthetic oligonucleotide
  Antisense strand to SEQ ID NO: 2115758
uacauuacugcaguauuau

SEQ ID NO: 2115760 - RNA, 19 nt, Artificial Sequence
  Description of Artificial Sequence: Synthetic oligonucleotide
  Sense strand starting at position 3351 of SEQ ID NO: 1882369
ugcaguaauguagauggua

SEQ ID NO: 2115761 - RNA, 19 nt, Artificial Sequence
  Description of Artificial Sequence: Synthetic oligonucleotide
  Antisense strand to SEQ ID NO: 2115760
uaccaucuacauuacugca

SEQ ID NO: 2115762 - RNA, 19 nt, Artificial Sequence
  Description of Artificial Sequence: Synthetic oligonucleotide
  Sense strand starting at position 3437 of SEQ ID NO: 1882369
gccacaaagaucggaauga

SEQ ID NO: 2115763 - RNA, 19 nt, Artificial Sequence
  Description of Artificial Sequence: Synthetic oligonucleotide
  Antisense strand to SEQ ID NO: 2115762
ucauuccgaucuuuguggc

SEQ ID NO: 2115764 - RNA, 19 nt, Artificial Sequence
  Description of Artificial Sequence: Synthetic oligonucleotide
  Sense strand starting at position 3872 of SEQ ID NO: 1882369
cuaggcauauuccuuggaa

SEQ ID NO: 2115765 - RNA, 19 nt, Artificial Sequence
  Description of Artificial Sequence: Synthetic oligonucleotide
  Antisense strand to SEQ ID NO: 2115764
uuccaaggaauaugccuag

SEQ ID NO: 2115766 - RNA, 19 nt, Artificial Sequence
  Description of Artificial Sequence: Synthetic oligonucleotide
  Sense strand starting at position 3874 of SEQ ID NO: 1882369
aggcauauuccuuggaauc

SEQ ID NO: 2115767 - RNA, 19 nt, Artificial Sequence
  Description of Artificial Sequence: Synthetic oligonucleotide
  Antisense strand to SEQ ID NO: 2115766
gauuccaaggaauaugccu

SEQ ID NO: 2115768 - RNA, 19 nt, Artificial Sequence
  Description of Artificial Sequence: Synthetic oligonucleotide
  Sense strand starting at position 3875 of SEQ ID NO: 1882369
ggcauauuccuuggaaucu

SEQ ID NO: 2115769 - RNA, 19 nt, Artificial Sequence
  Description of Artificial Sequence: Synthetic oligonucleotide
  Antisense strand to SEQ ID NO: 2115768
agauuccaaggaauaugcc

SEQ ID NO: 2115770 - RNA, 19 nt, Artificial Sequence
  Description of Artificial Sequence: Synthetic oligonucleotide
  Sense strand starting at position 3943 of SEQ ID NO: 1882369
ucacauauuugacaugguu

SEQ ID NO: 2115771 - RNA, 19 nt, Artificial Sequence
  Description of Artificial Sequence: Synthetic oligonucleotide
  Antisense strand to SEQ ID NO: 2115770
aaccaugucaaauauguga

SEQ ID NO: 2115772 - RNA, 19 nt, Artificial Sequence
  Description of Artificial Sequence: Synthetic oligonucleotide
  Sense strand starting at position 158 of SEQ ID NO: 1882370
gcugcugagcaggauauua

SEQ ID NO: 2115773 - RNA, 19 nt, Artificial Sequence
  Description of Artificial Sequence: Synthetic oligonucleotide
  Antisense strand to SEQ ID NO: 2115772
uaauauccugcucagcagc

SEQ ID NO: 2115774 - RNA, 19 nt, Artificial Sequence
  Description of Artificial Sequence: Synthetic oligonucleotide
  Sense strand starting at position 160 of SEQ ID NO: 1882370
ugcugagcaggauauuaau

SEQ ID NO: 2115775 - RNA, 19 nt, Artificial Sequence
  Description of Artificial Sequence: Synthetic oligonucleotide
  Antisense strand to SEQ ID NO: 2115774
auuaauauccugcucagca

SEQ ID NO: 2115776 - RNA, 19 nt, Artificial Sequence
  Description of Artificial Sequence: Synthetic oligonucleotide
  Sense strand starting at position 187 of SEQ ID NO: 1882370
cggcuaaugcguuugcauu

SEQ ID NO: 2115777 - RNA, 19 nt, Artificial Sequence
  Description of Artificial Sequence: Synthetic oligonucleotide
  Antisense strand to SEQ ID NO: 2115776
aaugcaaacgcauuagccg

SEQ ID NO: 2115778 - RNA, 19 nt, Artificial Sequence
  Description of Artificial Sequence: Synthetic oligonucleotide
  Sense strand starting at position 397 of SEQ ID NO: 1882370
gggccuugucugggaagac

SEQ ID NO: 2115779 - RNA, 19 nt, Artificial Sequence
  Description of Artificial Sequence: Synthetic oligonucleotide
  Antisense strand to SEQ ID NO: 2115778
gucuucccagacaaggccc

SEQ ID NO: 2115780 - RNA, 19 nt, Artificial Sequence
  Description of Artificial Sequence: Synthetic oligonucleotide
  Sense strand starting at position 782 of SEQ ID NO: 1882370
gaucauguaaguuggauga

SEQ ID NO: 2115781 - RNA, 19 nt, Artificial Sequence
  Description of Artificial Sequence: Synthetic oligonucleotide
  Antisense strand to SEQ ID NO: 2115780
ucauccaacuuacaugauc

SEQ ID NO: 2115782 - RNA, 19 nt, Artificial Sequence
  Description of Artificial Sequence: Synthetic oligonucleotide
  Sense strand starting at position 807 of SEQ ID NO: 1882370
ugcugcuguauuugagaga

SEQ ID NO: 2115783 - RNA, 19 nt, Artificial Sequence
  Description of Artificial Sequence: Synthetic oligonucleotide
  Antisense strand to SEQ ID NO: 2115782
ucucucaaauacagcagca

SEQ ID NO: 2115784 - RNA, 19 nt, Artificial Sequence
  Description of Artificial Sequence: Synthetic oligonucleotide
  Sense strand starting at position 826 of SEQ ID NO: 1882370
uugugcugugcucuaugua

SEQ ID NO: 2115785 - RNA, 19 nt, Artificial Sequence
  Description of Artificial Sequence: Synthetic oligonucleotide
  Antisense strand to SEQ ID NO: 2115784
uacauagagcacagcacaa

SEQ ID NO: 2115786 - RNA, 19 nt, Artificial Sequence
  Description of Artificial Sequence: Synthetic oligonucleotide
  Sense strand starting at position 903 of SEQ ID NO: 1882370
uguuaauaggaauauagcu

SEQ ID NO: 2115787 - RNA, 19 nt, Artificial Sequence
  Description of Artificial Sequence: Synthetic oligonucleotide
  Antisense strand to SEQ ID NO: 2115786
agcuauauuccuauuaaca

SEQ ID NO: 2115788 - RNA, 19 nt, Artificial Sequence
  Description of Artificial Sequence: Synthetic oligonucleotide
  Sense strand starting at position 986 of SEQ ID NO: 1882370
ucuugaugcuaaguuaaca

SEQ ID NO: 2115789 - RNA, 19 nt, Artificial Sequence
  Description of Artificial Sequence: Synthetic oligonucleotide
  Antisense strand to SEQ ID NO: 2115788
uguuaacuuagcaucaaga

SEQ ID NO: 2115790 - RNA, 19 nt, Artificial Sequence
  Description of Artificial Sequence: Synthetic oligonucleotide
  Sense strand starting at position 1233 of SEQ ID NO: 1882370
auaauugaguucuuuggag

SEQ ID NO: 2115791 - RNA, 19 nt, Artificial Sequence
  Description of Artificial Sequence: Synthetic oligonucleotide
  Antisense strand to SEQ ID NO: 2115790
cuccaaagaacucaauuau

SEQ ID NO: 2115792 - RNA, 19 nt, Artificial Sequence
  Description of Artificial Sequence: Synthetic oligonucleotide
  Sense strand starting at position 1235 of SEQ ID NO: 1882370
aauugaguucuuuggagga

SEQ ID NO: 2115793 - RNA, 19 nt, Artificial Sequence
  Description of Artificial Sequence: Synthetic oligonucleotide
  Antisense strand to SEQ ID NO: 2115792
uccuccaaagaacucaauu

SEQ ID NO: 2115794 - RNA, 19 nt, Artificial Sequence
  Description of Artificial Sequence: Synthetic oligonucleotide
  Sense strand starting at position 1239 of SEQ ID NO: 1882370
gaguucuuuggaggaguuu

SEQ ID NO: 2115795 - RNA, 19 nt, Artificial Sequence
  Description of Artificial Sequence: Synthetic oligonucleotide
  Antisense strand to SEQ ID NO: 2115794
aaacuccuccaaagaacuc

SEQ ID NO: 2115796 - RNA, 19 nt, Artificial Sequence
  Description of Artificial Sequence: Synthetic oligonucleotide
  Sense strand starting at position 1396 of SEQ ID NO: 1882370
gccuaugaguucucauuug

SEQ ID NO: 2115797 - RNA, 19 nt, Artificial Sequence
  Description of Artificial Sequence: Synthetic oligonucleotide
  Antisense strand to SEQ ID NO: 2115796
caaaugagaacucauaggc

SEQ ID NO: 2115798 - RNA, 19 nt, Artificial Sequence
  Description of Artificial Sequence: Synthetic oligonucleotide
  Sense strand starting at position 1650 of SEQ ID NO: 1882370
guuugagcccuggaagagu

SEQ ID NO: 2115799 - RNA, 19 nt, Artificial Sequence
  Description of Artificial Sequence: Synthetic oligonucleotide
  Antisense strand to SEQ ID NO: 2115798
acucuuccagggcucaaac

SEQ ID NO: 2115800 - RNA, 19 nt, Artificial Sequence
  Description of Artificial Sequence: Synthetic oligonucleotide
  Sense strand starting at position 1785 of SEQ ID NO: 1882370
uuguauuucuugucucaau

SEQ ID NO: 2115801 - RNA, 19 nt, Artificial Sequence
  Description of Artificial Sequence: Synthetic oligonucleotide
  Antisense strand to SEQ ID NO: 2115800
auugagacaagaaauacaa

SEQ ID NO: 2115802 - RNA, 19 nt, Artificial Sequence
  Description of Artificial Sequence: Synthetic oligonucleotide
  Sense strand starting at position 1786 of SEQ ID NO: 1882370
uguauuucuugucucaauu

SEQ ID NO: 2115803 - RNA, 19 nt, Artificial Sequence
  Description of Artificial Sequence: Synthetic oligonucleotide
  Antisense strand to SEQ ID NO: 2115802
aauugagacaagaaauaca

SEQ ID NO: 2115804 - RNA, 19 nt, Artificial Sequence
  Description of Artificial Sequence: Synthetic oligonucleotide
  Sense strand starting at position 1904 of SEQ ID NO: 1882370
gccauuuguccugagccuu

SEQ ID NO: 2115805 - RNA, 19 nt, Artificial Sequence
  Description of Artificial Sequence: Synthetic oligonucleotide
  Antisense strand to SEQ ID NO: 2115804
aaggcucaggacaaauggc

SEQ ID NO: 2115806 - RNA, 19 nt, Artificial Sequence
  Description of Artificial Sequence: Synthetic oligonucleotide
  Sense strand starting at position 1948 of SEQ ID NO: 1882370
aucgaaacaucucuuagau

SEQ ID NO: 2115807 - RNA, 19 nt, Artificial Sequence
  Description of Artificial Sequence: Synthetic oligonucleotide
  Antisense strand to SEQ ID NO: 2115806
aucuaagagauguuucgau

SEQ ID NO: 2115808 - RNA, 19 nt, Artificial Sequence
  Description of Artificial Sequence: Synthetic oligonucleotide
  Sense strand starting at position 1965 of SEQ ID NO: 1882370
aucccagagugacuuaaga

SEQ ID NO: 2115809 - RNA, 19 nt, Artificial Sequence
  Description of Artificial Sequence: Synthetic oligonucleotide
  Antisense strand to SEQ ID NO: 2115808
ucuuaagucacucugggau

SEQ ID NO: 2115810 - RNA, 19 nt, Artificial Sequence
  Description of Artificial Sequence: Synthetic oligonucleotide
  Sense strand starting at position 1981 of SEQ ID NO: 1882370
agauccaugcuaggaauua

SEQ ID NO: 2115811 - RNA, 19 nt, Artificial Sequence
  Description of Artificial Sequence: Synthetic oligonucleotide
  Antisense strand to SEQ ID NO: 2115810
uaauuccuagcauggaucu

SEQ ID NO: 2115812 - RNA, 19 nt, Artificial Sequence
  Description of Artificial Sequence: Synthetic oligonucleotide
  Sense strand starting at position 2255 of SEQ ID NO: 1882370
uuacuuggucuugacgaga

SEQ ID NO: 2115813 - RNA, 19 nt, Artificial Sequence
  Description of Artificial Sequence: Synthetic oligonucleotide
  Antisense strand to SEQ ID NO: 2115812
ucucgucaagaccaaguaa

SEQ ID NO: 2115814 - RNA, 19 nt, Artificial Sequence
  Description of Artificial Sequence: Synthetic oligonucleotide
  Sense strand starting at position 2319 of SEQ ID NO: 1882370
auugaaguucugggaggau

SEQ ID NO: 2115815 - RNA, 19 nt, Artificial Sequence
  Description of Artificial Sequence: Synthetic oligonucleotide
  Antisense strand to SEQ ID NO: 2115814
auccucccagaacuucaau

SEQ ID NO: 2115816 - RNA, 19 nt, Artificial Sequence
  Description of Artificial Sequence: Synthetic oligonucleotide
  Sense strand starting at position 2334 of SEQ ID NO: 1882370
ggaugaguaacuuguagaa

SEQ ID NO: 2115817 - RNA, 19 nt, Artificial Sequence
  Description of Artificial Sequence: Synthetic oligonucleotide
  Antisense strand to SEQ ID NO: 2115816
uucuacaaguuacucaucc

SEQ ID NO: 2115818 - RNA, 19 nt, Artificial Sequence
  Description of Artificial Sequence: Synthetic oligonucleotide
  Sense strand starting at position 2394 of SEQ ID NO: 1882370
acucucagcugauuauaga

SEQ ID NO: 2115819 - RNA, 19 nt, Artificial Sequence
  Description of Artificial Sequence: Synthetic oligonucleotide
  Antisense strand to SEQ ID NO: 2115818
ucuauaaucagcugagagu

SEQ ID NO: 2115820 - RNA, 19 nt, Artificial Sequence
  Description of Artificial Sequence: Synthetic oligonucleotide
  Sense strand starting at position 2666 of SEQ ID NO: 1882370
uacagacugcugugaacau

SEQ ID NO: 2115821 - RNA, 19 nt, Artificial Sequence
  Description of Artificial Sequence: Synthetic oligonucleotide
  Antisense strand to SEQ ID NO: 2115820
auguucacagcagucugua

SEQ ID NO: 2115822 - RNA, 19 nt, Artificial Sequence
  Description of Artificial Sequence: Synthetic oligonucleotide
  Sense strand starting at position 2699 of SEQ ID NO: 1882370
agccucacucaugauuaga

SEQ ID NO: 2115823 - RNA, 19 nt, Artificial Sequence
  Description of Artificial Sequence: Synthetic oligonucleotide
  Antisense strand to SEQ ID NO: 2115822
ucuaaucaugagugaggcu

SEQ ID NO: 2115824 - RNA, 19 nt, Artificial Sequence
  Description of Artificial Sequence: Synthetic oligonucleotide
  Sense strand starting at position 2847 of SEQ ID NO: 1882370
caugcaaaucgguacaacu

SEQ ID NO: 2115825 - RNA, 19 nt, Artificial Sequence
  Description of Artificial Sequence: Synthetic oligonucleotide
  Antisense strand to SEQ ID NO: 2115824
aguuguaccgauuugcaug

SEQ ID NO: 2115826 - RNA, 19 nt, Artificial Sequence
  Description of Artificial Sequence: Synthetic oligonucleotide
  Sense strand starting at position 2855 of SEQ ID NO: 1882370
ucgguacaacucuauauua

SEQ ID NO: 2115827 - RNA, 19 nt, Artificial Sequence
  Description of Artificial Sequence: Synthetic oligonucleotide
  Antisense strand to SEQ ID NO: 2115826
uaauauagaguuguaccga

SEQ ID NO: 2115828 - RNA, 19 nt, Artificial Sequence
  Description of Artificial Sequence: Synthetic oligonucleotide
  Sense strand starting at position 2965 of SEQ ID NO: 1882370
auugcaaugccagaaacuu

SEQ ID NO: 2115829 - RNA, 19 nt, Artificial Sequence
  Description of Artificial Sequence: Synthetic oligonucleotide
  Antisense strand to SEQ ID NO: 2115828
aaguuucuggcauugcaau

SEQ ID NO: 2115830 - RNA, 19 nt, Artificial Sequence
  Description of Artificial Sequence: Synthetic oligonucleotide
  Sense strand starting at position 3035 of SEQ ID NO: 1882370
acuaguagccauuauuauu

SEQ ID NO: 2115831 - RNA, 19 nt, Artificial Sequence
  Description of Artificial Sequence: Synthetic oligonucleotide
  Antisense strand to SEQ ID NO: 2115830
aauaauaauggcuacuagu

SEQ ID NO: 2115832 - RNA, 19 nt, Artificial Sequence
  Description of Artificial Sequence: Synthetic oligonucleotide
  Sense strand starting at position 3189 of SEQ ID NO: 1882370
auguguagccaguagagau

SEQ ID NO: 2115833 - RNA, 19 nt, Artificial Sequence
  Description of Artificial Sequence: Synthetic oligonucleotide
  Antisense strand to SEQ ID NO: 2115832
aucucuacuggcuacacau

SEQ ID NO: 2115834 - RNA, 19 nt, Artificial Sequence
  Description of Artificial Sequence: Synthetic oligonucleotide
  Sense strand starting at position 3242 of SEQ ID NO: 1882370
ucaaguagccauuauaaag

SEQ ID NO: 2115835 - RNA, 19 nt, Artificial Sequence
  Description of Artificial Sequence: Synthetic oligonucleotide
  Antisense strand to SEQ ID NO: 2115834
cuuuauaauggcuacuuga

SEQ ID NO: 2115836 - RNA, 19 nt, Artificial Sequence
  Description of Artificial Sequence: Synthetic oligonucleotide
  Sense strand starting at position 3363 of SEQ ID NO: 1882370
aaccuuugugcauaggaaa

SEQ ID NO: 2115837 - RNA, 19 nt, Artificial Sequence
  Description of Artificial Sequence: Synthetic oligonucleotide
  Antisense strand to SEQ ID NO: 2115836
uuuccuaugcacaaagguu

SEQ ID NO: 2115838 - RNA, 19 nt, Artificial Sequence
  Description of Artificial Sequence: Synthetic oligonucleotide
  Sense strand starting at position 3643 of SEQ ID NO: 1882370
gugacuuaauaagcaguaa

SEQ ID NO: 2115839 - RNA, 19 nt, Artificial Sequence
  Description of Artificial Sequence: Synthetic oligonucleotide
  Antisense strand to SEQ ID NO: 2115838
uuacugcuuauuaagucac

SEQ ID NO: 2115840 - RNA, 19 nt, Artificial Sequence
  Description of Artificial Sequence: Synthetic oligonucleotide
  Sense strand starting at position 3838 of SEQ ID NO: 1882370
gugacacauugauugucaa

SEQ ID NO: 2115841 - RNA, 19 nt, Artificial Sequence
  Description of Artificial Sequence: Synthetic oligonucleotide
  Antisense strand to SEQ ID NO: 2115840
uugacaaucaaugugucac

SEQ ID NO: 2115842 - RNA, 19 nt, Artificial Sequence
  Description of Artificial Sequence: Synthetic oligonucleotide
  Sense strand starting at position 3839 of SEQ ID NO: 1882370
ugacacauugauugucaaa

SEQ ID NO: 2115843 - RNA, 19 nt, Artificial Sequence
  Description of Artificial Sequence: Synthetic oligonucleotide
  Antisense strand to SEQ ID NO: 2115842
uuugacaaucaauguguca

SEQ ID NO: 2115844 - RNA, 19 nt, Artificial Sequence
  Description of Artificial Sequence: Synthetic oligonucleotide
  Sense strand starting at position 3929 of SEQ ID NO: 1882370
uugcaagauuaugucuaag

SEQ ID NO: 2115845 - RNA, 19 nt, Artificial Sequence
  Description of Artificial Sequence: Synthetic oligonucleotide
  Antisense strand to SEQ ID NO: 2115844
cuuagacauaaucuugcaa

SEQ ID NO: 2115846 - RNA, 19 nt, Artificial Sequence
  Description of Artificial Sequence: Synthetic oligonucleotide
  Sense strand starting at position 3935 of SEQ ID NO: 1882370
gauuaugucuaagcaaaga

SEQ ID NO: 2115847 - RNA, 19 nt, Artificial Sequence
  Description of Artificial Sequence: Synthetic oligonucleotide
  Antisense strand to SEQ ID NO: 2115846
ucuuugcuuagacauaauc

SEQ ID NO: 2115848 - RNA, 19 nt, Artificial Sequence
  Description of Artificial Sequence: Synthetic oligonucleotide
  Sense strand starting at position 3966 of SEQ ID NO: 1882370
ggccgaacugaugauugau

SEQ ID NO: 2115849 - RNA, 19 nt, Artificial Sequence
  Description of Artificial Sequence: Synthetic oligonucleotide
  Antisense strand to SEQ ID NO: 2115848
aucaaucaucaguucggcc

SEQ ID NO: 2115850 - RNA, 19 nt, Artificial Sequence
  Description of Artificial Sequence: Synthetic oligonucleotide
  Sense strand starting at position 3968 of SEQ ID NO: 1882370
ccgaacugaugauugauua

SEQ ID NO: 2115851 - RNA, 19 nt, Artificial Sequence
  Description of Artificial Sequence: Synthetic oligonucleotide
  Antisense strand to SEQ ID NO: 2115850
uaaucaaucaucaguucgg

SEQ ID NO: 2115852 - RNA, 19 nt, Artificial Sequence
  Description of Artificial Sequence: Synthetic oligonucleotide
  Sense strand starting at position 274 of SEQ ID NO: 1882371
gcagcauuugaagggcuua

SEQ ID NO: 2115853 - RNA, 19 nt, Artificial Sequence
  Description of Artificial Sequence: Synthetic oligonucleotide
  Antisense strand to SEQ ID NO: 2115852
uaagcccuucaaaugcugc

SEQ ID NO: 2115854 - RNA, 19 nt, Artificial Sequence
  Description of Artificial Sequence: Synthetic oligonucleotide
  Sense strand starting at position 310 of SEQ ID NO: 1882371
augaaagguucugugugau

SEQ ID NO: 2115855 - RNA, 19 nt, Artificial Sequence
  Description of Artificial Sequence: Synthetic oligonucleotide
  Antisense strand to SEQ ID NO: 2115854
aucacacagaaccuuucau

SEQ ID NO: 2115856 - RNA, 19 nt, Artificial Sequence
  Description of Artificial Sequence: Synthetic oligonucleotide
  Sense strand starting at position 313 of SEQ ID NO: 1882371
aaagguucugugugauuaa

SEQ ID NO: 2115857 - RNA, 19 nt, Artificial Sequence
  Description of Artificial Sequence: Synthetic oligonucleotide
  Antisense strand to SEQ ID NO: 2115856
uuaaucacacagaaccuuu

SEQ ID NO: 2115858 - RNA, 19 nt, Artificial Sequence
  Description of Artificial Sequence: Synthetic oligonucleotide
  Sense strand starting at position 340 of SEQ ID NO: 1882371
gcuggagaauauguugaau

SEQ ID NO: 2115859 - RNA, 19 nt, Artificial Sequence
  Description of Artificial Sequence: Synthetic oligonucleotide
  Antisense strand to SEQ ID NO: 2115858
auucaacauauucuccagc

SEQ ID NO: 2115860 - RNA, 19 nt, Artificial Sequence
  Description of Artificial Sequence: Synthetic oligonucleotide
  Sense strand starting at position 686 of SEQ ID NO: 1882371
gucauuagcaggcaggauu

SEQ ID NO: 2115861 - RNA, 19 nt, Artificial Sequence
  Description of Artificial Sequence: Synthetic oligonucleotide
  Antisense strand to SEQ ID NO: 2115860
aauccugccugcuaaugac

SEQ ID NO: 2115862 - RNA, 19 nt, Artificial Sequence
  Description of Artificial Sequence: Synthetic oligonucleotide
  Sense strand starting at position 939 of SEQ ID NO: 1882371
gcccgugauccucuacugu

SEQ ID NO: 2115863 - RNA, 19 nt, Artificial Sequence
  Description of Artificial Sequence: Synthetic oligonucleotide
  Antisense strand to SEQ ID NO: 2115862
acaguagaggaucacgggc

SEQ ID NO: 2115864 - RNA, 19 nt, Artificial Sequence
  Description of Artificial Sequence: Synthetic oligonucleotide
  Sense strand starting at position 1399 of SEQ ID NO: 1882371
ccugaaauuguuuguugag

SEQ ID NO: 2115865 - RNA, 19 nt, Artificial Sequence
  Description of Artificial Sequence: Synthetic oligonucleotide
  Antisense strand to SEQ ID NO: 2115864
cucaacaaacaauuucagg

SEQ ID NO: 2115866 - RNA, 19 nt, Artificial Sequence
  Description of Artificial Sequence: Synthetic oligonucleotide
  Sense strand starting at position 1416 of SEQ ID NO: 1882371
agcagacuguuaucauaau

SEQ ID NO: 2115867 - RNA, 19 nt, Artificial Sequence
  Description of Artificial Sequence: Synthetic oligonucleotide
  Antisense strand to SEQ ID NO: 2115866
auuaugauaacagucugcu

SEQ ID NO: 2115868 - RNA, 19 nt, Artificial Sequence
  Description of Artificial Sequence: Synthetic oligonucleotide
  Sense strand starting at position 1489 of SEQ ID NO: 1882371
uuaaacuuucuaggucuga

SEQ ID NO: 2115869 - RNA, 19 nt, Artificial Sequence
  Description of Artificial Sequence: Synthetic oligonucleotide
  Antisense strand to SEQ ID NO: 2115868
ucagaccuagaaaguuuaa

SEQ ID NO: 2115870 - RNA, 19 nt, Artificial Sequence
  Description of Artificial Sequence: Synthetic oligonucleotide
  Sense strand starting at position 1564 of SEQ ID NO: 1882371
guucuuggacuccaugaau

SEQ ID NO: 2115871 - RNA, 19 nt, Artificial Sequence
  Description of Artificial Sequence: Synthetic oligonucleotide
  Antisense strand to SEQ ID NO: 2115870
auucauggaguccaagaac

SEQ ID NO: 2115872 - RNA, 19 nt, Artificial Sequence
  Description of Artificial Sequence: Synthetic oligonucleotide
  Sense strand starting at position 1612 of SEQ ID NO: 1882371
auuccuggauaguugaauu

SEQ ID NO: 2115873 - RNA, 19 nt, Artificial Sequence
  Description of Artificial Sequence: Synthetic oligonucleotide
  Antisense strand to SEQ ID NO: 2115872
aauucaacuauccaggaau

SEQ ID NO: 2115874 - RNA, 19 nt, Artificial Sequence
  Description of Artificial Sequence: Synthetic oligonucleotide
  Sense strand starting at position 1721 of SEQ ID NO: 1882371
gucaaccaaggcuauaaau

SEQ ID NO: 2115875 - RNA, 19 nt, Artificial Sequence
  Description of Artificial Sequence: Synthetic oligonucleotide
  Antisense strand to SEQ ID NO: 2115874
auuuauagccuugguugac

SEQ ID NO: 2115876 - RNA, 19 nt, Artificial Sequence
  Description of Artificial Sequence: Synthetic oligonucleotide
  Sense strand starting at position 1755 of SEQ ID NO: 1882371
gcaauagaagagcauugua

SEQ ID NO: 2115877 - RNA, 19 nt, Artificial Sequence
  Description of Artificial Sequence: Synthetic oligonucleotide
  Antisense strand to SEQ ID NO: 2115876
uacaaugcucuucuauugc

SEQ ID NO: 2115878 - RNA, 19 nt, Artificial Sequence
  Description of Artificial Sequence: Synthetic oligonucleotide
  Sense strand starting at position 1758 of SEQ ID NO: 1882371
auagaagagcauuguaaua

SEQ ID NO: 2115879 - RNA, 19 nt, Artificial Sequence
  Description of Artificial Sequence: Synthetic oligonucleotide
  Antisense strand to SEQ ID NO: 2115878
uauuacaaugcucuucuau

SEQ ID NO: 2115880 - RNA, 19 nt, Artificial Sequence
  Description of Artificial Sequence: Synthetic oligonucleotide
  Sense strand starting at position 1830 of SEQ ID NO: 1882371
agauccgucguacaaauua

SEQ ID NO: 2115881 - RNA, 19 nt, Artificial Sequence
  Description of Artificial Sequence: Synthetic oligonucleotide
  Antisense strand to SEQ ID NO: 2115880
uaauuuguacgacggaucu

SEQ ID NO: 2115882 - RNA, 19 nt, Artificial Sequence
  Description of Artificial Sequence: Synthetic oligonucleotide
  Sense strand starting at position 1910 of SEQ ID NO: 1882371
caugauugagggcggagau

SEQ ID NO: 2115883 - RNA, 19 nt, Artificial Sequence
  Description of Artificial Sequence: Synthetic oligonucleotide
  Antisense strand to SEQ ID NO: 2115882
aucuccgcccucaaucaug

SEQ ID NO: 2115884 - RNA, 19 nt, Artificial Sequence
  Description of Artificial Sequence: Synthetic oligonucleotide
  Sense strand starting at position 2132 of SEQ ID NO: 1882371
guguaaucauuugcagcaa

SEQ ID NO: 2115885 - RNA, 19 nt, Artificial Sequence
  Description of Artificial Sequence: Synthetic oligonucleotide
  Antisense strand to SEQ ID NO: 2115884
uugcugcaaaugauuacac

SEQ ID NO: 2115886 - RNA, 19 nt, Artificial Sequence
  Description of Artificial Sequence: Synthetic oligonucleotide
  Sense strand starting at position 2471 of SEQ ID NO: 1882371
ggaucuuguuucccacaua

SEQ ID NO: 2115887 - RNA, 19 nt, Artificial Sequence
  Description of Artificial Sequence: Synthetic oligonucleotide
  Antisense strand to SEQ ID NO: 2115886
uaugugggaaacaagaucc

SEQ ID NO: 2115888 - RNA, 19 nt, Artificial Sequence
  Description of Artificial Sequence: Synthetic oligonucleotide
  Sense strand starting at position 2474 of SEQ ID NO: 1882371
ucuuguuucccacauagag

SEQ ID NO: 2115889 - RNA, 19 nt, Artificial Sequence
  Description of Artificial Sequence: Synthetic oligonucleotide
  Antisense strand to SEQ ID NO: 2115888
cucuaugugggaaacaaga

SEQ ID NO: 2115890 - RNA, 19 nt, Artificial Sequence
  Description of Artificial Sequence: Synthetic oligonucleotide
  Sense strand starting at position 2529 of SEQ ID NO: 1882371
ccucauacacguggauaau

SEQ ID NO: 2115891 - RNA, 19 nt, Artificial Sequence
  Description of Artificial Sequence: Synthetic oligonucleotide
  Antisense strand to SEQ ID NO: 2115890
auuauccacguguaugagg

SEQ ID NO: 2115892 - RNA, 19 nt, Artificial Sequence
  Description of Artificial Sequence: Synthetic oligonucleotide
  Sense strand starting at position 2530 of SEQ ID NO: 1882371
cucauacacguggauaaua

SEQ ID NO: 2115893 - RNA, 19 nt, Artificial Sequence
  Description of Artificial Sequence: Synthetic oligonucleotide
  Antisense strand to SEQ ID NO: 2115892
uauuauccacguguaugag

SEQ ID NO: 2115894 - RNA, 19 nt, Artificial Sequence
  Description of Artificial Sequence: Synthetic oligonucleotide
  Sense strand starting at position 2532 of SEQ ID NO: 1882371
cauacacguggauaauauu

SEQ ID NO: 2115895 - RNA, 19 nt, Artificial Sequence
  Description of Artificial Sequence: Synthetic oligonucleotide
  Antisense strand to SEQ ID NO: 2115894
aauauuauccacguguaug

SEQ ID NO: 2115896 - RNA, 19 nt, Artificial Sequence
  Description of Artificial Sequence: Synthetic oligonucleotide
  Sense strand starting at position 2578 of SEQ ID NO: 1882371
gcuaaauaaggacauguuu

SEQ ID NO: 2115897 - RNA, 19 nt, Artificial Sequence
  Description of Artificial Sequence: Synthetic oligonucleotide
  Antisense strand to SEQ ID NO: 2115896
aaacauguccuuauuuagc

SEQ ID NO: 2115898 - RNA, 19 nt, Artificial Sequence
  Description of Artificial Sequence: Synthetic oligonucleotide
  Sense strand starting at position 2637 of SEQ ID NO: 1882371
cuaagaauggcagggagua

SEQ ID NO: 2115899 - RNA, 19 nt, Artificial Sequence
  Description of Artificial Sequence: Synthetic oligonucleotide
  Antisense strand to SEQ ID NO: 2115898
uacucccugccauucuuag

SEQ ID NO: 2115900 - RNA, 19 nt, Artificial Sequence
  Description of Artificial Sequence: Synthetic oligonucleotide
  Sense strand starting at position 2805 of SEQ ID NO: 1882371
gccauccaugacuguacaa

SEQ ID NO: 2115901 - RNA, 19 nt, Artificial Sequence
  Description of Artificial Sequence: Synthetic oligonucleotide
  Antisense strand to SEQ ID NO: 2115900
uuguacagucauggauggc

SEQ ID NO: 2115902 - RNA, 19 nt, Artificial Sequence
  Description of Artificial Sequence: Synthetic oligonucleotide
  Sense strand starting at position 2829 of SEQ ID NO: 1882371
gccauucuacccugaagau

SEQ ID NO: 2115903 - RNA, 19 nt, Artificial Sequence
  Description of Artificial Sequence: Synthetic oligonucleotide
  Antisense strand to SEQ ID NO: 2115902
aucuucaggguagaauggc

SEQ ID NO: 2115904 - RNA, 19 nt, Artificial Sequence
  Description of Artificial Sequence: Synthetic oligonucleotide
  Sense strand starting at position 3049 of SEQ ID NO: 1882371
acaugauuccucugagagc

SEQ ID NO: 2115905 - RNA, 19 nt, Artificial Sequence
  Description of Artificial Sequence: Synthetic oligonucleotide
  Antisense strand to SEQ ID NO: 2115904
gcucucagaggaaucaugu

SEQ ID NO: 2115906 - RNA, 19 nt, Artificial Sequence
  Description of Artificial Sequence: Synthetic oligonucleotide
  Sense strand starting at position 3060 of SEQ ID NO: 1882371
cugagagcagucuaauaau

SEQ ID NO: 2115907 - RNA, 19 nt, Artificial Sequence
  Description of Artificial Sequence: Synthetic oligonucleotide
  Antisense strand to SEQ ID NO: 2115906
auuauuagacugcucucag

SEQ ID NO: 2115908 - RNA, 19 nt, Artificial Sequence
  Description of Artificial Sequence: Synthetic oligonucleotide
  Sense strand starting at position 3088 of SEQ ID NO: 1882371
ggaccugcauuacuucuaa

SEQ ID NO: 2115909 - RNA, 19 nt, Artificial Sequence
  Description of Artificial Sequence: Synthetic oligonucleotide
  Antisense strand to SEQ ID NO: 2115908
uuagaaguaaugcaggucc

SEQ ID NO: 2115910 - RNA, 19 nt, Artificial Sequence
  Description of Artificial Sequence: Synthetic oligonucleotide
  Sense strand starting at position 3320 of SEQ ID NO: 1882371
aguauacugggaugucuuu

SEQ ID NO: 2115911 - RNA, 19 nt, Artificial Sequence
  Description of Artificial Sequence: Synthetic oligonucleotide
  Antisense strand to SEQ ID NO: 2115910
aaagacaucccaguauacu

SEQ ID NO: 2115912 - RNA, 19 nt, Artificial Sequence
  Description of Artificial Sequence: Synthetic oligonucleotide
  Sense strand starting at position 3517 of SEQ ID NO: 1882371
gcacuuuggccuuagaaug

SEQ ID NO: 2115913 - RNA, 19 nt, Artificial Sequence
  Description of Artificial Sequence: Synthetic oligonucleotide
  Antisense strand to SEQ ID NO: 2115912
cauucuaaggccaaagugc

SEQ ID NO: 2115914 - RNA, 19 nt, Artificial Sequence
  Description of Artificial Sequence: Synthetic oligonucleotide
  Sense strand starting at position 3635 of SEQ ID NO: 1882371
ggagucaaaucauucugca

SEQ ID NO: 2115915 - RNA, 19 nt, Artificial Sequence
  Description of Artificial Sequence: Synthetic oligonucleotide
  Antisense strand to SEQ ID NO: 2115914
ugcagaaugauuugacucc

SEQ ID NO: 2115916 - RNA, 19 nt, Artificial Sequence
  Description of Artificial Sequence: Synthetic oligonucleotide
  Sense strand starting at position 3762 of SEQ ID NO: 1882371
acaucugagucuuuggaau

SEQ ID NO: 2115917 - RNA, 19 nt, Artificial Sequence
  Description of Artificial Sequence: Synthetic oligonucleotide
  Antisense strand to SEQ ID NO: 2115916
auuccaaagacucagaugu

SEQ ID NO: 2115918 - RNA, 19 nt, Artificial Sequence
  Description of Artificial Sequence: Synthetic oligonucleotide
  Sense strand starting at position 3774 of SEQ ID NO: 1882371
uuggaaucauucucuguau

SEQ ID NO: 2115919 - RNA, 19 nt, Artificial Sequence
  Description of Artificial Sequence: Synthetic oligonucleotide
  Antisense strand to SEQ ID NO: 2115918
auacagagaaugauuccaa

SEQ ID NO: 2115920 - RNA, 19 nt, Artificial Sequence
  Description of Artificial Sequence: Synthetic oligonucleotide
  Sense strand starting at position 3775 of SEQ ID NO: 1882371
uggaaucauucucuguauc

SEQ ID NO: 2115921 - RNA, 19 nt, Artificial Sequence
  Description of Artificial Sequence: Synthetic oligonucleotide
  Antisense strand to SEQ ID NO: 2115920
gauacagagaaugauucca

SEQ ID NO: 2115922 - RNA, 19 nt, Artificial Sequence
  Description of Artificial Sequence: Synthetic oligonucleotide
  Sense strand starting at position 3776 of SEQ ID NO: 1882371
ggaaucauucucuguaucu

SEQ ID NO: 2115923 - RNA, 19 nt, Artificial Sequence
  Description of Artificial Sequence: Synthetic oligonucleotide
  Antisense strand to SEQ ID NO: 2115922
agauacagagaaugauucc

SEQ ID NO: 2115924 - RNA, 19 nt, Artificial Sequence
  Description of Artificial Sequence: Synthetic oligonucleotide
  Sense strand starting at position 3787 of SEQ ID NO: 1882371
cuguaucucuaaguaacau

SEQ ID NO: 2115925 - RNA, 19 nt, Artificial Sequence
  Description of Artificial Sequence: Synthetic oligonucleotide
  Antisense strand to SEQ ID NO: 2115924
auguuacuuagagauacag

SEQ ID NO: 2115926 - RNA, 19 nt, Artificial Sequence
  Description of Artificial Sequence: Synthetic oligonucleotide
  Sense strand starting at position 3809 of SEQ ID NO: 1882371
cguauugcugcuccuugau

SEQ ID NO: 2115927 - RNA, 19 nt, Artificial Sequence
  Description of Artificial Sequence: Synthetic oligonucleotide
  Antisense strand to SEQ ID NO: 2115926
aucaaggagcagcaauacg

SEQ ID NO: 2115928 - RNA, 19 nt, Artificial Sequence
  Description of Artificial Sequence: Synthetic oligonucleotide
  Sense strand starting at position 3822 of SEQ ID NO: 1882371
cuugauuucuuuccgcuuu

SEQ ID NO: 2115929 - RNA, 19 nt, Artificial Sequence
  Description of Artificial Sequence: Synthetic oligonucleotide
  Antisense strand to SEQ ID NO: 2115928
aaagcggaaagaaaucaag

SEQ ID NO: 2115930 - RNA, 19 nt, Artificial Sequence
  Description of Artificial Sequence: Synthetic oligonucleotide
  Sense strand starting at position 3824 of SEQ ID NO: 1882371
ugauuucuuuccgcuuuaa

SEQ ID NO: 2115931 - RNA, 19 nt, Artificial Sequence
  Description of Artificial Sequence: Synthetic oligonucleotide
  Antisense strand to SEQ ID NO: 2115930
uuaaagcggaaagaaauca

SEQ ID NO: 2115932 - RNA, 19 nt, Artificial Sequence
  Description of Artificial Sequence: Synthetic oligonucleotide
  Sense strand starting at position 33 of SEQ ID NO: 1882372
gcucauuguagggaagauu

SEQ ID NO: 2115933 - RNA, 19 nt, Artificial Sequence
  Description of Artificial Sequence: Synthetic oligonucleotide
  Antisense strand to SEQ ID NO: 2115932
aaucuucccuacaaugagc

SEQ ID NO: 2115934 - RNA, 19 nt, Artificial Sequence
  Description of Artificial Sequence: Synthetic oligonucleotide
  Sense strand starting at position 75 of SEQ ID NO: 1882372
ugaucccugccagaauaca

SEQ ID NO: 2115935 - RNA, 19 nt, Artificial Sequence
  Description of Artificial Sequence: Synthetic oligonucleotide
  Antisense strand to SEQ ID NO: 2115934
uguauucuggcagggauca

SEQ ID NO: 2115936 - RNA, 19 nt, Artificial Sequence
  Description of Artificial Sequence: Synthetic oligonucleotide
  Sense strand starting at position 121 of SEQ ID NO: 1882372
uugucagggaaagguaaua

SEQ ID NO: 2115937 - RNA, 19 nt, Artificial Sequence
  Description of Artificial Sequence: Synthetic oligonucleotide
  Antisense strand to SEQ ID NO: 2115936
uauuaccuuucccugacaa

SEQ ID NO: 2115938 - RNA, 19 nt, Artificial Sequence
  Description of Artificial Sequence: Synthetic oligonucleotide
  Sense strand starting at position 473 of SEQ ID NO: 1882372
agacaauagugcuugagga

SEQ ID NO: 2115939 - RNA, 19 nt, Artificial Sequence
  Description of Artificial Sequence: Synthetic oligonucleotide
  Antisense strand to SEQ ID NO: 2115938
uccucaagcacuauugucu

SEQ ID NO: 2115940 - RNA, 19 nt, Artificial Sequence
  Description of Artificial Sequence: Synthetic oligonucleotide
  Sense strand starting at position 474 of SEQ ID NO: 1882372
gacaauagugcuugaggaa

SEQ ID NO: 2115941 - RNA, 19 nt, Artificial Sequence
  Description of Artificial Sequence: Synthetic oligonucleotide
  Antisense strand to SEQ ID NO: 2115940
uuccucaagcacuauuguc

SEQ ID NO: 2115942 - RNA, 19 nt, Artificial Sequence
  Description of Artificial Sequence: Synthetic oligonucleotide
  Sense strand starting at position 536 of SEQ ID NO: 1882372
ugaauaaaguaagucucau

SEQ ID NO: 2115943 - RNA, 19 nt, Artificial Sequence
  Description of Artificial Sequence: Synthetic oligonucleotide
  Antisense strand to SEQ ID NO: 2115942
augagacuuacuuuauuca

SEQ ID NO: 2115944 - RNA, 19 nt, Artificial Sequence
  Description of Artificial Sequence: Synthetic oligonucleotide
  Sense strand starting at position 646 of SEQ ID NO: 1882372
aguguaugacuguaaucac

SEQ ID NO: 2115945 - RNA, 19 nt, Artificial Sequence
  Description of Artificial Sequence: Synthetic oligonucleotide
  Antisense strand to SEQ ID NO: 2115944
gugauuacagucauacacu

SEQ ID NO: 2115946 - RNA, 19 nt, Artificial Sequence
  Description of Artificial Sequence: Synthetic oligonucleotide
  Sense strand starting at position 649 of SEQ ID NO: 1882372
guaugacuguaaucacaag

SEQ ID NO: 2115947 - RNA, 19 nt, Artificial Sequence
  Description of Artificial Sequence: Synthetic oligonucleotide
  Antisense strand to SEQ ID NO: 2115946
cuugugauuacagucauac

SEQ ID NO: 2115948 - RNA, 19 nt, Artificial Sequence
  Description of Artificial Sequence: Synthetic oligonucleotide
  Sense strand starting at position 663 of SEQ ID NO: 1882372
acaagcagaguguauaaua

SEQ ID NO: 2115949 - RNA, 19 nt, Artificial Sequence
  Description of Artificial Sequence: Synthetic oligonucleotide
  Antisense strand to SEQ ID NO: 2115948
uauuauacacucugcuugu

SEQ ID NO: 2115950 - RNA, 19 nt, Artificial Sequence
  Description of Artificial Sequence: Synthetic oligonucleotide
  Sense strand starting at position 670 of SEQ ID NO: 1882372
gaguguauaauaggagcau

SEQ ID NO: 2115951 - RNA, 19 nt, Artificial Sequence
  Description of Artificial Sequence: Synthetic oligonucleotide
  Antisense strand to SEQ ID NO: 2115950
augcuccuauuauacacuc

SEQ ID NO: 2115952 - RNA, 19 nt, Artificial Sequence
  Description of Artificial Sequence: Synthetic oligonucleotide
  Sense strand starting at position 838 of SEQ ID NO: 1882372
aucuacuuucuuugugaag

SEQ ID NO: 2115953 - RNA, 19 nt, Artificial Sequence
  Description of Artificial Sequence: Synthetic oligonucleotide
  Antisense strand to SEQ ID NO: 2115952
cuucacaaagaaaguagau

SEQ ID NO: 2115954 - RNA, 19 nt, Artificial Sequence
  Description of Artificial Sequence: Synthetic oligonucleotide
  Sense strand starting at position 852 of SEQ ID NO: 1882372
ugaaguucgguguaagauu

SEQ ID NO: 2115955 - RNA, 19 nt, Artificial Sequence
  Description of Artificial Sequence: Synthetic oligonucleotide
  Antisense strand to SEQ ID NO: 2115954
aaucuuacaccgaacuuca

SEQ ID NO: 2115956 - RNA, 19 nt, Artificial Sequence
  Description of Artificial Sequence: Synthetic oligonucleotide
  Sense strand starting at position 859 of SEQ ID NO: 1882372
cgguguaagauugacuaau

SEQ ID NO: 2115957 - RNA, 19 nt, Artificial Sequence
  Description of Artificial Sequence: Synthetic oligonucleotide
  Antisense strand to SEQ ID NO: 2115956
auuagucaaucuuacaccg

SEQ ID NO: 2115958 - RNA, 19 nt, Artificial Sequence
  Description of Artificial Sequence: Synthetic oligonucleotide
  Sense strand starting at position 861 of SEQ ID NO: 1882372
guguaagauugacuaauug

SEQ ID NO: 2115959 - RNA, 19 nt, Artificial Sequence
  Description of Artificial Sequence: Synthetic oligonucleotide
  Antisense strand to SEQ ID NO: 2115958
caauuagucaaucuuacac

SEQ ID NO: 2115960 - RNA, 19 nt, Artificial Sequence
  Description of Artificial Sequence: Synthetic oligonucleotide
  Sense strand starting at position 932 of SEQ ID NO: 1882372
cuuggauacugaguucuga

SEQ ID NO: 2115961 - RNA, 19 nt, Artificial Sequence
  Description of Artificial Sequence: Synthetic oligonucleotide
  Antisense strand to SEQ ID NO: 2115960
ucagaacucaguauccaag

SEQ ID NO: 2115962 - RNA, 19 nt, Artificial Sequence
  Description of Artificial Sequence: Synthetic oligonucleotide
  Sense strand starting at position 977 of SEQ ID NO: 1882372
uuagcuugagcuuagaaau

SEQ ID NO: 2115963 - RNA, 19 nt, Artificial Sequence
  Description of Artificial Sequence: Synthetic oligonucleotide
  Antisense strand to SEQ ID NO: 2115962
auuucuaagcucaagcuaa

SEQ ID NO: 2115964 - RNA, 19 nt, Artificial Sequence
  Description of Artificial Sequence: Synthetic oligonucleotide
  Sense strand starting at position 1047 of SEQ ID NO: 1882372
agaggugaugcuuagcaaa

SEQ ID NO: 2115965 - RNA, 19 nt, Artificial Sequence
  Description of Artificial Sequence: Synthetic oligonucleotide
  Antisense strand to SEQ ID NO: 2115964
uuugcuaagcaucaccucu

SEQ ID NO: 2115966 - RNA, 19 nt, Artificial Sequence
  Description of Artificial Sequence: Synthetic oligonucleotide
  Sense strand starting at position 1146 of SEQ ID NO: 1882372
gcugaaaguagugauacuu

SEQ ID NO: 2115967 - RNA, 19 nt, Artificial Sequence
  Description of Artificial Sequence: Synthetic oligonucleotide
  Antisense strand to SEQ ID NO: 2115966
aaguaucacuacuuucagc

SEQ ID NO: 2115968 - RNA, 19 nt, Artificial Sequence
  Description of Artificial Sequence: Synthetic oligonucleotide
  Sense strand starting at position 1152 of SEQ ID NO: 1882372
aguagugauacuugaaagu

SEQ ID NO: 2115969 - RNA, 19 nt, Artificial Sequence
  Description of Artificial Sequence: Synthetic oligonucleotide
  Antisense strand to SEQ ID NO: 2115968
acuuucaaguaucacuacu

SEQ ID NO: 2115970 - RNA, 19 nt, Artificial Sequence
  Description of Artificial Sequence: Synthetic oligonucleotide
  Sense strand starting at position 1239 of SEQ ID NO: 1882372
ggaaaucaauugguuuauu

SEQ ID NO: 2115971 - RNA, 19 nt, Artificial Sequence
  Description of Artificial Sequence: Synthetic oligonucleotide
  Antisense strand to SEQ ID NO: 2115970
aauaaaccaauugauuucc

SEQ ID NO: 2115972 - RNA, 19 nt, Artificial Sequence
  Description of Artificial Sequence: Synthetic oligonucleotide
  Sense strand starting at position 1296 of SEQ ID NO: 1882372
ucuacuucugauuggauga

SEQ ID NO: 2115973 - RNA, 19 nt, Artificial Sequence
  Description of Artificial Sequence: Synthetic oligonucleotide
  Antisense strand to SEQ ID NO: 2115972
ucauccaaucagaaguaga

SEQ ID NO: 2115974 - RNA, 19 nt, Artificial Sequence
  Description of Artificial Sequence: Synthetic oligonucleotide
  Sense strand starting at position 1303 of SEQ ID NO: 1882372
cugauuggaugagcuguaa

SEQ ID NO: 2115975 - RNA, 19 nt, Artificial Sequence
  Description of Artificial Sequence: Synthetic oligonucleotide
  Antisense strand to SEQ ID NO: 2115974
uuacagcucauccaaucag

SEQ ID NO: 2115976 - RNA, 19 nt, Artificial Sequence
  Description of Artificial Sequence: Synthetic oligonucleotide
  Sense strand starting at position 1307 of SEQ ID NO: 1882372
uuggaugagcuguaauagu

SEQ ID NO: 2115977 - RNA, 19 nt, Artificial Sequence
  Description of Artificial Sequence: Synthetic oligonucleotide
  Antisense strand to SEQ ID NO: 2115976
acuauuacagcucauccaa

SEQ ID NO: 2115978 - RNA, 19 nt, Artificial Sequence
  Description of Artificial Sequence: Synthetic oligonucleotide
  Sense strand starting at position 1470 of SEQ ID NO: 1882372
gcucuauaccuaugggaau

SEQ ID NO: 2115979 - RNA, 19 nt, Artificial Sequence
  Description of Artificial Sequence: Synthetic oligonucleotide
  Antisense strand to SEQ ID NO: 2115978
auucccauagguauagagc

SEQ ID NO: 2115980 - RNA, 19 nt, Artificial Sequence
  Description of Artificial Sequence: Synthetic oligonucleotide
  Sense strand starting at position 1476 of SEQ ID NO: 1882372
uaccuaugggaaugaguua

SEQ ID NO: 2115981 - RNA, 19 nt, Artificial Sequence
  Description of Artificial Sequence: Synthetic oligonucleotide
  Antisense strand to SEQ ID NO: 2115980
uaacucauucccauaggua

SEQ ID NO: 2115982 - RNA, 19 nt, Artificial Sequence
  Description of Artificial Sequence: Synthetic oligonucleotide
  Sense strand starting at position 1511 of SEQ ID NO: 1882372
agaugcagucauuaguaga

SEQ ID NO: 2115983 - RNA, 19 nt, Artificial Sequence
  Description of Artificial Sequence: Synthetic oligonucleotide
  Antisense strand to SEQ ID NO: 2115982
ucuacuaaugacugcaucu

SEQ ID NO: 2115984 - RNA, 19 nt, Artificial Sequence
  Description of Artificial Sequence: Synthetic oligonucleotide
  Sense strand starting at position 1591 of SEQ ID NO: 1882372
aauaguucuggguaacgga

SEQ ID NO: 2115985 - RNA, 19 nt, Artificial Sequence
  Description of Artificial Sequence: Synthetic oligonucleotide
  Antisense strand to SEQ ID NO: 2115984
uccguuacccagaacuauu

SEQ ID NO: 2115986 - RNA, 19 nt, Artificial Sequence
  Description of Artificial Sequence: Synthetic oligonucleotide
  Sense strand starting at position 1621 of SEQ ID NO: 1882372
guaccuguaccugagauga

SEQ ID NO: 2115987 - RNA, 19 nt, Artificial Sequence
  Description of Artificial Sequence: Synthetic oligonucleotide
  Antisense strand to SEQ ID NO: 2115986
ucaucucagguacagguac

SEQ ID NO: 2115988 - RNA, 19 nt, Artificial Sequence
  Description of Artificial Sequence: Synthetic oligonucleotide
  Sense strand starting at position 1815 of SEQ ID NO: 1882372
ugauuaugcuuaccagaaa

SEQ ID NO: 2115989 - RNA, 19 nt, Artificial Sequence
  Description of Artificial Sequence: Synthetic oligonucleotide
  Antisense strand to SEQ ID NO: 2115988
uuucugguaagcauaauca

SEQ ID NO: 2115990 - RNA, 19 nt, Artificial Sequence
  Description of Artificial Sequence: Synthetic oligonucleotide
  Sense strand starting at position 2470 of SEQ ID NO: 1882372
ggauuaaauuacuugcuca

SEQ ID NO: 2115991 - RNA, 19 nt, Artificial Sequence
  Description of Artificial Sequence: Synthetic oligonucleotide
  Antisense strand to SEQ ID NO: 2115990
ugagcaaguaauuuaaucc

SEQ ID NO: 2115992 - RNA, 19 nt, Artificial Sequence
  Description of Artificial Sequence: Synthetic oligonucleotide
  Sense strand starting at position 2776 of SEQ ID NO: 1882372
guuauuagugaacacucuu

SEQ ID NO: 2115993 - RNA, 19 nt, Artificial Sequence
  Description of Artificial Sequence: Synthetic oligonucleotide
  Antisense strand to SEQ ID NO: 2115992
aagaguguucacuaauaac

SEQ ID NO: 2115994 - RNA, 19 nt, Artificial Sequence
  Description of Artificial Sequence: Synthetic oligonucleotide
  Sense strand starting at position 2953 of SEQ ID NO: 1882372
ugugaauaugaugguuacu

SEQ ID NO: 2115995 - RNA, 19 nt, Artificial Sequence
  Description of Artificial Sequence: Synthetic oligonucleotide
  Antisense strand to SEQ ID NO: 2115994
aguaaccaucauauucaca

SEQ ID NO: 2115996 - RNA, 19 nt, Artificial Sequence
  Description of Artificial Sequence: Synthetic oligonucleotide
  Sense strand starting at position 2955 of SEQ ID NO: 1882372
ugaauaugaugguuacuau

SEQ ID NO: 2115997 - RNA, 19 nt, Artificial Sequence
  Description of Artificial Sequence: Synthetic oligonucleotide
  Antisense strand to SEQ ID NO: 2115996
auaguaaccaucauauuca

SEQ ID NO: 2115998 - RNA, 19 nt, Artificial Sequence
  Description of Artificial Sequence: Synthetic oligonucleotide
  Sense strand starting at position 3278 of SEQ ID NO: 1882372
aaguucuguuuccugaaga

SEQ ID NO: 2115999 - RNA, 19 nt, Artificial Sequence
  Description of Artificial Sequence: Synthetic oligonucleotide
  Antisense strand to SEQ ID NO: 2115998
ucuucaggaaacagaacuu

SEQ ID NO: 2116000 - RNA, 19 nt, Artificial Sequence
  Description of Artificial Sequence: Synthetic oligonucleotide
  Sense strand starting at position 3446 of SEQ ID NO: 1882372
cagguaaaggcuuauaacu

SEQ ID NO: 2116001 - RNA, 19 nt, Artificial Sequence
  Description of Artificial Sequence: Synthetic oligonucleotide
  Antisense strand to SEQ ID NO: 2116000
aguuauaagccuuuaccug

SEQ ID NO: 2116002 - RNA, 19 nt, Artificial Sequence
  Description of Artificial Sequence: Synthetic oligonucleotide
  Sense strand starting at position 3596 of SEQ ID NO: 1882372
augaaagacuccucaugca

SEQ ID NO: 2116003 - RNA, 19 nt, Artificial Sequence
  Description of Artificial Sequence: Synthetic oligonucleotide
  Antisense strand to SEQ ID NO: 2116002
ugcaugaggagucuuucau

SEQ ID NO: 2116004 - RNA, 19 nt, Artificial Sequence
  Description of Artificial Sequence: Synthetic oligonucleotide
  Sense strand starting at position 3718 of SEQ ID NO: 1882372
aggcuauugcaauaggaca

SEQ ID NO: 2116005 - RNA, 19 nt, Artificial Sequence
  Description of Artificial Sequence: Synthetic oligonucleotide
  Antisense strand to SEQ ID NO: 2116004
uguccuauugcaauagccu

SEQ ID NO: 2116006 - RNA, 19 nt, Artificial Sequence
  Description of Artificial Sequence: Synthetic oligonucleotide
  Sense strand starting at position 3744 of SEQ ID NO: 1882372
uggaauugagucugaacuc

SEQ ID NO: 2116007 - RNA, 19 nt, Artificial Sequence
  Description of Artificial Sequence: Synthetic oligonucleotide
  Antisense strand to SEQ ID NO: 2116006
gaguucagacucaauucca

SEQ ID NO: 2116008 - RNA, 19 nt, Artificial Sequence
  Description of Artificial Sequence: Synthetic oligonucleotide
  Sense strand starting at position 3873 of SEQ ID NO: 1882372
uuauaucugcaugguaaga

SEQ ID NO: 2116009 - RNA, 19 nt, Artificial Sequence
  Description of Artificial Sequence: Synthetic oligonucleotide
  Antisense strand to SEQ ID NO: 2116008
ucuuaccaugcagauauaa

SEQ ID NO: 2116010 - RNA, 19 nt, Artificial Sequence
  Description of Artificial Sequence: Synthetic oligonucleotide
  Sense strand starting at position 3912 of SEQ ID NO: 1882372
cgaggaguccaaggaaguu

SEQ ID NO: 2116011 - RNA, 19 nt, Artificial Sequence
  Description of Artificial Sequence: Synthetic oligonucleotide
  Antisense strand to SEQ ID NO: 2116010
aacuuccuuggacuccucg

SEQ ID NO: 2116012 - RNA, 19 nt, Artificial Sequence
  Description of Artificial Sequence: Synthetic oligonucleotide
  Sense strand starting at position 66 of SEQ ID NO: 1882373
ggaucaugaugcuuuacaa

SEQ ID NO: 2116013 - RNA, 19 nt, Artificial Sequence
  Description of Artificial Sequence: Synthetic oligonucleotide
  Antisense strand to SEQ ID NO: 2116012
uuguaaagcaucaugaucc

SEQ ID NO: 2116014 - RNA, 19 nt, Artificial Sequence
  Description of Artificial Sequence: Synthetic oligonucleotide
  Sense strand starting at position 120 of SEQ ID NO: 1882373
cuucauuugguguguuagu

SEQ ID NO: 2116015 - RNA, 19 nt, Artificial Sequence
  Description of Artificial Sequence: Synthetic oligonucleotide
  Antisense strand to SEQ ID NO: 2116014
acuaacacaccaaaugaag

SEQ ID NO: 2116016 - RNA, 19 nt, Artificial Sequence
  Description of Artificial Sequence: Synthetic oligonucleotide
  Sense strand starting at position 121 of SEQ ID NO: 1882373
uucauuugguguguuaguu

SEQ ID NO: 2116017 - RNA, 19 nt, Artificial Sequence
  Description of Artificial Sequence: Synthetic oligonucleotide
  Antisense strand to SEQ ID NO: 2116016
aacuaacacaccaaaugaa

SEQ ID NO: 2116018 - RNA, 19 nt, Artificial Sequence
  Description of Artificial Sequence: Synthetic oligonucleotide
  Sense strand starting at position 131 of SEQ ID NO: 1882373
guguuaguuaguccuugca

SEQ ID NO: 2116019 - RNA, 19 nt, Artificial Sequence
  Description of Artificial Sequence: Synthetic oligonucleotide
  Antisense strand to SEQ ID NO: 2116018
ugcaaggacuaacuaacac

SEQ ID NO: 2116020 - RNA, 19 nt, Artificial Sequence
  Description of Artificial Sequence: Synthetic oligonucleotide
  Sense strand starting at position 163 of SEQ ID NO: 1882373
auaugugaggcuggauuau

SEQ ID NO: 2116021 - RNA, 19 nt, Artificial Sequence
  Description of Artificial Sequence: Synthetic oligonucleotide
  Antisense strand to SEQ ID NO: 2116020
auaauccagccucacauau

SEQ ID NO: 2116022 - RNA, 19 nt, Artificial Sequence
  Description of Artificial Sequence: Synthetic oligonucleotide
  Sense strand starting at position 169 of SEQ ID NO: 1882373
gaggcuggauuauuauuau

SEQ ID NO: 2116023 - RNA, 19 nt, Artificial Sequence
  Description of Artificial Sequence: Synthetic oligonucleotide
  Antisense strand to SEQ ID NO: 2116022
auaauaauaauccagccuc

SEQ ID NO: 2116024 - RNA, 19 nt, Artificial Sequence
  Description of Artificial Sequence: Synthetic oligonucleotide
  Sense strand starting at position 839 of SEQ ID NO: 1882373
acuguaucaguugaucaag

SEQ ID NO: 2116025 - RNA, 19 nt, Artificial Sequence
  Description of Artificial Sequence: Synthetic oligonucleotide
  Antisense strand to SEQ ID NO: 2116024
cuugaucaacugauacagu

SEQ ID NO: 2116026 - RNA, 19 nt, Artificial Sequence
  Description of Artificial Sequence: Synthetic oligonucleotide
  Sense strand starting at position 841 of SEQ ID NO: 1882373
uguaucaguugaucaagaa

SEQ ID NO: 2116027 - RNA, 19 nt, Artificial Sequence
  Description of Artificial Sequence: Synthetic oligonucleotide
  Antisense strand to SEQ ID NO: 2116026
uucuugaucaacugauaca

SEQ ID NO: 2116028 - RNA, 19 nt, Artificial Sequence
  Description of Artificial Sequence: Synthetic oligonucleotide
  Sense strand starting at position 1182 of SEQ ID NO: 1882373
gaaguugugaauugugaaa

SEQ ID NO: 2116029 - RNA, 19 nt, Artificial Sequence
  Description of Artificial Sequence: Synthetic oligonucleotide
  Antisense strand to SEQ ID NO: 2116028
uuucacaauucacaacuuc

SEQ ID NO: 2116030 - RNA, 19 nt, Artificial Sequence
  Description of Artificial Sequence: Synthetic oligonucleotide
  Sense strand starting at position 1194 of SEQ ID NO: 1882373
ugugaaagaaccugauagu

SEQ ID NO: 2116031 - RNA, 19 nt, Artificial Sequence
  Description of Artificial Sequence: Synthetic oligonucleotide
  Antisense strand to SEQ ID NO: 2116030
acuaucagguucuuucaca

SEQ ID NO: 2116032 - RNA, 19 nt, Artificial Sequence
  Description of Artificial Sequence: Synthetic oligonucleotide
  Sense strand starting at position 1200 of SEQ ID NO: 1882373
agaaccugauaguugaagu

SEQ ID NO: 2116033 - RNA, 19 nt, Artificial Sequence
  Description of Artificial Sequence: Synthetic oligonucleotide
  Antisense strand to SEQ ID NO: 2116032
acuucaacuaucagguucu

SEQ ID NO: 2116034 - RNA, 19 nt, Artificial Sequence
  Description of Artificial Sequence: Synthetic oligonucleotide
  Sense strand starting at position 1327 of SEQ ID NO: 1882373
gagguuugcaguuagacau

SEQ ID NO: 2116035 - RNA, 19 nt, Artificial Sequence
  Description of Artificial Sequence: Synthetic oligonucleotide
  Antisense strand to SEQ ID NO: 2116034
augucuaacugcaaaccuc

SEQ ID NO: 2116036 - RNA, 19 nt, Artificial Sequence
  Description of Artificial Sequence: Synthetic oligonucleotide
  Sense strand starting at position 1334 of SEQ ID NO: 1882373
gcaguuagacaugaaaguu

SEQ ID NO: 2116037 - RNA, 19 nt, Artificial Sequence
  Description of Artificial Sequence: Synthetic oligonucleotide
  Antisense strand to SEQ ID NO: 2116036
aacuuucaugucuaacugc

SEQ ID NO: 2116038 - RNA, 19 nt, Artificial Sequence
  Description of Artificial Sequence: Synthetic oligonucleotide
  Sense strand starting at position 1430 of SEQ ID NO: 1882373
ggcuguaagacucaagauu

SEQ ID NO: 2116039 - RNA, 19 nt, Artificial Sequence
  Description of Artificial Sequence: Synthetic oligonucleotide
  Antisense strand to SEQ ID NO: 2116038
aaucuugagucuuacagcc

SEQ ID NO: 2116040 - RNA, 19 nt, Artificial Sequence
  Description of Artificial Sequence: Synthetic oligonucleotide
  Sense strand starting at position 1448 of SEQ ID NO: 1882373
ucacuuuaucuugagggca

SEQ ID NO: 2116041 - RNA, 19 nt, Artificial Sequence
  Description of Artificial Sequence: Synthetic oligonucleotide
  Antisense strand to SEQ ID NO: 2116040
ugcccucaagauaaaguga

SEQ ID NO: 2116042 - RNA, 19 nt, Artificial Sequence
  Description of Artificial Sequence: Synthetic oligonucleotide
  Sense strand starting at position 1598 of SEQ ID NO: 1882373
uuaucaggugcuuacuuaa

SEQ ID NO: 2116043 - RNA, 19 nt, Artificial Sequence
  Description of Artificial Sequence: Synthetic oligonucleotide
  Antisense strand to SEQ ID NO: 2116042
uuaaguaagcaccugauaa

SEQ ID NO: 2116044 - RNA, 19 nt, Artificial Sequence
  Description of Artificial Sequence: Synthetic oligonucleotide
  Sense strand starting at position 1633 of SEQ ID NO: 1882373
caaagauugugacuuguaa

SEQ ID NO: 2116045 - RNA, 19 nt, Artificial Sequence
  Description of Artificial Sequence: Synthetic oligonucleotide
  Antisense strand to SEQ ID NO: 2116044
uuacaagucacaaucuuug

SEQ ID NO: 2116046 - RNA, 19 nt, Artificial Sequence
  Description of Artificial Sequence: Synthetic oligonucleotide
  Sense strand starting at position 1736 of SEQ ID NO: 1882373
gugugugcaguauaauuua

SEQ ID NO: 2116047 - RNA, 19 nt, Artificial Sequence
  Description of Artificial Sequence: Synthetic oligonucleotide
  Antisense strand to SEQ ID NO: 2116046
uaaauuauacugcacacac

SEQ ID NO: 2116048 - RNA, 19 nt, Artificial Sequence
  Description of Artificial Sequence: Synthetic oligonucleotide
  Sense strand starting at position 1857 of SEQ ID NO: 1882373
gguagauuaggaugaguag

SEQ ID NO: 2116049 - RNA, 19 nt, Artificial Sequence
  Description of Artificial Sequence: Synthetic oligonucleotide
  Antisense strand to SEQ ID NO: 2116048
cuacucauccuaaucuacc

SEQ ID NO: 2116050 - RNA, 19 nt, Artificial Sequence
  Description of Artificial Sequence: Synthetic oligonucleotide
  Sense strand starting at position 2287 of SEQ ID NO: 1882373
gcuugugaaagcuaauuga

SEQ ID NO: 2116051 - RNA, 19 nt, Artificial Sequence
  Description of Artificial Sequence: Synthetic oligonucleotide
  Antisense strand to SEQ ID NO: 2116050
ucaauuagcuuucacaagc

SEQ ID NO: 2116052 - RNA, 19 nt, Artificial Sequence
  Description of Artificial Sequence: Synthetic oligonucleotide
  Sense strand starting at position 2290 of SEQ ID NO: 1882373
ugugaaagcuaauugaaau

SEQ ID NO: 2116053 - RNA, 19 nt, Artificial Sequence
  Description of Artificial Sequence: Synthetic oligonucleotide
  Antisense strand to SEQ ID NO: 2116052
auuucaauuagcuuucaca

SEQ ID NO: 2116054 - RNA, 19 nt, Artificial Sequence
  Description of Artificial Sequence: Synthetic oligonucleotide
  Sense strand starting at position 2434 of SEQ ID NO: 1882373
cuuugaacucuuugaaugu

SEQ ID NO: 2116055 - RNA, 19 nt, Artificial Sequence
  Description of Artificial Sequence: Synthetic oligonucleotide
  Antisense strand to SEQ ID NO: 2116054
acauucaaagaguucaaag

SEQ ID NO: 2116056 - RNA, 19 nt, Artificial Sequence
  Description of Artificial Sequence: Synthetic oligonucleotide
  Sense strand starting at position 2541 of SEQ ID NO: 1882373
aaugaauucccgggcaaua

SEQ ID NO: 2116057 - RNA, 19 nt, Artificial Sequence
  Description of Artificial Sequence: Synthetic oligonucleotide
  Antisense strand to SEQ ID NO: 2116056
uauugcccgggaauucauu

SEQ ID NO: 2116058 - RNA, 19 nt, Artificial Sequence
  Description of Artificial Sequence: Synthetic oligonucleotide
  Sense strand starting at position 2543 of SEQ ID NO: 1882373
ugaauucccgggcaauaaa

SEQ ID NO: 2116059 - RNA, 19 nt, Artificial Sequence
  Description of Artificial Sequence: Synthetic oligonucleotide
  Antisense strand to SEQ ID NO: 2116058
uuuauugcccgggaauuca

SEQ ID NO: 2116060 - RNA, 19 nt, Artificial Sequence
  Description of Artificial Sequence: Synthetic oligonucleotide
  Sense strand starting at position 2628 of SEQ ID NO: 1882373
aaggaauugcuguaugcag

SEQ ID NO: 2116061 - RNA, 19 nt, Artificial Sequence
  Description of Artificial Sequence: Synthetic oligonucleotide
  Antisense strand to SEQ ID NO: 2116060
cugcauacagcaauuccuu

SEQ ID NO: 2116062 - RNA, 19 nt, Artificial Sequence
  Description of Artificial Sequence: Synthetic oligonucleotide
  Sense strand starting at position 2762 of SEQ ID NO: 1882373
ggccaaacuagugauuguu

SEQ ID NO: 2116063 - RNA, 19 nt, Artificial Sequence
  Description of Artificial Sequence: Synthetic oligonucleotide
  Antisense strand to SEQ ID NO: 2116062
aacaaucacuaguuuggcc

SEQ ID NO: 2116064 - RNA, 19 nt, Artificial Sequence
  Description of Artificial Sequence: Synthetic oligonucleotide
  Sense strand starting at position 2780 of SEQ ID NO: 1882373
ugcuaauuaggauauaugu

SEQ ID NO: 2116065 - RNA, 19 nt, Artificial Sequence
  Description of Artificial Sequence: Synthetic oligonucleotide
  Antisense strand to SEQ ID NO: 2116064
acauauauccuaauuagca

SEQ ID NO: 2116066 - RNA, 19 nt, Artificial Sequence
  Description of Artificial Sequence: Synthetic oligonucleotide
  Sense strand starting at position 2889 of SEQ ID NO: 1882373
cacugaaauugacuggagu

SEQ ID NO: 2116067 - RNA, 19 nt, Artificial Sequence
  Description of Artificial Sequence: Synthetic oligonucleotide
  Antisense strand to SEQ ID NO: 2116066
acuccagucaauuucagug

SEQ ID NO: 2116068 - RNA, 19 nt, Artificial Sequence
  Description of Artificial Sequence: Synthetic oligonucleotide
  Sense strand starting at position 2890 of SEQ ID NO: 1882373
acugaaauugacuggaguu

SEQ ID NO: 2116069 - RNA, 19 nt, Artificial Sequence
  Description of Artificial Sequence: Synthetic oligonucleotide
  Antisense strand to SEQ ID NO: 2116068
aacuccagucaauuucagu

SEQ ID NO: 2116070 - RNA, 19 nt, Artificial Sequence
  Description of Artificial Sequence: Synthetic oligonucleotide
  Sense strand starting at position 2891 of SEQ ID NO: 1882373
cugaaauugacuggaguua

SEQ ID NO: 2116071 - RNA, 19 nt, Artificial Sequence
  Description of Artificial Sequence: Synthetic oligonucleotide
  Antisense strand to SEQ ID NO: 2116070
uaacuccagucaauuucag

SEQ ID NO: 2116072 - RNA, 19 nt, Artificial Sequence
  Description of Artificial Sequence: Synthetic oligonucleotide
  Sense strand starting at position 3246 of SEQ ID NO: 1882373
ccaguaauuguauauuaag

SEQ ID NO: 2116073 - RNA, 19 nt, Artificial Sequence
  Description of Artificial Sequence: Synthetic oligonucleotide
  Antisense strand to SEQ ID NO: 2116072
cuuaauauacaauuacugg

SEQ ID NO: 2116074 - RNA, 19 nt, Artificial Sequence
  Description of Artificial Sequence: Synthetic oligonucleotide
  Sense strand starting at position 3389 of SEQ ID NO: 1882373
gcagauaacuugucccaga

SEQ ID NO: 2116075 - RNA, 19 nt, Artificial Sequence
  Description of Artificial Sequence: Synthetic oligonucleotide
  Antisense strand to SEQ ID NO: 2116074
ucugggacaaguuaucugc

SEQ ID NO: 2116076 - RNA, 19 nt, Artificial Sequence
  Description of Artificial Sequence: Synthetic oligonucleotide
  Sense strand starting at position 3472 of SEQ ID NO: 1882373
gcuauugggaaguagcuau

SEQ ID NO: 2116077 - RNA, 19 nt, Artificial Sequence
  Description of Artificial Sequence: Synthetic oligonucleotide
  Antisense strand to SEQ ID NO: 2116076
auagcuacuucccaauagc

SEQ ID NO: 2116078 - RNA, 19 nt, Artificial Sequence
  Description of Artificial Sequence: Synthetic oligonucleotide
  Sense strand starting at position 3476 of SEQ ID NO: 1882373
uugggaaguagcuauuaca

SEQ ID NO: 2116079 - RNA, 19 nt, Artificial Sequence
  Description of Artificial Sequence: Synthetic oligonucleotide
  Antisense strand to SEQ ID NO: 2116078
uguaauagcuacuucccaa

SEQ ID NO: 2116080 - RNA, 19 nt, Artificial Sequence
  Description of Artificial Sequence: Synthetic oligonucleotide
  Sense strand starting at position 3588 of SEQ ID NO: 1882373
uuacaugagugaguagaga

SEQ ID NO: 2116081 - RNA, 19 nt, Artificial Sequence
  Description of Artificial Sequence: Synthetic oligonucleotide
  Antisense strand to SEQ ID NO: 2116080
ucucuacucacucauguaa

SEQ ID NO: 2116082 - RNA, 19 nt, Artificial Sequence
  Description of Artificial Sequence: Synthetic oligonucleotide
  Sense strand starting at position 3662 of SEQ ID NO: 1882373
agaagauguugucuaccaa

SEQ ID NO: 2116083 - RNA, 19 nt, Artificial Sequence
  Description of Artificial Sequence: Synthetic oligonucleotide
  Antisense strand to SEQ ID NO: 2116082
uugguagacaacaucuucu

SEQ ID NO: 2116084 - RNA, 19 nt, Artificial Sequence
  Description of Artificial Sequence: Synthetic oligonucleotide
  Sense strand starting at position 3758 of SEQ ID NO: 1882373
ucucuuacuguuuagaucu

SEQ ID NO: 2116085 - RNA, 19 nt, Artificial Sequence
  Description of Artificial Sequence: Synthetic oligonucleotide
  Antisense strand to SEQ ID NO: 2116084
agaucuaaacaguaagaga

SEQ ID NO: 2116086 - RNA, 19 nt, Artificial Sequence
  Description of Artificial Sequence: Synthetic oligonucleotide
  Sense strand starting at position 3765 of SEQ ID NO: 1882373
cuguuuagaucucuuggga

SEQ ID NO: 2116087 - RNA, 19 nt, Artificial Sequence
  Description of Artificial Sequence: Synthetic oligonucleotide
  Antisense strand to SEQ ID NO: 2116086
ucccaagagaucuaaacag

SEQ ID NO: 2116088 - RNA, 19 nt, Artificial Sequence
  Description of Artificial Sequence: Synthetic oligonucleotide
  Sense strand starting at position 3768 of SEQ ID NO: 1882373
uuuagaucucuugggauuc

SEQ ID NO: 2116089 - RNA, 19 nt, Artificial Sequence
  Description of Artificial Sequence: Synthetic oligonucleotide
  Antisense strand to SEQ ID NO: 2116088
gaaucccaagagaucuaaa

SEQ ID NO: 2116090 - RNA, 19 nt, Artificial Sequence
  Description of Artificial Sequence: Synthetic oligonucleotide
  Sense strand starting at position 3898 of SEQ ID NO: 1882373
cccaauaagcuguaaaugu

SEQ ID NO: 2116091 - RNA, 19 nt, Artificial Sequence
  Description of Artificial Sequence: Synthetic oligonucleotide
  Antisense strand to SEQ ID NO: 2116090
acauuuacagcuuauuggg

SEQ ID NO: 2116092 - RNA, 19 nt, Artificial Sequence
  Description of Artificial Sequence: Synthetic oligonucleotide
  Sense strand starting at position 281 of SEQ ID NO: 1882374
acuggaugaucccuuguua

SEQ ID NO: 2116093 - RNA, 19 nt, Artificial Sequence
  Description of Artificial Sequence: Synthetic oligonucleotide
  Antisense strand to SEQ ID NO: 2116092
uaacaagggaucauccagu

SEQ ID NO: 2116094 - RNA, 19 nt, Artificial Sequence
  Description of Artificial Sequence: Synthetic oligonucleotide
  Sense strand starting at position 369 of SEQ ID NO: 1882374
cucucuuugguggauguaa

SEQ ID NO: 2116095 - RNA, 19 nt, Artificial Sequence
  Description of Artificial Sequence: Synthetic oligonucleotide
  Antisense strand to SEQ ID NO: 2116094
uuacauccaccaaagagag

SEQ ID NO: 2116096 - RNA, 19 nt, Artificial Sequence
  Description of Artificial Sequence: Synthetic oligonucleotide
  Sense strand starting at position 558 of SEQ ID NO: 1882374
uugaucagugccuaauuga

SEQ ID NO: 2116097 - RNA, 19 nt, Artificial Sequence
  Description of Artificial Sequence: Synthetic oligonucleotide
  Antisense strand to SEQ ID NO: 2116096
ucaauuaggcacugaucaa

SEQ ID NO: 2116098 - RNA, 19 nt, Artificial Sequence
  Description of Artificial Sequence: Synthetic oligonucleotide
  Sense strand starting at position 662 of SEQ ID NO: 1882374
ugccuugaggcugaaagaa

SEQ ID NO: 2116099 - RNA, 19 nt, Artificial Sequence
  Description of Artificial Sequence: Synthetic oligonucleotide
  Antisense strand to SEQ ID NO: 2116098
uucuuucagccucaaggca

SEQ ID NO: 2116100 - RNA, 19 nt, Artificial Sequence
  Description of Artificial Sequence: Synthetic oligonucleotide
  Sense strand starting at position 724 of SEQ ID NO: 1882374
aucuuugcccuugaaauga

SEQ ID NO: 2116101 - RNA, 19 nt, Artificial Sequence
  Description of Artificial Sequence: Synthetic oligonucleotide
  Antisense strand to SEQ ID NO: 2116100
ucauuucaagggcaaagau

SEQ ID NO: 2116102 - RNA, 19 nt, Artificial Sequence
  Description of Artificial Sequence: Synthetic oligonucleotide
  Sense strand starting at position 799 of SEQ ID NO: 1882374
gucuaagugcaaugagaag

SEQ ID NO: 2116103 - RNA, 19 nt, Artificial Sequence
  Description of Artificial Sequence: Synthetic oligonucleotide
  Antisense strand to SEQ ID NO: 2116102
cuucucauugcacuuagac

SEQ ID NO: 2116104 - RNA, 19 nt, Artificial Sequence
  Description of Artificial Sequence: Synthetic oligonucleotide
  Sense strand starting at position 924 of SEQ ID NO: 1882374
uucuaaguucugcagaaug

SEQ ID NO: 2116105 - RNA, 19 nt, Artificial Sequence
  Description of Artificial Sequence: Synthetic oligonucleotide
  Antisense strand to SEQ ID NO: 2116104
cauucugcagaacuuagaa

SEQ ID NO: 2116106 - RNA, 19 nt, Artificial Sequence
  Description of Artificial Sequence: Synthetic oligonucleotide
  Sense strand starting at position 935 of SEQ ID NO: 1882374
gcagaaugggaaugugauc

SEQ ID NO: 2116107 - RNA, 19 nt, Artificial Sequence
  Description of Artificial Sequence: Synthetic oligonucleotide
  Antisense strand to SEQ ID NO: 2116106
gaucacauucccauucugc

SEQ ID NO: 2116108 - RNA, 19 nt, Artificial Sequence
  Description of Artificial Sequence: Synthetic oligonucleotide
  Sense strand starting at position 940 of SEQ ID NO: 1882374
augggaaugugaucucuaa

SEQ ID NO: 2116109 - RNA, 19 nt, Artificial Sequence
  Description of Artificial Sequence: Synthetic oligonucleotide
  Antisense strand to SEQ ID NO: 2116108
uuagagaucacauucccau

SEQ ID NO: 2116110 - RNA, 19 nt, Artificial Sequence
  Description of Artificial Sequence: Synthetic oligonucleotide
  Sense strand starting at position 1014 of SEQ ID NO: 1882374
gaggucuguccuuaauagu

SEQ ID NO: 2116111 - RNA, 19 nt, Artificial Sequence
  Description of Artificial Sequence: Synthetic oligonucleotide
  Antisense strand to SEQ ID NO: 2116110
acuauuaaggacagaccuc

SEQ ID NO: 2116112 - RNA, 19 nt, Artificial Sequence
  Description of Artificial Sequence: Synthetic oligonucleotide
  Sense strand starting at position 1069 of SEQ ID NO: 1882374
uugcuuugagaucauccuu

SEQ ID NO: 2116113 - RNA, 19 nt, Artificial Sequence
  Description of Artificial Sequence: Synthetic oligonucleotide
  Antisense strand to SEQ ID NO: 2116112
aaggaugaucucaaagcaa

SEQ ID NO: 2116114 - RNA, 19 nt, Artificial Sequence
  Description of Artificial Sequence: Synthetic oligonucleotide
  Sense strand starting at position 1373 of SEQ ID NO: 1882374
guggcuauuuaggucucua

SEQ ID NO: 2116115 - RNA, 19 nt, Artificial Sequence
  Description of Artificial Sequence: Synthetic oligonucleotide
  Antisense strand to SEQ ID NO: 2116114
uagagaccuaaauagccac

SEQ ID NO: 2116116 - RNA, 19 nt, Artificial Sequence
  Description of Artificial Sequence: Synthetic oligonucleotide
  Sense strand starting at position 1418 of SEQ ID NO: 1882374
cccucaccacuaggagaau

SEQ ID NO: 2116117 - RNA, 19 nt, Artificial Sequence
  Description of Artificial Sequence: Synthetic oligonucleotide
  Antisense strand to SEQ ID NO: 2116116
auucuccuaguggugaggg

SEQ ID NO: 2116118 - RNA, 19 nt, Artificial Sequence
  Description of Artificial Sequence: Synthetic oligonucleotide
  Sense strand starting at position 1476 of SEQ ID NO: 1882374
ugagaucuccauugggcau

SEQ ID NO: 2116119 - RNA, 19 nt, Artificial Sequence
  Description of Artificial Sequence: Synthetic oligonucleotide
  Antisense strand to SEQ ID NO: 2116118
augcccaauggagaucuca

SEQ ID NO: 2116120 - RNA, 19 nt, Artificial Sequence
  Description of Artificial Sequence: Synthetic oligonucleotide
  Sense strand starting at position 1599 of SEQ ID NO: 1882374
aggugucagggauauggua

SEQ ID NO: 2116121 - RNA, 19 nt, Artificial Sequence
  Description of Artificial Sequence: Synthetic oligonucleotide
  Antisense strand to SEQ ID NO: 2116120
uaccauaucccugacaccu

SEQ ID NO: 2116122 - RNA, 19 nt, Artificial Sequence
  Description of Artificial Sequence: Synthetic oligonucleotide
  Sense strand starting at position 1707 of SEQ ID NO: 1882374
ugugauaaaggcugagaag

SEQ ID NO: 2116123 - RNA, 19 nt, Artificial Sequence
  Description of Artificial Sequence: Synthetic oligonucleotide
  Antisense strand to SEQ ID NO: 2116122
cuucucagccuuuaucaca

SEQ ID NO: 2116124 - RNA, 19 nt, Artificial Sequence
  Description of Artificial Sequence: Synthetic oligonucleotide
  Sense strand starting at position 1791 of SEQ ID NO: 1882374
uggagaaauccuuggugca

SEQ ID NO: 2116125 - RNA, 19 nt, Artificial Sequence
  Description of Artificial Sequence: Synthetic oligonucleotide
  Antisense strand to SEQ ID NO: 2116124
ugcaccaaggauuucucca

SEQ ID NO: 2116126 - RNA, 19 nt, Artificial Sequence
  Description of Artificial Sequence: Synthetic oligonucleotide
  Sense strand starting at position 1792 of SEQ ID NO: 1882374
ggagaaauccuuggugcag

SEQ ID NO: 2116127 - RNA, 19 nt, Artificial Sequence
  Description of Artificial Sequence: Synthetic oligonucleotide
  Antisense strand to SEQ ID NO: 2116126
cugcaccaaggauuucucc

SEQ ID NO: 2116128 - RNA, 19 nt, Artificial Sequence
  Description of Artificial Sequence: Synthetic oligonucleotide
  Sense strand starting at position 1798 of SEQ ID NO: 1882374
auccuuggugcagaucuau

SEQ ID NO: 2116129 - RNA, 19 nt, Artificial Sequence
  Description of Artificial Sequence: Synthetic oligonucleotide
  Antisense strand to SEQ ID NO: 2116128
auagaucugcaccaaggau

SEQ ID NO: 2116130 - RNA, 19 nt, Artificial Sequence
  Description of Artificial Sequence: Synthetic oligonucleotide
  Sense strand starting at position 2094 of SEQ ID NO: 1882374
agagaagucagaugauguc

SEQ ID NO: 2116131 - RNA, 19 nt, Artificial Sequence
  Description of Artificial Sequence: Synthetic oligonucleotide
  Antisense strand to SEQ ID NO: 2116130
gacaucaucugacuucucu

SEQ ID NO: 2116132 - RNA, 19 nt, Artificial Sequence
  Description of Artificial Sequence: Synthetic oligonucleotide
  Sense strand starting at position 2176 of SEQ ID NO: 1882374
guuugaaguaaagauguca

SEQ ID NO: 2116133 - RNA, 19 nt, Artificial Sequence
  Description of Artificial Sequence: Synthetic oligonucleotide
  Antisense strand to SEQ ID NO: 2116132
ugacaucuuuacuucaaac

SEQ ID NO: 2116134 - RNA, 19 nt, Artificial Sequence
  Description of Artificial Sequence: Synthetic oligonucleotide
  Sense strand starting at position 2190 of SEQ ID NO: 1882374
ugucaaauacuuggagaca

SEQ ID NO: 2116135 - RNA, 19 nt, Artificial Sequence
  Description of Artificial Sequence: Synthetic oligonucleotide
  Antisense strand to SEQ ID NO: 2116134
ugucuccaaguauuugaca

SEQ ID NO: 2116136 - RNA, 19 nt, Artificial Sequence
  Description of Artificial Sequence: Synthetic oligonucleotide
  Sense strand starting at position 2250 of SEQ ID NO: 1882374
ggaagugacaauugaaggu

SEQ ID NO: 2116137 - RNA, 19 nt, Artificial Sequence
  Description of Artificial Sequence: Synthetic oligonucleotide
  Antisense strand to SEQ ID NO: 2116136
accuucaauugucacuucc

SEQ ID NO: 2116138 - RNA, 19 nt, Artificial Sequence
  Description of Artificial Sequence: Synthetic oligonucleotide
  Sense strand starting at position 2338 of SEQ ID NO: 1882374
uaggcagaaccuugaggau

SEQ ID NO: 2116139 - RNA, 19 nt, Artificial Sequence
  Description of Artificial Sequence: Synthetic oligonucleotide
  Antisense strand to SEQ ID NO: 2116138
auccucaagguucugccua

SEQ ID NO: 2116140 - RNA, 19 nt, Artificial Sequence
  Description of Artificial Sequence: Synthetic oligonucleotide
  Sense strand starting at position 2421 of SEQ ID NO: 1882374
gguggugccauugauaaga

SEQ ID NO: 2116141 - RNA, 19 nt, Artificial Sequence
  Description of Artificial Sequence: Synthetic oligonucleotide
  Antisense strand to SEQ ID NO: 2116140
ucuuaucaauggcaccacc

SEQ ID NO: 2116142 - RNA, 19 nt, Artificial Sequence
  Description of Artificial Sequence: Synthetic oligonucleotide
  Sense strand starting at position 2448 of SEQ ID NO: 1882374
accagacaugucugggaua

SEQ ID NO: 2116143 - RNA, 19 nt, Artificial Sequence
  Description of Artificial Sequence: Synthetic oligonucleotide
  Antisense strand to SEQ ID NO: 2116142
uaucccagacaugucuggu

SEQ ID NO: 2116144 - RNA, 19 nt, Artificial Sequence
  Description of Artificial Sequence: Synthetic oligonucleotide
  Sense strand starting at position 2494 of SEQ ID NO: 1882374
uaguguuaugcugaauuga

SEQ ID NO: 2116145 - RNA, 19 nt, Artificial Sequence
  Description of Artificial Sequence: Synthetic oligonucleotide
  Antisense strand to SEQ ID NO: 2116144
ucaauucagcauaacacua

SEQ ID NO: 2116146 - RNA, 19 nt, Artificial Sequence
  Description of Artificial Sequence: Synthetic oligonucleotide
  Sense strand starting at position 2690 of SEQ ID NO: 1882374
ucuugcuauuuagcucaga

SEQ ID NO: 2116147 - RNA, 19 nt, Artificial Sequence
  Description of Artificial Sequence: Synthetic oligonucleotide
  Antisense strand to SEQ ID NO: 2116146
ucugagcuaaauagcaaga

SEQ ID NO: 2116148 - RNA, 19 nt, Artificial Sequence
  Description of Artificial Sequence: Synthetic oligonucleotide
  Sense strand starting at position 2804 of SEQ ID NO: 1882374
uguaacugagcucaucaaa

SEQ ID NO: 2116149 - RNA, 19 nt, Artificial Sequence
  Description of Artificial Sequence: Synthetic oligonucleotide
  Antisense strand to SEQ ID NO: 2116148
uuugaugagcucaguuaca

SEQ ID NO: 2116150 - RNA, 19 nt, Artificial Sequence
  Description of Artificial Sequence: Synthetic oligonucleotide
  Sense strand starting at position 2895 of SEQ ID NO: 1882374
accgaaugauaacucauua

SEQ ID NO: 2116151 - RNA, 19 nt, Artificial Sequence
  Description of Artificial Sequence: Synthetic oligonucleotide
  Antisense strand to SEQ ID NO: 2116150
uaaugaguuaucauucggu

SEQ ID NO: 2116152 - RNA, 19 nt, Artificial Sequence
  Description of Artificial Sequence: Synthetic oligonucleotide
  Sense strand starting at position 3113 of SEQ ID NO: 1882374
gaaagagaguugccaggua

SEQ ID NO: 2116153 - RNA, 19 nt, Artificial Sequence
  Description of Artificial Sequence: Synthetic oligonucleotide
  Antisense strand to SEQ ID NO: 2116152
uaccuggcaacucucuuuc

SEQ ID NO: 2116154 - RNA, 19 nt, Artificial Sequence
  Description of Artificial Sequence: Synthetic oligonucleotide
  Sense strand starting at position 3118 of SEQ ID NO: 1882374
agaguugccagguaacauc

SEQ ID NO: 2116155 - RNA, 19 nt, Artificial Sequence
  Description of Artificial Sequence: Synthetic oligonucleotide
  Antisense strand to SEQ ID NO: 2116154
gauguuaccuggcaacucu

SEQ ID NO: 2116156 - RNA, 19 nt, Artificial Sequence
  Description of Artificial Sequence: Synthetic oligonucleotide
  Sense strand starting at position 3155 of SEQ ID NO: 1882374
ucaaguaggagugggauaa

SEQ ID NO: 2116157 - RNA, 19 nt, Artificial Sequence
  Description of Artificial Sequence: Synthetic oligonucleotide
  Antisense strand to SEQ ID NO: 2116156
uuaucccacuccuacuuga

SEQ ID NO: 2116158 - RNA, 19 nt, Artificial Sequence
  Description of Artificial Sequence: Synthetic oligonucleotide
  Sense strand starting at position 3226 of SEQ ID NO: 1882374
agaucauaguagcuacaaa

SEQ ID NO: 2116159 - RNA, 19 nt, Artificial Sequence
  Description of Artificial Sequence: Synthetic oligonucleotide
  Antisense strand to SEQ ID NO: 2116158
uuuguagcuacuaugaucu

SEQ ID NO: 2116160 - RNA, 19 nt, Artificial Sequence
  Description of Artificial Sequence: Synthetic oligonucleotide
  Sense strand starting at position 3404 of SEQ ID NO: 1882374
ucugauaugguugauaguu

SEQ ID NO: 2116161 - RNA, 19 nt, Artificial Sequence
  Description of Artificial Sequence: Synthetic oligonucleotide
  Antisense strand to SEQ ID NO: 2116160
aacuaucaaccauaucaga

SEQ ID NO: 2116162 - RNA, 19 nt, Artificial Sequence
  Description of Artificial Sequence: Synthetic oligonucleotide
  Sense strand starting at position 3409 of SEQ ID NO: 1882374
uaugguugauaguuaucaa

SEQ ID NO: 2116163 - RNA, 19 nt, Artificial Sequence
  Description of Artificial Sequence: Synthetic oligonucleotide
  Antisense strand to SEQ ID NO: 2116162
uugauaacuaucaaccaua

SEQ ID NO: 2116164 - RNA, 19 nt, Artificial Sequence
  Description of Artificial Sequence: Synthetic oligonucleotide
  Sense strand starting at position 3412 of SEQ ID NO: 1882374
gguugauaguuaucaacca

SEQ ID NO: 2116165 - RNA, 19 nt, Artificial Sequence
  Description of Artificial Sequence: Synthetic oligonucleotide
  Antisense strand to SEQ ID NO: 2116164
ugguugauaacuaucaacc

SEQ ID NO: 2116166 - RNA, 19 nt, Artificial Sequence
  Description of Artificial Sequence: Synthetic oligonucleotide
  Sense strand starting at position 3630 of SEQ ID NO: 1882374
agcucuguuaaaugggaau

SEQ ID NO: 2116167 - RNA, 19 nt, Artificial Sequence
  Description of Artificial Sequence: Synthetic oligonucleotide
  Antisense strand to SEQ ID NO: 2116166
auucccauuuaacagagcu

SEQ ID NO: 2116168 - RNA, 19 nt, Artificial Sequence
  Description of Artificial Sequence: Synthetic oligonucleotide
  Sense strand starting at position 3854 of SEQ ID NO: 1882374
uuuaaagugcugggaagau

SEQ ID NO: 2116169 - RNA, 19 nt, Artificial Sequence
  Description of Artificial Sequence: Synthetic oligonucleotide
  Antisense strand to SEQ ID NO: 2116168
aucuucccagcacuuuaaa

SEQ ID NO: 2116170 - RNA, 19 nt, Artificial Sequence
  Description of Artificial Sequence: Synthetic oligonucleotide
  Sense strand starting at position 3978 of SEQ ID NO: 1882374
ugaugaauugagcaagucu

SEQ ID NO: 2116171 - RNA, 19 nt, Artificial Sequence
  Description of Artificial Sequence: Synthetic oligonucleotide
  Antisense strand to SEQ ID NO: 2116170
agacuugcucaauucauca

SEQ ID NO: 2116172 - RNA, 19 nt, Artificial Sequence
  Description of Artificial Sequence: Synthetic oligonucleotide
  Sense strand starting at position 40 of SEQ ID NO: 1882375
acuaaaguaguagguaaau

SEQ ID NO: 2116173 - RNA, 19 nt, Artificial Sequence
  Description of Artificial Sequence: Synthetic oligonucleotide
  Antisense strand to SEQ ID NO: 2116172
auuuaccuacuacuuuagu

SEQ ID NO: 2116174 - RNA, 19 nt, Artificial Sequence
  Description of Artificial Sequence: Synthetic oligonucleotide
  Sense strand starting at position 51 of SEQ ID NO: 1882375
agguaaauauuggauccua

SEQ ID NO: 2116175 - RNA, 19 nt, Artificial Sequence
  Description of Artificial Sequence: Synthetic oligonucleotide
  Antisense strand to SEQ ID NO: 2116174
uaggauccaauauuuaccu

SEQ ID NO: 2116176 - RNA, 19 nt, Artificial Sequence
  Description of Artificial Sequence: Synthetic oligonucleotide
  Sense strand starting at position 132 of SEQ ID NO: 1882375
aaaguuacauagcugagua

SEQ ID NO: 2116177 - RNA, 19 nt, Artificial Sequence
  Description of Artificial Sequence: Synthetic oligonucleotide
  Antisense strand to SEQ ID NO: 2116176
uacucagcuauguaacuuu

SEQ ID NO: 2116178 - RNA, 19 nt, Artificial Sequence
  Description of Artificial Sequence: Synthetic oligonucleotide
  Sense strand starting at position 136 of SEQ ID NO: 1882375
uuacauagcugaguaacaa

SEQ ID NO: 2116179 - RNA, 19 nt, Artificial Sequence
  Description of Artificial Sequence: Synthetic oligonucleotide
  Antisense strand to SEQ ID NO: 2116178
uuguuacucagcuauguaa

SEQ ID NO: 2116180 - RNA, 19 nt, Artificial Sequence
  Description of Artificial Sequence: Synthetic oligonucleotide
  Sense strand starting at position 284 of SEQ ID NO: 1882375
aucagugagcuaugaucaa

SEQ ID NO: 2116181 - RNA, 19 nt, Artificial Sequence
  Description of Artificial Sequence: Synthetic oligonucleotide
  Antisense strand to SEQ ID NO: 2116180
uugaucauagcucacugau

SEQ ID NO: 2116182 - RNA, 19 nt, Artificial Sequence
  Description of Artificial Sequence: Synthetic oligonucleotide
  Sense strand starting at position 1057 of SEQ ID NO: 1882375
acuaaauucuaguugaagu

SEQ ID NO: 2116183 - RNA, 19 nt, Artificial Sequence
  Description of Artificial Sequence: Synthetic oligonucleotide
  Antisense strand to SEQ ID NO: 2116182
acuucaacuagaauuuagu

SEQ ID NO: 2116184 - RNA, 19 nt, Artificial Sequence
  Description of Artificial Sequence: Synthetic oligonucleotide
  Sense strand starting at position 1162 of SEQ ID NO: 1882375
uguagaaugugcucucuuu

SEQ ID NO: 2116185 - RNA, 19 nt, Artificial Sequence
  Description of Artificial Sequence: Synthetic oligonucleotide
  Antisense strand to SEQ ID NO: 2116184
aaagagagcacauucuaca

SEQ ID NO: 2116186 - RNA, 19 nt, Artificial Sequence
  Description of Artificial Sequence: Synthetic oligonucleotide
  Sense strand starting at position 1195 of SEQ ID NO: 1882375
ucugaaagaccuugcuuua

SEQ ID NO: 2116187 - RNA, 19 nt, Artificial Sequence
  Description of Artificial Sequence: Synthetic oligonucleotide
  Antisense strand to SEQ ID NO: 2116186
uaaagcaaggucuuucaga

SEQ ID NO: 2116188 - RNA, 19 nt, Artificial Sequence
  Description of Artificial Sequence: Synthetic oligonucleotide
  Sense strand starting at position 1347 of SEQ ID NO: 1882375
gagcuuuaagaguaggguu

SEQ ID NO: 2116189 - RNA, 19 nt, Artificial Sequence
  Description of Artificial Sequence: Synthetic oligonucleotide
  Antisense strand to SEQ ID NO: 2116188
aacccuacucuuaaagcuc

SEQ ID NO: 2116190 - RNA, 19 nt, Artificial Sequence
  Description of Artificial Sequence: Synthetic oligonucleotide
  Sense strand starting at position 1354 of SEQ ID NO: 1882375
aagaguaggguuuggguaa

SEQ ID NO: 2116191 - RNA, 19 nt, Artificial Sequence
  Description of Artificial Sequence: Synthetic oligonucleotide
  Antisense strand to SEQ ID NO: 2116190
uuacccaaacccuacucuu

SEQ ID NO: 2116192 - RNA, 19 nt, Artificial Sequence
  Description of Artificial Sequence: Synthetic oligonucleotide
  Sense strand starting at position 1368 of SEQ ID NO: 1882375
gguaauaucugcuucugag

SEQ ID NO: 2116193 - RNA, 19 nt, Artificial Sequence
  Description of Artificial Sequence: Synthetic oligonucleotide
  Antisense strand to SEQ ID NO: 2116192
cucagaagcagauauuacc

SEQ ID NO: 2116194 - RNA, 19 nt, Artificial Sequence
  Description of Artificial Sequence: Synthetic oligonucleotide
  Sense strand starting at position 1391 of SEQ ID NO: 1882375
guuucaggacuguggauau

SEQ ID NO: 2116195 - RNA, 19 nt, Artificial Sequence
  Description of Artificial Sequence: Synthetic oligonucleotide
  Antisense strand to SEQ ID NO: 2116194
auauccacaguccugaaac

SEQ ID NO: 2116196 - RNA, 19 nt, Artificial Sequence
  Description of Artificial Sequence: Synthetic oligonucleotide
  Sense strand starting at position 1471 of SEQ ID NO: 1882375
ggaacagacuugcucugua

SEQ ID NO: 2116197 - RNA, 19 nt, Artificial Sequence
  Description of Artificial Sequence: Synthetic oligonucleotide
  Antisense strand to SEQ ID NO: 2116196
uacagagcaagucuguucc

SEQ ID NO: 2116198 - RNA, 19 nt, Artificial Sequence
  Description of Artificial Sequence: Synthetic oligonucleotide
  Sense strand starting at position 1484 of SEQ ID NO: 1882375
ucuguauugcuccaaagag

SEQ ID NO: 2116199 - RNA, 19 nt, Artificial Sequence
  Description of Artificial Sequence: Synthetic oligonucleotide
  Antisense strand to SEQ ID NO: 2116198
cucuuuggagcaauacaga

SEQ ID NO: 2116200 - RNA, 19 nt, Artificial Sequence
  Description of Artificial Sequence: Synthetic oligonucleotide
  Sense strand starting at position 1512 of SEQ ID NO: 1882375
uugaaauuccaaugaggua

SEQ ID NO: 2116201 - RNA, 19 nt, Artificial Sequence
  Description of Artificial Sequence: Synthetic oligonucleotide
  Antisense strand to SEQ ID NO: 2116200
uaccucauuggaauuucaa

SEQ ID NO: 2116202 - RNA, 19 nt, Artificial Sequence
  Description of Artificial Sequence: Synthetic oligonucleotide
  Sense strand starting at position 1555 of SEQ ID NO: 1882375
aucugagcuguccaacaau

SEQ ID NO: 2116203 - RNA, 19 nt, Artificial Sequence
  Description of Artificial Sequence: Synthetic oligonucleotide
  Antisense strand to SEQ ID NO: 2116202
auuguuggacagcucagau

SEQ ID NO: 2116204 - RNA, 19 nt, Artificial Sequence
  Description of Artificial Sequence: Synthetic oligonucleotide
  Sense strand starting at position 1588 of SEQ ID NO: 1882375
gggcauuacucagcuacuu

SEQ ID NO: 2116205 - RNA, 19 nt, Artificial Sequence
  Description of Artificial Sequence: Synthetic oligonucleotide
  Antisense strand to SEQ ID NO: 2116204
aaguagcugaguaaugccc

SEQ ID NO: 2116206 - RNA, 19 nt, Artificial Sequence
  Description of Artificial Sequence: Synthetic oligonucleotide
  Sense strand starting at position 1600 of SEQ ID NO: 1882375
gcuacuugugcuccaccga

SEQ ID NO: 2116207 - RNA, 19 nt, Artificial Sequence
  Description of Artificial Sequence: Synthetic oligonucleotide
  Antisense strand to SEQ ID NO: 2116206
ucgguggagcacaaguagc

SEQ ID NO: 2116208 - RNA, 19 nt, Artificial Sequence
  Description of Artificial Sequence: Synthetic oligonucleotide
  Sense strand starting at position 1943 of SEQ ID NO: 1882375
uugaguucugaauguugag

SEQ ID NO: 2116209 - RNA, 19 nt, Artificial Sequence
  Description of Artificial Sequence: Synthetic oligonucleotide
  Antisense strand to SEQ ID NO: 2116208
cucaacauucagaacucaa

SEQ ID NO: 2116210 - RNA, 19 nt, Artificial Sequence
  Description of Artificial Sequence: Synthetic oligonucleotide
  Sense strand starting at position 1955 of SEQ ID NO: 1882375
uguugaggcuccucagauu

SEQ ID NO: 2116211 - RNA, 19 nt, Artificial Sequence
  Description of Artificial Sequence: Synthetic oligonucleotide
  Antisense strand to SEQ ID NO: 2116210
aaucugaggagccucaaca

SEQ ID NO: 2116212 - RNA, 19 nt, Artificial Sequence
  Description of Artificial Sequence: Synthetic oligonucleotide
  Sense strand starting at position 2043 of SEQ ID NO: 1882375
ugccauguauaugucauaa

SEQ ID NO: 2116213 - RNA, 19 nt, Artificial Sequence
  Description of Artificial Sequence: Synthetic oligonucleotide
  Antisense strand to SEQ ID NO: 2116212
uuaugacauauacauggca

SEQ ID NO: 2116214 - RNA, 19 nt, Artificial Sequence
  Description of Artificial Sequence: Synthetic oligonucleotide
  Sense strand starting at position 2356 of SEQ ID NO: 1882375
gugucucacucauugaguu

SEQ ID NO: 2116215 - RNA, 19 nt, Artificial Sequence
  Description of Artificial Sequence: Synthetic oligonucleotide
  Antisense strand to SEQ ID NO: 2116214
aacucaaugagugagacac

SEQ ID NO: 2116216 - RNA, 19 nt, Artificial Sequence
  Description of Artificial Sequence: Synthetic oligonucleotide
  Sense strand starting at position 2405 of SEQ ID NO: 1882375
accuaaauauuuggugaau

SEQ ID NO: 2116217 - RNA, 19 nt, Artificial Sequence
  Description of Artificial Sequence: Synthetic oligonucleotide
  Antisense strand to SEQ ID NO: 2116216
auucaccaaauauuuaggu

SEQ ID NO: 2116218 - RNA, 19 nt, Artificial Sequence
  Description of Artificial Sequence: Synthetic oligonucleotide
  Sense strand starting at position 2407 of SEQ ID NO: 1882375
cuaaauauuuggugaauga

SEQ ID NO: 2116219 - RNA, 19 nt, Artificial Sequence
  Description of Artificial Sequence: Synthetic oligonucleotide
  Antisense strand to SEQ ID NO: 2116218
ucauucaccaaauauuuag

SEQ ID NO: 2116220 - RNA, 19 nt, Artificial Sequence
  Description of Artificial Sequence: Synthetic oligonucleotide
  Sense strand starting at position 2432 of SEQ ID NO: 1882375
gauguagaaugaucaucug

SEQ ID NO: 2116221 - RNA, 19 nt, Artificial Sequence
  Description of Artificial Sequence: Synthetic oligonucleotide
  Antisense strand to SEQ ID NO: 2116220
cagaugaucauucuacauc

SEQ ID NO: 2116222 - RNA, 19 nt, Artificial Sequence
  Description of Artificial Sequence: Synthetic oligonucleotide
  Sense strand starting at position 2482 of SEQ ID NO: 1882375
gagucucuaccaugugaua

SEQ ID NO: 2116223 - RNA, 19 nt, Artificial Sequence
  Description of Artificial Sequence: Synthetic oligonucleotide
  Antisense strand to SEQ ID NO: 2116222
uaucacaugguagagacuc

SEQ ID NO: 2116224 - RNA, 19 nt, Artificial Sequence
  Description of Artificial Sequence: Synthetic oligonucleotide
  Sense strand starting at position 2491 of SEQ ID NO: 1882375
ccaugugauaggugcuuua

SEQ ID NO: 2116225 - RNA, 19 nt, Artificial Sequence
  Description of Artificial Sequence: Synthetic oligonucleotide
  Antisense strand to SEQ ID NO: 2116224
uaaagcaccuaucacaugg

SEQ ID NO: 2116226 - RNA, 19 nt, Artificial Sequence
  Description of Artificial Sequence: Synthetic oligonucleotide
  Sense strand starting at position 2494 of SEQ ID NO: 1882375
ugugauaggugcuuuaaau

SEQ ID NO: 2116227 - RNA, 19 nt, Artificial Sequence
  Description of Artificial Sequence: Synthetic oligonucleotide
  Antisense strand to SEQ ID NO: 2116226
auuuaaagcaccuaucaca

SEQ ID NO: 2116228 - RNA, 19 nt, Artificial Sequence
  Description of Artificial Sequence: Synthetic oligonucleotide
  Sense strand starting at position 2609 of SEQ ID NO: 1882375
uauuaagugcuuuguauga

SEQ ID NO: 2116229 - RNA, 19 nt, Artificial Sequence
  Description of Artificial Sequence: Synthetic oligonucleotide
  Antisense strand to SEQ ID NO: 2116228
ucauacaaagcacuuaaua

SEQ ID NO: 2116230 - RNA, 19 nt, Artificial Sequence
  Description of Artificial Sequence: Synthetic oligonucleotide
  Sense strand starting at position 2891 of SEQ ID NO: 1882375
caaaguaguagguaggauu

SEQ ID NO: 2116231 - RNA, 19 nt, Artificial Sequence
  Description of Artificial Sequence: Synthetic oligonucleotide
  Antisense strand to SEQ ID NO: 2116230
aauccuaccuacuacuuug

SEQ ID NO: 2116232 - RNA, 19 nt, Artificial Sequence
  Description of Artificial Sequence: Synthetic oligonucleotide
  Sense strand starting at position 3036 of SEQ ID NO: 1882375
augcaccauuucguugaua

SEQ ID NO: 2116233 - RNA, 19 nt, Artificial Sequence
  Description of Artificial Sequence: Synthetic oligonucleotide
  Antisense strand to SEQ ID NO: 2116232
uaucaacgaaauggugcau

SEQ ID NO: 2116234 - RNA, 19 nt, Artificial Sequence
  Description of Artificial Sequence: Synthetic oligonucleotide
  Sense strand starting at position 3038 of SEQ ID NO: 1882375
gcaccauuucguugauaag

SEQ ID NO: 2116235 - RNA, 19 nt, Artificial Sequence
  Description of Artificial Sequence: Synthetic oligonucleotide
  Antisense strand to SEQ ID NO: 2116234
cuuaucaacgaaauggugc

SEQ ID NO: 2116236 - RNA, 19 nt, Artificial Sequence
  Description of Artificial Sequence: Synthetic oligonucleotide
  Sense strand starting at position 3041 of SEQ ID NO: 1882375
ccauuucguugauaagaaa

SEQ ID NO: 2116237 - RNA, 19 nt, Artificial Sequence
  Description of Artificial Sequence: Synthetic oligonucleotide
  Antisense strand to SEQ ID NO: 2116236
uuucuuaucaacgaaaugg

SEQ ID NO: 2116238 - RNA, 19 nt, Artificial Sequence
  Description of Artificial Sequence: Synthetic oligonucleotide
  Sense strand starting at position 3232 of SEQ ID NO: 1882375
uguuguaguagaugaucuu

SEQ ID NO: 2116239 - RNA, 19 nt, Artificial Sequence
  Description of Artificial Sequence: Synthetic oligonucleotide
  Antisense strand to SEQ ID NO: 2116238
aagaucaucuacuacaaca

SEQ ID NO: 2116240 - RNA, 19 nt, Artificial Sequence
  Description of Artificial Sequence: Synthetic oligonucleotide
  Sense strand starting at position 3413 of SEQ ID NO: 1882375
aauugcaaccgaugugaca

SEQ ID NO: 2116241 - RNA, 19 nt, Artificial Sequence
  Description of Artificial Sequence: Synthetic oligonucleotide
  Antisense strand to SEQ ID NO: 2116240
ugucacaucgguugcaauu

SEQ ID NO: 2116242 - RNA, 19 nt, Artificial Sequence
  Description of Artificial Sequence: Synthetic oligonucleotide
  Sense strand starting at position 3787 of SEQ ID NO: 1882375
uaugcuuuggcacaaguca

SEQ ID NO: 2116243 - RNA, 19 nt, Artificial Sequence
  Description of Artificial Sequence: Synthetic oligonucleotide
  Antisense strand to SEQ ID NO: 2116242
ugacuugugccaaagcaua

SEQ ID NO: 2116244 - RNA, 19 nt, Artificial Sequence
  Description of Artificial Sequence: Synthetic oligonucleotide
  Sense strand starting at position 3935 of SEQ ID NO: 1882375
uaacuugaggaguauuguu

SEQ ID NO: 2116245 - RNA, 19 nt, Artificial Sequence
  Description of Artificial Sequence: Synthetic oligonucleotide
  Antisense strand to SEQ ID NO: 2116244
aacaauacuccucaaguua

SEQ ID NO: 2116246 - RNA, 19 nt, Artificial Sequence
  Description of Artificial Sequence: Synthetic oligonucleotide
  Sense strand starting at position 3940 of SEQ ID NO: 1882375
ugaggaguauuguucucaa

SEQ ID NO: 2116247 - RNA, 19 nt, Artificial Sequence
  Description of Artificial Sequence: Synthetic oligonucleotide
  Antisense strand to SEQ ID NO: 2116246
uugagaacaauacuccuca

SEQ ID NO: 2116248 - RNA, 19 nt, Artificial Sequence
  Description of Artificial Sequence: Synthetic oligonucleotide
  Sense strand starting at position 3943 of SEQ ID NO: 1882375
ggaguauuguucucaaaga

SEQ ID NO: 2116249 - RNA, 19 nt, Artificial Sequence
  Description of Artificial Sequence: Synthetic oligonucleotide
  Antisense strand to SEQ ID NO: 2116248
ucuuugagaacaauacucc

SEQ ID NO: 2116250 - RNA, 19 nt, Artificial Sequence
  Description of Artificial Sequence: Synthetic oligonucleotide
  Sense strand starting at position 3971 of SEQ ID NO: 1882375
gcugaaaucuauucuaagu

SEQ ID NO: 2116251 - RNA, 19 nt, Artificial Sequence
  Description of Artificial Sequence: Synthetic oligonucleotide
  Antisense strand to SEQ ID NO: 2116250
acuuagaauagauuucagc

SEQ ID NO: 2116252 - RNA, 19 nt, Artificial Sequence
  Description of Artificial Sequence: Synthetic oligonucleotide
  Sense strand starting at position 108 of SEQ ID NO: 1882376
gguuucuucagugagggag

SEQ ID NO: 2116253 - RNA, 19 nt, Artificial Sequence
  Description of Artificial Sequence: Synthetic oligonucleotide
  Antisense strand to SEQ ID NO: 2116252
cucccucacugaagaaacc

SEQ ID NO: 2116254 - RNA, 19 nt, Artificial Sequence
  Description of Artificial Sequence: Synthetic oligonucleotide
  Sense strand starting at position 292 of SEQ ID NO: 1882376
gaagaaucuguugagcagu

SEQ ID NO: 2116255 - RNA, 19 nt, Artificial Sequence
  Description of Artificial Sequence: Synthetic oligonucleotide
  Antisense strand to SEQ ID NO: 2116254
acugcucaacagauucuuc

SEQ ID NO: 2116256 - RNA, 19 nt, Artificial Sequence
  Description of Artificial Sequence: Synthetic oligonucleotide
  Sense strand starting at position 316 of SEQ ID NO: 1882376
ugaaauguaauacgagaug

SEQ ID NO: 2116257 - RNA, 19 nt, Artificial Sequence
  Description of Artificial Sequence: Synthetic oligonucleotide
  Antisense strand to SEQ ID NO: 2116256
caucucguauuacauuuca

SEQ ID NO: 2116258 - RNA, 19 nt, Artificial Sequence
  Description of Artificial Sequence: Synthetic oligonucleotide
  Sense strand starting at position 319 of SEQ ID NO: 1882376
aauguaauacgagauguac

SEQ ID NO: 2116259 - RNA, 19 nt, Artificial Sequence
  Description of Artificial Sequence: Synthetic oligonucleotide
  Antisense strand to SEQ ID NO: 2116258
guacaucucguauuacauu

SEQ ID NO: 2116260 - RNA, 19 nt, Artificial Sequence
  Description of Artificial Sequence: Synthetic oligonucleotide
  Sense strand starting at position 484 of SEQ ID NO: 1882376
auaggaaggccuugguuaa

SEQ ID NO: 2116261 - RNA, 19 nt, Artificial Sequence
  Description of Artificial Sequence: Synthetic oligonucleotide
  Antisense strand to SEQ ID NO: 2116260
uuaaccaaggccuuccuau

SEQ ID NO: 2116262 - RNA, 19 nt, Artificial Sequence
  Description of Artificial Sequence: Synthetic oligonucleotide
  Sense strand starting at position 595 of SEQ ID NO: 1882376
ucaguuagaucaucuauau

SEQ ID NO: 2116263 - RNA, 19 nt, Artificial Sequence
  Description of Artificial Sequence: Synthetic oligonucleotide
  Antisense strand to SEQ ID NO: 2116262
auauagaugaucuaacuga

SEQ ID NO: 2116264 - RNA, 19 nt, Artificial Sequence
  Description of Artificial Sequence: Synthetic oligonucleotide
  Sense strand starting at position 787 of SEQ ID NO: 1882376
uuguccuggguuuaacaua

SEQ ID NO: 2116265 - RNA, 19 nt, Artificial Sequence
  Description of Artificial Sequence: Synthetic oligonucleotide
  Antisense strand to SEQ ID NO: 2116264
uauguuaaacccaggacaa

SEQ ID NO: 2116266 - RNA, 19 nt, Artificial Sequence
  Description of Artificial Sequence: Synthetic oligonucleotide
  Sense strand starting at position 864 of SEQ ID NO: 1882376
aguaguuaugaguauguaa

SEQ ID NO: 2116267 - RNA, 19 nt, Artificial Sequence
  Description of Artificial Sequence: Synthetic oligonucleotide
  Antisense strand to SEQ ID NO: 2116266
uuacauacucauaacuacu

SEQ ID NO: 2116268 - RNA, 19 nt, Artificial Sequence
  Description of Artificial Sequence: Synthetic oligonucleotide
  Sense strand starting at position 1028 of SEQ ID NO: 1882376
agaagcagauucuuccaga

SEQ ID NO: 2116269 - RNA, 19 nt, Artificial Sequence
  Description of Artificial Sequence: Synthetic oligonucleotide
  Antisense strand to SEQ ID NO: 2116268
ucuggaagaaucugcuucu

SEQ ID NO: 2116270 - RNA, 19 nt, Artificial Sequence
  Description of Artificial Sequence: Synthetic oligonucleotide
  Sense strand starting at position 1074 of SEQ ID NO: 1882376
ugcaaaguaucccuaagga

SEQ ID NO: 2116271 - RNA, 19 nt, Artificial Sequence
  Description of Artificial Sequence: Synthetic oligonucleotide
  Antisense strand to SEQ ID NO: 2116270
uccuuagggauacuuugca

SEQ ID NO: 2116272 - RNA, 19 nt, Artificial Sequence
  Description of Artificial Sequence: Synthetic oligonucleotide
  Sense strand starting at position 1172 of SEQ ID NO: 1882376
gcuaauuagcaauguauuu

SEQ ID NO: 2116273 - RNA, 19 nt, Artificial Sequence
  Description of Artificial Sequence: Synthetic oligonucleotide
  Antisense strand to SEQ ID NO: 2116272
aaauacauugcuaauuagc

SEQ ID NO: 2116274 - RNA, 19 nt, Artificial Sequence
  Description of Artificial Sequence: Synthetic oligonucleotide
  Sense strand starting at position 1181 of SEQ ID NO: 1882376
caauguauuugagauggaa

SEQ ID NO: 2116275 - RNA, 19 nt, Artificial Sequence
  Description of Artificial Sequence: Synthetic oligonucleotide
  Antisense strand to SEQ ID NO: 2116274
uuccaucucaaauacauug

SEQ ID NO: 2116276 - RNA, 19 nt, Artificial Sequence
  Description of Artificial Sequence: Synthetic oligonucleotide
  Sense strand starting at position 1289 of SEQ ID NO: 1882376
agaacuggucaauauugca

SEQ ID NO: 2116277 - RNA, 19 nt, Artificial Sequence
  Description of Artificial Sequence: Synthetic oligonucleotide
  Antisense strand to SEQ ID NO: 2116276
ugcaauauugaccaguucu

SEQ ID NO: 2116278 - RNA, 19 nt, Artificial Sequence
  Description of Artificial Sequence: Synthetic oligonucleotide
  Sense strand starting at position 1297 of SEQ ID NO: 1882376
ucaauauugcaugaugacu

SEQ ID NO: 2116279 - RNA, 19 nt, Artificial Sequence
  Description of Artificial Sequence: Synthetic oligonucleotide
  Antisense strand to SEQ ID NO: 2116278
agucaucaugcaauauuga

SEQ ID NO: 2116280 - RNA, 19 nt, Artificial Sequence
  Description of Artificial Sequence: Synthetic oligonucleotide
  Sense strand starting at position 1332 of SEQ ID NO: 1882376
gauuuagguuuccaggaaa

SEQ ID NO: 2116281 - RNA, 19 nt, Artificial Sequence
  Description of Artificial Sequence: Synthetic oligonucleotide
  Antisense strand to SEQ ID NO: 2116280
uuuccuggaaaccuaaauc

SEQ ID NO: 2116282 - RNA, 19 nt, Artificial Sequence
  Description of Artificial Sequence: Synthetic oligonucleotide
  Sense strand starting at position 1381 of SEQ ID NO: 1882376
gcaagaaauccguauuauu

SEQ ID NO: 2116283 - RNA, 19 nt, Artificial Sequence
  Description of Artificial Sequence: Synthetic oligonucleotide
  Antisense strand to SEQ ID NO: 2116282
aauaauacggauuucuugc

SEQ ID NO: 2116284 - RNA, 19 nt, Artificial Sequence
  Description of Artificial Sequence: Synthetic oligonucleotide
  Sense strand starting at position 1505 of SEQ ID NO: 1882376
uguuguaauuuauugcaga

SEQ ID NO: 2116285 - RNA, 19 nt, Artificial Sequence
  Description of Artificial Sequence: Synthetic oligonucleotide
  Antisense strand to SEQ ID NO: 2116284
ucugcaauaaauuacaaca

SEQ ID NO: 2116286 - RNA, 19 nt, Artificial Sequence
  Description of Artificial Sequence: Synthetic oligonucleotide
  Sense strand starting at position 1573 of SEQ ID NO: 1882376
acaacuuauguuuggaaac

SEQ ID NO: 2116287 - RNA, 19 nt, Artificial Sequence
  Description of Artificial Sequence: Synthetic oligonucleotide
  Antisense strand to SEQ ID NO: 2116286
guuuccaaacauaaguugu

SEQ ID NO: 2116288 - RNA, 19 nt, Artificial Sequence
  Description of Artificial Sequence: Synthetic oligonucleotide
  Sense strand starting at position 1599 of SEQ ID NO: 1882376
aauaauaguugguuuggga

SEQ ID NO: 2116289 - RNA, 19 nt, Artificial Sequence
  Description of Artificial Sequence: Synthetic oligonucleotide
  Antisense strand to SEQ ID NO: 2116288
ucccaaaccaacuauuauu

SEQ ID NO: 2116290 - RNA, 19 nt, Artificial Sequence
  Description of Artificial Sequence: Synthetic oligonucleotide
  Sense strand starting at position 1647 of SEQ ID NO: 1882376
uuaggagcuuucuuaauaa

SEQ ID NO: 2116291 - RNA, 19 nt, Artificial Sequence
  Description of Artificial Sequence: Synthetic oligonucleotide
  Antisense strand to SEQ ID NO: 2116290
uuauuaagaaagcuccuaa

SEQ ID NO: 2116292 - RNA, 19 nt, Artificial Sequence
  Description of Artificial Sequence: Synthetic oligonucleotide
  Sense strand starting at position 1899 of SEQ ID NO: 1882376
gagagaaugucugauuuac

SEQ ID NO: 2116293 - RNA, 19 nt, Artificial Sequence
  Description of Artificial Sequence: Synthetic oligonucleotide
  Antisense strand to SEQ ID NO: 2116292
guaaaucagacauucucuc

SEQ ID NO: 2116294 - RNA, 19 nt, Artificial Sequence
  Description of Artificial Sequence: Synthetic oligonucleotide
  Sense strand starting at position 2038 of SEQ ID NO: 1882376
uuacuaugugagggaugga

SEQ ID NO: 2116295 - RNA, 19 nt, Artificial Sequence
  Description of Artificial Sequence: Synthetic oligonucleotide
  Antisense strand to SEQ ID NO: 2116294
uccaucccucacauaguaa

SEQ ID NO: 2116296 - RNA, 19 nt, Artificial Sequence
  Description of Artificial Sequence: Synthetic oligonucleotide
  Sense strand starting at position 2041 of SEQ ID NO: 1882376
cuaugugagggauggaauu

SEQ ID NO: 2116297 - RNA, 19 nt, Artificial Sequence
  Description of Artificial Sequence: Synthetic oligonucleotide
  Antisense strand to SEQ ID NO: 2116296
aauuccaucccucacauag

SEQ ID NO: 2116298 - RNA, 19 nt, Artificial Sequence
  Description of Artificial Sequence: Synthetic oligonucleotide
  Sense strand starting at position 2177 of SEQ ID NO: 1882376
agauuuccugcuugcauca

SEQ ID NO: 2116299 - RNA, 19 nt, Artificial Sequence
  Description of Artificial Sequence: Synthetic oligonucleotide
  Antisense strand to SEQ ID NO: 2116298
ugaugcaagcaggaaaucu

SEQ ID NO: 2116300 - RNA, 19 nt, Artificial Sequence
  Description of Artificial Sequence: Synthetic oligonucleotide
  Sense strand starting at position 2504 of SEQ ID NO: 1882376
cuguuauuagcggcuuacu

SEQ ID NO: 2116301 - RNA, 19 nt, Artificial Sequence
  Description of Artificial Sequence: Synthetic oligonucleotide
  Antisense strand to SEQ ID NO: 2116300
aguaagccgcuaauaacag

SEQ ID NO: 2116302 - RNA, 19 nt, Artificial Sequence
  Description of Artificial Sequence: Synthetic oligonucleotide
  Sense strand starting at position 2637 of SEQ ID NO: 1882376
guuggacuuugacucuaga

SEQ ID NO: 2116303 - RNA, 19 nt, Artificial Sequence
  Description of Artificial Sequence: Synthetic oligonucleotide
  Antisense strand to SEQ ID NO: 2116302
ucuagagucaaaguccaac

SEQ ID NO: 2116304 - RNA, 19 nt, Artificial Sequence
  Description of Artificial Sequence: Synthetic oligonucleotide
  Sense strand starting at position 2670 of SEQ ID NO: 1882376
uguauugauguccacagac

SEQ ID NO: 2116305 - RNA, 19 nt, Artificial Sequence
  Description of Artificial Sequence: Synthetic oligonucleotide
  Antisense strand to SEQ ID NO: 2116304
gucuguggacaucaauaca

SEQ ID NO: 2116306 - RNA, 19 nt, Artificial Sequence
  Description of Artificial Sequence: Synthetic oligonucleotide
  Sense strand starting at position 2773 of SEQ ID NO: 1882376
aauaguacggaaugguaua

SEQ ID NO: 2116307 - RNA, 19 nt, Artificial Sequence
  Description of Artificial Sequence: Synthetic oligonucleotide
  Antisense strand to SEQ ID NO: 2116306
uauaccauuccguacuauu

SEQ ID NO: 2116308 - RNA, 19 nt, Artificial Sequence
  Description of Artificial Sequence: Synthetic oligonucleotide
  Sense strand starting at position 2778 of SEQ ID NO: 1882376
uacggaaugguauagcaga

SEQ ID NO: 2116309 - RNA, 19 nt, Artificial Sequence
  Description of Artificial Sequence: Synthetic oligonucleotide
  Antisense strand to SEQ ID NO: 2116308
ucugcuauaccauuccgua

SEQ ID NO: 2116310 - RNA, 19 nt, Artificial Sequence
  Description of Artificial Sequence: Synthetic oligonucleotide
  Sense strand starting at position 2783 of SEQ ID NO: 1882376
aaugguauagcagaaaguu

SEQ ID NO: 2116311 - RNA, 19 nt, Artificial Sequence
  Description of Artificial Sequence: Synthetic oligonucleotide
  Antisense strand to SEQ ID NO: 2116310
aacuuucugcuauaccauu

SEQ ID NO: 2116312 - RNA, 19 nt, Artificial Sequence
  Description of Artificial Sequence: Synthetic oligonucleotide
  Sense strand starting at position 2814 of SEQ ID NO: 1882376
aaaugagugguuuaagugu

SEQ ID NO: 2116313 - RNA, 19 nt, Artificial Sequence
  Description of Artificial Sequence: Synthetic oligonucleotide
  Antisense strand to SEQ ID NO: 2116312
acacuuaaaccacucauuu

SEQ ID NO: 2116314 - RNA, 19 nt, Artificial Sequence
  Description of Artificial Sequence: Synthetic oligonucleotide
  Sense strand starting at position 2830 of SEQ ID NO: 1882376
uguuguuuaccagaaacaa

SEQ ID NO: 2116315 - RNA, 19 nt, Artificial Sequence
  Description of Artificial Sequence: Synthetic oligonucleotide
  Antisense strand to SEQ ID NO: 2116314
uuguuucugguaaacaaca

SEQ ID NO: 2116316 - RNA, 19 nt, Artificial Sequence
  Description of Artificial Sequence: Synthetic oligonucleotide
  Sense strand starting at position 2934 of SEQ ID NO: 1882376
gaguuugagaucugguaag

SEQ ID NO: 2116317 - RNA, 19 nt, Artificial Sequence
  Description of Artificial Sequence: Synthetic oligonucleotide
  Antisense strand to SEQ ID NO: 2116316
cuuaccagaucucaaacuc

SEQ ID NO: 2116318 - RNA, 19 nt, Artificial Sequence
  Description of Artificial Sequence: Synthetic oligonucleotide
  Sense strand starting at position 3075 of SEQ ID NO: 1882376
aaggaaagguuacuuguaa

SEQ ID NO: 2116319 - RNA, 19 nt, Artificial Sequence
  Description of Artificial Sequence: Synthetic oligonucleotide
  Antisense strand to SEQ ID NO: 2116318
uuacaaguaaccuuuccuu

SEQ ID NO: 2116320 - RNA, 19 nt, Artificial Sequence
  Description of Artificial Sequence: Synthetic oligonucleotide
  Sense strand starting at position 3076 of SEQ ID NO: 1882376
aggaaagguuacuuguaau

SEQ ID NO: 2116321 - RNA, 19 nt, Artificial Sequence
  Description of Artificial Sequence: Synthetic oligonucleotide
  Antisense strand to SEQ ID NO: 2116320
auuacaaguaaccuuuccu

SEQ ID NO: 2116322 - RNA, 19 nt, Artificial Sequence
  Description of Artificial Sequence: Synthetic oligonucleotide
  Sense strand starting at position 3082 of SEQ ID NO: 1882376
gguuacuuguaaucaauga

SEQ ID NO: 2116323 - RNA, 19 nt, Artificial Sequence
  Description of Artificial Sequence: Synthetic oligonucleotide
  Antisense strand to SEQ ID NO: 2116322
ucauugauuacaaguaacc

SEQ ID NO: 2116324 - RNA, 19 nt, Artificial Sequence
  Description of Artificial Sequence: Synthetic oligonucleotide
  Sense strand starting at position 3114 of SEQ ID NO: 1882376
uuugaaaugcuuuaggauu

SEQ ID NO: 2116325 - RNA, 19 nt, Artificial Sequence
  Description of Artificial Sequence: Synthetic oligonucleotide
  Antisense strand to SEQ ID NO: 2116324
aauccuaaagcauuucaaa

SEQ ID NO: 2116326 - RNA, 19 nt, Artificial Sequence
  Description of Artificial Sequence: Synthetic oligonucleotide
  Sense strand starting at position 3126 of SEQ ID NO: 1882376
uaggauuguguggaauacu

SEQ ID NO: 2116327 - RNA, 19 nt, Artificial Sequence
  Description of Artificial Sequence: Synthetic oligonucleotide
  Antisense strand to SEQ ID NO: 2116326
aguauuccacacaauccua

SEQ ID NO: 2116328 - RNA, 19 nt, Artificial Sequence
  Description of Artificial Sequence: Synthetic oligonucleotide
  Sense strand starting at position 3894 of SEQ ID NO: 1882376
guuauauaugaauaugguc

SEQ ID NO: 2116329 - RNA, 19 nt, Artificial Sequence
  Description of Artificial Sequence: Synthetic oligonucleotide
  Antisense strand to SEQ ID NO: 2116328
gaccauauucauauauaac

SEQ ID NO: 2116330 - RNA, 19 nt, Artificial Sequence
  Description of Artificial Sequence: Synthetic oligonucleotide
  Sense strand starting at position 3950 of SEQ ID NO: 1882376
guuaaugguggguaauuga

SEQ ID NO: 2116331 - RNA, 19 nt, Artificial Sequence
  Description of Artificial Sequence: Synthetic oligonucleotide
  Antisense strand to SEQ ID NO: 2116330
ucaauuacccaccauuaac

SEQ ID NO: 2116332 - RNA, 19 nt, Artificial Sequence
  Description of Artificial Sequence: Synthetic oligonucleotide
  Sense strand starting at position 77 of SEQ ID NO: 1882377
gugaauauuacaugguaag

SEQ ID NO: 2116333 - RNA, 19 nt, Artificial Sequence
  Description of Artificial Sequence: Synthetic oligonucleotide
  Antisense strand to SEQ ID NO: 2116332
cuuaccauguaauauucac

SEQ ID NO: 2116334 - RNA, 19 nt, Artificial Sequence
  Description of Artificial Sequence: Synthetic oligonucleotide
  Sense strand starting at position 242 of SEQ ID NO: 1882377
uuuagucuccuagaguuuc

SEQ ID NO: 2116335 - RNA, 19 nt, Artificial Sequence
  Description of Artificial Sequence: Synthetic oligonucleotide
  Antisense strand to SEQ ID NO: 2116334
gaaacucuaggagacuaaa

SEQ ID NO: 2116336 - RNA, 19 nt, Artificial Sequence
  Description of Artificial Sequence: Synthetic oligonucleotide
  Sense strand starting at position 354 of SEQ ID NO: 1882377
acagaauauuugcaacaug

SEQ ID NO: 2116337 - RNA, 19 nt, Artificial Sequence
  Description of Artificial Sequence: Synthetic oligonucleotide
  Antisense strand to SEQ ID NO: 2116336
cauguugcaaauauucugu

SEQ ID NO: 2116338 - RNA, 19 nt, Artificial Sequence
  Description of Artificial Sequence: Synthetic oligonucleotide
  Sense strand starting at position 555 of SEQ ID NO: 1882377
gcauauggccaccaucuua

SEQ ID NO: 2116339 - RNA, 19 nt, Artificial Sequence
  Description of Artificial Sequence: Synthetic oligonucleotide
  Antisense strand to SEQ ID NO: 2116338
uaagaugguggccauaugc

SEQ ID NO: 2116340 - RNA, 19 nt, Artificial Sequence
  Description of Artificial Sequence: Synthetic oligonucleotide
  Sense strand starting at position 580 of SEQ ID NO: 1882377
ucacaugacuucuuuguga

SEQ ID NO: 2116341 - RNA, 19 nt, Artificial Sequence
  Description of Artificial Sequence: Synthetic oligonucleotide
  Antisense strand to SEQ ID NO: 2116340
ucacaaagaagucauguga

SEQ ID NO: 2116342 - RNA, 19 nt, Artificial Sequence
  Description of Artificial Sequence: Synthetic oligonucleotide
  Sense strand starting at position 582 of SEQ ID NO: 1882377
acaugacuucuuugugagg

SEQ ID NO: 2116343 - RNA, 19 nt, Artificial Sequence
  Description of Artificial Sequence: Synthetic oligonucleotide
  Antisense strand to SEQ ID NO: 2116342
ccucacaaagaagucaugu

SEQ ID NO: 2116344 - RNA, 19 nt, Artificial Sequence
  Description of Artificial Sequence: Synthetic oligonucleotide
  Sense strand starting at position 990 of SEQ ID NO: 1882377
acaaguuuagggugaauaa

SEQ ID NO: 2116345 - RNA, 19 nt, Artificial Sequence
  Description of Artificial Sequence: Synthetic oligonucleotide
  Antisense strand to SEQ ID NO: 2116344
uuauucacccuaaacuugu

SEQ ID NO: 2116346 - RNA, 19 nt, Artificial Sequence
  Description of Artificial Sequence: Synthetic oligonucleotide
  Sense strand starting at position 999 of SEQ ID NO: 1882377
gggugaauaaauggucaua

SEQ ID NO: 2116347 - RNA, 19 nt, Artificial Sequence
  Description of Artificial Sequence: Synthetic oligonucleotide
  Antisense strand to SEQ ID NO: 2116346
uaugaccauuuauucaccc

SEQ ID NO: 2116348 - RNA, 19 nt, Artificial Sequence
  Description of Artificial Sequence: Synthetic oligonucleotide
  Sense strand starting at position 1001 of SEQ ID NO: 1882377
gugaauaaauggucauaua

SEQ ID NO: 2116349 - RNA, 19 nt, Artificial Sequence
  Description of Artificial Sequence: Synthetic oligonucleotide
  Antisense strand to SEQ ID NO: 2116348
uauaugaccauuuauucac

SEQ ID NO: 2116350 - RNA, 19 nt, Artificial Sequence
  Description of Artificial Sequence: Synthetic oligonucleotide
  Sense strand starting at position 1373 of SEQ ID NO: 1882377
uuuacaacgugauuaacau

SEQ ID NO: 2116351 - RNA, 19 nt, Artificial Sequence
  Description of Artificial Sequence: Synthetic oligonucleotide
  Antisense strand to SEQ ID NO: 2116350
auguuaaucacguuguaaa

SEQ ID NO: 2116352 - RNA, 19 nt, Artificial Sequence
  Description of Artificial Sequence: Synthetic oligonucleotide
  Sense strand starting at position 1374 of SEQ ID NO: 1882377
uuacaacgugauuaacauu

SEQ ID NO: 2116353 - RNA, 19 nt, Artificial Sequence
  Description of Artificial Sequence: Synthetic oligonucleotide
  Antisense strand to SEQ ID NO: 2116352
aauguuaaucacguuguaa

SEQ ID NO: 2116354 - RNA, 19 nt, Artificial Sequence
  Description of Artificial Sequence: Synthetic oligonucleotide
  Sense strand starting at position 1517 of SEQ ID NO: 1882377
gucucaaaugcaugaauaa

SEQ ID NO: 2116355 - RNA, 19 nt, Artificial Sequence
  Description of Artificial Sequence: Synthetic oligonucleotide
  Antisense strand to SEQ ID NO: 2116354
uuauucaugcauuugagac

SEQ ID NO: 2116356 - RNA, 19 nt, Artificial Sequence
  Description of Artificial Sequence: Synthetic oligonucleotide
  Sense strand starting at position 1630 of SEQ ID NO: 1882377
ggugcaucugaacaaauau

SEQ ID NO: 2116357 - RNA, 19 nt, Artificial Sequence
  Description of Artificial Sequence: Synthetic oligonucleotide
  Antisense strand to SEQ ID NO: 2116356
auauuuguucagaugcacc

SEQ ID NO: 2116358 - RNA, 19 nt, Artificial Sequence
  Description of Artificial Sequence: Synthetic oligonucleotide
  Sense strand starting at position 1866 of SEQ ID NO: 1882377
uuccaugaagaauguuaua

SEQ ID NO: 2116359 - RNA, 19 nt, Artificial Sequence
  Description of Artificial Sequence: Synthetic oligonucleotide
  Antisense strand to SEQ ID NO: 2116358
uauaacauucuucauggaa

SEQ ID NO: 2116360 - RNA, 19 nt, Artificial Sequence
  Description of Artificial Sequence: Synthetic oligonucleotide
  Sense strand starting at position 2038 of SEQ ID NO: 1882377
guauguaaucgggugugcu

SEQ ID NO: 2116361 - RNA, 19 nt, Artificial Sequence
  Description of Artificial Sequence: Synthetic oligonucleotide
  Antisense strand to SEQ ID NO: 2116360
agcacacccgauuacauac

SEQ ID NO: 2116362 - RNA, 19 nt, Artificial Sequence
  Description of Artificial Sequence: Synthetic oligonucleotide
  Sense strand starting at position 2063 of SEQ ID NO: 1882377
gauucuaacgguuauacug

SEQ ID NO: 2116363 - RNA, 19 nt, Artificial Sequence
  Description of Artificial Sequence: Synthetic oligonucleotide
  Antisense strand to SEQ ID NO: 2116362
caguauaaccguuagaauc

SEQ ID NO: 2116364 - RNA, 19 nt, Artificial Sequence
  Description of Artificial Sequence: Synthetic oligonucleotide
  Sense strand starting at position 2169 of SEQ ID NO: 1882377
uccuguuauccagggauug

SEQ ID NO: 2116365 - RNA, 19 nt, Artificial Sequence
  Description of Artificial Sequence: Synthetic oligonucleotide
  Antisense strand to SEQ ID NO: 2116364
caaucccuggauaacagga

SEQ ID NO: 2116366 - RNA, 19 nt, Artificial Sequence
  Description of Artificial Sequence: Synthetic oligonucleotide
  Sense strand starting at position 2171 of SEQ ID NO: 1882377
cuguuauccagggauuguc

SEQ ID NO: 2116367 - RNA, 19 nt, Artificial Sequence
  Description of Artificial Sequence: Synthetic oligonucleotide
  Antisense strand to SEQ ID NO: 2116366
gacaaucccuggauaacag

SEQ ID NO: 2116368 - RNA, 19 nt, Artificial Sequence
  Description of Artificial Sequence: Synthetic oligonucleotide
  Sense strand starting at position 2221 of SEQ ID NO: 1882377
acagaaggcuauuccuuaa

SEQ ID NO: 2116369 - RNA, 19 nt, Artificial Sequence
  Description of Artificial Sequence: Synthetic oligonucleotide
  Antisense strand to SEQ ID NO: 2116368
uuaaggaauagccuucugu

SEQ ID NO: 2116370 - RNA, 19 nt, Artificial Sequence
  Description of Artificial Sequence: Synthetic oligonucleotide
  Sense strand starting at position 2274 of SEQ ID NO: 1882377
ugugccauccuagaaacaa

SEQ ID NO: 2116371 - RNA, 19 nt, Artificial Sequence
  Description of Artificial Sequence: Synthetic oligonucleotide
  Antisense strand to SEQ ID NO: 2116370
uuguuucuaggauggcaca

SEQ ID NO: 2116372 - RNA, 19 nt, Artificial Sequence
  Description of Artificial Sequence: Synthetic oligonucleotide
  Sense strand starting at position 2407 of SEQ ID NO: 1882377
aagggaagaucacagaaau

SEQ ID NO: 2116373 - RNA, 19 nt, Artificial Sequence
  Description of Artificial Sequence: Synthetic oligonucleotide
  Antisense strand to SEQ ID NO: 2116372
auuucugugaucuucccuu

SEQ ID NO: 2116374 - RNA, 19 nt, Artificial Sequence
  Description of Artificial Sequence: Synthetic oligonucleotide
  Sense strand starting at position 2426 of SEQ ID NO: 1882377
gcuagaaugauguauccug

SEQ ID NO: 2116375 - RNA, 19 nt, Artificial Sequence
  Description of Artificial Sequence: Synthetic oligonucleotide
  Antisense strand to SEQ ID NO: 2116374
caggauacaucauucuagc

SEQ ID NO: 2116376 - RNA, 19 nt, Artificial Sequence
  Description of Artificial Sequence: Synthetic oligonucleotide
  Sense strand starting at position 2445 of SEQ ID NO: 1882377
gcaugugggauugggagaa

SEQ ID NO: 2116377 - RNA, 19 nt, Artificial Sequence
  Description of Artificial Sequence: Synthetic oligonucleotide
  Antisense strand to SEQ ID NO: 2116376
uucucccaaucccacaugc

SEQ ID NO: 2116378 - RNA, 19 nt, Artificial Sequence
  Description of Artificial Sequence: Synthetic oligonucleotide
  Sense strand starting at position 2716 of SEQ ID NO: 1882377
cagugaaagucccuggacu

SEQ ID NO: 2116379 - RNA, 19 nt, Artificial Sequence
  Description of Artificial Sequence: Synthetic oligonucleotide
  Antisense strand to SEQ ID NO: 2116378
aguccagggacuuucacug

SEQ ID NO: 2116380 - RNA, 19 nt, Artificial Sequence
  Description of Artificial Sequence: Synthetic oligonucleotide
  Sense strand starting at position 2717 of SEQ ID NO: 1882377
agugaaagucccuggacuu

SEQ ID NO: 2116381 - RNA, 19 nt, Artificial Sequence
  Description of Artificial Sequence: Synthetic oligonucleotide
  Antisense strand to SEQ ID NO: 2116380
aaguccagggacuuucacu

SEQ ID NO: 2116382 - RNA, 19 nt, Artificial Sequence
  Description of Artificial Sequence: Synthetic oligonucleotide
  Sense strand starting at position 2738 of SEQ ID NO: 1882377
augucaucucaucauuguu

SEQ ID NO: 2116383 - RNA, 19 nt, Artificial Sequence
  Description of Artificial Sequence: Synthetic oligonucleotide
  Antisense strand to SEQ ID NO: 2116382
aacaaugaugagaugacau

SEQ ID NO: 2116384 - RNA, 19 nt, Artificial Sequence
  Description of Artificial Sequence: Synthetic oligonucleotide
  Sense strand starting at position 2758 of SEQ ID NO: 1882377
ucauuaaagcgagagguaa

SEQ ID NO: 2116385 - RNA, 19 nt, Artificial Sequence
  Description of Artificial Sequence: Synthetic oligonucleotide
  Antisense strand to SEQ ID NO: 2116384
uuaccucucgcuuuaauga

SEQ ID NO: 2116386 - RNA, 19 nt, Artificial Sequence
  Description of Artificial Sequence: Synthetic oligonucleotide
  Sense strand starting at position 2776 of SEQ ID NO: 1882377
acugguagucuuugaaaua

SEQ ID NO: 2116387 - RNA, 19 nt, Artificial Sequence
  Description of Artificial Sequence: Synthetic oligonucleotide
  Antisense strand to SEQ ID NO: 2116386
uauuucaaagacuaccagu

SEQ ID NO: 2116388 - RNA, 19 nt, Artificial Sequence
  Description of Artificial Sequence: Synthetic oligonucleotide
  Sense strand starting at position 3031 of SEQ ID NO: 1882377
guacucucgccucaagaaa

SEQ ID NO: 2116389 - RNA, 19 nt, Artificial Sequence
  Description of Artificial Sequence: Synthetic oligonucleotide
  Antisense strand to SEQ ID NO: 2116388
uuucuugaggcgagaguac

SEQ ID NO: 2116390 - RNA, 19 nt, Artificial Sequence
  Description of Artificial Sequence: Synthetic oligonucleotide
  Sense strand starting at position 3047 of SEQ ID NO: 1882377
aaaguuauagugcaaugua

SEQ ID NO: 2116391 - RNA, 19 nt, Artificial Sequence
  Description of Artificial Sequence: Synthetic oligonucleotide
  Antisense strand to SEQ ID NO: 2116390
uacauugcacuauaacuuu

SEQ ID NO: 2116392 - RNA, 19 nt, Artificial Sequence
  Description of Artificial Sequence: Synthetic oligonucleotide
  Sense strand starting at position 3211 of SEQ ID NO: 1882377
gugucacuuguggaauaau

SEQ ID NO: 2116393 - RNA, 19 nt, Artificial Sequence
  Description of Artificial Sequence: Synthetic oligonucleotide
  Antisense strand to SEQ ID NO: 2116392
auuauuccacaagugacac

SEQ ID NO: 2116394 - RNA, 19 nt, Artificial Sequence
  Description of Artificial Sequence: Synthetic oligonucleotide
  Sense strand starting at position 3219 of SEQ ID NO: 1882377
uguggaauaaugugagaca

SEQ ID NO: 2116395 - RNA, 19 nt, Artificial Sequence
  Description of Artificial Sequence: Synthetic oligonucleotide
  Antisense strand to SEQ ID NO: 2116394
ugucucacauuauuccaca

SEQ ID NO: 2116396 - RNA, 19 nt, Artificial Sequence
  Description of Artificial Sequence: Synthetic oligonucleotide
  Sense strand starting at position 3222 of SEQ ID NO: 1882377
ggaauaaugugagacauuu

SEQ ID NO: 2116397 - RNA, 19 nt, Artificial Sequence
  Description of Artificial Sequence: Synthetic oligonucleotide
  Antisense strand to SEQ ID NO: 2116396
aaaugucucacauuauucc

SEQ ID NO: 2116398 - RNA, 19 nt, Artificial Sequence
  Description of Artificial Sequence: Synthetic oligonucleotide
  Sense strand starting at position 3330 of SEQ ID NO: 1882377
auguauuuguaugcuucua

SEQ ID NO: 2116399 - RNA, 19 nt, Artificial Sequence
  Description of Artificial Sequence: Synthetic oligonucleotide
  Antisense strand to SEQ ID NO: 2116398
uagaagcauacaaauacau

SEQ ID NO: 2116400 - RNA, 19 nt, Artificial Sequence
  Description of Artificial Sequence: Synthetic oligonucleotide
  Sense strand starting at position 3533 of SEQ ID NO: 1882377
auaaaugugcauugaagag

SEQ ID NO: 2116401 - RNA, 19 nt, Artificial Sequence
  Description of Artificial Sequence: Synthetic oligonucleotide
  Antisense strand to SEQ ID NO: 2116400
cucuucaaugcacauuuau

SEQ ID NO: 2116402 - RNA, 19 nt, Artificial Sequence
  Description of Artificial Sequence: Synthetic oligonucleotide
  Sense strand starting at position 3654 of SEQ ID NO: 1882377
uucugucaucuccagaugu

SEQ ID NO: 2116403 - RNA, 19 nt, Artificial Sequence
  Description of Artificial Sequence: Synthetic oligonucleotide
  Antisense strand to SEQ ID NO: 2116402
acaucuggagaugacagaa

SEQ ID NO: 2116404 - RNA, 19 nt, Artificial Sequence
  Description of Artificial Sequence: Synthetic oligonucleotide
  Sense strand starting at position 3656 of SEQ ID NO: 1882377
cugucaucuccagauguag

SEQ ID NO: 2116405 - RNA, 19 nt, Artificial Sequence
  Description of Artificial Sequence: Synthetic oligonucleotide
  Antisense strand to SEQ ID NO: 2116404
cuacaucuggagaugacag

SEQ ID NO: 2116406 - RNA, 19 nt, Artificial Sequence
  Description of Artificial Sequence: Synthetic oligonucleotide
  Sense strand starting at position 3707 of SEQ ID NO: 1882377
uugagaagucugggucauc

SEQ ID NO: 2116407 - RNA, 19 nt, Artificial Sequence
  Description of Artificial Sequence: Synthetic oligonucleotide
  Antisense strand to SEQ ID NO: 2116406
gaugacccagacuucucaa

SEQ ID NO: 2116408 - RNA, 19 nt, Artificial Sequence
  Description of Artificial Sequence: Synthetic oligonucleotide
  Sense strand starting at position 3759 of SEQ ID NO: 1882377
uugaguguuccauggaaac

SEQ ID NO: 2116409 - RNA, 19 nt, Artificial Sequence
  Description of Artificial Sequence: Synthetic oligonucleotide
  Antisense strand to SEQ ID NO: 2116408
guuuccauggaacacucaa

SEQ ID NO: 2116410 - RNA, 19 nt, Artificial Sequence
  Description of Artificial Sequence: Synthetic oligonucleotide
  Sense strand starting at position 3892 of SEQ ID NO: 1882377
ucucaugaauugguaagau

SEQ ID NO: 2116411 - RNA, 19 nt, Artificial Sequence
  Description of Artificial Sequence: Synthetic oligonucleotide
  Antisense strand to SEQ ID NO: 2116410
aucuuaccaauucaugaga

SEQ ID NO: 2116412 - RNA, 19 nt, Artificial Sequence
  Description of Artificial Sequence: Synthetic oligonucleotide
  Sense strand starting at position 162 of SEQ ID NO: 1882378
agaggauuaacagguguag

SEQ ID NO: 2116413 - RNA, 19 nt, Artificial Sequence
  Description of Artificial Sequence: Synthetic oligonucleotide
  Antisense strand to SEQ ID NO: 2116412
cuacaccuguuaauccucu

SEQ ID NO: 2116414 - RNA, 19 nt, Artificial Sequence
  Description of Artificial Sequence: Synthetic oligonucleotide
  Sense strand starting at position 164 of SEQ ID NO: 1882378
aggauuaacagguguaguc

SEQ ID NO: 2116415 - RNA, 19 nt, Artificial Sequence
  Description of Artificial Sequence: Synthetic oligonucleotide
  Antisense strand to SEQ ID NO: 2116414
gacuacaccuguuaauccu

SEQ ID NO: 2116416 - RNA, 19 nt, Artificial Sequence
  Description of Artificial Sequence: Synthetic oligonucleotide
  Sense strand starting at position 166 of SEQ ID NO: 1882378
gauuaacagguguagucau

SEQ ID NO: 2116417 - RNA, 19 nt, Artificial Sequence
  Description of Artificial Sequence: Synthetic oligonucleotide
  Antisense strand to SEQ ID NO: 2116416
augacuacaccuguuaauc

SEQ ID NO: 2116418 - RNA, 19 nt, Artificial Sequence
  Description of Artificial Sequence: Synthetic oligonucleotide
  Sense strand starting at position 196 of SEQ ID NO: 1882378
uguggauagccugaauuaa

SEQ ID NO: 2116419 - RNA, 19 nt, Artificial Sequence
  Description of Artificial Sequence: Synthetic oligonucleotide
  Antisense strand to SEQ ID NO: 2116418
uuaauucaggcuauccaca

SEQ ID NO: 2116420 - RNA, 19 nt, Artificial Sequence
  Description of Artificial Sequence: Synthetic oligonucleotide
  Sense strand starting at position 282 of SEQ ID NO: 1882378
ccaccuguccgucaauaaa

SEQ ID NO: 2116421 - RNA, 19 nt, Artificial Sequence
  Description of Artificial Sequence: Synthetic oligonucleotide
  Antisense strand to SEQ ID NO: 2116420
uuuauugacggacaggugg

SEQ ID NO: 2116422 - RNA, 19 nt, Artificial Sequence
  Description of Artificial Sequence: Synthetic oligonucleotide
  Sense strand starting at position 285 of SEQ ID NO: 1882378
ccuguccgucaauaaauau

SEQ ID NO: 2116423 - RNA, 19 nt, Artificial Sequence
  Description of Artificial Sequence: Synthetic oligonucleotide
  Antisense strand to SEQ ID NO: 2116422
auauuuauugacggacagg

SEQ ID NO: 2116424 - RNA, 19 nt, Artificial Sequence
  Description of Artificial Sequence: Synthetic oligonucleotide
  Sense strand starting at position 326 of SEQ ID NO: 1882378
ggacauuguggucagcacu

SEQ ID NO: 2116425 - RNA, 19 nt, Artificial Sequence
  Description of Artificial Sequence: Synthetic oligonucleotide
  Antisense strand to SEQ ID NO: 2116424
agugcugaccacaaugucc

SEQ ID NO: 2116426 - RNA, 19 nt, Artificial Sequence
  Description of Artificial Sequence: Synthetic oligonucleotide
  Sense strand starting at position 478 of SEQ ID NO: 1882378
ugguaauaucuugauccuc

SEQ ID NO: 2116427 - RNA, 19 nt, Artificial Sequence
  Description of Artificial Sequence: Synthetic oligonucleotide
  Antisense strand to SEQ ID NO: 2116426
gaggaucaagauauuacca

SEQ ID NO: 2116428 - RNA, 19 nt, Artificial Sequence
  Description of Artificial Sequence: Synthetic oligonucleotide
  Sense strand starting at position 480 of SEQ ID NO: 1882378
guaauaucuugauccucag

SEQ ID NO: 2116429 - RNA, 19 nt, Artificial Sequence
  Description of Artificial Sequence: Synthetic oligonucleotide
  Antisense strand to SEQ ID NO: 2116428
cugaggaucaagauauuac

SEQ ID NO: 2116430 - RNA, 19 nt, Artificial Sequence
  Description of Artificial Sequence: Synthetic oligonucleotide
  Sense strand starting at position 1046 of SEQ ID NO: 1882378
uuaacagcugccuauugaa

SEQ ID NO: 2116431 - RNA, 19 nt, Artificial Sequence
  Description of Artificial Sequence: Synthetic oligonucleotide
  Antisense strand to SEQ ID NO: 2116430
uucaauaggcagcuguuaa

SEQ ID NO: 2116432 - RNA, 19 nt, Artificial Sequence
  Description of Artificial Sequence: Synthetic oligonucleotide
  Sense strand starting at position 1176 of SEQ ID NO: 1882378
ucuuuaaguuccuuuagga

SEQ ID NO: 2116433 - RNA, 19 nt, Artificial Sequence
  Description of Artificial Sequence: Synthetic oligonucleotide
  Antisense strand to SEQ ID NO: 2116432
uccuaaaggaacuuaaaga

SEQ ID NO: 2116434 - RNA, 19 nt, Artificial Sequence
  Description of Artificial Sequence: Synthetic oligonucleotide
  Sense strand starting at position 1221 of SEQ ID NO: 1882378
augucuuaccgacaguuau

SEQ ID NO: 2116435 - RNA, 19 nt, Artificial Sequence
  Description of Artificial Sequence: Synthetic oligonucleotide
  Antisense strand to SEQ ID NO: 2116434
auaacugucgguaagacau

SEQ ID NO: 2116436 - RNA, 19 nt, Artificial Sequence
  Description of Artificial Sequence: Synthetic oligonucleotide
  Sense strand starting at position 1315 of SEQ ID NO: 1882378
cuacucuccguauaacuga

SEQ ID NO: 2116437 - RNA, 19 nt, Artificial Sequence
  Description of Artificial Sequence: Synthetic oligonucleotide
  Antisense strand to SEQ ID NO: 2116436
ucaguuauacggagaguag

SEQ ID NO: 2116438 - RNA, 19 nt, Artificial Sequence
  Description of Artificial Sequence: Synthetic oligonucleotide
  Sense strand starting at position 1323 of SEQ ID NO: 1882378
cguauaacugaacaaguaa

SEQ ID NO: 2116439 - RNA, 19 nt, Artificial Sequence
  Description of Artificial Sequence: Synthetic oligonucleotide
  Antisense strand to SEQ ID NO: 2116438
uuacuuguucaguuauacg

SEQ ID NO: 2116440 - RNA, 19 nt, Artificial Sequence
  Description of Artificial Sequence: Synthetic oligonucleotide
  Sense strand starting at position 1455 of SEQ ID NO: 1882378
aaaugugaugauuguaaac

SEQ ID NO: 2116441 - RNA, 19 nt, Artificial Sequence
  Description of Artificial Sequence: Synthetic oligonucleotide
  Antisense strand to SEQ ID NO: 2116440
guuuacaaucaucacauuu

SEQ ID NO: 2116442 - RNA, 19 nt, Artificial Sequence
  Description of Artificial Sequence: Synthetic oligonucleotide
  Sense strand starting at position 1462 of SEQ ID NO: 1882378
augauuguaaacuggaagu

SEQ ID NO: 2116443 - RNA, 19 nt, Artificial Sequence
  Description of Artificial Sequence: Synthetic oligonucleotide
  Antisense strand to SEQ ID NO: 2116442
acuuccaguuuacaaucau

SEQ ID NO: 2116444 - RNA, 19 nt, Artificial Sequence
  Description of Artificial Sequence: Synthetic oligonucleotide
  Sense strand starting at position 1802 of SEQ ID NO: 1882378
cagcaaacugggugaaguu

SEQ ID NO: 2116445 - RNA, 19 nt, Artificial Sequence
  Description of Artificial Sequence: Synthetic oligonucleotide
  Antisense strand to SEQ ID NO: 2116444
aacuucacccaguuugcug

SEQ ID NO: 2116446 - RNA, 19 nt, Artificial Sequence
  Description of Artificial Sequence: Synthetic oligonucleotide
  Sense strand starting at position 1892 of SEQ ID NO: 1882378
accucaacuccaugagaug

SEQ ID NO: 2116447 - RNA, 19 nt, Artificial Sequence
  Description of Artificial Sequence: Synthetic oligonucleotide
  Antisense strand to SEQ ID NO: 2116446
caucucauggaguugaggu

SEQ ID NO: 2116448 - RNA, 19 nt, Artificial Sequence
  Description of Artificial Sequence: Synthetic oligonucleotide
  Sense strand starting at position 2202 of SEQ ID NO: 1882378
augcauuucccuuguuugu

SEQ ID NO: 2116449 - RNA, 19 nt, Artificial Sequence
  Description of Artificial Sequence: Synthetic oligonucleotide
  Antisense strand to SEQ ID NO: 2116448
acaaacaagggaaaugcau

SEQ ID NO: 2116450 - RNA, 19 nt, Artificial Sequence
  Description of Artificial Sequence: Synthetic oligonucleotide
  Sense strand starting at position 2282 of SEQ ID NO: 1882378
ugugcugggcgaagcauua

SEQ ID NO: 2116451 - RNA, 19 nt, Artificial Sequence
  Description of Artificial Sequence: Synthetic oligonucleotide
  Antisense strand to SEQ ID NO: 2116450
uaaugcuucgcccagcaca

SEQ ID NO: 2116452 - RNA, 19 nt, Artificial Sequence
  Description of Artificial Sequence: Synthetic oligonucleotide
  Sense strand starting at position 2292 of SEQ ID NO: 1882378
gaagcauuaugugucagga

SEQ ID NO: 2116453 - RNA, 19 nt, Artificial Sequence
  Description of Artificial Sequence: Synthetic oligonucleotide
  Antisense strand to SEQ ID NO: 2116452
uccugacacauaaugcuuc

SEQ ID NO: 2116454 - RNA, 19 nt, Artificial Sequence
  Description of Artificial Sequence: Synthetic oligonucleotide
  Sense strand starting at position 2443 of SEQ ID NO: 1882378
gcauuugcuuguuugguga

SEQ ID NO: 2116455 - RNA, 19 nt, Artificial Sequence
  Description of Artificial Sequence: Synthetic oligonucleotide
  Antisense strand to SEQ ID NO: 2116454
ucaccaaacaagcaaaugc

SEQ ID NO: 2116456 - RNA, 19 nt, Artificial Sequence
  Description of Artificial Sequence: Synthetic oligonucleotide
  Sense strand starting at position 2562 of SEQ ID NO: 1882378
aauaguaccuguccagaag

SEQ ID NO: 2116457 - RNA, 19 nt, Artificial Sequence
  Description of Artificial Sequence: Synthetic oligonucleotide
  Antisense strand to SEQ ID NO: 2116456
cuucuggacagguacuauu

SEQ ID NO: 2116458 - RNA, 19 nt, Artificial Sequence
  Description of Artificial Sequence: Synthetic oligonucleotide
  Sense strand starting at position 2607 of SEQ ID NO: 1882378
gggcaauuauggcucuuaa

SEQ ID NO: 2116459 - RNA, 19 nt, Artificial Sequence
  Description of Artificial Sequence: Synthetic oligonucleotide
  Antisense strand to SEQ ID NO: 2116458
uuaagagccauaauugccc

SEQ ID NO: 2116460 - RNA, 19 nt, Artificial Sequence
  Description of Artificial Sequence: Synthetic oligonucleotide
  Sense strand starting at position 2640 of SEQ ID NO: 1882378
guaaguaauccacaguauc

SEQ ID NO: 2116461 - RNA, 19 nt, Artificial Sequence
  Description of Artificial Sequence: Synthetic oligonucleotide
  Antisense strand to SEQ ID NO: 2116460
gauacuguggauuacuuac

SEQ ID NO: 2116462 - RNA, 19 nt, Artificial Sequence
  Description of Artificial Sequence: Synthetic oligonucleotide
  Sense strand starting at position 3004 of SEQ ID NO: 1882378
ggcaaaguuagauaggcau

SEQ ID NO: 2116463 - RNA, 19 nt, Artificial Sequence
  Description of Artificial Sequence: Synthetic oligonucleotide
  Antisense strand to SEQ ID NO: 2116462
augccuaucuaacuuugcc

SEQ ID NO: 2116464 - RNA, 19 nt, Artificial Sequence
  Description of Artificial Sequence: Synthetic oligonucleotide
  Sense strand starting at position 3011 of SEQ ID NO: 1882378
uuagauaggcauugucuau

SEQ ID NO: 2116465 - RNA, 19 nt, Artificial Sequence
  Description of Artificial Sequence: Synthetic oligonucleotide
  Antisense strand to SEQ ID NO: 2116464
auagacaaugccuaucuaa

SEQ ID NO: 2116466 - RNA, 19 nt, Artificial Sequence
  Description of Artificial Sequence: Synthetic oligonucleotide
  Sense strand starting at position 3064 of SEQ ID NO: 1882378
guuaaagacccuugaaccu

SEQ ID NO: 2116467 - RNA, 19 nt, Artificial Sequence
  Description of Artificial Sequence: Synthetic oligonucleotide
  Antisense strand to SEQ ID NO: 2116466
agguucaagggucuuuaac

SEQ ID NO: 2116468 - RNA, 19 nt, Artificial Sequence
  Description of Artificial Sequence: Synthetic oligonucleotide
  Sense strand starting at position 3286 of SEQ ID NO: 1882378
aggaaauacugauacugaa

SEQ ID NO: 2116469 - RNA, 19 nt, Artificial Sequence
  Description of Artificial Sequence: Synthetic oligonucleotide
  Antisense strand to SEQ ID NO: 2116468
uucaguaucaguauuuccu

SEQ ID NO: 2116470 - RNA, 19 nt, Artificial Sequence
  Description of Artificial Sequence: Synthetic oligonucleotide
  Sense strand starting at position 3320 of SEQ ID NO: 1882378
ggaaguugcuucuuggaau

SEQ ID NO: 2116471 - RNA, 19 nt, Artificial Sequence
  Description of Artificial Sequence: Synthetic oligonucleotide
  Antisense strand to SEQ ID NO: 2116470
auuccaagaagcaacuucc

SEQ ID NO: 2116472 - RNA, 19 nt, Artificial Sequence
  Description of Artificial Sequence: Synthetic oligonucleotide
  Sense strand starting at position 3475 of SEQ ID NO: 1882378
cuagcuaaagcucaugaaa

SEQ ID NO: 2116473 - RNA, 19 nt, Artificial Sequence
  Description of Artificial Sequence: Synthetic oligonucleotide
  Antisense strand to SEQ ID NO: 2116472
uuucaugagcuuuagcuag

SEQ ID NO: 2116474 - RNA, 19 nt, Artificial Sequence
  Description of Artificial Sequence: Synthetic oligonucleotide
  Sense strand starting at position 3505 of SEQ ID NO: 1882378
cuacucucugaauggcuua

SEQ ID NO: 2116475 - RNA, 19 nt, Artificial Sequence
  Description of Artificial Sequence: Synthetic oligonucleotide
  Antisense strand to SEQ ID NO: 2116474
uaagccauucagagaguag

SEQ ID NO: 2116476 - RNA, 19 nt, Artificial Sequence
  Description of Artificial Sequence: Synthetic oligonucleotide
  Sense strand starting at position 3510 of SEQ ID NO: 1882378
cucugaauggcuuaucuuu

SEQ ID NO: 2116477 - RNA, 19 nt, Artificial Sequence
  Description of Artificial Sequence: Synthetic oligonucleotide
  Antisense strand to SEQ ID NO: 2116476
aaagauaagccauucagag

SEQ ID NO: 2116478 - RNA, 19 nt, Artificial Sequence
  Description of Artificial Sequence: Synthetic oligonucleotide
  Sense strand starting at position 3516 of SEQ ID NO: 1882378
auggcuuaucuuuagcuga

SEQ ID NO: 2116479 - RNA, 19 nt, Artificial Sequence
  Description of Artificial Sequence: Synthetic oligonucleotide
  Antisense strand to SEQ ID NO: 2116478
ucagcuaaagauaagccau

SEQ ID NO: 2116480 - RNA, 19 nt, Artificial Sequence
  Description of Artificial Sequence: Synthetic oligonucleotide
  Sense strand starting at position 3526 of SEQ ID NO: 1882378
uuuagcugagcucauaaca

SEQ ID NO: 2116481 - RNA, 19 nt, Artificial Sequence
  Description of Artificial Sequence: Synthetic oligonucleotide
  Antisense strand to SEQ ID NO: 2116480
uguuaugagcucagcuaaa

SEQ ID NO: 2116482 - RNA, 19 nt, Artificial Sequence
  Description of Artificial Sequence: Synthetic oligonucleotide
  Sense strand starting at position 3569 of SEQ ID NO: 1882378
gguagaaucuucuugugaa

SEQ ID NO: 2116483 - RNA, 19 nt, Artificial Sequence
  Description of Artificial Sequence: Synthetic oligonucleotide
  Antisense strand to SEQ ID NO: 2116482
uucacaagaagauucuacc

SEQ ID NO: 2116484 - RNA, 19 nt, Artificial Sequence
  Description of Artificial Sequence: Synthetic oligonucleotide
  Sense strand starting at position 3667 of SEQ ID NO: 1882378
cccugauuacaauaggcuu

SEQ ID NO: 2116485 - RNA, 19 nt, Artificial Sequence
  Description of Artificial Sequence: Synthetic oligonucleotide
  Antisense strand to SEQ ID NO: 2116484
aagccuauuguaaucaggg

SEQ ID NO: 2116486 - RNA, 19 nt, Artificial Sequence
  Description of Artificial Sequence: Synthetic oligonucleotide
  Sense strand starting at position 3848 of SEQ ID NO: 1882378
uucuuaaauugagugggau

SEQ ID NO: 2116487 - RNA, 19 nt, Artificial Sequence
  Description of Artificial Sequence: Synthetic oligonucleotide
  Antisense strand to SEQ ID NO: 2116486
aucccacucaauuuaagaa

SEQ ID NO: 2116488 - RNA, 19 nt, Artificial Sequence
  Description of Artificial Sequence: Synthetic oligonucleotide
  Sense strand starting at position 3849 of SEQ ID NO: 1882378
ucuuaaauugagugggaua

SEQ ID NO: 2116489 - RNA, 19 nt, Artificial Sequence
  Description of Artificial Sequence: Synthetic oligonucleotide
  Antisense strand to SEQ ID NO: 2116488
uaucccacucaauuuaaga

SEQ ID NO: 2116490 - RNA, 19 nt, Artificial Sequence
  Description of Artificial Sequence: Synthetic oligonucleotide
  Sense strand starting at position 3851 of SEQ ID NO: 1882378
uuaaauugagugggauacu

SEQ ID NO: 2116491 - RNA, 19 nt, Artificial Sequence
  Description of Artificial Sequence: Synthetic oligonucleotide
  Antisense strand to SEQ ID NO: 2116490
aguaucccacucaauuuaa

SEQ ID NO: 2116492 - RNA, 19 nt, Artificial Sequence
  Description of Artificial Sequence: Synthetic oligonucleotide
  Sense strand starting at position 11 of SEQ ID NO: 1882379
ucucaauaguucuucugua

SEQ ID NO: 2116493 - RNA, 19 nt, Artificial Sequence
  Description of Artificial Sequence: Synthetic oligonucleotide
  Antisense strand to SEQ ID NO: 2116492
uacagaagaacuauugaga

SEQ ID NO: 2116494 - RNA, 19 nt, Artificial Sequence
  Description of Artificial Sequence: Synthetic oligonucleotide
  Sense strand starting at position 12 of SEQ ID NO: 1882379
cucaauaguucuucuguaa

SEQ ID NO: 2116495 - RNA, 19 nt, Artificial Sequence
  Description of Artificial Sequence: Synthetic oligonucleotide
  Antisense strand to SEQ ID NO: 2116494
uuacagaagaacuauugag

SEQ ID NO: 2116496 - RNA, 19 nt, Artificial Sequence
  Description of Artificial Sequence: Synthetic oligonucleotide
  Sense strand starting at position 16 of SEQ ID NO: 1882379
auaguucuucuguaaauca

SEQ ID NO: 2116497 - RNA, 19 nt, Artificial Sequence
  Description of Artificial Sequence: Synthetic oligonucleotide
  Antisense strand to SEQ ID NO: 2116496
ugauuuacagaagaacuau

SEQ ID NO: 2116498 - RNA, 19 nt, Artificial Sequence
  Description of Artificial Sequence: Synthetic oligonucleotide
  Sense strand starting at position 23 of SEQ ID NO: 1882379
uucuguaaaucaucaagga

SEQ ID NO: 2116499 - RNA, 19 nt, Artificial Sequence
  Description of Artificial Sequence: Synthetic oligonucleotide
  Antisense strand to SEQ ID NO: 2116498
uccuugaugauuuacagaa

SEQ ID NO: 2116500 - RNA, 19 nt, Artificial Sequence
  Description of Artificial Sequence: Synthetic oligonucleotide
  Sense strand starting at position 145 of SEQ ID NO: 1882379
gcaaauauauguguaucaa

SEQ ID NO: 2116501 - RNA, 19 nt, Artificial Sequence
  Description of Artificial Sequence: Synthetic oligonucleotide
  Antisense strand to SEQ ID NO: 2116500
uugauacacauauauuugc

SEQ ID NO: 2116502 - RNA, 19 nt, Artificial Sequence
  Description of Artificial Sequence: Synthetic oligonucleotide
  Sense strand starting at position 208 of SEQ ID NO: 1882379
guguauguguacuuacaaa

SEQ ID NO: 2116503 - RNA, 19 nt, Artificial Sequence
  Description of Artificial Sequence: Synthetic oligonucleotide
  Antisense strand to SEQ ID NO: 2116502
uuuguaaguacacauacac

SEQ ID NO: 2116504 - RNA, 19 nt, Artificial Sequence
  Description of Artificial Sequence: Synthetic oligonucleotide
  Sense strand starting at position 224 of SEQ ID NO: 1882379
aaauaaugcgugcauacau

SEQ ID NO: 2116505 - RNA, 19 nt, Artificial Sequence
  Description of Artificial Sequence: Synthetic oligonucleotide
  Antisense strand to SEQ ID NO: 2116504
auguaugcacgcauuauuu

SEQ ID NO: 2116506 - RNA, 19 nt, Artificial Sequence
  Description of Artificial Sequence: Synthetic oligonucleotide
  Sense strand starting at position 414 of SEQ ID NO: 1882379
gagagcugaggguguguaa

SEQ ID NO: 2116507 - RNA, 19 nt, Artificial Sequence
  Description of Artificial Sequence: Synthetic oligonucleotide
  Antisense strand to SEQ ID NO: 2116506
uuacacacccucagcucuc

SEQ ID NO: 2116508 - RNA, 19 nt, Artificial Sequence
  Description of Artificial Sequence: Synthetic oligonucleotide
  Sense strand starting at position 459 of SEQ ID NO: 1882379
ucaacaugucagcaaugcu

SEQ ID NO: 2116509 - RNA, 19 nt, Artificial Sequence
  Description of Artificial Sequence: Synthetic oligonucleotide
  Antisense strand to SEQ ID NO: 2116508
agcauugcugacauguuga

SEQ ID NO: 2116510 - RNA, 19 nt, Artificial Sequence
  Description of Artificial Sequence: Synthetic oligonucleotide
  Sense strand starting at position 488 of SEQ ID NO: 1882379
gcagcuugcagacaugaaa

SEQ ID NO: 2116511 - RNA, 19 nt, Artificial Sequence
  Description of Artificial Sequence: Synthetic oligonucleotide
  Antisense strand to SEQ ID NO: 2116510
uuucaugucugcaagcugc

SEQ ID NO: 2116512 - RNA, 19 nt, Artificial Sequence
  Description of Artificial Sequence: Synthetic oligonucleotide
  Sense strand starting at position 491 of SEQ ID NO: 1882379
gcuugcagacaugaaacaa

SEQ ID NO: 2116513 - RNA, 19 nt, Artificial Sequence
  Description of Artificial Sequence: Synthetic oligonucleotide
  Antisense strand to SEQ ID NO: 2116512
uuguuucaugucugcaagc

SEQ ID NO: 2116514 - RNA, 19 nt, Artificial Sequence
  Description of Artificial Sequence: Synthetic oligonucleotide
  Sense strand starting at position 545 of SEQ ID NO: 1882379
guuguuaguguccagagac

SEQ ID NO: 2116515 - RNA, 19 nt, Artificial Sequence
  Description of Artificial Sequence: Synthetic oligonucleotide
  Antisense strand to SEQ ID NO: 2116514
gucucuggacacuaacaac

SEQ ID NO: 2116516 - RNA, 19 nt, Artificial Sequence
  Description of Artificial Sequence: Synthetic oligonucleotide
  Sense strand starting at position 560 of SEQ ID NO: 1882379
agaccagacuguccauaua

SEQ ID NO: 2116517 - RNA, 19 nt, Artificial Sequence
  Description of Artificial Sequence: Synthetic oligonucleotide
  Antisense strand to SEQ ID NO: 2116516
uauauggacagucuggucu

SEQ ID NO: 2116518 - RNA, 19 nt, Artificial Sequence
  Description of Artificial Sequence: Synthetic oligonucleotide
  Sense strand starting at position 769 of SEQ ID NO: 1882379
ggugaagcgcuuuauuaag

SEQ ID NO: 2116519 - RNA, 19 nt, Artificial Sequence
  Description of Artificial Sequence: Synthetic oligonucleotide
  Antisense strand to SEQ ID NO: 2116518
cuuaauaaagcgcuucacc

SEQ ID NO: 2116520 - RNA, 19 nt, Artificial Sequence
  Description of Artificial Sequence: Synthetic oligonucleotide
  Sense strand starting at position 916 of SEQ ID NO: 1882379
gugucaugacuuuaagaau

SEQ ID NO: 2116521 - RNA, 19 nt, Artificial Sequence
  Description of Artificial Sequence: Synthetic oligonucleotide
  Antisense strand to SEQ ID NO: 2116520
auucuuaaagucaugacac

SEQ ID NO: 2116522 - RNA, 19 nt, Artificial Sequence
  Description of Artificial Sequence: Synthetic oligonucleotide
  Sense strand starting at position 1123 of SEQ ID NO: 1882379
accaaauugccuugcgaaa

SEQ ID NO: 2116523 - RNA, 19 nt, Artificial Sequence
  Description of Artificial Sequence: Synthetic oligonucleotide
  Antisense strand to SEQ ID NO: 2116522
uuucgcaaggcaauuuggu

SEQ ID NO: 2116524 - RNA, 19 nt, Artificial Sequence
  Description of Artificial Sequence: Synthetic oligonucleotide
  Sense strand starting at position 1146 of SEQ ID NO: 1882379
uaauuacgaucucuaggga

SEQ ID NO: 2116525 - RNA, 19 nt, Artificial Sequence
  Description of Artificial Sequence: Synthetic oligonucleotide
  Antisense strand to SEQ ID NO: 2116524
ucccuagagaucguaauua

SEQ ID NO: 2116526 - RNA, 19 nt, Artificial Sequence
  Description of Artificial Sequence: Synthetic oligonucleotide
  Sense strand starting at position 1149 of SEQ ID NO: 1882379
uuacgaucucuagggaagu

SEQ ID NO: 2116527 - RNA, 19 nt, Artificial Sequence
  Description of Artificial Sequence: Synthetic oligonucleotide
  Antisense strand to SEQ ID NO: 2116526
acuucccuagagaucguaa

SEQ ID NO: 2116528 - RNA, 19 nt, Artificial Sequence
  Description of Artificial Sequence: Synthetic oligonucleotide
  Sense strand starting at position 1411 of SEQ ID NO: 1882379
gggaauuauuaacuguuuc

SEQ ID NO: 2116529 - RNA, 19 nt, Artificial Sequence
  Description of Artificial Sequence: Synthetic oligonucleotide
  Antisense strand to SEQ ID NO: 2116528
gaaacaguuaauaauuccc

SEQ ID NO: 2116530 - RNA, 19 nt, Artificial Sequence
  Description of Artificial Sequence: Synthetic oligonucleotide
  Sense strand starting at position 1453 of SEQ ID NO: 1882379
auucguuuaagacgggaaa

SEQ ID NO: 2116531 - RNA, 19 nt, Artificial Sequence
  Description of Artificial Sequence: Synthetic oligonucleotide
  Antisense strand to SEQ ID NO: 2116530
uuucccgucuuaaacgaau

SEQ ID NO: 2116532 - RNA, 19 nt, Artificial Sequence
  Description of Artificial Sequence: Synthetic oligonucleotide
  Sense strand starting at position 1476 of SEQ ID NO: 1882379
ugaagagggucacucuauu

SEQ ID NO: 2116533 - RNA, 19 nt, Artificial Sequence
  Description of Artificial Sequence: Synthetic oligonucleotide
  Antisense strand to SEQ ID NO: 2116532
aauagagugacccucuuca

SEQ ID NO: 2116534 - RNA, 19 nt, Artificial Sequence
  Description of Artificial Sequence: Synthetic oligonucleotide
  Sense strand starting at position 1597 of SEQ ID NO: 1882379
gguguucuuggcuauccau

SEQ ID NO: 2116535 - RNA, 19 nt, Artificial Sequence
  Description of Artificial Sequence: Synthetic oligonucleotide
  Antisense strand to SEQ ID NO: 2116534
auggauagccaagaacacc

SEQ ID NO: 2116536 - RNA, 19 nt, Artificial Sequence
  Description of Artificial Sequence: Synthetic oligonucleotide
  Sense strand starting at position 1600 of SEQ ID NO: 1882379
guucuuggcuauccauaau

SEQ ID NO: 2116537 - RNA, 19 nt, Artificial Sequence
  Description of Artificial Sequence: Synthetic oligonucleotide
  Antisense strand to SEQ ID NO: 2116536
auuauggauagccaagaac

SEQ ID NO: 2116538 - RNA, 19 nt, Artificial Sequence
  Description of Artificial Sequence: Synthetic oligonucleotide
  Sense strand starting at position 1729 of SEQ ID NO: 1882379
cgaagauuccagcacuuua

SEQ ID NO: 2116539 - RNA, 19 nt, Artificial Sequence
  Description of Artificial Sequence: Synthetic oligonucleotide
  Antisense strand to SEQ ID NO: 2116538
uaaagugcuggaaucuucg

SEQ ID NO: 2116540 - RNA, 19 nt, Artificial Sequence
  Description of Artificial Sequence: Synthetic oligonucleotide
  Sense strand starting at position 1750 of SEQ ID NO: 1882379
ugaauuacccauuaugguu

SEQ ID NO: 2116541 - RNA, 19 nt, Artificial Sequence
  Description of Artificial Sequence: Synthetic oligonucleotide
  Antisense strand to SEQ ID NO: 2116540
aaccauaauggguaauuca

SEQ ID NO: 2116542 - RNA, 19 nt, Artificial Sequence
  Description of Artificial Sequence: Synthetic oligonucleotide
  Sense strand starting at position 1822 of SEQ ID NO: 1882379
ugcguuuacaaguagaaac

SEQ ID NO: 2116543 - RNA, 19 nt, Artificial Sequence
  Description of Artificial Sequence: Synthetic oligonucleotide
  Antisense strand to SEQ ID NO: 2116542
guuucuacuuguaaacgca

SEQ ID NO: 2116544 - RNA, 19 nt, Artificial Sequence
  Description of Artificial Sequence: Synthetic oligonucleotide
  Sense strand starting at position 1824 of SEQ ID NO: 1882379
cguuuacaaguagaaacau

SEQ ID NO: 2116545 - RNA, 19 nt, Artificial Sequence
  Description of Artificial Sequence: Synthetic oligonucleotide
  Antisense strand to SEQ ID NO: 2116544
auguuucuacuuguaaacg

SEQ ID NO: 2116546 - RNA, 19 nt, Artificial Sequence
  Description of Artificial Sequence: Synthetic oligonucleotide
  Sense strand starting at position 1839 of SEQ ID NO: 1882379
acauaaucaggaggcgaau

SEQ ID NO: 2116547 - RNA, 19 nt, Artificial Sequence
  Description of Artificial Sequence: Synthetic oligonucleotide
  Antisense strand to SEQ ID NO: 2116546
auucgccuccugauuaugu

SEQ ID NO: 2116548 - RNA, 19 nt, Artificial Sequence
  Description of Artificial Sequence: Synthetic oligonucleotide
  Sense strand starting at position 1875 of SEQ ID NO: 1882379
aucugaagcugguuuauca

SEQ ID NO: 2116549 - RNA, 19 nt, Artificial Sequence
  Description of Artificial Sequence: Synthetic oligonucleotide
  Antisense strand to SEQ ID NO: 2116548
ugauaaaccagcuucagau

SEQ ID NO: 2116550 - RNA, 19 nt, Artificial Sequence
  Description of Artificial Sequence: Synthetic oligonucleotide
  Sense strand starting at position 1879 of SEQ ID NO: 1882379
gaagcugguuuaucagaca

SEQ ID NO: 2116551 - RNA, 19 nt, Artificial Sequence
  Description of Artificial Sequence: Synthetic oligonucleotide
  Antisense strand to SEQ ID NO: 2116550
ugucugauaaaccagcuuc

SEQ ID NO: 2116552 - RNA, 19 nt, Artificial Sequence
  Description of Artificial Sequence: Synthetic oligonucleotide
  Sense strand starting at position 2142 of SEQ ID NO: 1882379
ccgaaaccaugauuccauu

SEQ ID NO: 2116553 - RNA, 19 nt, Artificial Sequence
  Description of Artificial Sequence: Synthetic oligonucleotide
  Antisense strand to SEQ ID NO: 2116552
aauggaaucaugguuucgg

SEQ ID NO: 2116554 - RNA, 19 nt, Artificial Sequence
  Description of Artificial Sequence: Synthetic oligonucleotide
  Sense strand starting at position 2148 of SEQ ID NO: 1882379
ccaugauuccauugccaag

SEQ ID NO: 2116555 - RNA, 19 nt, Artificial Sequence
  Description of Artificial Sequence: Synthetic oligonucleotide
  Antisense strand to SEQ ID NO: 2116554
cuuggcaauggaaucaugg

SEQ ID NO: 2116556 - RNA, 19 nt, Artificial Sequence
  Description of Artificial Sequence: Synthetic oligonucleotide
  Sense strand starting at position 2351 of SEQ ID NO: 1882379
ucugaaucccgguacugaa

SEQ ID NO: 2116557 - RNA, 19 nt, Artificial Sequence
  Description of Artificial Sequence: Synthetic oligonucleotide
  Antisense strand to SEQ ID NO: 2116556
uucaguaccgggauucaga

SEQ ID NO: 2116558 - RNA, 19 nt, Artificial Sequence
  Description of Artificial Sequence: Synthetic oligonucleotide
  Sense strand starting at position 2391 of SEQ ID NO: 1882379
caggucugcgcugaaagaa

SEQ ID NO: 2116559 - RNA, 19 nt, Artificial Sequence
  Description of Artificial Sequence: Synthetic oligonucleotide
  Antisense strand to SEQ ID NO: 2116558
uucuuucagcgcagaccug

SEQ ID NO: 2116560 - RNA, 19 nt, Artificial Sequence
  Description of Artificial Sequence: Synthetic oligonucleotide
  Sense strand starting at position 2493 of SEQ ID NO: 1882379
cagugaguuucucuuacag

SEQ ID NO: 2116561 - RNA, 19 nt, Artificial Sequence
  Description of Artificial Sequence: Synthetic oligonucleotide
  Antisense strand to SEQ ID NO: 2116560
cuguaagagaaacucacug

SEQ ID NO: 2116562 - RNA, 19 nt, Artificial Sequence
  Description of Artificial Sequence: Synthetic oligonucleotide
  Sense strand starting at position 3730 of SEQ ID NO: 1882379
gagcuuugggcuuaauguu

SEQ ID NO: 2116563 - RNA, 19 nt, Artificial Sequence
  Description of Artificial Sequence: Synthetic oligonucleotide
  Antisense strand to SEQ ID NO: 2116562
aacauuaagcccaaagcuc

SEQ ID NO: 2116564 - RNA, 19 nt, Artificial Sequence
  Description of Artificial Sequence: Synthetic oligonucleotide
  Sense strand starting at position 3736 of SEQ ID NO: 1882379
ugggcuuaauguuugagaa

SEQ ID NO: 2116565 - RNA, 19 nt, Artificial Sequence
  Description of Artificial Sequence: Synthetic oligonucleotide
  Antisense strand to SEQ ID NO: 2116564
uucucaaacauuaagccca

SEQ ID NO: 2116566 - RNA, 19 nt, Artificial Sequence
  Description of Artificial Sequence: Synthetic oligonucleotide
  Sense strand starting at position 3737 of SEQ ID NO: 1882379
gggcuuaauguuugagaag

SEQ ID NO: 2116567 - RNA, 19 nt, Artificial Sequence
  Description of Artificial Sequence: Synthetic oligonucleotide
  Antisense strand to SEQ ID NO: 2116566
cuucucaaacauuaagccc

SEQ ID NO: 2116568 - RNA, 19 nt, Artificial Sequence
  Description of Artificial Sequence: Synthetic oligonucleotide
  Sense strand starting at position 3809 of SEQ ID NO: 1882379
auccgacugucugcauuua

SEQ ID NO: 2116569 - RNA, 19 nt, Artificial Sequence
  Description of Artificial Sequence: Synthetic oligonucleotide
  Antisense strand to SEQ ID NO: 2116568
uaaaugcagacagucggau

SEQ ID NO: 2116570 - RNA, 19 nt, Artificial Sequence
  Description of Artificial Sequence: Synthetic oligonucleotide
  Sense strand starting at position 3870 of SEQ ID NO: 1882379
agagaugugcugggucaga

SEQ ID NO: 2116571 - RNA, 19 nt, Artificial Sequence
  Description of Artificial Sequence: Synthetic oligonucleotide
  Antisense strand to SEQ ID NO: 2116570
ucugacccagcacaucucu

SEQ ID NO: 2116572 - RNA, 19 nt, Artificial Sequence
  Description of Artificial Sequence: Synthetic oligonucleotide
  Sense strand starting at position 164 of SEQ ID NO: 1882380
ugacccauucucuaaacgu

SEQ ID NO: 2116573 - RNA, 19 nt, Artificial Sequence
  Description of Artificial Sequence: Synthetic oligonucleotide
  Antisense strand to SEQ ID NO: 2116572
acguuuagagaauggguca

SEQ ID NO: 2116574 - RNA, 19 nt, Artificial Sequence
  Description of Artificial Sequence: Synthetic oligonucleotide
  Sense strand starting at position 259 of SEQ ID NO: 1882380
auccuauaaugcuuuguga

SEQ ID NO: 2116575 - RNA, 19 nt, Artificial Sequence
  Description of Artificial Sequence: Synthetic oligonucleotide
  Antisense strand to SEQ ID NO: 2116574
ucacaaagcauuauaggau

SEQ ID NO: 2116576 - RNA, 19 nt, Artificial Sequence
  Description of Artificial Sequence: Synthetic oligonucleotide
  Sense strand starting at position 261 of SEQ ID NO: 1882380
ccuauaaugcuuugugaau

SEQ ID NO: 2116577 - RNA, 19 nt, Artificial Sequence
  Description of Artificial Sequence: Synthetic oligonucleotide
  Antisense strand to SEQ ID NO: 2116576
auucacaaagcauuauagg

SEQ ID NO: 2116578 - RNA, 19 nt, Artificial Sequence
  Description of Artificial Sequence: Synthetic oligonucleotide
  Sense strand starting at position 262 of SEQ ID NO: 1882380
cuauaaugcuuugugaaua

SEQ ID NO: 2116579 - RNA, 19 nt, Artificial Sequence
  Description of Artificial Sequence: Synthetic oligonucleotide
  Antisense strand to SEQ ID NO: 2116578
uauucacaaagcauuauag

SEQ ID NO: 2116580 - RNA, 19 nt, Artificial Sequence
  Description of Artificial Sequence: Synthetic oligonucleotide
  Sense strand starting at position 267 of SEQ ID NO: 1882380
augcuuugugaauaaugau

SEQ ID NO: 2116581 - RNA, 19 nt, Artificial Sequence
  Description of Artificial Sequence: Synthetic oligonucleotide
  Antisense strand to SEQ ID NO: 2116580
aucauuauucacaaagcau

SEQ ID NO: 2116582 - RNA, 19 nt, Artificial Sequence
  Description of Artificial Sequence: Synthetic oligonucleotide
  Sense strand starting at position 320 of SEQ ID NO: 1882380
cauugaugagauugcuuau

SEQ ID NO: 2116583 - RNA, 19 nt, Artificial Sequence
  Description of Artificial Sequence: Synthetic oligonucleotide
  Antisense strand to SEQ ID NO: 2116582
auaagcaaucucaucaaug

SEQ ID NO: 2116584 - RNA, 19 nt, Artificial Sequence
  Description of Artificial Sequence: Synthetic oligonucleotide
  Sense strand starting at position 427 of SEQ ID NO: 1882380
uaucuauuaggcuaguagu

SEQ ID NO: 2116585 - RNA, 19 nt, Artificial Sequence
  Description of Artificial Sequence: Synthetic oligonucleotide
  Antisense strand to SEQ ID NO: 2116584
acuacuagccuaauagaua

SEQ ID NO: 2116586 - RNA, 19 nt, Artificial Sequence
  Description of Artificial Sequence: Synthetic oligonucleotide
  Sense strand starting at position 438 of SEQ ID NO: 1882380
cuaguaguacauuguauga

SEQ ID NO: 2116587 - RNA, 19 nt, Artificial Sequence
  Description of Artificial Sequence: Synthetic oligonucleotide
  Antisense strand to SEQ ID NO: 2116586
ucauacaauguacuacuag

SEQ ID NO: 2116588 - RNA, 19 nt, Artificial Sequence
  Description of Artificial Sequence: Synthetic oligonucleotide
  Sense strand starting at position 524 of SEQ ID NO: 1882380
cagguauuagccugauguu

SEQ ID NO: 2116589 - RNA, 19 nt, Artificial Sequence
  Description of Artificial Sequence: Synthetic oligonucleotide
  Antisense strand to SEQ ID NO: 2116588
aacaucaggcuaauaccug

SEQ ID NO: 2116590 - RNA, 19 nt, Artificial Sequence
  Description of Artificial Sequence: Synthetic oligonucleotide
  Sense strand starting at position 525 of SEQ ID NO: 1882380
agguauuagccugauguuu

SEQ ID NO: 2116591 - RNA, 19 nt, Artificial Sequence
  Description of Artificial Sequence: Synthetic oligonucleotide
  Antisense strand to SEQ ID NO: 2116590
aaacaucaggcuaauaccu

SEQ ID NO: 2116592 - RNA, 19 nt, Artificial Sequence
  Description of Artificial Sequence: Synthetic oligonucleotide
  Sense strand starting at position 546 of SEQ ID NO: 1882380
uugacuaagccuuguacuu

SEQ ID NO: 2116593 - RNA, 19 nt, Artificial Sequence
  Description of Artificial Sequence: Synthetic oligonucleotide
  Antisense strand to SEQ ID NO: 2116592
aaguacaaggcuuagucaa

SEQ ID NO: 2116594 - RNA, 19 nt, Artificial Sequence
  Description of Artificial Sequence: Synthetic oligonucleotide
  Sense strand starting at position 564 of SEQ ID NO: 1882380
uuauauagcuuguucuaug

SEQ ID NO: 2116595 - RNA, 19 nt, Artificial Sequence
  Description of Artificial Sequence: Synthetic oligonucleotide
  Antisense strand to SEQ ID NO: 2116594
cauagaacaagcuauauaa

SEQ ID NO: 2116596 - RNA, 19 nt, Artificial Sequence
  Description of Artificial Sequence: Synthetic oligonucleotide
  Sense strand starting at position 575 of SEQ ID NO: 1882380
guucuaugugcaguuaugu

SEQ ID NO: 2116597 - RNA, 19 nt, Artificial Sequence
  Description of Artificial Sequence: Synthetic oligonucleotide
  Antisense strand to SEQ ID NO: 2116596
acauaacugcacauagaac

SEQ ID NO: 2116598 - RNA, 19 nt, Artificial Sequence
  Description of Artificial Sequence: Synthetic oligonucleotide
  Sense strand starting at position 581 of SEQ ID NO: 1882380
ugugcaguuauguaaucuu

SEQ ID NO: 2116599 - RNA, 19 nt, Artificial Sequence
  Description of Artificial Sequence: Synthetic oligonucleotide
  Antisense strand to SEQ ID NO: 2116598
aagauuacauaacugcaca

SEQ ID NO: 2116600 - RNA, 19 nt, Artificial Sequence
  Description of Artificial Sequence: Synthetic oligonucleotide
  Sense strand starting at position 1188 of SEQ ID NO: 1882380
gguggaagguucuuguauc

SEQ ID NO: 2116601 - RNA, 19 nt, Artificial Sequence
  Description of Artificial Sequence: Synthetic oligonucleotide
  Antisense strand to SEQ ID NO: 2116600
gauacaagaaccuuccacc

SEQ ID NO: 2116602 - RNA, 19 nt, Artificial Sequence
  Description of Artificial Sequence: Synthetic oligonucleotide
  Sense strand starting at position 1647 of SEQ ID NO: 1882380
uucucuuucucgguggaaa

SEQ ID NO: 2116603 - RNA, 19 nt, Artificial Sequence
  Description of Artificial Sequence: Synthetic oligonucleotide
  Antisense strand to SEQ ID NO: 2116602
uuuccaccgagaaagagaa

SEQ ID NO: 2116604 - RNA, 19 nt, Artificial Sequence
  Description of Artificial Sequence: Synthetic oligonucleotide
  Sense strand starting at position 1700 of SEQ ID NO: 1882380
aucugugcuccugaacaca

SEQ ID NO: 2116605 - RNA, 19 nt, Artificial Sequence
  Description of Artificial Sequence: Synthetic oligonucleotide
  Antisense strand to SEQ ID NO: 2116604
uguguucaggagcacagau

SEQ ID NO: 2116606 - RNA, 19 nt, Artificial Sequence
  Description of Artificial Sequence: Synthetic oligonucleotide
  Sense strand starting at position 1722 of SEQ ID NO: 1882380
ucuccaauguacuuguuau

SEQ ID NO: 2116607 - RNA, 19 nt, Artificial Sequence
  Description of Artificial Sequence: Synthetic oligonucleotide
  Antisense strand to SEQ ID NO: 2116606
auaacaaguacauuggaga

SEQ ID NO: 2116608 - RNA, 19 nt, Artificial Sequence
  Description of Artificial Sequence: Synthetic oligonucleotide
  Sense strand starting at position 2031 of SEQ ID NO: 1882380
uuccacugauccuuuguca

SEQ ID NO: 2116609 - RNA, 19 nt, Artificial Sequence
  Description of Artificial Sequence: Synthetic oligonucleotide
  Antisense strand to SEQ ID NO: 2116608
ugacaaaggaucaguggaa

SEQ ID NO: 2116610 - RNA, 19 nt, Artificial Sequence
  Description of Artificial Sequence: Synthetic oligonucleotide
  Sense strand starting at position 2704 of SEQ ID NO: 1882380
cuguauucucucuauagug

SEQ ID NO: 2116611 - RNA, 19 nt, Artificial Sequence
  Description of Artificial Sequence: Synthetic oligonucleotide
  Antisense strand to SEQ ID NO: 2116610
cacuauagagagaauacag

SEQ ID NO: 2116612 - RNA, 19 nt, Artificial Sequence
  Description of Artificial Sequence: Synthetic oligonucleotide
  Sense strand starting at position 2706 of SEQ ID NO: 1882380
guauucucucuauagugaa

SEQ ID NO: 2116613 - RNA, 19 nt, Artificial Sequence
  Description of Artificial Sequence: Synthetic oligonucleotide
  Antisense strand to SEQ ID NO: 2116612
uucacuauagagagaauac

SEQ ID NO: 2116614 - RNA, 19 nt, Artificial Sequence
  Description of Artificial Sequence: Synthetic oligonucleotide
  Sense strand starting at position 2713 of SEQ ID NO: 1882380
cucuauagugaauggcauu

SEQ ID NO: 2116615 - RNA, 19 nt, Artificial Sequence
  Description of Artificial Sequence: Synthetic oligonucleotide
  Antisense strand to SEQ ID NO: 2116614
aaugccauucacuauagag

SEQ ID NO: 2116616 - RNA, 19 nt, Artificial Sequence
  Description of Artificial Sequence: Synthetic oligonucleotide
  Sense strand starting at position 2719 of SEQ ID NO: 1882380
agugaauggcauuaugauu

SEQ ID NO: 2116617 - RNA, 19 nt, Artificial Sequence
  Description of Artificial Sequence: Synthetic oligonucleotide
  Antisense strand to SEQ ID NO: 2116616
aaucauaaugccauucacu

SEQ ID NO: 2116618 - RNA, 19 nt, Artificial Sequence
  Description of Artificial Sequence: Synthetic oligonucleotide
  Sense strand starting at position 2725 of SEQ ID NO: 1882380
uggcauuaugauugucaca

SEQ ID NO: 2116619 - RNA, 19 nt, Artificial Sequence
  Description of Artificial Sequence: Synthetic oligonucleotide
  Antisense strand to SEQ ID NO: 2116618
ugugacaaucauaaugcca

SEQ ID NO: 2116620 - RNA, 19 nt, Artificial Sequence
  Description of Artificial Sequence: Synthetic oligonucleotide
  Sense strand starting at position 2727 of SEQ ID NO: 1882380
gcauuaugauugucacauc

SEQ ID NO: 2116621 - RNA, 19 nt, Artificial Sequence
  Description of Artificial Sequence: Synthetic oligonucleotide
  Antisense strand to SEQ ID NO: 2116620
gaugugacaaucauaaugc

SEQ ID NO: 2116622 - RNA, 19 nt, Artificial Sequence
  Description of Artificial Sequence: Synthetic oligonucleotide
  Sense strand starting at position 2804 of SEQ ID NO: 1882380
aucaccaagcucuguugaa

SEQ ID NO: 2116623 - RNA, 19 nt, Artificial Sequence
  Description of Artificial Sequence: Synthetic oligonucleotide
  Antisense strand to SEQ ID NO: 2116622
uucaacagagcuuggugau

SEQ ID NO: 2116624 - RNA, 19 nt, Artificial Sequence
  Description of Artificial Sequence: Synthetic oligonucleotide
  Sense strand starting at position 2808 of SEQ ID NO: 1882380
ccaagcucuguugaacuua

SEQ ID NO: 2116625 - RNA, 19 nt, Artificial Sequence
  Description of Artificial Sequence: Synthetic oligonucleotide
  Antisense strand to SEQ ID NO: 2116624
uaaguucaacagagcuugg

SEQ ID NO: 2116626 - RNA, 19 nt, Artificial Sequence
  Description of Artificial Sequence: Synthetic oligonucleotide
  Sense strand starting at position 2908 of SEQ ID NO: 1882380
uuauguggguggcuaauau

SEQ ID NO: 2116627 - RNA, 19 nt, Artificial Sequence
  Description of Artificial Sequence: Synthetic oligonucleotide
  Antisense strand to SEQ ID NO: 2116626
auauuagccacccacauaa

SEQ ID NO: 2116628 - RNA, 19 nt, Artificial Sequence
  Description of Artificial Sequence: Synthetic oligonucleotide
  Sense strand starting at position 3014 of SEQ ID NO: 1882380
gauccaaaucuaggcaguu

SEQ ID NO: 2116629 - RNA, 19 nt, Artificial Sequence
  Description of Artificial Sequence: Synthetic oligonucleotide
  Antisense strand to SEQ ID NO: 2116628
aacugccuagauuuggauc

SEQ ID NO: 2116630 - RNA, 19 nt, Artificial Sequence
  Description of Artificial Sequence: Synthetic oligonucleotide
  Sense strand starting at position 3015 of SEQ ID NO: 1882380
auccaaaucuaggcaguuu

SEQ ID NO: 2116631 - RNA, 19 nt, Artificial Sequence
  Description of Artificial Sequence: Synthetic oligonucleotide
  Antisense strand to SEQ ID NO: 2116630
aaacugccuagauuuggau

SEQ ID NO: 2116632 - RNA, 19 nt, Artificial Sequence
  Description of Artificial Sequence: Synthetic oligonucleotide
  Sense strand starting at position 3130 of SEQ ID NO: 1882380
uuugguagaguugguucau

SEQ ID NO: 2116633 - RNA, 19 nt, Artificial Sequence
  Description of Artificial Sequence: Synthetic oligonucleotide
  Antisense strand to SEQ ID NO: 2116632
augaaccaacucuaccaaa

SEQ ID NO: 2116634 - RNA, 19 nt, Artificial Sequence
  Description of Artificial Sequence: Synthetic oligonucleotide
  Sense strand starting at position 3163 of SEQ ID NO: 1882380
cuguguaacuucuuacaac

SEQ ID NO: 2116635 - RNA, 19 nt, Artificial Sequence
  Description of Artificial Sequence: Synthetic oligonucleotide
  Antisense strand to SEQ ID NO: 2116634
guuguaagaaguuacacag

SEQ ID NO: 2116636 - RNA, 19 nt, Artificial Sequence
  Description of Artificial Sequence: Synthetic oligonucleotide
  Sense strand starting at position 3257 of SEQ ID NO: 1882380
augucuuuguaaucuauag

SEQ ID NO: 2116637 - RNA, 19 nt, Artificial Sequence
  Description of Artificial Sequence: Synthetic oligonucleotide
  Antisense strand to SEQ ID NO: 2116636
cuauagauuacaaagacau

SEQ ID NO: 2116638 - RNA, 19 nt, Artificial Sequence
  Description of Artificial Sequence: Synthetic oligonucleotide
  Sense strand starting at position 3367 of SEQ ID NO: 1882380
uuguuuaauguccauacca

SEQ ID NO: 2116639 - RNA, 19 nt, Artificial Sequence
  Description of Artificial Sequence: Synthetic oligonucleotide
  Antisense strand to SEQ ID NO: 2116638
ugguauggacauuaaacaa

SEQ ID NO: 2116640 - RNA, 19 nt, Artificial Sequence
  Description of Artificial Sequence: Synthetic oligonucleotide
  Sense strand starting at position 3485 of SEQ ID NO: 1882380
uguguuaccauuuguugac

SEQ ID NO: 2116641 - RNA, 19 nt, Artificial Sequence
  Description of Artificial Sequence: Synthetic oligonucleotide
  Antisense strand to SEQ ID NO: 2116640
gucaacaaaugguaacaca

SEQ ID NO: 2116642 - RNA, 19 nt, Artificial Sequence
  Description of Artificial Sequence: Synthetic oligonucleotide
  Sense strand starting at position 3486 of SEQ ID NO: 1882380
guguuaccauuuguugacu

SEQ ID NO: 2116643 - RNA, 19 nt, Artificial Sequence
  Description of Artificial Sequence: Synthetic oligonucleotide
  Antisense strand to SEQ ID NO: 2116642
agucaacaaaugguaacac

SEQ ID NO: 2116644 - RNA, 19 nt, Artificial Sequence
  Description of Artificial Sequence: Synthetic oligonucleotide
  Sense strand starting at position 3607 of SEQ ID NO: 1882380
uuugaucgaucucuuguua

SEQ ID NO: 2116645 - RNA, 19 nt, Artificial Sequence
  Description of Artificial Sequence: Synthetic oligonucleotide
  Antisense strand to SEQ ID NO: 2116644
uaacaagagaucgaucaaa

SEQ ID NO: 2116646 - RNA, 19 nt, Artificial Sequence
  Description of Artificial Sequence: Synthetic oligonucleotide
  Sense strand starting at position 3846 of SEQ ID NO: 1882380
gguaaagacaagugauagu

SEQ ID NO: 2116647 - RNA, 19 nt, Artificial Sequence
  Description of Artificial Sequence: Synthetic oligonucleotide
  Antisense strand to SEQ ID NO: 2116646
acuaucacuugucuuuacc

SEQ ID NO: 2116648 - RNA, 19 nt, Artificial Sequence
  Description of Artificial Sequence: Synthetic oligonucleotide
  Sense strand starting at position 3855 of SEQ ID NO: 1882380
aagugauaguuucugaaau

SEQ ID NO: 2116649 - RNA, 19 nt, Artificial Sequence
  Description of Artificial Sequence: Synthetic oligonucleotide
  Antisense strand to SEQ ID NO: 2116648
auuucagaaacuaucacuu

SEQ ID NO: 2116650 - RNA, 19 nt, Artificial Sequence
  Description of Artificial Sequence: Synthetic oligonucleotide
  Sense strand starting at position 3974 of SEQ ID NO: 1882380
agaguucuaccguaguaua

SEQ ID NO: 2116651 - RNA, 19 nt, Artificial Sequence
  Description of Artificial Sequence: Synthetic oligonucleotide
  Antisense strand to SEQ ID NO: 2116650
uauacuacgguagaacucu

SEQ ID NO: 2116652 - RNA, 19 nt, Artificial Sequence
  Description of Artificial Sequence: Synthetic oligonucleotide
  Sense strand starting at position 288 of SEQ ID NO: 1882381
augcuaagucaaugaaaga

SEQ ID NO: 2116653 - RNA, 19 nt, Artificial Sequence
  Description of Artificial Sequence: Synthetic oligonucleotide
  Antisense strand to SEQ ID NO: 2116652
ucuuucauugacuuagcau

SEQ ID NO: 2116654 - RNA, 19 nt, Artificial Sequence
  Description of Artificial Sequence: Synthetic oligonucleotide
  Sense strand starting at position 318 of SEQ ID NO: 1882381
agaauuggcucccuaaaca

SEQ ID NO: 2116655 - RNA, 19 nt, Artificial Sequence
  Description of Artificial Sequence: Synthetic oligonucleotide
  Antisense strand to SEQ ID NO: 2116654
uguuuagggagccaauucu

SEQ ID NO: 2116656 - RNA, 19 nt, Artificial Sequence
  Description of Artificial Sequence: Synthetic oligonucleotide
  Sense strand starting at position 340 of SEQ ID NO: 1882381
agaguugaguguuuauaua

SEQ ID NO: 2116657 - RNA, 19 nt, Artificial Sequence
  Description of Artificial Sequence: Synthetic oligonucleotide
  Antisense strand to SEQ ID NO: 2116656
uauauaaacacucaacucu

SEQ ID NO: 2116658 - RNA, 19 nt, Artificial Sequence
  Description of Artificial Sequence: Synthetic oligonucleotide
  Sense strand starting at position 406 of SEQ ID NO: 1882381
ggagacuaaugagaaauaa

SEQ ID NO: 2116659 - RNA, 19 nt, Artificial Sequence
  Description of Artificial Sequence: Synthetic oligonucleotide
  Antisense strand to SEQ ID NO: 2116658
uuauuucucauuagucucc

SEQ ID NO: 2116660 - RNA, 19 nt, Artificial Sequence
  Description of Artificial Sequence: Synthetic oligonucleotide
  Sense strand starting at position 642 of SEQ ID NO: 1882381
ccacaucaguggguccaaa

SEQ ID NO: 2116661 - RNA, 19 nt, Artificial Sequence
  Description of Artificial Sequence: Synthetic oligonucleotide
  Antisense strand to SEQ ID NO: 2116660
uuuggacccacugaugugg

SEQ ID NO: 2116662 - RNA, 19 nt, Artificial Sequence
  Description of Artificial Sequence: Synthetic oligonucleotide
  Sense strand starting at position 716 of SEQ ID NO: 1882381
auuccaugugcuggagaga

SEQ ID NO: 2116663 - RNA, 19 nt, Artificial Sequence
  Description of Artificial Sequence: Synthetic oligonucleotide
  Antisense strand to SEQ ID NO: 2116662
ucucuccagcacauggaau

SEQ ID NO: 2116664 - RNA, 19 nt, Artificial Sequence
  Description of Artificial Sequence: Synthetic oligonucleotide
  Sense strand starting at position 717 of SEQ ID NO: 1882381
uuccaugugcuggagagau

SEQ ID NO: 2116665 - RNA, 19 nt, Artificial Sequence
  Description of Artificial Sequence: Synthetic oligonucleotide
  Antisense strand to SEQ ID NO: 2116664
aucucuccagcacauggaa

SEQ ID NO: 2116666 - RNA, 19 nt, Artificial Sequence
  Description of Artificial Sequence: Synthetic oligonucleotide
  Sense strand starting at position 859 of SEQ ID NO: 1882381
gugguauagcuguagacuc

SEQ ID NO: 2116667 - RNA, 19 nt, Artificial Sequence
  Description of Artificial Sequence: Synthetic oligonucleotide
  Antisense strand to SEQ ID NO: 2116666
gagucuacagcuauaccac

SEQ ID NO: 2116668 - RNA, 19 nt, Artificial Sequence
  Description of Artificial Sequence: Synthetic oligonucleotide
  Sense strand starting at position 876 of SEQ ID NO: 1882381
ucagguuacuuucuaauga

SEQ ID NO: 2116669 - RNA, 19 nt, Artificial Sequence
  Description of Artificial Sequence: Synthetic oligonucleotide
  Antisense strand to SEQ ID NO: 2116668
ucauuagaaaguaaccuga

SEQ ID NO: 2116670 - RNA, 19 nt, Artificial Sequence
  Description of Artificial Sequence: Synthetic oligonucleotide
  Sense strand starting at position 940 of SEQ ID NO: 1882381
guuagauggugaucagggu

SEQ ID NO: 2116671 - RNA, 19 nt, Artificial Sequence
  Description of Artificial Sequence: Synthetic oligonucleotide
  Antisense strand to SEQ ID NO: 2116670
acccugaucaccaucuaac

SEQ ID NO: 2116672 - RNA, 19 nt, Artificial Sequence
  Description of Artificial Sequence: Synthetic oligonucleotide
  Sense strand starting at position 944 of SEQ ID NO: 1882381
gauggugaucaggguuaag

SEQ ID NO: 2116673 - RNA, 19 nt, Artificial Sequence
  Description of Artificial Sequence: Synthetic oligonucleotide
  Antisense strand to SEQ ID NO: 2116672
cuuaacccugaucaccauc

SEQ ID NO: 2116674 - RNA, 19 nt, Artificial Sequence
  Description of Artificial Sequence: Synthetic oligonucleotide
  Sense strand starting at position 1035 of SEQ ID NO: 1882381
cugggaagcucauuaagaa

SEQ ID NO: 2116675 - RNA, 19 nt, Artificial Sequence
  Description of Artificial Sequence: Synthetic oligonucleotide
  Antisense strand to SEQ ID NO: 2116674
uucuuaaugagcuucccag

SEQ ID NO: 2116676 - RNA, 19 nt, Artificial Sequence
  Description of Artificial Sequence: Synthetic oligonucleotide
  Sense strand starting at position 1042 of SEQ ID NO: 1882381
gcucauuaagaagguaaga

SEQ ID NO: 2116677 - RNA, 19 nt, Artificial Sequence
  Description of Artificial Sequence: Synthetic oligonucleotide
  Antisense strand to SEQ ID NO: 2116676
ucuuaccuucuuaaugagc

SEQ ID NO: 2116678 - RNA, 19 nt, Artificial Sequence
  Description of Artificial Sequence: Synthetic oligonucleotide
  Sense strand starting at position 1649 of SEQ ID NO: 1882381
aaaggugagaugugaguaa

SEQ ID NO: 2116679 - RNA, 19 nt, Artificial Sequence
  Description of Artificial Sequence: Synthetic oligonucleotide
  Antisense strand to SEQ ID NO: 2116678
uuacucacaucucaccuuu

SEQ ID NO: 2116680 - RNA, 19 nt, Artificial Sequence
  Description of Artificial Sequence: Synthetic oligonucleotide
  Sense strand starting at position 1698 of SEQ ID NO: 1882381
agauauuuguaccugcagu

SEQ ID NO: 2116681 - RNA, 19 nt, Artificial Sequence
  Description of Artificial Sequence: Synthetic oligonucleotide
  Antisense strand to SEQ ID NO: 2116680
acugcagguacaaauaucu

SEQ ID NO: 2116682 - RNA, 19 nt, Artificial Sequence
  Description of Artificial Sequence: Synthetic oligonucleotide
  Sense strand starting at position 1816 of SEQ ID NO: 1882381
gggucuuugaggugauuac

SEQ ID NO: 2116683 - RNA, 19 nt, Artificial Sequence
  Description of Artificial Sequence: Synthetic oligonucleotide
  Antisense strand to SEQ ID NO: 2116682
guaaucaccucaaagaccc

SEQ ID NO: 2116684 - RNA, 19 nt, Artificial Sequence
  Description of Artificial Sequence: Synthetic oligonucleotide
  Sense strand starting at position 1817 of SEQ ID NO: 1882381
ggucuuugaggugauuacu

SEQ ID NO: 2116685 - RNA, 19 nt, Artificial Sequence
  Description of Artificial Sequence: Synthetic oligonucleotide
  Antisense strand to SEQ ID NO: 2116684
aguaaucaccucaaagacc

SEQ ID NO: 2116686 - RNA, 19 nt, Artificial Sequence
  Description of Artificial Sequence: Synthetic oligonucleotide
  Sense strand starting at position 1826 of SEQ ID NO: 1882381
ggugauuacucaccuaaug

SEQ ID NO: 2116687 - RNA, 19 nt, Artificial Sequence
  Description of Artificial Sequence: Synthetic oligonucleotide
  Antisense strand to SEQ ID NO: 2116686
cauuaggugaguaaucacc

SEQ ID NO: 2116688 - RNA, 19 nt, Artificial Sequence
  Description of Artificial Sequence: Synthetic oligonucleotide
  Sense strand starting at position 1930 of SEQ ID NO: 1882381
cguuguuuggccuugucaa

SEQ ID NO: 2116689 - RNA, 19 nt, Artificial Sequence
  Description of Artificial Sequence: Synthetic oligonucleotide
  Antisense strand to SEQ ID NO: 2116688
uugacaaggccaaacaacg

SEQ ID NO: 2116690 - RNA, 19 nt, Artificial Sequence
  Description of Artificial Sequence: Synthetic oligonucleotide
  Sense strand starting at position 1990 of SEQ ID NO: 1882381
gauuguucugagcagacag

SEQ ID NO: 2116691 - RNA, 19 nt, Artificial Sequence
  Description of Artificial Sequence: Synthetic oligonucleotide
  Antisense strand to SEQ ID NO: 2116690
cugucugcucagaacaauc

SEQ ID NO: 2116692 - RNA, 19 nt, Artificial Sequence
  Description of Artificial Sequence: Synthetic oligonucleotide
  Sense strand starting at position 2034 of SEQ ID NO: 1882381
uucucaugauugccucaga

SEQ ID NO: 2116693 - RNA, 19 nt, Artificial Sequence
  Description of Artificial Sequence: Synthetic oligonucleotide
  Antisense strand to SEQ ID NO: 2116692
ucugaggcaaucaugagaa

SEQ ID NO: 2116694 - RNA, 19 nt, Artificial Sequence
  Description of Artificial Sequence: Synthetic oligonucleotide
  Sense strand starting at position 2035 of SEQ ID NO: 1882381
ucucaugauugccucagaa

SEQ ID NO: 2116695 - RNA, 19 nt, Artificial Sequence
  Description of Artificial Sequence: Synthetic oligonucleotide
  Antisense strand to SEQ ID NO: 2116694
uucugaggcaaucaugaga

SEQ ID NO: 2116696 - RNA, 19 nt, Artificial Sequence
  Description of Artificial Sequence: Synthetic oligonucleotide
  Sense strand starting at position 2037 of SEQ ID NO: 1882381
ucaugauugccucagaaug

SEQ ID NO: 2116697 - RNA, 19 nt, Artificial Sequence
  Description of Artificial Sequence: Synthetic oligonucleotide
  Antisense strand to SEQ ID NO: 2116696
cauucugaggcaaucauga

SEQ ID NO: 2116698 - RNA, 19 nt, Artificial Sequence
  Description of Artificial Sequence: Synthetic oligonucleotide
  Sense strand starting at position 2042 of SEQ ID NO: 1882381
auugccucagaaugaaauu

SEQ ID NO: 2116699 - RNA, 19 nt, Artificial Sequence
  Description of Artificial Sequence: Synthetic oligonucleotide
  Antisense strand to SEQ ID NO: 2116698
aauuucauucugaggcaau

SEQ ID NO: 2116700 - RNA, 19 nt, Artificial Sequence
  Description of Artificial Sequence: Synthetic oligonucleotide
  Sense strand starting at position 2191 of SEQ ID NO: 1882381
agaugauucucuguccuuc

SEQ ID NO: 2116701 - RNA, 19 nt, Artificial Sequence
  Description of Artificial Sequence: Synthetic oligonucleotide
  Antisense strand to SEQ ID NO: 2116700
gaaggacagagaaucaucu

SEQ ID NO: 2116702 - RNA, 19 nt, Artificial Sequence
  Description of Artificial Sequence: Synthetic oligonucleotide
  Sense strand starting at position 2193 of SEQ ID NO: 1882381
augauucucuguccuucua

SEQ ID NO: 2116703 - RNA, 19 nt, Artificial Sequence
  Description of Artificial Sequence: Synthetic oligonucleotide
  Antisense strand to SEQ ID NO: 2116702
uagaaggacagagaaucau

SEQ ID NO: 2116704 - RNA, 19 nt, Artificial Sequence
  Description of Artificial Sequence: Synthetic oligonucleotide
  Sense strand starting at position 2534 of SEQ ID NO: 1882381
cucaucaagguuuauguau

SEQ ID NO: 2116705 - RNA, 19 nt, Artificial Sequence
  Description of Artificial Sequence: Synthetic oligonucleotide
  Antisense strand to SEQ ID NO: 2116704
auacauaaaccuugaugag

SEQ ID NO: 2116706 - RNA, 19 nt, Artificial Sequence
  Description of Artificial Sequence: Synthetic oligonucleotide
  Sense strand starting at position 3211 of SEQ ID NO: 1882381
ucucgaagagcucaagugu

SEQ ID NO: 2116707 - RNA, 19 nt, Artificial Sequence
  Description of Artificial Sequence: Synthetic oligonucleotide
  Antisense strand to SEQ ID NO: 2116706
acacuugagcucuucgaga

SEQ ID NO: 2116708 - RNA, 19 nt, Artificial Sequence
  Description of Artificial Sequence: Synthetic oligonucleotide
  Sense strand starting at position 3242 of SEQ ID NO: 1882381
gacagagguagccguaaga

SEQ ID NO: 2116709 - RNA, 19 nt, Artificial Sequence
  Description of Artificial Sequence: Synthetic oligonucleotide
  Antisense strand to SEQ ID NO: 2116708
ucuuacggcuaccucuguc

SEQ ID NO: 2116710 - RNA, 19 nt, Artificial Sequence
  Description of Artificial Sequence: Synthetic oligonucleotide
  Sense strand starting at position 3256 of SEQ ID NO: 1882381
uaagaucuugaagggcauu

SEQ ID NO: 2116711 - RNA, 19 nt, Artificial Sequence
  Description of Artificial Sequence: Synthetic oligonucleotide
  Antisense strand to SEQ ID NO: 2116710
aaugcccuucaagaucuua

SEQ ID NO: 2116712 - RNA, 19 nt, Artificial Sequence
  Description of Artificial Sequence: Synthetic oligonucleotide
  Sense strand starting at position 3315 of SEQ ID NO: 1882381
cuggguaauuuauacccaa

SEQ ID NO: 2116713 - RNA, 19 nt, Artificial Sequence
  Description of Artificial Sequence: Synthetic oligonucleotide
  Antisense strand to SEQ ID NO: 2116712
uuggguauaaauuacccag

SEQ ID NO: 2116714 - RNA, 19 nt, Artificial Sequence
  Description of Artificial Sequence: Synthetic oligonucleotide
  Sense strand starting at position 3333 of SEQ ID NO: 1882381
auagaaaugcuuugcucac

SEQ ID NO: 2116715 - RNA, 19 nt, Artificial Sequence
  Description of Artificial Sequence: Synthetic oligonucleotide
  Antisense strand to SEQ ID NO: 2116714
gugagcaaagcauuucuau

SEQ ID NO: 2116716 - RNA, 19 nt, Artificial Sequence
  Description of Artificial Sequence: Synthetic oligonucleotide
  Sense strand starting at position 3409 of SEQ ID NO: 1882381
gggccuacuuccucuagau

SEQ ID NO: 2116717 - RNA, 19 nt, Artificial Sequence
  Description of Artificial Sequence: Synthetic oligonucleotide
  Antisense strand to SEQ ID NO: 2116716
aucuagaggaaguaggccc

SEQ ID NO: 2116718 - RNA, 19 nt, Artificial Sequence
  Description of Artificial Sequence: Synthetic oligonucleotide
  Sense strand starting at position 3413 of SEQ ID NO: 1882381
cuacuuccucuagauggua

SEQ ID NO: 2116719 - RNA, 19 nt, Artificial Sequence
  Description of Artificial Sequence: Synthetic oligonucleotide
  Antisense strand to SEQ ID NO: 2116718
uaccaucuagaggaaguag

SEQ ID NO: 2116720 - RNA, 19 nt, Artificial Sequence
  Description of Artificial Sequence: Synthetic oligonucleotide
  Sense strand starting at position 3641 of SEQ ID NO: 1882381
gcauuuaugcugugcuaag

SEQ ID NO: 2116721 - RNA, 19 nt, Artificial Sequence
  Description of Artificial Sequence: Synthetic oligonucleotide
  Antisense strand to SEQ ID NO: 2116720
cuuagcacagcauaaaugc

SEQ ID NO: 2116722 - RNA, 19 nt, Artificial Sequence
  Description of Artificial Sequence: Synthetic oligonucleotide
  Sense strand starting at position 3855 of SEQ ID NO: 1882381
gugcuacuucuacagagau

SEQ ID NO: 2116723 - RNA, 19 nt, Artificial Sequence
  Description of Artificial Sequence: Synthetic oligonucleotide
  Antisense strand to SEQ ID NO: 2116722
aucucuguagaaguagcac

SEQ ID NO: 2116724 - RNA, 19 nt, Artificial Sequence
  Description of Artificial Sequence: Synthetic oligonucleotide
  Sense strand starting at position 3878 of SEQ ID NO: 1882381
aggcaacuccggugagaau

SEQ ID NO: 2116725 - RNA, 19 nt, Artificial Sequence
  Description of Artificial Sequence: Synthetic oligonucleotide
  Antisense strand to SEQ ID NO: 2116724
auucucaccggaguugccu

SEQ ID NO: 2116726 - RNA, 19 nt, Artificial Sequence
  Description of Artificial Sequence: Synthetic oligonucleotide
  Sense strand starting at position 3879 of SEQ ID NO: 1882381
ggcaacuccggugagaaua

SEQ ID NO: 2116727 - RNA, 19 nt, Artificial Sequence
  Description of Artificial Sequence: Synthetic oligonucleotide
  Antisense strand to SEQ ID NO: 2116726
uauucucaccggaguugcc

SEQ ID NO: 2116728 - RNA, 19 nt, Artificial Sequence
  Description of Artificial Sequence: Synthetic oligonucleotide
  Sense strand starting at position 3938 of SEQ ID NO: 1882381
cugagaacaguuggcaaua

SEQ ID NO: 2116729 - RNA, 19 nt, Artificial Sequence
  Description of Artificial Sequence: Synthetic oligonucleotide
  Antisense strand to SEQ ID NO: 2116728
uauugccaacuguucucag

SEQ ID NO: 2116730 - RNA, 19 nt, Artificial Sequence
  Description of Artificial Sequence: Synthetic oligonucleotide
  Sense strand starting at position 3950 of SEQ ID NO: 1882381
ggcaauaaauuugaaauac

SEQ ID NO: 2116731 - RNA, 19 nt, Artificial Sequence
  Description of Artificial Sequence: Synthetic oligonucleotide
  Antisense strand to SEQ ID NO: 2116730
guauuucaaauuuauugcc

SEQ ID NO: 2116732 - RNA, 19 nt, Artificial Sequence
  Description of Artificial Sequence: Synthetic oligonucleotide
  Sense strand starting at position 290 of SEQ ID NO: 1882382
uauacaaugugguucuaag

SEQ ID NO: 2116733 - RNA, 19 nt, Artificial Sequence
  Description of Artificial Sequence: Synthetic oligonucleotide
  Antisense strand to SEQ ID NO: 2116732
cuuagaaccacauuguaua

SEQ ID NO: 2116734 - RNA, 19 nt, Artificial Sequence
  Description of Artificial Sequence: Synthetic oligonucleotide
  Sense strand starting at position 302 of SEQ ID NO: 1882382
uucuaagacuuucuguaag

SEQ ID NO: 2116735 - RNA, 19 nt, Artificial Sequence
  Description of Artificial Sequence: Synthetic oligonucleotide
  Antisense strand to SEQ ID NO: 2116734
cuuacagaaagucuuagaa

SEQ ID NO: 2116736 - RNA, 19 nt, Artificial Sequence
  Description of Artificial Sequence: Synthetic oligonucleotide
  Sense strand starting at position 304 of SEQ ID NO: 1882382
cuaagacuuucuguaaguc

SEQ ID NO: 2116737 - RNA, 19 nt, Artificial Sequence
  Description of Artificial Sequence: Synthetic oligonucleotide
  Antisense strand to SEQ ID NO: 2116736
gacuuacagaaagucuuag

SEQ ID NO: 2116738 - RNA, 19 nt, Artificial Sequence
  Description of Artificial Sequence: Synthetic oligonucleotide
  Sense strand starting at position 318 of SEQ ID NO: 1882382
aagucuucucgggaggcaa

SEQ ID NO: 2116739 - RNA, 19 nt, Artificial Sequence
  Description of Artificial Sequence: Synthetic oligonucleotide
  Antisense strand to SEQ ID NO: 2116738
uugccucccgagaagacuu

SEQ ID NO: 2116740 - RNA, 19 nt, Artificial Sequence
  Description of Artificial Sequence: Synthetic oligonucleotide
  Sense strand starting at position 373 of SEQ ID NO: 1882382
ugccuaccucuagaaugaa

SEQ ID NO: 2116741 - RNA, 19 nt, Artificial Sequence
  Description of Artificial Sequence: Synthetic oligonucleotide
  Antisense strand to SEQ ID NO: 2116740
uucauucuagagguaggca

SEQ ID NO: 2116742 - RNA, 19 nt, Artificial Sequence
  Description of Artificial Sequence: Synthetic oligonucleotide
  Sense strand starting at position 592 of SEQ ID NO: 1882382
cacacauuggcaugugaga

SEQ ID NO: 2116743 - RNA, 19 nt, Artificial Sequence
  Description of Artificial Sequence: Synthetic oligonucleotide
  Antisense strand to SEQ ID NO: 2116742
ucucacaugccaaugugug

SEQ ID NO: 2116744 - RNA, 19 nt, Artificial Sequence
  Description of Artificial Sequence: Synthetic oligonucleotide
  Sense strand starting at position 605 of SEQ ID NO: 1882382
gugagaagcacugaguuag

SEQ ID NO: 2116745 - RNA, 19 nt, Artificial Sequence
  Description of Artificial Sequence: Synthetic oligonucleotide
  Antisense strand to SEQ ID NO: 2116744
cuaacucagugcuucucac

SEQ ID NO: 2116746 - RNA, 19 nt, Artificial Sequence
  Description of Artificial Sequence: Synthetic oligonucleotide
  Sense strand starting at position 653 of SEQ ID NO: 1882382
gguccuccucucugaacaa

SEQ ID NO: 2116747 - RNA, 19 nt, Artificial Sequence
  Description of Artificial Sequence: Synthetic oligonucleotide
  Antisense strand to SEQ ID NO: 2116746
uuguucagagaggaggacc

SEQ ID NO: 2116748 - RNA, 19 nt, Artificial Sequence
  Description of Artificial Sequence: Synthetic oligonucleotide
  Sense strand starting at position 870 of SEQ ID NO: 1882382
gaaagcaaguuucuggauu

SEQ ID NO: 2116749 - RNA, 19 nt, Artificial Sequence
  Description of Artificial Sequence: Synthetic oligonucleotide
  Antisense strand to SEQ ID NO: 2116748
aauccagaaacuugcuuuc

SEQ ID NO: 2116750 - RNA, 19 nt, Artificial Sequence
  Description of Artificial Sequence: Synthetic oligonucleotide
  Sense strand starting at position 944 of SEQ ID NO: 1882382
uagcuuugucaugagacau

SEQ ID NO: 2116751 - RNA, 19 nt, Artificial Sequence
  Description of Artificial Sequence: Synthetic oligonucleotide
  Antisense strand to SEQ ID NO: 2116750
augucucaugacaaagcua

SEQ ID NO: 2116752 - RNA, 19 nt, Artificial Sequence
  Description of Artificial Sequence: Synthetic oligonucleotide
  Sense strand starting at position 1037 of SEQ ID NO: 1882382
uagaaaguuuaaguuguca

SEQ ID NO: 2116753 - RNA, 19 nt, Artificial Sequence
  Description of Artificial Sequence: Synthetic oligonucleotide
  Antisense strand to SEQ ID NO: 2116752
ugacaacuuaaacuuucua

SEQ ID NO: 2116754 - RNA, 19 nt, Artificial Sequence
  Description of Artificial Sequence: Synthetic oligonucleotide
  Sense strand starting at position 1039 of SEQ ID NO: 1882382
gaaaguuuaaguugucagg

SEQ ID NO: 2116755 - RNA, 19 nt, Artificial Sequence
  Description of Artificial Sequence: Synthetic oligonucleotide
  Antisense strand to SEQ ID NO: 2116754
ccugacaacuuaaacuuuc

SEQ ID NO: 2116756 - RNA, 19 nt, Artificial Sequence
  Description of Artificial Sequence: Synthetic oligonucleotide
  Sense strand starting at position 1041 of SEQ ID NO: 1882382
aaguuuaaguugucaggga

SEQ ID NO: 2116757 - RNA, 19 nt, Artificial Sequence
  Description of Artificial Sequence: Synthetic oligonucleotide
  Antisense strand to SEQ ID NO: 2116756
ucccugacaacuuaaacuu

SEQ ID NO: 2116758 - RNA, 19 nt, Artificial Sequence
  Description of Artificial Sequence: Synthetic oligonucleotide
  Sense strand starting at position 1045 of SEQ ID NO: 1882382
uuaaguugucagggacuga

SEQ ID NO: 2116759 - RNA, 19 nt, Artificial Sequence
  Description of Artificial Sequence: Synthetic oligonucleotide
  Antisense strand to SEQ ID NO: 2116758
ucagucccugacaacuuaa

SEQ ID NO: 2116760 - RNA, 19 nt, Artificial Sequence
  Description of Artificial Sequence: Synthetic oligonucleotide
  Sense strand starting at position 1119 of SEQ ID NO: 1882382
ggugaaaccugagucaucu

SEQ ID NO: 2116761 - RNA, 19 nt, Artificial Sequence
  Description of Artificial Sequence: Synthetic oligonucleotide
  Antisense strand to SEQ ID NO: 2116760
agaugacucagguuucacc

SEQ ID NO: 2116762 - RNA, 19 nt, Artificial Sequence
  Description of Artificial Sequence: Synthetic oligonucleotide
  Sense strand starting at position 1123 of SEQ ID NO: 1882382
aaaccugagucaucugaag

SEQ ID NO: 2116763 - RNA, 19 nt, Artificial Sequence
  Description of Artificial Sequence: Synthetic oligonucleotide
  Antisense strand to SEQ ID NO: 2116762
cuucagaugacucagguuu

SEQ ID NO: 2116764 - RNA, 19 nt, Artificial Sequence
  Description of Artificial Sequence: Synthetic oligonucleotide
  Sense strand starting at position 1331 of SEQ ID NO: 1882382
aaaggcaucuucuuaggua

SEQ ID NO: 2116765 - RNA, 19 nt, Artificial Sequence
  Description of Artificial Sequence: Synthetic oligonucleotide
  Antisense strand to SEQ ID NO: 2116764
uaccuaagaagaugccuuu

SEQ ID NO: 2116766 - RNA, 19 nt, Artificial Sequence
  Description of Artificial Sequence: Synthetic oligonucleotide
  Sense strand starting at position 1335 of SEQ ID NO: 1882382
gcaucuucuuagguaauuu

SEQ ID NO: 2116767 - RNA, 19 nt, Artificial Sequence
  Description of Artificial Sequence: Synthetic oligonucleotide
  Antisense strand to SEQ ID NO: 2116766
aaauuaccuaagaagaugc

SEQ ID NO: 2116768 - RNA, 19 nt, Artificial Sequence
  Description of Artificial Sequence: Synthetic oligonucleotide
  Sense strand starting at position 1392 of SEQ ID NO: 1882382
gugcgaguucucuucuucu

SEQ ID NO: 2116769 - RNA, 19 nt, Artificial Sequence
  Description of Artificial Sequence: Synthetic oligonucleotide
  Antisense strand to SEQ ID NO: 2116768
agaagaagagaacucgcac

SEQ ID NO: 2116770 - RNA, 19 nt, Artificial Sequence
  Description of Artificial Sequence: Synthetic oligonucleotide
  Sense strand starting at position 1394 of SEQ ID NO: 1882382
gcgaguucucuucuucuuu

SEQ ID NO: 2116771 - RNA, 19 nt, Artificial Sequence
  Description of Artificial Sequence: Synthetic oligonucleotide
  Antisense strand to SEQ ID NO: 2116770
aaagaagaagagaacucgc

SEQ ID NO: 2116772 - RNA, 19 nt, Artificial Sequence
  Description of Artificial Sequence: Synthetic oligonucleotide
  Sense strand starting at position 1585 of SEQ ID NO: 1882382
gugugugccguuucucuaa

SEQ ID NO: 2116773 - RNA, 19 nt, Artificial Sequence
  Description of Artificial Sequence: Synthetic oligonucleotide
  Antisense strand to SEQ ID NO: 2116772
uuagagaaacggcacacac

SEQ ID NO: 2116774 - RNA, 19 nt, Artificial Sequence
  Description of Artificial Sequence: Synthetic oligonucleotide
  Sense strand starting at position 1609 of SEQ ID NO: 1882382
ugacucauagucuggagga

SEQ ID NO: 2116775 - RNA, 19 nt, Artificial Sequence
  Description of Artificial Sequence: Synthetic oligonucleotide
  Antisense strand to SEQ ID NO: 2116774
uccuccagacuaugaguca

SEQ ID NO: 2116776 - RNA, 19 nt, Artificial Sequence
  Description of Artificial Sequence: Synthetic oligonucleotide
  Sense strand starting at position 1678 of SEQ ID NO: 1882382
caaggaugggccuguuuac

SEQ ID NO: 2116777 - RNA, 19 nt, Artificial Sequence
  Description of Artificial Sequence: Synthetic oligonucleotide
  Antisense strand to SEQ ID NO: 2116776
guaaacaggcccauccuug

SEQ ID NO: 2116778 - RNA, 19 nt, Artificial Sequence
  Description of Artificial Sequence: Synthetic oligonucleotide
  Sense strand starting at position 1726 of SEQ ID NO: 1882382
guguaaacagccugaggaa

SEQ ID NO: 2116779 - RNA, 19 nt, Artificial Sequence
  Description of Artificial Sequence: Synthetic oligonucleotide
  Antisense strand to SEQ ID NO: 2116778
uuccucaggcuguuuacac

SEQ ID NO: 2116780 - RNA, 19 nt, Artificial Sequence
  Description of Artificial Sequence: Synthetic oligonucleotide
  Sense strand starting at position 2310 of SEQ ID NO: 1882382
gagguuugaccauauguag

SEQ ID NO: 2116781 - RNA, 19 nt, Artificial Sequence
  Description of Artificial Sequence: Synthetic oligonucleotide
  Antisense strand to SEQ ID NO: 2116780
cuacauauggucaaaccuc

SEQ ID NO: 2116782 - RNA, 19 nt, Artificial Sequence
  Description of Artificial Sequence: Synthetic oligonucleotide
  Sense strand starting at position 2715 of SEQ ID NO: 1882382
uucgcuauaccuggaauuu

SEQ ID NO: 2116783 - RNA, 19 nt, Artificial Sequence
  Description of Artificial Sequence: Synthetic oligonucleotide
  Antisense strand to SEQ ID NO: 2116782
aaauuccagguauagcgaa

SEQ ID NO: 2116784 - RNA, 19 nt, Artificial Sequence
  Description of Artificial Sequence: Synthetic oligonucleotide
  Sense strand starting at position 2810 of SEQ ID NO: 1882382
gcagcuacucaaggauaaa

SEQ ID NO: 2116785 - RNA, 19 nt, Artificial Sequence
  Description of Artificial Sequence: Synthetic oligonucleotide
  Antisense strand to SEQ ID NO: 2116784
uuuauccuugaguagcugc

SEQ ID NO: 2116786 - RNA, 19 nt, Artificial Sequence
  Description of Artificial Sequence: Synthetic oligonucleotide
  Sense strand starting at position 2884 of SEQ ID NO: 1882382
aaauaaucacgcugggaua

SEQ ID NO: 2116787 - RNA, 19 nt, Artificial Sequence
  Description of Artificial Sequence: Synthetic oligonucleotide
  Antisense strand to SEQ ID NO: 2116786
uaucccagcgugauuauuu

SEQ ID NO: 2116788 - RNA, 19 nt, Artificial Sequence
  Description of Artificial Sequence: Synthetic oligonucleotide
  Sense strand starting at position 2885 of SEQ ID NO: 1882382
aauaaucacgcugggauaa

SEQ ID NO: 2116789 - RNA, 19 nt, Artificial Sequence
  Description of Artificial Sequence: Synthetic oligonucleotide
  Antisense strand to SEQ ID NO: 2116788
uuaucccagcgugauuauu

SEQ ID NO: 2116790 - RNA, 19 nt, Artificial Sequence
  Description of Artificial Sequence: Synthetic oligonucleotide
  Sense strand starting at position 2897 of SEQ ID NO: 1882382
gggauaagguccucuguaa

SEQ ID NO: 2116791 - RNA, 19 nt, Artificial Sequence
  Description of Artificial Sequence: Synthetic oligonucleotide
  Antisense strand to SEQ ID NO: 2116790
uuacagaggaccuuauccc

SEQ ID NO: 2116792 - RNA, 19 nt, Artificial Sequence
  Description of Artificial Sequence: Synthetic oligonucleotide
  Sense strand starting at position 2995 of SEQ ID NO: 1882382
gugcgguucgugguuuaua

SEQ ID NO: 2116793 - RNA, 19 nt, Artificial Sequence
  Description of Artificial Sequence: Synthetic oligonucleotide
  Antisense strand to SEQ ID NO: 2116792
uauaaaccacgaaccgcac

SEQ ID NO: 2116794 - RNA, 19 nt, Artificial Sequence
  Description of Artificial Sequence: Synthetic oligonucleotide
  Sense strand starting at position 2997 of SEQ ID NO: 1882382
gcgguucgugguuuauaaa

SEQ ID NO: 2116795 - RNA, 19 nt, Artificial Sequence
  Description of Artificial Sequence: Synthetic oligonucleotide
  Antisense strand to SEQ ID NO: 2116794
uuuauaaaccacgaaccgc

SEQ ID NO: 2116796 - RNA, 19 nt, Artificial Sequence
  Description of Artificial Sequence: Synthetic oligonucleotide
  Sense strand starting at position 3042 of SEQ ID NO: 1882382
cuaguagugaugcaugaau

SEQ ID NO: 2116797 - RNA, 19 nt, Artificial Sequence
  Description of Artificial Sequence: Synthetic oligonucleotide
  Antisense strand to SEQ ID NO: 2116796
auucaugcaucacuacuag

SEQ ID NO: 2116798 - RNA, 19 nt, Artificial Sequence
  Description of Artificial Sequence: Synthetic oligonucleotide
  Sense strand starting at position 3044 of SEQ ID NO: 1882382
aguagugaugcaugaauua

SEQ ID NO: 2116799 - RNA, 19 nt, Artificial Sequence
  Description of Artificial Sequence: Synthetic oligonucleotide
  Antisense strand to SEQ ID NO: 2116798
uaauucaugcaucacuacu

SEQ ID NO: 2116800 - RNA, 19 nt, Artificial Sequence
  Description of Artificial Sequence: Synthetic oligonucleotide
  Sense strand starting at position 3137 of SEQ ID NO: 1882382
ggcaauguuaacggaaaca

SEQ ID NO: 2116801 - RNA, 19 nt, Artificial Sequence
  Description of Artificial Sequence: Synthetic oligonucleotide
  Antisense strand to SEQ ID NO: 2116800
uguuuccguuaacauugcc

SEQ ID NO: 2116802 - RNA, 19 nt, Artificial Sequence
  Description of Artificial Sequence: Synthetic oligonucleotide
  Sense strand starting at position 3179 of SEQ ID NO: 1882382
ugccuaucgcacuaggaaa

SEQ ID NO: 2116803 - RNA, 19 nt, Artificial Sequence
  Description of Artificial Sequence: Synthetic oligonucleotide
  Antisense strand to SEQ ID NO: 2116802
uuuccuagugcgauaggca

SEQ ID NO: 2116804 - RNA, 19 nt, Artificial Sequence
  Description of Artificial Sequence: Synthetic oligonucleotide
  Sense strand starting at position 3500 of SEQ ID NO: 1882382
aggucauguguuagguagu

SEQ ID NO: 2116805 - RNA, 19 nt, Artificial Sequence
  Description of Artificial Sequence: Synthetic oligonucleotide
  Antisense strand to SEQ ID NO: 2116804
acuaccuaacacaugaccu

SEQ ID NO: 2116806 - RNA, 19 nt, Artificial Sequence
  Description of Artificial Sequence: Synthetic oligonucleotide
  Sense strand starting at position 3578 of SEQ ID NO: 1882382
uguaaaguccuagauggug

SEQ ID NO: 2116807 - RNA, 19 nt, Artificial Sequence
  Description of Artificial Sequence: Synthetic oligonucleotide
  Antisense strand to SEQ ID NO: 2116806
caccaucuaggacuuuaca

SEQ ID NO: 2116808 - RNA, 19 nt, Artificial Sequence
  Description of Artificial Sequence: Synthetic oligonucleotide
  Sense strand starting at position 3853 of SEQ ID NO: 1882382
ugggcuagucucuaacaca

SEQ ID NO: 2116809 - RNA, 19 nt, Artificial Sequence
  Description of Artificial Sequence: Synthetic oligonucleotide
  Antisense strand to SEQ ID NO: 2116808
uguguuagagacuagccca

SEQ ID NO: 2116810 - RNA, 19 nt, Artificial Sequence
  Description of Artificial Sequence: Synthetic oligonucleotide
  Sense strand starting at position 3902 of SEQ ID NO: 1882382
acagaauaggccuguagga

SEQ ID NO: 2116811 - RNA, 19 nt, Artificial Sequence
  Description of Artificial Sequence: Synthetic oligonucleotide
  Antisense strand to SEQ ID NO: 2116810
uccuacaggccuauucugu

SEQ ID NO: 2116812 - RNA, 19 nt, Artificial Sequence
  Description of Artificial Sequence: Synthetic oligonucleotide
  Sense strand starting at position 89 of SEQ ID NO: 1882383
aguuaagaacuauguaaca

SEQ ID NO: 2116813 - RNA, 19 nt, Artificial Sequence
  Description of Artificial Sequence: Synthetic oligonucleotide
  Antisense strand to SEQ ID NO: 2116812
uguuacauaguucuuaacu

SEQ ID NO: 2116814 - RNA, 19 nt, Artificial Sequence
  Description of Artificial Sequence: Synthetic oligonucleotide
  Sense strand starting at position 747 of SEQ ID NO: 1882383
ugugaaauuccaggauagu

SEQ ID NO: 2116815 - RNA, 19 nt, Artificial Sequence
  Description of Artificial Sequence: Synthetic oligonucleotide
  Antisense strand to SEQ ID NO: 2116814
acuauccuggaauuucaca

SEQ ID NO: 2116816 - RNA, 19 nt, Artificial Sequence
  Description of Artificial Sequence: Synthetic oligonucleotide
  Sense strand starting at position 798 of SEQ ID NO: 1882383
uugccuagggcuggagaaa

SEQ ID NO: 2116817 - RNA, 19 nt, Artificial Sequence
  Description of Artificial Sequence: Synthetic oligonucleotide
  Antisense strand to SEQ ID NO: 2116816
uuucuccagcccuaggcaa

SEQ ID NO: 2116818 - RNA, 19 nt, Artificial Sequence
  Description of Artificial Sequence: Synthetic oligonucleotide
  Sense strand starting at position 799 of SEQ ID NO: 1882383
ugccuagggcuggagaaau

SEQ ID NO: 2116819 - RNA, 19 nt, Artificial Sequence
  Description of Artificial Sequence: Synthetic oligonucleotide
  Antisense strand to SEQ ID NO: 2116818
auuucuccagcccuaggca

SEQ ID NO: 2116820 - RNA, 19 nt, Artificial Sequence
  Description of Artificial Sequence: Synthetic oligonucleotide
  Sense strand starting at position 974 of SEQ ID NO: 1882383
uugcucaacugagugauaa

SEQ ID NO: 2116821 - RNA, 19 nt, Artificial Sequence
  Description of Artificial Sequence: Synthetic oligonucleotide
  Antisense strand to SEQ ID NO: 2116820
uuaucacucaguugagcaa

SEQ ID NO: 2116822 - RNA, 19 nt, Artificial Sequence
  Description of Artificial Sequence: Synthetic oligonucleotide
  Sense strand starting at position 975 of SEQ ID NO: 1882383
ugcucaacugagugauaac

SEQ ID NO: 2116823 - RNA, 19 nt, Artificial Sequence
  Description of Artificial Sequence: Synthetic oligonucleotide
  Antisense strand to SEQ ID NO: 2116822
guuaucacucaguugagca

SEQ ID NO: 2116824 - RNA, 19 nt, Artificial Sequence
  Description of Artificial Sequence: Synthetic oligonucleotide
  Sense strand starting at position 984 of SEQ ID NO: 1882383
gagugauaacucugcugag

SEQ ID NO: 2116825 - RNA, 19 nt, Artificial Sequence
  Description of Artificial Sequence: Synthetic oligonucleotide
  Antisense strand to SEQ ID NO: 2116824
cucagcagaguuaucacuc

SEQ ID NO: 2116826 - RNA, 19 nt, Artificial Sequence
  Description of Artificial Sequence: Synthetic oligonucleotide
  Sense strand starting at position 999 of SEQ ID NO: 1882383
ugagcuaaacuauggaauu

SEQ ID NO: 2116827 - RNA, 19 nt, Artificial Sequence
  Description of Artificial Sequence: Synthetic oligonucleotide
  Antisense strand to SEQ ID NO: 2116826
aauuccauaguuuagcuca

SEQ ID NO: 2116828 - RNA, 19 nt, Artificial Sequence
  Description of Artificial Sequence: Synthetic oligonucleotide
  Sense strand starting at position 1012 of SEQ ID NO: 1882383
ggaauugcacacuggaaau

SEQ ID NO: 2116829 - RNA, 19 nt, Artificial Sequence
  Description of Artificial Sequence: Synthetic oligonucleotide
  Antisense strand to SEQ ID NO: 2116828
auuuccagugugcaauucc

SEQ ID NO: 2116830 - RNA, 19 nt, Artificial Sequence
  Description of Artificial Sequence: Synthetic oligonucleotide
  Sense strand starting at position 1031 of SEQ ID NO: 1882383
gguugaaguguaugggaug

SEQ ID NO: 2116831 - RNA, 19 nt, Artificial Sequence
  Description of Artificial Sequence: Synthetic oligonucleotide
  Antisense strand to SEQ ID NO: 2116830
caucccauacacuucaacc

SEQ ID NO: 2116832 - RNA, 19 nt, Artificial Sequence
  Description of Artificial Sequence: Synthetic oligonucleotide
  Sense strand starting at position 1036 of SEQ ID NO: 1882383
aaguguaugggaugugaau

SEQ ID NO: 2116833 - RNA, 19 nt, Artificial Sequence
  Description of Artificial Sequence: Synthetic oligonucleotide
  Antisense strand to SEQ ID NO: 2116832
auucacaucccauacacuu

SEQ ID NO: 2116834 - RNA, 19 nt, Artificial Sequence
  Description of Artificial Sequence: Synthetic oligonucleotide
  Sense strand starting at position 1038 of SEQ ID NO: 1882383
guguaugggaugugaauug

SEQ ID NO: 2116835 - RNA, 19 nt, Artificial Sequence
  Description of Artificial Sequence: Synthetic oligonucleotide
  Antisense strand to SEQ ID NO: 2116834
caauucacaucccauacac

SEQ ID NO: 2116836 - RNA, 19 nt, Artificial Sequence
  Description of Artificial Sequence: Synthetic oligonucleotide
  Sense strand starting at position 1287 of SEQ ID NO: 1882383
aggcaauugugcccaauga

SEQ ID NO: 2116837 - RNA, 19 nt, Artificial Sequence
  Description of Artificial Sequence: Synthetic oligonucleotide
  Antisense strand to SEQ ID NO: 2116836
ucauugggcacaauugccu

SEQ ID NO: 2116838 - RNA, 19 nt, Artificial Sequence
  Description of Artificial Sequence: Synthetic oligonucleotide
  Sense strand starting at position 1288 of SEQ ID NO: 1882383
ggcaauugugcccaaugau

SEQ ID NO: 2116839 - RNA, 19 nt, Artificial Sequence
  Description of Artificial Sequence: Synthetic oligonucleotide
  Antisense strand to SEQ ID NO: 2116838
aucauugggcacaauugcc

SEQ ID NO: 2116840 - RNA, 19 nt, Artificial Sequence
  Description of Artificial Sequence: Synthetic oligonucleotide
  Sense strand starting at position 1291 of SEQ ID NO: 1882383
aauugugcccaaugauaug

SEQ ID NO: 2116841 - RNA, 19 nt, Artificial Sequence
  Description of Artificial Sequence: Synthetic oligonucleotide
  Antisense strand to SEQ ID NO: 2116840
cauaucauugggcacaauu

SEQ ID NO: 2116842 - RNA, 19 nt, Artificial Sequence
  Description of Artificial Sequence: Synthetic oligonucleotide
  Sense strand starting at position 1302 of SEQ ID NO: 1882383
augauaugccuccaaaugu

SEQ ID NO: 2116843 - RNA, 19 nt, Artificial Sequence
  Description of Artificial Sequence: Synthetic oligonucleotide
  Antisense strand to SEQ ID NO: 2116842
acauuuggaggcauaucau

SEQ ID NO: 2116844 - RNA, 19 nt, Artificial Sequence
  Description of Artificial Sequence: Synthetic oligonucleotide
  Sense strand starting at position 1315 of SEQ ID NO: 1882383
aaauguugccguguuguau

SEQ ID NO: 2116845 - RNA, 19 nt, Artificial Sequence
  Description of Artificial Sequence: Synthetic oligonucleotide
  Antisense strand to SEQ ID NO: 2116844
auacaacacggcaacauuu

SEQ ID NO: 2116846 - RNA, 19 nt, Artificial Sequence
  Description of Artificial Sequence: Synthetic oligonucleotide
  Sense strand starting at position 1316 of SEQ ID NO: 1882383
aauguugccguguuguauu

SEQ ID NO: 2116847 - RNA, 19 nt, Artificial Sequence
  Description of Artificial Sequence: Synthetic oligonucleotide
  Antisense strand to SEQ ID NO: 2116846
aauacaacacggcaacauu

SEQ ID NO: 2116848 - RNA, 19 nt, Artificial Sequence
  Description of Artificial Sequence: Synthetic oligonucleotide
  Sense strand starting at position 1386 of SEQ ID NO: 1882383
auggucuguucuucugaca

SEQ ID NO: 2116849 - RNA, 19 nt, Artificial Sequence
  Description of Artificial Sequence: Synthetic oligonucleotide
  Antisense strand to SEQ ID NO: 2116848
ugucagaagaacagaccau

SEQ ID NO: 2116850 - RNA, 19 nt, Artificial Sequence
  Description of Artificial Sequence: Synthetic oligonucleotide
  Sense strand starting at position 1632 of SEQ ID NO: 1882383
cccagucccuccuugagua

SEQ ID NO: 2116851 - RNA, 19 nt, Artificial Sequence
  Description of Artificial Sequence: Synthetic oligonucleotide
  Antisense strand to SEQ ID NO: 2116850
uacucaaggagggacuggg

SEQ ID NO: 2116852 - RNA, 19 nt, Artificial Sequence
  Description of Artificial Sequence: Synthetic oligonucleotide
  Sense strand starting at position 1771 of SEQ ID NO: 1882383
ucuagcaauuaaguagaaa

SEQ ID NO: 2116853 - RNA, 19 nt, Artificial Sequence
  Description of Artificial Sequence: Synthetic oligonucleotide
  Antisense strand to SEQ ID NO: 2116852
uuucuacuuaauugcuaga

SEQ ID NO: 2116854 - RNA, 19 nt, Artificial Sequence
  Description of Artificial Sequence: Synthetic oligonucleotide
  Sense strand starting at position 1819 of SEQ ID NO: 1882383
caguuaagcucaguggacu

SEQ ID NO: 2116855 - RNA, 19 nt, Artificial Sequence
  Description of Artificial Sequence: Synthetic oligonucleotide
  Antisense strand to SEQ ID NO: 2116854
aguccacugagcuuaacug

SEQ ID NO: 2116856 - RNA, 19 nt, Artificial Sequence
  Description of Artificial Sequence: Synthetic oligonucleotide
  Sense strand starting at position 1820 of SEQ ID NO: 1882383
aguuaagcucaguggacua

SEQ ID NO: 2116857 - RNA, 19 nt, Artificial Sequence
  Description of Artificial Sequence: Synthetic oligonucleotide
  Antisense strand to SEQ ID NO: 2116856
uaguccacugagcuuaacu

SEQ ID NO: 2116858 - RNA, 19 nt, Artificial Sequence
  Description of Artificial Sequence: Synthetic oligonucleotide
  Sense strand starting at position 1878 of SEQ ID NO: 1882383
agugcaaaugcauucguuu

SEQ ID NO: 2116859 - RNA, 19 nt, Artificial Sequence
  Description of Artificial Sequence: Synthetic oligonucleotide
  Antisense strand to SEQ ID NO: 2116858
aaacgaaugcauuugcacu

SEQ ID NO: 2116860 - RNA, 19 nt, Artificial Sequence
  Description of Artificial Sequence: Synthetic oligonucleotide
  Sense strand starting at position 2027 of SEQ ID NO: 1882383
cagucauuugugcgucacu

SEQ ID NO: 2116861 - RNA, 19 nt, Artificial Sequence
  Description of Artificial Sequence: Synthetic oligonucleotide
  Antisense strand to SEQ ID NO: 2116860
agugacgcacaaaugacug

SEQ ID NO: 2116862 - RNA, 19 nt, Artificial Sequence
  Description of Artificial Sequence: Synthetic oligonucleotide
  Sense strand starting at position 2088 of SEQ ID NO: 1882383
ggcagacuuccuugagguu

SEQ ID NO: 2116863 - RNA, 19 nt, Artificial Sequence
  Description of Artificial Sequence: Synthetic oligonucleotide
  Antisense strand to SEQ ID NO: 2116862
aaccucaaggaagucugcc

SEQ ID NO: 2116864 - RNA, 19 nt, Artificial Sequence
  Description of Artificial Sequence: Synthetic oligonucleotide
  Sense strand starting at position 2089 of SEQ ID NO: 1882383
gcagacuuccuugagguuu

SEQ ID NO: 2116865 - RNA, 19 nt, Artificial Sequence
  Description of Artificial Sequence: Synthetic oligonucleotide
  Antisense strand to SEQ ID NO: 2116864
aaaccucaaggaagucugc

SEQ ID NO: 2116866 - RNA, 19 nt, Artificial Sequence
  Description of Artificial Sequence: Synthetic oligonucleotide
  Sense strand starting at position 2114 of SEQ ID NO: 1882383
gacugugagcagugaaauc

SEQ ID NO: 2116867 - RNA, 19 nt, Artificial Sequence
  Description of Artificial Sequence: Synthetic oligonucleotide
  Antisense strand to SEQ ID NO: 2116866
gauuucacugcucacaguc

SEQ ID NO: 2116868 - RNA, 19 nt, Artificial Sequence
  Description of Artificial Sequence: Synthetic oligonucleotide
  Sense strand starting at position 2123 of SEQ ID NO: 1882383
cagugaaaucuguaucugu

SEQ ID NO: 2116869 - RNA, 19 nt, Artificial Sequence
  Description of Artificial Sequence: Synthetic oligonucleotide
  Antisense strand to SEQ ID NO: 2116868
acagauacagauuucacug

SEQ ID NO: 2116870 - RNA, 19 nt, Artificial Sequence
  Description of Artificial Sequence: Synthetic oligonucleotide
  Sense strand starting at position 2544 of SEQ ID NO: 1882383
uggucucucugagucauaa

SEQ ID NO: 2116871 - RNA, 19 nt, Artificial Sequence
  Description of Artificial Sequence: Synthetic oligonucleotide
  Antisense strand to SEQ ID NO: 2116870
uuaugacucagagagacca

SEQ ID NO: 2116872 - RNA, 19 nt, Artificial Sequence
  Description of Artificial Sequence: Synthetic oligonucleotide
  Sense strand starting at position 2592 of SEQ ID NO: 1882383
cuucuuccagaguauauga

SEQ ID NO: 2116873 - RNA, 19 nt, Artificial Sequence
  Description of Artificial Sequence: Synthetic oligonucleotide
  Antisense strand to SEQ ID NO: 2116872
ucauauacucuggaagaag

SEQ ID NO: 2116874 - RNA, 19 nt, Artificial Sequence
  Description of Artificial Sequence: Synthetic oligonucleotide
  Sense strand starting at position 2752 of SEQ ID NO: 1882383
auaauacugcauugguuaa

SEQ ID NO: 2116875 - RNA, 19 nt, Artificial Sequence
  Description of Artificial Sequence: Synthetic oligonucleotide
  Antisense strand to SEQ ID NO: 2116874
uuaaccaaugcaguauuau

SEQ ID NO: 2116876 - RNA, 19 nt, Artificial Sequence
  Description of Artificial Sequence: Synthetic oligonucleotide
  Sense strand starting at position 3157 of SEQ ID NO: 1882383
auugaaugucaacaugcua

SEQ ID NO: 2116877 - RNA, 19 nt, Artificial Sequence
  Description of Artificial Sequence: Synthetic oligonucleotide
  Antisense strand to SEQ ID NO: 2116876
uagcauguugacauucaau

SEQ ID NO: 2116878 - RNA, 19 nt, Artificial Sequence
  Description of Artificial Sequence: Synthetic oligonucleotide
  Sense strand starting at position 3232 of SEQ ID NO: 1882383
uagacauauguguguacau

SEQ ID NO: 2116879 - RNA, 19 nt, Artificial Sequence
  Description of Artificial Sequence: Synthetic oligonucleotide
  Antisense strand to SEQ ID NO: 2116878
auguacacacauaugucua

SEQ ID NO: 2116880 - RNA, 19 nt, Artificial Sequence
  Description of Artificial Sequence: Synthetic oligonucleotide
  Sense strand starting at position 3233 of SEQ ID NO: 1882383
agacauauguguguacauu

SEQ ID NO: 2116881 - RNA, 19 nt, Artificial Sequence
  Description of Artificial Sequence: Synthetic oligonucleotide
  Antisense strand to SEQ ID NO: 2116880
aauguacacacauaugucu

SEQ ID NO: 2116882 - RNA, 19 nt, Artificial Sequence
  Description of Artificial Sequence: Synthetic oligonucleotide
  Sense strand starting at position 3549 of SEQ ID NO: 1882383
uucuaaauggcaugccuua

SEQ ID NO: 2116883 - RNA, 19 nt, Artificial Sequence
  Description of Artificial Sequence: Synthetic oligonucleotide
  Antisense strand to SEQ ID NO: 2116882
uaaggcaugccauuuagaa

SEQ ID NO: 2116884 - RNA, 19 nt, Artificial Sequence
  Description of Artificial Sequence: Synthetic oligonucleotide
  Sense strand starting at position 3695 of SEQ ID NO: 1882383
auuaauggcccaggaacau

SEQ ID NO: 2116885 - RNA, 19 nt, Artificial Sequence
  Description of Artificial Sequence: Synthetic oligonucleotide
  Antisense strand to SEQ ID NO: 2116884
auguuccugggccauuaau

SEQ ID NO: 2116886 - RNA, 19 nt, Artificial Sequence
  Description of Artificial Sequence: Synthetic oligonucleotide
  Sense strand starting at position 3757 of SEQ ID NO: 1882383
ccuugacuucuauaaguga

SEQ ID NO: 2116887 - RNA, 19 nt, Artificial Sequence
  Description of Artificial Sequence: Synthetic oligonucleotide
  Antisense strand to SEQ ID NO: 2116886
ucacuuauagaagucaagg

SEQ ID NO: 2116888 - RNA, 19 nt, Artificial Sequence
  Description of Artificial Sequence: Synthetic oligonucleotide
  Sense strand starting at position 3760 of SEQ ID NO: 1882383
ugacuucuauaagugagaa

SEQ ID NO: 2116889 - RNA, 19 nt, Artificial Sequence
  Description of Artificial Sequence: Synthetic oligonucleotide
  Antisense strand to SEQ ID NO: 2116888
uucucacuuauagaaguca

SEQ ID NO: 2116890 - RNA, 19 nt, Artificial Sequence
  Description of Artificial Sequence: Synthetic oligonucleotide
  Sense strand starting at position 3867 of SEQ ID NO: 1882383
cuuguauguuaaucccauu

SEQ ID NO: 2116891 - RNA, 19 nt, Artificial Sequence
  Description of Artificial Sequence: Synthetic oligonucleotide
  Antisense strand to SEQ ID NO: 2116890
aaugggauuaacauacaag

SEQ ID NO: 2116892 - RNA, 19 nt, Artificial Sequence
  Description of Artificial Sequence: Synthetic oligonucleotide
  Sense strand starting at position 317 of SEQ ID NO: 1882384
gauguaugucuuggugaag

SEQ ID NO: 2116893 - RNA, 19 nt, Artificial Sequence
  Description of Artificial Sequence: Synthetic oligonucleotide
  Antisense strand to SEQ ID NO: 2116892
cuucaccaagacauacauc

SEQ ID NO: 2116894 - RNA, 19 nt, Artificial Sequence
  Description of Artificial Sequence: Synthetic oligonucleotide
  Sense strand starting at position 318 of SEQ ID NO: 1882384
auguaugucuuggugaaga

SEQ ID NO: 2116895 - RNA, 19 nt, Artificial Sequence
  Description of Artificial Sequence: Synthetic oligonucleotide
  Antisense strand to SEQ ID NO: 2116894
ucuucaccaagacauacau

SEQ ID NO: 2116896 - RNA, 19 nt, Artificial Sequence
  Description of Artificial Sequence: Synthetic oligonucleotide
  Sense strand starting at position 320 of SEQ ID NO: 1882384
guaugucuuggugaagaga

SEQ ID NO: 2116897 - RNA, 19 nt, Artificial Sequence
  Description of Artificial Sequence: Synthetic oligonucleotide
  Antisense strand to SEQ ID NO: 2116896
ucucuucaccaagacauac

SEQ ID NO: 2116898 - RNA, 19 nt, Artificial Sequence
  Description of Artificial Sequence: Synthetic oligonucleotide
  Sense strand starting at position 333 of SEQ ID NO: 1882384
aagagaauuugauauggua

SEQ ID NO: 2116899 - RNA, 19 nt, Artificial Sequence
  Description of Artificial Sequence: Synthetic oligonucleotide
  Antisense strand to SEQ ID NO: 2116898
uaccauaucaaauucucuu

SEQ ID NO: 2116900 - RNA, 19 nt, Artificial Sequence
  Description of Artificial Sequence: Synthetic oligonucleotide
  Sense strand starting at position 391 of SEQ ID NO: 1882384
uccagauuggauuggaagu

SEQ ID NO: 2116901 - RNA, 19 nt, Artificial Sequence
  Description of Artificial Sequence: Synthetic oligonucleotide
  Antisense strand to SEQ ID NO: 2116900
acuuccaauccaaucugga

SEQ ID NO: 2116902 - RNA, 19 nt, Artificial Sequence
  Description of Artificial Sequence: Synthetic oligonucleotide
  Sense strand starting at position 392 of SEQ ID NO: 1882384
ccagauuggauuggaaguu

SEQ ID NO: 2116903 - RNA, 19 nt, Artificial Sequence
  Description of Artificial Sequence: Synthetic oligonucleotide
  Antisense strand to SEQ ID NO: 2116902
aacuuccaauccaaucugg

SEQ ID NO: 2116904 - RNA, 19 nt, Artificial Sequence
  Description of Artificial Sequence: Synthetic oligonucleotide
  Sense strand starting at position 561 of SEQ ID NO: 1882384
gggcuuccuggaugccaaa

SEQ ID NO: 2116905 - RNA, 19 nt, Artificial Sequence
  Description of Artificial Sequence: Synthetic oligonucleotide
  Antisense strand to SEQ ID NO: 2116904
uuuggcauccaggaagccc

SEQ ID NO: 2116906 - RNA, 19 nt, Artificial Sequence
  Description of Artificial Sequence: Synthetic oligonucleotide
  Sense strand starting at position 632 of SEQ ID NO: 1882384
uggaaucacuguucucuaa

SEQ ID NO: 2116907 - RNA, 19 nt, Artificial Sequence
  Description of Artificial Sequence: Synthetic oligonucleotide
  Antisense strand to SEQ ID NO: 2116906
uuagagaacagugauucca

SEQ ID NO: 2116908 - RNA, 19 nt, Artificial Sequence
  Description of Artificial Sequence: Synthetic oligonucleotide
  Sense strand starting at position 745 of SEQ ID NO: 1882384
guuccagauguugaugaac

SEQ ID NO: 2116909 - RNA, 19 nt, Artificial Sequence
  Description of Artificial Sequence: Synthetic oligonucleotide
  Antisense strand to SEQ ID NO: 2116908
guucaucaacaucuggaac

SEQ ID NO: 2116910 - RNA, 19 nt, Artificial Sequence
  Description of Artificial Sequence: Synthetic oligonucleotide
  Sense strand starting at position 832 of SEQ ID NO: 1882384
agguuaaggcaguauguaa

SEQ ID NO: 2116911 - RNA, 19 nt, Artificial Sequence
  Description of Artificial Sequence: Synthetic oligonucleotide
  Antisense strand to SEQ ID NO: 2116910
uuacauacugccuuaaccu

SEQ ID NO: 2116912 - RNA, 19 nt, Artificial Sequence
  Description of Artificial Sequence: Synthetic oligonucleotide
  Sense strand starting at position 877 of SEQ ID NO: 1882384
uugaauuaacucugaauug

SEQ ID NO: 2116913 - RNA, 19 nt, Artificial Sequence
  Description of Artificial Sequence: Synthetic oligonucleotide
  Antisense strand to SEQ ID NO: 2116912
caauucagaguuaauucaa

SEQ ID NO: 2116914 - RNA, 19 nt, Artificial Sequence
  Description of Artificial Sequence: Synthetic oligonucleotide
  Sense strand starting at position 916 of SEQ ID NO: 1882384
agauguggauggguuguaa

SEQ ID NO: 2116915 - RNA, 19 nt, Artificial Sequence
  Description of Artificial Sequence: Synthetic oligonucleotide
  Antisense strand to SEQ ID NO: 2116914
uuacaacccauccacaucu

SEQ ID NO: 2116916 - RNA, 19 nt, Artificial Sequence
  Description of Artificial Sequence: Synthetic oligonucleotide
  Sense strand starting at position 1108 of SEQ ID NO: 1882384
ggaggauguuuggaaauuu

SEQ ID NO: 2116917 - RNA, 19 nt, Artificial Sequence
  Description of Artificial Sequence: Synthetic oligonucleotide
  Antisense strand to SEQ ID NO: 2116916
aaauuuccaaacauccucc

SEQ ID NO: 2116918 - RNA, 19 nt, Artificial Sequence
  Description of Artificial Sequence: Synthetic oligonucleotide
  Sense strand starting at position 1173 of SEQ ID NO: 1882384
uuuauuacucaguggccaa

SEQ ID NO: 2116919 - RNA, 19 nt, Artificial Sequence
  Description of Artificial Sequence: Synthetic oligonucleotide
  Antisense strand to SEQ ID NO: 2116918
uuggccacugaguaauaaa

SEQ ID NO: 2116920 - RNA, 19 nt, Artificial Sequence
  Description of Artificial Sequence: Synthetic oligonucleotide
  Sense strand starting at position 1186 of SEQ ID NO: 1882384
ggccaaggaugauuaacau

SEQ ID NO: 2116921 - RNA, 19 nt, Artificial Sequence
  Description of Artificial Sequence: Synthetic oligonucleotide
  Antisense strand to SEQ ID NO: 2116920
auguuaaucauccuuggcc

SEQ ID NO: 2116922 - RNA, 19 nt, Artificial Sequence
  Description of Artificial Sequence: Synthetic oligonucleotide
  Sense strand starting at position 1446 of SEQ ID NO: 1882384
aggucuuuccuauggaaga

SEQ ID NO: 2116923 - RNA, 19 nt, Artificial Sequence
  Description of Artificial Sequence: Synthetic oligonucleotide
  Antisense strand to SEQ ID NO: 2116922
ucuuccauaggaaagaccu

SEQ ID NO: 2116924 - RNA, 19 nt, Artificial Sequence
  Description of Artificial Sequence: Synthetic oligonucleotide
  Sense strand starting at position 1486 of SEQ ID NO: 1882384
uuaucuucuccugaggucu

SEQ ID NO: 2116925 - RNA, 19 nt, Artificial Sequence
  Description of Artificial Sequence: Synthetic oligonucleotide
  Antisense strand to SEQ ID NO: 2116924
agaccucaggagaagauaa

SEQ ID NO: 2116926 - RNA, 19 nt, Artificial Sequence
  Description of Artificial Sequence: Synthetic oligonucleotide
  Sense strand starting at position 1623 of SEQ ID NO: 1882384
uguauagacucagcuauag

SEQ ID NO: 2116927 - RNA, 19 nt, Artificial Sequence
  Description of Artificial Sequence: Synthetic oligonucleotide
  Antisense strand to SEQ ID NO: 2116926
cuauagcugagucuauaca

SEQ ID NO: 2116928 - RNA, 19 nt, Artificial Sequence
  Description of Artificial Sequence: Synthetic oligonucleotide
  Sense strand starting at position 1697 of SEQ ID NO: 1882384
acauauauguaugucugau

SEQ ID NO: 2116929 - RNA, 19 nt, Artificial Sequence
  Description of Artificial Sequence: Synthetic oligonucleotide
  Antisense strand to SEQ ID NO: 2116928
aucagacauacauauaugu

SEQ ID NO: 2116930 - RNA, 19 nt, Artificial Sequence
  Description of Artificial Sequence: Synthetic oligonucleotide
  Sense strand starting at position 1801 of SEQ ID NO: 1882384
uaaggauggcauuguuuaa

SEQ ID NO: 2116931 - RNA, 19 nt, Artificial Sequence
  Description of Artificial Sequence: Synthetic oligonucleotide
  Antisense strand to SEQ ID NO: 2116930
uuaaacaaugccauccuua

SEQ ID NO: 2116932 - RNA, 19 nt, Artificial Sequence
  Description of Artificial Sequence: Synthetic oligonucleotide
  Sense strand starting at position 1808 of SEQ ID NO: 1882384
ggcauuguuuaaguagaau

SEQ ID NO: 2116933 - RNA, 19 nt, Artificial Sequence
  Description of Artificial Sequence: Synthetic oligonucleotide
  Antisense strand to SEQ ID NO: 2116932
auucuacuuaaacaaugcc

SEQ ID NO: 2116934 - RNA, 19 nt, Artificial Sequence
  Description of Artificial Sequence: Synthetic oligonucleotide
  Sense strand starting at position 1835 of SEQ ID NO: 1882384
uugguucuauuccuuugau

SEQ ID NO: 2116935 - RNA, 19 nt, Artificial Sequence
  Description of Artificial Sequence: Synthetic oligonucleotide
  Antisense strand to SEQ ID NO: 2116934
aucaaaggaauagaaccaa

SEQ ID NO: 2116936 - RNA, 19 nt, Artificial Sequence
  Description of Artificial Sequence: Synthetic oligonucleotide
  Sense strand starting at position 1836 of SEQ ID NO: 1882384
ugguucuauuccuuugaua

SEQ ID NO: 2116937 - RNA, 19 nt, Artificial Sequence
  Description of Artificial Sequence: Synthetic oligonucleotide
  Antisense strand to SEQ ID NO: 2116936
uaucaaaggaauagaacca

SEQ ID NO: 2116938 - RNA, 19 nt, Artificial Sequence
  Description of Artificial Sequence: Synthetic oligonucleotide
  Sense strand starting at position 1838 of SEQ ID NO: 1882384
guucuauuccuuugauaag

SEQ ID NO: 2116939 - RNA, 19 nt, Artificial Sequence
  Description of Artificial Sequence: Synthetic oligonucleotide
  Antisense strand to SEQ ID NO: 2116938
cuuaucaaaggaauagaac

SEQ ID NO: 2116940 - RNA, 19 nt, Artificial Sequence
  Description of Artificial Sequence: Synthetic oligonucleotide
  Sense strand starting at position 1998 of SEQ ID NO: 1882384
agacguuugcuggaagaua

SEQ ID NO: 2116941 - RNA, 19 nt, Artificial Sequence
  Description of Artificial Sequence: Synthetic oligonucleotide
  Antisense strand to SEQ ID NO: 2116940
uaucuuccagcaaacgucu

SEQ ID NO: 2116942 - RNA, 19 nt, Artificial Sequence
  Description of Artificial Sequence: Synthetic oligonucleotide
  Sense strand starting at position 2025 of SEQ ID NO: 1882384
acaucuggacugcaguaau

SEQ ID NO: 2116943 - RNA, 19 nt, Artificial Sequence
  Description of Artificial Sequence: Synthetic oligonucleotide
  Antisense strand to SEQ ID NO: 2116942
auuacugcaguccagaugu

SEQ ID NO: 2116944 - RNA, 19 nt, Artificial Sequence
  Description of Artificial Sequence: Synthetic oligonucleotide
  Sense strand starting at position 2081 of SEQ ID NO: 1882384
cagugagagcuguacuaga

SEQ ID NO: 2116945 - RNA, 19 nt, Artificial Sequence
  Description of Artificial Sequence: Synthetic oligonucleotide
  Antisense strand to SEQ ID NO: 2116944
ucuaguacagcucucacug

SEQ ID NO: 2116946 - RNA, 19 nt, Artificial Sequence
  Description of Artificial Sequence: Synthetic oligonucleotide
  Sense strand starting at position 2086 of SEQ ID NO: 1882384
agagcuguacuagaaagua

SEQ ID NO: 2116947 - RNA, 19 nt, Artificial Sequence
  Description of Artificial Sequence: Synthetic oligonucleotide
  Antisense strand to SEQ ID NO: 2116946
uacuuucuaguacagcucu

SEQ ID NO: 2116948 - RNA, 19 nt, Artificial Sequence
  Description of Artificial Sequence: Synthetic oligonucleotide
  Sense strand starting at position 2197 of SEQ ID NO: 1882384
ucacuuuauggugauguuu

SEQ ID NO: 2116949 - RNA, 19 nt, Artificial Sequence
  Description of Artificial Sequence: Synthetic oligonucleotide
  Antisense strand to SEQ ID NO: 2116948
aaacaucaccauaaaguga

SEQ ID NO: 2116950 - RNA, 19 nt, Artificial Sequence
  Description of Artificial Sequence: Synthetic oligonucleotide
  Sense strand starting at position 2370 of SEQ ID NO: 1882384
caccuauagccuuagagug

SEQ ID NO: 2116951 - RNA, 19 nt, Artificial Sequence
  Description of Artificial Sequence: Synthetic oligonucleotide
  Antisense strand to SEQ ID NO: 2116950
cacucuaaggcuauaggug

SEQ ID NO: 2116952 - RNA, 19 nt, Artificial Sequence
  Description of Artificial Sequence: Synthetic oligonucleotide
  Sense strand starting at position 2443 of SEQ ID NO: 1882384
gaagaaguguacuuucugu

SEQ ID NO: 2116953 - RNA, 19 nt, Artificial Sequence
  Description of Artificial Sequence: Synthetic oligonucleotide
  Antisense strand to SEQ ID NO: 2116952
acagaaaguacacuucuuc

SEQ ID NO: 2116954 - RNA, 19 nt, Artificial Sequence
  Description of Artificial Sequence: Synthetic oligonucleotide
  Sense strand starting at position 2451 of SEQ ID NO: 1882384
guacuuucuguggacaaau

SEQ ID NO: 2116955 - RNA, 19 nt, Artificial Sequence
  Description of Artificial Sequence: Synthetic oligonucleotide
  Antisense strand to SEQ ID NO: 2116954
auuuguccacagaaaguac

SEQ ID NO: 2116956 - RNA, 19 nt, Artificial Sequence
  Description of Artificial Sequence: Synthetic oligonucleotide
  Sense strand starting at position 2488 of SEQ ID NO: 1882384
uucuuuauucucuauguga

SEQ ID NO: 2116957 - RNA, 19 nt, Artificial Sequence
  Description of Artificial Sequence: Synthetic oligonucleotide
  Antisense strand to SEQ ID NO: 2116956
ucacauagagaauaaagaa

SEQ ID NO: 2116958 - RNA, 19 nt, Artificial Sequence
  Description of Artificial Sequence: Synthetic oligonucleotide
  Sense strand starting at position 2852 of SEQ ID NO: 1882384
gacgcauuuccaugccaag

SEQ ID NO: 2116959 - RNA, 19 nt, Artificial Sequence
  Description of Artificial Sequence: Synthetic oligonucleotide
  Antisense strand to SEQ ID NO: 2116958
cuuggcauggaaaugcguc

SEQ ID NO: 2116960 - RNA, 19 nt, Artificial Sequence
  Description of Artificial Sequence: Synthetic oligonucleotide
  Sense strand starting at position 3081 of SEQ ID NO: 1882384
uggaauuacugacucuuau

SEQ ID NO: 2116961 - RNA, 19 nt, Artificial Sequence
  Description of Artificial Sequence: Synthetic oligonucleotide
  Antisense strand to SEQ ID NO: 2116960
auaagagucaguaauucca

SEQ ID NO: 2116962 - RNA, 19 nt, Artificial Sequence
  Description of Artificial Sequence: Synthetic oligonucleotide
  Sense strand starting at position 3322 of SEQ ID NO: 1882384
gauuucuucugucaaggac

SEQ ID NO: 2116963 - RNA, 19 nt, Artificial Sequence
  Description of Artificial Sequence: Synthetic oligonucleotide
  Antisense strand to SEQ ID NO: 2116962
guccuugacagaagaaauc

SEQ ID NO: 2116964 - RNA, 19 nt, Artificial Sequence
  Description of Artificial Sequence: Synthetic oligonucleotide
  Sense strand starting at position 3460 of SEQ ID NO: 1882384
cuucccucugagcaagauu

SEQ ID NO: 2116965 - RNA, 19 nt, Artificial Sequence
  Description of Artificial Sequence: Synthetic oligonucleotide
  Antisense strand to SEQ ID NO: 2116964
aaucuugcucagagggaag

SEQ ID NO: 2116966 - RNA, 19 nt, Artificial Sequence
  Description of Artificial Sequence: Synthetic oligonucleotide
  Sense strand starting at position 3565 of SEQ ID NO: 1882384
cagaacuguggugggaaua

SEQ ID NO: 2116967 - RNA, 19 nt, Artificial Sequence
  Description of Artificial Sequence: Synthetic oligonucleotide
  Antisense strand to SEQ ID NO: 2116966
uauucccaccacaguucug

SEQ ID NO: 2116968 - RNA, 19 nt, Artificial Sequence
  Description of Artificial Sequence: Synthetic oligonucleotide
  Sense strand starting at position 3566 of SEQ ID NO: 1882384
agaacuguggugggaauau

SEQ ID NO: 2116969 - RNA, 19 nt, Artificial Sequence
  Description of Artificial Sequence: Synthetic oligonucleotide
  Antisense strand to SEQ ID NO: 2116968
auauucccaccacaguucu

SEQ ID NO: 2116970 - RNA, 19 nt, Artificial Sequence
  Description of Artificial Sequence: Synthetic oligonucleotide
  Sense strand starting at position 3833 of SEQ ID NO: 1882384
gguacaucaccauggaaua

SEQ ID NO: 2116971 - RNA, 19 nt, Artificial Sequence
  Description of Artificial Sequence: Synthetic oligonucleotide
  Antisense strand to SEQ ID NO: 2116970
uauuccauggugauguacc

SEQ ID NO: 2116972 - RNA, 19 nt, Artificial Sequence
  Description of Artificial Sequence: Synthetic oligonucleotide
  Sense strand starting at position 58 of SEQ ID NO: 1882385
gguucaugugcagugguuu

SEQ ID NO: 2116973 - RNA, 19 nt, Artificial Sequence
  Description of Artificial Sequence: Synthetic oligonucleotide
  Antisense strand to SEQ ID NO: 2116972
aaaccacugcacaugaacc

SEQ ID NO: 2116974 - RNA, 19 nt, Artificial Sequence
  Description of Artificial Sequence: Synthetic oligonucleotide
  Sense strand starting at position 72 of SEQ ID NO: 1882385
gguuuauugauaugugaua

SEQ ID NO: 2116975 - RNA, 19 nt, Artificial Sequence
  Description of Artificial Sequence: Synthetic oligonucleotide
  Antisense strand to SEQ ID NO: 2116974
uaucacauaucaauaaacc

SEQ ID NO: 2116976 - RNA, 19 nt, Artificial Sequence
  Description of Artificial Sequence: Synthetic oligonucleotide
  Sense strand starting at position 193 of SEQ ID NO: 1882385
agcuuaauccugcaggauu

SEQ ID NO: 2116977 - RNA, 19 nt, Artificial Sequence
  Description of Artificial Sequence: Synthetic oligonucleotide
  Antisense strand to SEQ ID NO: 2116976
aauccugcaggauuaagcu

SEQ ID NO: 2116978 - RNA, 19 nt, Artificial Sequence
  Description of Artificial Sequence: Synthetic oligonucleotide
  Sense strand starting at position 269 of SEQ ID NO: 1882385
gcuggaguauuuguaccua

SEQ ID NO: 2116979 - RNA, 19 nt, Artificial Sequence
  Description of Artificial Sequence: Synthetic oligonucleotide
  Antisense strand to SEQ ID NO: 2116978
uagguacaaauacuccagc

SEQ ID NO: 2116980 - RNA, 19 nt, Artificial Sequence
  Description of Artificial Sequence: Synthetic oligonucleotide
  Sense strand starting at position 411 of SEQ ID NO: 1882385
cuccaaagaugcccugaua

SEQ ID NO: 2116981 - RNA, 19 nt, Artificial Sequence
  Description of Artificial Sequence: Synthetic oligonucleotide
  Antisense strand to SEQ ID NO: 2116980
uaucagggcaucuuuggag

SEQ ID NO: 2116982 - RNA, 19 nt, Artificial Sequence
  Description of Artificial Sequence: Synthetic oligonucleotide
  Sense strand starting at position 604 of SEQ ID NO: 1882385
augggaaaugucugguuug

SEQ ID NO: 2116983 - RNA, 19 nt, Artificial Sequence
  Description of Artificial Sequence: Synthetic oligonucleotide
  Antisense strand to SEQ ID NO: 2116982
caaaccagacauuucccau

SEQ ID NO: 2116984 - RNA, 19 nt, Artificial Sequence
  Description of Artificial Sequence: Synthetic oligonucleotide
  Sense strand starting at position 647 of SEQ ID NO: 1882385
gagauaguuccacaaugca

SEQ ID NO: 2116985 - RNA, 19 nt, Artificial Sequence
  Description of Artificial Sequence: Synthetic oligonucleotide
  Antisense strand to SEQ ID NO: 2116984
ugcauuguggaacuaucuc

SEQ ID NO: 2116986 - RNA, 19 nt, Artificial Sequence
  Description of Artificial Sequence: Synthetic oligonucleotide
  Sense strand starting at position 1006 of SEQ ID NO: 1882385
aggaauaaaugcucaguga

SEQ ID NO: 2116987 - RNA, 19 nt, Artificial Sequence
  Description of Artificial Sequence: Synthetic oligonucleotide
  Antisense strand to SEQ ID NO: 2116986
ucacugagcauuuauuccu

SEQ ID NO: 2116988 - RNA, 19 nt, Artificial Sequence
  Description of Artificial Sequence: Synthetic oligonucleotide
  Sense strand starting at position 1010 of SEQ ID NO: 1882385
auaaaugcucagugacaca

SEQ ID NO: 2116989 - RNA, 19 nt, Artificial Sequence
  Description of Artificial Sequence: Synthetic oligonucleotide
  Antisense strand to SEQ ID NO: 2116988
ugugucacugagcauuuau

SEQ ID NO: 2116990 - RNA, 19 nt, Artificial Sequence
  Description of Artificial Sequence: Synthetic oligonucleotide
  Sense strand starting at position 1102 of SEQ ID NO: 1882385
ugcauuaaucaagauugca

SEQ ID NO: 2116991 - RNA, 19 nt, Artificial Sequence
  Description of Artificial Sequence: Synthetic oligonucleotide
  Antisense strand to SEQ ID NO: 2116990
ugcaaucuugauuaaugca

SEQ ID NO: 2116992 - RNA, 19 nt, Artificial Sequence
  Description of Artificial Sequence: Synthetic oligonucleotide
  Sense strand starting at position 1462 of SEQ ID NO: 1882385
uggcuaaacucuuugaaua

SEQ ID NO: 2116993 - RNA, 19 nt, Artificial Sequence
  Description of Artificial Sequence: Synthetic oligonucleotide
  Antisense strand to SEQ ID NO: 2116992
uauucaaagaguuuagcca

SEQ ID NO: 2116994 - RNA, 19 nt, Artificial Sequence
  Description of Artificial Sequence: Synthetic oligonucleotide
  Sense strand starting at position 1463 of SEQ ID NO: 1882385
ggcuaaacucuuugaauau

SEQ ID NO: 2116995 - RNA, 19 nt, Artificial Sequence
  Description of Artificial Sequence: Synthetic oligonucleotide
  Antisense strand to SEQ ID NO: 2116994
auauucaaagaguuuagcc

SEQ ID NO: 2116996 - RNA, 19 nt, Artificial Sequence
  Description of Artificial Sequence: Synthetic oligonucleotide
  Sense strand starting at position 1564 of SEQ ID NO: 1882385
ccacauuggccagaacuau

SEQ ID NO: 2116997 - RNA, 19 nt, Artificial Sequence
  Description of Artificial Sequence: Synthetic oligonucleotide
  Antisense strand to SEQ ID NO: 2116996
auaguucuggccaaugugg

SEQ ID NO: 2116998 - RNA, 19 nt, Artificial Sequence
  Description of Artificial Sequence: Synthetic oligonucleotide
  Sense strand starting at position 1601 of SEQ ID NO: 1882385
cugcaaggugcugaggaau

SEQ ID NO: 2116999 - RNA, 19 nt, Artificial Sequence
  Description of Artificial Sequence: Synthetic oligonucleotide
  Antisense strand to SEQ ID NO: 2116998
auuccucagcaccuugcag

SEQ ID NO: 2117000 - RNA, 19 nt, Artificial Sequence
  Description of Artificial Sequence: Synthetic oligonucleotide
  Sense strand starting at position 1604 of SEQ ID NO: 1882385
caaggugcugaggaaugua

SEQ ID NO: 2117001 - RNA, 19 nt, Artificial Sequence
  Description of Artificial Sequence: Synthetic oligonucleotide
  Antisense strand to SEQ ID NO: 2117000
uacauuccucagcaccuug

SEQ ID NO: 2117002 - RNA, 19 nt, Artificial Sequence
  Description of Artificial Sequence: Synthetic oligonucleotide
  Sense strand starting at position 1639 of SEQ ID NO: 1882385
gaugauaagcauuauuguu

SEQ ID NO: 2117003 - RNA, 19 nt, Artificial Sequence
  Description of Artificial Sequence: Synthetic oligonucleotide
  Antisense strand to SEQ ID NO: 2117002
aacaauaaugcuuaucauc

SEQ ID NO: 2117004 - RNA, 19 nt, Artificial Sequence
  Description of Artificial Sequence: Synthetic oligonucleotide
  Sense strand starting at position 1913 of SEQ ID NO: 1882385
ccaaauguagucuaacuuu

SEQ ID NO: 2117005 - RNA, 19 nt, Artificial Sequence
  Description of Artificial Sequence: Synthetic oligonucleotide
  Antisense strand to SEQ ID NO: 2117004
aaaguuagacuacauuugg

SEQ ID NO: 2117006 - RNA, 19 nt, Artificial Sequence
  Description of Artificial Sequence: Synthetic oligonucleotide
  Sense strand starting at position 2089 of SEQ ID NO: 1882385
cuaagaaguuugucaggag

SEQ ID NO: 2117007 - RNA, 19 nt, Artificial Sequence
  Description of Artificial Sequence: Synthetic oligonucleotide
  Antisense strand to SEQ ID NO: 2117006
cuccugacaaacuucuuag

SEQ ID NO: 2117008 - RNA, 19 nt, Artificial Sequence
  Description of Artificial Sequence: Synthetic oligonucleotide
  Sense strand starting at position 2093 of SEQ ID NO: 1882385
gaaguuugucaggaguauc

SEQ ID NO: 2117009 - RNA, 19 nt, Artificial Sequence
  Description of Artificial Sequence: Synthetic oligonucleotide
  Antisense strand to SEQ ID NO: 2117008
gauacuccugacaaacuuc

SEQ ID NO: 2117010 - RNA, 19 nt, Artificial Sequence
  Description of Artificial Sequence: Synthetic oligonucleotide
  Sense strand starting at position 2196 of SEQ ID NO: 1882385
gggaacaagcuuuggcaaa

SEQ ID NO: 2117011 - RNA, 19 nt, Artificial Sequence
  Description of Artificial Sequence: Synthetic oligonucleotide
  Antisense strand to SEQ ID NO: 2117010
uuugccaaagcuuguuccc

SEQ ID NO: 2117012 - RNA, 19 nt, Artificial Sequence
  Description of Artificial Sequence: Synthetic oligonucleotide
  Sense strand starting at position 2299 of SEQ ID NO: 1882385
cuagacuccagaugugagu

SEQ ID NO: 2117013 - RNA, 19 nt, Artificial Sequence
  Description of Artificial Sequence: Synthetic oligonucleotide
  Antisense strand to SEQ ID NO: 2117012
acucacaucuggagucuag

SEQ ID NO: 2117014 - RNA, 19 nt, Artificial Sequence
  Description of Artificial Sequence: Synthetic oligonucleotide
  Sense strand starting at position 2386 of SEQ ID NO: 1882385
aauccuuggacgggugaca

SEQ ID NO: 2117015 - RNA, 19 nt, Artificial Sequence
  Description of Artificial Sequence: Synthetic oligonucleotide
  Antisense strand to SEQ ID NO: 2117014
ugucacccguccaaggauu

SEQ ID NO: 2117016 - RNA, 19 nt, Artificial Sequence
  Description of Artificial Sequence: Synthetic oligonucleotide
  Sense strand starting at position 2644 of SEQ ID NO: 1882385
gugagaagcugaguaaaua

SEQ ID NO: 2117017 - RNA, 19 nt, Artificial Sequence
  Description of Artificial Sequence: Synthetic oligonucleotide
  Antisense strand to SEQ ID NO: 2117016
uauuuacucagcuucucac

SEQ ID NO: 2117018 - RNA, 19 nt, Artificial Sequence
  Description of Artificial Sequence: Synthetic oligonucleotide
  Sense strand starting at position 2665 of SEQ ID NO: 1882385
guagaaauaggcuacuguu

SEQ ID NO: 2117019 - RNA, 19 nt, Artificial Sequence
  Description of Artificial Sequence: Synthetic oligonucleotide
  Antisense strand to SEQ ID NO: 2117018
aacaguagccuauuucuac

SEQ ID NO: 2117020 - RNA, 19 nt, Artificial Sequence
  Description of Artificial Sequence: Synthetic oligonucleotide
  Sense strand starting at position 2703 of SEQ ID NO: 1882385
gguaaauugccauaucuuu

SEQ ID NO: 2117021 - RNA, 19 nt, Artificial Sequence
  Description of Artificial Sequence: Synthetic oligonucleotide
  Antisense strand to SEQ ID NO: 2117020
aaagauauggcaauuuacc

SEQ ID NO: 2117022 - RNA, 19 nt, Artificial Sequence
  Description of Artificial Sequence: Synthetic oligonucleotide
  Sense strand starting at position 2724 of SEQ ID NO: 1882385
gggauucucuuuccucuga

SEQ ID NO: 2117023 - RNA, 19 nt, Artificial Sequence
  Description of Artificial Sequence: Synthetic oligonucleotide
  Antisense strand to SEQ ID NO: 2117022
ucagaggaaagagaauccc

SEQ ID NO: 2117024 - RNA, 19 nt, Artificial Sequence
  Description of Artificial Sequence: Synthetic oligonucleotide
  Sense strand starting at position 2728 of SEQ ID NO: 1882385
uucucuuuccucugaggga

SEQ ID NO: 2117025 - RNA, 19 nt, Artificial Sequence
  Description of Artificial Sequence: Synthetic oligonucleotide
  Antisense strand to SEQ ID NO: 2117024
ucccucagaggaaagagaa

SEQ ID NO: 2117026 - RNA, 19 nt, Artificial Sequence
  Description of Artificial Sequence: Synthetic oligonucleotide
  Sense strand starting at position 2902 of SEQ ID NO: 1882385
cuugguaaauacuuggauu

SEQ ID NO: 2117027 - RNA, 19 nt, Artificial Sequence
  Description of Artificial Sequence: Synthetic oligonucleotide
  Antisense strand to SEQ ID NO: 2117026
aauccaaguauuuaccaag

SEQ ID NO: 2117028 - RNA, 19 nt, Artificial Sequence
  Description of Artificial Sequence: Synthetic oligonucleotide
  Sense strand starting at position 2915 of SEQ ID NO: 1882385
uggauuugcucucugcaag

SEQ ID NO: 2117029 - RNA, 19 nt, Artificial Sequence
  Description of Artificial Sequence: Synthetic oligonucleotide
  Antisense strand to SEQ ID NO: 2117028
cuugcagagagcaaaucca

SEQ ID NO: 2117030 - RNA, 19 nt, Artificial Sequence
  Description of Artificial Sequence: Synthetic oligonucleotide
  Sense strand starting at position 2916 of SEQ ID NO: 1882385
ggauuugcucucugcaagu

SEQ ID NO: 2117031 - RNA, 19 nt, Artificial Sequence
  Description of Artificial Sequence: Synthetic oligonucleotide
  Antisense strand to SEQ ID NO: 2117030
acuugcagagagcaaaucc

SEQ ID NO: 2117032 - RNA, 19 nt, Artificial Sequence
  Description of Artificial Sequence: Synthetic oligonucleotide
  Sense strand starting at position 2955 of SEQ ID NO: 1882385
caaugaguugaaugcauga

SEQ ID NO: 2117033 - RNA, 19 nt, Artificial Sequence
  Description of Artificial Sequence: Synthetic oligonucleotide
  Antisense strand to SEQ ID NO: 2117032
ucaugcauucaacucauug

SEQ ID NO: 2117034 - RNA, 19 nt, Artificial Sequence
  Description of Artificial Sequence: Synthetic oligonucleotide
  Sense strand starting at position 2960 of SEQ ID NO: 1882385
aguugaaugcaugagagcu

SEQ ID NO: 2117035 - RNA, 19 nt, Artificial Sequence
  Description of Artificial Sequence: Synthetic oligonucleotide
  Antisense strand to SEQ ID NO: 2117034
agcucucaugcauucaacu

SEQ ID NO: 2117036 - RNA, 19 nt, Artificial Sequence
  Description of Artificial Sequence: Synthetic oligonucleotide
  Sense strand starting at position 2982 of SEQ ID NO: 1882385
acggaacagcucugaggau

SEQ ID NO: 2117037 - RNA, 19 nt, Artificial Sequence
  Description of Artificial Sequence: Synthetic oligonucleotide
  Antisense strand to SEQ ID NO: 2117036
auccucagagcuguuccgu

SEQ ID NO: 2117038 - RNA, 19 nt, Artificial Sequence
  Description of Artificial Sequence: Synthetic oligonucleotide
  Sense strand starting at position 3133 of SEQ ID NO: 1882385
uaugcuauggccuagggau

SEQ ID NO: 2117039 - RNA, 19 nt, Artificial Sequence
  Description of Artificial Sequence: Synthetic oligonucleotide
  Antisense strand to SEQ ID NO: 2117038
aucccuaggccauagcaua

SEQ ID NO: 2117040 - RNA, 19 nt, Artificial Sequence
  Description of Artificial Sequence: Synthetic oligonucleotide
  Sense strand starting at position 3135 of SEQ ID NO: 1882385
ugcuauggccuagggauuu

SEQ ID NO: 2117041 - RNA, 19 nt, Artificial Sequence
  Description of Artificial Sequence: Synthetic oligonucleotide
  Antisense strand to SEQ ID NO: 2117040
aaaucccuaggccauagca

SEQ ID NO: 2117042 - RNA, 19 nt, Artificial Sequence
  Description of Artificial Sequence: Synthetic oligonucleotide
  Sense strand starting at position 3147 of SEQ ID NO: 1882385
gggauuuaaugguaaggga

SEQ ID NO: 2117043 - RNA, 19 nt, Artificial Sequence
  Description of Artificial Sequence: Synthetic oligonucleotide
  Antisense strand to SEQ ID NO: 2117042
ucccuuaccauuaaauccc

SEQ ID NO: 2117044 - RNA, 19 nt, Artificial Sequence
  Description of Artificial Sequence: Synthetic oligonucleotide
  Sense strand starting at position 3150 of SEQ ID NO: 1882385
auuuaaugguaagggaaau

SEQ ID NO: 2117045 - RNA, 19 nt, Artificial Sequence
  Description of Artificial Sequence: Synthetic oligonucleotide
  Antisense strand to SEQ ID NO: 2117044
auuucccuuaccauuaaau

SEQ ID NO: 2117046 - RNA, 19 nt, Artificial Sequence
  Description of Artificial Sequence: Synthetic oligonucleotide
  Sense strand starting at position 3161 of SEQ ID NO: 1882385
agggaaauagcucagucuu

SEQ ID NO: 2117047 - RNA, 19 nt, Artificial Sequence
  Description of Artificial Sequence: Synthetic oligonucleotide
  Antisense strand to SEQ ID NO: 2117046
aagacugagcuauuucccu

SEQ ID NO: 2117048 - RNA, 19 nt, Artificial Sequence
  Description of Artificial Sequence: Synthetic oligonucleotide
  Sense strand starting at position 3241 of SEQ ID NO: 1882385
gugugacaaggaugaucau

SEQ ID NO: 2117049 - RNA, 19 nt, Artificial Sequence
  Description of Artificial Sequence: Synthetic oligonucleotide
  Antisense strand to SEQ ID NO: 2117048
augaucauccuugucacac

SEQ ID NO: 2117050 - RNA, 19 nt, Artificial Sequence
  Description of Artificial Sequence: Synthetic oligonucleotide
  Sense strand starting at position 3345 of SEQ ID NO: 1882385
uugagucccaucggaaaga

SEQ ID NO: 2117051 - RNA, 19 nt, Artificial Sequence
  Description of Artificial Sequence: Synthetic oligonucleotide
  Antisense strand to SEQ ID NO: 2117050
ucuuuccgaugggacucaa

SEQ ID NO: 2117052 - RNA, 19 nt, Artificial Sequence
  Description of Artificial Sequence: Synthetic oligonucleotide
  Sense strand starting at position 6 of SEQ ID NO: 1882386
ucgagaaccaauuaguugu

SEQ ID NO: 2117053 - RNA, 19 nt, Artificial Sequence
  Description of Artificial Sequence: Synthetic oligonucleotide
  Antisense strand to SEQ ID NO: 2117052
acaacuaauugguucucga

SEQ ID NO: 2117054 - RNA, 19 nt, Artificial Sequence
  Description of Artificial Sequence: Synthetic oligonucleotide
  Sense strand starting at position 9 of SEQ ID NO: 1882386
agaaccaauuaguuguauu

SEQ ID NO: 2117055 - RNA, 19 nt, Artificial Sequence
  Description of Artificial Sequence: Synthetic oligonucleotide
  Antisense strand to SEQ ID NO: 2117054
aauacaacuaauugguucu

SEQ ID NO: 2117056 - RNA, 19 nt, Artificial Sequence
  Description of Artificial Sequence: Synthetic oligonucleotide
  Sense strand starting at position 19 of SEQ ID NO: 1882386
aguuguauuccuuaggcaa

SEQ ID NO: 2117057 - RNA, 19 nt, Artificial Sequence
  Description of Artificial Sequence: Synthetic oligonucleotide
  Antisense strand to SEQ ID NO: 2117056
uugccuaaggaauacaacu

SEQ ID NO: 2117058 - RNA, 19 nt, Artificial Sequence
  Description of Artificial Sequence: Synthetic oligonucleotide
  Sense strand starting at position 238 of SEQ ID NO: 1882386
gguugugcucacuuguagu

SEQ ID NO: 2117059 - RNA, 19 nt, Artificial Sequence
  Description of Artificial Sequence: Synthetic oligonucleotide
  Antisense strand to SEQ ID NO: 2117058
acuacaagugagcacaacc

SEQ ID NO: 2117060 - RNA, 19 nt, Artificial Sequence
  Description of Artificial Sequence: Synthetic oligonucleotide
  Sense strand starting at position 461 of SEQ ID NO: 1882386
agccaauuagauggucaaa

SEQ ID NO: 2117061 - RNA, 19 nt, Artificial Sequence
  Description of Artificial Sequence: Synthetic oligonucleotide
  Antisense strand to SEQ ID NO: 2117060
uuugaccaucuaauuggcu

SEQ ID NO: 2117062 - RNA, 19 nt, Artificial Sequence
  Description of Artificial Sequence: Synthetic oligonucleotide
  Sense strand starting at position 581 of SEQ ID NO: 1882386
uagcuauaggaguaaccuu

SEQ ID NO: 2117063 - RNA, 19 nt, Artificial Sequence
  Description of Artificial Sequence: Synthetic oligonucleotide
  Antisense strand to SEQ ID NO: 2117062
aagguuacuccuauagcua

SEQ ID NO: 2117064 - RNA, 19 nt, Artificial Sequence
  Description of Artificial Sequence: Synthetic oligonucleotide
  Sense strand starting at position 710 of SEQ ID NO: 1882386
aggaauuaguuagcagaug

SEQ ID NO: 2117065 - RNA, 19 nt, Artificial Sequence
  Description of Artificial Sequence: Synthetic oligonucleotide
  Antisense strand to SEQ ID NO: 2117064
caucugcuaacuaauuccu

SEQ ID NO: 2117066 - RNA, 19 nt, Artificial Sequence
  Description of Artificial Sequence: Synthetic oligonucleotide
  Sense strand starting at position 715 of SEQ ID NO: 1882386
uuaguuagcagauggaaug

SEQ ID NO: 2117067 - RNA, 19 nt, Artificial Sequence
  Description of Artificial Sequence: Synthetic oligonucleotide
  Antisense strand to SEQ ID NO: 2117066
cauuccaucugcuaacuaa

SEQ ID NO: 2117068 - RNA, 19 nt, Artificial Sequence
  Description of Artificial Sequence: Synthetic oligonucleotide
  Sense strand starting at position 864 of SEQ ID NO: 1882386
aucagagaugucugguaaa

SEQ ID NO: 2117069 - RNA, 19 nt, Artificial Sequence
  Description of Artificial Sequence: Synthetic oligonucleotide
  Antisense strand to SEQ ID NO: 2117068
uuuaccagacaucucugau

SEQ ID NO: 2117070 - RNA, 19 nt, Artificial Sequence
  Description of Artificial Sequence: Synthetic oligonucleotide
  Sense strand starting at position 949 of SEQ ID NO: 1882386
guggaauucuagucuaaca

SEQ ID NO: 2117071 - RNA, 19 nt, Artificial Sequence
  Description of Artificial Sequence: Synthetic oligonucleotide
  Antisense strand to SEQ ID NO: 2117070
uguuagacuagaauuccac

SEQ ID NO: 2117072 - RNA, 19 nt, Artificial Sequence
  Description of Artificial Sequence: Synthetic oligonucleotide
  Sense strand starting at position 1000 of SEQ ID NO: 1882386
uguauuagaguuugaucua

SEQ ID NO: 2117073 - RNA, 19 nt, Artificial Sequence
  Description of Artificial Sequence: Synthetic oligonucleotide
  Antisense strand to SEQ ID NO: 2117072
uagaucaaacucuaauaca

SEQ ID NO: 2117074 - RNA, 19 nt, Artificial Sequence
  Description of Artificial Sequence: Synthetic oligonucleotide
  Sense strand starting at position 1237 of SEQ ID NO: 1882386
agagguucuauauggauau

SEQ ID NO: 2117075 - RNA, 19 nt, Artificial Sequence
  Description of Artificial Sequence: Synthetic oligonucleotide
  Antisense strand to SEQ ID NO: 2117074
auauccauauagaaccucu

SEQ ID NO: 2117076 - RNA, 19 nt, Artificial Sequence
  Description of Artificial Sequence: Synthetic oligonucleotide
  Sense strand starting at position 1241 of SEQ ID NO: 1882386
guucuauauggauauaugu

SEQ ID NO: 2117077 - RNA, 19 nt, Artificial Sequence
  Description of Artificial Sequence: Synthetic oligonucleotide
  Antisense strand to SEQ ID NO: 2117076
acauauauccauauagaac

SEQ ID NO: 2117078 - RNA, 19 nt, Artificial Sequence
  Description of Artificial Sequence: Synthetic oligonucleotide
  Sense strand starting at position 1304 of SEQ ID NO: 1882386
aaguuagguugccugauuu

SEQ ID NO: 2117079 - RNA, 19 nt, Artificial Sequence
  Description of Artificial Sequence: Synthetic oligonucleotide
  Antisense strand to SEQ ID NO: 2117078
aaaucaggcaaccuaacuu

SEQ ID NO: 2117080 - RNA, 19 nt, Artificial Sequence
  Description of Artificial Sequence: Synthetic oligonucleotide
  Sense strand starting at position 1330 of SEQ ID NO: 1882386
ugacaccacuuauuaguua

SEQ ID NO: 2117081 - RNA, 19 nt, Artificial Sequence
  Description of Artificial Sequence: Synthetic oligonucleotide
  Antisense strand to SEQ ID NO: 2117080
uaacuaauaagugguguca

SEQ ID NO: 2117082 - RNA, 19 nt, Artificial Sequence
  Description of Artificial Sequence: Synthetic oligonucleotide
  Sense strand starting at position 1334 of SEQ ID NO: 1882386
accacuuauuaguuaaugu

SEQ ID NO: 2117083 - RNA, 19 nt, Artificial Sequence
  Description of Artificial Sequence: Synthetic oligonucleotide
  Antisense strand to SEQ ID NO: 2117082
acauuaacuaauaaguggu

SEQ ID NO: 2117084 - RNA, 19 nt, Artificial Sequence
  Description of Artificial Sequence: Synthetic oligonucleotide
  Sense strand starting at position 1344 of SEQ ID NO: 1882386
aguuaaugugacugagcaa

SEQ ID NO: 2117085 - RNA, 19 nt, Artificial Sequence
  Description of Artificial Sequence: Synthetic oligonucleotide
  Antisense strand to SEQ ID NO: 2117084
uugcucagucacauuaacu

SEQ ID NO: 2117086 - RNA, 19 nt, Artificial Sequence
  Description of Artificial Sequence: Synthetic oligonucleotide
  Sense strand starting at position 1345 of SEQ ID NO: 1882386
guuaaugugacugagcaaa

SEQ ID NO: 2117087 - RNA, 19 nt, Artificial Sequence
  Description of Artificial Sequence: Synthetic oligonucleotide
  Antisense strand to SEQ ID NO: 2117086
uuugcucagucacauuaac

SEQ ID NO: 2117088 - RNA, 19 nt, Artificial Sequence
  Description of Artificial Sequence: Synthetic oligonucleotide
  Sense strand starting at position 1347 of SEQ ID NO: 1882386
uaaugugacugagcaaaug

SEQ ID NO: 2117089 - RNA, 19 nt, Artificial Sequence
  Description of Artificial Sequence: Synthetic oligonucleotide
  Antisense strand to SEQ ID NO: 2117088
cauuugcucagucacauua

SEQ ID NO: 2117090 - RNA, 19 nt, Artificial Sequence
  Description of Artificial Sequence: Synthetic oligonucleotide
  Sense strand starting at position 1356 of SEQ ID NO: 1882386
ugagcaaaugacugaacuu

SEQ ID NO: 2117091 - RNA, 19 nt, Artificial Sequence
  Description of Artificial Sequence: Synthetic oligonucleotide
  Antisense strand to SEQ ID NO: 2117090
aaguucagucauuugcuca

SEQ ID NO: 2117092 - RNA, 19 nt, Artificial Sequence
  Description of Artificial Sequence: Synthetic oligonucleotide
  Sense strand starting at position 1603 of SEQ ID NO: 1882386
uagaauuagccuuggugag

SEQ ID NO: 2117093 - RNA, 19 nt, Artificial Sequence
  Description of Artificial Sequence: Synthetic oligonucleotide
  Antisense strand to SEQ ID NO: 2117092
cucaccaaggcuaauucua

SEQ ID NO: 2117094 - RNA, 19 nt, Artificial Sequence
  Description of Artificial Sequence: Synthetic oligonucleotide
  Sense strand starting at position 1852 of SEQ ID NO: 1882386
ggacaauauuuauaugcau

SEQ ID NO: 2117095 - RNA, 19 nt, Artificial Sequence
  Description of Artificial Sequence: Synthetic oligonucleotide
  Antisense strand to SEQ ID NO: 2117094
augcauauaaauauugucc

SEQ ID NO: 2117096 - RNA, 19 nt, Artificial Sequence
  Description of Artificial Sequence: Synthetic oligonucleotide
  Sense strand starting at position 1943 of SEQ ID NO: 1882386
uugagagacuucccagauc

SEQ ID NO: 2117097 - RNA, 19 nt, Artificial Sequence
  Description of Artificial Sequence: Synthetic oligonucleotide
  Antisense strand to SEQ ID NO: 2117096
gaucugggaagucucucaa

SEQ ID NO: 2117098 - RNA, 19 nt, Artificial Sequence
  Description of Artificial Sequence: Synthetic oligonucleotide
  Sense strand starting at position 1954 of SEQ ID NO: 1882386
cccagaucuuaccuuguua

SEQ ID NO: 2117099 - RNA, 19 nt, Artificial Sequence
  Description of Artificial Sequence: Synthetic oligonucleotide
  Antisense strand to SEQ ID NO: 2117098
uaacaagguaagaucuggg

SEQ ID NO: 2117100 - RNA, 19 nt, Artificial Sequence
  Description of Artificial Sequence: Synthetic oligonucleotide
  Sense strand starting at position 2236 of SEQ ID NO: 1882386
uucuuaucuccugaaaggu

SEQ ID NO: 2117101 - RNA, 19 nt, Artificial Sequence
  Description of Artificial Sequence: Synthetic oligonucleotide
  Antisense strand to SEQ ID NO: 2117100
accuuucaggagauaagaa

SEQ ID NO: 2117102 - RNA, 19 nt, Artificial Sequence
  Description of Artificial Sequence: Synthetic oligonucleotide
  Sense strand starting at position 2330 of SEQ ID NO: 1882386
uuagcuuugguugagaucu

SEQ ID NO: 2117103 - RNA, 19 nt, Artificial Sequence
  Description of Artificial Sequence: Synthetic oligonucleotide
  Antisense strand to SEQ ID NO: 2117102
agaucucaaccaaagcuaa

SEQ ID NO: 2117104 - RNA, 19 nt, Artificial Sequence
  Description of Artificial Sequence: Synthetic oligonucleotide
  Sense strand starting at position 2496 of SEQ ID NO: 1882386
gaaggucuuccuugugaaa

SEQ ID NO: 2117105 - RNA, 19 nt, Artificial Sequence
  Description of Artificial Sequence: Synthetic oligonucleotide
  Antisense strand to SEQ ID NO: 2117104
uuucacaaggaagaccuuc

SEQ ID NO: 2117106 - RNA, 19 nt, Artificial Sequence
  Description of Artificial Sequence: Synthetic oligonucleotide
  Sense strand starting at position 2537 of SEQ ID NO: 1882386
acuuucuguuacuugauau

SEQ ID NO: 2117107 - RNA, 19 nt, Artificial Sequence
  Description of Artificial Sequence: Synthetic oligonucleotide
  Antisense strand to SEQ ID NO: 2117106
auaucaaguaacagaaagu

SEQ ID NO: 2117108 - RNA, 19 nt, Artificial Sequence
  Description of Artificial Sequence: Synthetic oligonucleotide
  Sense strand starting at position 2572 of SEQ ID NO: 1882386
cauuaucagugccugagaa

SEQ ID NO: 2117109 - RNA, 19 nt, Artificial Sequence
  Description of Artificial Sequence: Synthetic oligonucleotide
  Antisense strand to SEQ ID NO: 2117108
uucucaggcacugauaaug

SEQ ID NO: 2117110 - RNA, 19 nt, Artificial Sequence
  Description of Artificial Sequence: Synthetic oligonucleotide
  Sense strand starting at position 2573 of SEQ ID NO: 1882386
auuaucagugccugagaaa

SEQ ID NO: 2117111 - RNA, 19 nt, Artificial Sequence
  Description of Artificial Sequence: Synthetic oligonucleotide
  Antisense strand to SEQ ID NO: 2117110
uuucucaggcacugauaau

SEQ ID NO: 2117112 - RNA, 19 nt, Artificial Sequence
  Description of Artificial Sequence: Synthetic oligonucleotide
  Sense strand starting at position 2596 of SEQ ID NO: 1882386
gagauaugguacccugucu

SEQ ID NO: 2117113 - RNA, 19 nt, Artificial Sequence
  Description of Artificial Sequence: Synthetic oligonucleotide
  Antisense strand to SEQ ID NO: 2117112
agacaggguaccauaucuc

SEQ ID NO: 2117114 - RNA, 19 nt, Artificial Sequence
  Description of Artificial Sequence: Synthetic oligonucleotide
  Sense strand starting at position 2767 of SEQ ID NO: 1882386
uccauagaauucucuggca

SEQ ID NO: 2117115 - RNA, 19 nt, Artificial Sequence
  Description of Artificial Sequence: Synthetic oligonucleotide
  Antisense strand to SEQ ID NO: 2117114
ugccagagaauucuaugga

SEQ ID NO: 2117116 - RNA, 19 nt, Artificial Sequence
  Description of Artificial Sequence: Synthetic oligonucleotide
  Sense strand starting at position 2802 of SEQ ID NO: 1882386
cugugagugcaggaaauaa

SEQ ID NO: 2117117 - RNA, 19 nt, Artificial Sequence
  Description of Artificial Sequence: Synthetic oligonucleotide
  Antisense strand to SEQ ID NO: 2117116
uuauuuccugcacucacag

SEQ ID NO: 2117118 - RNA, 19 nt, Artificial Sequence
  Description of Artificial Sequence: Synthetic oligonucleotide
  Sense strand starting at position 2860 of SEQ ID NO: 1882386
aguacauugcaagaaguca

SEQ ID NO: 2117119 - RNA, 19 nt, Artificial Sequence
  Description of Artificial Sequence: Synthetic oligonucleotide
  Antisense strand to SEQ ID NO: 2117118
ugacuucuugcaauguacu

SEQ ID NO: 2117120 - RNA, 19 nt, Artificial Sequence
  Description of Artificial Sequence: Synthetic oligonucleotide
  Sense strand starting at position 3110 of SEQ ID NO: 1882386
gcaccacuuguggaugauu

SEQ ID NO: 2117121 - RNA, 19 nt, Artificial Sequence
  Description of Artificial Sequence: Synthetic oligonucleotide
  Antisense strand to SEQ ID NO: 2117120
aaucauccacaaguggugc

SEQ ID NO: 2117122 - RNA, 19 nt, Artificial Sequence
  Description of Artificial Sequence: Synthetic oligonucleotide
  Sense strand starting at position 3290 of SEQ ID NO: 1882386
ugggaucuuggucaagcua

SEQ ID NO: 2117123 - RNA, 19 nt, Artificial Sequence
  Description of Artificial Sequence: Synthetic oligonucleotide
  Antisense strand to SEQ ID NO: 2117122
uagcuugaccaagauccca

SEQ ID NO: 2117124 - RNA, 19 nt, Artificial Sequence
  Description of Artificial Sequence: Synthetic oligonucleotide
  Sense strand starting at position 3298 of SEQ ID NO: 1882386
uggucaagcuauuuacuuu

SEQ ID NO: 2117125 - RNA, 19 nt, Artificial Sequence
  Description of Artificial Sequence: Synthetic oligonucleotide
  Antisense strand to SEQ ID NO: 2117124
aaaguaaauagcuugacca

SEQ ID NO: 2117126 - RNA, 19 nt, Artificial Sequence
  Description of Artificial Sequence: Synthetic oligonucleotide
  Sense strand starting at position 3392 of SEQ ID NO: 1882386
uucuccaugcuagaguaaa

SEQ ID NO: 2117127 - RNA, 19 nt, Artificial Sequence
  Description of Artificial Sequence: Synthetic oligonucleotide
  Antisense strand to SEQ ID NO: 2117126
uuuacucuagcauggagaa

SEQ ID NO: 2117128 - RNA, 19 nt, Artificial Sequence
  Description of Artificial Sequence: Synthetic oligonucleotide
  Sense strand starting at position 3494 of SEQ ID NO: 1882386
agacuuauauuagcuagaa

SEQ ID NO: 2117129 - RNA, 19 nt, Artificial Sequence
  Description of Artificial Sequence: Synthetic oligonucleotide
  Antisense strand to SEQ ID NO: 2117128
uucuagcuaauauaagucu

SEQ ID NO: 2117130 - RNA, 19 nt, Artificial Sequence
  Description of Artificial Sequence: Synthetic oligonucleotide
  Sense strand starting at position 3613 of SEQ ID NO: 1882386
guccuuugagcugaaauac

SEQ ID NO: 2117131 - RNA, 19 nt, Artificial Sequence
  Description of Artificial Sequence: Synthetic oligonucleotide
  Antisense strand to SEQ ID NO: 2117130
guauuucagcucaaaggac

SEQ ID NO: 2117132 - RNA, 19 nt, Artificial Sequence
  Description of Artificial Sequence: Synthetic oligonucleotide
  Sense strand starting at position 34 of SEQ ID NO: 1882387
agaacacuggcguaggaau

SEQ ID NO: 2117133 - RNA, 19 nt, Artificial Sequence
  Description of Artificial Sequence: Synthetic oligonucleotide
  Antisense strand to SEQ ID NO: 2117132
auuccuacgccaguguucu

SEQ ID NO: 2117134 - RNA, 19 nt, Artificial Sequence
  Description of Artificial Sequence: Synthetic oligonucleotide
  Sense strand starting at position 156 of SEQ ID NO: 1882387
cucugaguggaguagugau

SEQ ID NO: 2117135 - RNA, 19 nt, Artificial Sequence
  Description of Artificial Sequence: Synthetic oligonucleotide
  Antisense strand to SEQ ID NO: 2117134
aucacuacuccacucagag

SEQ ID NO: 2117136 - RNA, 19 nt, Artificial Sequence
  Description of Artificial Sequence: Synthetic oligonucleotide
  Sense strand starting at position 173 of SEQ ID NO: 1882387
auauguuuggcuuaaacug

SEQ ID NO: 2117137 - RNA, 19 nt, Artificial Sequence
  Description of Artificial Sequence: Synthetic oligonucleotide
  Antisense strand to SEQ ID NO: 2117136
caguuuaagccaaacauau

SEQ ID NO: 2117138 - RNA, 19 nt, Artificial Sequence
  Description of Artificial Sequence: Synthetic oligonucleotide
  Sense strand starting at position 265 of SEQ ID NO: 1882387
gcuugucuucgccuggagu

SEQ ID NO: 2117139 - RNA, 19 nt, Artificial Sequence
  Description of Artificial Sequence: Synthetic oligonucleotide
  Antisense strand to SEQ ID NO: 2117138
acuccaggcgaagacaagc

SEQ ID NO: 2117140 - RNA, 19 nt, Artificial Sequence
  Description of Artificial Sequence: Synthetic oligonucleotide
  Sense strand starting at position 370 of SEQ ID NO: 1882387
uaacaauggcugcaggaua

SEQ ID NO: 2117141 - RNA, 19 nt, Artificial Sequence
  Description of Artificial Sequence: Synthetic oligonucleotide
  Antisense strand to SEQ ID NO: 2117140
uauccugcagccauuguua

SEQ ID NO: 2117142 - RNA, 19 nt, Artificial Sequence
  Description of Artificial Sequence: Synthetic oligonucleotide
  Sense strand starting at position 454 of SEQ ID NO: 1882387
ccaagagucuuuguauaua

SEQ ID NO: 2117143 - RNA, 19 nt, Artificial Sequence
  Description of Artificial Sequence: Synthetic oligonucleotide
  Antisense strand to SEQ ID NO: 2117142
uauauacaaagacucuugg

SEQ ID NO: 2117144 - RNA, 19 nt, Artificial Sequence
  Description of Artificial Sequence: Synthetic oligonucleotide
  Sense strand starting at position 457 of SEQ ID NO: 1882387
agagucuuuguauauacuu

SEQ ID NO: 2117145 - RNA, 19 nt, Artificial Sequence
  Description of Artificial Sequence: Synthetic oligonucleotide
  Antisense strand to SEQ ID NO: 2117144
aaguauauacaaagacucu

SEQ ID NO: 2117146 - RNA, 19 nt, Artificial Sequence
  Description of Artificial Sequence: Synthetic oligonucleotide
  Sense strand starting at position 552 of SEQ ID NO: 1882387
ucaagagaguucucuggaa

SEQ ID NO: 2117147 - RNA, 19 nt, Artificial Sequence
  Description of Artificial Sequence: Synthetic oligonucleotide
  Antisense strand to SEQ ID NO: 2117146
uuccagagaacucucuuga

SEQ ID NO: 2117148 - RNA, 19 nt, Artificial Sequence
  Description of Artificial Sequence: Synthetic oligonucleotide
  Sense strand starting at position 750 of SEQ ID NO: 1882387
guaguaauccaauaguaau

SEQ ID NO: 2117149 - RNA, 19 nt, Artificial Sequence
  Description of Artificial Sequence: Synthetic oligonucleotide
  Antisense strand to SEQ ID NO: 2117148
auuacuauuggauuacuac

SEQ ID NO: 2117150 - RNA, 19 nt, Artificial Sequence
  Description of Artificial Sequence: Synthetic oligonucleotide
  Sense strand starting at position 1009 of SEQ ID NO: 1882387
ugugucagauaucucugaa

SEQ ID NO: 2117151 - RNA, 19 nt, Artificial Sequence
  Description of Artificial Sequence: Synthetic oligonucleotide
  Antisense strand to SEQ ID NO: 2117150
uucagagauaucugacaca

SEQ ID NO: 2117152 - RNA, 19 nt, Artificial Sequence
  Description of Artificial Sequence: Synthetic oligonucleotide
  Sense strand starting at position 1012 of SEQ ID NO: 1882387
gucagauaucucugaagug

SEQ ID NO: 2117153 - RNA, 19 nt, Artificial Sequence
  Description of Artificial Sequence: Synthetic oligonucleotide
  Antisense strand to SEQ ID NO: 2117152
cacuucagagauaucugac

SEQ ID NO: 2117154 - RNA, 19 nt, Artificial Sequence
  Description of Artificial Sequence: Synthetic oligonucleotide
  Sense strand starting at position 1017 of SEQ ID NO: 1882387
auaucucugaagugagguu

SEQ ID NO: 2117155 - RNA, 19 nt, Artificial Sequence
  Description of Artificial Sequence: Synthetic oligonucleotide
  Antisense strand to SEQ ID NO: 2117154
aaccucacuucagagauau

SEQ ID NO: 2117156 - RNA, 19 nt, Artificial Sequence
  Description of Artificial Sequence: Synthetic oligonucleotide
  Sense strand starting at position 1131 of SEQ ID NO: 1882387
guauuuaccuggccaacuu

SEQ ID NO: 2117157 - RNA, 19 nt, Artificial Sequence
  Description of Artificial Sequence: Synthetic oligonucleotide
  Antisense strand to SEQ ID NO: 2117156
aaguuggccagguaaauac

SEQ ID NO: 2117158 - RNA, 19 nt, Artificial Sequence
  Description of Artificial Sequence: Synthetic oligonucleotide
  Sense strand starting at position 1200 of SEQ ID NO: 1882387
cugaaagaguggcuccuau

SEQ ID NO: 2117159 - RNA, 19 nt, Artificial Sequence
  Description of Artificial Sequence: Synthetic oligonucleotide
  Antisense strand to SEQ ID NO: 2117158
auaggagccacucuuucag

SEQ ID NO: 2117160 - RNA, 19 nt, Artificial Sequence
  Description of Artificial Sequence: Synthetic oligonucleotide
  Sense strand starting at position 1249 of SEQ ID NO: 1882387
agaacugugaguuagguau

SEQ ID NO: 2117161 - RNA, 19 nt, Artificial Sequence
  Description of Artificial Sequence: Synthetic oligonucleotide
  Antisense strand to SEQ ID NO: 2117160
auaccuaacucacaguucu

SEQ ID NO: 2117162 - RNA, 19 nt, Artificial Sequence
  Description of Artificial Sequence: Synthetic oligonucleotide
  Sense strand starting at position 1253 of SEQ ID NO: 1882387
cugugaguuagguauaacu

SEQ ID NO: 2117163 - RNA, 19 nt, Artificial Sequence
  Description of Artificial Sequence: Synthetic oligonucleotide
  Antisense strand to SEQ ID NO: 2117162
aguuauaccuaacucacag

SEQ ID NO: 2117164 - RNA, 19 nt, Artificial Sequence
  Description of Artificial Sequence: Synthetic oligonucleotide
  Sense strand starting at position 1372 of SEQ ID NO: 1882387
acugaugacugagccuuaa

SEQ ID NO: 2117165 - RNA, 19 nt, Artificial Sequence
  Description of Artificial Sequence: Synthetic oligonucleotide
  Antisense strand to SEQ ID NO: 2117164
uuaaggcucagucaucagu

SEQ ID NO: 2117166 - RNA, 19 nt, Artificial Sequence
  Description of Artificial Sequence: Synthetic oligonucleotide
  Sense strand starting at position 1673 of SEQ ID NO: 1882387
guaauuauugaagguacuu

SEQ ID NO: 2117167 - RNA, 19 nt, Artificial Sequence
  Description of Artificial Sequence: Synthetic oligonucleotide
  Antisense strand to SEQ ID NO: 2117166
aaguaccuucaauaauuac

SEQ ID NO: 2117168 - RNA, 19 nt, Artificial Sequence
  Description of Artificial Sequence: Synthetic oligonucleotide
  Sense strand starting at position 1678 of SEQ ID NO: 1882387
uauugaagguacuuguuau

SEQ ID NO: 2117169 - RNA, 19 nt, Artificial Sequence
  Description of Artificial Sequence: Synthetic oligonucleotide
  Antisense strand to SEQ ID NO: 2117168
auaacaaguaccuucaaua

SEQ ID NO: 2117170 - RNA, 19 nt, Artificial Sequence
  Description of Artificial Sequence: Synthetic oligonucleotide
  Sense strand starting at position 2473 of SEQ ID NO: 1882387
uuagaaaggccauagcuuu

SEQ ID NO: 2117171 - RNA, 19 nt, Artificial Sequence
  Description of Artificial Sequence: Synthetic oligonucleotide
  Antisense strand to SEQ ID NO: 2117170
aaagcuauggccuuucuaa

SEQ ID NO: 2117172 - RNA, 19 nt, Artificial Sequence
  Description of Artificial Sequence: Synthetic oligonucleotide
  Sense strand starting at position 2565 of SEQ ID NO: 1882387
gcgagugacagacagacau

SEQ ID NO: 2117173 - RNA, 19 nt, Artificial Sequence
  Description of Artificial Sequence: Synthetic oligonucleotide
  Antisense strand to SEQ ID NO: 2117172
augucugucugucacucgc

SEQ ID NO: 2117174 - RNA, 19 nt, Artificial Sequence
  Description of Artificial Sequence: Synthetic oligonucleotide
  Sense strand starting at position 2651 of SEQ ID NO: 1882387
aucagauauagucagacgu

SEQ ID NO: 2117175 - RNA, 19 nt, Artificial Sequence
  Description of Artificial Sequence: Synthetic oligonucleotide
  Antisense strand to SEQ ID NO: 2117174
acgucugacuauaucugau

SEQ ID NO: 2117176 - RNA, 19 nt, Artificial Sequence
  Description of Artificial Sequence: Synthetic oligonucleotide
  Sense strand starting at position 2655 of SEQ ID NO: 1882387
gauauagucagacguaaag

SEQ ID NO: 2117177 - RNA, 19 nt, Artificial Sequence
  Description of Artificial Sequence: Synthetic oligonucleotide
  Antisense strand to SEQ ID NO: 2117176
cuuuacgucugacuauauc

SEQ ID NO: 2117178 - RNA, 19 nt, Artificial Sequence
  Description of Artificial Sequence: Synthetic oligonucleotide
  Sense strand starting at position 2657 of SEQ ID NO: 1882387
uauagucagacguaaagug

SEQ ID NO: 2117179 - RNA, 19 nt, Artificial Sequence
  Description of Artificial Sequence: Synthetic oligonucleotide
  Antisense strand to SEQ ID NO: 2117178
cacuuuacgucugacuaua

SEQ ID NO: 2117180 - RNA, 19 nt, Artificial Sequence
  Description of Artificial Sequence: Synthetic oligonucleotide
  Sense strand starting at position 2861 of SEQ ID NO: 1882387
uccaguuauccacagcaua

SEQ ID NO: 2117181 - RNA, 19 nt, Artificial Sequence
  Description of Artificial Sequence: Synthetic oligonucleotide
  Antisense strand to SEQ ID NO: 2117180
uaugcuguggauaacugga

SEQ ID NO: 2117182 - RNA, 19 nt, Artificial Sequence
  Description of Artificial Sequence: Synthetic oligonucleotide
  Sense strand starting at position 3000 of SEQ ID NO: 1882387
gggcgaugcaaucaaucau

SEQ ID NO: 2117183 - RNA, 19 nt, Artificial Sequence
  Description of Artificial Sequence: Synthetic oligonucleotide
  Antisense strand to SEQ ID NO: 2117182
augauugauugcaucgccc

SEQ ID NO: 2117184 - RNA, 19 nt, Artificial Sequence
  Description of Artificial Sequence: Synthetic oligonucleotide
  Sense strand starting at position 3062 of SEQ ID NO: 1882387
ccuucccuggcugaagaau

SEQ ID NO: 2117185 - RNA, 19 nt, Artificial Sequence
  Description of Artificial Sequence: Synthetic oligonucleotide
  Antisense strand to SEQ ID NO: 2117184
auucuucagccagggaagg

SEQ ID NO: 2117186 - RNA, 19 nt, Artificial Sequence
  Description of Artificial Sequence: Synthetic oligonucleotide
  Sense strand starting at position 3087 of SEQ ID NO: 1882387
uuggacugaucccuaugau

SEQ ID NO: 2117187 - RNA, 19 nt, Artificial Sequence
  Description of Artificial Sequence: Synthetic oligonucleotide
  Antisense strand to SEQ ID NO: 2117186
aucauagggaucaguccaa

SEQ ID NO: 2117188 - RNA, 19 nt, Artificial Sequence
  Description of Artificial Sequence: Synthetic oligonucleotide
  Sense strand starting at position 3108 of SEQ ID NO: 1882387
acugaucccuaggauuuaa

SEQ ID NO: 2117189 - RNA, 19 nt, Artificial Sequence
  Description of Artificial Sequence: Synthetic oligonucleotide
  Antisense strand to SEQ ID NO: 2117188
uuaaauccuagggaucagu

SEQ ID NO: 2117190 - RNA, 19 nt, Artificial Sequence
  Description of Artificial Sequence: Synthetic oligonucleotide
  Sense strand starting at position 3140 of SEQ ID NO: 1882387
gugaauucuucucccagac

SEQ ID NO: 2117191 - RNA, 19 nt, Artificial Sequence
  Description of Artificial Sequence: Synthetic oligonucleotide
  Antisense strand to SEQ ID NO: 2117190
gucugggagaagaauucac

SEQ ID NO: 2117192 - RNA, 19 nt, Artificial Sequence
  Description of Artificial Sequence: Synthetic oligonucleotide
  Sense strand starting at position 3219 of SEQ ID NO: 1882387
ccaguuacccggcagauaa

SEQ ID NO: 2117193 - RNA, 19 nt, Artificial Sequence
  Description of Artificial Sequence: Synthetic oligonucleotide
  Antisense strand to SEQ ID NO: 2117192
uuaucugccggguaacugg

SEQ ID NO: 2117194 - RNA, 19 nt, Artificial Sequence
  Description of Artificial Sequence: Synthetic oligonucleotide
  Sense strand starting at position 3327 of SEQ ID NO: 1882387
uuaauaggauugcuuuacu

SEQ ID NO: 2117195 - RNA, 19 nt, Artificial Sequence
  Description of Artificial Sequence: Synthetic oligonucleotide
  Antisense strand to SEQ ID NO: 2117194
aguaaagcaauccuauuaa

SEQ ID NO: 2117196 - RNA, 19 nt, Artificial Sequence
  Description of Artificial Sequence: Synthetic oligonucleotide
  Sense strand starting at position 3330 of SEQ ID NO: 1882387
auaggauugcuuuacuucu

SEQ ID NO: 2117197 - RNA, 19 nt, Artificial Sequence
  Description of Artificial Sequence: Synthetic oligonucleotide
  Antisense strand to SEQ ID NO: 2117196
agaaguaaagcaauccuau

SEQ ID NO: 2117198 - RNA, 19 nt, Artificial Sequence
  Description of Artificial Sequence: Synthetic oligonucleotide
  Sense strand starting at position 3340 of SEQ ID NO: 1882387
uuuacuucuguguaccaaa

SEQ ID NO: 2117199 - RNA, 19 nt, Artificial Sequence
  Description of Artificial Sequence: Synthetic oligonucleotide
  Antisense strand to SEQ ID NO: 2117198
uuugguacacagaaguaaa

SEQ ID NO: 2117200 - RNA, 19 nt, Artificial Sequence
  Description of Artificial Sequence: Synthetic oligonucleotide
  Sense strand starting at position 3437 of SEQ ID NO: 1882387
guauuacuucucuaaaguu

SEQ ID NO: 2117201 - RNA, 19 nt, Artificial Sequence
  Description of Artificial Sequence: Synthetic oligonucleotide
  Antisense strand to SEQ ID NO: 2117200
aacuuuagagaaguaauac

SEQ ID NO: 2117202 - RNA, 19 nt, Artificial Sequence
  Description of Artificial Sequence: Synthetic oligonucleotide
  Sense strand starting at position 3473 of SEQ ID NO: 1882387
ucuccacucccugagucau

SEQ ID NO: 2117203 - RNA, 19 nt, Artificial Sequence
  Description of Artificial Sequence: Synthetic oligonucleotide
  Antisense strand to SEQ ID NO: 2117202
augacucagggaguggaga

SEQ ID NO: 2117204 - RNA, 19 nt, Artificial Sequence
  Description of Artificial Sequence: Synthetic oligonucleotide
  Sense strand starting at position 3485 of SEQ ID NO: 1882387
gagucaucucaggauuguu

SEQ ID NO: 2117205 - RNA, 19 nt, Artificial Sequence
  Description of Artificial Sequence: Synthetic oligonucleotide
  Antisense strand to SEQ ID NO: 2117204
aacaauccugagaugacuc

SEQ ID NO: 2117206 - RNA, 19 nt, Artificial Sequence
  Description of Artificial Sequence: Synthetic oligonucleotide
  Sense strand starting at position 3591 of SEQ ID NO: 1882387
ucaggaguuuaccuaaaug

SEQ ID NO: 2117207 - RNA, 19 nt, Artificial Sequence
  Description of Artificial Sequence: Synthetic oligonucleotide
  Antisense strand to SEQ ID NO: 2117206
cauuuagguaaacuccuga

SEQ ID NO: 2117208 - RNA, 19 nt, Artificial Sequence
  Description of Artificial Sequence: Synthetic oligonucleotide
  Sense strand starting at position 3866 of SEQ ID NO: 1882387
guacuuagauaguuccaag

SEQ ID NO: 2117209 - RNA, 19 nt, Artificial Sequence
  Description of Artificial Sequence: Synthetic oligonucleotide
  Antisense strand to SEQ ID NO: 2117208
cuuggaacuaucuaaguac

SEQ ID NO: 2117210 - RNA, 19 nt, Artificial Sequence
  Description of Artificial Sequence: Synthetic oligonucleotide
  Sense strand starting at position 3932 of SEQ ID NO: 1882387
cucucuuaacuaggagaua

SEQ ID NO: 2117211 - RNA, 19 nt, Artificial Sequence
  Description of Artificial Sequence: Synthetic oligonucleotide
  Antisense strand to SEQ ID NO: 2117210
uaucuccuaguuaagagag

SEQ ID NO: 2117212 - RNA, 19 nt, Artificial Sequence
  Description of Artificial Sequence: Synthetic oligonucleotide
  Sense strand starting at position 2 of SEQ ID NO: 1882388
guugauaguugacaggauu

SEQ ID NO: 2117213 - RNA, 19 nt, Artificial Sequence
  Description of Artificial Sequence: Synthetic oligonucleotide
  Antisense strand to SEQ ID NO: 2117212
aauccugucaacuaucaac

SEQ ID NO: 2117214 - RNA, 19 nt, Artificial Sequence
  Description of Artificial Sequence: Synthetic oligonucleotide
  Sense strand starting at position 15 of SEQ ID NO: 1882388
aggauuuggugucauaaac

SEQ ID NO: 2117215 - RNA, 19 nt, Artificial Sequence
  Description of Artificial Sequence: Synthetic oligonucleotide
  Antisense strand to SEQ ID NO: 2117214
guuuaugacaccaaauccu

SEQ ID NO: 2117216 - RNA, 19 nt, Artificial Sequence
  Description of Artificial Sequence: Synthetic oligonucleotide
  Sense strand starting at position 409 of SEQ ID NO: 1882388
accauauguuuguuuccua

SEQ ID NO: 2117217 - RNA, 19 nt, Artificial Sequence
  Description of Artificial Sequence: Synthetic oligonucleotide
  Antisense strand to SEQ ID NO: 2117216
uaggaaacaaacauauggu

SEQ ID NO: 2117218 - RNA, 19 nt, Artificial Sequence
  Description of Artificial Sequence: Synthetic oligonucleotide
  Sense strand starting at position 498 of SEQ ID NO: 1882388
agagcaaccuagugaacua

SEQ ID NO: 2117219 - RNA, 19 nt, Artificial Sequence
  Description of Artificial Sequence: Synthetic oligonucleotide
  Antisense strand to SEQ ID NO: 2117218
uaguucacuagguugcucu

SEQ ID NO: 2117220 - RNA, 19 nt, Artificial Sequence
  Description of Artificial Sequence: Synthetic oligonucleotide
  Sense strand starting at position 743 of SEQ ID NO: 1882388
ugggaugucuuccuaccaa

SEQ ID NO: 2117221 - RNA, 19 nt, Artificial Sequence
  Description of Artificial Sequence: Synthetic oligonucleotide
  Antisense strand to SEQ ID NO: 2117220
uugguaggaagacauccca

SEQ ID NO: 2117222 - RNA, 19 nt, Artificial Sequence
  Description of Artificial Sequence: Synthetic oligonucleotide
  Sense strand starting at position 977 of SEQ ID NO: 1882388
ugccuauagugaugaauau

SEQ ID NO: 2117223 - RNA, 19 nt, Artificial Sequence
  Description of Artificial Sequence: Synthetic oligonucleotide
  Antisense strand to SEQ ID NO: 2117222
auauucaucacuauaggca

SEQ ID NO: 2117224 - RNA, 19 nt, Artificial Sequence
  Description of Artificial Sequence: Synthetic oligonucleotide
  Sense strand starting at position 978 of SEQ ID NO: 1882388
gccuauagugaugaauauu

SEQ ID NO: 2117225 - RNA, 19 nt, Artificial Sequence
  Description of Artificial Sequence: Synthetic oligonucleotide
  Antisense strand to SEQ ID NO: 2117224
aauauucaucacuauaggc

SEQ ID NO: 2117226 - RNA, 19 nt, Artificial Sequence
  Description of Artificial Sequence: Synthetic oligonucleotide
  Sense strand starting at position 1001 of SEQ ID NO: 1882388
gaguaugcaucuuguucuu

SEQ ID NO: 2117227 - RNA, 19 nt, Artificial Sequence
  Description of Artificial Sequence: Synthetic oligonucleotide
  Antisense strand to SEQ ID NO: 2117226
aagaacaagaugcauacuc

SEQ ID NO: 2117228 - RNA, 19 nt, Artificial Sequence
  Description of Artificial Sequence: Synthetic oligonucleotide
  Sense strand starting at position 1028 of SEQ ID NO: 1882388
guaaguaucacacacguca

SEQ ID NO: 2117229 - RNA, 19 nt, Artificial Sequence
  Description of Artificial Sequence: Synthetic oligonucleotide
  Antisense strand to SEQ ID NO: 2117228
ugacgugugugauacuuac

SEQ ID NO: 2117230 - RNA, 19 nt, Artificial Sequence
  Description of Artificial Sequence: Synthetic oligonucleotide
  Sense strand starting at position 1036 of SEQ ID NO: 1882388
cacacacgucaagguauau

SEQ ID NO: 2117231 - RNA, 19 nt, Artificial Sequence
  Description of Artificial Sequence: Synthetic oligonucleotide
  Antisense strand to SEQ ID NO: 2117230
auauaccuugacgugugug

SEQ ID NO: 2117232 - RNA, 19 nt, Artificial Sequence
  Description of Artificial Sequence: Synthetic oligonucleotide
  Sense strand starting at position 1040 of SEQ ID NO: 1882388
cacgucaagguauaugaaa

SEQ ID NO: 2117233 - RNA, 19 nt, Artificial Sequence
  Description of Artificial Sequence: Synthetic oligonucleotide
  Antisense strand to SEQ ID NO: 2117232
uuucauauaccuugacgug

SEQ ID NO: 2117234 - RNA, 19 nt, Artificial Sequence
  Description of Artificial Sequence: Synthetic oligonucleotide
  Sense strand starting at position 1062 of SEQ ID NO: 1882388
uggcuuauguuaucaagag

SEQ ID NO: 2117235 - RNA, 19 nt, Artificial Sequence
  Description of Artificial Sequence: Synthetic oligonucleotide
  Antisense strand to SEQ ID NO: 2117234
cucuugauaacauaagcca

SEQ ID NO: 2117236 - RNA, 19 nt, Artificial Sequence
  Description of Artificial Sequence: Synthetic oligonucleotide
  Sense strand starting at position 1063 of SEQ ID NO: 1882388
ggcuuauguuaucaagaga

SEQ ID NO: 2117237 - RNA, 19 nt, Artificial Sequence
  Description of Artificial Sequence: Synthetic oligonucleotide
  Antisense strand to SEQ ID NO: 2117236
ucucuugauaacauaagcc

SEQ ID NO: 2117238 - RNA, 19 nt, Artificial Sequence
  Description of Artificial Sequence: Synthetic oligonucleotide
  Sense strand starting at position 1210 of SEQ ID NO: 1882388
gaaagaauuuagcaacgua

SEQ ID NO: 2117239 - RNA, 19 nt, Artificial Sequence
  Description of Artificial Sequence: Synthetic oligonucleotide
  Antisense strand to SEQ ID NO: 2117238
uacguugcuaaauucuuuc

SEQ ID NO: 2117240 - RNA, 19 nt, Artificial Sequence
  Description of Artificial Sequence: Synthetic oligonucleotide
  Sense strand starting at position 1252 of SEQ ID NO: 1882388
aaccauaugugauagaaug

SEQ ID NO: 2117241 - RNA, 19 nt, Artificial Sequence
  Description of Artificial Sequence: Synthetic oligonucleotide
  Antisense strand to SEQ ID NO: 2117240
cauucuaucacauaugguu

SEQ ID NO: 2117242 - RNA, 19 nt, Artificial Sequence
  Description of Artificial Sequence: Synthetic oligonucleotide
  Sense strand starting at position 1268 of SEQ ID NO: 1882388
auggaugaauccuacuaag

SEQ ID NO: 2117243 - RNA, 19 nt, Artificial Sequence
  Description of Artificial Sequence: Synthetic oligonucleotide
  Antisense strand to SEQ ID NO: 2117242
cuuaguaggauucauccau

SEQ ID NO: 2117244 - RNA, 19 nt, Artificial Sequence
  Description of Artificial Sequence: Synthetic oligonucleotide
  Sense strand starting at position 1359 of SEQ ID NO: 1882388
guagaaacaccuugcuaaa

SEQ ID NO: 2117245 - RNA, 19 nt, Artificial Sequence
  Description of Artificial Sequence: Synthetic oligonucleotide
  Antisense strand to SEQ ID NO: 2117244
uuuagcaagguguuucuac

SEQ ID NO: 2117246 - RNA, 19 nt, Artificial Sequence
  Description of Artificial Sequence: Synthetic oligonucleotide
  Sense strand starting at position 1740 of SEQ ID NO: 1882388
ccaagauucuaacgcagag

SEQ ID NO: 2117247 - RNA, 19 nt, Artificial Sequence
  Description of Artificial Sequence: Synthetic oligonucleotide
  Antisense strand to SEQ ID NO: 2117246
cucugcguuagaaucuugg

SEQ ID NO: 2117248 - RNA, 19 nt, Artificial Sequence
  Description of Artificial Sequence: Synthetic oligonucleotide
  Sense strand starting at position 1863 of SEQ ID NO: 1882388
cuggauauauguucucuag

SEQ ID NO: 2117249 - RNA, 19 nt, Artificial Sequence
  Description of Artificial Sequence: Synthetic oligonucleotide
  Antisense strand to SEQ ID NO: 2117248
cuagagaacauauauccag

SEQ ID NO: 2117250 - RNA, 19 nt, Artificial Sequence
  Description of Artificial Sequence: Synthetic oligonucleotide
  Sense strand starting at position 2305 of SEQ ID NO: 1882388
caugcauaauagguguuaa

SEQ ID NO: 2117251 - RNA, 19 nt, Artificial Sequence
  Description of Artificial Sequence: Synthetic oligonucleotide
  Antisense strand to SEQ ID NO: 2117250
uuaacaccuauuaugcaug

SEQ ID NO: 2117252 - RNA, 19 nt, Artificial Sequence
  Description of Artificial Sequence: Synthetic oligonucleotide
  Sense strand starting at position 2875 of SEQ ID NO: 1882388
auagguuacuuauucugau

SEQ ID NO: 2117253 - RNA, 19 nt, Artificial Sequence
  Description of Artificial Sequence: Synthetic oligonucleotide
  Antisense strand to SEQ ID NO: 2117252
aucagaauaaguaaccuau

SEQ ID NO: 2117254 - RNA, 19 nt, Artificial Sequence
  Description of Artificial Sequence: Synthetic oligonucleotide
  Sense strand starting at position 2878 of SEQ ID NO: 1882388
gguuacuuauucugauugu

SEQ ID NO: 2117255 - RNA, 19 nt, Artificial Sequence
  Description of Artificial Sequence: Synthetic oligonucleotide
  Antisense strand to SEQ ID NO: 2117254
acaaucagaauaaguaacc

SEQ ID NO: 2117256 - RNA, 19 nt, Artificial Sequence
  Description of Artificial Sequence: Synthetic oligonucleotide
  Sense strand starting at position 2879 of SEQ ID NO: 1882388
guuacuuauucugauuguu

SEQ ID NO: 2117257 - RNA, 19 nt, Artificial Sequence
  Description of Artificial Sequence: Synthetic oligonucleotide
  Antisense strand to SEQ ID NO: 2117256
aacaaucagaauaaguaac

SEQ ID NO: 2117258 - RNA, 19 nt, Artificial Sequence
  Description of Artificial Sequence: Synthetic oligonucleotide
  Sense strand starting at position 2887 of SEQ ID NO: 1882388
uucugauuguuggguugga

SEQ ID NO: 2117259 - RNA, 19 nt, Artificial Sequence
  Description of Artificial Sequence: Synthetic oligonucleotide
  Antisense strand to SEQ ID NO: 2117258
uccaacccaacaaucagaa

SEQ ID NO: 2117260 - RNA, 19 nt, Artificial Sequence
  Description of Artificial Sequence: Synthetic oligonucleotide
  Sense strand starting at position 2888 of SEQ ID NO: 1882388
ucugauuguuggguuggau

SEQ ID NO: 2117261 - RNA, 19 nt, Artificial Sequence
  Description of Artificial Sequence: Synthetic oligonucleotide
  Antisense strand to SEQ ID NO: 2117260
auccaacccaacaaucaga

SEQ ID NO: 2117262 - RNA, 19 nt, Artificial Sequence
  Description of Artificial Sequence: Synthetic oligonucleotide
  Sense strand starting at position 2897 of SEQ ID NO: 1882388
uggguuggauguuuauuau

SEQ ID NO: 2117263 - RNA, 19 nt, Artificial Sequence
  Description of Artificial Sequence: Synthetic oligonucleotide
  Antisense strand to SEQ ID NO: 2117262
auaauaaacauccaaccca

SEQ ID NO: 2117264 - RNA, 19 nt, Artificial Sequence
  Description of Artificial Sequence: Synthetic oligonucleotide
  Sense strand starting at position 2919 of SEQ ID NO: 1882388
auugaaugguauugugaau

SEQ ID NO: 2117265 - RNA, 19 nt, Artificial Sequence
  Description of Artificial Sequence: Synthetic oligonucleotide
  Antisense strand to SEQ ID NO: 2117264
auucacaauaccauucaau

SEQ ID NO: 2117266 - RNA, 19 nt, Artificial Sequence
  Description of Artificial Sequence: Synthetic oligonucleotide
  Sense strand starting at position 2925 of SEQ ID NO: 1882388
ugguauugugaauggauca

SEQ ID NO: 2117267 - RNA, 19 nt, Artificial Sequence
  Description of Artificial Sequence: Synthetic oligonucleotide
  Antisense strand to SEQ ID NO: 2117266
ugauccauucacaauacca

SEQ ID NO: 2117268 - RNA, 19 nt, Artificial Sequence
  Description of Artificial Sequence: Synthetic oligonucleotide
  Sense strand starting at position 2926 of SEQ ID NO: 1882388
gguauugugaauggaucaa

SEQ ID NO: 2117269 - RNA, 19 nt, Artificial Sequence
  Description of Artificial Sequence: Synthetic oligonucleotide
  Antisense strand to SEQ ID NO: 2117268
uugauccauucacaauacc

SEQ ID NO: 2117270 - RNA, 19 nt, Artificial Sequence
  Description of Artificial Sequence: Synthetic oligonucleotide
  Sense strand starting at position 2939 of SEQ ID NO: 1882388
gaucaaggaugauggcaua

SEQ ID NO: 2117271 - RNA, 19 nt, Artificial Sequence
  Description of Artificial Sequence: Synthetic oligonucleotide
  Antisense strand to SEQ ID NO: 2117270
uaugccaucauccuugauc

SEQ ID NO: 2117272 - RNA, 19 nt, Artificial Sequence
  Description of Artificial Sequence: Synthetic oligonucleotide
  Sense strand starting at position 2942 of SEQ ID NO: 1882388
caaggaugauggcauauaa

SEQ ID NO: 2117273 - RNA, 19 nt, Artificial Sequence
  Description of Artificial Sequence: Synthetic oligonucleotide
  Antisense strand to SEQ ID NO: 2117272
uuauaugccaucauccuug

SEQ ID NO: 2117274 - RNA, 19 nt, Artificial Sequence
  Description of Artificial Sequence: Synthetic oligonucleotide
  Sense strand starting at position 2963 of SEQ ID NO: 1882388
acccaaaguuuaugguuaa

SEQ ID NO: 2117275 - RNA, 19 nt, Artificial Sequence
  Description of Artificial Sequence: Synthetic oligonucleotide
  Antisense strand to SEQ ID NO: 2117274
uuaaccauaaacuuugggu

SEQ ID NO: 2117276 - RNA, 19 nt, Artificial Sequence
  Description of Artificial Sequence: Synthetic oligonucleotide
  Sense strand starting at position 2970 of SEQ ID NO: 1882388
guuuaugguuaacacaauu

SEQ ID NO: 2117277 - RNA, 19 nt, Artificial Sequence
  Description of Artificial Sequence: Synthetic oligonucleotide
  Antisense strand to SEQ ID NO: 2117276
aauuguguuaaccauaaac

SEQ ID NO: 2117278 - RNA, 19 nt, Artificial Sequence
  Description of Artificial Sequence: Synthetic oligonucleotide
  Sense strand starting at position 3055 of SEQ ID NO: 1882388
uuaugaagucuguggcaga

SEQ ID NO: 2117279 - RNA, 19 nt, Artificial Sequence
  Description of Artificial Sequence: Synthetic oligonucleotide
  Antisense strand to SEQ ID NO: 2117278
ucugccacagacuucauaa

SEQ ID NO: 2117280 - RNA, 19 nt, Artificial Sequence
  Description of Artificial Sequence: Synthetic oligonucleotide
  Sense strand starting at position 3056 of SEQ ID NO: 1882388
uaugaagucuguggcagaa

SEQ ID NO: 2117281 - RNA, 19 nt, Artificial Sequence
  Description of Artificial Sequence: Synthetic oligonucleotide
  Antisense strand to SEQ ID NO: 2117280
uucugccacagacuucaua

SEQ ID NO: 2117282 - RNA, 19 nt, Artificial Sequence
  Description of Artificial Sequence: Synthetic oligonucleotide
  Sense strand starting at position 3379 of SEQ ID NO: 1882388
gguaauacauaguuucgaa

SEQ ID NO: 2117283 - RNA, 19 nt, Artificial Sequence
  Description of Artificial Sequence: Synthetic oligonucleotide
  Antisense strand to SEQ ID NO: 2117282
uucgaaacuauguauuacc

SEQ ID NO: 2117284 - RNA, 19 nt, Artificial Sequence
  Description of Artificial Sequence: Synthetic oligonucleotide
  Sense strand starting at position 3382 of SEQ ID NO: 1882388
aauacauaguuucgaauag

SEQ ID NO: 2117285 - RNA, 19 nt, Artificial Sequence
  Description of Artificial Sequence: Synthetic oligonucleotide
  Antisense strand to SEQ ID NO: 2117284
cuauucgaaacuauguauu

SEQ ID NO: 2117286 - RNA, 19 nt, Artificial Sequence
  Description of Artificial Sequence: Synthetic oligonucleotide
  Sense strand starting at position 3386 of SEQ ID NO: 1882388
cauaguuucgaauagcuag

SEQ ID NO: 2117287 - RNA, 19 nt, Artificial Sequence
  Description of Artificial Sequence: Synthetic oligonucleotide
  Antisense strand to SEQ ID NO: 2117286
cuagcuauucgaaacuaug

SEQ ID NO: 2117288 - RNA, 19 nt, Artificial Sequence
  Description of Artificial Sequence: Synthetic oligonucleotide
  Sense strand starting at position 3696 of SEQ ID NO: 1882388
cuacuuucgugucuacuaa

SEQ ID NO: 2117289 - RNA, 19 nt, Artificial Sequence
  Description of Artificial Sequence: Synthetic oligonucleotide
  Antisense strand to SEQ ID NO: 2117288
uuaguagacacgaaaguag

SEQ ID NO: 2117290 - RNA, 19 nt, Artificial Sequence
  Description of Artificial Sequence: Synthetic oligonucleotide
  Sense strand starting at position 42 of SEQ ID NO: 1882389
gcagguguccuagacagac

SEQ ID NO: 2117291 - RNA, 19 nt, Artificial Sequence
  Description of Artificial Sequence: Synthetic oligonucleotide
  Antisense strand to SEQ ID NO: 2117290
gucugucuaggacaccugc

SEQ ID NO: 2117292 - RNA, 19 nt, Artificial Sequence
  Description of Artificial Sequence: Synthetic oligonucleotide
  Sense strand starting at position 227 of SEQ ID NO: 1882389
aauggaaaugucugacuua

SEQ ID NO: 2117293 - RNA, 19 nt, Artificial Sequence
  Description of Artificial Sequence: Synthetic oligonucleotide
  Antisense strand to SEQ ID NO: 2117292
uaagucagacauuuccauu

SEQ ID NO: 2117294 - RNA, 19 nt, Artificial Sequence
  Description of Artificial Sequence: Synthetic oligonucleotide
  Sense strand starting at position 230 of SEQ ID NO: 1882389
ggaaaugucugacuuaaau

SEQ ID NO: 2117295 - RNA, 19 nt, Artificial Sequence
  Description of Artificial Sequence: Synthetic oligonucleotide
  Antisense strand to SEQ ID NO: 2117294
auuuaagucagacauuucc

SEQ ID NO: 2117296 - RNA, 19 nt, Artificial Sequence
  Description of Artificial Sequence: Synthetic oligonucleotide
  Sense strand starting at position 317 of SEQ ID NO: 1882389
auuagaaauguuugguacu

SEQ ID NO: 2117297 - RNA, 19 nt, Artificial Sequence
  Description of Artificial Sequence: Synthetic oligonucleotide
  Antisense strand to SEQ ID NO: 2117296
aguaccaaacauuucuaau

SEQ ID NO: 2117298 - RNA, 19 nt, Artificial Sequence
  Description of Artificial Sequence: Synthetic oligonucleotide
  Sense strand starting at position 319 of SEQ ID NO: 1882389
uagaaauguuugguacuuu

SEQ ID NO: 2117299 - RNA, 19 nt, Artificial Sequence
  Description of Artificial Sequence: Synthetic oligonucleotide
  Antisense strand to SEQ ID NO: 2117298
aaaguaccaaacauuucua

SEQ ID NO: 2117300 - RNA, 19 nt, Artificial Sequence
  Description of Artificial Sequence: Synthetic oligonucleotide
  Sense strand starting at position 407 of SEQ ID NO: 1882389
gcaguugauuucuuuccca

SEQ ID NO: 2117301 - RNA, 19 nt, Artificial Sequence
  Description of Artificial Sequence: Synthetic oligonucleotide
  Antisense strand to SEQ ID NO: 2117300
ugggaaagaaaucaacugc

SEQ ID NO: 2117302 - RNA, 19 nt, Artificial Sequence
  Description of Artificial Sequence: Synthetic oligonucleotide
  Sense strand starting at position 1008 of SEQ ID NO: 1882389
guaauuggucuguaaaugu

SEQ ID NO: 2117303 - RNA, 19 nt, Artificial Sequence
  Description of Artificial Sequence: Synthetic oligonucleotide
  Antisense strand to SEQ ID NO: 2117302
acauuuacagaccaauuac

SEQ ID NO: 2117304 - RNA, 19 nt, Artificial Sequence
  Description of Artificial Sequence: Synthetic oligonucleotide
  Sense strand starting at position 1019 of SEQ ID NO: 1882389
guaaauguaugguugagaa

SEQ ID NO: 2117305 - RNA, 19 nt, Artificial Sequence
  Description of Artificial Sequence: Synthetic oligonucleotide
  Antisense strand to SEQ ID NO: 2117304
uucucaaccauacauuuac

SEQ ID NO: 2117306 - RNA, 19 nt, Artificial Sequence
  Description of Artificial Sequence: Synthetic oligonucleotide
  Sense strand starting at position 1049 of SEQ ID NO: 1882389
ucuagucuuagucaaggua

SEQ ID NO: 2117307 - RNA, 19 nt, Artificial Sequence
  Description of Artificial Sequence: Synthetic oligonucleotide
  Antisense strand to SEQ ID NO: 2117306
uaccuugacuaagacuaga

SEQ ID NO: 2117308 - RNA, 19 nt, Artificial Sequence
  Description of Artificial Sequence: Synthetic oligonucleotide
  Sense strand starting at position 1339 of SEQ ID NO: 1882389
gaagaagguuuaucccuuu

SEQ ID NO: 2117309 - RNA, 19 nt, Artificial Sequence
  Description of Artificial Sequence: Synthetic oligonucleotide
  Antisense strand to SEQ ID NO: 2117308
aaagggauaaaccuucuuc

SEQ ID NO: 2117310 - RNA, 19 nt, Artificial Sequence
  Description of Artificial Sequence: Synthetic oligonucleotide
  Sense strand starting at position 1450 of SEQ ID NO: 1882389
aucuauguuuacucuugga

SEQ ID NO: 2117311 - RNA, 19 nt, Artificial Sequence
  Description of Artificial Sequence: Synthetic oligonucleotide
  Antisense strand to SEQ ID NO: 2117310
uccaagaguaaacauagau

SEQ ID NO: 2117312 - RNA, 19 nt, Artificial Sequence
  Description of Artificial Sequence: Synthetic oligonucleotide
  Sense strand starting at position 1454 of SEQ ID NO: 1882389
auguuuacucuuggagaau

SEQ ID NO: 2117313 - RNA, 19 nt, Artificial Sequence
  Description of Artificial Sequence: Synthetic oligonucleotide
  Antisense strand to SEQ ID NO: 2117312
auucuccaagaguaaacau

SEQ ID NO: 2117314 - RNA, 19 nt, Artificial Sequence
  Description of Artificial Sequence: Synthetic oligonucleotide
  Sense strand starting at position 1472 of SEQ ID NO: 1882389
ugccuuauagaucaaaggu

SEQ ID NO: 2117315 - RNA, 19 nt, Artificial Sequence
  Description of Artificial Sequence: Synthetic oligonucleotide
  Antisense strand to SEQ ID NO: 2117314
accuuugaucuauaaggca

SEQ ID NO: 2117316 - RNA, 19 nt, Artificial Sequence
  Description of Artificial Sequence: Synthetic oligonucleotide
  Sense strand starting at position 1739 of SEQ ID NO: 1882389
aguugaugaucucugucaa

SEQ ID NO: 2117317 - RNA, 19 nt, Artificial Sequence
  Description of Artificial Sequence: Synthetic oligonucleotide
  Antisense strand to SEQ ID NO: 2117316
uugacagagaucaucaacu

SEQ ID NO: 2117318 - RNA, 19 nt, Artificial Sequence
  Description of Artificial Sequence: Synthetic oligonucleotide
  Sense strand starting at position 1740 of SEQ ID NO: 1882389
guugaugaucucugucaaa

SEQ ID NO: 2117319 - RNA, 19 nt, Artificial Sequence
  Description of Artificial Sequence: Synthetic oligonucleotide
  Antisense strand to SEQ ID NO: 2117318
uuugacagagaucaucaac

SEQ ID NO: 2117320 - RNA, 19 nt, Artificial Sequence
  Description of Artificial Sequence: Synthetic oligonucleotide
  Sense strand starting at position 1756 of SEQ ID NO: 1882389
aaaguauuaggucaaagca

SEQ ID NO: 2117321 - RNA, 19 nt, Artificial Sequence
  Description of Artificial Sequence: Synthetic oligonucleotide
  Antisense strand to SEQ ID NO: 2117320
ugcuuugaccuaauacuuu

SEQ ID NO: 2117322 - RNA, 19 nt, Artificial Sequence
  Description of Artificial Sequence: Synthetic oligonucleotide
  Sense strand starting at position 1846 of SEQ ID NO: 1882389
acauaagagucaccuguua

SEQ ID NO: 2117323 - RNA, 19 nt, Artificial Sequence
  Description of Artificial Sequence: Synthetic oligonucleotide
  Antisense strand to SEQ ID NO: 2117322
uaacaggugacucuuaugu

SEQ ID NO: 2117324 - RNA, 19 nt, Artificial Sequence
  Description of Artificial Sequence: Synthetic oligonucleotide
  Sense strand starting at position 2223 of SEQ ID NO: 1882389
agggaucaguuguucuuaa

SEQ ID NO: 2117325 - RNA, 19 nt, Artificial Sequence
  Description of Artificial Sequence: Synthetic oligonucleotide
  Antisense strand to SEQ ID NO: 2117324
uuaagaacaacugaucccu

SEQ ID NO: 2117326 - RNA, 19 nt, Artificial Sequence
  Description of Artificial Sequence: Synthetic oligonucleotide
  Sense strand starting at position 2224 of SEQ ID NO: 1882389
gggaucaguuguucuuaau

SEQ ID NO: 2117327 - RNA, 19 nt, Artificial Sequence
  Description of Artificial Sequence: Synthetic oligonucleotide
  Antisense strand to SEQ ID NO: 2117326
auuaagaacaacugauccc

SEQ ID NO: 2117328 - RNA, 19 nt, Artificial Sequence
  Description of Artificial Sequence: Synthetic oligonucleotide
  Sense strand starting at position 2455 of SEQ ID NO: 1882389
cuguuuauuagucagguca

SEQ ID NO: 2117329 - RNA, 19 nt, Artificial Sequence
  Description of Artificial Sequence: Synthetic oligonucleotide
  Antisense strand to SEQ ID NO: 2117328
ugaccugacuaauaaacag

SEQ ID NO: 2117330 - RNA, 19 nt, Artificial Sequence
  Description of Artificial Sequence: Synthetic oligonucleotide
  Sense strand starting at position 2470 of SEQ ID NO: 1882389
gucacaauucuguagguca

SEQ ID NO: 2117331 - RNA, 19 nt, Artificial Sequence
  Description of Artificial Sequence: Synthetic oligonucleotide
  Antisense strand to SEQ ID NO: 2117330
ugaccuacagaauugugac

SEQ ID NO: 2117332 - RNA, 19 nt, Artificial Sequence
  Description of Artificial Sequence: Synthetic oligonucleotide
  Sense strand starting at position 2560 of SEQ ID NO: 1882389
uguucucaucaggaguuua

SEQ ID NO: 2117333 - RNA, 19 nt, Artificial Sequence
  Description of Artificial Sequence: Synthetic oligonucleotide
  Antisense strand to SEQ ID NO: 2117332
uaaacuccugaugagaaca

SEQ ID NO: 2117334 - RNA, 19 nt, Artificial Sequence
  Description of Artificial Sequence: Synthetic oligonucleotide
  Sense strand starting at position 3133 of SEQ ID NO: 1882389
aaugacucacgugaucagu

SEQ ID NO: 2117335 - RNA, 19 nt, Artificial Sequence
  Description of Artificial Sequence: Synthetic oligonucleotide
  Antisense strand to SEQ ID NO: 2117334
acugaucacgugagucauu

SEQ ID NO: 2117336 - RNA, 19 nt, Artificial Sequence
  Description of Artificial Sequence: Synthetic oligonucleotide
  Sense strand starting at position 3221 of SEQ ID NO: 1882389
ucccuuuggccauauaaug

SEQ ID NO: 2117337 - RNA, 19 nt, Artificial Sequence
  Description of Artificial Sequence: Synthetic oligonucleotide
  Antisense strand to SEQ ID NO: 2117336
cauuauauggccaaaggga

SEQ ID NO: 2117338 - RNA, 19 nt, Artificial Sequence
  Description of Artificial Sequence: Synthetic oligonucleotide
  Sense strand starting at position 3281 of SEQ ID NO: 1882389
aagcaagagucauugggaa

SEQ ID NO: 2117339 - RNA, 19 nt, Artificial Sequence
  Description of Artificial Sequence: Synthetic oligonucleotide
  Antisense strand to SEQ ID NO: 2117338
uucccaaugacucuugcuu

SEQ ID NO: 2117340 - RNA, 19 nt, Artificial Sequence
  Description of Artificial Sequence: Synthetic oligonucleotide
  Sense strand starting at position 3283 of SEQ ID NO: 1882389
gcaagagucauugggaauc

SEQ ID NO: 2117341 - RNA, 19 nt, Artificial Sequence
  Description of Artificial Sequence: Synthetic oligonucleotide
  Antisense strand to SEQ ID NO: 2117340
gauucccaaugacucuugc

SEQ ID NO: 2117342 - RNA, 19 nt, Artificial Sequence
  Description of Artificial Sequence: Synthetic oligonucleotide
  Sense strand starting at position 3305 of SEQ ID NO: 1882389
uuagaauccugccuaucag

SEQ ID NO: 2117343 - RNA, 19 nt, Artificial Sequence
  Description of Artificial Sequence: Synthetic oligonucleotide
  Antisense strand to SEQ ID NO: 2117342
cugauaggcaggauucuaa

SEQ ID NO: 2117344 - RNA, 19 nt, Artificial Sequence
  Description of Artificial Sequence: Synthetic oligonucleotide
  Sense strand starting at position 3319 of SEQ ID NO: 1882389
aucagacaguugguaucaa

SEQ ID NO: 2117345 - RNA, 19 nt, Artificial Sequence
  Description of Artificial Sequence: Synthetic oligonucleotide
  Antisense strand to SEQ ID NO: 2117344
uugauaccaacugucugau

SEQ ID NO: 2117346 - RNA, 19 nt, Artificial Sequence
  Description of Artificial Sequence: Synthetic oligonucleotide
  Sense strand starting at position 3396 of SEQ ID NO: 1882389
cucugaaagcaauaggguu

SEQ ID NO: 2117347 - RNA, 19 nt, Artificial Sequence
  Description of Artificial Sequence: Synthetic oligonucleotide
  Antisense strand to SEQ ID NO: 2117346
aacccuauugcuuucagag

SEQ ID NO: 2117348 - RNA, 19 nt, Artificial Sequence
  Description of Artificial Sequence: Synthetic oligonucleotide
  Sense strand starting at position 3446 of SEQ ID NO: 1882389
cccaaugugcaaugauauc

SEQ ID NO: 2117349 - RNA, 19 nt, Artificial Sequence
  Description of Artificial Sequence: Synthetic oligonucleotide
  Antisense strand to SEQ ID NO: 2117348
gauaucauugcacauuggg

SEQ ID NO: 2117350 - RNA, 19 nt, Artificial Sequence
  Description of Artificial Sequence: Synthetic oligonucleotide
  Sense strand starting at position 3493 of SEQ ID NO: 1882389
uugauauuagguggagcua

SEQ ID NO: 2117351 - RNA, 19 nt, Artificial Sequence
  Description of Artificial Sequence: Synthetic oligonucleotide
  Antisense strand to SEQ ID NO: 2117350
uagcuccaccuaauaucaa

SEQ ID NO: 2117352 - RNA, 19 nt, Artificial Sequence
  Description of Artificial Sequence: Synthetic oligonucleotide
  Sense strand starting at position 3553 of SEQ ID NO: 1882389
aaaguaugggagcaguuau

SEQ ID NO: 2117353 - RNA, 19 nt, Artificial Sequence
  Description of Artificial Sequence: Synthetic oligonucleotide
  Antisense strand to SEQ ID NO: 2117352
auaacugcucccauacuuu

SEQ ID NO: 2117354 - RNA, 19 nt, Artificial Sequence
  Description of Artificial Sequence: Synthetic oligonucleotide
  Sense strand starting at position 3757 of SEQ ID NO: 1882389
agaauugugccucauucuu

SEQ ID NO: 2117355 - RNA, 19 nt, Artificial Sequence
  Description of Artificial Sequence: Synthetic oligonucleotide
  Antisense strand to SEQ ID NO: 2117354
aagaaugaggcacaauucu

SEQ ID NO: 2117356 - RNA, 19 nt, Artificial Sequence
  Description of Artificial Sequence: Synthetic oligonucleotide
  Sense strand starting at position 3831 of SEQ ID NO: 1882389
uggcauguuccagaccacu

SEQ ID NO: 2117357 - RNA, 19 nt, Artificial Sequence
  Description of Artificial Sequence: Synthetic oligonucleotide
  Antisense strand to SEQ ID NO: 2117356
aguggucuggaacaugcca

SEQ ID NO: 2117358 - RNA, 19 nt, Artificial Sequence
  Description of Artificial Sequence: Synthetic oligonucleotide
  Sense strand starting at position 3872 of SEQ ID NO: 1882389
uguagcaauucccugaaua

SEQ ID NO: 2117359 - RNA, 19 nt, Artificial Sequence
  Description of Artificial Sequence: Synthetic oligonucleotide
  Antisense strand to SEQ ID NO: 2117358
uauucagggaauugcuaca

SEQ ID NO: 2117360 - RNA, 19 nt, Artificial Sequence
  Description of Artificial Sequence: Synthetic oligonucleotide
  Sense strand starting at position 3873 of SEQ ID NO: 1882389
guagcaauucccugaauau

SEQ ID NO: 2117361 - RNA, 19 nt, Artificial Sequence
  Description of Artificial Sequence: Synthetic oligonucleotide
  Antisense strand to SEQ ID NO: 2117360
auauucagggaauugcuac

SEQ ID NO: 2117362 - RNA, 19 nt, Artificial Sequence
  Description of Artificial Sequence: Synthetic oligonucleotide
  Sense strand starting at position 3914 of SEQ ID NO: 1882389
ucugguacacaugauucua

SEQ ID NO: 2117363 - RNA, 19 nt, Artificial Sequence
  Description of Artificial Sequence: Synthetic oligonucleotide
  Antisense strand to SEQ ID NO: 2117362
uagaaucauguguaccaga

SEQ ID NO: 2117364 - RNA, 19 nt, Artificial Sequence
  Description of Artificial Sequence: Synthetic oligonucleotide
  Sense strand starting at position 3924 of SEQ ID NO: 1882389
augauucuacuagggcauu

SEQ ID NO: 2117365 - RNA, 19 nt, Artificial Sequence
  Description of Artificial Sequence: Synthetic oligonucleotide
  Antisense strand to SEQ ID NO: 2117364
aaugcccuaguagaaucau

SEQ ID NO: 2117366 - RNA, 19 nt, Artificial Sequence
  Description of Artificial Sequence: Synthetic oligonucleotide
  Sense strand starting at position 3967 of SEQ ID NO: 1882389
agguccauuuaguaagaug

SEQ ID NO: 2117367 - RNA, 19 nt, Artificial Sequence
  Description of Artificial Sequence: Synthetic oligonucleotide
  Antisense strand to SEQ ID NO: 2117366
caucuuacuaaauggaccu

SEQ ID NO: 2117368 - RNA, 19 nt, Artificial Sequence
  Description of Artificial Sequence: Synthetic oligonucleotide
  Sense strand starting at position 3983 of SEQ ID NO: 1882389
augccauauggugaucuga

SEQ ID NO: 2117369 - RNA, 19 nt, Artificial Sequence
  Description of Artificial Sequence: Synthetic oligonucleotide
  Antisense strand to SEQ ID NO: 2117368
ucagaucaccauauggcau

SEQ ID NO: 2117370 - RNA, 19 nt, Artificial Sequence
  Description of Artificial Sequence: Synthetic oligonucleotide
  Sense strand starting at position 97 of SEQ ID NO: 1882390
ggugauugucucuaaguga

SEQ ID NO: 2117371 - RNA, 19 nt, Artificial Sequence
  Description of Artificial Sequence: Synthetic oligonucleotide
  Antisense strand to SEQ ID NO: 2117370
ucacuuagagacaaucacc

SEQ ID NO: 2117372 - RNA, 19 nt, Artificial Sequence
  Description of Artificial Sequence: Synthetic oligonucleotide
  Sense strand starting at position 100 of SEQ ID NO: 1882390
gauugucucuaagugagga

SEQ ID NO: 2117373 - RNA, 19 nt, Artificial Sequence
  Description of Artificial Sequence: Synthetic oligonucleotide
  Antisense strand to SEQ ID NO: 2117372
uccucacuuagagacaauc

SEQ ID NO: 2117374 - RNA, 19 nt, Artificial Sequence
  Description of Artificial Sequence: Synthetic oligonucleotide
  Sense strand starting at position 105 of SEQ ID NO: 1882390
ucucuaagugaggagugau

SEQ ID NO: 2117375 - RNA, 19 nt, Artificial Sequence
  Description of Artificial Sequence: Synthetic oligonucleotide
  Antisense strand to SEQ ID NO: 2117374
aucacuccucacuuagaga

SEQ ID NO: 2117376 - RNA, 19 nt, Artificial Sequence
  Description of Artificial Sequence: Synthetic oligonucleotide
  Sense strand starting at position 322 of SEQ ID NO: 1882390
ggugauuguaugugaggga

SEQ ID NO: 2117377 - RNA, 19 nt, Artificial Sequence
  Description of Artificial Sequence: Synthetic oligonucleotide
  Antisense strand to SEQ ID NO: 2117376
ucccucacauacaaucacc

SEQ ID NO: 2117378 - RNA, 19 nt, Artificial Sequence
  Description of Artificial Sequence: Synthetic oligonucleotide
  Sense strand starting at position 326 of SEQ ID NO: 1882390
auuguaugugagggagcaa

SEQ ID NO: 2117379 - RNA, 19 nt, Artificial Sequence
  Description of Artificial Sequence: Synthetic oligonucleotide
  Antisense strand to SEQ ID NO: 2117378
uugcucccucacauacaau

SEQ ID NO: 2117380 - RNA, 19 nt, Artificial Sequence
  Description of Artificial Sequence: Synthetic oligonucleotide
  Sense strand starting at position 327 of SEQ ID NO: 1882390
uuguaugugagggagcaaa

SEQ ID NO: 2117381 - RNA, 19 nt, Artificial Sequence
  Description of Artificial Sequence: Synthetic oligonucleotide
  Antisense strand to SEQ ID NO: 2117380
uuugcucccucacauacaa

SEQ ID NO: 2117382 - RNA, 19 nt, Artificial Sequence
  Description of Artificial Sequence: Synthetic oligonucleotide
  Sense strand starting at position 526 of SEQ ID NO: 1882390
gacauuagaccuggugcca

SEQ ID NO: 2117383 - RNA, 19 nt, Artificial Sequence
  Description of Artificial Sequence: Synthetic oligonucleotide
  Antisense strand to SEQ ID NO: 2117382
uggcaccaggucuaauguc

SEQ ID NO: 2117384 - RNA, 19 nt, Artificial Sequence
  Description of Artificial Sequence: Synthetic oligonucleotide
  Sense strand starting at position 565 of SEQ ID NO: 1882390
uugaauuggugucuggacu

SEQ ID NO: 2117385 - RNA, 19 nt, Artificial Sequence
  Description of Artificial Sequence: Synthetic oligonucleotide
  Antisense strand to SEQ ID NO: 2117384
aguccagacaccaauucaa

SEQ ID NO: 2117386 - RNA, 19 nt, Artificial Sequence
  Description of Artificial Sequence: Synthetic oligonucleotide
  Sense strand starting at position 721 of SEQ ID NO: 1882390
ugggaaaucucacuguugu

SEQ ID NO: 2117387 - RNA, 19 nt, Artificial Sequence
  Description of Artificial Sequence: Synthetic oligonucleotide
  Antisense strand to SEQ ID NO: 2117386
acaacagugagauuuccca

SEQ ID NO: 2117388 - RNA, 19 nt, Artificial Sequence
  Description of Artificial Sequence: Synthetic oligonucleotide
  Sense strand starting at position 722 of SEQ ID NO: 1882390
gggaaaucucacuguuguc

SEQ ID NO: 2117389 - RNA, 19 nt, Artificial Sequence
  Description of Artificial Sequence: Synthetic oligonucleotide
  Antisense strand to SEQ ID NO: 2117388
gacaacagugagauuuccc

SEQ ID NO: 2117390 - RNA, 19 nt, Artificial Sequence
  Description of Artificial Sequence: Synthetic oligonucleotide
  Sense strand starting at position 843 of SEQ ID NO: 1882390
gugcuuuaggaggaagugu

SEQ ID NO: 2117391 - RNA, 19 nt, Artificial Sequence
  Description of Artificial Sequence: Synthetic oligonucleotide
  Antisense strand to SEQ ID NO: 2117390
acacuuccuccuaaagcac

SEQ ID NO: 2117392 - RNA, 19 nt, Artificial Sequence
  Description of Artificial Sequence: Synthetic oligonucleotide
  Sense strand starting at position 1321 of SEQ ID NO: 1882390
aucaauagccagugauuau

SEQ ID NO: 2117393 - RNA, 19 nt, Artificial Sequence
  Description of Artificial Sequence: Synthetic oligonucleotide
  Antisense strand to SEQ ID NO: 2117392
auaaucacuggcuauugau

SEQ ID NO: 2117394 - RNA, 19 nt, Artificial Sequence
  Description of Artificial Sequence: Synthetic oligonucleotide
  Sense strand starting at position 1325 of SEQ ID NO: 1882390
auagccagugauuaucaga

SEQ ID NO: 2117395 - RNA, 19 nt, Artificial Sequence
  Description of Artificial Sequence: Synthetic oligonucleotide
  Antisense strand to SEQ ID NO: 2117394
ucugauaaucacuggcuau

SEQ ID NO: 2117396 - RNA, 19 nt, Artificial Sequence
  Description of Artificial Sequence: Synthetic oligonucleotide
  Sense strand starting at position 1351 of SEQ ID NO: 1882390
uauguucguaguuagagga

SEQ ID NO: 2117397 - RNA, 19 nt, Artificial Sequence
  Description of Artificial Sequence: Synthetic oligonucleotide
  Antisense strand to SEQ ID NO: 2117396
uccucuaacuacgaacaua

SEQ ID NO: 2117398 - RNA, 19 nt, Artificial Sequence
  Description of Artificial Sequence: Synthetic oligonucleotide
  Sense strand starting at position 1395 of SEQ ID NO: 1882390
gacccagaccaguauguuu

SEQ ID NO: 2117399 - RNA, 19 nt, Artificial Sequence
  Description of Artificial Sequence: Synthetic oligonucleotide
  Antisense strand to SEQ ID NO: 2117398
aaacauacuggucuggguc

SEQ ID NO: 2117400 - RNA, 19 nt, Artificial Sequence
  Description of Artificial Sequence: Synthetic oligonucleotide
  Sense strand starting at position 1406 of SEQ ID NO: 1882390
guauguuucugaccucaaa

SEQ ID NO: 2117401 - RNA, 19 nt, Artificial Sequence
  Description of Artificial Sequence: Synthetic oligonucleotide
  Antisense strand to SEQ ID NO: 2117400
uuugaggucagaaacauac

SEQ ID NO: 2117402 - RNA, 19 nt, Artificial Sequence
  Description of Artificial Sequence: Synthetic oligonucleotide
  Sense strand starting at position 1434 of SEQ ID NO: 1882390
ggcagcauuugaccuggua

SEQ ID NO: 2117403 - RNA, 19 nt, Artificial Sequence
  Description of Artificial Sequence: Synthetic oligonucleotide
  Antisense strand to SEQ ID NO: 2117402
uaccaggucaaaugcugcc

SEQ ID NO: 2117404 - RNA, 19 nt, Artificial Sequence
  Description of Artificial Sequence: Synthetic oligonucleotide
  Sense strand starting at position 1472 of SEQ ID NO: 1882390
uacagaugcuuucuaagug

SEQ ID NO: 2117405 - RNA, 19 nt, Artificial Sequence
  Description of Artificial Sequence: Synthetic oligonucleotide
  Antisense strand to SEQ ID NO: 2117404
cacuuagaaagcaucugua

SEQ ID NO: 2117406 - RNA, 19 nt, Artificial Sequence
  Description of Artificial Sequence: Synthetic oligonucleotide
  Sense strand starting at position 1508 of SEQ ID NO: 1882390
ccaagaaagugaucauguc

SEQ ID NO: 2117407 - RNA, 19 nt, Artificial Sequence
  Description of Artificial Sequence: Synthetic oligonucleotide
  Antisense strand to SEQ ID NO: 2117406
gacaugaucacuuucuugg

SEQ ID NO: 2117408 - RNA, 19 nt, Artificial Sequence
  Description of Artificial Sequence: Synthetic oligonucleotide
  Sense strand starting at position 1516 of SEQ ID NO: 1882390
gugaucaugucaucuacag

SEQ ID NO: 2117409 - RNA, 19 nt, Artificial Sequence
  Description of Artificial Sequence: Synthetic oligonucleotide
  Antisense strand to SEQ ID NO: 2117408
cuguagaugacaugaucac

SEQ ID NO: 2117410 - RNA, 19 nt, Artificial Sequence
  Description of Artificial Sequence: Synthetic oligonucleotide
  Sense strand starting at position 1836 of SEQ ID NO: 1882390
uugaauuucucagaaguca

SEQ ID NO: 2117411 - RNA, 19 nt, Artificial Sequence
  Description of Artificial Sequence: Synthetic oligonucleotide
  Antisense strand to SEQ ID NO: 2117410
ugacuucugagaaauucaa

SEQ ID NO: 2117412 - RNA, 19 nt, Artificial Sequence
  Description of Artificial Sequence: Synthetic oligonucleotide
  Sense strand starting at position 2056 of SEQ ID NO: 1882390
ucucaaugucuugaaguca

SEQ ID NO: 2117413 - RNA, 19 nt, Artificial Sequence
  Description of Artificial Sequence: Synthetic oligonucleotide
  Antisense strand to SEQ ID NO: 2117412
ugacuucaagacauugaga

SEQ ID NO: 2117414 - RNA, 19 nt, Artificial Sequence
  Description of Artificial Sequence: Synthetic oligonucleotide
  Sense strand starting at position 2546 of SEQ ID NO: 1882390
cucaauaagcuauagugaa

SEQ ID NO: 2117415 - RNA, 19 nt, Artificial Sequence
  Description of Artificial Sequence: Synthetic oligonucleotide
  Antisense strand to SEQ ID NO: 2117414
uucacuauagcuuauugag

SEQ ID NO: 2117416 - RNA, 19 nt, Artificial Sequence
  Description of Artificial Sequence: Synthetic oligonucleotide
  Sense strand starting at position 2595 of SEQ ID NO: 1882390
gauagauuguacuuugaau

SEQ ID NO: 2117417 - RNA, 19 nt, Artificial Sequence
  Description of Artificial Sequence: Synthetic oligonucleotide
  Antisense strand to SEQ ID NO: 2117416
auucaaaguacaaucuauc

SEQ ID NO: 2117418 - RNA, 19 nt, Artificial Sequence
  Description of Artificial Sequence: Synthetic oligonucleotide
  Sense strand starting at position 2597 of SEQ ID NO: 1882390
uagauuguacuuugaaugu

SEQ ID NO: 2117419 - RNA, 19 nt, Artificial Sequence
  Description of Artificial Sequence: Synthetic oligonucleotide
  Antisense strand to SEQ ID NO: 2117418
acauucaaaguacaaucua

SEQ ID NO: 2117420 - RNA, 19 nt, Artificial Sequence
  Description of Artificial Sequence: Synthetic oligonucleotide
  Sense strand starting at position 2652 of SEQ ID NO: 1882390
cuuuguaugggcuacagau

SEQ ID NO: 2117421 - RNA, 19 nt, Artificial Sequence
  Description of Artificial Sequence: Synthetic oligonucleotide
  Antisense strand to SEQ ID NO: 2117420
aucuguagcccauacaaag

SEQ ID NO: 2117422 - RNA, 19 nt, Artificial Sequence
  Description of Artificial Sequence: Synthetic oligonucleotide
  Sense strand starting at position 2654 of SEQ ID NO: 1882390
uuguaugggcuacagauau

SEQ ID NO: 2117423 - RNA, 19 nt, Artificial Sequence
  Description of Artificial Sequence: Synthetic oligonucleotide
  Antisense strand to SEQ ID NO: 2117422
auaucuguagcccauacaa

SEQ ID NO: 2117424 - RNA, 19 nt, Artificial Sequence
  Description of Artificial Sequence: Synthetic oligonucleotide
  Sense strand starting at position 2660 of SEQ ID NO: 1882390
gggcuacagauauguccua

SEQ ID NO: 2117425 - RNA, 19 nt, Artificial Sequence
  Description of Artificial Sequence: Synthetic oligonucleotide
  Antisense strand to SEQ ID NO: 2117424
uaggacauaucuguagccc

SEQ ID NO: 2117426 - RNA, 19 nt, Artificial Sequence
  Description of Artificial Sequence: Synthetic oligonucleotide
  Sense strand starting at position 2672 of SEQ ID NO: 1882390
uguccuacaucauuguaga

SEQ ID NO: 2117427 - RNA, 19 nt, Artificial Sequence
  Description of Artificial Sequence: Synthetic oligonucleotide
  Antisense strand to SEQ ID NO: 2117426
ucuacaaugauguaggaca

SEQ ID NO: 2117428 - RNA, 19 nt, Artificial Sequence
  Description of Artificial Sequence: Synthetic oligonucleotide
  Sense strand starting at position 2706 of SEQ ID NO: 1882390
aacagcugucaaggaaagu

SEQ ID NO: 2117429 - RNA, 19 nt, Artificial Sequence
  Description of Artificial Sequence: Synthetic oligonucleotide
  Antisense strand to SEQ ID NO: 2117428
acuuuccuugacagcuguu

SEQ ID NO: 2117430 - RNA, 19 nt, Artificial Sequence
  Description of Artificial Sequence: Synthetic oligonucleotide
  Sense strand starting at position 3032 of SEQ ID NO: 1882390
caggauuccucugccagag

SEQ ID NO: 2117431 - RNA, 19 nt, Artificial Sequence
  Description of Artificial Sequence: Synthetic oligonucleotide
  Antisense strand to SEQ ID NO: 2117430
cucuggcagaggaauccug

SEQ ID NO: 2117432 - RNA, 19 nt, Artificial Sequence
  Description of Artificial Sequence: Synthetic oligonucleotide
  Sense strand starting at position 3168 of SEQ ID NO: 1882390
cugcuuaggguuuauugaa

SEQ ID NO: 2117433 - RNA, 19 nt, Artificial Sequence
  Description of Artificial Sequence: Synthetic oligonucleotide
  Antisense strand to SEQ ID NO: 2117432
uucaauaaacccuaagcag

SEQ ID NO: 2117434 - RNA, 19 nt, Artificial Sequence
  Description of Artificial Sequence: Synthetic oligonucleotide
  Sense strand starting at position 3275 of SEQ ID NO: 1882390
gggagaacuguuugagagu

SEQ ID NO: 2117435 - RNA, 19 nt, Artificial Sequence
  Description of Artificial Sequence: Synthetic oligonucleotide
  Antisense strand to SEQ ID NO: 2117434
acucucaaacaguucuccc

SEQ ID NO: 2117436 - RNA, 19 nt, Artificial Sequence
  Description of Artificial Sequence: Synthetic oligonucleotide
  Sense strand starting at position 3284 of SEQ ID NO: 1882390
guuugagaguugcuaggaa

SEQ ID NO: 2117437 - RNA, 19 nt, Artificial Sequence
  Description of Artificial Sequence: Synthetic oligonucleotide
  Antisense strand to SEQ ID NO: 2117436
uuccuagcaacucucaaac

SEQ ID NO: 2117438 - RNA, 19 nt, Artificial Sequence
  Description of Artificial Sequence: Synthetic oligonucleotide
  Sense strand starting at position 3522 of SEQ ID NO: 1882390
ggaauucucucacccuaug

SEQ ID NO: 2117439 - RNA, 19 nt, Artificial Sequence
  Description of Artificial Sequence: Synthetic oligonucleotide
  Antisense strand to SEQ ID NO: 2117438
cauagggugagagaauucc

SEQ ID NO: 2117440 - RNA, 19 nt, Artificial Sequence
  Description of Artificial Sequence: Synthetic oligonucleotide
  Sense strand starting at position 3567 of SEQ ID NO: 1882390
uggcaauccuauucugaga

SEQ ID NO: 2117441 - RNA, 19 nt, Artificial Sequence
  Description of Artificial Sequence: Synthetic oligonucleotide
  Antisense strand to SEQ ID NO: 2117440
ucucagaauaggauugcca

SEQ ID NO: 2117442 - RNA, 19 nt, Artificial Sequence
  Description of Artificial Sequence: Synthetic oligonucleotide
  Sense strand starting at position 3584 of SEQ ID NO: 1882390
gaucucagccucuaagagu

SEQ ID NO: 2117443 - RNA, 19 nt, Artificial Sequence
  Description of Artificial Sequence: Synthetic oligonucleotide
  Antisense strand to SEQ ID NO: 2117442
acucuuagaggcugagauc

SEQ ID NO: 2117444 - RNA, 19 nt, Artificial Sequence
  Description of Artificial Sequence: Synthetic oligonucleotide
  Sense strand starting at position 3668 of SEQ ID NO: 1882390
guguaaacaccaugaucuc

SEQ ID NO: 2117445 - RNA, 19 nt, Artificial Sequence
  Description of Artificial Sequence: Synthetic oligonucleotide
  Antisense strand to SEQ ID NO: 2117444
gagaucaugguguuuacac

SEQ ID NO: 2117446 - RNA, 19 nt, Artificial Sequence
  Description of Artificial Sequence: Synthetic oligonucleotide
  Sense strand starting at position 3736 of SEQ ID NO: 1882390
cuggcuacucgagaguuaa

SEQ ID NO: 2117447 - RNA, 19 nt, Artificial Sequence
  Description of Artificial Sequence: Synthetic oligonucleotide
  Antisense strand to SEQ ID NO: 2117446
uuaacucucgaguagccag

SEQ ID NO: 2117448 - RNA, 19 nt, Artificial Sequence
  Description of Artificial Sequence: Synthetic oligonucleotide
  Sense strand starting at position 3932 of SEQ ID NO: 1882390
aaaugagaaaguugugugu

SEQ ID NO: 2117449 - RNA, 19 nt, Artificial Sequence
  Description of Artificial Sequence: Synthetic oligonucleotide
  Antisense strand to SEQ ID NO: 2117448
acacacaacuuucucauuu

SEQ ID NO: 2117450 - RNA, 19 nt, Artificial Sequence
  Description of Artificial Sequence: Synthetic oligonucleotide
  Sense strand starting at position 37 of SEQ ID NO: 1882391
acaagaugauuuggaggga

SEQ ID NO: 2117451 - RNA, 19 nt, Artificial Sequence
  Description of Artificial Sequence: Synthetic oligonucleotide
  Antisense strand to SEQ ID NO: 2117450
ucccuccaaaucaucuugu

SEQ ID NO: 2117452 - RNA, 19 nt, Artificial Sequence
  Description of Artificial Sequence: Synthetic oligonucleotide
  Sense strand starting at position 119 of SEQ ID NO: 1882391
agaguccugccagauaaua

SEQ ID NO: 2117453 - RNA, 19 nt, Artificial Sequence
  Description of Artificial Sequence: Synthetic oligonucleotide
  Antisense strand to SEQ ID NO: 2117452
uauuaucuggcaggacucu

SEQ ID NO: 2117454 - RNA, 19 nt, Artificial Sequence
  Description of Artificial Sequence: Synthetic oligonucleotide
  Sense strand starting at position 264 of SEQ ID NO: 1882391
ugaguuauguaaucaaugg

SEQ ID NO: 2117455 - RNA, 19 nt, Artificial Sequence
  Description of Artificial Sequence: Synthetic oligonucleotide
  Antisense strand to SEQ ID NO: 2117454
ccauugauuacauaacuca

SEQ ID NO: 2117456 - RNA, 19 nt, Artificial Sequence
  Description of Artificial Sequence: Synthetic oligonucleotide
  Sense strand starting at position 311 of SEQ ID NO: 1882391
aacuuagauccacgugaug

SEQ ID NO: 2117457 - RNA, 19 nt, Artificial Sequence
  Description of Artificial Sequence: Synthetic oligonucleotide
  Antisense strand to SEQ ID NO: 2117456
caucacguggaucuaaguu

SEQ ID NO: 2117458 - RNA, 19 nt, Artificial Sequence
  Description of Artificial Sequence: Synthetic oligonucleotide
  Sense strand starting at position 342 of SEQ ID NO: 1882391
guaaauucuagauggagua

SEQ ID NO: 2117459 - RNA, 19 nt, Artificial Sequence
  Description of Artificial Sequence: Synthetic oligonucleotide
  Antisense strand to SEQ ID NO: 2117458
uacuccaucuagaauuuac

SEQ ID NO: 2117460 - RNA, 19 nt, Artificial Sequence
  Description of Artificial Sequence: Synthetic oligonucleotide
  Sense strand starting at position 450 of SEQ ID NO: 1882391
uguauaaaguuucuguaug

SEQ ID NO: 2117461 - RNA, 19 nt, Artificial Sequence
  Description of Artificial Sequence: Synthetic oligonucleotide
  Antisense strand to SEQ ID NO: 2117460
cauacagaaacuuuauaca

SEQ ID NO: 2117462 - RNA, 19 nt, Artificial Sequence
  Description of Artificial Sequence: Synthetic oligonucleotide
  Sense strand starting at position 457 of SEQ ID NO: 1882391
aguuucuguauguauaaag

SEQ ID NO: 2117463 - RNA, 19 nt, Artificial Sequence
  Description of Artificial Sequence: Synthetic oligonucleotide
  Antisense strand to SEQ ID NO: 2117462
cuuuauacauacagaaacu

SEQ ID NO: 2117464 - RNA, 19 nt, Artificial Sequence
  Description of Artificial Sequence: Synthetic oligonucleotide
  Sense strand starting at position 654 of SEQ ID NO: 1882391
uugauaauaugaucaugca

SEQ ID NO: 2117465 - RNA, 19 nt, Artificial Sequence
  Description of Artificial Sequence: Synthetic oligonucleotide
  Antisense strand to SEQ ID NO: 2117464
ugcaugaucauauuaucaa

SEQ ID NO: 2117466 - RNA, 19 nt, Artificial Sequence
  Description of Artificial Sequence: Synthetic oligonucleotide
  Sense strand starting at position 684 of SEQ ID NO: 1882391
ucauacaaugccugguaaa

SEQ ID NO: 2117467 - RNA, 19 nt, Artificial Sequence
  Description of Artificial Sequence: Synthetic oligonucleotide
  Antisense strand to SEQ ID NO: 2117466
uuuaccaggcauuguauga

SEQ ID NO: 2117468 - RNA, 19 nt, Artificial Sequence
  Description of Artificial Sequence: Synthetic oligonucleotide
  Sense strand starting at position 685 of SEQ ID NO: 1882391
cauacaaugccugguaaag

SEQ ID NO: 2117469 - RNA, 19 nt, Artificial Sequence
  Description of Artificial Sequence: Synthetic oligonucleotide
  Antisense strand to SEQ ID NO: 2117468
cuuuaccaggcauuguaug

SEQ ID NO: 2117470 - RNA, 19 nt, Artificial Sequence
  Description of Artificial Sequence: Synthetic oligonucleotide
  Sense strand starting at position 709 of SEQ ID NO: 1882391
aagagcuaaugauuagagu

SEQ ID NO: 2117471 - RNA, 19 nt, Artificial Sequence
  Description of Artificial Sequence: Synthetic oligonucleotide
  Antisense strand to SEQ ID NO: 2117470
acucuaaucauuagcucuu

SEQ ID NO: 2117472 - RNA, 19 nt, Artificial Sequence
  Description of Artificial Sequence: Synthetic oligonucleotide
  Sense strand starting at position 718 of SEQ ID NO: 1882391
ugauuagaguucuuacaug

SEQ ID NO: 2117473 - RNA, 19 nt, Artificial Sequence
  Description of Artificial Sequence: Synthetic oligonucleotide
  Antisense strand to SEQ ID NO: 2117472
cauguaagaacucuaauca

SEQ ID NO: 2117474 - RNA, 19 nt, Artificial Sequence
  Description of Artificial Sequence: Synthetic oligonucleotide
  Sense strand starting at position 744 of SEQ ID NO: 1882391
accuguucucaguacauua

SEQ ID NO: 2117475 - RNA, 19 nt, Artificial Sequence
  Description of Artificial Sequence: Synthetic oligonucleotide
  Antisense strand to SEQ ID NO: 2117474
uaauguacugagaacaggu

SEQ ID NO: 2117476 - RNA, 19 nt, Artificial Sequence
  Description of Artificial Sequence: Synthetic oligonucleotide
  Sense strand starting at position 746 of SEQ ID NO: 1882391
cuguucucaguacauuaga

SEQ ID NO: 2117477 - RNA, 19 nt, Artificial Sequence
  Description of Artificial Sequence: Synthetic oligonucleotide
  Antisense strand to SEQ ID NO: 2117476
ucuaauguacugagaacag

SEQ ID NO: 2117478 - RNA, 19 nt, Artificial Sequence
  Description of Artificial Sequence: Synthetic oligonucleotide
  Sense strand starting at position 897 of SEQ ID NO: 1882391
guaaacuaguaauugaaca

SEQ ID NO: 2117479 - RNA, 19 nt, Artificial Sequence
  Description of Artificial Sequence: Synthetic oligonucleotide
  Antisense strand to SEQ ID NO: 2117478
uguucaauuacuaguuuac

SEQ ID NO: 2117480 - RNA, 19 nt, Artificial Sequence
  Description of Artificial Sequence: Synthetic oligonucleotide
  Sense strand starting at position 999 of SEQ ID NO: 1882391
aacccaaaggcauguguau

SEQ ID NO: 2117481 - RNA, 19 nt, Artificial Sequence
  Description of Artificial Sequence: Synthetic oligonucleotide
  Antisense strand to SEQ ID NO: 2117480
auacacaugccuuuggguu

SEQ ID NO: 2117482 - RNA, 19 nt, Artificial Sequence
  Description of Artificial Sequence: Synthetic oligonucleotide
  Sense strand starting at position 1010 of SEQ ID NO: 1882391
auguguauugugggaaaga

SEQ ID NO: 2117483 - RNA, 19 nt, Artificial Sequence
  Description of Artificial Sequence: Synthetic oligonucleotide
  Antisense strand to SEQ ID NO: 2117482
ucuuucccacaauacacau

SEQ ID NO: 2117484 - RNA, 19 nt, Artificial Sequence
  Description of Artificial Sequence: Synthetic oligonucleotide
  Sense strand starting at position 1085 of SEQ ID NO: 1882391
cucguuauuagugaugaaa

SEQ ID NO: 2117485 - RNA, 19 nt, Artificial Sequence
  Description of Artificial Sequence: Synthetic oligonucleotide
  Antisense strand to SEQ ID NO: 2117484
uuucaucacuaauaacgag

SEQ ID NO: 2117486 - RNA, 19 nt, Artificial Sequence
  Description of Artificial Sequence: Synthetic oligonucleotide
  Sense strand starting at position 1623 of SEQ ID NO: 1882391
gugcacuguuauccuauuu

SEQ ID NO: 2117487 - RNA, 19 nt, Artificial Sequence
  Description of Artificial Sequence: Synthetic oligonucleotide
  Antisense strand to SEQ ID NO: 2117486
aaauaggauaacagugcac

SEQ ID NO: 2117488 - RNA, 19 nt, Artificial Sequence
  Description of Artificial Sequence: Synthetic oligonucleotide
  Sense strand starting at position 2082 of SEQ ID NO: 1882391
gcgcuugauuucccugagu

SEQ ID NO: 2117489 - RNA, 19 nt, Artificial Sequence
  Description of Artificial Sequence: Synthetic oligonucleotide
  Antisense strand to SEQ ID NO: 2117488
acucagggaaaucaagcgc

SEQ ID NO: 2117490 - RNA, 19 nt, Artificial Sequence
  Description of Artificial Sequence: Synthetic oligonucleotide
  Sense strand starting at position 2084 of SEQ ID NO: 1882391
gcuugauuucccugagucc

SEQ ID NO: 2117491 - RNA, 19 nt, Artificial Sequence
  Description of Artificial Sequence: Synthetic oligonucleotide
  Antisense strand to SEQ ID NO: 2117490
ggacucagggaaaucaagc

SEQ ID NO: 2117492 - RNA, 19 nt, Artificial Sequence
  Description of Artificial Sequence: Synthetic oligonucleotide
  Sense strand starting at position 2208 of SEQ ID NO: 1882391
agugcugucguuguaauaa

SEQ ID NO: 2117493 - RNA, 19 nt, Artificial Sequence
  Description of Artificial Sequence: Synthetic oligonucleotide
  Antisense strand to SEQ ID NO: 2117492
uuauuacaacgacagcacu

SEQ ID NO: 2117494 - RNA, 19 nt, Artificial Sequence
  Description of Artificial Sequence: Synthetic oligonucleotide
  Sense strand starting at position 2286 of SEQ ID NO: 1882391
gguucuuagguuugacaga

SEQ ID NO: 2117495 - RNA, 19 nt, Artificial Sequence
  Description of Artificial Sequence: Synthetic oligonucleotide
  Antisense strand to SEQ ID NO: 2117494
ucugucaaaccuaagaacc

SEQ ID NO: 2117496 - RNA, 19 nt, Artificial Sequence
  Description of Artificial Sequence: Synthetic oligonucleotide
  Sense strand starting at position 2291 of SEQ ID NO: 1882391
uuagguuugacagagcagu

SEQ ID NO: 2117497 - RNA, 19 nt, Artificial Sequence
  Description of Artificial Sequence: Synthetic oligonucleotide
  Antisense strand to SEQ ID NO: 2117496
acugcucugucaaaccuaa

SEQ ID NO: 2117498 - RNA, 19 nt, Artificial Sequence
  Description of Artificial Sequence: Synthetic oligonucleotide
  Sense strand starting at position 2321 of SEQ ID NO: 1882391
ucagaugaaccucgugaug

SEQ ID NO: 2117499 - RNA, 19 nt, Artificial Sequence
  Description of Artificial Sequence: Synthetic oligonucleotide
  Antisense strand to SEQ ID NO: 2117498
caucacgagguucaucuga

SEQ ID NO: 2117500 - RNA, 19 nt, Artificial Sequence
  Description of Artificial Sequence: Synthetic oligonucleotide
  Sense strand starting at position 2324 of SEQ ID NO: 1882391
gaugaaccucgugaugcuu

SEQ ID NO: 2117501 - RNA, 19 nt, Artificial Sequence
  Description of Artificial Sequence: Synthetic oligonucleotide
  Antisense strand to SEQ ID NO: 2117500
aagcaucacgagguucauc

SEQ ID NO: 2117502 - RNA, 19 nt, Artificial Sequence
  Description of Artificial Sequence: Synthetic oligonucleotide
  Sense strand starting at position 2408 of SEQ ID NO: 1882391
aggcuuaccucagcuuaga

SEQ ID NO: 2117503 - RNA, 19 nt, Artificial Sequence
  Description of Artificial Sequence: Synthetic oligonucleotide
  Antisense strand to SEQ ID NO: 2117502
ucuaagcugagguaagccu

SEQ ID NO: 2117504 - RNA, 19 nt, Artificial Sequence
  Description of Artificial Sequence: Synthetic oligonucleotide
  Sense strand starting at position 2554 of SEQ ID NO: 1882391
cgagaaguacucugguuac

SEQ ID NO: 2117505 - RNA, 19 nt, Artificial Sequence
  Description of Artificial Sequence: Synthetic oligonucleotide
  Antisense strand to SEQ ID NO: 2117504
guaaccagaguacuucucg

SEQ ID NO: 2117506 - RNA, 19 nt, Artificial Sequence
  Description of Artificial Sequence: Synthetic oligonucleotide
  Sense strand starting at position 2557 of SEQ ID NO: 1882391
gaaguacucugguuacagc

SEQ ID NO: 2117507 - RNA, 19 nt, Artificial Sequence
  Description of Artificial Sequence: Synthetic oligonucleotide
  Antisense strand to SEQ ID NO: 2117506
gcuguaaccagaguacuuc

SEQ ID NO: 2117508 - RNA, 19 nt, Artificial Sequence
  Description of Artificial Sequence: Synthetic oligonucleotide
  Sense strand starting at position 2728 of SEQ ID NO: 1882391
ucgcaaauaccugaaagau

SEQ ID NO: 2117509 - RNA, 19 nt, Artificial Sequence
  Description of Artificial Sequence: Synthetic oligonucleotide
  Antisense strand to SEQ ID NO: 2117508
aucuuucagguauuugcga

SEQ ID NO: 2117510 - RNA, 19 nt, Artificial Sequence
  Description of Artificial Sequence: Synthetic oligonucleotide
  Sense strand starting at position 2856 of SEQ ID NO: 1882391
uuaaguuuagcagacaucu

SEQ ID NO: 2117511 - RNA, 19 nt, Artificial Sequence
  Description of Artificial Sequence: Synthetic oligonucleotide
  Antisense strand to SEQ ID NO: 2117510
agaugucugcuaaacuuaa

SEQ ID NO: 2117512 - RNA, 19 nt, Artificial Sequence
  Description of Artificial Sequence: Synthetic oligonucleotide
  Sense strand starting at position 2864 of SEQ ID NO: 1882391
agcagacaucuuggaauau

SEQ ID NO: 2117513 - RNA, 19 nt, Artificial Sequence
  Description of Artificial Sequence: Synthetic oligonucleotide
  Antisense strand to SEQ ID NO: 2117512
auauuccaagaugucugcu

SEQ ID NO: 2117514 - RNA, 19 nt, Artificial Sequence
  Description of Artificial Sequence: Synthetic oligonucleotide
  Sense strand starting at position 2895 of SEQ ID NO: 1882391
cugguauaucuugaucauu

SEQ ID NO: 2117515 - RNA, 19 nt, Artificial Sequence
  Description of Artificial Sequence: Synthetic oligonucleotide
  Antisense strand to SEQ ID NO: 2117514
aaugaucaagauauaccag

SEQ ID NO: 2117516 - RNA, 19 nt, Artificial Sequence
  Description of Artificial Sequence: Synthetic oligonucleotide
  Sense strand starting at position 2904 of SEQ ID NO: 1882391
cuugaucauugcuuguaau

SEQ ID NO: 2117517 - RNA, 19 nt, Artificial Sequence
  Description of Artificial Sequence: Synthetic oligonucleotide
  Antisense strand to SEQ ID NO: 2117516
auuacaagcaaugaucaag

SEQ ID NO: 2117518 - RNA, 19 nt, Artificial Sequence
  Description of Artificial Sequence: Synthetic oligonucleotide
  Sense strand starting at position 2905 of SEQ ID NO: 1882391
uugaucauugcuuguaaug

SEQ ID NO: 2117519 - RNA, 19 nt, Artificial Sequence
  Description of Artificial Sequence: Synthetic oligonucleotide
  Antisense strand to SEQ ID NO: 2117518
cauuacaagcaaugaucaa

SEQ ID NO: 2117520 - RNA, 19 nt, Artificial Sequence
  Description of Artificial Sequence: Synthetic oligonucleotide
  Sense strand starting at position 2915 of SEQ ID NO: 1882391
cuuguaauguuaccgauuu

SEQ ID NO: 2117521 - RNA, 19 nt, Artificial Sequence
  Description of Artificial Sequence: Synthetic oligonucleotide
  Antisense strand to SEQ ID NO: 2117520
aaaucgguaacauuacaag

SEQ ID NO: 2117522 - RNA, 19 nt, Artificial Sequence
  Description of Artificial Sequence: Synthetic oligonucleotide
  Sense strand starting at position 3181 of SEQ ID NO: 1882391
auacaauccggaugaugau

SEQ ID NO: 2117523 - RNA, 19 nt, Artificial Sequence
  Description of Artificial Sequence: Synthetic oligonucleotide
  Antisense strand to SEQ ID NO: 2117522
aucaucauccggauuguau

SEQ ID NO: 2117524 - RNA, 19 nt, Artificial Sequence
  Description of Artificial Sequence: Synthetic oligonucleotide
  Sense strand starting at position 3187 of SEQ ID NO: 1882391
uccggaugaugauuacuca

SEQ ID NO: 2117525 - RNA, 19 nt, Artificial Sequence
  Description of Artificial Sequence: Synthetic oligonucleotide
  Antisense strand to SEQ ID NO: 2117524
ugaguaaucaucauccgga

SEQ ID NO: 2117526 - RNA, 19 nt, Artificial Sequence
  Description of Artificial Sequence: Synthetic oligonucleotide
  Sense strand starting at position 3904 of SEQ ID NO: 1882391
auaauaagucuuggugaag

SEQ ID NO: 2117527 - RNA, 19 nt, Artificial Sequence
  Description of Artificial Sequence: Synthetic oligonucleotide
  Antisense strand to SEQ ID NO: 2117526
cuucaccaagacuuauuau

SEQ ID NO: 2117528 - RNA, 19 nt, Artificial Sequence
  Description of Artificial Sequence: Synthetic oligonucleotide
  Sense strand starting at position 3905 of SEQ ID NO: 1882391
uaauaagucuuggugaaga

SEQ ID NO: 2117529 - RNA, 19 nt, Artificial Sequence
  Description of Artificial Sequence: Synthetic oligonucleotide
  Antisense strand to SEQ ID NO: 2117528
ucuucaccaagacuuauua

SEQ ID NO: 2117530 - RNA, 19 nt, Artificial Sequence
  Description of Artificial Sequence: Synthetic oligonucleotide
  Sense strand starting at position 55 of SEQ ID NO: 1882392
gggaguaaugcaggaaagu

SEQ ID NO: 2117531 - RNA, 19 nt, Artificial Sequence
  Description of Artificial Sequence: Synthetic oligonucleotide
  Antisense strand to SEQ ID NO: 2117530
acuuuccugcauuacuccc

SEQ ID NO: 2117532 - RNA, 19 nt, Artificial Sequence
  Description of Artificial Sequence: Synthetic oligonucleotide
  Sense strand starting at position 402 of SEQ ID NO: 1882392
aaaccuuugcugggaagca

SEQ ID NO: 2117533 - RNA, 19 nt, Artificial Sequence
  Description of Artificial Sequence: Synthetic oligonucleotide
  Antisense strand to SEQ ID NO: 2117532
ugcuucccagcaaagguuu

SEQ ID NO: 2117534 - RNA, 19 nt, Artificial Sequence
  Description of Artificial Sequence: Synthetic oligonucleotide
  Sense strand starting at position 418 of SEQ ID NO: 1882392
gcaggagaguuuccuggaa

SEQ ID NO: 2117535 - RNA, 19 nt, Artificial Sequence
  Description of Artificial Sequence: Synthetic oligonucleotide
  Antisense strand to SEQ ID NO: 2117534
uuccaggaaacucuccugc

SEQ ID NO: 2117536 - RNA, 19 nt, Artificial Sequence
  Description of Artificial Sequence: Synthetic oligonucleotide
  Sense strand starting at position 550 of SEQ ID NO: 1882392
cacaaauccggucaaguuu

SEQ ID NO: 2117537 - RNA, 19 nt, Artificial Sequence
  Description of Artificial Sequence: Synthetic oligonucleotide
  Antisense strand to SEQ ID NO: 2117536
aaacuugaccggauuugug

SEQ ID NO: 2117538 - RNA, 19 nt, Artificial Sequence
  Description of Artificial Sequence: Synthetic oligonucleotide
  Sense strand starting at position 618 of SEQ ID NO: 1882392
cagguuaucucugcgagga

SEQ ID NO: 2117539 - RNA, 19 nt, Artificial Sequence
  Description of Artificial Sequence: Synthetic oligonucleotide
  Antisense strand to SEQ ID NO: 2117538
uccucgcagagauaaccug

SEQ ID NO: 2117540 - RNA, 19 nt, Artificial Sequence
  Description of Artificial Sequence: Synthetic oligonucleotide
  Sense strand starting at position 619 of SEQ ID NO: 1882392
agguuaucucugcgaggac

SEQ ID NO: 2117541 - RNA, 19 nt, Artificial Sequence
  Description of Artificial Sequence: Synthetic oligonucleotide
  Antisense strand to SEQ ID NO: 2117540
guccucgcagagauaaccu

SEQ ID NO: 2117542 - RNA, 19 nt, Artificial Sequence
  Description of Artificial Sequence: Synthetic oligonucleotide
  Sense strand starting at position 1154 of SEQ ID NO: 1882392
ggaggaacuuccucagcca

SEQ ID NO: 2117543 - RNA, 19 nt, Artificial Sequence
  Description of Artificial Sequence: Synthetic oligonucleotide
  Antisense strand to SEQ ID NO: 2117542
uggcugaggaaguuccucc

SEQ ID NO: 2117544 - RNA, 19 nt, Artificial Sequence
  Description of Artificial Sequence: Synthetic oligonucleotide
  Sense strand starting at position 1950 of SEQ ID NO: 1882392
cuaagugucccgggagauu

SEQ ID NO: 2117545 - RNA, 19 nt, Artificial Sequence
  Description of Artificial Sequence: Synthetic oligonucleotide
  Antisense strand to SEQ ID NO: 2117544
aaucucccgggacacuuag

SEQ ID NO: 2117546 - RNA, 19 nt, Artificial Sequence
  Description of Artificial Sequence: Synthetic oligonucleotide
  Sense strand starting at position 2278 of SEQ ID NO: 1882392
acguucaagcugggagaaa

SEQ ID NO: 2117547 - RNA, 19 nt, Artificial Sequence
  Description of Artificial Sequence: Synthetic oligonucleotide
  Antisense strand to SEQ ID NO: 2117546
uuucucccagcuugaacgu

SEQ ID NO: 2117548 - RNA, 19 nt, Artificial Sequence
  Description of Artificial Sequence: Synthetic oligonucleotide
  Sense strand starting at position 2296 of SEQ ID NO: 1882392
aauguuugucuugagagga

SEQ ID NO: 2117549 - RNA, 19 nt, Artificial Sequence
  Description of Artificial Sequence: Synthetic oligonucleotide
  Antisense strand to SEQ ID NO: 2117548
uccucucaagacaaacauu

SEQ ID NO: 2117550 - RNA, 19 nt, Artificial Sequence
  Description of Artificial Sequence: Synthetic oligonucleotide
  Sense strand starting at position 2327 of SEQ ID NO: 1882392
ugagaaagcugauuccaga

SEQ ID NO: 2117551 - RNA, 19 nt, Artificial Sequence
  Description of Artificial Sequence: Synthetic oligonucleotide
  Antisense strand to SEQ ID NO: 2117550
ucuggaaucagcuuucuca

SEQ ID NO: 2117552 - RNA, 19 nt, Artificial Sequence
  Description of Artificial Sequence: Synthetic oligonucleotide
  Sense strand starting at position 2384 of SEQ ID NO: 1882392
gauggaugcuuccuuugag

SEQ ID NO: 2117553 - RNA, 19 nt, Artificial Sequence
  Description of Artificial Sequence: Synthetic oligonucleotide
  Antisense strand to SEQ ID NO: 2117552
cucaaaggaagcauccauc

SEQ ID NO: 2117554 - RNA, 19 nt, Artificial Sequence
  Description of Artificial Sequence: Synthetic oligonucleotide
  Sense strand starting at position 2385 of SEQ ID NO: 1882392
auggaugcuuccuuugaga

SEQ ID NO: 2117555 - RNA, 19 nt, Artificial Sequence
  Description of Artificial Sequence: Synthetic oligonucleotide
  Antisense strand to SEQ ID NO: 2117554
ucucaaaggaagcauccau

SEQ ID NO: 2117556 - RNA, 19 nt, Artificial Sequence
  Description of Artificial Sequence: Synthetic oligonucleotide
  Sense strand starting at position 2387 of SEQ ID NO: 1882392
ggaugcuuccuuugagagc

SEQ ID NO: 2117557 - RNA, 19 nt, Artificial Sequence
  Description of Artificial Sequence: Synthetic oligonucleotide
  Antisense strand to SEQ ID NO: 2117556
gcucucaaaggaagcaucc

SEQ ID NO: 2117558 - RNA, 19 nt, Artificial Sequence
  Description of Artificial Sequence: Synthetic oligonucleotide
  Sense strand starting at position 2434 of SEQ ID NO: 1882392
ccugucagauuucuugcaa

SEQ ID NO: 2117559 - RNA, 19 nt, Artificial Sequence
  Description of Artificial Sequence: Synthetic oligonucleotide
  Antisense strand to SEQ ID NO: 2117558
uugcaagaaaucugacagg

SEQ ID NO: 2117560 - RNA, 19 nt, Artificial Sequence
  Description of Artificial Sequence: Synthetic oligonucleotide
  Sense strand starting at position 2562 of SEQ ID NO: 1882392
agguuauugguuuguagaa

SEQ ID NO: 2117561 - RNA, 19 nt, Artificial Sequence
  Description of Artificial Sequence: Synthetic oligonucleotide
  Antisense strand to SEQ ID NO: 2117560
uucuacaaaccaauaaccu

SEQ ID NO: 2117562 - RNA, 19 nt, Artificial Sequence
  Description of Artificial Sequence: Synthetic oligonucleotide
  Sense strand starting at position 2563 of SEQ ID NO: 1882392
gguuauugguuuguagaaa

SEQ ID NO: 2117563 - RNA, 19 nt, Artificial Sequence
  Description of Artificial Sequence: Synthetic oligonucleotide
  Antisense strand to SEQ ID NO: 2117562
uuucuacaaaccaauaacc

SEQ ID NO: 2117564 - RNA, 19 nt, Artificial Sequence
  Description of Artificial Sequence: Synthetic oligonucleotide
  Sense strand starting at position 2590 of SEQ ID NO: 1882392
gcagacaaugaucgucaga

SEQ ID NO: 2117565 - RNA, 19 nt, Artificial Sequence
  Description of Artificial Sequence: Synthetic oligonucleotide
  Antisense strand to SEQ ID NO: 2117564
ucugacgaucauugucugc

SEQ ID NO: 2117566 - RNA, 19 nt, Artificial Sequence
  Description of Artificial Sequence: Synthetic oligonucleotide
  Sense strand starting at position 2592 of SEQ ID NO: 1882392
agacaaugaucgucagaua

SEQ ID NO: 2117567 - RNA, 19 nt, Artificial Sequence
  Description of Artificial Sequence: Synthetic oligonucleotide
  Antisense strand to SEQ ID NO: 2117566
uaucugacgaucauugucu

SEQ ID NO: 2117568 - RNA, 19 nt, Artificial Sequence
  Description of Artificial Sequence: Synthetic oligonucleotide
  Sense strand starting at position 2608 of SEQ ID NO: 1882392
auacuauuccaacgagggu

SEQ ID NO: 2117569 - RNA, 19 nt, Artificial Sequence
  Description of Artificial Sequence: Synthetic oligonucleotide
  Antisense strand to SEQ ID NO: 2117568
acccucguuggaauaguau

SEQ ID NO: 2117570 - RNA, 19 nt, Artificial Sequence
  Description of Artificial Sequence: Synthetic oligonucleotide
  Sense strand starting at position 2634 of SEQ ID NO: 1882392
uuaugaugcuauuuagugu

SEQ ID NO: 2117571 - RNA, 19 nt, Artificial Sequence
  Description of Artificial Sequence: Synthetic oligonucleotide
  Antisense strand to SEQ ID NO: 2117570
acacuaaauagcaucauaa

SEQ ID NO: 2117572 - RNA, 19 nt, Artificial Sequence
  Description of Artificial Sequence: Synthetic oligonucleotide
  Sense strand starting at position 2637 of SEQ ID NO: 1882392
ugaugcuauuuaguguaua

SEQ ID NO: 2117573 - RNA, 19 nt, Artificial Sequence
  Description of Artificial Sequence: Synthetic oligonucleotide
  Antisense strand to SEQ ID NO: 2117572
uauacacuaaauagcauca

SEQ ID NO: 2117574 - RNA, 19 nt, Artificial Sequence
  Description of Artificial Sequence: Synthetic oligonucleotide
  Sense strand starting at position 2696 of SEQ ID NO: 1882392
ggaucacauuacuuuguga

SEQ ID NO: 2117575 - RNA, 19 nt, Artificial Sequence
  Description of Artificial Sequence: Synthetic oligonucleotide
  Antisense strand to SEQ ID NO: 2117574
ucacaaaguaaugugaucc

SEQ ID NO: 2117576 - RNA, 19 nt, Artificial Sequence
  Description of Artificial Sequence: Synthetic oligonucleotide
  Sense strand starting at position 2698 of SEQ ID NO: 1882392
aucacauuacuuugugacu

SEQ ID NO: 2117577 - RNA, 19 nt, Artificial Sequence
  Description of Artificial Sequence: Synthetic oligonucleotide
  Antisense strand to SEQ ID NO: 2117576
agucacaaaguaaugugau

SEQ ID NO: 2117578 - RNA, 19 nt, Artificial Sequence
  Description of Artificial Sequence: Synthetic oligonucleotide
  Sense strand starting at position 2699 of SEQ ID NO: 1882392
ucacauuacuuugugacuu

SEQ ID NO: 2117579 - RNA, 19 nt, Artificial Sequence
  Description of Artificial Sequence: Synthetic oligonucleotide
  Antisense strand to SEQ ID NO: 2117578
aagucacaaaguaauguga

SEQ ID NO: 2117580 - RNA, 19 nt, Artificial Sequence
  Description of Artificial Sequence: Synthetic oligonucleotide
  Sense strand starting at position 2830 of SEQ ID NO: 1882392
uagugaacucuaggaaagu

SEQ ID NO: 2117581 - RNA, 19 nt, Artificial Sequence
  Description of Artificial Sequence: Synthetic oligonucleotide
  Antisense strand to SEQ ID NO: 2117580
acuuuccuagaguucacua

SEQ ID NO: 2117582 - RNA, 19 nt, Artificial Sequence
  Description of Artificial Sequence: Synthetic oligonucleotide
  Sense strand starting at position 2853 of SEQ ID NO: 1882392
acugaauacuuugcacagu

SEQ ID NO: 2117583 - RNA, 19 nt, Artificial Sequence
  Description of Artificial Sequence: Synthetic oligonucleotide
  Antisense strand to SEQ ID NO: 2117582
acugugcaaaguauucagu

SEQ ID NO: 2117584 - RNA, 19 nt, Artificial Sequence
  Description of Artificial Sequence: Synthetic oligonucleotide
  Sense strand starting at position 2953 of SEQ ID NO: 1882392
uucagagugcuggaagagu

SEQ ID NO: 2117585 - RNA, 19 nt, Artificial Sequence
  Description of Artificial Sequence: Synthetic oligonucleotide
  Antisense strand to SEQ ID NO: 2117584
acucuuccagcacucugaa

SEQ ID NO: 2117586 - RNA, 19 nt, Artificial Sequence
  Description of Artificial Sequence: Synthetic oligonucleotide
  Sense strand starting at position 3150 of SEQ ID NO: 1882392
ucgccuucugcucugugaa

SEQ ID NO: 2117587 - RNA, 19 nt, Artificial Sequence
  Description of Artificial Sequence: Synthetic oligonucleotide
  Antisense strand to SEQ ID NO: 2117586
uucacagagcagaaggcga

SEQ ID NO: 2117588 - RNA, 19 nt, Artificial Sequence
  Description of Artificial Sequence: Synthetic oligonucleotide
  Sense strand starting at position 3167 of SEQ ID NO: 1882392
aaucacugugcugaggaau

SEQ ID NO: 2117589 - RNA, 19 nt, Artificial Sequence
  Description of Artificial Sequence: Synthetic oligonucleotide
  Antisense strand to SEQ ID NO: 2117588
auuccucagcacagugauu

SEQ ID NO: 2117590 - RNA, 19 nt, Artificial Sequence
  Description of Artificial Sequence: Synthetic oligonucleotide
  Sense strand starting at position 3243 of SEQ ID NO: 1882392
gucaaaugaugaccagacu

SEQ ID NO: 2117591 - RNA, 19 nt, Artificial Sequence
  Description of Artificial Sequence: Synthetic oligonucleotide
  Antisense strand to SEQ ID NO: 2117590
agucuggucaucauuugac

SEQ ID NO: 2117592 - RNA, 19 nt, Artificial Sequence
  Description of Artificial Sequence: Synthetic oligonucleotide
  Sense strand starting at position 3366 of SEQ ID NO: 1882392
ccaugcuguggaugaaauu

SEQ ID NO: 2117593 - RNA, 19 nt, Artificial Sequence
  Description of Artificial Sequence: Synthetic oligonucleotide
  Antisense strand to SEQ ID NO: 2117592
aauuucauccacagcaugg

SEQ ID NO: 2117594 - RNA, 19 nt, Artificial Sequence
  Description of Artificial Sequence: Synthetic oligonucleotide
  Sense strand starting at position 3367 of SEQ ID NO: 1882392
caugcuguggaugaaauua

SEQ ID NO: 2117595 - RNA, 19 nt, Artificial Sequence
  Description of Artificial Sequence: Synthetic oligonucleotide
  Antisense strand to SEQ ID NO: 2117594
uaauuucauccacagcaug

SEQ ID NO: 2117596 - RNA, 19 nt, Artificial Sequence
  Description of Artificial Sequence: Synthetic oligonucleotide
  Sense strand starting at position 3421 of SEQ ID NO: 1882392
cagcaacgucauggauaga

SEQ ID NO: 2117597 - RNA, 19 nt, Artificial Sequence
  Description of Artificial Sequence: Synthetic oligonucleotide
  Antisense strand to SEQ ID NO: 2117596
ucuauccaugacguugcug

SEQ ID NO: 2117598 - RNA, 19 nt, Artificial Sequence
  Description of Artificial Sequence: Synthetic oligonucleotide
  Sense strand starting at position 3520 of SEQ ID NO: 1882392
gggccagaaucucuguaag

SEQ ID NO: 2117599 - RNA, 19 nt, Artificial Sequence
  Description of Artificial Sequence: Synthetic oligonucleotide
  Antisense strand to SEQ ID NO: 2117598
cuuacagagauucuggccc

SEQ ID NO: 2117600 - RNA, 19 nt, Artificial Sequence
  Description of Artificial Sequence: Synthetic oligonucleotide
  Sense strand starting at position 3522 of SEQ ID NO: 1882392
gccagaaucucuguaagga

SEQ ID NO: 2117601 - RNA, 19 nt, Artificial Sequence
  Description of Artificial Sequence: Synthetic oligonucleotide
  Antisense strand to SEQ ID NO: 2117600
uccuuacagagauucuggc

SEQ ID NO: 2117602 - RNA, 19 nt, Artificial Sequence
  Description of Artificial Sequence: Synthetic oligonucleotide
  Sense strand starting at position 3572 of SEQ ID NO: 1882392
agggacuuugcuuaaagca

SEQ ID NO: 2117603 - RNA, 19 nt, Artificial Sequence
  Description of Artificial Sequence: Synthetic oligonucleotide
  Antisense strand to SEQ ID NO: 2117602
ugcuuuaagcaaagucccu

SEQ ID NO: 2117604 - RNA, 19 nt, Artificial Sequence
  Description of Artificial Sequence: Synthetic oligonucleotide
  Sense strand starting at position 3732 of SEQ ID NO: 1882392
gccagucugguaugauaca

SEQ ID NO: 2117605 - RNA, 19 nt, Artificial Sequence
  Description of Artificial Sequence: Synthetic oligonucleotide
  Antisense strand to SEQ ID NO: 2117604
uguaucauaccagacuggc

SEQ ID NO: 2117606 - RNA, 19 nt, Artificial Sequence
  Description of Artificial Sequence: Synthetic oligonucleotide
  Sense strand starting at position 3951 of SEQ ID NO: 1882392
aaagcuugauggguaaacu

SEQ ID NO: 2117607 - RNA, 19 nt, Artificial Sequence
  Description of Artificial Sequence: Synthetic oligonucleotide
  Antisense strand to SEQ ID NO: 2117606
aguuuacccaucaagcuuu

SEQ ID NO: 2117608 - RNA, 19 nt, Artificial Sequence
  Description of Artificial Sequence: Synthetic oligonucleotide
  Sense strand starting at position 3972 of SEQ ID NO: 1882392
gggugucuuacugagaauc

SEQ ID NO: 2117609 - RNA, 19 nt, Artificial Sequence
  Description of Artificial Sequence: Synthetic oligonucleotide
  Antisense strand to SEQ ID NO: 2117608
gauucucaguaagacaccc

SEQ ID NO: 2117610 - RNA, 19 nt, Artificial Sequence
  Description of Artificial Sequence: Synthetic oligonucleotide
  Sense strand starting at position 39 of SEQ ID NO: 1882393
ugccucaaggguugagaaa

SEQ ID NO: 2117611 - RNA, 19 nt, Artificial Sequence
  Description of Artificial Sequence: Synthetic oligonucleotide
  Antisense strand to SEQ ID NO: 2117610
uuucucaacccuugaggca

SEQ ID NO: 2117612 - RNA, 19 nt, Artificial Sequence
  Description of Artificial Sequence: Synthetic oligonucleotide
  Sense strand starting at position 92 of SEQ ID NO: 1882393
aagucuaaaggaggucaua

SEQ ID NO: 2117613 - RNA, 19 nt, Artificial Sequence
  Description of Artificial Sequence: Synthetic oligonucleotide
  Antisense strand to SEQ ID NO: 2117612
uaugaccuccuuuagacuu

SEQ ID NO: 2117614 - RNA, 19 nt, Artificial Sequence
  Description of Artificial Sequence: Synthetic oligonucleotide
  Sense strand starting at position 143 of SEQ ID NO: 1882393
uaauuuguguuucugagca

SEQ ID NO: 2117615 - RNA, 19 nt, Artificial Sequence
  Description of Artificial Sequence: Synthetic oligonucleotide
  Antisense strand to SEQ ID NO: 2117614
ugcucagaaacacaaauua

SEQ ID NO: 2117616 - RNA, 19 nt, Artificial Sequence
  Description of Artificial Sequence: Synthetic oligonucleotide
  Sense strand starting at position 148 of SEQ ID NO: 1882393
uguguuucugagcaagauc

SEQ ID NO: 2117617 - RNA, 19 nt, Artificial Sequence
  Description of Artificial Sequence: Synthetic oligonucleotide
  Antisense strand to SEQ ID NO: 2117616
gaucuugcucagaaacaca

SEQ ID NO: 2117618 - RNA, 19 nt, Artificial Sequence
  Description of Artificial Sequence: Synthetic oligonucleotide
  Sense strand starting at position 151 of SEQ ID NO: 1882393
guuucugagcaagauccuu

SEQ ID NO: 2117619 - RNA, 19 nt, Artificial Sequence
  Description of Artificial Sequence: Synthetic oligonucleotide
  Antisense strand to SEQ ID NO: 2117618
aaggaucuugcucagaaac

SEQ ID NO: 2117620 - RNA, 19 nt, Artificial Sequence
  Description of Artificial Sequence: Synthetic oligonucleotide
  Sense strand starting at position 156 of SEQ ID NO: 1882393
ugagcaagauccuugguaa

SEQ ID NO: 2117621 - RNA, 19 nt, Artificial Sequence
  Description of Artificial Sequence: Synthetic oligonucleotide
  Antisense strand to SEQ ID NO: 2117620
uuaccaaggaucuugcuca

SEQ ID NO: 2117622 - RNA, 19 nt, Artificial Sequence
  Description of Artificial Sequence: Synthetic oligonucleotide
  Sense strand starting at position 157 of SEQ ID NO: 1882393
gagcaagauccuugguaau

SEQ ID NO: 2117623 - RNA, 19 nt, Artificial Sequence
  Description of Artificial Sequence: Synthetic oligonucleotide
  Antisense strand to SEQ ID NO: 2117622
auuaccaaggaucuugcuc

SEQ ID NO: 2117624 - RNA, 19 nt, Artificial Sequence
  Description of Artificial Sequence: Synthetic oligonucleotide
  Sense strand starting at position 159 of SEQ ID NO: 1882393
gcaagauccuugguaauua

SEQ ID NO: 2117625 - RNA, 19 nt, Artificial Sequence
  Description of Artificial Sequence: Synthetic oligonucleotide
  Antisense strand to SEQ ID NO: 2117624
uaauuaccaaggaucuugc

SEQ ID NO: 2117626 - RNA, 19 nt, Artificial Sequence
  Description of Artificial Sequence: Synthetic oligonucleotide
  Sense strand starting at position 640 of SEQ ID NO: 1882393
auaaauauuugacaggcua

SEQ ID NO: 2117627 - RNA, 19 nt, Artificial Sequence
  Description of Artificial Sequence: Synthetic oligonucleotide
  Antisense strand to SEQ ID NO: 2117626
uagccugucaaauauuuau

SEQ ID NO: 2117628 - RNA, 19 nt, Artificial Sequence
  Description of Artificial Sequence: Synthetic oligonucleotide
  Sense strand starting at position 673 of SEQ ID NO: 1882393
uuuauugcugcugaccaaa

SEQ ID NO: 2117629 - RNA, 19 nt, Artificial Sequence
  Description of Artificial Sequence: Synthetic oligonucleotide
  Antisense strand to SEQ ID NO: 2117628
uuuggucagcagcaauaaa

SEQ ID NO: 2117630 - RNA, 19 nt, Artificial Sequence
  Description of Artificial Sequence: Synthetic oligonucleotide
  Sense strand starting at position 685 of SEQ ID NO: 1882393
gaccaaaggucauuguaag

SEQ ID NO: 2117631 - RNA, 19 nt, Artificial Sequence
  Description of Artificial Sequence: Synthetic oligonucleotide
  Antisense strand to SEQ ID NO: 2117630
cuuacaaugaccuuugguc

SEQ ID NO: 2117632 - RNA, 19 nt, Artificial Sequence
  Description of Artificial Sequence: Synthetic oligonucleotide
  Sense strand starting at position 686 of SEQ ID NO: 1882393
accaaaggucauuguaaga

SEQ ID NO: 2117633 - RNA, 19 nt, Artificial Sequence
  Description of Artificial Sequence: Synthetic oligonucleotide
  Antisense strand to SEQ ID NO: 2117632
ucuuacaaugaccuuuggu

SEQ ID NO: 2117634 - RNA, 19 nt, Artificial Sequence
  Description of Artificial Sequence: Synthetic oligonucleotide
  Sense strand starting at position 704 of SEQ ID NO: 1882393
auuuaaaggucacauagua

SEQ ID NO: 2117635 - RNA, 19 nt, Artificial Sequence
  Description of Artificial Sequence: Synthetic oligonucleotide
  Antisense strand to SEQ ID NO: 2117634
uacuaugugaccuuuaaau

SEQ ID NO: 2117636 - RNA, 19 nt, Artificial Sequence
  Description of Artificial Sequence: Synthetic oligonucleotide
  Sense strand starting at position 723 of SEQ ID NO: 1882393
gguacuaugugaucuuuaa

SEQ ID NO: 2117637 - RNA, 19 nt, Artificial Sequence
  Description of Artificial Sequence: Synthetic oligonucleotide
  Antisense strand to SEQ ID NO: 2117636
uuaaagaucacauaguacc

SEQ ID NO: 2117638 - RNA, 19 nt, Artificial Sequence
  Description of Artificial Sequence: Synthetic oligonucleotide
  Sense strand starting at position 1013 of SEQ ID NO: 1882393
gaaauaagguuuguuguca

SEQ ID NO: 2117639 - RNA, 19 nt, Artificial Sequence
  Description of Artificial Sequence: Synthetic oligonucleotide
  Antisense strand to SEQ ID NO: 2117638
ugacaacaaaccuuauuuc

SEQ ID NO: 2117640 - RNA, 19 nt, Artificial Sequence
  Description of Artificial Sequence: Synthetic oligonucleotide
  Sense strand starting at position 1046 of SEQ ID NO: 1882393
augacuauuugugaaucua

SEQ ID NO: 2117641 - RNA, 19 nt, Artificial Sequence
  Description of Artificial Sequence: Synthetic oligonucleotide
  Antisense strand to SEQ ID NO: 2117640
uagauucacaaauagucau

SEQ ID NO: 2117642 - RNA, 19 nt, Artificial Sequence
  Description of Artificial Sequence: Synthetic oligonucleotide
  Sense strand starting at position 1395 of SEQ ID NO: 1882393
cuaaaugauuucuagugaa

SEQ ID NO: 2117643 - RNA, 19 nt, Artificial Sequence
  Description of Artificial Sequence: Synthetic oligonucleotide
  Antisense strand to SEQ ID NO: 2117642
uucacuagaaaucauuuag

SEQ ID NO: 2117644 - RNA, 19 nt, Artificial Sequence
  Description of Artificial Sequence: Synthetic oligonucleotide
  Sense strand starting at position 1440 of SEQ ID NO: 1882393
gccuaucuugucuauuaua

SEQ ID NO: 2117645 - RNA, 19 nt, Artificial Sequence
  Description of Artificial Sequence: Synthetic oligonucleotide
  Antisense strand to SEQ ID NO: 2117644
uauaauagacaagauaggc

SEQ ID NO: 2117646 - RNA, 19 nt, Artificial Sequence
  Description of Artificial Sequence: Synthetic oligonucleotide
  Sense strand starting at position 1585 of SEQ ID NO: 1882393
ccuacagagucaguguuaa

SEQ ID NO: 2117647 - RNA, 19 nt, Artificial Sequence
  Description of Artificial Sequence: Synthetic oligonucleotide
  Antisense strand to SEQ ID NO: 2117646
uuaacacugacucuguagg

SEQ ID NO: 2117648 - RNA, 19 nt, Artificial Sequence
  Description of Artificial Sequence: Synthetic oligonucleotide
  Sense strand starting at position 1654 of SEQ ID NO: 1882393
ucaucaucuggucauuguu

SEQ ID NO: 2117649 - RNA, 19 nt, Artificial Sequence
  Description of Artificial Sequence: Synthetic oligonucleotide
  Antisense strand to SEQ ID NO: 2117648
aacaaugaccagaugauga

SEQ ID NO: 2117650 - RNA, 19 nt, Artificial Sequence
  Description of Artificial Sequence: Synthetic oligonucleotide
  Sense strand starting at position 1918 of SEQ ID NO: 1882393
ggacuugccagugagaggu

SEQ ID NO: 2117651 - RNA, 19 nt, Artificial Sequence
  Description of Artificial Sequence: Synthetic oligonucleotide
  Antisense strand to SEQ ID NO: 2117650
accucucacuggcaagucc

SEQ ID NO: 2117652 - RNA, 19 nt, Artificial Sequence
  Description of Artificial Sequence: Synthetic oligonucleotide
  Sense strand starting at position 1994 of SEQ ID NO: 1882393
ucauuauguugggcaaauc

SEQ ID NO: 2117653 - RNA, 19 nt, Artificial Sequence
  Description of Artificial Sequence: Synthetic oligonucleotide
  Antisense strand to SEQ ID NO: 2117652
gauuugcccaacauaauga

SEQ ID NO: 2117654 - RNA, 19 nt, Artificial Sequence
  Description of Artificial Sequence: Synthetic oligonucleotide
  Sense strand starting at position 2016 of SEQ ID NO: 1882393
gcgugaccguauuuggaga

SEQ ID NO: 2117655 - RNA, 19 nt, Artificial Sequence
  Description of Artificial Sequence: Synthetic oligonucleotide
  Antisense strand to SEQ ID NO: 2117654
ucuccaaauacggucacgc

SEQ ID NO: 2117656 - RNA, 19 nt, Artificial Sequence
  Description of Artificial Sequence: Synthetic oligonucleotide
  Sense strand starting at position 2049 of SEQ ID NO: 1882393
agguaauaaacgugaagug

SEQ ID NO: 2117657 - RNA, 19 nt, Artificial Sequence
  Description of Artificial Sequence: Synthetic oligonucleotide
  Antisense strand to SEQ ID NO: 2117656
cacuucacguuuauuaccu

SEQ ID NO: 2117658 - RNA, 19 nt, Artificial Sequence
  Description of Artificial Sequence: Synthetic oligonucleotide
  Sense strand starting at position 2050 of SEQ ID NO: 1882393
gguaauaaacgugaaguga

SEQ ID NO: 2117659 - RNA, 19 nt, Artificial Sequence
  Description of Artificial Sequence: Synthetic oligonucleotide
  Antisense strand to SEQ ID NO: 2117658
ucacuucacguuuauuacc

SEQ ID NO: 2117660 - RNA, 19 nt, Artificial Sequence
  Description of Artificial Sequence: Synthetic oligonucleotide
  Sense strand starting at position 2099 of SEQ ID NO: 1882393
gcccauugucuuuauaaga

SEQ ID NO: 2117661 - RNA, 19 nt, Artificial Sequence
  Description of Artificial Sequence: Synthetic oligonucleotide
  Antisense strand to SEQ ID NO: 2117660
ucuuauaaagacaaugggc

SEQ ID NO: 2117662 - RNA, 19 nt, Artificial Sequence
  Description of Artificial Sequence: Synthetic oligonucleotide
  Sense strand starting at position 2180 of SEQ ID NO: 1882393
gaaggugacugucuacaag

SEQ ID NO: 2117663 - RNA, 19 nt, Artificial Sequence
  Description of Artificial Sequence: Synthetic oligonucleotide
  Antisense strand to SEQ ID NO: 2117662
cuuguagacagucaccuuc

SEQ ID NO: 2117664 - RNA, 19 nt, Artificial Sequence
  Description of Artificial Sequence: Synthetic oligonucleotide
  Sense strand starting at position 2352 of SEQ ID NO: 1882393
uucgaagagucccuaagga

SEQ ID NO: 2117665 - RNA, 19 nt, Artificial Sequence
  Description of Artificial Sequence: Synthetic oligonucleotide
  Antisense strand to SEQ ID NO: 2117664
uccuuagggacucuucgaa

SEQ ID NO: 2117666 - RNA, 19 nt, Artificial Sequence
  Description of Artificial Sequence: Synthetic oligonucleotide
  Sense strand starting at position 2392 of SEQ ID NO: 1882393
cuuaguucggcugaagaca

SEQ ID NO: 2117667 - RNA, 19 nt, Artificial Sequence
  Description of Artificial Sequence: Synthetic oligonucleotide
  Antisense strand to SEQ ID NO: 2117666
ugucuucagccgaacuaag

SEQ ID NO: 2117668 - RNA, 19 nt, Artificial Sequence
  Description of Artificial Sequence: Synthetic oligonucleotide
  Sense strand starting at position 2829 of SEQ ID NO: 1882393
gucaauugugcugugcuga

SEQ ID NO: 2117669 - RNA, 19 nt, Artificial Sequence
  Description of Artificial Sequence: Synthetic oligonucleotide
  Antisense strand to SEQ ID NO: 2117668
ucagcacagcacaauugac

SEQ ID NO: 2117670 - RNA, 19 nt, Artificial Sequence
  Description of Artificial Sequence: Synthetic oligonucleotide
  Sense strand starting at position 2835 of SEQ ID NO: 1882393
ugugcugugcugaggagaa

SEQ ID NO: 2117671 - RNA, 19 nt, Artificial Sequence
  Description of Artificial Sequence: Synthetic oligonucleotide
  Antisense strand to SEQ ID NO: 2117670
uucuccucagcacagcaca

SEQ ID NO: 2117672 - RNA, 19 nt, Artificial Sequence
  Description of Artificial Sequence: Synthetic oligonucleotide
  Sense strand starting at position 2880 of SEQ ID NO: 1882393
caaagaaagucacugguga

SEQ ID NO: 2117673 - RNA, 19 nt, Artificial Sequence
  Description of Artificial Sequence: Synthetic oligonucleotide
  Antisense strand to SEQ ID NO: 2117672
ucaccagugacuuucuuug

SEQ ID NO: 2117674 - RNA, 19 nt, Artificial Sequence
  Description of Artificial Sequence: Synthetic oligonucleotide
  Sense strand starting at position 2963 of SEQ ID NO: 1882393
aagcaaggacagugaugau

SEQ ID NO: 2117675 - RNA, 19 nt, Artificial Sequence
  Description of Artificial Sequence: Synthetic oligonucleotide
  Antisense strand to SEQ ID NO: 2117674
aucaucacuguccuugcuu

SEQ ID NO: 2117676 - RNA, 19 nt, Artificial Sequence
  Description of Artificial Sequence: Synthetic oligonucleotide
  Sense strand starting at position 3050 of SEQ ID NO: 1882393
uggaaauggagccgugacu

SEQ ID NO: 2117677 - RNA, 19 nt, Artificial Sequence
  Description of Artificial Sequence: Synthetic oligonucleotide
  Antisense strand to SEQ ID NO: 2117676
agucacggcuccauuucca

SEQ ID NO: 2117678 - RNA, 19 nt, Artificial Sequence
  Description of Artificial Sequence: Synthetic oligonucleotide
  Sense strand starting at position 3070 of SEQ ID NO: 1882393
gggauaguguggaaaugga

SEQ ID NO: 2117679 - RNA, 19 nt, Artificial Sequence
  Description of Artificial Sequence: Synthetic oligonucleotide
  Antisense strand to SEQ ID NO: 2117678
uccauuuccacacuauccc

SEQ ID NO: 2117680 - RNA, 19 nt, Artificial Sequence
  Description of Artificial Sequence: Synthetic oligonucleotide
  Sense strand starting at position 3276 of SEQ ID NO: 1882393
cguaauauaagagggauua

SEQ ID NO: 2117681 - RNA, 19 nt, Artificial Sequence
  Description of Artificial Sequence: Synthetic oligonucleotide
  Antisense strand to SEQ ID NO: 2117680
uaaucccucuuauauuacg

SEQ ID NO: 2117682 - RNA, 19 nt, Artificial Sequence
  Description of Artificial Sequence: Synthetic oligonucleotide
  Sense strand starting at position 3387 of SEQ ID NO: 1882393
aaucauccuguaggaagua

SEQ ID NO: 2117683 - RNA, 19 nt, Artificial Sequence
  Description of Artificial Sequence: Synthetic oligonucleotide
  Antisense strand to SEQ ID NO: 2117682
uacuuccuacaggaugauu

SEQ ID NO: 2117684 - RNA, 19 nt, Artificial Sequence
  Description of Artificial Sequence: Synthetic oligonucleotide
  Sense strand starting at position 3793 of SEQ ID NO: 1882393
uccuccuucgcuuaggaaa

SEQ ID NO: 2117685 - RNA, 19 nt, Artificial Sequence
  Description of Artificial Sequence: Synthetic oligonucleotide
  Antisense strand to SEQ ID NO: 2117684
uuuccuaagcgaaggagga

SEQ ID NO: 2117686 - RNA, 19 nt, Artificial Sequence
  Description of Artificial Sequence: Synthetic oligonucleotide
  Sense strand starting at position 3857 of SEQ ID NO: 1882393
acauccuacuuguuaggaa

SEQ ID NO: 2117687 - RNA, 19 nt, Artificial Sequence
  Description of Artificial Sequence: Synthetic oligonucleotide
  Antisense strand to SEQ ID NO: 2117686
uuccuaacaaguaggaugu

SEQ ID NO: 2117688 - RNA, 19 nt, Artificial Sequence
  Description of Artificial Sequence: Synthetic oligonucleotide
  Sense strand starting at position 3916 of SEQ ID NO: 1882393
uuagcauggccacaaugaa

SEQ ID NO: 2117689 - RNA, 19 nt, Artificial Sequence
  Description of Artificial Sequence: Synthetic oligonucleotide
  Antisense strand to SEQ ID NO: 2117688
uucauuguggccaugcuaa

SEQ ID NO: 2117690 - RNA, 19 nt, Artificial Sequence
  Description of Artificial Sequence: Synthetic oligonucleotide
  Sense strand starting at position 8 of SEQ ID NO: 1882394
uuaucaacucgaugauuaa

SEQ ID NO: 2117691 - RNA, 19 nt, Artificial Sequence
  Description of Artificial Sequence: Synthetic oligonucleotide
  Antisense strand to SEQ ID NO: 2117690
uuaaucaucgaguugauaa

SEQ ID NO: 2117692 - RNA, 19 nt, Artificial Sequence
  Description of Artificial Sequence: Synthetic oligonucleotide
  Sense strand starting at position 11 of SEQ ID NO: 1882394
ucaacucgaugauuaaacu

SEQ ID NO: 2117693 - RNA, 19 nt, Artificial Sequence
  Description of Artificial Sequence: Synthetic oligonucleotide
  Antisense strand to SEQ ID NO: 2117692
aguuuaaucaucgaguuga

SEQ ID NO: 2117694 - RNA, 19 nt, Artificial Sequence
  Description of Artificial Sequence: Synthetic oligonucleotide
  Sense strand starting at position 17 of SEQ ID NO: 1882394
cgaugauuaaacugggacu

SEQ ID NO: 2117695 - RNA, 19 nt, Artificial Sequence
  Description of Artificial Sequence: Synthetic oligonucleotide
  Antisense strand to SEQ ID NO: 2117694
agucccaguuuaaucaucg

SEQ ID NO: 2117696 - RNA, 19 nt, Artificial Sequence
  Description of Artificial Sequence: Synthetic oligonucleotide
  Sense strand starting at position 39 of SEQ ID NO: 1882394
uguggugaaacauagcuuu

SEQ ID NO: 2117697 - RNA, 19 nt, Artificial Sequence
  Description of Artificial Sequence: Synthetic oligonucleotide
  Antisense strand to SEQ ID NO: 2117696
aaagcuauguuucaccaca

SEQ ID NO: 2117698 - RNA, 19 nt, Artificial Sequence
  Description of Artificial Sequence: Synthetic oligonucleotide
  Sense strand starting at position 42 of SEQ ID NO: 1882394
ggugaaacauagcuuucuu

SEQ ID NO: 2117699 - RNA, 19 nt, Artificial Sequence
  Description of Artificial Sequence: Synthetic oligonucleotide
  Antisense strand to SEQ ID NO: 2117698
aagaaagcuauguuucacc

SEQ ID NO: 2117700 - RNA, 19 nt, Artificial Sequence
  Description of Artificial Sequence: Synthetic oligonucleotide
  Sense strand starting at position 70 of SEQ ID NO: 1882394
guuaauuguacguuugugu

SEQ ID NO: 2117701 - RNA, 19 nt, Artificial Sequence
  Description of Artificial Sequence: Synthetic oligonucleotide
  Antisense strand to SEQ ID NO: 2117700
acacaaacguacaauuaac

SEQ ID NO: 2117702 - RNA, 19 nt, Artificial Sequence
  Description of Artificial Sequence: Synthetic oligonucleotide
  Sense strand starting at position 127 of SEQ ID NO: 1882394
ugagguuguguauggaaau

SEQ ID NO: 2117703 - RNA, 19 nt, Artificial Sequence
  Description of Artificial Sequence: Synthetic oligonucleotide
  Antisense strand to SEQ ID NO: 2117702
auuuccauacacaaccuca

SEQ ID NO: 2117704 - RNA, 19 nt, Artificial Sequence
  Description of Artificial Sequence: Synthetic oligonucleotide
  Sense strand starting at position 161 of SEQ ID NO: 1882394
agaugaaacuucuugugua

SEQ ID NO: 2117705 - RNA, 19 nt, Artificial Sequence
  Description of Artificial Sequence: Synthetic oligonucleotide
  Antisense strand to SEQ ID NO: 2117704
uacacaagaaguuucaucu

SEQ ID NO: 2117706 - RNA, 19 nt, Artificial Sequence
  Description of Artificial Sequence: Synthetic oligonucleotide
  Sense strand starting at position 173 of SEQ ID NO: 1882394
uuguguauuauuugugucu

SEQ ID NO: 2117707 - RNA, 19 nt, Artificial Sequence
  Description of Artificial Sequence: Synthetic oligonucleotide
  Antisense strand to SEQ ID NO: 2117706
agacacaaauaauacacaa

SEQ ID NO: 2117708 - RNA, 19 nt, Artificial Sequence
  Description of Artificial Sequence: Synthetic oligonucleotide
  Sense strand starting at position 174 of SEQ ID NO: 1882394
uguguauuauuugugucuu

SEQ ID NO: 2117709 - RNA, 19 nt, Artificial Sequence
  Description of Artificial Sequence: Synthetic oligonucleotide
  Antisense strand to SEQ ID NO: 2117708
aagacacaaauaauacaca

SEQ ID NO: 2117710 - RNA, 19 nt, Artificial Sequence
  Description of Artificial Sequence: Synthetic oligonucleotide
  Sense strand starting at position 207 of SEQ ID NO: 1882394
gauauuguucuauauguga

SEQ ID NO: 2117711 - RNA, 19 nt, Artificial Sequence
  Description of Artificial Sequence: Synthetic oligonucleotide
  Antisense strand to SEQ ID NO: 2117710
ucacauauagaacaauauc

SEQ ID NO: 2117712 - RNA, 19 nt, Artificial Sequence
  Description of Artificial Sequence: Synthetic oligonucleotide
  Sense strand starting at position 533 of SEQ ID NO: 1882394
ugagaacauuuccaugaaa

SEQ ID NO: 2117713 - RNA, 19 nt, Artificial Sequence
  Description of Artificial Sequence: Synthetic oligonucleotide
  Antisense strand to SEQ ID NO: 2117712
uuucauggaaauguucuca

SEQ ID NO: 2117714 - RNA, 19 nt, Artificial Sequence
  Description of Artificial Sequence: Synthetic oligonucleotide
  Sense strand starting at position 694 of SEQ ID NO: 1882394
aaagauguccugcaaggua

SEQ ID NO: 2117715 - RNA, 19 nt, Artificial Sequence
  Description of Artificial Sequence: Synthetic oligonucleotide
  Antisense strand to SEQ ID NO: 2117714
uaccuugcaggacaucuuu

SEQ ID NO: 2117716 - RNA, 19 nt, Artificial Sequence
  Description of Artificial Sequence: Synthetic oligonucleotide
  Sense strand starting at position 847 of SEQ ID NO: 1882394
gugauuucagcaggcggau

SEQ ID NO: 2117717 - RNA, 19 nt, Artificial Sequence
  Description of Artificial Sequence: Synthetic oligonucleotide
  Antisense strand to SEQ ID NO: 2117716
auccgccugcugaaaucac

SEQ ID NO: 2117718 - RNA, 19 nt, Artificial Sequence
  Description of Artificial Sequence: Synthetic oligonucleotide
  Sense strand starting at position 863 of SEQ ID NO: 1882394
gaucaucaguuguuuauag

SEQ ID NO: 2117719 - RNA, 19 nt, Artificial Sequence
  Description of Artificial Sequence: Synthetic oligonucleotide
  Antisense strand to SEQ ID NO: 2117718
cuauaaacaacugaugauc

SEQ ID NO: 2117720 - RNA, 19 nt, Artificial Sequence
  Description of Artificial Sequence: Synthetic oligonucleotide
  Sense strand starting at position 1075 of SEQ ID NO: 1882394
gugcuuagaccauaaacag

SEQ ID NO: 2117721 - RNA, 19 nt, Artificial Sequence
  Description of Artificial Sequence: Synthetic oligonucleotide
  Antisense strand to SEQ ID NO: 2117720
cuguuuauggucuaagcac

SEQ ID NO: 2117722 - RNA, 19 nt, Artificial Sequence
  Description of Artificial Sequence: Synthetic oligonucleotide
  Sense strand starting at position 1185 of SEQ ID NO: 1882394
ugagcuucccuuugaacau

SEQ ID NO: 2117723 - RNA, 19 nt, Artificial Sequence
  Description of Artificial Sequence: Synthetic oligonucleotide
  Antisense strand to SEQ ID NO: 2117722
auguucaaagggaagcuca

SEQ ID NO: 2117724 - RNA, 19 nt, Artificial Sequence
  Description of Artificial Sequence: Synthetic oligonucleotide
  Sense strand starting at position 1533 of SEQ ID NO: 1882394
ggcgauucugaugacuaca

SEQ ID NO: 2117725 - RNA, 19 nt, Artificial Sequence
  Description of Artificial Sequence: Synthetic oligonucleotide
  Antisense strand to SEQ ID NO: 2117724
uguagucaucagaaucgcc

SEQ ID NO: 2117726 - RNA, 19 nt, Artificial Sequence
  Description of Artificial Sequence: Synthetic oligonucleotide
  Sense strand starting at position 1796 of SEQ ID NO: 1882394
gggugcugguaccugagaa

SEQ ID NO: 2117727 - RNA, 19 nt, Artificial Sequence
  Description of Artificial Sequence: Synthetic oligonucleotide
  Antisense strand to SEQ ID NO: 2117726
uucucagguaccagcaccc

SEQ ID NO: 2117728 - RNA, 19 nt, Artificial Sequence
  Description of Artificial Sequence: Synthetic oligonucleotide
  Sense strand starting at position 1797 of SEQ ID NO: 1882394
ggugcugguaccugagaaa

SEQ ID NO: 2117729 - RNA, 19 nt, Artificial Sequence
  Description of Artificial Sequence: Synthetic oligonucleotide
  Antisense strand to SEQ ID NO: 2117728
uuucucagguaccagcacc

SEQ ID NO: 2117730 - RNA, 19 nt, Artificial Sequence
  Description of Artificial Sequence: Synthetic oligonucleotide
  Sense strand starting at position 1827 of SEQ ID NO: 1882394
cagggucuguguuuggaga

SEQ ID NO: 2117731 - RNA, 19 nt, Artificial Sequence
  Description of Artificial Sequence: Synthetic oligonucleotide
  Antisense strand to SEQ ID NO: 2117730
ucuccaaacacagacccug

SEQ ID NO: 2117732 - RNA, 19 nt, Artificial Sequence
  Description of Artificial Sequence: Synthetic oligonucleotide
  Sense strand starting at position 1828 of SEQ ID NO: 1882394
agggucuguguuuggagaa

SEQ ID NO: 2117733 - RNA, 19 nt, Artificial Sequence
  Description of Artificial Sequence: Synthetic oligonucleotide
  Antisense strand to SEQ ID NO: 2117732
uucuccaaacacagacccu

SEQ ID NO: 2117734 - RNA, 19 nt, Artificial Sequence
  Description of Artificial Sequence: Synthetic oligonucleotide
  Sense strand starting at position 1891 of SEQ ID NO: 1882394
ucaugugcuccgucaguga

SEQ ID NO: 2117735 - RNA, 19 nt, Artificial Sequence
  Description of Artificial Sequence: Synthetic oligonucleotide
  Antisense strand to SEQ ID NO: 2117734
ucacugacggagcacauga

SEQ ID NO: 2117736 - RNA, 19 nt, Artificial Sequence
  Description of Artificial Sequence: Synthetic oligonucleotide
  Sense strand starting at position 1954 of SEQ ID NO: 1882394
gcauuuccuccaggagucu

SEQ ID NO: 2117737 - RNA, 19 nt, Artificial Sequence
  Description of Artificial Sequence: Synthetic oligonucleotide
  Antisense strand to SEQ ID NO: 2117736
agacuccuggaggaaaugc

SEQ ID NO: 2117738 - RNA, 19 nt, Artificial Sequence
  Description of Artificial Sequence: Synthetic oligonucleotide
  Sense strand starting at position 2065 of SEQ ID NO: 1882394
acgauuuccuuauugugua

SEQ ID NO: 2117739 - RNA, 19 nt, Artificial Sequence
  Description of Artificial Sequence: Synthetic oligonucleotide
  Antisense strand to SEQ ID NO: 2117738
uacacaauaaggaaaucgu

SEQ ID NO: 2117740 - RNA, 19 nt, Artificial Sequence
  Description of Artificial Sequence: Synthetic oligonucleotide
  Sense strand starting at position 2070 of SEQ ID NO: 1882394
uuccuuauuguguaagaca

SEQ ID NO: 2117741 - RNA, 19 nt, Artificial Sequence
  Description of Artificial Sequence: Synthetic oligonucleotide
  Antisense strand to SEQ ID NO: 2117740
ugucuuacacaauaaggaa

SEQ ID NO: 2117742 - RNA, 19 nt, Artificial Sequence
  Description of Artificial Sequence: Synthetic oligonucleotide
  Sense strand starting at position 2093 of SEQ ID NO: 1882394
gaaguaagucuacaauggu

SEQ ID NO: 2117743 - RNA, 19 nt, Artificial Sequence
  Description of Artificial Sequence: Synthetic oligonucleotide
  Antisense strand to SEQ ID NO: 2117742
accauuguagacuuacuuc

SEQ ID NO: 2117744 - RNA, 19 nt, Artificial Sequence
  Description of Artificial Sequence: Synthetic oligonucleotide
  Sense strand starting at position 2992 of SEQ ID NO: 1882394
ggguggauccaguggugaa

SEQ ID NO: 2117745 - RNA, 19 nt, Artificial Sequence
  Description of Artificial Sequence: Synthetic oligonucleotide
  Antisense strand to SEQ ID NO: 2117744
uucaccacuggauccaccc

SEQ ID NO: 2117746 - RNA, 19 nt, Artificial Sequence
  Description of Artificial Sequence: Synthetic oligonucleotide
  Sense strand starting at position 2993 of SEQ ID NO: 1882394
gguggauccaguggugaaa

SEQ ID NO: 2117747 - RNA, 19 nt, Artificial Sequence
  Description of Artificial Sequence: Synthetic oligonucleotide
  Antisense strand to SEQ ID NO: 2117746
uuucaccacuggauccacc

SEQ ID NO: 2117748 - RNA, 19 nt, Artificial Sequence
  Description of Artificial Sequence: Synthetic oligonucleotide
  Sense strand starting at position 3042 of SEQ ID NO: 1882394
acaacugagucuuugaaca

SEQ ID NO: 2117749 - RNA, 19 nt, Artificial Sequence
  Description of Artificial Sequence: Synthetic oligonucleotide
  Antisense strand to SEQ ID NO: 2117748
uguucaaagacucaguugu

SEQ ID NO: 2117750 - RNA, 19 nt, Artificial Sequence
  Description of Artificial Sequence: Synthetic oligonucleotide
  Sense strand starting at position 3196 of SEQ ID NO: 1882394
uaugguuggccaggugaaa

SEQ ID NO: 2117751 - RNA, 19 nt, Artificial Sequence
  Description of Artificial Sequence: Synthetic oligonucleotide
  Antisense strand to SEQ ID NO: 2117750
uuucaccuggccaaccaua

SEQ ID NO: 2117752 - RNA, 19 nt, Artificial Sequence
  Description of Artificial Sequence: Synthetic oligonucleotide
  Sense strand starting at position 3350 of SEQ ID NO: 1882394
ggacgaggauucuucagac

SEQ ID NO: 2117753 - RNA, 19 nt, Artificial Sequence
  Description of Artificial Sequence: Synthetic oligonucleotide
  Antisense strand to SEQ ID NO: 2117752
gucugaagaauccucgucc

SEQ ID NO: 2117754 - RNA, 19 nt, Artificial Sequence
  Description of Artificial Sequence: Synthetic oligonucleotide
  Sense strand starting at position 3397 of SEQ ID NO: 1882394
ugaugaucacuugggugga

SEQ ID NO: 2117755 - RNA, 19 nt, Artificial Sequence
  Description of Artificial Sequence: Synthetic oligonucleotide
  Antisense strand to SEQ ID NO: 2117754
uccacccaagugaucauca

SEQ ID NO: 2117756 - RNA, 19 nt, Artificial Sequence
  Description of Artificial Sequence: Synthetic oligonucleotide
  Sense strand starting at position 3558 of SEQ ID NO: 1882394
ggaggauguggucacccua

SEQ ID NO: 2117757 - RNA, 19 nt, Artificial Sequence
  Description of Artificial Sequence: Synthetic oligonucleotide
  Antisense strand to SEQ ID NO: 2117756
uagggugaccacauccucc

SEQ ID NO: 2117758 - RNA, 19 nt, Artificial Sequence
  Description of Artificial Sequence: Synthetic oligonucleotide
  Sense strand starting at position 3572 of SEQ ID NO: 1882394
cccuacugugcuggaaaca

SEQ ID NO: 2117759 - RNA, 19 nt, Artificial Sequence
  Description of Artificial Sequence: Synthetic oligonucleotide
  Antisense strand to SEQ ID NO: 2117758
uguuuccagcacaguaggg

SEQ ID NO: 2117760 - RNA, 19 nt, Artificial Sequence
  Description of Artificial Sequence: Synthetic oligonucleotide
  Sense strand starting at position 3623 of SEQ ID NO: 1882394
gaaagagaaugcucaguac

SEQ ID NO: 2117761 - RNA, 19 nt, Artificial Sequence
  Description of Artificial Sequence: Synthetic oligonucleotide
  Antisense strand to SEQ ID NO: 2117760
guacugagcauucucuuuc

SEQ ID NO: 2117762 - RNA, 19 nt, Artificial Sequence
  Description of Artificial Sequence: Synthetic oligonucleotide
  Sense strand starting at position 3627 of SEQ ID NO: 1882394
gagaaugcucaguacagca

SEQ ID NO: 2117763 - RNA, 19 nt, Artificial Sequence
  Description of Artificial Sequence: Synthetic oligonucleotide
  Antisense strand to SEQ ID NO: 2117762
ugcuguacugagcauucuc

SEQ ID NO: 2117764 - RNA, 19 nt, Artificial Sequence
  Description of Artificial Sequence: Synthetic oligonucleotide
  Sense strand starting at position 3682 of SEQ ID NO: 1882394
caaagauaaucgcugaaag

SEQ ID NO: 2117765 - RNA, 19 nt, Artificial Sequence
  Description of Artificial Sequence: Synthetic oligonucleotide
  Antisense strand to SEQ ID NO: 2117764
cuuucagcgauuaucuuug

SEQ ID NO: 2117766 - RNA, 19 nt, Artificial Sequence
  Description of Artificial Sequence: Synthetic oligonucleotide
  Sense strand starting at position 3683 of SEQ ID NO: 1882394
aaagauaaucgcugaaagu

SEQ ID NO: 2117767 - RNA, 19 nt, Artificial Sequence
  Description of Artificial Sequence: Synthetic oligonucleotide
  Antisense strand to SEQ ID NO: 2117766
acuuucagcgauuaucuuu

SEQ ID NO: 2117768 - RNA, 19 nt, Artificial Sequence
  Description of Artificial Sequence: Synthetic oligonucleotide
  Sense strand starting at position 3684 of SEQ ID NO: 1882394
aagauaaucgcugaaaguu

SEQ ID NO: 2117769 - RNA, 19 nt, Artificial Sequence
  Description of Artificial Sequence: Synthetic oligonucleotide
  Antisense strand to SEQ ID NO: 2117768
aacuuucagcgauuaucuu

SEQ ID NO: 2117770 - RNA, 19 nt, Artificial Sequence
  Description of Artificial Sequence: Synthetic oligonucleotide
  Sense strand starting at position 117 of SEQ ID NO: 1882395
ugugcagaaaguuguagaa

SEQ ID NO: 2117771 - RNA, 19 nt, Artificial Sequence
  Description of Artificial Sequence: Synthetic oligonucleotide
  Antisense strand to SEQ ID NO: 2117770
uucuacaacuuucugcaca

SEQ ID NO: 2117772 - RNA, 19 nt, Artificial Sequence
  Description of Artificial Sequence: Synthetic oligonucleotide
  Sense strand starting at position 176 of SEQ ID NO: 1882395
ucauccaacccugggauua

SEQ ID NO: 2117773 - RNA, 19 nt, Artificial Sequence
  Description of Artificial Sequence: Synthetic oligonucleotide
  Antisense strand to SEQ ID NO: 2117772
uaaucccaggguuggauga

SEQ ID NO: 2117774 - RNA, 19 nt, Artificial Sequence
  Description of Artificial Sequence: Synthetic oligonucleotide
  Sense strand starting at position 247 of SEQ ID NO: 1882395
aagugaagcucagcugaga

SEQ ID NO: 2117775 - RNA, 19 nt, Artificial Sequence
  Description of Artificial Sequence: Synthetic oligonucleotide
  Antisense strand to SEQ ID NO: 2117774
ucucagcugagcuucacuu

SEQ ID NO: 2117776 - RNA, 19 nt, Artificial Sequence
  Description of Artificial Sequence: Synthetic oligonucleotide
  Sense strand starting at position 410 of SEQ ID NO: 1882395
aggccaucccaguaaugga

SEQ ID NO: 2117777 - RNA, 19 nt, Artificial Sequence
  Description of Artificial Sequence: Synthetic oligonucleotide
  Antisense strand to SEQ ID NO: 2117776
uccauuacugggauggccu

SEQ ID NO: 2117778 - RNA, 19 nt, Artificial Sequence
  Description of Artificial Sequence: Synthetic oligonucleotide
  Sense strand starting at position 434 of SEQ ID NO: 1882395
ucacauguauguuuggaau

SEQ ID NO: 2117779 - RNA, 19 nt, Artificial Sequence
  Description of Artificial Sequence: Synthetic oligonucleotide
  Antisense strand to SEQ ID NO: 2117778
auuccaaacauacauguga

SEQ ID NO: 2117780 - RNA, 19 nt, Artificial Sequence
  Description of Artificial Sequence: Synthetic oligonucleotide
  Sense strand starting at position 440 of SEQ ID NO: 1882395
guauguuuggaauagacug

SEQ ID NO: 2117781 - RNA, 19 nt, Artificial Sequence
  Description of Artificial Sequence: Synthetic oligonucleotide
  Antisense strand to SEQ ID NO: 2117780
cagucuauuccaaacauac

SEQ ID NO: 2117782 - RNA, 19 nt, Artificial Sequence
  Description of Artificial Sequence: Synthetic oligonucleotide
  Sense strand starting at position 482 of SEQ ID NO: 1882395
ucacauguauggucggaau

SEQ ID NO: 2117783 - RNA, 19 nt, Artificial Sequence
  Description of Artificial Sequence: Synthetic oligonucleotide
  Antisense strand to SEQ ID NO: 2117782
auuccgaccauacauguga

SEQ ID NO: 2117784 - RNA, 19 nt, Artificial Sequence
  Description of Artificial Sequence: Synthetic oligonucleotide
  Sense strand starting at position 484 of SEQ ID NO: 1882395
acauguauggucggaauag

SEQ ID NO: 2117785 - RNA, 19 nt, Artificial Sequence
  Description of Artificial Sequence: Synthetic oligonucleotide
  Antisense strand to SEQ ID NO: 2117784
cuauuccgaccauacaugu

SEQ ID NO: 2117786 - RNA, 19 nt, Artificial Sequence
  Description of Artificial Sequence: Synthetic oligonucleotide
  Sense strand starting at position 500 of SEQ ID NO: 1882395
uagaaaggguaguuuacaa

SEQ ID NO: 2117787 - RNA, 19 nt, Artificial Sequence
  Description of Artificial Sequence: Synthetic oligonucleotide
  Antisense strand to SEQ ID NO: 2117786
uuguaaacuacccuuucua

SEQ ID NO: 2117788 - RNA, 19 nt, Artificial Sequence
  Description of Artificial Sequence: Synthetic oligonucleotide
  Sense strand starting at position 532 of SEQ ID NO: 1882395
gccuguguuguguucauau

SEQ ID NO: 2117789 - RNA, 19 nt, Artificial Sequence
  Description of Artificial Sequence: Synthetic oligonucleotide
  Antisense strand to SEQ ID NO: 2117788
auaugaacacaacacaggc

SEQ ID NO: 2117790 - RNA, 19 nt, Artificial Sequence
  Description of Artificial Sequence: Synthetic oligonucleotide
  Sense strand starting at position 541 of SEQ ID NO: 1882395
guguucauaugagugagaa

SEQ ID NO: 2117791 - RNA, 19 nt, Artificial Sequence
  Description of Artificial Sequence: Synthetic oligonucleotide
  Antisense strand to SEQ ID NO: 2117790
uucucacucauaugaacac

SEQ ID NO: 2117792 - RNA, 19 nt, Artificial Sequence
  Description of Artificial Sequence: Synthetic oligonucleotide
  Sense strand starting at position 679 of SEQ ID NO: 1882395
cccucuucccacugagagu

SEQ ID NO: 2117793 - RNA, 19 nt, Artificial Sequence
  Description of Artificial Sequence: Synthetic oligonucleotide
  Antisense strand to SEQ ID NO: 2117792
acucucagugggaagaggg

SEQ ID NO: 2117794 - RNA, 19 nt, Artificial Sequence
  Description of Artificial Sequence: Synthetic oligonucleotide
  Sense strand starting at position 948 of SEQ ID NO: 1882395
ccaugacagugguuacaug

SEQ ID NO: 2117795 - RNA, 19 nt, Artificial Sequence
  Description of Artificial Sequence: Synthetic oligonucleotide
  Antisense strand to SEQ ID NO: 2117794
cauguaaccacugucaugg

SEQ ID NO: 2117796 - RNA, 19 nt, Artificial Sequence
  Description of Artificial Sequence: Synthetic oligonucleotide
  Sense strand starting at position 1132 of SEQ ID NO: 1882395
cauuguuugcugcuaugca

SEQ ID NO: 2117797 - RNA, 19 nt, Artificial Sequence
  Description of Artificial Sequence: Synthetic oligonucleotide
  Antisense strand to SEQ ID NO: 2117796
ugcauagcagcaaacaaug

SEQ ID NO: 2117798 - RNA, 19 nt, Artificial Sequence
  Description of Artificial Sequence: Synthetic oligonucleotide
  Sense strand starting at position 1357 of SEQ ID NO: 1882395
agagaauuguuucuugaug

SEQ ID NO: 2117799 - RNA, 19 nt, Artificial Sequence
  Description of Artificial Sequence: Synthetic oligonucleotide
  Antisense strand to SEQ ID NO: 2117798
caucaagaaacaauucucu

SEQ ID NO: 2117800 - RNA, 19 nt, Artificial Sequence
  Description of Artificial Sequence: Synthetic oligonucleotide
  Sense strand starting at position 1358 of SEQ ID NO: 1882395
gagaauuguuucuugauga

SEQ ID NO: 2117801 - RNA, 19 nt, Artificial Sequence
  Description of Artificial Sequence: Synthetic oligonucleotide
  Antisense strand to SEQ ID NO: 2117800
ucaucaagaaacaauucuc

SEQ ID NO: 2117802 - RNA, 19 nt, Artificial Sequence
  Description of Artificial Sequence: Synthetic oligonucleotide
  Sense strand starting at position 1439 of SEQ ID NO: 1882395
cugcauguuugaucauaaa

SEQ ID NO: 2117803 - RNA, 19 nt, Artificial Sequence
  Description of Artificial Sequence: Synthetic oligonucleotide
  Antisense strand to SEQ ID NO: 2117802
uuuaugaucaaacaugcag

SEQ ID NO: 2117804 - RNA, 19 nt, Artificial Sequence
  Description of Artificial Sequence: Synthetic oligonucleotide
  Sense strand starting at position 1556 of SEQ ID NO: 1882395
cuuugugauccucaggguu

SEQ ID NO: 2117805 - RNA, 19 nt, Artificial Sequence
  Description of Artificial Sequence: Synthetic oligonucleotide
  Antisense strand to SEQ ID NO: 2117804
aacccugaggaucacaaag

SEQ ID NO: 2117806 - RNA, 19 nt, Artificial Sequence
  Description of Artificial Sequence: Synthetic oligonucleotide
  Sense strand starting at position 1773 of SEQ ID NO: 1882395
gcaugagugauaggcacaa

SEQ ID NO: 2117807 - RNA, 19 nt, Artificial Sequence
  Description of Artificial Sequence: Synthetic oligonucleotide
  Antisense strand to SEQ ID NO: 2117806
uugugccuaucacucaugc

SEQ ID NO: 2117808 - RNA, 19 nt, Artificial Sequence
  Description of Artificial Sequence: Synthetic oligonucleotide
  Sense strand starting at position 1854 of SEQ ID NO: 1882395
agccacucaccaugugaga

SEQ ID NO: 2117809 - RNA, 19 nt, Artificial Sequence
  Description of Artificial Sequence: Synthetic oligonucleotide
  Antisense strand to SEQ ID NO: 2117808
ucucacauggugaguggcu

SEQ ID NO: 2117810 - RNA, 19 nt, Artificial Sequence
  Description of Artificial Sequence: Synthetic oligonucleotide
  Sense strand starting at position 2023 of SEQ ID NO: 1882395
gggcgaaggccugagagaa

SEQ ID NO: 2117811 - RNA, 19 nt, Artificial Sequence
  Description of Artificial Sequence: Synthetic oligonucleotide
  Antisense strand to SEQ ID NO: 2117810
uucucucaggccuucgccc

SEQ ID NO: 2117812 - RNA, 19 nt, Artificial Sequence
  Description of Artificial Sequence: Synthetic oligonucleotide
  Sense strand starting at position 2070 of SEQ ID NO: 1882395
uuagaaugcugacuccaca

SEQ ID NO: 2117813 - RNA, 19 nt, Artificial Sequence
  Description of Artificial Sequence: Synthetic oligonucleotide
  Antisense strand to SEQ ID NO: 2117812
uguggagucagcauucuaa

SEQ ID NO: 2117814 - RNA, 19 nt, Artificial Sequence
  Description of Artificial Sequence: Synthetic oligonucleotide
  Sense strand starting at position 2090 of SEQ ID NO: 1882395
uuagaaugcugacuccaga

SEQ ID NO: 2117815 - RNA, 19 nt, Artificial Sequence
  Description of Artificial Sequence: Synthetic oligonucleotide
  Antisense strand to SEQ ID NO: 2117814
ucuggagucagcauucuaa

SEQ ID NO: 2117816 - RNA, 19 nt, Artificial Sequence
  Description of Artificial Sequence: Synthetic oligonucleotide
  Sense strand starting at position 2155 of SEQ ID NO: 1882395
uguggaauaucacccaaag

SEQ ID NO: 2117817 - RNA, 19 nt, Artificial Sequence
  Description of Artificial Sequence: Synthetic oligonucleotide
  Antisense strand to SEQ ID NO: 2117816
cuuugggugauauuccaca

SEQ ID NO: 2117818 - RNA, 19 nt, Artificial Sequence
  Description of Artificial Sequence: Synthetic oligonucleotide
  Sense strand starting at position 2199 of SEQ ID NO: 1882395
uugggaccugcuuguugaa

SEQ ID NO: 2117819 - RNA, 19 nt, Artificial Sequence
  Description of Artificial Sequence: Synthetic oligonucleotide
  Antisense strand to SEQ ID NO: 2117818
uucaacaagcaggucccaa

SEQ ID NO: 2117820 - RNA, 19 nt, Artificial Sequence
  Description of Artificial Sequence: Synthetic oligonucleotide
  Sense strand starting at position 2201 of SEQ ID NO: 1882395
gggaccugcuuguugaaga

SEQ ID NO: 2117821 - RNA, 19 nt, Artificial Sequence
  Description of Artificial Sequence: Synthetic oligonucleotide
  Antisense strand to SEQ ID NO: 2117820
ucuucaacaagcagguccc

SEQ ID NO: 2117822 - RNA, 19 nt, Artificial Sequence
  Description of Artificial Sequence: Synthetic oligonucleotide
  Sense strand starting at position 2206 of SEQ ID NO: 1882395
cugcuuguugaagaaacau

SEQ ID NO: 2117823 - RNA, 19 nt, Artificial Sequence
  Description of Artificial Sequence: Synthetic oligonucleotide
  Antisense strand to SEQ ID NO: 2117822
auguuucuucaacaagcag

SEQ ID NO: 2117824 - RNA, 19 nt, Artificial Sequence
  Description of Artificial Sequence: Synthetic oligonucleotide
  Sense strand starting at position 2240 of SEQ ID NO: 1882395
gaaagcuggccugagaacu

SEQ ID NO: 2117825 - RNA, 19 nt, Artificial Sequence
  Description of Artificial Sequence: Synthetic oligonucleotide
  Antisense strand to SEQ ID NO: 2117824
aguucucaggccagcuuuc

SEQ ID NO: 2117826 - RNA, 19 nt, Artificial Sequence
  Description of Artificial Sequence: Synthetic oligonucleotide
  Sense strand starting at position 2246 of SEQ ID NO: 1882395
uggccugagaacugaugua

SEQ ID NO: 2117827 - RNA, 19 nt, Artificial Sequence
  Description of Artificial Sequence: Synthetic oligonucleotide
  Antisense strand to SEQ ID NO: 2117826
uacaucaguucucaggcca

SEQ ID NO: 2117828 - RNA, 19 nt, Artificial Sequence
  Description of Artificial Sequence: Synthetic oligonucleotide
  Sense strand starting at position 2386 of SEQ ID NO: 1882395
ccaggcuuccugcagaacu

SEQ ID NO: 2117829 - RNA, 19 nt, Artificial Sequence
  Description of Artificial Sequence: Synthetic oligonucleotide
  Antisense strand to SEQ ID NO: 2117828
aguucugcaggaagccugg

SEQ ID NO: 2117830 - RNA, 19 nt, Artificial Sequence
  Description of Artificial Sequence: Synthetic oligonucleotide
  Sense strand starting at position 2418 of SEQ ID NO: 1882395
auguguauacacuggaguu

SEQ ID NO: 2117831 - RNA, 19 nt, Artificial Sequence
  Description of Artificial Sequence: Synthetic oligonucleotide
  Antisense strand to SEQ ID NO: 2117830
aacuccaguguauacacau

SEQ ID NO: 2117832 - RNA, 19 nt, Artificial Sequence
  Description of Artificial Sequence: Synthetic oligonucleotide
  Sense strand starting at position 2442 of SEQ ID NO: 1882395
cagggucuccuuggcagaa

SEQ ID NO: 2117833 - RNA, 19 nt, Artificial Sequence
  Description of Artificial Sequence: Synthetic oligonucleotide
  Antisense strand to SEQ ID NO: 2117832
uucugccaaggagacccug

SEQ ID NO: 2117834 - RNA, 19 nt, Artificial Sequence
  Description of Artificial Sequence: Synthetic oligonucleotide
  Sense strand starting at position 3249 of SEQ ID NO: 1882395
cugucaaaccugggugaug

SEQ ID NO: 2117835 - RNA, 19 nt, Artificial Sequence
  Description of Artificial Sequence: Synthetic oligonucleotide
  Antisense strand to SEQ ID NO: 2117834
caucacccagguuugacag

SEQ ID NO: 2117836 - RNA, 19 nt, Artificial Sequence
  Description of Artificial Sequence: Synthetic oligonucleotide
  Sense strand starting at position 3365 of SEQ ID NO: 1882395
uaaucugggucugcagaua

SEQ ID NO: 2117837 - RNA, 19 nt, Artificial Sequence
  Description of Artificial Sequence: Synthetic oligonucleotide
  Antisense strand to SEQ ID NO: 2117836
uaucugcagacccagauua

SEQ ID NO: 2117838 - RNA, 19 nt, Artificial Sequence
  Description of Artificial Sequence: Synthetic oligonucleotide
  Sense strand starting at position 3428 of SEQ ID NO: 1882395
ugggacacuucucauuuaa

SEQ ID NO: 2117839 - RNA, 19 nt, Artificial Sequence
  Description of Artificial Sequence: Synthetic oligonucleotide
  Antisense strand to SEQ ID NO: 2117838
uuaaaugagaaguguccca

SEQ ID NO: 2117840 - RNA, 19 nt, Artificial Sequence
  Description of Artificial Sequence: Synthetic oligonucleotide
  Sense strand starting at position 3451 of SEQ ID NO: 1882395
ggccgaauuccugagaaau

SEQ ID NO: 2117841 - RNA, 19 nt, Artificial Sequence
  Description of Artificial Sequence: Synthetic oligonucleotide
  Antisense strand to SEQ ID NO: 2117840
auuucucaggaauucggcc

SEQ ID NO: 2117842 - RNA, 19 nt, Artificial Sequence
  Description of Artificial Sequence: Synthetic oligonucleotide
  Sense strand starting at position 3526 of SEQ ID NO: 1882395
gaggaaugacugugcucuu

SEQ ID NO: 2117843 - RNA, 19 nt, Artificial Sequence
  Description of Artificial Sequence: Synthetic oligonucleotide
  Antisense strand to SEQ ID NO: 2117842
aagagcacagucauuccuc

SEQ ID NO: 2117844 - RNA, 19 nt, Artificial Sequence
  Description of Artificial Sequence: Synthetic oligonucleotide
  Sense strand starting at position 3527 of SEQ ID NO: 1882395
aggaaugacugugcucuuu

SEQ ID NO: 2117845 - RNA, 19 nt, Artificial Sequence
  Description of Artificial Sequence: Synthetic oligonucleotide
  Antisense strand to SEQ ID NO: 2117844
aaagagcacagucauuccu

SEQ ID NO: 2117846 - RNA, 19 nt, Artificial Sequence
  Description of Artificial Sequence: Synthetic oligonucleotide
  Sense strand starting at position 3538 of SEQ ID NO: 1882395
ugcucuuucuaauuagaug

SEQ ID NO: 2117847 - RNA, 19 nt, Artificial Sequence
  Description of Artificial Sequence: Synthetic oligonucleotide
  Antisense strand to SEQ ID NO: 2117846
caucuaauuagaaagagca

SEQ ID NO: 2117848 - RNA, 19 nt, Artificial Sequence
  Description of Artificial Sequence: Synthetic oligonucleotide
  Sense strand starting at position 3931 of SEQ ID NO: 1882395
uuguauagacauuggaaca

SEQ ID NO: 2117849 - RNA, 19 nt, Artificial Sequence
  Description of Artificial Sequence: Synthetic oligonucleotide
  Antisense strand to SEQ ID NO: 2117848
uguuccaaugucuauacaa

SEQ ID NO: 2117850 - RNA, 19 nt, Artificial Sequence
  Description of Artificial Sequence: Synthetic oligonucleotide
  Sense strand starting at position 2265 of SEQ ID NO: 1882396
caaaguggcuuuguaaagu

SEQ ID NO: 2117851 - RNA, 19 nt, Artificial Sequence
  Description of Artificial Sequence: Synthetic oligonucleotide
  Antisense strand to SEQ ID NO: 2117850
acuuuacaaagccacuuug

SEQ ID NO: 2117852 - RNA, 19 nt, Artificial Sequence
  Description of Artificial Sequence: Synthetic oligonucleotide
  Sense strand starting at position 2273 of SEQ ID NO: 1882396
cuuuguaaagucuauggaa

SEQ ID NO: 2117853 - RNA, 19 nt, Artificial Sequence
  Description of Artificial Sequence: Synthetic oligonucleotide
  Antisense strand to SEQ ID NO: 2117852
uuccauagacuuuacaaag

SEQ ID NO: 2117854 - RNA, 19 nt, Artificial Sequence
  Description of Artificial Sequence: Synthetic oligonucleotide
  Sense strand starting at position 2275 of SEQ ID NO: 1882396
uuguaaagucuauggaaac

SEQ ID NO: 2117855 - RNA, 19 nt, Artificial Sequence
  Description of Artificial Sequence: Synthetic oligonucleotide
  Antisense strand to SEQ ID NO: 2117854
guuuccauagacuuuacaa

SEQ ID NO: 2117856 - RNA, 19 nt, Artificial Sequence
  Description of Artificial Sequence: Synthetic oligonucleotide
  Sense strand starting at position 2511 of SEQ ID NO: 1882396
gggcucugcagcguuuaga

SEQ ID NO: 2117857 - RNA, 19 nt, Artificial Sequence
  Description of Artificial Sequence: Synthetic oligonucleotide
  Antisense strand to SEQ ID NO: 2117856
ucuaaacgcugcagagccc

SEQ ID NO: 2117858 - RNA, 19 nt, Artificial Sequence
  Description of Artificial Sequence: Synthetic oligonucleotide
  Sense strand starting at position 2514 of SEQ ID NO: 1882396
cucugcagcguuuagacaa

SEQ ID NO: 2117859 - RNA, 19 nt, Artificial Sequence
  Description of Artificial Sequence: Synthetic oligonucleotide
  Antisense strand to SEQ ID NO: 2117858
uugucuaaacgcugcagag

SEQ ID NO: 2117860 - RNA, 19 nt, Artificial Sequence
  Description of Artificial Sequence: Synthetic oligonucleotide
  Sense strand starting at position 2552 of SEQ ID NO: 1882396
ugcagaggaucuuugaauu

SEQ ID NO: 2117861 - RNA, 19 nt, Artificial Sequence
  Description of Artificial Sequence: Synthetic oligonucleotide
  Antisense strand to SEQ ID NO: 2117860
aauucaaagauccucugca

SEQ ID NO: 2117862 - RNA, 19 nt, Artificial Sequence
  Description of Artificial Sequence: Synthetic oligonucleotide
  Sense strand starting at position 2563 of SEQ ID NO: 1882396
uuugaauucugucucuagu

SEQ ID NO: 2117863 - RNA, 19 nt, Artificial Sequence
  Description of Artificial Sequence: Synthetic oligonucleotide
  Antisense strand to SEQ ID NO: 2117862
acuagagacagaauucaaa

SEQ ID NO: 2117864 - RNA, 19 nt, Artificial Sequence
  Description of Artificial Sequence: Synthetic oligonucleotide
  Sense strand starting at position 2565 of SEQ ID NO: 1882396
ugaauucugucucuaguca

SEQ ID NO: 2117865 - RNA, 19 nt, Artificial Sequence
  Description of Artificial Sequence: Synthetic oligonucleotide
  Antisense strand to SEQ ID NO: 2117864
ugacuagagacagaauuca

SEQ ID NO: 2117866 - RNA, 19 nt, Artificial Sequence
  Description of Artificial Sequence: Synthetic oligonucleotide
  Sense strand starting at position 2595 of SEQ ID NO: 1882396
ugguguuucucacuagauu

SEQ ID NO: 2117867 - RNA, 19 nt, Artificial Sequence
  Description of Artificial Sequence: Synthetic oligonucleotide
  Antisense strand to SEQ ID NO: 2117866
aaucuagugagaaacacca

SEQ ID NO: 2117868 - RNA, 19 nt, Artificial Sequence
  Description of Artificial Sequence: Synthetic oligonucleotide
  Sense strand starting at position 2596 of SEQ ID NO: 1882396
gguguuucucacuagauua

SEQ ID NO: 2117869 - RNA, 19 nt, Artificial Sequence
  Description of Artificial Sequence: Synthetic oligonucleotide
  Antisense strand to SEQ ID NO: 2117868
uaaucuagugagaaacacc

SEQ ID NO: 2117870 - RNA, 19 nt, Artificial Sequence
  Description of Artificial Sequence: Synthetic oligonucleotide
  Sense strand starting at position 2676 of SEQ ID NO: 1882396
gguggaucacgcugaggaa

SEQ ID NO: 2117871 - RNA, 19 nt, Artificial Sequence
  Description of Artificial Sequence: Synthetic oligonucleotide
  Antisense strand to SEQ ID NO: 2117870
uuccucagcgugauccacc

SEQ ID NO: 2117872 - RNA, 19 nt, Artificial Sequence
  Description of Artificial Sequence: Synthetic oligonucleotide
  Sense strand starting at position 2747 of SEQ ID NO: 1882396
cugugagucugggugaaug

SEQ ID NO: 2117873 - RNA, 19 nt, Artificial Sequence
  Description of Artificial Sequence: Synthetic oligonucleotide
  Antisense strand to SEQ ID NO: 2117872
cauucacccagacucacag

SEQ ID NO: 2117874 - RNA, 19 nt, Artificial Sequence
  Description of Artificial Sequence: Synthetic oligonucleotide
  Sense strand starting at position 2796 of SEQ ID NO: 1882396
ggugcacccucuuuaauca

SEQ ID NO: 2117875 - RNA, 19 nt, Artificial Sequence
  Description of Artificial Sequence: Synthetic oligonucleotide
  Antisense strand to SEQ ID NO: 2117874
ugauuaaagagggugcacc

SEQ ID NO: 2117876 - RNA, 19 nt, Artificial Sequence
  Description of Artificial Sequence: Synthetic oligonucleotide
  Sense strand starting at position 2815 of SEQ ID NO: 1882396
ccuacuguauuugaugaua

SEQ ID NO: 2117877 - RNA, 19 nt, Artificial Sequence
  Description of Artificial Sequence: Synthetic oligonucleotide
  Antisense strand to SEQ ID NO: 2117876
uaucaucaaauacaguagg

SEQ ID NO: 2117878 - RNA, 19 nt, Artificial Sequence
  Description of Artificial Sequence: Synthetic oligonucleotide
  Sense strand starting at position 2871 of SEQ ID NO: 1882396
aaauaauauguguggaagu

SEQ ID NO: 2117879 - RNA, 19 nt, Artificial Sequence
  Description of Artificial Sequence: Synthetic oligonucleotide
  Antisense strand to SEQ ID NO: 2117878
acuuccacacauauuauuu

SEQ ID NO: 2117880 - RNA, 19 nt, Artificial Sequence
  Description of Artificial Sequence: Synthetic oligonucleotide
  Sense strand starting at position 2873 of SEQ ID NO: 1882396
auaauauguguggaaguga

SEQ ID NO: 2117881 - RNA, 19 nt, Artificial Sequence
  Description of Artificial Sequence: Synthetic oligonucleotide
  Antisense strand to SEQ ID NO: 2117880
ucacuuccacacauauuau

SEQ ID NO: 2117882 - RNA, 19 nt, Artificial Sequence
  Description of Artificial Sequence: Synthetic oligonucleotide
  Sense strand starting at position 2901 of SEQ ID NO: 1882396
uuucuauguggcuaacaaa

SEQ ID NO: 2117883 - RNA, 19 nt, Artificial Sequence
  Description of Artificial Sequence: Synthetic oligonucleotide
  Antisense strand to SEQ ID NO: 2117882
uuuguuagccacauagaaa

SEQ ID NO: 2117884 - RNA, 19 nt, Artificial Sequence
  Description of Artificial Sequence: Synthetic oligonucleotide
  Sense strand starting at position 2944 of SEQ ID NO: 1882396
ccgugacacucaccuauaa

SEQ ID NO: 2117885 - RNA, 19 nt, Artificial Sequence
  Description of Artificial Sequence: Synthetic oligonucleotide
  Antisense strand to SEQ ID NO: 2117884
uuauaggugagugucacgg

SEQ ID NO: 2117886 - RNA, 19 nt, Artificial Sequence
  Description of Artificial Sequence: Synthetic oligonucleotide
  Sense strand starting at position 3010 of SEQ ID NO: 1882396
caugccauuugggaaauga

SEQ ID NO: 2117887 - RNA, 19 nt, Artificial Sequence
  Description of Artificial Sequence: Synthetic oligonucleotide
  Antisense strand to SEQ ID NO: 2117886
ucauuucccaaauggcaug

SEQ ID NO: 2117888 - RNA, 19 nt, Artificial Sequence
  Description of Artificial Sequence: Synthetic oligonucleotide
  Sense strand starting at position 3066 of SEQ ID NO: 1882396
aggagaugugccgagauga

SEQ ID NO: 2117889 - RNA, 19 nt, Artificial Sequence
  Description of Artificial Sequence: Synthetic oligonucleotide
  Antisense strand to SEQ ID NO: 2117888
ucaucucggcacaucuccu

SEQ ID NO: 2117890 - RNA, 19 nt, Artificial Sequence
  Description of Artificial Sequence: Synthetic oligonucleotide
  Sense strand starting at position 3079 of SEQ ID NO: 1882396
agaugaucacgcuauuaca

SEQ ID NO: 2117891 - RNA, 19 nt, Artificial Sequence
  Description of Artificial Sequence: Synthetic oligonucleotide
  Antisense strand to SEQ ID NO: 2117890
uguaauagcgugaucaucu

SEQ ID NO: 2117892 - RNA, 19 nt, Artificial Sequence
  Description of Artificial Sequence: Synthetic oligonucleotide
  Sense strand starting at position 3132 of SEQ ID NO: 1882396
caaggcuucuaguuaugag

SEQ ID NO: 2117893 - RNA, 19 nt, Artificial Sequence
  Description of Artificial Sequence: Synthetic oligonucleotide
  Antisense strand to SEQ ID NO: 2117892
cucauaacuagaagccuug

SEQ ID NO: 2117894 - RNA, 19 nt, Artificial Sequence
  Description of Artificial Sequence: Synthetic oligonucleotide
  Sense strand starting at position 3207 of SEQ ID NO: 1882396
aaagaaugcguauaauaug

SEQ ID NO: 2117895 - RNA, 19 nt, Artificial Sequence
  Description of Artificial Sequence: Synthetic oligonucleotide
  Antisense strand to SEQ ID NO: 2117894
cauauuauacgcauucuuu

SEQ ID NO: 2117896 - RNA, 19 nt, Artificial Sequence
  Description of Artificial Sequence: Synthetic oligonucleotide
  Sense strand starting at position 3212 of SEQ ID NO: 1882396
augcguauaauauggauga

SEQ ID NO: 2117897 - RNA, 19 nt, Artificial Sequence
  Description of Artificial Sequence: Synthetic oligonucleotide
  Antisense strand to SEQ ID NO: 2117896
ucauccauauuauacgcau

SEQ ID NO: 2117898 - RNA, 19 nt, Artificial Sequence
  Description of Artificial Sequence: Synthetic oligonucleotide
  Sense strand starting at position 3214 of SEQ ID NO: 1882396
gcguauaauauggaugaau

SEQ ID NO: 2117899 - RNA, 19 nt, Artificial Sequence
  Description of Artificial Sequence: Synthetic oligonucleotide
  Antisense strand to SEQ ID NO: 2117898
auucauccauauuauacgc

SEQ ID NO: 2117900 - RNA, 19 nt, Artificial Sequence
  Description of Artificial Sequence: Synthetic oligonucleotide
  Sense strand starting at position 3258 of SEQ ID NO: 1882396
uuuacauaauuggcuugaa

SEQ ID NO: 2117901 - RNA, 19 nt, Artificial Sequence
  Description of Artificial Sequence: Synthetic oligonucleotide
  Antisense strand to SEQ ID NO: 2117900
uucaagccaauuauguaaa

SEQ ID NO: 2117902 - RNA, 19 nt, Artificial Sequence
  Description of Artificial Sequence: Synthetic oligonucleotide
  Sense strand starting at position 3259 of SEQ ID NO: 1882396
uuacauaauuggcuugaaa

SEQ ID NO: 2117903 - RNA, 19 nt, Artificial Sequence
  Description of Artificial Sequence: Synthetic oligonucleotide
  Antisense strand to SEQ ID NO: 2117902
uuucaagccaauuauguaa

SEQ ID NO: 2117904 - RNA, 19 nt, Artificial Sequence
  Description of Artificial Sequence: Synthetic oligonucleotide
  Sense strand starting at position 3261 of SEQ ID NO: 1882396
acauaauuggcuugaaagg

SEQ ID NO: 2117905 - RNA, 19 nt, Artificial Sequence
  Description of Artificial Sequence: Synthetic oligonucleotide
  Antisense strand to SEQ ID NO: 2117904
ccuuucaagccaauuaugu

SEQ ID NO: 2117906 - RNA, 19 nt, Artificial Sequence
  Description of Artificial Sequence: Synthetic oligonucleotide
  Sense strand starting at position 3469 of SEQ ID NO: 1882396
aaauuuacguucuggaaga

SEQ ID NO: 2117907 - RNA, 19 nt, Artificial Sequence
  Description of Artificial Sequence: Synthetic oligonucleotide
  Antisense strand to SEQ ID NO: 2117906
ucuuccagaacguaaauuu

SEQ ID NO: 2117908 - RNA, 19 nt, Artificial Sequence
  Description of Artificial Sequence: Synthetic oligonucleotide
  Sense strand starting at position 3550 of SEQ ID NO: 1882396
uucuguuuaguccacauca

SEQ ID NO: 2117909 - RNA, 19 nt, Artificial Sequence
  Description of Artificial Sequence: Synthetic oligonucleotide
  Antisense strand to SEQ ID NO: 2117908
ugauguggacuaaacagaa

SEQ ID NO: 2117910 - RNA, 19 nt, Artificial Sequence
  Description of Artificial Sequence: Synthetic oligonucleotide
  Sense strand starting at position 3552 of SEQ ID NO: 1882396
cuguuuaguccacaucaca

SEQ ID NO: 2117911 - RNA, 19 nt, Artificial Sequence
  Description of Artificial Sequence: Synthetic oligonucleotide
  Antisense strand to SEQ ID NO: 2117910
ugugauguggacuaaacag

SEQ ID NO: 2117912 - RNA, 19 nt, Artificial Sequence
  Description of Artificial Sequence: Synthetic oligonucleotide
  Sense strand starting at position 3620 of SEQ ID NO: 1882396
auaucuccauguguguuaa

SEQ ID NO: 2117913 - RNA, 19 nt, Artificial Sequence
  Description of Artificial Sequence: Synthetic oligonucleotide
  Antisense strand to SEQ ID NO: 2117912
uuaacacacauggagauau

SEQ ID NO: 2117914 - RNA, 19 nt, Artificial Sequence
  Description of Artificial Sequence: Synthetic oligonucleotide
  Sense strand starting at position 3659 of SEQ ID NO: 1882396
gucuaucuuguguauuaau

SEQ ID NO: 2117915 - RNA, 19 nt, Artificial Sequence
  Description of Artificial Sequence: Synthetic oligonucleotide
  Antisense strand to SEQ ID NO: 2117914
auuaauacacaagauagac

SEQ ID NO: 2117916 - RNA, 19 nt, Artificial Sequence
  Description of Artificial Sequence: Synthetic oligonucleotide
  Sense strand starting at position 3688 of SEQ ID NO: 1882396
caggaaaguuucccgggau

SEQ ID NO: 2117917 - RNA, 19 nt, Artificial Sequence
  Description of Artificial Sequence: Synthetic oligonucleotide
  Antisense strand to SEQ ID NO: 2117916
aucccgggaaacuuuccug

SEQ ID NO: 2117918 - RNA, 19 nt, Artificial Sequence
  Description of Artificial Sequence: Synthetic oligonucleotide
  Sense strand starting at position 3836 of SEQ ID NO: 1882396
ggcaaaugcucccuggaaa

SEQ ID NO: 2117919 - RNA, 19 nt, Artificial Sequence
  Description of Artificial Sequence: Synthetic oligonucleotide
  Antisense strand to SEQ ID NO: 2117918
uuuccagggagcauuugcc

SEQ ID NO: 2117920 - RNA, 19 nt, Artificial Sequence
  Description of Artificial Sequence: Synthetic oligonucleotide
  Sense strand starting at position 3837 of SEQ ID NO: 1882396
gcaaaugcucccuggaaac

SEQ ID NO: 2117921 - RNA, 19 nt, Artificial Sequence
  Description of Artificial Sequence: Synthetic oligonucleotide
  Antisense strand to SEQ ID NO: 2117920
guuuccagggagcauuugc

SEQ ID NO: 2117922 - RNA, 19 nt, Artificial Sequence
  Description of Artificial Sequence: Synthetic oligonucleotide
  Sense strand starting at position 3859 of SEQ ID NO: 1882396
gugggauccuguguaacug

SEQ ID NO: 2117923 - RNA, 19 nt, Artificial Sequence
  Description of Artificial Sequence: Synthetic oligonucleotide
  Antisense strand to SEQ ID NO: 2117922
caguuacacaggaucccac

SEQ ID NO: 2117924 - RNA, 19 nt, Artificial Sequence
  Description of Artificial Sequence: Synthetic oligonucleotide
  Sense strand starting at position 3907 of SEQ ID NO: 1882396
ccuuaauauugcucugaag

SEQ ID NO: 2117925 - RNA, 19 nt, Artificial Sequence
  Description of Artificial Sequence: Synthetic oligonucleotide
  Antisense strand to SEQ ID NO: 2117924
cuucagagcaauauuaagg

SEQ ID NO: 2117926 - RNA, 19 nt, Artificial Sequence
  Description of Artificial Sequence: Synthetic oligonucleotide
  Sense strand starting at position 3909 of SEQ ID NO: 1882396
uuaauauugcucugaagac

SEQ ID NO: 2117927 - RNA, 19 nt, Artificial Sequence
  Description of Artificial Sequence: Synthetic oligonucleotide
  Antisense strand to SEQ ID NO: 2117926
gucuucagagcaauauuaa

SEQ ID NO: 2117928 - RNA, 19 nt, Artificial Sequence
  Description of Artificial Sequence: Synthetic oligonucleotide
  Sense strand starting at position 3958 of SEQ ID NO: 1882396
uuaauaguucugggauauc

SEQ ID NO: 2117929 - RNA, 19 nt, Artificial Sequence
  Description of Artificial Sequence: Synthetic oligonucleotide
  Antisense strand to SEQ ID NO: 2117928
gauaucccagaacuauuaa

SEQ ID NO: 2117930 - RNA, 19 nt, Artificial Sequence
  Description of Artificial Sequence: Synthetic oligonucleotide
  Sense strand starting at position 48 of SEQ ID NO: 1882397
cagagacauugaucauguu

SEQ ID NO: 2117931 - RNA, 19 nt, Artificial Sequence
  Description of Artificial Sequence: Synthetic oligonucleotide
  Antisense strand to SEQ ID NO: 2117930
aacaugaucaaugucucug

SEQ ID NO: 2117932 - RNA, 19 nt, Artificial Sequence
  Description of Artificial Sequence: Synthetic oligonucleotide
  Sense strand starting at position 393 of SEQ ID NO: 1882397
uuaaguaacuugccagaau

SEQ ID NO: 2117933 - RNA, 19 nt, Artificial Sequence
  Description of Artificial Sequence: Synthetic oligonucleotide
  Antisense strand to SEQ ID NO: 2117932
auucuggcaaguuacuuaa

SEQ ID NO: 2117934 - RNA, 19 nt, Artificial Sequence
  Description of Artificial Sequence: Synthetic oligonucleotide
  Sense strand starting at position 396 of SEQ ID NO: 1882397
aguaacuugccagaaucca

SEQ ID NO: 2117935 - RNA, 19 nt, Artificial Sequence
  Description of Artificial Sequence: Synthetic oligonucleotide
  Antisense strand to SEQ ID NO: 2117934
uggauucuggcaaguuacu

SEQ ID NO: 2117936 - RNA, 19 nt, Artificial Sequence
  Description of Artificial Sequence: Synthetic oligonucleotide
  Sense strand starting at position 405 of SEQ ID NO: 1882397
ccagaauccacguggaaag

SEQ ID NO: 2117937 - RNA, 19 nt, Artificial Sequence
  Description of Artificial Sequence: Synthetic oligonucleotide
  Antisense strand to SEQ ID NO: 2117936
cuuuccacguggauucugg

SEQ ID NO: 2117938 - RNA, 19 nt, Artificial Sequence
  Description of Artificial Sequence: Synthetic oligonucleotide
  Sense strand starting at position 412 of SEQ ID NO: 1882397
ccacguggaaagugaugaa

SEQ ID NO: 2117939 - RNA, 19 nt, Artificial Sequence
  Description of Artificial Sequence: Synthetic oligonucleotide
  Antisense strand to SEQ ID NO: 2117938
uucaucacuuuccacgugg

SEQ ID NO: 2117940 - RNA, 19 nt, Artificial Sequence
  Description of Artificial Sequence: Synthetic oligonucleotide
  Sense strand starting at position 527 of SEQ ID NO: 1882397
ucuugcuuugaugaaguca

SEQ ID NO: 2117941 - RNA, 19 nt, Artificial Sequence
  Description of Artificial Sequence: Synthetic oligonucleotide
  Antisense strand to SEQ ID NO: 2117940
ugacuucaucaaagcaaga

SEQ ID NO: 2117942 - RNA, 19 nt, Artificial Sequence
  Description of Artificial Sequence: Synthetic oligonucleotide
  Sense strand starting at position 621 of SEQ ID NO: 1882397
aagaaugugccugagucau

SEQ ID NO: 2117943 - RNA, 19 nt, Artificial Sequence
  Description of Artificial Sequence: Synthetic oligonucleotide
  Antisense strand to SEQ ID NO: 2117942
augacucaggcacauucuu

SEQ ID NO: 2117944 - RNA, 19 nt, Artificial Sequence
  Description of Artificial Sequence: Synthetic oligonucleotide
  Sense strand starting at position 667 of SEQ ID NO: 1882397
aggguagucacaggcagaa

SEQ ID NO: 2117945 - RNA, 19 nt, Artificial Sequence
  Description of Artificial Sequence: Synthetic oligonucleotide
  Antisense strand to SEQ ID NO: 2117944
uucugccugugacuacccu

SEQ ID NO: 2117946 - RNA, 19 nt, Artificial Sequence
  Description of Artificial Sequence: Synthetic oligonucleotide
  Sense strand starting at position 888 of SEQ ID NO: 1882397
cugguaaauuuccaagaug

SEQ ID NO: 2117947 - RNA, 19 nt, Artificial Sequence
  Description of Artificial Sequence: Synthetic oligonucleotide
  Antisense strand to SEQ ID NO: 2117946
caucuuggaaauuuaccag

SEQ ID NO: 2117948 - RNA, 19 nt, Artificial Sequence
  Description of Artificial Sequence: Synthetic oligonucleotide
  Sense strand starting at position 957 of SEQ ID NO: 1882397
ccgagauucccagggacag

SEQ ID NO: 2117949 - RNA, 19 nt, Artificial Sequence
  Description of Artificial Sequence: Synthetic oligonucleotide
  Antisense strand to SEQ ID NO: 2117948
cugucccugggaaucucgg

SEQ ID NO: 2117950 - RNA, 19 nt, Artificial Sequence
  Description of Artificial Sequence: Synthetic oligonucleotide
  Sense strand starting at position 1139 of SEQ ID NO: 1882397
ggaaaugaaaucugguuuc

SEQ ID NO: 2117951 - RNA, 19 nt, Artificial Sequence
  Description of Artificial Sequence: Synthetic oligonucleotide
  Antisense strand to SEQ ID NO: 2117950
gaaaccagauuucauuucc

SEQ ID NO: 2117952 - RNA, 19 nt, Artificial Sequence
  Description of Artificial Sequence: Synthetic oligonucleotide
  Sense strand starting at position 1200 of SEQ ID NO: 1882397
gggcuaauaucuuuaugac

SEQ ID NO: 2117953 - RNA, 19 nt, Artificial Sequence
  Description of Artificial Sequence: Synthetic oligonucleotide
  Antisense strand to SEQ ID NO: 2117952
gucauaaagauauuagccc

SEQ ID NO: 2117954 - RNA, 19 nt, Artificial Sequence
  Description of Artificial Sequence: Synthetic oligonucleotide
  Sense strand starting at position 1201 of SEQ ID NO: 1882397
ggcuaauaucuuuaugaca

SEQ ID NO: 2117955 - RNA, 19 nt, Artificial Sequence
  Description of Artificial Sequence: Synthetic oligonucleotide
  Antisense strand to SEQ ID NO: 2117954
ugucauaaagauauuagcc

SEQ ID NO: 2117956 - RNA, 19 nt, Artificial Sequence
  Description of Artificial Sequence: Synthetic oligonucleotide
  Sense strand starting at position 1294 of SEQ ID NO: 1882397
uagcauaggcuggauuaaa

SEQ ID NO: 2117957 - RNA, 19 nt, Artificial Sequence
  Description of Artificial Sequence: Synthetic oligonucleotide
  Antisense strand to SEQ ID NO: 2117956
uuuaauccagccuaugcua

SEQ ID NO: 2117958 - RNA, 19 nt, Artificial Sequence
  Description of Artificial Sequence: Synthetic oligonucleotide
  Sense strand starting at position 1305 of SEQ ID NO: 1882397
ggauuaaagucagcaugag

SEQ ID NO: 2117959 - RNA, 19 nt, Artificial Sequence
  Description of Artificial Sequence: Synthetic oligonucleotide
  Antisense strand to SEQ ID NO: 2117958
cucaugcugacuuuaaucc

SEQ ID NO: 2117960 - RNA, 19 nt, Artificial Sequence
  Description of Artificial Sequence: Synthetic oligonucleotide
  Sense strand starting at position 1388 of SEQ ID NO: 1882397
gucaaauaugugcagagga

SEQ ID NO: 2117961 - RNA, 19 nt, Artificial Sequence
  Description of Artificial Sequence: Synthetic oligonucleotide
  Antisense strand to SEQ ID NO: 2117960
uccucugcacauauuugac

SEQ ID NO: 2117962 - RNA, 19 nt, Artificial Sequence
  Description of Artificial Sequence: Synthetic oligonucleotide
  Sense strand starting at position 1857 of SEQ ID NO: 1882397
guaacuuaccacugaggga

SEQ ID NO: 2117963 - RNA, 19 nt, Artificial Sequence
  Description of Artificial Sequence: Synthetic oligonucleotide
  Antisense strand to SEQ ID NO: 2117962
ucccucagugguaaguuac

SEQ ID NO: 2117964 - RNA, 19 nt, Artificial Sequence
  Description of Artificial Sequence: Synthetic oligonucleotide
  Sense strand starting at position 1980 of SEQ ID NO: 1882397
aucaaaguccugcaugagu

SEQ ID NO: 2117965 - RNA, 19 nt, Artificial Sequence
  Description of Artificial Sequence: Synthetic oligonucleotide
  Antisense strand to SEQ ID NO: 2117964
acucaugcaggacuuugau

SEQ ID NO: 2117966 - RNA, 19 nt, Artificial Sequence
  Description of Artificial Sequence: Synthetic oligonucleotide
  Sense strand starting at position 2002 of SEQ ID NO: 1882397
agcugauuggcugaaccua

SEQ ID NO: 2117967 - RNA, 19 nt, Artificial Sequence
  Description of Artificial Sequence: Synthetic oligonucleotide
  Antisense strand to SEQ ID NO: 2117966
uagguucagccaaucagcu

SEQ ID NO: 2117968 - RNA, 19 nt, Artificial Sequence
  Description of Artificial Sequence: Synthetic oligonucleotide
  Sense strand starting at position 2041 of SEQ ID NO: 1882397
ugccaaggagucugggaaa

SEQ ID NO: 2117969 - RNA, 19 nt, Artificial Sequence
  Description of Artificial Sequence: Synthetic oligonucleotide
  Antisense strand to SEQ ID NO: 2117968
uuucccagacuccuuggca

SEQ ID NO: 2117970 - RNA, 19 nt, Artificial Sequence
  Description of Artificial Sequence: Synthetic oligonucleotide
  Sense strand starting at position 2223 of SEQ ID NO: 1882397
uggcaugagagccauccua

SEQ ID NO: 2117971 - RNA, 19 nt, Artificial Sequence
  Description of Artificial Sequence: Synthetic oligonucleotide
  Antisense strand to SEQ ID NO: 2117970
uaggauggcucucaugcca

SEQ ID NO: 2117972 - RNA, 19 nt, Artificial Sequence
  Description of Artificial Sequence: Synthetic oligonucleotide
  Sense strand starting at position 2248 of SEQ ID NO: 1882397
gugugcagucacgcuuuau

SEQ ID NO: 2117973 - RNA, 19 nt, Artificial Sequence
  Description of Artificial Sequence: Synthetic oligonucleotide
  Antisense strand to SEQ ID NO: 2117972
auaaagcgugacugcacac

SEQ ID NO: 2117974 - RNA, 19 nt, Artificial Sequence
  Description of Artificial Sequence: Synthetic oligonucleotide
  Sense strand starting at position 2249 of SEQ ID NO: 1882397
ugugcagucacgcuuuauu

SEQ ID NO: 2117975 - RNA, 19 nt, Artificial Sequence
  Description of Artificial Sequence: Synthetic oligonucleotide
  Antisense strand to SEQ ID NO: 2117974
aauaaagcgugacugcaca

SEQ ID NO: 2117976 - RNA, 19 nt, Artificial Sequence
  Description of Artificial Sequence: Synthetic oligonucleotide
  Sense strand starting at position 2256 of SEQ ID NO: 1882397
ucacgcuuuauugagaaga

SEQ ID NO: 2117977 - RNA, 19 nt, Artificial Sequence
  Description of Artificial Sequence: Synthetic oligonucleotide
  Antisense strand to SEQ ID NO: 2117976
ucuucucaauaaagcguga

SEQ ID NO: 2117978 - RNA, 19 nt, Artificial Sequence
  Description of Artificial Sequence: Synthetic oligonucleotide
  Sense strand starting at position 2270 of SEQ ID NO: 1882397
gaagauucugaaggucagu

SEQ ID NO: 2117979 - RNA, 19 nt, Artificial Sequence
  Description of Artificial Sequence: Synthetic oligonucleotide
  Antisense strand to SEQ ID NO: 2117978
acugaccuucagaaucuuc

SEQ ID NO: 2117980 - RNA, 19 nt, Artificial Sequence
  Description of Artificial Sequence: Synthetic oligonucleotide
  Sense strand starting at position 2313 of SEQ ID NO: 1882397
gguucugacagauauggug

SEQ ID NO: 2117981 - RNA, 19 nt, Artificial Sequence
  Description of Artificial Sequence: Synthetic oligonucleotide
  Antisense strand to SEQ ID NO: 2117980
caccauaucugucagaacc

SEQ ID NO: 2117982 - RNA, 19 nt, Artificial Sequence
  Description of Artificial Sequence: Synthetic oligonucleotide
  Sense strand starting at position 2379 of SEQ ID NO: 1882397
gugugcgcccaugugauaa

SEQ ID NO: 2117983 - RNA, 19 nt, Artificial Sequence
  Description of Artificial Sequence: Synthetic oligonucleotide
  Antisense strand to SEQ ID NO: 2117982
uuaucacaugggcgcacac

SEQ ID NO: 2117984 - RNA, 19 nt, Artificial Sequence
  Description of Artificial Sequence: Synthetic oligonucleotide
  Sense strand starting at position 2578 of SEQ ID NO: 1882397
auaguacauccucagucua

SEQ ID NO: 2117985 - RNA, 19 nt, Artificial Sequence
  Description of Artificial Sequence: Synthetic oligonucleotide
  Antisense strand to SEQ ID NO: 2117984
uagacugaggauguacuau

SEQ ID NO: 2117986 - RNA, 19 nt, Artificial Sequence
  Description of Artificial Sequence: Synthetic oligonucleotide
  Sense strand starting at position 2602 of SEQ ID NO: 1882397
cugccagaaccuugauaug

SEQ ID NO: 2117987 - RNA, 19 nt, Artificial Sequence
  Description of Artificial Sequence: Synthetic oligonucleotide
  Antisense strand to SEQ ID NO: 2117986
cauaucaagguucuggcag

SEQ ID NO: 2117988 - RNA, 19 nt, Artificial Sequence
  Description of Artificial Sequence: Synthetic oligonucleotide
  Sense strand starting at position 2641 of SEQ ID NO: 1882397
uguucuuaagaagggaauu

SEQ ID NO: 2117989 - RNA, 19 nt, Artificial Sequence
  Description of Artificial Sequence: Synthetic oligonucleotide
  Antisense strand to SEQ ID NO: 2117988
aauucccuucuuaagaaca

SEQ ID NO: 2117990 - RNA, 19 nt, Artificial Sequence
  Description of Artificial Sequence: Synthetic oligonucleotide
  Sense strand starting at position 2685 of SEQ ID NO: 1882397
acacucugacuguaguaga

SEQ ID NO: 2117991 - RNA, 19 nt, Artificial Sequence
  Description of Artificial Sequence: Synthetic oligonucleotide
  Antisense strand to SEQ ID NO: 2117990
ucuacuacagucagagugu

SEQ ID NO: 2117992 - RNA, 19 nt, Artificial Sequence
  Description of Artificial Sequence: Synthetic oligonucleotide
  Sense strand starting at position 2710 of SEQ ID NO: 1882397
ucauauuuguggcuucuca

SEQ ID NO: 2117993 - RNA, 19 nt, Artificial Sequence
  Description of Artificial Sequence: Synthetic oligonucleotide
  Antisense strand to SEQ ID NO: 2117992
ugagaagccacaaauauga

SEQ ID NO: 2117994 - RNA, 19 nt, Artificial Sequence
  Description of Artificial Sequence: Synthetic oligonucleotide
  Sense strand starting at position 2797 of SEQ ID NO: 1882397
gaagucagagaucgaguca

SEQ ID NO: 2117995 - RNA, 19 nt, Artificial Sequence
  Description of Artificial Sequence: Synthetic oligonucleotide
  Antisense strand to SEQ ID NO: 2117994
ugacucgaucucugacuuc

SEQ ID NO: 2117996 - RNA, 19 nt, Artificial Sequence
  Description of Artificial Sequence: Synthetic oligonucleotide
  Sense strand starting at position 2802 of SEQ ID NO: 1882397
cagagaucgagucagaguu

SEQ ID NO: 2117997 - RNA, 19 nt, Artificial Sequence
  Description of Artificial Sequence: Synthetic oligonucleotide
  Antisense strand to SEQ ID NO: 2117996
aacucugacucgaucucug

SEQ ID NO: 2117998 - RNA, 19 nt, Artificial Sequence
  Description of Artificial Sequence: Synthetic oligonucleotide
  Sense strand starting at position 3424 of SEQ ID NO: 1882397
ccaguuucccuccaugauc

SEQ ID NO: 2117999 - RNA, 19 nt, Artificial Sequence
  Description of Artificial Sequence: Synthetic oligonucleotide
  Antisense strand to SEQ ID NO: 2117998
gaucauggagggaaacugg

SEQ ID NO: 2118000 - RNA, 19 nt, Artificial Sequence
  Description of Artificial Sequence: Synthetic oligonucleotide
  Sense strand starting at position 3462 of SEQ ID NO: 1882397
agggcauuguucuuggaaa

SEQ ID NO: 2118001 - RNA, 19 nt, Artificial Sequence
  Description of Artificial Sequence: Synthetic oligonucleotide
  Antisense strand to SEQ ID NO: 2118000
uuuccaagaacaaugcccu

SEQ ID NO: 2118002 - RNA, 19 nt, Artificial Sequence
  Description of Artificial Sequence: Synthetic oligonucleotide
  Sense strand starting at position 3603 of SEQ ID NO: 1882397
ugaugugcuagauaagcca

SEQ ID NO: 2118003 - RNA, 19 nt, Artificial Sequence
  Description of Artificial Sequence: Synthetic oligonucleotide
  Antisense strand to SEQ ID NO: 2118002
uggcuuaucuagcacauca

SEQ ID NO: 2118004 - RNA, 19 nt, Artificial Sequence
  Description of Artificial Sequence: Synthetic oligonucleotide
  Sense strand starting at position 3817 of SEQ ID NO: 1882397
acuggauuguuaucaccaa

SEQ ID NO: 2118005 - RNA, 19 nt, Artificial Sequence
  Description of Artificial Sequence: Synthetic oligonucleotide
  Antisense strand to SEQ ID NO: 2118004
uuggugauaacaauccagu

SEQ ID NO: 2118006 - RNA, 19 nt, Artificial Sequence
  Description of Artificial Sequence: Synthetic oligonucleotide
  Sense strand starting at position 3835 of SEQ ID NO: 1882397
acaauuugugcagggcuua

SEQ ID NO: 2118007 - RNA, 19 nt, Artificial Sequence
  Description of Artificial Sequence: Synthetic oligonucleotide
  Antisense strand to SEQ ID NO: 2118006
uaagcccugcacaaauugu

SEQ ID NO: 2118008 - RNA, 19 nt, Artificial Sequence
  Description of Artificial Sequence: Synthetic oligonucleotide
  Sense strand starting at position 3933 of SEQ ID NO: 1882397
cuggauuccuaacccagau

SEQ ID NO: 2118009 - RNA, 19 nt, Artificial Sequence
  Description of Artificial Sequence: Synthetic oligonucleotide
  Antisense strand to SEQ ID NO: 2118008
aucuggguuaggaauccag

SEQ ID NO: 2118010 - RNA, 19 nt, Artificial Sequence
  Description of Artificial Sequence: Synthetic oligonucleotide
  Sense strand starting at position 142 of SEQ ID NO: 1882399
gacgcagacucugugcuua

SEQ ID NO: 2118011 - RNA, 19 nt, Artificial Sequence
  Description of Artificial Sequence: Synthetic oligonucleotide
  Antisense strand to SEQ ID NO: 2118010
uaagcacagagucugcguc

SEQ ID NO: 2118012 - RNA, 19 nt, Artificial Sequence
  Description of Artificial Sequence: Synthetic oligonucleotide
  Sense strand starting at position 147 of SEQ ID NO: 1882399
agacucugugcuuaccaua

SEQ ID NO: 2118013 - RNA, 19 nt, Artificial Sequence
  Description of Artificial Sequence: Synthetic oligonucleotide
  Antisense strand to SEQ ID NO: 2118012
uaugguaagcacagagucu

SEQ ID NO: 2118014 - RNA, 19 nt, Artificial Sequence
  Description of Artificial Sequence: Synthetic oligonucleotide
  Sense strand starting at position 263 of SEQ ID NO: 1882399
aaugaacucccuugggagu

SEQ ID NO: 2118015 - RNA, 19 nt, Artificial Sequence
  Description of Artificial Sequence: Synthetic oligonucleotide
  Antisense strand to SEQ ID NO: 2118014
acucccaagggaguucauu

SEQ ID NO: 2118016 - RNA, 19 nt, Artificial Sequence
  Description of Artificial Sequence: Synthetic oligonucleotide
  Sense strand starting at position 431 of SEQ ID NO: 1882399
gugaaacuauauggucaug

SEQ ID NO: 2118017 - RNA, 19 nt, Artificial Sequence
  Description of Artificial Sequence: Synthetic oligonucleotide
  Antisense strand to SEQ ID NO: 2118016
caugaccauauaguuucac

SEQ ID NO: 2118018 - RNA, 19 nt, Artificial Sequence
  Description of Artificial Sequence: Synthetic oligonucleotide
  Sense strand starting at position 436 of SEQ ID NO: 1882399
acuauauggucaugaacac

SEQ ID NO: 2118019 - RNA, 19 nt, Artificial Sequence
  Description of Artificial Sequence: Synthetic oligonucleotide
  Antisense strand to SEQ ID NO: 2118018
guguucaugaccauauagu

SEQ ID NO: 2118020 - RNA, 19 nt, Artificial Sequence
  Description of Artificial Sequence: Synthetic oligonucleotide
  Sense strand starting at position 454 of SEQ ID NO: 1882399
cgggcauguucugaacucu

SEQ ID NO: 2118021 - RNA, 19 nt, Artificial Sequence
  Description of Artificial Sequence: Synthetic oligonucleotide
  Antisense strand to SEQ ID NO: 2118020
agaguucagaacaugcccg

SEQ ID NO: 2118022 - RNA, 19 nt, Artificial Sequence
  Description of Artificial Sequence: Synthetic oligonucleotide
  Sense strand starting at position 460 of SEQ ID NO: 1882399
uguucugaacucugugaaa

SEQ ID NO: 2118023 - RNA, 19 nt, Artificial Sequence
  Description of Artificial Sequence: Synthetic oligonucleotide
  Antisense strand to SEQ ID NO: 2118022
uuucacagaguucagaaca

SEQ ID NO: 2118024 - RNA, 19 nt, Artificial Sequence
  Description of Artificial Sequence: Synthetic oligonucleotide
  Sense strand starting at position 462 of SEQ ID NO: 1882399
uucugaacucugugaaacc

SEQ ID NO: 2118025 - RNA, 19 nt, Artificial Sequence
  Description of Artificial Sequence: Synthetic oligonucleotide
  Antisense strand to SEQ ID NO: 2118024
gguuucacagaguucagaa

SEQ ID NO: 2118026 - RNA, 19 nt, Artificial Sequence
  Description of Artificial Sequence: Synthetic oligonucleotide
  Sense strand starting at position 548 of SEQ ID NO: 1882399
cgcagaggacaguacuauu

SEQ ID NO: 2118027 - RNA, 19 nt, Artificial Sequence
  Description of Artificial Sequence: Synthetic oligonucleotide
  Antisense strand to SEQ ID NO: 2118026
aauaguacuguccucugcg

SEQ ID NO: 2118028 - RNA, 19 nt, Artificial Sequence
  Description of Artificial Sequence: Synthetic oligonucleotide
  Sense strand starting at position 839 of SEQ ID NO: 1882399
gcagaaugguccgucggca

SEQ ID NO: 2118029 - RNA, 19 nt, Artificial Sequence
  Description of Artificial Sequence: Synthetic oligonucleotide
  Antisense strand to SEQ ID NO: 2118028
ugccgacggaccauucugc

SEQ ID NO: 2118030 - RNA, 19 nt, Artificial Sequence
  Description of Artificial Sequence: Synthetic oligonucleotide
  Sense strand starting at position 1045 of SEQ ID NO: 1882399
gcuucuuucugcgaggcca

SEQ ID NO: 2118031 - RNA, 19 nt, Artificial Sequence
  Description of Artificial Sequence: Synthetic oligonucleotide
  Antisense strand to SEQ ID NO: 2118030
uggccucgcagaaagaagc

SEQ ID NO: 2118032 - RNA, 19 nt, Artificial Sequence
  Description of Artificial Sequence: Synthetic oligonucleotide
  Sense strand starting at position 1216 of SEQ ID NO: 1882399
caagcuuucguggagguga

SEQ ID NO: 2118033 - RNA, 19 nt, Artificial Sequence
  Description of Artificial Sequence: Synthetic oligonucleotide
  Antisense strand to SEQ ID NO: 2118032
ucaccuccacgaaagcuug

SEQ ID NO: 2118034 - RNA, 19 nt, Artificial Sequence
  Description of Artificial Sequence: Synthetic oligonucleotide
  Sense strand starting at position 1514 of SEQ ID NO: 1882399
uguggacucacucgcauua

SEQ ID NO: 2118035 - RNA, 19 nt, Artificial Sequence
  Description of Artificial Sequence: Synthetic oligonucleotide
  Antisense strand to SEQ ID NO: 2118034
uaaugcgagugaguccaca

SEQ ID NO: 2118036 - RNA, 19 nt, Artificial Sequence
  Description of Artificial Sequence: Synthetic oligonucleotide
  Sense strand starting at position 1516 of SEQ ID NO: 1882399
uggacucacucgcauuaca

SEQ ID NO: 2118037 - RNA, 19 nt, Artificial Sequence
  Description of Artificial Sequence: Synthetic oligonucleotide
  Antisense strand to SEQ ID NO: 2118036
uguaaugcgagugagucca

SEQ ID NO: 2118038 - RNA, 19 nt, Artificial Sequence
  Description of Artificial Sequence: Synthetic oligonucleotide
  Sense strand starting at position 1545 of SEQ ID NO: 1882399
cuauacaccuguuuguaaa

SEQ ID NO: 2118039 - RNA, 19 nt, Artificial Sequence
  Description of Artificial Sequence: Synthetic oligonucleotide
  Antisense strand to SEQ ID NO: 2118038
uuuacaaacagguguauag

SEQ ID NO: 2118040 - RNA, 19 nt, Artificial Sequence
  Description of Artificial Sequence: Synthetic oligonucleotide
  Sense strand starting at position 1558 of SEQ ID NO: 1882399
uguaaaggguccuccuaga

SEQ ID NO: 2118041 - RNA, 19 nt, Artificial Sequence
  Description of Artificial Sequence: Synthetic oligonucleotide
  Antisense strand to SEQ ID NO: 2118040
ucuaggaggacccuuuaca

SEQ ID NO: 2118042 - RNA, 19 nt, Artificial Sequence
  Description of Artificial Sequence: Synthetic oligonucleotide
  Sense strand starting at position 1563 of SEQ ID NO: 1882399
aggguccuccuagaaugua

SEQ ID NO: 2118043 - RNA, 19 nt, Artificial Sequence
  Description of Artificial Sequence: Synthetic oligonucleotide
  Antisense strand to SEQ ID NO: 2118042
uacauucuaggaggacccu

SEQ ID NO: 2118044 - RNA, 19 nt, Artificial Sequence
  Description of Artificial Sequence: Synthetic oligonucleotide
  Sense strand starting at position 1660 of SEQ ID NO: 1882399
cccagauguccauagcagu

SEQ ID NO: 2118045 - RNA, 19 nt, Artificial Sequence
  Description of Artificial Sequence: Synthetic oligonucleotide
  Antisense strand to SEQ ID NO: 2118044
acugcuauggacaucuggg

SEQ ID NO: 2118046 - RNA, 19 nt, Artificial Sequence
  Description of Artificial Sequence: Synthetic oligonucleotide
  Sense strand starting at position 1888 of SEQ ID NO: 1882399
gcccucugcugacagguua

SEQ ID NO: 2118047 - RNA, 19 nt, Artificial Sequence
  Description of Artificial Sequence: Synthetic oligonucleotide
  Antisense strand to SEQ ID NO: 2118046
uaaccugucagcagagggc

SEQ ID NO: 2118048 - RNA, 19 nt, Artificial Sequence
  Description of Artificial Sequence: Synthetic oligonucleotide
  Sense strand starting at position 1896 of SEQ ID NO: 1882399
cugacagguuaagucaaga

SEQ ID NO: 2118049 - RNA, 19 nt, Artificial Sequence
  Description of Artificial Sequence: Synthetic oligonucleotide
  Antisense strand to SEQ ID NO: 2118048
ucuugacuuaaccugucag

SEQ ID NO: 2118050 - RNA, 19 nt, Artificial Sequence
  Description of Artificial Sequence: Synthetic oligonucleotide
  Sense strand starting at position 2454 of SEQ ID NO: 1882399
cccugauccuucuagucau

SEQ ID NO: 2118051 - RNA, 19 nt, Artificial Sequence
  Description of Artificial Sequence: Synthetic oligonucleotide
  Antisense strand to SEQ ID NO: 2118050
augacuagaaggaucaggg

SEQ ID NO: 2118052 - RNA, 19 nt, Artificial Sequence
  Description of Artificial Sequence: Synthetic oligonucleotide
  Sense strand starting at position 2457 of SEQ ID NO: 1882399
ugauccuucuagucauagu

SEQ ID NO: 2118053 - RNA, 19 nt, Artificial Sequence
  Description of Artificial Sequence: Synthetic oligonucleotide
  Antisense strand to SEQ ID NO: 2118052
acuaugacuagaaggauca

SEQ ID NO: 2118054 - RNA, 19 nt, Artificial Sequence
  Description of Artificial Sequence: Synthetic oligonucleotide
  Sense strand starting at position 3339 of SEQ ID NO: 1882399
agagccaggugcuuuaauu

SEQ ID NO: 2118055 - RNA, 19 nt, Artificial Sequence
  Description of Artificial Sequence: Synthetic oligonucleotide
  Antisense strand to SEQ ID NO: 2118054
aauuaaagcaccuggcucu

SEQ ID NO: 2118056 - RNA, 19 nt, Artificial Sequence
  Description of Artificial Sequence: Synthetic oligonucleotide
  Sense strand starting at position 3346 of SEQ ID NO: 1882399
ggugcuuuaauuggaggua

SEQ ID NO: 2118057 - RNA, 19 nt, Artificial Sequence
  Description of Artificial Sequence: Synthetic oligonucleotide
  Antisense strand to SEQ ID NO: 2118056
uaccuccaauuaaagcacc

SEQ ID NO: 2118058 - RNA, 19 nt, Artificial Sequence
  Description of Artificial Sequence: Synthetic oligonucleotide
  Sense strand starting at position 3347 of SEQ ID NO: 1882399
gugcuuuaauuggagguaa

SEQ ID NO: 2118059 - RNA, 19 nt, Artificial Sequence
  Description of Artificial Sequence: Synthetic oligonucleotide
  Antisense strand to SEQ ID NO: 2118058
uuaccuccaauuaaagcac

SEQ ID NO: 2118060 - RNA, 19 nt, Artificial Sequence
  Description of Artificial Sequence: Synthetic oligonucleotide
  Sense strand starting at position 3349 of SEQ ID NO: 1882399
gcuuuaauuggagguaauu

SEQ ID NO: 2118061 - RNA, 19 nt, Artificial Sequence
  Description of Artificial Sequence: Synthetic oligonucleotide
  Antisense strand to SEQ ID NO: 2118060
aauuaccuccaauuaaagc

SEQ ID NO: 2118062 - RNA, 19 nt, Artificial Sequence
  Description of Artificial Sequence: Synthetic oligonucleotide
  Sense strand starting at position 3444 of SEQ ID NO: 1882399
ugaccuaacugggcucaaa

SEQ ID NO: 2118063 - RNA, 19 nt, Artificial Sequence
  Description of Artificial Sequence: Synthetic oligonucleotide
  Antisense strand to SEQ ID NO: 2118062
uuugagcccaguuagguca

SEQ ID NO: 2118064 - RNA, 19 nt, Artificial Sequence
  Description of Artificial Sequence: Synthetic oligonucleotide
  Sense strand starting at position 3572 of SEQ ID NO: 1882399
uaggguggcucugcagaaa

SEQ ID NO: 2118065 - RNA, 19 nt, Artificial Sequence
  Description of Artificial Sequence: Synthetic oligonucleotide
  Antisense strand to SEQ ID NO: 2118064
uuucugcagagccacccua

SEQ ID NO: 2118066 - RNA, 19 nt, Artificial Sequence
  Description of Artificial Sequence: Synthetic oligonucleotide
  Sense strand starting at position 3655 of SEQ ID NO: 1882399
gggaauuggagaggugcaa

SEQ ID NO: 2118067 - RNA, 19 nt, Artificial Sequence
  Description of Artificial Sequence: Synthetic oligonucleotide
  Antisense strand to SEQ ID NO: 2118066
uugcaccucuccaauuccc

SEQ ID NO: 2118068 - RNA, 19 nt, Artificial Sequence
  Description of Artificial Sequence: Synthetic oligonucleotide
  Sense strand starting at position 3698 of SEQ ID NO: 1882399
ccucuccugucacguauaa

SEQ ID NO: 2118069 - RNA, 19 nt, Artificial Sequence
  Description of Artificial Sequence: Synthetic oligonucleotide
  Antisense strand to SEQ ID NO: 2118068
uuauacgugacaggagagg

SEQ ID NO: 2118070 - RNA, 19 nt, Artificial Sequence
  Description of Artificial Sequence: Synthetic oligonucleotide
  Sense strand starting at position 3732 of SEQ ID NO: 1882399
ggucauugcugucacccaa

SEQ ID NO: 2118071 - RNA, 19 nt, Artificial Sequence
  Description of Artificial Sequence: Synthetic oligonucleotide
  Antisense strand to SEQ ID NO: 2118070
uugggugacagcaaugacc

SEQ ID NO: 2118072 - RNA, 19 nt, Artificial Sequence
  Description of Artificial Sequence: Synthetic oligonucleotide
  Sense strand starting at position 3766 of SEQ ID NO: 1882399
cccuccuuuggucagugaa

SEQ ID NO: 2118073 - RNA, 19 nt, Artificial Sequence
  Description of Artificial Sequence: Synthetic oligonucleotide
  Antisense strand to SEQ ID NO: 2118072
uucacugaccaaaggaggg

SEQ ID NO: 2118074 - RNA, 19 nt, Artificial Sequence
  Description of Artificial Sequence: Synthetic oligonucleotide
  Sense strand starting at position 3768 of SEQ ID NO: 1882399
cuccuuuggucagugaagu

SEQ ID NO: 2118075 - RNA, 19 nt, Artificial Sequence
  Description of Artificial Sequence: Synthetic oligonucleotide
  Antisense strand to SEQ ID NO: 2118074
acuucacugaccaaaggag

SEQ ID NO: 2118076 - RNA, 19 nt, Artificial Sequence
  Description of Artificial Sequence: Synthetic oligonucleotide
  Sense strand starting at position 3769 of SEQ ID NO: 1882399
uccuuuggucagugaaguc

SEQ ID NO: 2118077 - RNA, 19 nt, Artificial Sequence
  Description of Artificial Sequence: Synthetic oligonucleotide
  Antisense strand to SEQ ID NO: 2118076
gacuucacugaccaaagga

SEQ ID NO: 2118078 - RNA, 19 nt, Artificial Sequence
  Description of Artificial Sequence: Synthetic oligonucleotide
  Sense strand starting at position 3836 of SEQ ID NO: 1882399
gccuuccugcuucgggaaa

SEQ ID NO: 2118079 - RNA, 19 nt, Artificial Sequence
  Description of Artificial Sequence: Synthetic oligonucleotide
  Antisense strand to SEQ ID NO: 2118078
uuucccgaagcaggaaggc

SEQ ID NO: 2118080 - RNA, 19 nt, Artificial Sequence
  Description of Artificial Sequence: Synthetic oligonucleotide
  Sense strand starting at position 3837 of SEQ ID NO: 1882399
ccuuccugcuucgggaaau

SEQ ID NO: 2118081 - RNA, 19 nt, Artificial Sequence
  Description of Artificial Sequence: Synthetic oligonucleotide
  Antisense strand to SEQ ID NO: 2118080
auuucccgaagcaggaagg

SEQ ID NO: 2118082 - RNA, 19 nt, Artificial Sequence
  Description of Artificial Sequence: Synthetic oligonucleotide
  Sense strand starting at position 3838 of SEQ ID NO: 1882399
cuuccugcuucgggaaauc

SEQ ID NO: 2118083 - RNA, 19 nt, Artificial Sequence
  Description of Artificial Sequence: Synthetic oligonucleotide
  Antisense strand to SEQ ID NO: 2118082
gauuucccgaagcaggaag

SEQ ID NO: 2118084 - RNA, 19 nt, Artificial Sequence
  Description of Artificial Sequence: Synthetic oligonucleotide
  Sense strand starting at position 3849 of SEQ ID NO: 1882399
gggaaaucauuccaauaac

SEQ ID NO: 2118085 - RNA, 19 nt, Artificial Sequence
  Description of Artificial Sequence: Synthetic oligonucleotide
  Antisense strand to SEQ ID NO: 2118084
guuauuggaaugauuuccc

SEQ ID NO: 2118086 - RNA, 19 nt, Artificial Sequence
  Description of Artificial Sequence: Synthetic oligonucleotide
  Sense strand starting at position 75 of SEQ ID NO: 1882398
cugccuucuuuagggugaa

SEQ ID NO: 2118087 - RNA, 19 nt, Artificial Sequence
  Description of Artificial Sequence: Synthetic oligonucleotide
  Antisense strand to SEQ ID NO: 2118086
uucacccuaaagaaggcag

SEQ ID NO: 2118088 - RNA, 19 nt, Artificial Sequence
  Description of Artificial Sequence: Synthetic oligonucleotide
  Sense strand starting at position 76 of SEQ ID NO: 1882398
ugccuucuuuagggugaaa

SEQ ID NO: 2118089 - RNA, 19 nt, Artificial Sequence
  Description of Artificial Sequence: Synthetic oligonucleotide
  Antisense strand to SEQ ID NO: 2118088
uuucacccuaaagaaggca

SEQ ID NO: 2118090 - RNA, 19 nt, Artificial Sequence
  Description of Artificial Sequence: Synthetic oligonucleotide
  Sense strand starting at position 78 of SEQ ID NO: 1882398
ccuucuuuagggugaaacu

SEQ ID NO: 2118091 - RNA, 19 nt, Artificial Sequence
  Description of Artificial Sequence: Synthetic oligonucleotide
  Antisense strand to SEQ ID NO: 2118090
aguuucacccuaaagaagg

SEQ ID NO: 2118092 - RNA, 19 nt, Artificial Sequence
  Description of Artificial Sequence: Synthetic oligonucleotide
  Sense strand starting at position 87 of SEQ ID NO: 1882398
gggugaaacucaguaucug

SEQ ID NO: 2118093 - RNA, 19 nt, Artificial Sequence
  Description of Artificial Sequence: Synthetic oligonucleotide
  Antisense strand to SEQ ID NO: 2118092
cagauacugaguuucaccc

SEQ ID NO: 2118094 - RNA, 19 nt, Artificial Sequence
  Description of Artificial Sequence: Synthetic oligonucleotide
  Sense strand starting at position 99 of SEQ ID NO: 1882398
guaucugggcuucaggaaa

SEQ ID NO: 2118095 - RNA, 19 nt, Artificial Sequence
  Description of Artificial Sequence: Synthetic oligonucleotide
  Antisense strand to SEQ ID NO: 2118094
uuuccugaagcccagauac

SEQ ID NO: 2118096 - RNA, 19 nt, Artificial Sequence
  Description of Artificial Sequence: Synthetic oligonucleotide
  Sense strand starting at position 110 of SEQ ID NO: 1882398
ucaggaaacucccagugua

SEQ ID NO: 2118097 - RNA, 19 nt, Artificial Sequence
  Description of Artificial Sequence: Synthetic oligonucleotide
  Antisense strand to SEQ ID NO: 2118096
uacacugggaguuuccuga

SEQ ID NO: 2118098 - RNA, 19 nt, Artificial Sequence
  Description of Artificial Sequence: Synthetic oligonucleotide
  Sense strand starting at position 156 of SEQ ID NO: 1882398
ggaucucucaaaugaggca

SEQ ID NO: 2118099 - RNA, 19 nt, Artificial Sequence
  Description of Artificial Sequence: Synthetic oligonucleotide
  Antisense strand to SEQ ID NO: 2118098
ugccucauuugagagaucc

SEQ ID NO: 2118100 - RNA, 19 nt, Artificial Sequence
  Description of Artificial Sequence: Synthetic oligonucleotide
  Sense strand starting at position 313 of SEQ ID NO: 1882398
gcauaagucugucccauac

SEQ ID NO: 2118101 - RNA, 19 nt, Artificial Sequence
  Description of Artificial Sequence: Synthetic oligonucleotide
  Antisense strand to SEQ ID NO: 2118100
guaugggacagacuuaugc

SEQ ID NO: 2118102 - RNA, 19 nt, Artificial Sequence
  Description of Artificial Sequence: Synthetic oligonucleotide
  Sense strand starting at position 315 of SEQ ID NO: 1882398
auaagucugucccauacaa

SEQ ID NO: 2118103 - RNA, 19 nt, Artificial Sequence
  Description of Artificial Sequence: Synthetic oligonucleotide
  Antisense strand to SEQ ID NO: 2118102
uuguaugggacagacuuau

SEQ ID NO: 2118104 - RNA, 19 nt, Artificial Sequence
  Description of Artificial Sequence: Synthetic oligonucleotide
  Sense strand starting at position 339 of SEQ ID NO: 1882398
gggacagacuuacacuauu

SEQ ID NO: 2118105 - RNA, 19 nt, Artificial Sequence
  Description of Artificial Sequence: Synthetic oligonucleotide
  Antisense strand to SEQ ID NO: 2118104
aauaguguaagucuguccc

SEQ ID NO: 2118106 - RNA, 19 nt, Artificial Sequence
  Description of Artificial Sequence: Synthetic oligonucleotide
  Sense strand starting at position 366 of SEQ ID NO: 1882398
ccaguuuaacuggaagucu

SEQ ID NO: 2118107 - RNA, 19 nt, Artificial Sequence
  Description of Artificial Sequence: Synthetic oligonucleotide
  Antisense strand to SEQ ID NO: 2118106
agacuuccaguuaaacugg

SEQ ID NO: 2118108 - RNA, 19 nt, Artificial Sequence
  Description of Artificial Sequence: Synthetic oligonucleotide
  Sense strand starting at position 771 of SEQ ID NO: 1882398
cccauuaaugcuggcuaau

SEQ ID NO: 2118109 - RNA, 19 nt, Artificial Sequence
  Description of Artificial Sequence: Synthetic oligonucleotide
  Antisense strand to SEQ ID NO: 2118108
auuagccagcauuaauggg

SEQ ID NO: 2118110 - RNA, 19 nt, Artificial Sequence
  Description of Artificial Sequence: Synthetic oligonucleotide
  Sense strand starting at position 780 of SEQ ID NO: 1882398
gcuggcuaaucuggcuaau

SEQ ID NO: 2118111 - RNA, 19 nt, Artificial Sequence
  Description of Artificial Sequence: Synthetic oligonucleotide
  Antisense strand to SEQ ID NO: 2118110
auuagccagauuagccagc

SEQ ID NO: 2118112 - RNA, 19 nt, Artificial Sequence
  Description of Artificial Sequence: Synthetic oligonucleotide
  Sense strand starting at position 782 of SEQ ID NO: 1882398
uggcuaaucuggcuaauaa

SEQ ID NO: 2118113 - RNA, 19 nt, Artificial Sequence
  Description of Artificial Sequence: Synthetic oligonucleotide
  Antisense strand to SEQ ID NO: 2118112
uuauuagccagauuagcca

SEQ ID NO: 2118114 - RNA, 19 nt, Artificial Sequence
  Description of Artificial Sequence: Synthetic oligonucleotide
  Sense strand starting at position 783 of SEQ ID NO: 1882398
ggcuaaucuggcuaauaaa

SEQ ID NO: 2118115 - RNA, 19 nt, Artificial Sequence
  Description of Artificial Sequence: Synthetic oligonucleotide
  Antisense strand to SEQ ID NO: 2118114
uuuauuagccagauuagcc

SEQ ID NO: 2118116 - RNA, 19 nt, Artificial Sequence
  Description of Artificial Sequence: Synthetic oligonucleotide
  Sense strand starting at position 906 of SEQ ID NO: 1882398
ucgagauguagcugacguu

SEQ ID NO: 2118117 - RNA, 19 nt, Artificial Sequence
  Description of Artificial Sequence: Synthetic oligonucleotide
  Antisense strand to SEQ ID NO: 2118116
aacgucagcuacaucucga

SEQ ID NO: 2118118 - RNA, 19 nt, Artificial Sequence
  Description of Artificial Sequence: Synthetic oligonucleotide
  Sense strand starting at position 907 of SEQ ID NO: 1882398
cgagauguagcugacguuu

SEQ ID NO: 2118119 - RNA, 19 nt, Artificial Sequence
  Description of Artificial Sequence: Synthetic oligonucleotide
  Antisense strand to SEQ ID NO: 2118118
aaacgucagcuacaucucg

SEQ ID NO: 2118120 - RNA, 19 nt, Artificial Sequence
  Description of Artificial Sequence: Synthetic oligonucleotide
  Sense strand starting at position 31 of SEQ ID NO: 1882400
uugccucuucucuauggaa

SEQ ID NO: 2118121 - RNA, 19 nt, Artificial Sequence
  Description of Artificial Sequence: Synthetic oligonucleotide
  Antisense strand to SEQ ID NO: 2118120
uuccauagagaagaggcaa

SEQ ID NO: 2118122 - RNA, 19 nt, Artificial Sequence
  Description of Artificial Sequence: Synthetic oligonucleotide
  Sense strand starting at position 151 of SEQ ID NO: 1882400
uuugacugguuccuuaaau

SEQ ID NO: 2118123 - RNA, 19 nt, Artificial Sequence
  Description of Artificial Sequence: Synthetic oligonucleotide
  Antisense strand to SEQ ID NO: 2118122
auuuaaggaaccagucaaa

SEQ ID NO: 2118124 - RNA, 19 nt, Artificial Sequence
  Description of Artificial Sequence: Synthetic oligonucleotide
  Sense strand starting at position 152 of SEQ ID NO: 1882400
uugacugguuccuuaaaug

SEQ ID NO: 2118125 - RNA, 19 nt, Artificial Sequence
  Description of Artificial Sequence: Synthetic oligonucleotide
  Antisense strand to SEQ ID NO: 2118124
cauuuaaggaaccagucaa

SEQ ID NO: 2118126 - RNA, 19 nt, Artificial Sequence
  Description of Artificial Sequence: Synthetic oligonucleotide
  Sense strand starting at position 158 of SEQ ID NO: 1882400
gguuccuuaaauggaugau

SEQ ID NO: 2118127 - RNA, 19 nt, Artificial Sequence
  Description of Artificial Sequence: Synthetic oligonucleotide
  Antisense strand to SEQ ID NO: 2118126
aucauccauuuaaggaacc

SEQ ID NO: 2118128 - RNA, 19 nt, Artificial Sequence
  Description of Artificial Sequence: Synthetic oligonucleotide
  Sense strand starting at position 290 of SEQ ID NO: 1882400
uugagagaccuaugucuau

SEQ ID NO: 2118129 - RNA, 19 nt, Artificial Sequence
  Description of Artificial Sequence: Synthetic oligonucleotide
  Antisense strand to SEQ ID NO: 2118128
auagacauaggucucucaa

SEQ ID NO: 2118130 - RNA, 19 nt, Artificial Sequence
  Description of Artificial Sequence: Synthetic oligonucleotide
  Sense strand starting at position 293 of SEQ ID NO: 1882400
agagaccuaugucuauaca

SEQ ID NO: 2118131 - RNA, 19 nt, Artificial Sequence
  Description of Artificial Sequence: Synthetic oligonucleotide
  Antisense strand to SEQ ID NO: 2118130
uguauagacauaggucucu

SEQ ID NO: 2118132 - RNA, 19 nt, Artificial Sequence
  Description of Artificial Sequence: Synthetic oligonucleotide
  Sense strand starting at position 315 of SEQ ID NO: 1882400
guggucuguaaaugaauga

SEQ ID NO: 2118133 - RNA, 19 nt, Artificial Sequence
  Description of Artificial Sequence: Synthetic oligonucleotide
  Antisense strand to SEQ ID NO: 2118132
ucauucauuuacagaccac

SEQ ID NO: 2118134 - RNA, 19 nt, Artificial Sequence
  Description of Artificial Sequence: Synthetic oligonucleotide
  Sense strand starting at position 319 of SEQ ID NO: 1882400
ucuguaaaugaaugacuuu

SEQ ID NO: 2118135 - RNA, 19 nt, Artificial Sequence
  Description of Artificial Sequence: Synthetic oligonucleotide
  Antisense strand to SEQ ID NO: 2118134
aaagucauucauuuacaga

SEQ ID NO: 2118136 - RNA, 19 nt, Artificial Sequence
  Description of Artificial Sequence: Synthetic oligonucleotide
  Sense strand starting at position 366 of SEQ ID NO: 1882400
ucaagaaggugucccauau

SEQ ID NO: 2118137 - RNA, 19 nt, Artificial Sequence
  Description of Artificial Sequence: Synthetic oligonucleotide
  Antisense strand to SEQ ID NO: 2118136
auaugggacaccuucuuga

SEQ ID NO: 2118138 - RNA, 19 nt, Artificial Sequence
  Description of Artificial Sequence: Synthetic oligonucleotide
  Sense strand starting at position 370 of SEQ ID NO: 1882400
gaaggugucccauaugaug

SEQ ID NO: 2118139 - RNA, 19 nt, Artificial Sequence
  Description of Artificial Sequence: Synthetic oligonucleotide
  Antisense strand to SEQ ID NO: 2118138
caucauaugggacaccuuc

SEQ ID NO: 2118140 - RNA, 19 nt, Artificial Sequence
  Description of Artificial Sequence: Synthetic oligonucleotide
  Sense strand starting at position 405 of SEQ ID NO: 1882400
ugaacuaaugugcauacaa

SEQ ID NO: 2118141 - RNA, 19 nt, Artificial Sequence
  Description of Artificial Sequence: Synthetic oligonucleotide
  Antisense strand to SEQ ID NO: 2118140
uuguaugcacauuaguuca

SEQ ID NO: 2118142 - RNA, 19 nt, Artificial Sequence
  Description of Artificial Sequence: Synthetic oligonucleotide
  Sense strand starting at position 427 of SEQ ID NO: 1882400
cauaucgagcuguaagaaa

SEQ ID NO: 2118143 - RNA, 19 nt, Artificial Sequence
  Description of Artificial Sequence: Synthetic oligonucleotide
  Antisense strand to SEQ ID NO: 2118142
uuucuuacagcucgauaug

SEQ ID NO: 2118144 - RNA, 19 nt, Artificial Sequence
  Description of Artificial Sequence: Synthetic oligonucleotide
  Sense strand starting at position 536 of SEQ ID NO: 1882400
cuuuguuuggaguaacaga

SEQ ID NO: 2118145 - RNA, 19 nt, Artificial Sequence
  Description of Artificial Sequence: Synthetic oligonucleotide
  Antisense strand to SEQ ID NO: 2118144
ucuguuacuccaaacaaag

SEQ ID NO: 2118146 - RNA, 19 nt, Artificial Sequence
  Description of Artificial Sequence: Synthetic oligonucleotide
  Sense strand starting at position 558 of SEQ ID NO: 1882400
aggccaauugcugaggagu

SEQ ID NO: 2118147 - RNA, 19 nt, Artificial Sequence
  Description of Artificial Sequence: Synthetic oligonucleotide
  Antisense strand to SEQ ID NO: 2118146
acuccucagcaauuggccu

SEQ ID NO: 2118148 - RNA, 19 nt, Artificial Sequence
  Description of Artificial Sequence: Synthetic oligonucleotide
  Sense strand starting at position 731 of SEQ ID NO: 1882400
aggucaguauaugugaaag

SEQ ID NO: 2118149 - RNA, 19 nt, Artificial Sequence
  Description of Artificial Sequence: Synthetic oligonucleotide
  Antisense strand to SEQ ID NO: 2118148
cuuucacauauacugaccu

SEQ ID NO: 2118150 - RNA, 19 nt, Artificial Sequence
  Description of Artificial Sequence: Synthetic oligonucleotide
  Sense strand starting at position 771 of SEQ ID NO: 1882400
uuagacaagacgugaaguu

SEQ ID NO: 2118151 - RNA, 19 nt, Artificial Sequence
  Description of Artificial Sequence: Synthetic oligonucleotide
  Antisense strand to SEQ ID NO: 2118150
aacuucacgucuugucuaa

SEQ ID NO: 2118152 - RNA, 19 nt, Artificial Sequence
  Description of Artificial Sequence: Synthetic oligonucleotide
  Sense strand starting at position 804 of SEQ ID NO: 1882400
ugucaacaaucagcugauu

SEQ ID NO: 2118153 - RNA, 19 nt, Artificial Sequence
  Description of Artificial Sequence: Synthetic oligonucleotide
  Antisense strand to SEQ ID NO: 2118152
aaucagcugauuguugaca

SEQ ID NO: 2118154 - RNA, 19 nt, Artificial Sequence
  Description of Artificial Sequence: Synthetic oligonucleotide
  Sense strand starting at position 838 of SEQ ID NO: 1882400
guagcaaugagguaucauc

SEQ ID NO: 2118155 - RNA, 19 nt, Artificial Sequence
  Description of Artificial Sequence: Synthetic oligonucleotide
  Antisense strand to SEQ ID NO: 2118154
gaugauaccucauugcuac

SEQ ID NO: 2118156 - RNA, 19 nt, Artificial Sequence
  Description of Artificial Sequence: Synthetic oligonucleotide
  Sense strand starting at position 1037 of SEQ ID NO: 1882400
aaguaacuugcccauguga

SEQ ID NO: 2118157 - RNA, 19 nt, Artificial Sequence
  Description of Artificial Sequence: Synthetic oligonucleotide
  Antisense strand to SEQ ID NO: 2118156
ucacaugggcaaguuacuu

SEQ ID NO: 2118158 - RNA, 19 nt, Artificial Sequence
  Description of Artificial Sequence: Synthetic oligonucleotide
  Sense strand starting at position 1526 of SEQ ID NO: 1882400
caguuuaauggauacuagu

SEQ ID NO: 2118159 - RNA, 19 nt, Artificial Sequence
  Description of Artificial Sequence: Synthetic oligonucleotide
  Antisense strand to SEQ ID NO: 2118158
acuaguauccauuaaacug

SEQ ID NO: 2118160 - RNA, 19 nt, Artificial Sequence
  Description of Artificial Sequence: Synthetic oligonucleotide
  Sense strand starting at position 1537 of SEQ ID NO: 1882400
auacuaguacuauguagaa

SEQ ID NO: 2118161 - RNA, 19 nt, Artificial Sequence
  Description of Artificial Sequence: Synthetic oligonucleotide
  Antisense strand to SEQ ID NO: 2118160
uucuacauaguacuaguau

SEQ ID NO: 2118162 - RNA, 19 nt, Artificial Sequence
  Description of Artificial Sequence: Synthetic oligonucleotide
  Sense strand starting at position 1838 of SEQ ID NO: 1882400
gucacagagugaccugaau

SEQ ID NO: 2118163 - RNA, 19 nt, Artificial Sequence
  Description of Artificial Sequence: Synthetic oligonucleotide
  Antisense strand to SEQ ID NO: 2118162
auucaggucacucugugac

SEQ ID NO: 2118164 - RNA, 19 nt, Artificial Sequence
  Description of Artificial Sequence: Synthetic oligonucleotide
  Sense strand starting at position 1968 of SEQ ID NO: 1882400
gagcgaucugcggcuuugu

SEQ ID NO: 2118165 - RNA, 19 nt, Artificial Sequence
  Description of Artificial Sequence: Synthetic oligonucleotide
  Antisense strand to SEQ ID NO: 2118164
acaaagccgcagaucgcuc

SEQ ID NO: 2118166 - RNA, 19 nt, Artificial Sequence
  Description of Artificial Sequence: Synthetic oligonucleotide
  Sense strand starting at position 2563 of SEQ ID NO: 1882400
gagauuugccgcugcugaa

SEQ ID NO: 2118167 - RNA, 19 nt, Artificial Sequence
  Description of Artificial Sequence: Synthetic oligonucleotide
  Antisense strand to SEQ ID NO: 2118166
uucagcagcggcaaaucuc

SEQ ID NO: 2118168 - RNA, 19 nt, Artificial Sequence
  Description of Artificial Sequence: Synthetic oligonucleotide
  Sense strand starting at position 2810 of SEQ ID NO: 1882400
auuugucagucaucgcuua

SEQ ID NO: 2118169 - RNA, 19 nt, Artificial Sequence
  Description of Artificial Sequence: Synthetic oligonucleotide
  Antisense strand to SEQ ID NO: 2118168
uaagcgaugacugacaaau

SEQ ID NO: 2118170 - RNA, 19 nt, Artificial Sequence
  Description of Artificial Sequence: Synthetic oligonucleotide
  Sense strand starting at position 2815 of SEQ ID NO: 1882400
ucagucaucgcuuagauaa

SEQ ID NO: 2118171 - RNA, 19 nt, Artificial Sequence
  Description of Artificial Sequence: Synthetic oligonucleotide
  Antisense strand to SEQ ID NO: 2118170
uuaucuaagcgaugacuga

SEQ ID NO: 2118172 - RNA, 19 nt, Artificial Sequence
  Description of Artificial Sequence: Synthetic oligonucleotide
  Sense strand starting at position 3015 of SEQ ID NO: 1882400
cuccuugggcacgaguaaa

SEQ ID NO: 2118173 - RNA, 19 nt, Artificial Sequence
  Description of Artificial Sequence: Synthetic oligonucleotide
  Antisense strand to SEQ ID NO: 2118172
uuuacucgugcccaaggag

SEQ ID NO: 2118174 - RNA, 19 nt, Artificial Sequence
  Description of Artificial Sequence: Synthetic oligonucleotide
  Sense strand starting at position 3054 of SEQ ID NO: 1882400
gggaauggaccaggucuuu

SEQ ID NO: 2118175 - RNA, 19 nt, Artificial Sequence
  Description of Artificial Sequence: Synthetic oligonucleotide
  Antisense strand to SEQ ID NO: 2118174
aaagaccugguccauuccc

SEQ ID NO: 2118176 - RNA, 19 nt, Artificial Sequence
  Description of Artificial Sequence: Synthetic oligonucleotide
  Sense strand starting at position 3128 of SEQ ID NO: 1882400
cggagacgcccuuagauga

SEQ ID NO: 2118177 - RNA, 19 nt, Artificial Sequence
  Description of Artificial Sequence: Synthetic oligonucleotide
  Antisense strand to SEQ ID NO: 2118176
ucaucuaagggcgucuccg

SEQ ID NO: 2118178 - RNA, 19 nt, Artificial Sequence
  Description of Artificial Sequence: Synthetic oligonucleotide
  Sense strand starting at position 3168 of SEQ ID NO: 1882400
gguuguuuccaagaagcac

SEQ ID NO: 2118179 - RNA, 19 nt, Artificial Sequence
  Description of Artificial Sequence: Synthetic oligonucleotide
  Antisense strand to SEQ ID NO: 2118178
gugcuucuuggaaacaacc

SEQ ID NO: 2118180 - RNA, 19 nt, Artificial Sequence
  Description of Artificial Sequence: Synthetic oligonucleotide
  Sense strand starting at position 3233 of SEQ ID NO: 1882400
ucauaauucuuccugggag

SEQ ID NO: 2118181 - RNA, 19 nt, Artificial Sequence
  Description of Artificial Sequence: Synthetic oligonucleotide
  Antisense strand to SEQ ID NO: 2118180
cucccaggaagaauuauga

SEQ ID NO: 2118182 - RNA, 19 nt, Artificial Sequence
  Description of Artificial Sequence: Synthetic oligonucleotide
  Sense strand starting at position 3236 of SEQ ID NO: 1882400
uaauucuuccugggagggu

SEQ ID NO: 2118183 - RNA, 19 nt, Artificial Sequence
  Description of Artificial Sequence: Synthetic oligonucleotide
  Antisense strand to SEQ ID NO: 2118182
acccucccaggaagaauua

SEQ ID NO: 2118184 - RNA, 19 nt, Artificial Sequence
  Description of Artificial Sequence: Synthetic oligonucleotide
  Sense strand starting at position 3260 of SEQ ID NO: 1882400
ccgauuauucucuauggga

SEQ ID NO: 2118185 - RNA, 19 nt, Artificial Sequence
  Description of Artificial Sequence: Synthetic oligonucleotide
  Antisense strand to SEQ ID NO: 2118184
ucccauagagaauaaucgg

SEQ ID NO: 2118186 - RNA, 19 nt, Artificial Sequence
  Description of Artificial Sequence: Synthetic oligonucleotide
  Sense strand starting at position 3262 of SEQ ID NO: 1882400
gauuauucucuaugggauu

SEQ ID NO: 2118187 - RNA, 19 nt, Artificial Sequence
  Description of Artificial Sequence: Synthetic oligonucleotide
  Antisense strand to SEQ ID NO: 2118186
aaucccauagagaauaauc

SEQ ID NO: 2118188 - RNA, 19 nt, Artificial Sequence
  Description of Artificial Sequence: Synthetic oligonucleotide
  Sense strand starting at position 3379 of SEQ ID NO: 1882400
uuugauaaaguuugugacu

SEQ ID NO: 2118189 - RNA, 19 nt, Artificial Sequence
  Description of Artificial Sequence: Synthetic oligonucleotide
  Antisense strand to SEQ ID NO: 2118188
agucacaaacuuuaucaaa

SEQ ID NO: 2118190 - RNA, 19 nt, Artificial Sequence
  Description of Artificial Sequence: Synthetic oligonucleotide
  Sense strand starting at position 3380 of SEQ ID NO: 1882400
uugauaaaguuugugacua

SEQ ID NO: 2118191 - RNA, 19 nt, Artificial Sequence
  Description of Artificial Sequence: Synthetic oligonucleotide
  Antisense strand to SEQ ID NO: 2118190
uagucacaaacuuuaucaa

SEQ ID NO: 2118192 - RNA, 19 nt, Artificial Sequence
  Description of Artificial Sequence: Synthetic oligonucleotide
  Sense strand starting at position 3527 of SEQ ID NO: 1882400
aggaaauucuaugccaauc

SEQ ID NO: 2118193 - RNA, 19 nt, Artificial Sequence
  Description of Artificial Sequence: Synthetic oligonucleotide
  Antisense strand to SEQ ID NO: 2118192
gauuggcauagaauuuccu

SEQ ID NO: 2118194 - RNA, 19 nt, Artificial Sequence
  Description of Artificial Sequence: Synthetic oligonucleotide
  Sense strand starting at position 3640 of SEQ ID NO: 1882400
ugugucuggaaauguauuu

SEQ ID NO: 2118195 - RNA, 19 nt, Artificial Sequence
  Description of Artificial Sequence: Synthetic oligonucleotide
  Antisense strand to SEQ ID NO: 2118194
aaauacauuuccagacaca

SEQ ID NO: 2118196 - RNA, 19 nt, Artificial Sequence
  Description of Artificial Sequence: Synthetic oligonucleotide
  Sense strand starting at position 3841 of SEQ ID NO: 1882400
gguauuauaugguuaauga

SEQ ID NO: 2118197 - RNA, 19 nt, Artificial Sequence
  Description of Artificial Sequence: Synthetic oligonucleotide
  Antisense strand to SEQ ID NO: 2118196
ucauuaaccauauaauacc

SEQ ID NO: 2118198 - RNA, 19 nt, Artificial Sequence
  Description of Artificial Sequence: Synthetic oligonucleotide
  Sense strand starting at position 3966 of SEQ ID NO: 1882400
cucuuuguaggauauguuu

SEQ ID NO: 2118199 - RNA, 19 nt, Artificial Sequence
  Description of Artificial Sequence: Synthetic oligonucleotide
  Antisense strand to SEQ ID NO: 2118198
aaacauauccuacaaagag

SEQ ID NO: 2118200 - RNA, 19 nt, Artificial Sequence
  Description of Artificial Sequence: Synthetic oligonucleotide
  Sense strand starting at position 56 of SEQ ID NO: 1882401
gagccuucugcauagaaag

SEQ ID NO: 2118201 - RNA, 19 nt, Artificial Sequence
  Description of Artificial Sequence: Synthetic oligonucleotide
  Antisense strand to SEQ ID NO: 2118200
cuuucuaugcagaaggcuc

SEQ ID NO: 2118202 - RNA, 19 nt, Artificial Sequence
  Description of Artificial Sequence: Synthetic oligonucleotide
  Sense strand starting at position 334 of SEQ ID NO: 1882401
ucauaaaucaagugagacg

SEQ ID NO: 2118203 - RNA, 19 nt, Artificial Sequence
  Description of Artificial Sequence: Synthetic oligonucleotide
  Antisense strand to SEQ ID NO: 2118202
cgucucacuugauuuauga

SEQ ID NO: 2118204 - RNA, 19 nt, Artificial Sequence
  Description of Artificial Sequence: Synthetic oligonucleotide
  Sense strand starting at position 478 of SEQ ID NO: 1882401
ucagucauauaguccaaga

SEQ ID NO: 2118205 - RNA, 19 nt, Artificial Sequence
  Description of Artificial Sequence: Synthetic oligonucleotide
  Antisense strand to SEQ ID NO: 2118204
ucuuggacuauaugacuga

SEQ ID NO: 2118206 - RNA, 19 nt, Artificial Sequence
  Description of Artificial Sequence: Synthetic oligonucleotide
  Sense strand starting at position 522 of SEQ ID NO: 1882401
aguuuccauccagauaguu

SEQ ID NO: 2118207 - RNA, 19 nt, Artificial Sequence
  Description of Artificial Sequence: Synthetic oligonucleotide
  Antisense strand to SEQ ID NO: 2118206
aacuaucuggauggaaacu

SEQ ID NO: 2118208 - RNA, 19 nt, Artificial Sequence
  Description of Artificial Sequence: Synthetic oligonucleotide
  Sense strand starting at position 712 of SEQ ID NO: 1882401
guaaacaucuugcuagaca

SEQ ID NO: 2118209 - RNA, 19 nt, Artificial Sequence
  Description of Artificial Sequence: Synthetic oligonucleotide
  Antisense strand to SEQ ID NO: 2118208
ugucuagcaagauguuuac

SEQ ID NO: 2118210 - RNA, 19 nt, Artificial Sequence
  Description of Artificial Sequence: Synthetic oligonucleotide
  Sense strand starting at position 881 of SEQ ID NO: 1882401
ucucgauaaucucuugaaa

SEQ ID NO: 2118211 - RNA, 19 nt, Artificial Sequence
  Description of Artificial Sequence: Synthetic oligonucleotide
  Antisense strand to SEQ ID NO: 2118210
uuucaagagauuaucgaga

SEQ ID NO: 2118212 - RNA, 19 nt, Artificial Sequence
  Description of Artificial Sequence: Synthetic oligonucleotide
  Sense strand starting at position 915 of SEQ ID NO: 1882401
gaaguucuugguuaucgaa

SEQ ID NO: 2118213 - RNA, 19 nt, Artificial Sequence
  Description of Artificial Sequence: Synthetic oligonucleotide
  Antisense strand to SEQ ID NO: 2118212
uucgauaaccaagaacuuc

SEQ ID NO: 2118214 - RNA, 19 nt, Artificial Sequence
  Description of Artificial Sequence: Synthetic oligonucleotide
  Sense strand starting at position 947 of SEQ ID NO: 1882401
ugugacaucacuugggaag

SEQ ID NO: 2118215 - RNA, 19 nt, Artificial Sequence
  Description of Artificial Sequence: Synthetic oligonucleotide
  Antisense strand to SEQ ID NO: 2118214
cuucccaagugaugucaca

SEQ ID NO: 2118216 - RNA, 19 nt, Artificial Sequence
  Description of Artificial Sequence: Synthetic oligonucleotide
  Sense strand starting at position 948 of SEQ ID NO: 1882401
gugacaucacuugggaagu

SEQ ID NO: 2118217 - RNA, 19 nt, Artificial Sequence
  Description of Artificial Sequence: Synthetic oligonucleotide
  Antisense strand to SEQ ID NO: 2118216
acuucccaagugaugucac

SEQ ID NO: 2118218 - RNA, 19 nt, Artificial Sequence
  Description of Artificial Sequence: Synthetic oligonucleotide
  Sense strand starting at position 958 of SEQ ID NO: 1882401
uugggaaguccaggcuuau

SEQ ID NO: 2118219 - RNA, 19 nt, Artificial Sequence
  Description of Artificial Sequence: Synthetic oligonucleotide
  Antisense strand to SEQ ID NO: 2118218
auaagccuggacuucccaa

SEQ ID NO: 2118220 - RNA, 19 nt, Artificial Sequence
  Description of Artificial Sequence: Synthetic oligonucleotide
  Sense strand starting at position 977 of SEQ ID NO: 1882401
ccggcuuauccaugaacag

SEQ ID NO: 2118221 - RNA, 19 nt, Artificial Sequence
  Description of Artificial Sequence: Synthetic oligonucleotide
  Antisense strand to SEQ ID NO: 2118220
cuguucauggauaagccgg

SEQ ID NO: 2118222 - RNA, 19 nt, Artificial Sequence
  Description of Artificial Sequence: Synthetic oligonucleotide
  Sense strand starting at position 978 of SEQ ID NO: 1882401
cggcuuauccaugaacaga

SEQ ID NO: 2118223 - RNA, 19 nt, Artificial Sequence
  Description of Artificial Sequence: Synthetic oligonucleotide
  Antisense strand to SEQ ID NO: 2118222
ucuguucauggauaagccg

SEQ ID NO: 2118224 - RNA, 19 nt, Artificial Sequence
  Description of Artificial Sequence: Synthetic oligonucleotide
  Sense strand starting at position 1119 of SEQ ID NO: 1882401
aaaggaaaguguguaugua

SEQ ID NO: 2118225 - RNA, 19 nt, Artificial Sequence
  Description of Artificial Sequence: Synthetic oligonucleotide
  Antisense strand to SEQ ID NO: 2118224
uacauacacacuuuccuuu

SEQ ID NO: 2118226 - RNA, 19 nt, Artificial Sequence
  Description of Artificial Sequence: Synthetic oligonucleotide
  Sense strand starting at position 1123 of SEQ ID NO: 1882401
gaaaguguguauguagaag

SEQ ID NO: 2118227 - RNA, 19 nt, Artificial Sequence
  Description of Artificial Sequence: Synthetic oligonucleotide
  Antisense strand to SEQ ID NO: 2118226
cuucuacauacacacuuuc

SEQ ID NO: 2118228 - RNA, 19 nt, Artificial Sequence
  Description of Artificial Sequence: Synthetic oligonucleotide
  Sense strand starting at position 1320 of SEQ ID NO: 1882401
gcuagauauuuggcuagca

SEQ ID NO: 2118229 - RNA, 19 nt, Artificial Sequence
  Description of Artificial Sequence: Synthetic oligonucleotide
  Antisense strand to SEQ ID NO: 2118228
ugcuagccaaauaucuagc

SEQ ID NO: 2118230 - RNA, 19 nt, Artificial Sequence
  Description of Artificial Sequence: Synthetic oligonucleotide
  Sense strand starting at position 1433 of SEQ ID NO: 1882401
cugggcuuccauuauguca

SEQ ID NO: 2118231 - RNA, 19 nt, Artificial Sequence
  Description of Artificial Sequence: Synthetic oligonucleotide
  Antisense strand to SEQ ID NO: 2118230
ugacauaauggaagcccag

SEQ ID NO: 2118232 - RNA, 19 nt, Artificial Sequence
  Description of Artificial Sequence: Synthetic oligonucleotide
  Sense strand starting at position 1462 of SEQ ID NO: 1882401
aaauguguuggaugagauu

SEQ ID NO: 2118233 - RNA, 19 nt, Artificial Sequence
  Description of Artificial Sequence: Synthetic oligonucleotide
  Antisense strand to SEQ ID NO: 2118232
aaucucauccaacacauuu

SEQ ID NO: 2118234 - RNA, 19 nt, Artificial Sequence
  Description of Artificial Sequence: Synthetic oligonucleotide
  Sense strand starting at position 1750 of SEQ ID NO: 1882401
cauguaaaggagggaugua

SEQ ID NO: 2118235 - RNA, 19 nt, Artificial Sequence
  Description of Artificial Sequence: Synthetic oligonucleotide
  Antisense strand to SEQ ID NO: 2118234
uacaucccuccuuuacaug

SEQ ID NO: 2118236 - RNA, 19 nt, Artificial Sequence
  Description of Artificial Sequence: Synthetic oligonucleotide
  Sense strand starting at position 1932 of SEQ ID NO: 1882401
aacaaugaucuuggucgua

SEQ ID NO: 2118237 - RNA, 19 nt, Artificial Sequence
  Description of Artificial Sequence: Synthetic oligonucleotide
  Antisense strand to SEQ ID NO: 2118236
uacgaccaagaucauuguu

SEQ ID NO: 2118238 - RNA, 19 nt, Artificial Sequence
  Description of Artificial Sequence: Synthetic oligonucleotide
  Sense strand starting at position 2022 of SEQ ID NO: 1882401
ccagucauccaucaguuua

SEQ ID NO: 2118239 - RNA, 19 nt, Artificial Sequence
  Description of Artificial Sequence: Synthetic oligonucleotide
  Antisense strand to SEQ ID NO: 2118238
uaaacugauggaugacugg

SEQ ID NO: 2118240 - RNA, 19 nt, Artificial Sequence
  Description of Artificial Sequence: Synthetic oligonucleotide
  Sense strand starting at position 2024 of SEQ ID NO: 1882401
agucauccaucaguuuaga

SEQ ID NO: 2118241 - RNA, 19 nt, Artificial Sequence
  Description of Artificial Sequence: Synthetic oligonucleotide
  Antisense strand to SEQ ID NO: 2118240
ucuaaacugauggaugacu

SEQ ID NO: 2118242 - RNA, 19 nt, Artificial Sequence
  Description of Artificial Sequence: Synthetic oligonucleotide
  Sense strand starting at position 2397 of SEQ ID NO: 1882401
caugucaugguccagacuu

SEQ ID NO: 2118243 - RNA, 19 nt, Artificial Sequence
  Description of Artificial Sequence: Synthetic oligonucleotide
  Antisense strand to SEQ ID NO: 2118242
aagucuggaccaugacaug

SEQ ID NO: 2118244 - RNA, 19 nt, Artificial Sequence
  Description of Artificial Sequence: Synthetic oligonucleotide
  Sense strand starting at position 2399 of SEQ ID NO: 1882401
ugucaugguccagacuuga

SEQ ID NO: 2118245 - RNA, 19 nt, Artificial Sequence
  Description of Artificial Sequence: Synthetic oligonucleotide
  Antisense strand to SEQ ID NO: 2118244
ucaagucuggaccaugaca

SEQ ID NO: 2118246 - RNA, 19 nt, Artificial Sequence
  Description of Artificial Sequence: Synthetic oligonucleotide
  Sense strand starting at position 2635 of SEQ ID NO: 1882401
agagaaugcucugugugau

SEQ ID NO: 2118247 - RNA, 19 nt, Artificial Sequence
  Description of Artificial Sequence: Synthetic oligonucleotide
  Antisense strand to SEQ ID NO: 2118246
aucacacagagcauucucu

SEQ ID NO: 2118248 - RNA, 19 nt, Artificial Sequence
  Description of Artificial Sequence: Synthetic oligonucleotide
  Sense strand starting at position 2701 of SEQ ID NO: 1882401
uugauucuugcuuauagua

SEQ ID NO: 2118249 - RNA, 19 nt, Artificial Sequence
  Description of Artificial Sequence: Synthetic oligonucleotide
  Antisense strand to SEQ ID NO: 2118248
uacuauaagcaagaaucaa

SEQ ID NO: 2118250 - RNA, 19 nt, Artificial Sequence
  Description of Artificial Sequence: Synthetic oligonucleotide
  Sense strand starting at position 2828 of SEQ ID NO: 1882401
cuugguaggcuuuagaaga

SEQ ID NO: 2118251 - RNA, 19 nt, Artificial Sequence
  Description of Artificial Sequence: Synthetic oligonucleotide
  Antisense strand to SEQ ID NO: 2118250
ucuucuaaagccuaccaag

SEQ ID NO: 2118252 - RNA, 19 nt, Artificial Sequence
  Description of Artificial Sequence: Synthetic oligonucleotide
  Sense strand starting at position 2859 of SEQ ID NO: 1882401
ccaccuuguguggacaagu

SEQ ID NO: 2118253 - RNA, 19 nt, Artificial Sequence
  Description of Artificial Sequence: Synthetic oligonucleotide
  Antisense strand to SEQ ID NO: 2118252
acuuguccacacaaggugg

SEQ ID NO: 2118254 - RNA, 19 nt, Artificial Sequence
  Description of Artificial Sequence: Synthetic oligonucleotide
  Sense strand starting at position 2943 of SEQ ID NO: 1882401
cucacugagcugcagaaau

SEQ ID NO: 2118255 - RNA, 19 nt, Artificial Sequence
  Description of Artificial Sequence: Synthetic oligonucleotide
  Antisense strand to SEQ ID NO: 2118254
auuucugcagcucagugag

SEQ ID NO: 2118256 - RNA, 19 nt, Artificial Sequence
  Description of Artificial Sequence: Synthetic oligonucleotide
  Sense strand starting at position 2954 of SEQ ID NO: 1882401
gcagaaauuuggcagaacu

SEQ ID NO: 2118257 - RNA, 19 nt, Artificial Sequence
  Description of Artificial Sequence: Synthetic oligonucleotide
  Antisense strand to SEQ ID NO: 2118256
aguucugccaaauuucugc

SEQ ID NO: 2118258 - RNA, 19 nt, Artificial Sequence
  Description of Artificial Sequence: Synthetic oligonucleotide
  Sense strand starting at position 3084 of SEQ ID NO: 1882401
aaaguauccucucuagggu

SEQ ID NO: 2118259 - RNA, 19 nt, Artificial Sequence
  Description of Artificial Sequence: Synthetic oligonucleotide
  Antisense strand to SEQ ID NO: 2118258
acccuagagaggauacuuu

SEQ ID NO: 2118260 - RNA, 19 nt, Artificial Sequence
  Description of Artificial Sequence: Synthetic oligonucleotide
  Sense strand starting at position 3093 of SEQ ID NO: 1882401
ucucuaggguuucucuaaa

SEQ ID NO: 2118261 - RNA, 19 nt, Artificial Sequence
  Description of Artificial Sequence: Synthetic oligonucleotide
  Antisense strand to SEQ ID NO: 2118260
uuuagagaaacccuagaga

SEQ ID NO: 2118262 - RNA, 19 nt, Artificial Sequence
  Description of Artificial Sequence: Synthetic oligonucleotide
  Sense strand starting at position 3278 of SEQ ID NO: 1882401
uuuggaaaucacugacgua

SEQ ID NO: 2118263 - RNA, 19 nt, Artificial Sequence
  Description of Artificial Sequence: Synthetic oligonucleotide
  Antisense strand to SEQ ID NO: 2118262
uacgucagugauuuccaaa

SEQ ID NO: 2118264 - RNA, 19 nt, Artificial Sequence
  Description of Artificial Sequence: Synthetic oligonucleotide
  Sense strand starting at position 3401 of SEQ ID NO: 1882401
ucaagaacuuuggcuuuga

SEQ ID NO: 2118265 - RNA, 19 nt, Artificial Sequence
  Description of Artificial Sequence: Synthetic oligonucleotide
  Antisense strand to SEQ ID NO: 2118264
ucaaagccaaaguucuuga

SEQ ID NO: 2118266 - RNA, 19 nt, Artificial Sequence
  Description of Artificial Sequence: Synthetic oligonucleotide
  Sense strand starting at position 3472 of SEQ ID NO: 1882401
uuacuuaaauuguccugua

SEQ ID NO: 2118267 - RNA, 19 nt, Artificial Sequence
  Description of Artificial Sequence: Synthetic oligonucleotide
  Antisense strand to SEQ ID NO: 2118266
uacaggacaauuuaaguaa

SEQ ID NO: 2118268 - RNA, 19 nt, Artificial Sequence
  Description of Artificial Sequence: Synthetic oligonucleotide
  Sense strand starting at position 3622 of SEQ ID NO: 1882401
gcauaaaugucauuuggcu

SEQ ID NO: 2118269 - RNA, 19 nt, Artificial Sequence
  Description of Artificial Sequence: Synthetic oligonucleotide
  Antisense strand to SEQ ID NO: 2118268
agccaaaugacauuuaugc

SEQ ID NO: 2118270 - RNA, 19 nt, Artificial Sequence
  Description of Artificial Sequence: Synthetic oligonucleotide
  Sense strand starting at position 3784 of SEQ ID NO: 1882401
cuuugagauccagguuaac

SEQ ID NO: 2118271 - RNA, 19 nt, Artificial Sequence
  Description of Artificial Sequence: Synthetic oligonucleotide
  Antisense strand to SEQ ID NO: 2118270
guuaaccuggaucucaaag

SEQ ID NO: 2118272 - RNA, 19 nt, Artificial Sequence
  Description of Artificial Sequence: Synthetic oligonucleotide
  Sense strand starting at position 3867 of SEQ ID NO: 1882401
ggcuuugggaugcauguaa

SEQ ID NO: 2118273 - RNA, 19 nt, Artificial Sequence
  Description of Artificial Sequence: Synthetic oligonucleotide
  Antisense strand to SEQ ID NO: 2118272
uuacaugcaucccaaagcc

SEQ ID NO: 2118274 - RNA, 19 nt, Artificial Sequence
  Description of Artificial Sequence: Synthetic oligonucleotide
  Sense strand starting at position 3871 of SEQ ID NO: 1882401
uugggaugcauguaagguu

SEQ ID NO: 2118275 - RNA, 19 nt, Artificial Sequence
  Description of Artificial Sequence: Synthetic oligonucleotide
  Antisense strand to SEQ ID NO: 2118274
aaccuuacaugcaucccaa

SEQ ID NO: 2118276 - RNA, 19 nt, Artificial Sequence
  Description of Artificial Sequence: Synthetic oligonucleotide
  Sense strand starting at position 3879 of SEQ ID NO: 1882401
cauguaagguucucuggaa

SEQ ID NO: 2118277 - RNA, 19 nt, Artificial Sequence
  Description of Artificial Sequence: Synthetic oligonucleotide
  Antisense strand to SEQ ID NO: 2118276
uuccagagaaccuuacaug

SEQ ID NO: 2118278 - RNA, 19 nt, Artificial Sequence
  Description of Artificial Sequence: Synthetic oligonucleotide
  Sense strand starting at position 3880 of SEQ ID NO: 1882401
auguaagguucucuggaag

SEQ ID NO: 2118279 - RNA, 19 nt, Artificial Sequence
  Description of Artificial Sequence: Synthetic oligonucleotide
  Antisense strand to SEQ ID NO: 2118278
cuuccagagaaccuuacau

SEQ ID NO: 2118280 - RNA, 19 nt, Artificial Sequence
  Description of Artificial Sequence: Synthetic oligonucleotide
  Sense strand starting at position 197 of SEQ ID NO: 1882402
gccaaagacuguccuauau

SEQ ID NO: 2118281 - RNA, 19 nt, Artificial Sequence
  Description of Artificial Sequence: Synthetic oligonucleotide
  Antisense strand to SEQ ID NO: 2118280
auauaggacagucuuuggc

SEQ ID NO: 2118282 - RNA, 19 nt, Artificial Sequence
  Description of Artificial Sequence: Synthetic oligonucleotide
  Sense strand starting at position 280 of SEQ ID NO: 1882402
cagaacuauuaggucugaa

SEQ ID NO: 2118283 - RNA, 19 nt, Artificial Sequence
  Description of Artificial Sequence: Synthetic oligonucleotide
  Antisense strand to SEQ ID NO: 2118282
uucagaccuaauaguucug

SEQ ID NO: 2118284 - RNA, 19 nt, Artificial Sequence
  Description of Artificial Sequence: Synthetic oligonucleotide
  Sense strand starting at position 283 of SEQ ID NO: 1882402
aacuauuaggucugaaugu

SEQ ID NO: 2118285 - RNA, 19 nt, Artificial Sequence
  Description of Artificial Sequence: Synthetic oligonucleotide
  Antisense strand to SEQ ID NO: 2118284
acauucagaccuaauaguu

SEQ ID NO: 2118286 - RNA, 19 nt, Artificial Sequence
  Description of Artificial Sequence: Synthetic oligonucleotide
  Sense strand starting at position 491 of SEQ ID NO: 1882402
accgucuucguugugaagu

SEQ ID NO: 2118287 - RNA, 19 nt, Artificial Sequence
  Description of Artificial Sequence: Synthetic oligonucleotide
  Antisense strand to SEQ ID NO: 2118286
acuucacaacgaagacggu

SEQ ID NO: 2118288 - RNA, 19 nt, Artificial Sequence
  Description of Artificial Sequence: Synthetic oligonucleotide
  Sense strand starting at position 494 of SEQ ID NO: 1882402
gucuucguugugaaguugu

SEQ ID NO: 2118289 - RNA, 19 nt, Artificial Sequence
  Description of Artificial Sequence: Synthetic oligonucleotide
  Antisense strand to SEQ ID NO: 2118288
acaacuucacaacgaagac

SEQ ID NO: 2118290 - RNA, 19 nt, Artificial Sequence
  Description of Artificial Sequence: Synthetic oligonucleotide
  Sense strand starting at position 571 of SEQ ID NO: 1882402
gagcuugaugcugauccua

SEQ ID NO: 2118291 - RNA, 19 nt, Artificial Sequence
  Description of Artificial Sequence: Synthetic oligonucleotide
  Antisense strand to SEQ ID NO: 2118290
uaggaucagcaucaagcuc

SEQ ID NO: 2118292 - RNA, 19 nt, Artificial Sequence
  Description of Artificial Sequence: Synthetic oligonucleotide
  Sense strand starting at position 579 of SEQ ID NO: 1882402
ugcugauccuauucggaaa

SEQ ID NO: 2118293 - RNA, 19 nt, Artificial Sequence
  Description of Artificial Sequence: Synthetic oligonucleotide
  Antisense strand to SEQ ID NO: 2118292
uuuccgaauaggaucagca

SEQ ID NO: 2118294 - RNA, 19 nt, Artificial Sequence
  Description of Artificial Sequence: Synthetic oligonucleotide
  Sense strand starting at position 696 of SEQ ID NO: 1882402
auuuguauuugcuaaaguc

SEQ ID NO: 2118295 - RNA, 19 nt, Artificial Sequence
  Description of Artificial Sequence: Synthetic oligonucleotide
  Antisense strand to SEQ ID NO: 2118294
gacuuuagcaaauacaaau

SEQ ID NO: 2118296 - RNA, 19 nt, Artificial Sequence
  Description of Artificial Sequence: Synthetic oligonucleotide
  Sense strand starting at position 950 of SEQ ID NO: 1882402
cugucaucucaaggaucau

SEQ ID NO: 2118297 - RNA, 19 nt, Artificial Sequence
  Description of Artificial Sequence: Synthetic oligonucleotide
  Antisense strand to SEQ ID NO: 2118296
augauccuugagaugacag

SEQ ID NO: 2118298 - RNA, 19 nt, Artificial Sequence
  Description of Artificial Sequence: Synthetic oligonucleotide
  Sense strand starting at position 1104 of SEQ ID NO: 1882402
cuuuccucagacugagaga

SEQ ID NO: 2118299 - RNA, 19 nt, Artificial Sequence
  Description of Artificial Sequence: Synthetic oligonucleotide
  Antisense strand to SEQ ID NO: 2118298
ucucucagucugaggaaag

SEQ ID NO: 2118300 - RNA, 19 nt, Artificial Sequence
  Description of Artificial Sequence: Synthetic oligonucleotide
  Sense strand starting at position 1128 of SEQ ID NO: 1882402
gggaggauccaagguggua

SEQ ID NO: 2118301 - RNA, 19 nt, Artificial Sequence
  Description of Artificial Sequence: Synthetic oligonucleotide
  Antisense strand to SEQ ID NO: 2118300
uaccaccuuggauccuccc

SEQ ID NO: 2118302 - RNA, 19 nt, Artificial Sequence
  Description of Artificial Sequence: Synthetic oligonucleotide
  Sense strand starting at position 1234 of SEQ ID NO: 1882402
agcacuaaugcucaaaguu

SEQ ID NO: 2118303 - RNA, 19 nt, Artificial Sequence
  Description of Artificial Sequence: Synthetic oligonucleotide
  Antisense strand to SEQ ID NO: 2118302
aacuuugagcauuagugcu

SEQ ID NO: 2118304 - RNA, 19 nt, Artificial Sequence
  Description of Artificial Sequence: Synthetic oligonucleotide
  Sense strand starting at position 1244 of SEQ ID NO: 1882402
cucaaaguuguggauuaau

SEQ ID NO: 2118305 - RNA, 19 nt, Artificial Sequence
  Description of Artificial Sequence: Synthetic oligonucleotide
  Antisense strand to SEQ ID NO: 2118304
auuaauccacaacuuugag

SEQ ID NO: 2118306 - RNA, 19 nt, Artificial Sequence
  Description of Artificial Sequence: Synthetic oligonucleotide
  Sense strand starting at position 1253 of SEQ ID NO: 1882402
guggauuaauaggaagaac

SEQ ID NO: 2118307 - RNA, 19 nt, Artificial Sequence
  Description of Artificial Sequence: Synthetic oligonucleotide
  Antisense strand to SEQ ID NO: 2118306
guucuuccuauuaauccac

SEQ ID NO: 2118308 - RNA, 19 nt, Artificial Sequence
  Description of Artificial Sequence: Synthetic oligonucleotide
  Sense strand starting at position 1860 of SEQ ID NO: 1882402
ugcagacuguacucaaauu

SEQ ID NO: 2118309 - RNA, 19 nt, Artificial Sequence
  Description of Artificial Sequence: Synthetic oligonucleotide
  Antisense strand to SEQ ID NO: 2118308
aauuugaguacagucugca

SEQ ID NO: 2118310 - RNA, 19 nt, Artificial Sequence
  Description of Artificial Sequence: Synthetic oligonucleotide
  Sense strand starting at position 1940 of SEQ ID NO: 1882402
ccucaagaguccucugaga

SEQ ID NO: 2118311 - RNA, 19 nt, Artificial Sequence
  Description of Artificial Sequence: Synthetic oligonucleotide
  Antisense strand to SEQ ID NO: 2118310
ucucagaggacucuugagg

SEQ ID NO: 2118312 - RNA, 19 nt, Artificial Sequence
  Description of Artificial Sequence: Synthetic oligonucleotide
  Sense strand starting at position 1942 of SEQ ID NO: 1882402
ucaagaguccucugagagc

SEQ ID NO: 2118313 - RNA, 19 nt, Artificial Sequence
  Description of Artificial Sequence: Synthetic oligonucleotide
  Antisense strand to SEQ ID NO: 2118312
gcucucagaggacucuuga

SEQ ID NO: 2118314 - RNA, 19 nt, Artificial Sequence
  Description of Artificial Sequence: Synthetic oligonucleotide
  Sense strand starting at position 2007 of SEQ ID NO: 1882402
agaauuguugcucauggaa

SEQ ID NO: 2118315 - RNA, 19 nt, Artificial Sequence
  Description of Artificial Sequence: Synthetic oligonucleotide
  Antisense strand to SEQ ID NO: 2118314
uuccaugagcaacaauucu

SEQ ID NO: 2118316 - RNA, 19 nt, Artificial Sequence
  Description of Artificial Sequence: Synthetic oligonucleotide
  Sense strand starting at position 2031 of SEQ ID NO: 1882402
uagagaaucucagucucag

SEQ ID NO: 2118317 - RNA, 19 nt, Artificial Sequence
  Description of Artificial Sequence: Synthetic oligonucleotide
  Antisense strand to SEQ ID NO: 2118316
cugagacugagauucucua

SEQ ID NO: 2118318 - RNA, 19 nt, Artificial Sequence
  Description of Artificial Sequence: Synthetic oligonucleotide
  Sense strand starting at position 2051 of SEQ ID NO: 1882402
auucuugcauucuugggaa

SEQ ID NO: 2118319 - RNA, 19 nt, Artificial Sequence
  Description of Artificial Sequence: Synthetic oligonucleotide
  Antisense strand to SEQ ID NO: 2118318
uucccaagaaugcaagaau

SEQ ID NO: 2118320 - RNA, 19 nt, Artificial Sequence
  Description of Artificial Sequence: Synthetic oligonucleotide
  Sense strand starting at position 2053 of SEQ ID NO: 1882402
ucuugcauucuugggaaau

SEQ ID NO: 2118321 - RNA, 19 nt, Artificial Sequence
  Description of Artificial Sequence: Synthetic oligonucleotide
  Antisense strand to SEQ ID NO: 2118320
auuucccaagaaugcaaga

SEQ ID NO: 2118322 - RNA, 19 nt, Artificial Sequence
  Description of Artificial Sequence: Synthetic oligonucleotide
  Sense strand starting at position 2071 of SEQ ID NO: 1882402
ucaugauaggcuuagagug

SEQ ID NO: 2118323 - RNA, 19 nt, Artificial Sequence
  Description of Artificial Sequence: Synthetic oligonucleotide
  Antisense strand to SEQ ID NO: 2118322
cacucuaagccuaucauga

SEQ ID NO: 2118324 - RNA, 19 nt, Artificial Sequence
  Description of Artificial Sequence: Synthetic oligonucleotide
  Sense strand starting at position 2187 of SEQ ID NO: 1882402
gacagauuaauggguugua

SEQ ID NO: 2118325 - RNA, 19 nt, Artificial Sequence
  Description of Artificial Sequence: Synthetic oligonucleotide
  Antisense strand to SEQ ID NO: 2118324
uacaacccauuaaucuguc

SEQ ID NO: 2118326 - RNA, 19 nt, Artificial Sequence
  Description of Artificial Sequence: Synthetic oligonucleotide
  Sense strand starting at position 2188 of SEQ ID NO: 1882402
acagauuaauggguuguaa

SEQ ID NO: 2118327 - RNA, 19 nt, Artificial Sequence
  Description of Artificial Sequence: Synthetic oligonucleotide
  Antisense strand to SEQ ID NO: 2118326
uuacaacccauuaaucugu

SEQ ID NO: 2118328 - RNA, 19 nt, Artificial Sequence
  Description of Artificial Sequence: Synthetic oligonucleotide
  Sense strand starting at position 2190 of SEQ ID NO: 1882402
agauuaauggguuguaauu

SEQ ID NO: 2118329 - RNA, 19 nt, Artificial Sequence
  Description of Artificial Sequence: Synthetic oligonucleotide
  Antisense strand to SEQ ID NO: 2118328
aauuacaacccauuaaucu

SEQ ID NO: 2118330 - RNA, 19 nt, Artificial Sequence
  Description of Artificial Sequence: Synthetic oligonucleotide
  Sense strand starting at position 2264 of SEQ ID NO: 1882402
cugucauguuaauugaucu

SEQ ID NO: 2118331 - RNA, 19 nt, Artificial Sequence
  Description of Artificial Sequence: Synthetic oligonucleotide
  Antisense strand to SEQ ID NO: 2118330
agaucaauuaacaugacag

SEQ ID NO: 2118332 - RNA, 19 nt, Artificial Sequence
  Description of Artificial Sequence: Synthetic oligonucleotide
  Sense strand starting at position 2323 of SEQ ID NO: 1882402
gcacuuugaauugguggaa

SEQ ID NO: 2118333 - RNA, 19 nt, Artificial Sequence
  Description of Artificial Sequence: Synthetic oligonucleotide
  Antisense strand to SEQ ID NO: 2118332
uuccaccaauucaaagugc

SEQ ID NO: 2118334 - RNA, 19 nt, Artificial Sequence
  Description of Artificial Sequence: Synthetic oligonucleotide
  Sense strand starting at position 2327 of SEQ ID NO: 1882402
uuugaauugguggaagcuu

SEQ ID NO: 2118335 - RNA, 19 nt, Artificial Sequence
  Description of Artificial Sequence: Synthetic oligonucleotide
  Antisense strand to SEQ ID NO: 2118334
aagcuuccaccaauucaaa

SEQ ID NO: 2118336 - RNA, 19 nt, Artificial Sequence
  Description of Artificial Sequence: Synthetic oligonucleotide
  Sense strand starting at position 2813 of SEQ ID NO: 1882402
ugguaaagaaccuggucaa

SEQ ID NO: 2118337 - RNA, 19 nt, Artificial Sequence
  Description of Artificial Sequence: Synthetic oligonucleotide
  Antisense strand to SEQ ID NO: 2118336
uugaccagguucuuuacca

SEQ ID NO: 2118338 - RNA, 19 nt, Artificial Sequence
  Description of Artificial Sequence: Synthetic oligonucleotide
  Sense strand starting at position 2814 of SEQ ID NO: 1882402
gguaaagaaccuggucaaa

SEQ ID NO: 2118339 - RNA, 19 nt, Artificial Sequence
  Description of Artificial Sequence: Synthetic oligonucleotide
  Antisense strand to SEQ ID NO: 2118338
uuugaccagguucuuuacc

SEQ ID NO: 2118340 - RNA, 19 nt, Artificial Sequence
  Description of Artificial Sequence: Synthetic oligonucleotide
  Sense strand starting at position 2904 of SEQ ID NO: 1882402
augcauuagcaugauaaua

SEQ ID NO: 2118341 - RNA, 19 nt, Artificial Sequence
  Description of Artificial Sequence: Synthetic oligonucleotide
  Antisense strand to SEQ ID NO: 2118340
uauuaucaugcuaaugcau

SEQ ID NO: 2118342 - RNA, 19 nt, Artificial Sequence
  Description of Artificial Sequence: Synthetic oligonucleotide
  Sense strand starting at position 3060 of SEQ ID NO: 1882402
acuccuuguuaagcagaua

SEQ ID NO: 2118343 - RNA, 19 nt, Artificial Sequence
  Description of Artificial Sequence: Synthetic oligonucleotide
  Antisense strand to SEQ ID NO: 2118342
uaucugcuuaacaaggagu

SEQ ID NO: 2118344 - RNA, 19 nt, Artificial Sequence
  Description of Artificial Sequence: Synthetic oligonucleotide
  Sense strand starting at position 3063 of SEQ ID NO: 1882402
ccuuguuaagcagauaauc

SEQ ID NO: 2118345 - RNA, 19 nt, Artificial Sequence
  Description of Artificial Sequence: Synthetic oligonucleotide
  Antisense strand to SEQ ID NO: 2118344
gauuaucugcuuaacaagg

SEQ ID NO: 2118346 - RNA, 19 nt, Artificial Sequence
  Description of Artificial Sequence: Synthetic oligonucleotide
  Sense strand starting at position 3443 of SEQ ID NO: 1882402
aagacaaugcacugguuua

SEQ ID NO: 2118347 - RNA, 19 nt, Artificial Sequence
  Description of Artificial Sequence: Synthetic oligonucleotide
  Antisense strand to SEQ ID NO: 2118346
uaaaccagugcauugucuu

SEQ ID NO: 2118348 - RNA, 19 nt, Artificial Sequence
  Description of Artificial Sequence: Synthetic oligonucleotide
  Sense strand starting at position 3550 of SEQ ID NO: 1882402
augaauaauugugccaguu

SEQ ID NO: 2118349 - RNA, 19 nt, Artificial Sequence
  Description of Artificial Sequence: Synthetic oligonucleotide
  Antisense strand to SEQ ID NO: 2118348
aacuggcacaauuauucau

SEQ ID NO: 2118350 - RNA, 19 nt, Artificial Sequence
  Description of Artificial Sequence: Synthetic oligonucleotide
  Sense strand starting at position 3564 of SEQ ID NO: 1882402
caguuucuccaagggucua

SEQ ID NO: 2118351 - RNA, 19 nt, Artificial Sequence
  Description of Artificial Sequence: Synthetic oligonucleotide
  Antisense strand to SEQ ID NO: 2118350
uagacccuuggagaaacug

SEQ ID NO: 2118352 - RNA, 19 nt, Artificial Sequence
  Description of Artificial Sequence: Synthetic oligonucleotide
  Sense strand starting at position 3645 of SEQ ID NO: 1882402
gcaaguuuccucgcagcga

SEQ ID NO: 2118353 - RNA, 19 nt, Artificial Sequence
  Description of Artificial Sequence: Synthetic oligonucleotide
  Antisense strand to SEQ ID NO: 2118352
ucgcugcgaggaaacuugc

SEQ ID NO: 2118354 - RNA, 19 nt, Artificial Sequence
  Description of Artificial Sequence: Synthetic oligonucleotide
  Sense strand starting at position 3731 of SEQ ID NO: 1882402
aggagugggugucuggaaa

SEQ ID NO: 2118355 - RNA, 19 nt, Artificial Sequence
  Description of Artificial Sequence: Synthetic oligonucleotide
  Antisense strand to SEQ ID NO: 2118354
uuuccagacacccacuccu

SEQ ID NO: 2118356 - RNA, 19 nt, Artificial Sequence
  Description of Artificial Sequence: Synthetic oligonucleotide
  Sense strand starting at position 3735 of SEQ ID NO: 1882402
gugggugucuggaaagggu

SEQ ID NO: 2118357 - RNA, 19 nt, Artificial Sequence
  Description of Artificial Sequence: Synthetic oligonucleotide
  Antisense strand to SEQ ID NO: 2118356
acccuuuccagacacccac

SEQ ID NO: 2118358 - RNA, 19 nt, Artificial Sequence
  Description of Artificial Sequence: Synthetic oligonucleotide
  Sense strand starting at position 3814 of SEQ ID NO: 1882402
aguaguauaugggcaguga

SEQ ID NO: 2118359 - RNA, 19 nt, Artificial Sequence
  Description of Artificial Sequence: Synthetic oligonucleotide
  Antisense strand to SEQ ID NO: 2118358
ucacugcccauauacuacu

SEQ ID NO: 2118360 - RNA, 19 nt, Artificial Sequence
  Description of Artificial Sequence: Synthetic oligonucleotide
  Sense strand starting at position 725 of SEQ ID NO: 1882403
cacuguuagagggagugua

SEQ ID NO: 2118361 - RNA, 19 nt, Artificial Sequence
  Description of Artificial Sequence: Synthetic oligonucleotide
  Antisense strand to SEQ ID NO: 2118360
uacacucccucuaacagug

SEQ ID NO: 2118362 - RNA, 19 nt, Artificial Sequence
  Description of Artificial Sequence: Synthetic oligonucleotide
  Sense strand starting at position 942 of SEQ ID NO: 1882403
ccacuuaaaccacggauau

SEQ ID NO: 2118363 - RNA, 19 nt, Artificial Sequence
  Description of Artificial Sequence: Synthetic oligonucleotide
  Antisense strand to SEQ ID NO: 2118362
auauccgugguuuaagugg

SEQ ID NO: 2118364 - RNA, 19 nt, Artificial Sequence
  Description of Artificial Sequence: Synthetic oligonucleotide
  Sense strand starting at position 959 of SEQ ID NO: 1882403
auugccugugcuuaagaua

SEQ ID NO: 2118365 - RNA, 19 nt, Artificial Sequence
  Description of Artificial Sequence: Synthetic oligonucleotide
  Antisense strand to SEQ ID NO: 2118364
uaucuuaagcacaggcaau

SEQ ID NO: 2118366 - RNA, 19 nt, Artificial Sequence
  Description of Artificial Sequence: Synthetic oligonucleotide
  Sense strand starting at position 974 of SEQ ID NO: 1882403
gauauauuguaauugccag

SEQ ID NO: 2118367 - RNA, 19 nt, Artificial Sequence
  Description of Artificial Sequence: Synthetic oligonucleotide
  Antisense strand to SEQ ID NO: 2118366
cuggcaauuacaauauauc

SEQ ID NO: 2118368 - RNA, 19 nt, Artificial Sequence
  Description of Artificial Sequence: Synthetic oligonucleotide
  Sense strand starting at position 1114 of SEQ ID NO: 1882403
auagcauuguaggcaaaua

SEQ ID NO: 2118369 - RNA, 19 nt, Artificial Sequence
  Description of Artificial Sequence: Synthetic oligonucleotide
  Antisense strand to SEQ ID NO: 2118368
uauuugccuacaaugcuau

SEQ ID NO: 2118370 - RNA, 19 nt, Artificial Sequence
  Description of Artificial Sequence: Synthetic oligonucleotide
  Sense strand starting at position 1196 of SEQ ID NO: 1882403
uguguaauguuauugagaa

SEQ ID NO: 2118371 - RNA, 19 nt, Artificial Sequence
  Description of Artificial Sequence: Synthetic oligonucleotide
  Antisense strand to SEQ ID NO: 2118370
uucucaauaacauuacaca

SEQ ID NO: 2118372 - RNA, 19 nt, Artificial Sequence
  Description of Artificial Sequence: Synthetic oligonucleotide
  Sense strand starting at position 1260 of SEQ ID NO: 1882403
gauccuuaacauuggugga

SEQ ID NO: 2118373 - RNA, 19 nt, Artificial Sequence
  Description of Artificial Sequence: Synthetic oligonucleotide
  Antisense strand to SEQ ID NO: 2118372
uccaccaauguuaaggauc

SEQ ID NO: 2118374 - RNA, 19 nt, Artificial Sequence
  Description of Artificial Sequence: Synthetic oligonucleotide
  Sense strand starting at position 1262 of SEQ ID NO: 1882403
uccuuaacauugguggaua

SEQ ID NO: 2118375 - RNA, 19 nt, Artificial Sequence
  Description of Artificial Sequence: Synthetic oligonucleotide
  Antisense strand to SEQ ID NO: 2118374
uauccaccaauguuaagga

SEQ ID NO: 2118376 - RNA, 19 nt, Artificial Sequence
  Description of Artificial Sequence: Synthetic oligonucleotide
  Sense strand starting at position 1264 of SEQ ID NO: 1882403
cuuaacauugguggauauu

SEQ ID NO: 2118377 - RNA, 19 nt, Artificial Sequence
  Description of Artificial Sequence: Synthetic oligonucleotide
  Antisense strand to SEQ ID NO: 2118376
aauauccaccaauguuaag

SEQ ID NO: 2118378 - RNA, 19 nt, Artificial Sequence
  Description of Artificial Sequence: Synthetic oligonucleotide
  Sense strand starting at position 1314 of SEQ ID NO: 1882403
ggauaccauuagcuaugau

SEQ ID NO: 2118379 - RNA, 19 nt, Artificial Sequence
  Description of Artificial Sequence: Synthetic oligonucleotide
  Antisense strand to SEQ ID NO: 2118378
aucauagcuaaugguaucc

SEQ ID NO: 2118380 - RNA, 19 nt, Artificial Sequence
  Description of Artificial Sequence: Synthetic oligonucleotide
  Sense strand starting at position 1326 of SEQ ID NO: 1882403
cuaugauauguccagugac

SEQ ID NO: 2118381 - RNA, 19 nt, Artificial Sequence
  Description of Artificial Sequence: Synthetic oligonucleotide
  Antisense strand to SEQ ID NO: 2118380
gucacuggacauaucauag

SEQ ID NO: 2118382 - RNA, 19 nt, Artificial Sequence
  Description of Artificial Sequence: Synthetic oligonucleotide
  Sense strand starting at position 1329 of SEQ ID NO: 1882403
ugauauguccagugacacu

SEQ ID NO: 2118383 - RNA, 19 nt, Artificial Sequence
  Description of Artificial Sequence: Synthetic oligonucleotide
  Antisense strand to SEQ ID NO: 2118382
agugucacuggacauauca

SEQ ID NO: 2118384 - RNA, 19 nt, Artificial Sequence
  Description of Artificial Sequence: Synthetic oligonucleotide
  Sense strand starting at position 1424 of SEQ ID NO: 1882403
agauguggaauaugugaua

SEQ ID NO: 2118385 - RNA, 19 nt, Artificial Sequence
  Description of Artificial Sequence: Synthetic oligonucleotide
  Antisense strand to SEQ ID NO: 2118384
uaucacauauuccacaucu

SEQ ID NO: 2118386 - RNA, 19 nt, Artificial Sequence
  Description of Artificial Sequence: Synthetic oligonucleotide
  Sense strand starting at position 1466 of SEQ ID NO: 1882403
guaagagcauuccugaaga

SEQ ID NO: 2118387 - RNA, 19 nt, Artificial Sequence
  Description of Artificial Sequence: Synthetic oligonucleotide
  Antisense strand to SEQ ID NO: 2118386
ucuucaggaaugcucuuac

SEQ ID NO: 2118388 - RNA, 19 nt, Artificial Sequence
  Description of Artificial Sequence: Synthetic oligonucleotide
  Sense strand starting at position 1554 of SEQ ID NO: 1882403
gcaauaaggugguugaaug

SEQ ID NO: 2118389 - RNA, 19 nt, Artificial Sequence
  Description of Artificial Sequence: Synthetic oligonucleotide
  Antisense strand to SEQ ID NO: 2118388
cauucaaccaccuuauugc

SEQ ID NO: 2118390 - RNA, 19 nt, Artificial Sequence
  Description of Artificial Sequence: Synthetic oligonucleotide
  Sense strand starting at position 1555 of SEQ ID NO: 1882403
caauaaggugguugaaugu

SEQ ID NO: 2118391 - RNA, 19 nt, Artificial Sequence
  Description of Artificial Sequence: Synthetic oligonucleotide
  Antisense strand to SEQ ID NO: 2118390
acauucaaccaccuuauug

SEQ ID NO: 2118392 - RNA, 19 nt, Artificial Sequence
  Description of Artificial Sequence: Synthetic oligonucleotide
  Sense strand starting at position 1656 of SEQ ID NO: 1882403
uggagaacauguuuaccuu

SEQ ID NO: 2118393 - RNA, 19 nt, Artificial Sequence
  Description of Artificial Sequence: Synthetic oligonucleotide
  Antisense strand to SEQ ID NO: 2118392
aagguaaacauguucucca

SEQ ID NO: 2118394 - RNA, 19 nt, Artificial Sequence
  Description of Artificial Sequence: Synthetic oligonucleotide
  Sense strand starting at position 1670 of SEQ ID NO: 1882403
accuuugcauugguaauuu

SEQ ID NO: 2118395 - RNA, 19 nt, Artificial Sequence
  Description of Artificial Sequence: Synthetic oligonucleotide
  Antisense strand to SEQ ID NO: 2118394
aaauuaccaaugcaaaggu

SEQ ID NO: 2118396 - RNA, 19 nt, Artificial Sequence
  Description of Artificial Sequence: Synthetic oligonucleotide
  Sense strand starting at position 1830 of SEQ ID NO: 1882403
guaacuauuuaugaaacag

SEQ ID NO: 2118397 - RNA, 19 nt, Artificial Sequence
  Description of Artificial Sequence: Synthetic oligonucleotide
  Antisense strand to SEQ ID NO: 2118396
cuguuucauaaauaguuac

SEQ ID NO: 2118398 - RNA, 19 nt, Artificial Sequence
  Description of Artificial Sequence: Synthetic oligonucleotide
  Sense strand starting at position 1867 of SEQ ID NO: 1882403
augugauuuccaugucuuc

SEQ ID NO: 2118399 - RNA, 19 nt, Artificial Sequence
  Description of Artificial Sequence: Synthetic oligonucleotide
  Antisense strand to SEQ ID NO: 2118398
gaagacauggaaaucacau

SEQ ID NO: 2118400 - RNA, 19 nt, Artificial Sequence
  Description of Artificial Sequence: Synthetic oligonucleotide
  Sense strand starting at position 1919 of SEQ ID NO: 1882403
ucaguauguaguuagguua

SEQ ID NO: 2118401 - RNA, 19 nt, Artificial Sequence
  Description of Artificial Sequence: Synthetic oligonucleotide
  Antisense strand to SEQ ID NO: 2118400
uaaccuaacuacauacuga

SEQ ID NO: 2118402 - RNA, 19 nt, Artificial Sequence
  Description of Artificial Sequence: Synthetic oligonucleotide
  Sense strand starting at position 2208 of SEQ ID NO: 1882403
uggcaaaucucauccagug

SEQ ID NO: 2118403 - RNA, 19 nt, Artificial Sequence
  Description of Artificial Sequence: Synthetic oligonucleotide
  Antisense strand to SEQ ID NO: 2118402
cacuggaugagauuugcca

SEQ ID NO: 2118404 - RNA, 19 nt, Artificial Sequence
  Description of Artificial Sequence: Synthetic oligonucleotide
  Sense strand starting at position 2234 of SEQ ID NO: 1882403
ccuguacaugcuuacuuau

SEQ ID NO: 2118405 - RNA, 19 nt, Artificial Sequence
  Description of Artificial Sequence: Synthetic oligonucleotide
  Antisense strand to SEQ ID NO: 2118404
auaaguaagcauguacagg

SEQ ID NO: 2118406 - RNA, 19 nt, Artificial Sequence
  Description of Artificial Sequence: Synthetic oligonucleotide
  Sense strand starting at position 2353 of SEQ ID NO: 1882403
cuaacuugguuggaauuua

SEQ ID NO: 2118407 - RNA, 19 nt, Artificial Sequence
  Description of Artificial Sequence: Synthetic oligonucleotide
  Antisense strand to SEQ ID NO: 2118406
uaaauuccaaccaaguuag

SEQ ID NO: 2118408 - RNA, 19 nt, Artificial Sequence
  Description of Artificial Sequence: Synthetic oligonucleotide
  Sense strand starting at position 2379 of SEQ ID NO: 1882403
guauguuguggguaacauu

SEQ ID NO: 2118409 - RNA, 19 nt, Artificial Sequence
  Description of Artificial Sequence: Synthetic oligonucleotide
  Antisense strand to SEQ ID NO: 2118408
aauguuacccacaacauac

SEQ ID NO: 2118410 - RNA, 19 nt, Artificial Sequence
  Description of Artificial Sequence: Synthetic oligonucleotide
  Sense strand starting at position 2423 of SEQ ID NO: 1882403
uguaguacccuacagacua

SEQ ID NO: 2118411 - RNA, 19 nt, Artificial Sequence
  Description of Artificial Sequence: Synthetic oligonucleotide
  Antisense strand to SEQ ID NO: 2118410
uagucuguaggguacuaca

SEQ ID NO: 2118412 - RNA, 19 nt, Artificial Sequence
  Description of Artificial Sequence: Synthetic oligonucleotide
  Sense strand starting at position 2637 of SEQ ID NO: 1882403
cuguaauuaccagaaaugu

SEQ ID NO: 2118413 - RNA, 19 nt, Artificial Sequence
  Description of Artificial Sequence: Synthetic oligonucleotide
  Antisense strand to SEQ ID NO: 2118412
acauuucugguaauuacag

SEQ ID NO: 2118414 - RNA, 19 nt, Artificial Sequence
  Description of Artificial Sequence: Synthetic oligonucleotide
  Sense strand starting at position 2667 of SEQ ID NO: 1882403
aaaggcauugcugagagua

SEQ ID NO: 2118415 - RNA, 19 nt, Artificial Sequence
  Description of Artificial Sequence: Synthetic oligonucleotide
  Antisense strand to SEQ ID NO: 2118414
uacucucagcaaugccuuu

SEQ ID NO: 2118416 - RNA, 19 nt, Artificial Sequence
  Description of Artificial Sequence: Synthetic oligonucleotide
  Sense strand starting at position 3245 of SEQ ID NO: 1882403
guuauuuacuucucaacgu

SEQ ID NO: 2118417 - RNA, 19 nt, Artificial Sequence
  Description of Artificial Sequence: Synthetic oligonucleotide
  Antisense strand to SEQ ID NO: 2118416
acguugagaaguaaauaac

SEQ ID NO: 2118418 - RNA, 19 nt, Artificial Sequence
  Description of Artificial Sequence: Synthetic oligonucleotide
  Sense strand starting at position 3363 of SEQ ID NO: 1882403
aaagaaaugucagcgaaug

SEQ ID NO: 2118419 - RNA, 19 nt, Artificial Sequence
  Description of Artificial Sequence: Synthetic oligonucleotide
  Antisense strand to SEQ ID NO: 2118418
cauucgcugacauuucuuu

SEQ ID NO: 2118420 - RNA, 19 nt, Artificial Sequence
  Description of Artificial Sequence: Synthetic oligonucleotide
  Sense strand starting at position 3365 of SEQ ID NO: 1882403
agaaaugucagcgaaugua

SEQ ID NO: 2118421 - RNA, 19 nt, Artificial Sequence
  Description of Artificial Sequence: Synthetic oligonucleotide
  Antisense strand to SEQ ID NO: 2118420
uacauucgcugacauuucu

SEQ ID NO: 2118422 - RNA, 19 nt, Artificial Sequence
  Description of Artificial Sequence: Synthetic oligonucleotide
  Sense strand starting at position 3417 of SEQ ID NO: 1882403
agagauagacguuauaugu

SEQ ID NO: 2118423 - RNA, 19 nt, Artificial Sequence
  Description of Artificial Sequence: Synthetic oligonucleotide
  Antisense strand to SEQ ID NO: 2118422
acauauaacgucuaucucu

SEQ ID NO: 2118424 - RNA, 19 nt, Artificial Sequence
  Description of Artificial Sequence: Synthetic oligonucleotide
  Sense strand starting at position 3421 of SEQ ID NO: 1882403
auagacguuauauguauga

SEQ ID NO: 2118425 - RNA, 19 nt, Artificial Sequence
  Description of Artificial Sequence: Synthetic oligonucleotide
  Antisense strand to SEQ ID NO: 2118424
ucauacauauaacgucuau

SEQ ID NO: 2118426 - RNA, 19 nt, Artificial Sequence
  Description of Artificial Sequence: Synthetic oligonucleotide
  Sense strand starting at position 3423 of SEQ ID NO: 1882403
agacguuauauguaugaca

SEQ ID NO: 2118427 - RNA, 19 nt, Artificial Sequence
  Description of Artificial Sequence: Synthetic oligonucleotide
  Antisense strand to SEQ ID NO: 2118426
ugucauacauauaacgucu

SEQ ID NO: 2118428 - RNA, 19 nt, Artificial Sequence
  Description of Artificial Sequence: Synthetic oligonucleotide
  Sense strand starting at position 3425 of SEQ ID NO: 1882403
acguuauauguaugacaaa

SEQ ID NO: 2118429 - RNA, 19 nt, Artificial Sequence
  Description of Artificial Sequence: Synthetic oligonucleotide
  Antisense strand to SEQ ID NO: 2118428
uuugucauacauauaacgu

SEQ ID NO: 2118430 - RNA, 19 nt, Artificial Sequence
  Description of Artificial Sequence: Synthetic oligonucleotide
  Sense strand starting at position 3456 of SEQ ID NO: 1882403
ucagccauuguauguauuu

SEQ ID NO: 2118431 - RNA, 19 nt, Artificial Sequence
  Description of Artificial Sequence: Synthetic oligonucleotide
  Antisense strand to SEQ ID NO: 2118430
aaauacauacaauggcuga

SEQ ID NO: 2118432 - RNA, 19 nt, Artificial Sequence
  Description of Artificial Sequence: Synthetic oligonucleotide
  Sense strand starting at position 3478 of SEQ ID NO: 1882403
aagagaaaguuguugaacu

SEQ ID NO: 2118433 - RNA, 19 nt, Artificial Sequence
  Description of Artificial Sequence: Synthetic oligonucleotide
  Antisense strand to SEQ ID NO: 2118432
aguucaacaacuuucucuu

SEQ ID NO: 2118434 - RNA, 19 nt, Artificial Sequence
  Description of Artificial Sequence: Synthetic oligonucleotide
  Sense strand starting at position 3499 of SEQ ID NO: 1882403
augaauggauucccaguga

SEQ ID NO: 2118435 - RNA, 19 nt, Artificial Sequence
  Description of Artificial Sequence: Synthetic oligonucleotide
  Antisense strand to SEQ ID NO: 2118434
ucacugggaauccauucau

SEQ ID NO: 2118436 - RNA, 19 nt, Artificial Sequence
  Description of Artificial Sequence: Synthetic oligonucleotide
  Sense strand starting at position 3503 of SEQ ID NO: 1882403
auggauucccagugaugua

SEQ ID NO: 2118437 - RNA, 19 nt, Artificial Sequence
  Description of Artificial Sequence: Synthetic oligonucleotide
  Antisense strand to SEQ ID NO: 2118436
uacaucacugggaauccau

SEQ ID NO: 2118438 - RNA, 19 nt, Artificial Sequence
  Description of Artificial Sequence: Synthetic oligonucleotide
  Sense strand starting at position 3504 of SEQ ID NO: 1882403
uggauucccagugauguaa

SEQ ID NO: 2118439 - RNA, 19 nt, Artificial Sequence
  Description of Artificial Sequence: Synthetic oligonucleotide
  Antisense strand to SEQ ID NO: 2118438
uuacaucacugggaaucca

SEQ ID NO: 2118440 - RNA, 19 nt, Artificial Sequence
  Description of Artificial Sequence: Synthetic oligonucleotide
  Sense strand starting at position 54 of SEQ ID NO: 1882404
auucuaguguuaccauaug

SEQ ID NO: 2118441 - RNA, 19 nt, Artificial Sequence
  Description of Artificial Sequence: Synthetic oligonucleotide
  Antisense strand to SEQ ID NO: 2118440
cauaugguaacacuagaau

SEQ ID NO: 2118442 - RNA, 19 nt, Artificial Sequence
  Description of Artificial Sequence: Synthetic oligonucleotide
  Sense strand starting at position 254 of SEQ ID NO: 1882404
uggguauaacuuugaccca

SEQ ID NO: 2118443 - RNA, 19 nt, Artificial Sequence
  Description of Artificial Sequence: Synthetic oligonucleotide
  Antisense strand to SEQ ID NO: 2118442
ugggucaaaguuauaccca

SEQ ID NO: 2118444 - RNA, 19 nt, Artificial Sequence
  Description of Artificial Sequence: Synthetic oligonucleotide
  Sense strand starting at position 305 of SEQ ID NO: 1882404
gcagacaugggauacguua

SEQ ID NO: 2118445 - RNA, 19 nt, Artificial Sequence
  Description of Artificial Sequence: Synthetic oligonucleotide
  Antisense strand to SEQ ID NO: 2118444
uaacguaucccaugucugc

SEQ ID NO: 2118446 - RNA, 19 nt, Artificial Sequence
  Description of Artificial Sequence: Synthetic oligonucleotide
  Sense strand starting at position 343 of SEQ ID NO: 1882404
auugaaacuugcuuaaguu

SEQ ID NO: 2118447 - RNA, 19 nt, Artificial Sequence
  Description of Artificial Sequence: Synthetic oligonucleotide
  Antisense strand to SEQ ID NO: 2118446
aacuuaagcaaguuucaau

SEQ ID NO: 2118448 - RNA, 19 nt, Artificial Sequence
  Description of Artificial Sequence: Synthetic oligonucleotide
  Sense strand starting at position 344 of SEQ ID NO: 1882404
uugaaacuugcuuaaguuu

SEQ ID NO: 2118449 - RNA, 19 nt, Artificial Sequence
  Description of Artificial Sequence: Synthetic oligonucleotide
  Antisense strand to SEQ ID NO: 2118448
aaacuuaagcaaguuucaa

SEQ ID NO: 2118450 - RNA, 19 nt, Artificial Sequence
  Description of Artificial Sequence: Synthetic oligonucleotide
  Sense strand starting at position 418 of SEQ ID NO: 1882404
ggaauauacuaagaggaau

SEQ ID NO: 2118451 - RNA, 19 nt, Artificial Sequence
  Description of Artificial Sequence: Synthetic oligonucleotide
  Antisense strand to SEQ ID NO: 2118450
auuccucuuaguauauucc

SEQ ID NO: 2118452 - RNA, 19 nt, Artificial Sequence
  Description of Artificial Sequence: Synthetic oligonucleotide
  Sense strand starting at position 432 of SEQ ID NO: 1882404
ggaauacacuaagagugaa

SEQ ID NO: 2118453 - RNA, 19 nt, Artificial Sequence
  Description of Artificial Sequence: Synthetic oligonucleotide
  Antisense strand to SEQ ID NO: 2118452
uucacucuuaguguauucc

SEQ ID NO: 2118454 - RNA, 19 nt, Artificial Sequence
  Description of Artificial Sequence: Synthetic oligonucleotide
  Sense strand starting at position 639 of SEQ ID NO: 1882404
aaaugugcagucgaggaaa

SEQ ID NO: 2118455 - RNA, 19 nt, Artificial Sequence
  Description of Artificial Sequence: Synthetic oligonucleotide
  Antisense strand to SEQ ID NO: 2118454
uuuccucgacugcacauuu

SEQ ID NO: 2118456 - RNA, 19 nt, Artificial Sequence
  Description of Artificial Sequence: Synthetic oligonucleotide
  Sense strand starting at position 641 of SEQ ID NO: 1882404
augugcagucgaggaaaua

SEQ ID NO: 2118457 - RNA, 19 nt, Artificial Sequence
  Description of Artificial Sequence: Synthetic oligonucleotide
  Antisense strand to SEQ ID NO: 2118456
uauuuccucgacugcacau

SEQ ID NO: 2118458 - RNA, 19 nt, Artificial Sequence
  Description of Artificial Sequence: Synthetic oligonucleotide
  Sense strand starting at position 642 of SEQ ID NO: 1882404
ugugcagucgaggaaauau

SEQ ID NO: 2118459 - RNA, 19 nt, Artificial Sequence
  Description of Artificial Sequence: Synthetic oligonucleotide
  Antisense strand to SEQ ID NO: 2118458
auauuuccucgacugcaca

SEQ ID NO: 2118460 - RNA, 19 nt, Artificial Sequence
  Description of Artificial Sequence: Synthetic oligonucleotide
  Sense strand starting at position 735 of SEQ ID NO: 1882404
agcaaagugcuugacaaac

SEQ ID NO: 2118461 - RNA, 19 nt, Artificial Sequence
  Description of Artificial Sequence: Synthetic oligonucleotide
  Antisense strand to SEQ ID NO: 2118460
guuugucaagcacuuugcu

SEQ ID NO: 2118462 - RNA, 19 nt, Artificial Sequence
  Description of Artificial Sequence: Synthetic oligonucleotide
  Sense strand starting at position 754 of SEQ ID NO: 1882404
acuaucuuggagggaucuu

SEQ ID NO: 2118463 - RNA, 19 nt, Artificial Sequence
  Description of Artificial Sequence: Synthetic oligonucleotide
  Antisense strand to SEQ ID NO: 2118462
aagaucccuccaagauagu

SEQ ID NO: 2118464 - RNA, 19 nt, Artificial Sequence
  Description of Artificial Sequence: Synthetic oligonucleotide
  Sense strand starting at position 816 of SEQ ID NO: 1882404
uuguaacagaguuagucau

SEQ ID NO: 2118465 - RNA, 19 nt, Artificial Sequence
  Description of Artificial Sequence: Synthetic oligonucleotide
  Antisense strand to SEQ ID NO: 2118464
augacuaacucuguuacaa

SEQ ID NO: 2118466 - RNA, 19 nt, Artificial Sequence
  Description of Artificial Sequence: Synthetic oligonucleotide
  Sense strand starting at position 818 of SEQ ID NO: 1882404
guaacagaguuagucauua

SEQ ID NO: 2118467 - RNA, 19 nt, Artificial Sequence
  Description of Artificial Sequence: Synthetic oligonucleotide
  Antisense strand to SEQ ID NO: 2118466
uaaugacuaacucuguuac

SEQ ID NO: 2118468 - RNA, 19 nt, Artificial Sequence
  Description of Artificial Sequence: Synthetic oligonucleotide
  Sense strand starting at position 822 of SEQ ID NO: 1882404
cagaguuagucauuaagag

SEQ ID NO: 2118469 - RNA, 19 nt, Artificial Sequence
  Description of Artificial Sequence: Synthetic oligonucleotide
  Antisense strand to SEQ ID NO: 2118468
cucuuaaugacuaacucug

SEQ ID NO: 2118470 - RNA, 19 nt, Artificial Sequence
  Description of Artificial Sequence: Synthetic oligonucleotide
  Sense strand starting at position 831 of SEQ ID NO: 1882404
ucauuaagagauuggcuca

SEQ ID NO: 2118471 - RNA, 19 nt, Artificial Sequence
  Description of Artificial Sequence: Synthetic oligonucleotide
  Antisense strand to SEQ ID NO: 2118470
ugagccaaucucuuaauga

SEQ ID NO: 2118472 - RNA, 19 nt, Artificial Sequence
  Description of Artificial Sequence: Synthetic oligonucleotide
  Sense strand starting at position 861 of SEQ ID NO: 1882404
gaaccuggaucuguugaua

SEQ ID NO: 2118473 - RNA, 19 nt, Artificial Sequence
  Description of Artificial Sequence: Synthetic oligonucleotide
  Antisense strand to SEQ ID NO: 2118472
uaucaacagauccagguuc

SEQ ID NO: 2118474 - RNA, 19 nt, Artificial Sequence
  Description of Artificial Sequence: Synthetic oligonucleotide
  Sense strand starting at position 957 of SEQ ID NO: 1882404
gagguaauauagccauauu

SEQ ID NO: 2118475 - RNA, 19 nt, Artificial Sequence
  Description of Artificial Sequence: Synthetic oligonucleotide
  Antisense strand to SEQ ID NO: 2118474
aauauggcuauauuaccuc

SEQ ID NO: 2118476 - RNA, 19 nt, Artificial Sequence
  Description of Artificial Sequence: Synthetic oligonucleotide
  Sense strand starting at position 1103 of SEQ ID NO: 1882404
acaguuuauuacccgaaga

SEQ ID NO: 2118477 - RNA, 19 nt, Artificial Sequence
  Description of Artificial Sequence: Synthetic oligonucleotide
  Antisense strand to SEQ ID NO: 2118476
ucuucggguaauaaacugu

SEQ ID NO: 2118478 - RNA, 19 nt, Artificial Sequence
  Description of Artificial Sequence: Synthetic oligonucleotide
  Sense strand starting at position 1313 of SEQ ID NO: 1882404
gugugccuauuauuuguaa

SEQ ID NO: 2118479 - RNA, 19 nt, Artificial Sequence
  Description of Artificial Sequence: Synthetic oligonucleotide
  Antisense strand to SEQ ID NO: 2118478
uuacaaauaauaggcacac

SEQ ID NO: 2118480 - RNA, 19 nt, Artificial Sequence
  Description of Artificial Sequence: Synthetic oligonucleotide
  Sense strand starting at position 1316 of SEQ ID NO: 1882404
ugccuauuauuuguaaggu

SEQ ID NO: 2118481 - RNA, 19 nt, Artificial Sequence
  Description of Artificial Sequence: Synthetic oligonucleotide
  Antisense strand to SEQ ID NO: 2118480
accuuacaaauaauaggca

SEQ ID NO: 2118482 - RNA, 19 nt, Artificial Sequence
  Description of Artificial Sequence: Synthetic oligonucleotide
  Sense strand starting at position 1346 of SEQ ID NO: 1882404
aagguacagucguuuauag

SEQ ID NO: 2118483 - RNA, 19 nt, Artificial Sequence
  Description of Artificial Sequence: Synthetic oligonucleotide
  Antisense strand to SEQ ID NO: 2118482
cuauaaacgacuguaccuu

SEQ ID NO: 2118484 - RNA, 19 nt, Artificial Sequence
  Description of Artificial Sequence: Synthetic oligonucleotide
  Sense strand starting at position 1356 of SEQ ID NO: 1882404
cguuuauagccagugcuuu

SEQ ID NO: 2118485 - RNA, 19 nt, Artificial Sequence
  Description of Artificial Sequence: Synthetic oligonucleotide
  Antisense strand to SEQ ID NO: 2118484
aaagcacuggcuauaaacg

SEQ ID NO: 2118486 - RNA, 19 nt, Artificial Sequence
  Description of Artificial Sequence: Synthetic oligonucleotide
  Sense strand starting at position 1377 of SEQ ID NO: 1882404
ucaaguccuuucuugauag

SEQ ID NO: 2118487 - RNA, 19 nt, Artificial Sequence
  Description of Artificial Sequence: Synthetic oligonucleotide
  Antisense strand to SEQ ID NO: 2118486
cuaucaagaaaggacuuga

SEQ ID NO: 2118488 - RNA, 19 nt, Artificial Sequence
  Description of Artificial Sequence: Synthetic oligonucleotide
  Sense strand starting at position 1487 of SEQ ID NO: 1882404
aagauaguuugugugacuu

SEQ ID NO: 2118489 - RNA, 19 nt, Artificial Sequence
  Description of Artificial Sequence: Synthetic oligonucleotide
  Antisense strand to SEQ ID NO: 2118488
aagucacacaaacuaucuu

SEQ ID NO: 2118490 - RNA, 19 nt, Artificial Sequence
  Description of Artificial Sequence: Synthetic oligonucleotide
  Sense strand starting at position 1655 of SEQ ID NO: 1882404
cuagcaaacuuauuaggaa

SEQ ID NO: 2118491 - RNA, 19 nt, Artificial Sequence
  Description of Artificial Sequence: Synthetic oligonucleotide
  Antisense strand to SEQ ID NO: 2118490
uuccuaauaaguuugcuag

SEQ ID NO: 2118492 - RNA, 19 nt, Artificial Sequence
  Description of Artificial Sequence: Synthetic oligonucleotide
  Sense strand starting at position 1716 of SEQ ID NO: 1882404
cugauuaggcauuguaaag

SEQ ID NO: 2118493 - RNA, 19 nt, Artificial Sequence
  Description of Artificial Sequence: Synthetic oligonucleotide
  Antisense strand to SEQ ID NO: 2118492
cuuuacaaugccuaaucag

SEQ ID NO: 2118494 - RNA, 19 nt, Artificial Sequence
  Description of Artificial Sequence: Synthetic oligonucleotide
  Sense strand starting at position 1917 of SEQ ID NO: 1882404
agauucuuacuuugcgaca

SEQ ID NO: 2118495 - RNA, 19 nt, Artificial Sequence
  Description of Artificial Sequence: Synthetic oligonucleotide
  Antisense strand to SEQ ID NO: 2118494
ugucgcaaaguaagaaucu

SEQ ID NO: 2118496 - RNA, 19 nt, Artificial Sequence
  Description of Artificial Sequence: Synthetic oligonucleotide
  Sense strand starting at position 2033 of SEQ ID NO: 1882404
gccggagucgccuucuauu

SEQ ID NO: 2118497 - RNA, 19 nt, Artificial Sequence
  Description of Artificial Sequence: Synthetic oligonucleotide
  Antisense strand to SEQ ID NO: 2118496
aauagaaggcgacuccggc

SEQ ID NO: 2118498 - RNA, 19 nt, Artificial Sequence
  Description of Artificial Sequence: Synthetic oligonucleotide
  Sense strand starting at position 2074 of SEQ ID NO: 1882404
ugggcuuuccgacaccuga

SEQ ID NO: 2118499 - RNA, 19 nt, Artificial Sequence
  Description of Artificial Sequence: Synthetic oligonucleotide
  Antisense strand to SEQ ID NO: 2118498
ucaggugucggaaagccca

SEQ ID NO: 2118500 - RNA, 19 nt, Artificial Sequence
  Description of Artificial Sequence: Synthetic oligonucleotide
  Sense strand starting at position 2849 of SEQ ID NO: 1882404
cggucaucgcgggugacuu

SEQ ID NO: 2118501 - RNA, 19 nt, Artificial Sequence
  Description of Artificial Sequence: Synthetic oligonucleotide
  Antisense strand to SEQ ID NO: 2118500
aagucacccgcgaugaccg

SEQ ID NO: 2118502 - RNA, 19 nt, Artificial Sequence
  Description of Artificial Sequence: Synthetic oligonucleotide
  Sense strand starting at position 3016 of SEQ ID NO: 1882404
ggaagaagucguggagaga

SEQ ID NO: 2118503 - RNA, 19 nt, Artificial Sequence
  Description of Artificial Sequence: Synthetic oligonucleotide
  Antisense strand to SEQ ID NO: 2118502
ucucuccacgacuucuucc

SEQ ID NO: 2118504 - RNA, 19 nt, Artificial Sequence
  Description of Artificial Sequence: Synthetic oligonucleotide
  Sense strand starting at position 3306 of SEQ ID NO: 1882404
cuaugcugucguccaguuu

SEQ ID NO: 2118505 - RNA, 19 nt, Artificial Sequence
  Description of Artificial Sequence: Synthetic oligonucleotide
  Antisense strand to SEQ ID NO: 2118504
aaacuggacgacagcauag

SEQ ID NO: 2118506 - RNA, 19 nt, Artificial Sequence
  Description of Artificial Sequence: Synthetic oligonucleotide
  Sense strand starting at position 3368 of SEQ ID NO: 1882404
acggugcgcgaguuaucaa

SEQ ID NO: 2118507 - RNA, 19 nt, Artificial Sequence
  Description of Artificial Sequence: Synthetic oligonucleotide
  Antisense strand to SEQ ID NO: 2118506
uugauaacucgcgcaccgu

SEQ ID NO: 2118508 - RNA, 19 nt, Artificial Sequence
  Description of Artificial Sequence: Synthetic oligonucleotide
  Sense strand starting at position 3387 of SEQ ID NO: 1882404
gcgauaggccaggauaugu

SEQ ID NO: 2118509 - RNA, 19 nt, Artificial Sequence
  Description of Artificial Sequence: Synthetic oligonucleotide
  Antisense strand to SEQ ID NO: 2118508
acauauccuggccuaucgc

SEQ ID NO: 2118510 - RNA, 19 nt, Artificial Sequence
  Description of Artificial Sequence: Synthetic oligonucleotide
  Sense strand starting at position 3517 of SEQ ID NO: 1882404
gaaccuuaggauugucgua

SEQ ID NO: 2118511 - RNA, 19 nt, Artificial Sequence
  Description of Artificial Sequence: Synthetic oligonucleotide
  Antisense strand to SEQ ID NO: 2118510
uacgacaauccuaagguuc

SEQ ID NO: 2118512 - RNA, 19 nt, Artificial Sequence
  Description of Artificial Sequence: Synthetic oligonucleotide
  Sense strand starting at position 3804 of SEQ ID NO: 1882404
ugucacuuauacccaaagu

SEQ ID NO: 2118513 - RNA, 19 nt, Artificial Sequence
  Description of Artificial Sequence: Synthetic oligonucleotide
  Antisense strand to SEQ ID NO: 2118512
acuuuggguauaagugaca

SEQ ID NO: 2118514 - RNA, 19 nt, Artificial Sequence
  Description of Artificial Sequence: Synthetic oligonucleotide
  Sense strand starting at position 3837 of SEQ ID NO: 1882404
auguaagucuuccuuacag

SEQ ID NO: 2118515 - RNA, 19 nt, Artificial Sequence
  Description of Artificial Sequence: Synthetic oligonucleotide
  Antisense strand to SEQ ID NO: 2118514
cuguaaggaagacuuacau

SEQ ID NO: 2118516 - RNA, 19 nt, Artificial Sequence
  Description of Artificial Sequence: Synthetic oligonucleotide
  Sense strand starting at position 3839 of SEQ ID NO: 1882404
guaagucuuccuuacagga

SEQ ID NO: 2118517 - RNA, 19 nt, Artificial Sequence
  Description of Artificial Sequence: Synthetic oligonucleotide
  Antisense strand to SEQ ID NO: 2118516
uccuguaaggaagacuuac

SEQ ID NO: 2118518 - RNA, 19 nt, Artificial Sequence
  Description of Artificial Sequence: Synthetic oligonucleotide
  Sense strand starting at position 3980 of SEQ ID NO: 1882404
guuaguggcauguauaauu

SEQ ID NO: 2118519 - RNA, 19 nt, Artificial Sequence
  Description of Artificial Sequence: Synthetic oligonucleotide
  Antisense strand to SEQ ID NO: 2118518
aauuauacaugccacuaac

SEQ ID NO: 2118520 - RNA, 19 nt, Artificial Sequence
  Description of Artificial Sequence: Synthetic oligonucleotide
  Sense strand starting at position 36 of SEQ ID NO: 1882405
ggaggugaucuuuacuucu

SEQ ID NO: 2118521 - RNA, 19 nt, Artificial Sequence
  Description of Artificial Sequence: Synthetic oligonucleotide
  Antisense strand to SEQ ID NO: 2118520
agaaguaaagaucaccucc

SEQ ID NO: 2118522 - RNA, 19 nt, Artificial Sequence
  Description of Artificial Sequence: Synthetic oligonucleotide
  Sense strand starting at position 60 of SEQ ID NO: 1882405
uuuacuuguccugaagaac

SEQ ID NO: 2118523 - RNA, 19 nt, Artificial Sequence
  Description of Artificial Sequence: Synthetic oligonucleotide
  Antisense strand to SEQ ID NO: 2118522
guucuucaggacaaguaaa

SEQ ID NO: 2118524 - RNA, 19 nt, Artificial Sequence
  Description of Artificial Sequence: Synthetic oligonucleotide
  Sense strand starting at position 137 of SEQ ID NO: 1882405
gagggaauucaguguaugg

SEQ ID NO: 2118525 - RNA, 19 nt, Artificial Sequence
  Description of Artificial Sequence: Synthetic oligonucleotide
  Antisense strand to SEQ ID NO: 2118524
ccauacacugaauucccuc

SEQ ID NO: 2118526 - RNA, 19 nt, Artificial Sequence
  Description of Artificial Sequence: Synthetic oligonucleotide
  Sense strand starting at position 610 of SEQ ID NO: 1882405
uuuauaaguuauccaguca

SEQ ID NO: 2118527 - RNA, 19 nt, Artificial Sequence
  Description of Artificial Sequence: Synthetic oligonucleotide
  Antisense strand to SEQ ID NO: 2118526
ugacuggauaacuuauaaa

SEQ ID NO: 2118528 - RNA, 19 nt, Artificial Sequence
  Description of Artificial Sequence: Synthetic oligonucleotide
  Sense strand starting at position 678 of SEQ ID NO: 1882405
uauuaauaguaggcuagua

SEQ ID NO: 2118529 - RNA, 19 nt, Artificial Sequence
  Description of Artificial Sequence: Synthetic oligonucleotide
  Antisense strand to SEQ ID NO: 2118528
uacuagccuacuauuaaua

SEQ ID NO: 2118530 - RNA, 19 nt, Artificial Sequence
  Description of Artificial Sequence: Synthetic oligonucleotide
  Sense strand starting at position 680 of SEQ ID NO: 1882405
uuaauaguaggcuaguauu

SEQ ID NO: 2118531 - RNA, 19 nt, Artificial Sequence
  Description of Artificial Sequence: Synthetic oligonucleotide
  Antisense strand to SEQ ID NO: 2118530
aauacuagccuacuauuaa

SEQ ID NO: 2118532 - RNA, 19 nt, Artificial Sequence
  Description of Artificial Sequence: Synthetic oligonucleotide
  Sense strand starting at position 693 of SEQ ID NO: 1882405
aguauuuaaggcuguugua

SEQ ID NO: 2118533 - RNA, 19 nt, Artificial Sequence
  Description of Artificial Sequence: Synthetic oligonucleotide
  Antisense strand to SEQ ID NO: 2118532
uacaacagccuuaaauacu

SEQ ID NO: 2118534 - RNA, 19 nt, Artificial Sequence
  Description of Artificial Sequence: Synthetic oligonucleotide
  Sense strand starting at position 740 of SEQ ID NO: 1882405
cugaauaauugaguuugau

SEQ ID NO: 2118535 - RNA, 19 nt, Artificial Sequence
  Description of Artificial Sequence: Synthetic oligonucleotide
  Antisense strand to SEQ ID NO: 2118534
aucaaacucaauuauucag

SEQ ID NO: 2118536 - RNA, 19 nt, Artificial Sequence
  Description of Artificial Sequence: Synthetic oligonucleotide
  Sense strand starting at position 752 of SEQ ID NO: 1882405
guuugaucacaugauaugu

SEQ ID NO: 2118537 - RNA, 19 nt, Artificial Sequence
  Description of Artificial Sequence: Synthetic oligonucleotide
  Antisense strand to SEQ ID NO: 2118536
acauaucaugugaucaaac

SEQ ID NO: 2118538 - RNA, 19 nt, Artificial Sequence
  Description of Artificial Sequence: Synthetic oligonucleotide
  Sense strand starting at position 796 of SEQ ID NO: 1882405
gcaguuaguacucaaaguu

SEQ ID NO: 2118539 - RNA, 19 nt, Artificial Sequence
  Description of Artificial Sequence: Synthetic oligonucleotide
  Antisense strand to SEQ ID NO: 2118538
aacuuugaguacuaacugc

SEQ ID NO: 2118540 - RNA, 19 nt, Artificial Sequence
  Description of Artificial Sequence: Synthetic oligonucleotide
  Sense strand starting at position 1063 of SEQ ID NO: 1882405
aauaaucaguuguuuggga

SEQ ID NO: 2118541 - RNA, 19 nt, Artificial Sequence
  Description of Artificial Sequence: Synthetic oligonucleotide
  Antisense strand to SEQ ID NO: 2118540
ucccaaacaacugauuauu

SEQ ID NO: 2118542 - RNA, 19 nt, Artificial Sequence
  Description of Artificial Sequence: Synthetic oligonucleotide
  Sense strand starting at position 1071 of SEQ ID NO: 1882405
guuguuugggagcauaaau

SEQ ID NO: 2118543 - RNA, 19 nt, Artificial Sequence
  Description of Artificial Sequence: Synthetic oligonucleotide
  Antisense strand to SEQ ID NO: 2118542
auuuaugcucccaaacaac

SEQ ID NO: 2118544 - RNA, 19 nt, Artificial Sequence
  Description of Artificial Sequence: Synthetic oligonucleotide
  Sense strand starting at position 1153 of SEQ ID NO: 1882405
ucucucuaugguugauaca

SEQ ID NO: 2118545 - RNA, 19 nt, Artificial Sequence
  Description of Artificial Sequence: Synthetic oligonucleotide
  Antisense strand to SEQ ID NO: 2118544
uguaucaaccauagagaga

SEQ ID NO: 2118546 - RNA, 19 nt, Artificial Sequence
  Description of Artificial Sequence: Synthetic oligonucleotide
  Sense strand starting at position 1154 of SEQ ID NO: 1882405
cucucuaugguugauacau

SEQ ID NO: 2118547 - RNA, 19 nt, Artificial Sequence
  Description of Artificial Sequence: Synthetic oligonucleotide
  Antisense strand to SEQ ID NO: 2118546
auguaucaaccauagagag

SEQ ID NO: 2118548 - RNA, 19 nt, Artificial Sequence
  Description of Artificial Sequence: Synthetic oligonucleotide
  Sense strand starting at position 1435 of SEQ ID NO: 1882405
uguugcucgcauucugaua

SEQ ID NO: 2118549 - RNA, 19 nt, Artificial Sequence
  Description of Artificial Sequence: Synthetic oligonucleotide
  Antisense strand to SEQ ID NO: 2118548
uaucagaaugcgagcaaca

SEQ ID NO: 2118550 - RNA, 19 nt, Artificial Sequence
  Description of Artificial Sequence: Synthetic oligonucleotide
  Sense strand starting at position 1448 of SEQ ID NO: 1882405
cugauacaaucagcuguau

SEQ ID NO: 2118551 - RNA, 19 nt, Artificial Sequence
  Description of Artificial Sequence: Synthetic oligonucleotide
  Antisense strand to SEQ ID NO: 2118550
auacagcugauuguaucag

SEQ ID NO: 2118552 - RNA, 19 nt, Artificial Sequence
  Description of Artificial Sequence: Synthetic oligonucleotide
  Sense strand starting at position 1650 of SEQ ID NO: 1882405
uccugaacucugcaaagua

SEQ ID NO: 2118553 - RNA, 19 nt, Artificial Sequence
  Description of Artificial Sequence: Synthetic oligonucleotide
  Antisense strand to SEQ ID NO: 2118552
uacuuugcagaguucagga

SEQ ID NO: 2118554 - RNA, 19 nt, Artificial Sequence
  Description of Artificial Sequence: Synthetic oligonucleotide
  Sense strand starting at position 1724 of SEQ ID NO: 1882405
auugcaguuccauagagaa

SEQ ID NO: 2118555 - RNA, 19 nt, Artificial Sequence
  Description of Artificial Sequence: Synthetic oligonucleotide
  Antisense strand to SEQ ID NO: 2118554
uucucuauggaacugcaau

SEQ ID NO: 2118556 - RNA, 19 nt, Artificial Sequence
  Description of Artificial Sequence: Synthetic oligonucleotide
  Sense strand starting at position 1754 of SEQ ID NO: 1882405
ccuccuaagugguuuaaau

SEQ ID NO: 2118557 - RNA, 19 nt, Artificial Sequence
  Description of Artificial Sequence: Synthetic oligonucleotide
  Antisense strand to SEQ ID NO: 2118556
auuuaaaccacuuaggagg

SEQ ID NO: 2118558 - RNA, 19 nt, Artificial Sequence
  Description of Artificial Sequence: Synthetic oligonucleotide
  Sense strand starting at position 1756 of SEQ ID NO: 1882405
uccuaagugguuuaaaucu

SEQ ID NO: 2118559 - RNA, 19 nt, Artificial Sequence
  Description of Artificial Sequence: Synthetic oligonucleotide
  Antisense strand to SEQ ID NO: 2118558
agauuuaaaccacuuagga

SEQ ID NO: 2118560 - RNA, 19 nt, Artificial Sequence
  Description of Artificial Sequence: Synthetic oligonucleotide
  Sense strand starting at position 2054 of SEQ ID NO: 1882405
ggaucuuuaucacuuugaa

SEQ ID NO: 2118561 - RNA, 19 nt, Artificial Sequence
  Description of Artificial Sequence: Synthetic oligonucleotide
  Antisense strand to SEQ ID NO: 2118560
uucaaagugauaaagaucc

SEQ ID NO: 2118562 - RNA, 19 nt, Artificial Sequence
  Description of Artificial Sequence: Synthetic oligonucleotide
  Sense strand starting at position 2125 of SEQ ID NO: 1882405
guuucccaugauugugaca

SEQ ID NO: 2118563 - RNA, 19 nt, Artificial Sequence
  Description of Artificial Sequence: Synthetic oligonucleotide
  Antisense strand to SEQ ID NO: 2118562
ugucacaaucaugggaaac

SEQ ID NO: 2118564 - RNA, 19 nt, Artificial Sequence
  Description of Artificial Sequence: Synthetic oligonucleotide
  Sense strand starting at position 2130 of SEQ ID NO: 1882405
ccaugauugugacauauuu

SEQ ID NO: 2118565 - RNA, 19 nt, Artificial Sequence
  Description of Artificial Sequence: Synthetic oligonucleotide
  Antisense strand to SEQ ID NO: 2118564
aaauaugucacaaucaugg

SEQ ID NO: 2118566 - RNA, 19 nt, Artificial Sequence
  Description of Artificial Sequence: Synthetic oligonucleotide
  Sense strand starting at position 2379 of SEQ ID NO: 1882405
agugcuucugaauacauga

SEQ ID NO: 2118567 - RNA, 19 nt, Artificial Sequence
  Description of Artificial Sequence: Synthetic oligonucleotide
  Antisense strand to SEQ ID NO: 2118566
ucauguauucagaagcacu

SEQ ID NO: 2118568 - RNA, 19 nt, Artificial Sequence
  Description of Artificial Sequence: Synthetic oligonucleotide
  Sense strand starting at position 2394 of SEQ ID NO: 1882405
augacugugcucugaauac

SEQ ID NO: 2118569 - RNA, 19 nt, Artificial Sequence
  Description of Artificial Sequence: Synthetic oligonucleotide
  Antisense strand to SEQ ID NO: 2118568
guauucagagcacagucau

SEQ ID NO: 2118570 - RNA, 19 nt, Artificial Sequence
  Description of Artificial Sequence: Synthetic oligonucleotide
  Sense strand starting at position 2484 of SEQ ID NO: 1882405
gcugaugugcuacaaggaa

SEQ ID NO: 2118571 - RNA, 19 nt, Artificial Sequence
  Description of Artificial Sequence: Synthetic oligonucleotide
  Antisense strand to SEQ ID NO: 2118570
uuccuuguagcacaucagc

SEQ ID NO: 2118572 - RNA, 19 nt, Artificial Sequence
  Description of Artificial Sequence: Synthetic oligonucleotide
  Sense strand starting at position 2571 of SEQ ID NO: 1882405
accugugguguuuaaucca

SEQ ID NO: 2118573 - RNA, 19 nt, Artificial Sequence
  Description of Artificial Sequence: Synthetic oligonucleotide
  Antisense strand to SEQ ID NO: 2118572
uggauuaaacaccacaggu

SEQ ID NO: 2118574 - RNA, 19 nt, Artificial Sequence
  Description of Artificial Sequence: Synthetic oligonucleotide
  Sense strand starting at position 2939 of SEQ ID NO: 1882405
cgguucuaaaguuagugau

SEQ ID NO: 2118575 - RNA, 19 nt, Artificial Sequence
  Description of Artificial Sequence: Synthetic oligonucleotide
  Antisense strand to SEQ ID NO: 2118574
aucacuaacuuuagaaccg

SEQ ID NO: 2118576 - RNA, 19 nt, Artificial Sequence
  Description of Artificial Sequence: Synthetic oligonucleotide
  Sense strand starting at position 2941 of SEQ ID NO: 1882405
guucuaaaguuagugauca

SEQ ID NO: 2118577 - RNA, 19 nt, Artificial Sequence
  Description of Artificial Sequence: Synthetic oligonucleotide
  Antisense strand to SEQ ID NO: 2118576
ugaucacuaacuuuagaac

SEQ ID NO: 2118578 - RNA, 19 nt, Artificial Sequence
  Description of Artificial Sequence: Synthetic oligonucleotide
  Sense strand starting at position 2945 of SEQ ID NO: 1882405
uaaaguuagugaucagauu

SEQ ID NO: 2118579 - RNA, 19 nt, Artificial Sequence
  Description of Artificial Sequence: Synthetic oligonucleotide
  Antisense strand to SEQ ID NO: 2118578
aaucugaucacuaacuuua

SEQ ID NO: 2118580 - RNA, 19 nt, Artificial Sequence
  Description of Artificial Sequence: Synthetic oligonucleotide
  Sense strand starting at position 2959 of SEQ ID NO: 1882405
agauuaaacgcaggugaga

SEQ ID NO: 2118581 - RNA, 19 nt, Artificial Sequence
  Description of Artificial Sequence: Synthetic oligonucleotide
  Antisense strand to SEQ ID NO: 2118580
ucucaccugcguuuaaucu

SEQ ID NO: 2118582 - RNA, 19 nt, Artificial Sequence
  Description of Artificial Sequence: Synthetic oligonucleotide
  Sense strand starting at position 3039 of SEQ ID NO: 1882405
gguaaaucacaaggauucu

SEQ ID NO: 2118583 - RNA, 19 nt, Artificial Sequence
  Description of Artificial Sequence: Synthetic oligonucleotide
  Antisense strand to SEQ ID NO: 2118582
agaauccuugugauuuacc

SEQ ID NO: 2118584 - RNA, 19 nt, Artificial Sequence
  Description of Artificial Sequence: Synthetic oligonucleotide
  Sense strand starting at position 3155 of SEQ ID NO: 1882405
ugagcaagaucacuauaau

SEQ ID NO: 2118585 - RNA, 19 nt, Artificial Sequence
  Description of Artificial Sequence: Synthetic oligonucleotide
  Antisense strand to SEQ ID NO: 2118584
auuauagugaucuugcuca

SEQ ID NO: 2118586 - RNA, 19 nt, Artificial Sequence
  Description of Artificial Sequence: Synthetic oligonucleotide
  Sense strand starting at position 3323 of SEQ ID NO: 1882405
aaacguuuccuagaaagug

SEQ ID NO: 2118587 - RNA, 19 nt, Artificial Sequence
  Description of Artificial Sequence: Synthetic oligonucleotide
  Antisense strand to SEQ ID NO: 2118586
cacuuucuaggaaacguuu

SEQ ID NO: 2118588 - RNA, 19 nt, Artificial Sequence
  Description of Artificial Sequence: Synthetic oligonucleotide
  Sense strand starting at position 3374 of SEQ ID NO: 1882405
cuuacaucggcagaucagu

SEQ ID NO: 2118589 - RNA, 19 nt, Artificial Sequence
  Description of Artificial Sequence: Synthetic oligonucleotide
  Antisense strand to SEQ ID NO: 2118588
acugaucugccgauguaag

SEQ ID NO: 2118590 - RNA, 19 nt, Artificial Sequence
  Description of Artificial Sequence: Synthetic oligonucleotide
  Sense strand starting at position 3399 of SEQ ID NO: 1882405
cuugcaaagccagguauuu

SEQ ID NO: 2118591 - RNA, 19 nt, Artificial Sequence
  Description of Artificial Sequence: Synthetic oligonucleotide
  Antisense strand to SEQ ID NO: 2118590
aaauaccuggcuuugcaag

SEQ ID NO: 2118592 - RNA, 19 nt, Artificial Sequence
  Description of Artificial Sequence: Synthetic oligonucleotide
  Sense strand starting at position 3513 of SEQ ID NO: 1882405
acgagaaucauagggcaag

SEQ ID NO: 2118593 - RNA, 19 nt, Artificial Sequence
  Description of Artificial Sequence: Synthetic oligonucleotide
  Antisense strand to SEQ ID NO: 2118592
cuugcccuaugauucucgu

SEQ ID NO: 2118594 - RNA, 19 nt, Artificial Sequence
  Description of Artificial Sequence: Synthetic oligonucleotide
  Sense strand starting at position 3536 of SEQ ID NO: 1882405
gcgguccuugaggaagaaa

SEQ ID NO: 2118595 - RNA, 19 nt, Artificial Sequence
  Description of Artificial Sequence: Synthetic oligonucleotide
  Antisense strand to SEQ ID NO: 2118594
uuucuuccucaaggaccgc

SEQ ID NO: 2118596 - RNA, 19 nt, Artificial Sequence
  Description of Artificial Sequence: Synthetic oligonucleotide
  Sense strand starting at position 3727 of SEQ ID NO: 1882405
cguggaaggccguuuguuu

SEQ ID NO: 2118597 - RNA, 19 nt, Artificial Sequence
  Description of Artificial Sequence: Synthetic oligonucleotide
  Antisense strand to SEQ ID NO: 2118596
aaacaaacggccuuccacg

SEQ ID NO: 2118598 - RNA, 19 nt, Artificial Sequence
  Description of Artificial Sequence: Synthetic oligonucleotide
  Sense strand starting at position 3843 of SEQ ID NO: 1882405
agcccuuucuucucagaag

SEQ ID NO: 2118599 - RNA, 19 nt, Artificial Sequence
  Description of Artificial Sequence: Synthetic oligonucleotide
  Antisense strand to SEQ ID NO: 2118598
cuucugagaagaaagggcu

SEQ ID NO: 2118600 - RNA, 19 nt, Artificial Sequence
  Description of Artificial Sequence: Synthetic oligonucleotide
  Sense strand starting at position 75 of SEQ ID NO: 1882406
gcuacucuuguuuaaauug

SEQ ID NO: 2118601 - RNA, 19 nt, Artificial Sequence
  Description of Artificial Sequence: Synthetic oligonucleotide
  Antisense strand to SEQ ID NO: 2118600
caauuuaaacaagaguagc

SEQ ID NO: 2118602 - RNA, 19 nt, Artificial Sequence
  Description of Artificial Sequence: Synthetic oligonucleotide
  Sense strand starting at position 123 of SEQ ID NO: 1882406
uuagccagacucuguuauu

SEQ ID NO: 2118603 - RNA, 19 nt, Artificial Sequence
  Description of Artificial Sequence: Synthetic oligonucleotide
  Antisense strand to SEQ ID NO: 2118602
aauaacagagucuggcuaa

SEQ ID NO: 2118604 - RNA, 19 nt, Artificial Sequence
  Description of Artificial Sequence: Synthetic oligonucleotide
  Sense strand starting at position 221 of SEQ ID NO: 1882406
ugagaaugcucuuccuaca

SEQ ID NO: 2118605 - RNA, 19 nt, Artificial Sequence
  Description of Artificial Sequence: Synthetic oligonucleotide
  Antisense strand to SEQ ID NO: 2118604
uguaggaagagcauucuca

SEQ ID NO: 2118606 - RNA, 19 nt, Artificial Sequence
  Description of Artificial Sequence: Synthetic oligonucleotide
  Sense strand starting at position 557 of SEQ ID NO: 1882406
gccugagaaugcucuuucu

SEQ ID NO: 2118607 - RNA, 19 nt, Artificial Sequence
  Description of Artificial Sequence: Synthetic oligonucleotide
  Antisense strand to SEQ ID NO: 2118606
agaaagagcauucucaggc

SEQ ID NO: 2118608 - RNA, 19 nt, Artificial Sequence
  Description of Artificial Sequence: Synthetic oligonucleotide
  Sense strand starting at position 560 of SEQ ID NO: 1882406
ugagaaugcucuuucuaua

SEQ ID NO: 2118609 - RNA, 19 nt, Artificial Sequence
  Description of Artificial Sequence: Synthetic oligonucleotide
  Antisense strand to SEQ ID NO: 2118608
uauagaaagagcauucuca

SEQ ID NO: 2118610 - RNA, 19 nt, Artificial Sequence
  Description of Artificial Sequence: Synthetic oligonucleotide
  Sense strand starting at position 565 of SEQ ID NO: 1882406
augcucuuucuauagagua

SEQ ID NO: 2118611 - RNA, 19 nt, Artificial Sequence
  Description of Artificial Sequence: Synthetic oligonucleotide
  Antisense strand to SEQ ID NO: 2118610
uacucuauagaaagagcau

SEQ ID NO: 2118612 - RNA, 19 nt, Artificial Sequence
  Description of Artificial Sequence: Synthetic oligonucleotide
  Sense strand starting at position 575 of SEQ ID NO: 1882406
uauagaguagcuuggugua

SEQ ID NO: 2118613 - RNA, 19 nt, Artificial Sequence
  Description of Artificial Sequence: Synthetic oligonucleotide
  Antisense strand to SEQ ID NO: 2118612
uacaccaagcuacucuaua

SEQ ID NO: 2118614 - RNA, 19 nt, Artificial Sequence
  Description of Artificial Sequence: Synthetic oligonucleotide
  Sense strand starting at position 577 of SEQ ID NO: 1882406
uagaguagcuugguguaaa

SEQ ID NO: 2118615 - RNA, 19 nt, Artificial Sequence
  Description of Artificial Sequence: Synthetic oligonucleotide
  Antisense strand to SEQ ID NO: 2118614
uuuacaccaagcuacucua

SEQ ID NO: 2118616 - RNA, 19 nt, Artificial Sequence
  Description of Artificial Sequence: Synthetic oligonucleotide
  Sense strand starting at position 580 of SEQ ID NO: 1882406
aguagcuugguguaaagaa

SEQ ID NO: 2118617 - RNA, 19 nt, Artificial Sequence
  Description of Artificial Sequence: Synthetic oligonucleotide
  Antisense strand to SEQ ID NO: 2118616
uucuuuacaccaagcuacu

SEQ ID NO: 2118618 - RNA, 19 nt, Artificial Sequence
  Description of Artificial Sequence: Synthetic oligonucleotide
  Sense strand starting at position 652 of SEQ ID NO: 1882406
ccugguacucacgagaaac

SEQ ID NO: 2118619 - RNA, 19 nt, Artificial Sequence
  Description of Artificial Sequence: Synthetic oligonucleotide
  Antisense strand to SEQ ID NO: 2118618
guuucucgugaguaccagg

SEQ ID NO: 2118620 - RNA, 19 nt, Artificial Sequence
  Description of Artificial Sequence: Synthetic oligonucleotide
  Sense strand starting at position 654 of SEQ ID NO: 1882406
ugguacucacgagaaacuu

SEQ ID NO: 2118621 - RNA, 19 nt, Artificial Sequence
  Description of Artificial Sequence: Synthetic oligonucleotide
  Antisense strand to SEQ ID NO: 2118620
aaguuucucgugaguacca

SEQ ID NO: 2118622 - RNA, 19 nt, Artificial Sequence
  Description of Artificial Sequence: Synthetic oligonucleotide
  Sense strand starting at position 671 of SEQ ID NO: 1882406
uuaugaagcuuuguaacuc

SEQ ID NO: 2118623 - RNA, 19 nt, Artificial Sequence
  Description of Artificial Sequence: Synthetic oligonucleotide
  Antisense strand to SEQ ID NO: 2118622
gaguuacaaagcuucauaa

SEQ ID NO: 2118624 - RNA, 19 nt, Artificial Sequence
  Description of Artificial Sequence: Synthetic oligonucleotide
  Sense strand starting at position 680 of SEQ ID NO: 1882406
uuuguaacucccuggucau

SEQ ID NO: 2118625 - RNA, 19 nt, Artificial Sequence
  Description of Artificial Sequence: Synthetic oligonucleotide
  Antisense strand to SEQ ID NO: 2118624
augaccagggaguuacaaa

SEQ ID NO: 2118626 - RNA, 19 nt, Artificial Sequence
  Description of Artificial Sequence: Synthetic oligonucleotide
  Sense strand starting at position 683 of SEQ ID NO: 1882406
guaacucccuggucaucau

SEQ ID NO: 2118627 - RNA, 19 nt, Artificial Sequence
  Description of Artificial Sequence: Synthetic oligonucleotide
  Antisense strand to SEQ ID NO: 2118626
augaugaccagggaguuac

SEQ ID NO: 2118628 - RNA, 19 nt, Artificial Sequence
  Description of Artificial Sequence: Synthetic oligonucleotide
  Sense strand starting at position 701 of SEQ ID NO: 1882406
uuuaccucuccgugaaaca

SEQ ID NO: 2118629 - RNA, 19 nt, Artificial Sequence
  Description of Artificial Sequence: Synthetic oligonucleotide
  Antisense strand to SEQ ID NO: 2118628
uguuucacggagagguaaa

SEQ ID NO: 2118630 - RNA, 19 nt, Artificial Sequence
  Description of Artificial Sequence: Synthetic oligonucleotide
  Sense strand starting at position 749 of SEQ ID NO: 1882406
auaauucuauaggcuugua

SEQ ID NO: 2118631 - RNA, 19 nt, Artificial Sequence
  Description of Artificial Sequence: Synthetic oligonucleotide
  Antisense strand to SEQ ID NO: 2118630
uacaagccuauagaauuau

SEQ ID NO: 2118632 - RNA, 19 nt, Artificial Sequence
  Description of Artificial Sequence: Synthetic oligonucleotide
  Sense strand starting at position 831 of SEQ ID NO: 1882406
auaguaaacguguacauuc

SEQ ID NO: 2118633 - RNA, 19 nt, Artificial Sequence
  Description of Artificial Sequence: Synthetic oligonucleotide
  Antisense strand to SEQ ID NO: 2118632
gaauguacacguuuacuau

SEQ ID NO: 2118634 - RNA, 19 nt, Artificial Sequence
  Description of Artificial Sequence: Synthetic oligonucleotide
  Sense strand starting at position 1242 of SEQ ID NO: 1882406
gguugaaugucucuacuga

SEQ ID NO: 2118635 - RNA, 19 nt, Artificial Sequence
  Description of Artificial Sequence: Synthetic oligonucleotide
  Antisense strand to SEQ ID NO: 2118634
ucaguagagacauucaacc

SEQ ID NO: 2118636 - RNA, 19 nt, Artificial Sequence
  Description of Artificial Sequence: Synthetic oligonucleotide
  Sense strand starting at position 1243 of SEQ ID NO: 1882406
guugaaugucucuacugag

SEQ ID NO: 2118637 - RNA, 19 nt, Artificial Sequence
  Description of Artificial Sequence: Synthetic oligonucleotide
  Antisense strand to SEQ ID NO: 2118636
cucaguagagacauucaac

SEQ ID NO: 2118638 - RNA, 19 nt, Artificial Sequence
  Description of Artificial Sequence: Synthetic oligonucleotide
  Sense strand starting at position 1407 of SEQ ID NO: 1882406
ugccuccucgcuugagaau

SEQ ID NO: 2118639 - RNA, 19 nt, Artificial Sequence
  Description of Artificial Sequence: Synthetic oligonucleotide
  Antisense strand to SEQ ID NO: 2118638
auucucaagcgaggaggca

SEQ ID NO: 2118640 - RNA, 19 nt, Artificial Sequence
  Description of Artificial Sequence: Synthetic oligonucleotide
  Sense strand starting at position 1479 of SEQ ID NO: 1882406
gaugaaguccuacguggga

SEQ ID NO: 2118641 - RNA, 19 nt, Artificial Sequence
  Description of Artificial Sequence: Synthetic oligonucleotide
  Antisense strand to SEQ ID NO: 2118640
ucccacguaggacuucauc

SEQ ID NO: 2118642 - RNA, 19 nt, Artificial Sequence
  Description of Artificial Sequence: Synthetic oligonucleotide
  Sense strand starting at position 1524 of SEQ ID NO: 1882406
ggaauuuccuccuacagag

SEQ ID NO: 2118643 - RNA, 19 nt, Artificial Sequence
  Description of Artificial Sequence: Synthetic oligonucleotide
  Antisense strand to SEQ ID NO: 2118642
cucuguaggaggaaauucc

SEQ ID NO: 2118644 - RNA, 19 nt, Artificial Sequence
  Description of Artificial Sequence: Synthetic oligonucleotide
  Sense strand starting at position 1573 of SEQ ID NO: 1882406
gauggagguuauguuaaug

SEQ ID NO: 2118645 - RNA, 19 nt, Artificial Sequence
  Description of Artificial Sequence: Synthetic oligonucleotide
  Antisense strand to SEQ ID NO: 2118644
cauuaacauaaccuccauc

SEQ ID NO: 2118646 - RNA, 19 nt, Artificial Sequence
  Description of Artificial Sequence: Synthetic oligonucleotide
  Sense strand starting at position 1584 of SEQ ID NO: 1882406
uguuaaugguguucaggca

SEQ ID NO: 2118647 - RNA, 19 nt, Artificial Sequence
  Description of Artificial Sequence: Synthetic oligonucleotide
  Antisense strand to SEQ ID NO: 2118646
ugccugaacaccauuaaca

SEQ ID NO: 2118648 - RNA, 19 nt, Artificial Sequence
  Description of Artificial Sequence: Synthetic oligonucleotide
  Sense strand starting at position 1632 of SEQ ID NO: 1882406
aagccugcaguuugaaauu

SEQ ID NO: 2118649 - RNA, 19 nt, Artificial Sequence
  Description of Artificial Sequence: Synthetic oligonucleotide
  Antisense strand to SEQ ID NO: 2118648
aauuucaaacugcaggcuu

SEQ ID NO: 2118650 - RNA, 19 nt, Artificial Sequence
  Description of Artificial Sequence: Synthetic oligonucleotide
  Sense strand starting at position 2146 of SEQ ID NO: 1882406
gaguucugggucugugguu

SEQ ID NO: 2118651 - RNA, 19 nt, Artificial Sequence
  Description of Artificial Sequence: Synthetic oligonucleotide
  Antisense strand to SEQ ID NO: 2118650
aaccacagacccagaacuc

SEQ ID NO: 2118652 - RNA, 19 nt, Artificial Sequence
  Description of Artificial Sequence: Synthetic oligonucleotide
  Sense strand starting at position 2151 of SEQ ID NO: 1882406
cugggucugugguuuggaa

SEQ ID NO: 2118653 - RNA, 19 nt, Artificial Sequence
  Description of Artificial Sequence: Synthetic oligonucleotide
  Antisense strand to SEQ ID NO: 2118652
uuccaaaccacagacccag

SEQ ID NO: 2118654 - RNA, 19 nt, Artificial Sequence
  Description of Artificial Sequence: Synthetic oligonucleotide
  Sense strand starting at position 2180 of SEQ ID NO: 1882406
gaacgcauuggguguaaga

SEQ ID NO: 2118655 - RNA, 19 nt, Artificial Sequence
  Description of Artificial Sequence: Synthetic oligonucleotide
  Antisense strand to SEQ ID NO: 2118654
ucuuacacccaaugcguuc

SEQ ID NO: 2118656 - RNA, 19 nt, Artificial Sequence
  Description of Artificial Sequence: Synthetic oligonucleotide
  Sense strand starting at position 2182 of SEQ ID NO: 1882406
acgcauuggguguaagauc

SEQ ID NO: 2118657 - RNA, 19 nt, Artificial Sequence
  Description of Artificial Sequence: Synthetic oligonucleotide
  Antisense strand to SEQ ID NO: 2118656
gaucuuacacccaaugcgu

SEQ ID NO: 2118658 - RNA, 19 nt, Artificial Sequence
  Description of Artificial Sequence: Synthetic oligonucleotide
  Sense strand starting at position 2230 of SEQ ID NO: 1882406
aaggcuuucgcagguggaa

SEQ ID NO: 2118659 - RNA, 19 nt, Artificial Sequence
  Description of Artificial Sequence: Synthetic oligonucleotide
  Antisense strand to SEQ ID NO: 2118658
uuccaccugcgaaagccuu

SEQ ID NO: 2118660 - RNA, 19 nt, Artificial Sequence
  Description of Artificial Sequence: Synthetic oligonucleotide
  Sense strand starting at position 2242 of SEQ ID NO: 1882406
gguggaaugcucugacgga

SEQ ID NO: 2118661 - RNA, 19 nt, Artificial Sequence
  Description of Artificial Sequence: Synthetic oligonucleotide
  Antisense strand to SEQ ID NO: 2118660
uccgucagagcauuccacc

SEQ ID NO: 2118662 - RNA, 19 nt, Artificial Sequence
  Description of Artificial Sequence: Synthetic oligonucleotide
  Sense strand starting at position 2246 of SEQ ID NO: 1882406
gaaugcucugacggagacu

SEQ ID NO: 2118663 - RNA, 19 nt, Artificial Sequence
  Description of Artificial Sequence: Synthetic oligonucleotide
  Antisense strand to SEQ ID NO: 2118662
agucuccgucagagcauuc

SEQ ID NO: 2118664 - RNA, 19 nt, Artificial Sequence
  Description of Artificial Sequence: Synthetic oligonucleotide
  Sense strand starting at position 2257 of SEQ ID NO: 1882406
cggagacugugggaagaua

SEQ ID NO: 2118665 - RNA, 19 nt, Artificial Sequence
  Description of Artificial Sequence: Synthetic oligonucleotide
  Antisense strand to SEQ ID NO: 2118664
uaucuucccacagucuccg

SEQ ID NO: 2118666 - RNA, 19 nt, Artificial Sequence
  Description of Artificial Sequence: Synthetic oligonucleotide
  Sense strand starting at position 2439 of SEQ ID NO: 1882406
ggcugaaagugugucugga

SEQ ID NO: 2118667 - RNA, 19 nt, Artificial Sequence
  Description of Artificial Sequence: Synthetic oligonucleotide
  Antisense strand to SEQ ID NO: 2118666
uccagacacacuuucagcc

SEQ ID NO: 2118668 - RNA, 19 nt, Artificial Sequence
  Description of Artificial Sequence: Synthetic oligonucleotide
  Sense strand starting at position 2441 of SEQ ID NO: 1882406
cugaaagugugucuggaau

SEQ ID NO: 2118669 - RNA, 19 nt, Artificial Sequence
  Description of Artificial Sequence: Synthetic oligonucleotide
  Antisense strand to SEQ ID NO: 2118668
auuccagacacacuuucag

SEQ ID NO: 2118670 - RNA, 19 nt, Artificial Sequence
  Description of Artificial Sequence: Synthetic oligonucleotide
  Sense strand starting at position 2729 of SEQ ID NO: 1882406
acugcagaccuuugugacu

SEQ ID NO: 2118671 - RNA, 19 nt, Artificial Sequence
  Description of Artificial Sequence: Synthetic oligonucleotide
  Antisense strand to SEQ ID NO: 2118670
agucacaaaggucugcagu

SEQ ID NO: 2118672 - RNA, 19 nt, Artificial Sequence
  Description of Artificial Sequence: Synthetic oligonucleotide
  Sense strand starting at position 2734 of SEQ ID NO: 1882406
agaccuuugugacuagugu

SEQ ID NO: 2118673 - RNA, 19 nt, Artificial Sequence
  Description of Artificial Sequence: Synthetic oligonucleotide
  Antisense strand to SEQ ID NO: 2118672
acacuagucacaaaggucu

SEQ ID NO: 2118674 - RNA, 19 nt, Artificial Sequence
  Description of Artificial Sequence: Synthetic oligonucleotide
  Sense strand starting at position 2735 of SEQ ID NO: 1882406
gaccuuugugacuaguguu

SEQ ID NO: 2118675 - RNA, 19 nt, Artificial Sequence
  Description of Artificial Sequence: Synthetic oligonucleotide
  Antisense strand to SEQ ID NO: 2118674
aacacuagucacaaagguc

SEQ ID NO: 2118676 - RNA, 19 nt, Artificial Sequence
  Description of Artificial Sequence: Synthetic oligonucleotide
  Sense strand starting at position 3821 of SEQ ID NO: 1882406
ccaggaaugagguguuaua

SEQ ID NO: 2118677 - RNA, 19 nt, Artificial Sequence
  Description of Artificial Sequence: Synthetic oligonucleotide
  Antisense strand to SEQ ID NO: 2118676
uauaacaccucauuccugg

SEQ ID NO: 2118678 - RNA, 19 nt, Artificial Sequence
  Description of Artificial Sequence: Synthetic oligonucleotide
  Sense strand starting at position 3911 of SEQ ID NO: 1882406
gucucauggcagugauuga

SEQ ID NO: 2118679 - RNA, 19 nt, Artificial Sequence
  Description of Artificial Sequence: Synthetic oligonucleotide
  Antisense strand to SEQ ID NO: 2118678
ucaaucacugccaugagac

SEQ ID NO: 2118680 - RNA, 19 nt, Artificial Sequence
  Description of Artificial Sequence: Synthetic oligonucleotide
  Sense strand starting at position 99 of SEQ ID NO: 1882407
caguguucuccacagagaa

SEQ ID NO: 2118681 - RNA, 19 nt, Artificial Sequence
  Description of Artificial Sequence: Synthetic oligonucleotide
  Antisense strand to SEQ ID NO: 2118680
uucucuguggagaacacug

SEQ ID NO: 2118682 - RNA, 19 nt, Artificial Sequence
  Description of Artificial Sequence: Synthetic oligonucleotide
  Sense strand starting at position 126 of SEQ ID NO: 1882407
gccagaagacuguggaaua

SEQ ID NO: 2118683 - RNA, 19 nt, Artificial Sequence
  Description of Artificial Sequence: Synthetic oligonucleotide
  Antisense strand to SEQ ID NO: 2118682
uauuccacagucuucuggc

SEQ ID NO: 2118684 - RNA, 19 nt, Artificial Sequence
  Description of Artificial Sequence: Synthetic oligonucleotide
  Sense strand starting at position 158 of SEQ ID NO: 1882407
gcugauagauaacugucaa

SEQ ID NO: 2118685 - RNA, 19 nt, Artificial Sequence
  Description of Artificial Sequence: Synthetic oligonucleotide
  Antisense strand to SEQ ID NO: 2118684
uugacaguuaucuaucagc

SEQ ID NO: 2118686 - RNA, 19 nt, Artificial Sequence
  Description of Artificial Sequence: Synthetic oligonucleotide
  Sense strand starting at position 289 of SEQ ID NO: 1882407
ggaauuuacuaccaaagca

SEQ ID NO: 2118687 - RNA, 19 nt, Artificial Sequence
  Description of Artificial Sequence: Synthetic oligonucleotide
  Antisense strand to SEQ ID NO: 2118686
ugcuuugguaguaaauucc

SEQ ID NO: 2118688 - RNA, 19 nt, Artificial Sequence
  Description of Artificial Sequence: Synthetic oligonucleotide
  Sense strand starting at position 319 of SEQ ID NO: 1882407
ggaagucaugaaggcuaca

SEQ ID NO: 2118689 - RNA, 19 nt, Artificial Sequence
  Description of Artificial Sequence: Synthetic oligonucleotide
  Antisense strand to SEQ ID NO: 2118688
uguagccuucaugacuucc

SEQ ID NO: 2118690 - RNA, 19 nt, Artificial Sequence
  Description of Artificial Sequence: Synthetic oligonucleotide
  Sense strand starting at position 416 of SEQ ID NO: 1882407
guaaacauuguguaaagua

SEQ ID NO: 2118691 - RNA, 19 nt, Artificial Sequence
  Description of Artificial Sequence: Synthetic oligonucleotide
  Antisense strand to SEQ ID NO: 2118690
uacuuuacacaauguuuac

SEQ ID NO: 2118692 - RNA, 19 nt, Artificial Sequence
  Description of Artificial Sequence: Synthetic oligonucleotide
  Sense strand starting at position 485 of SEQ ID NO: 1882407
uuggacaaguacuuuauaa

SEQ ID NO: 2118693 - RNA, 19 nt, Artificial Sequence
  Description of Artificial Sequence: Synthetic oligonucleotide
  Antisense strand to SEQ ID NO: 2118692
uuauaaaguacuuguccaa

SEQ ID NO: 2118694 - RNA, 19 nt, Artificial Sequence
  Description of Artificial Sequence: Synthetic oligonucleotide
  Sense strand starting at position 573 of SEQ ID NO: 1882407
agacuuuguuaaguuaaac

SEQ ID NO: 2118695 - RNA, 19 nt, Artificial Sequence
  Description of Artificial Sequence: Synthetic oligonucleotide
  Antisense strand to SEQ ID NO: 2118694
guuuaacuuaacaaagucu

SEQ ID NO: 2118696 - RNA, 19 nt, Artificial Sequence
  Description of Artificial Sequence: Synthetic oligonucleotide
  Sense strand starting at position 664 of SEQ ID NO: 1882407
acaauuggcucucugaaga

SEQ ID NO: 2118697 - RNA, 19 nt, Artificial Sequence
  Description of Artificial Sequence: Synthetic oligonucleotide
  Antisense strand to SEQ ID NO: 2118696
ucuucagagagccaauugu

SEQ ID NO: 2118698 - RNA, 19 nt, Artificial Sequence
  Description of Artificial Sequence: Synthetic oligonucleotide
  Sense strand starting at position 757 of SEQ ID NO: 1882407
acaugaagucacugaacuu

SEQ ID NO: 2118699 - RNA, 19 nt, Artificial Sequence
  Description of Artificial Sequence: Synthetic oligonucleotide
  Antisense strand to SEQ ID NO: 2118698
aaguucagugacuucaugu

SEQ ID NO: 2118700 - RNA, 19 nt, Artificial Sequence
  Description of Artificial Sequence: Synthetic oligonucleotide
  Sense strand starting at position 856 of SEQ ID NO: 1882407
aaacuaagagagugcugua

SEQ ID NO: 2118701 - RNA, 19 nt, Artificial Sequence
  Description of Artificial Sequence: Synthetic oligonucleotide
  Antisense strand to SEQ ID NO: 2118700
uacagcacucucuuaguuu

SEQ ID NO: 2118702 - RNA, 19 nt, Artificial Sequence
  Description of Artificial Sequence: Synthetic oligonucleotide
  Sense strand starting at position 861 of SEQ ID NO: 1882407
aagagagugcuguauucug

SEQ ID NO: 2118703 - RNA, 19 nt, Artificial Sequence
  Description of Artificial Sequence: Synthetic oligonucleotide
  Antisense strand to SEQ ID NO: 2118702
cagaauacagcacucucuu

SEQ ID NO: 2118704 - RNA, 19 nt, Artificial Sequence
  Description of Artificial Sequence: Synthetic oligonucleotide
  Sense strand starting at position 876 of SEQ ID NO: 1882407
ucugaaagcuaaguuaaua

SEQ ID NO: 2118705 - RNA, 19 nt, Artificial Sequence
  Description of Artificial Sequence: Synthetic oligonucleotide
  Antisense strand to SEQ ID NO: 2118704
uauuaacuuagcuuucaga

SEQ ID NO: 2118706 - RNA, 19 nt, Artificial Sequence
  Description of Artificial Sequence: Synthetic oligonucleotide
  Sense strand starting at position 930 of SEQ ID NO: 1882407
uggagaauauuaguacuca

SEQ ID NO: 2118707 - RNA, 19 nt, Artificial Sequence
  Description of Artificial Sequence: Synthetic oligonucleotide
  Antisense strand to SEQ ID NO: 2118706
ugaguacuaauauucucca

SEQ ID NO: 2118708 - RNA, 19 nt, Artificial Sequence
  Description of Artificial Sequence: Synthetic oligonucleotide
  Sense strand starting at position 1038 of SEQ ID NO: 1882407
acaguccuuccugacuuua

SEQ ID NO: 2118709 - RNA, 19 nt, Artificial Sequence
  Description of Artificial Sequence: Synthetic oligonucleotide
  Antisense strand to SEQ ID NO: 2118708
uaaagucaggaaggacugu

SEQ ID NO: 2118710 - RNA, 19 nt, Artificial Sequence
  Description of Artificial Sequence: Synthetic oligonucleotide
  Sense strand starting at position 1343 of SEQ ID NO: 1882407
agaguauagcaauacaugu

SEQ ID NO: 2118711 - RNA, 19 nt, Artificial Sequence
  Description of Artificial Sequence: Synthetic oligonucleotide
  Antisense strand to SEQ ID NO: 2118710
acauguauugcuauacucu

SEQ ID NO: 2118712 - RNA, 19 nt, Artificial Sequence
  Description of Artificial Sequence: Synthetic oligonucleotide
  Sense strand starting at position 1454 of SEQ ID NO: 1882407
aguguugaaggccauugau

SEQ ID NO: 2118713 - RNA, 19 nt, Artificial Sequence
  Description of Artificial Sequence: Synthetic oligonucleotide
  Antisense strand to SEQ ID NO: 2118712
aucaauggccuucaacacu

SEQ ID NO: 2118714 - RNA, 19 nt, Artificial Sequence
  Description of Artificial Sequence: Synthetic oligonucleotide
  Sense strand starting at position 2010 of SEQ ID NO: 1882407
uaggucucuccugaugaau

SEQ ID NO: 2118715 - RNA, 19 nt, Artificial Sequence
  Description of Artificial Sequence: Synthetic oligonucleotide
  Antisense strand to SEQ ID NO: 2118714
auucaucaggagagaccua

SEQ ID NO: 2118716 - RNA, 19 nt, Artificial Sequence
  Description of Artificial Sequence: Synthetic oligonucleotide
  Sense strand starting at position 2013 of SEQ ID NO: 1882407
gucucuccugaugaauuga

SEQ ID NO: 2118717 - RNA, 19 nt, Artificial Sequence
  Description of Artificial Sequence: Synthetic oligonucleotide
  Antisense strand to SEQ ID NO: 2118716
ucaauucaucaggagagac

SEQ ID NO: 2118718 - RNA, 19 nt, Artificial Sequence
  Description of Artificial Sequence: Synthetic oligonucleotide
  Sense strand starting at position 2023 of SEQ ID NO: 1882407
augaauugagguggacagu

SEQ ID NO: 2118719 - RNA, 19 nt, Artificial Sequence
  Description of Artificial Sequence: Synthetic oligonucleotide
  Antisense strand to SEQ ID NO: 2118718
acuguccaccucaauucau

SEQ ID NO: 2118720 - RNA, 19 nt, Artificial Sequence
  Description of Artificial Sequence: Synthetic oligonucleotide
  Sense strand starting at position 2170 of SEQ ID NO: 1882407
gaucaagaagccugguaga

SEQ ID NO: 2118721 - RNA, 19 nt, Artificial Sequence
  Description of Artificial Sequence: Synthetic oligonucleotide
  Antisense strand to SEQ ID NO: 2118720
ucuaccaggcuucuugauc

SEQ ID NO: 2118722 - RNA, 19 nt, Artificial Sequence
  Description of Artificial Sequence: Synthetic oligonucleotide
  Sense strand starting at position 2222 of SEQ ID NO: 1882407
ggcuucugugaacaccaau

SEQ ID NO: 2118723 - RNA, 19 nt, Artificial Sequence
  Description of Artificial Sequence: Synthetic oligonucleotide
  Antisense strand to SEQ ID NO: 2118722
auugguguucacagaagcc

SEQ ID NO: 2118724 - RNA, 19 nt, Artificial Sequence
  Description of Artificial Sequence: Synthetic oligonucleotide
  Sense strand starting at position 2435 of SEQ ID NO: 1882407
uccaaaucacagugugaaa

SEQ ID NO: 2118725 - RNA, 19 nt, Artificial Sequence
  Description of Artificial Sequence: Synthetic oligonucleotide
  Antisense strand to SEQ ID NO: 2118724
uuucacacugugauuugga

SEQ ID NO: 2118726 - RNA, 19 nt, Artificial Sequence
  Description of Artificial Sequence: Synthetic oligonucleotide
  Sense strand starting at position 2498 of SEQ ID NO: 1882407
gaagcuuagcgacaacaaa

SEQ ID NO: 2118727 - RNA, 19 nt, Artificial Sequence
  Description of Artificial Sequence: Synthetic oligonucleotide
  Antisense strand to SEQ ID NO: 2118726
uuuguugucgcuaagcuuc

SEQ ID NO: 2118728 - RNA, 19 nt, Artificial Sequence
  Description of Artificial Sequence: Synthetic oligonucleotide
  Sense strand starting at position 2613 of SEQ ID NO: 1882407
cucuuugaaucucuuggaa

SEQ ID NO: 2118729 - RNA, 19 nt, Artificial Sequence
  Description of Artificial Sequence: Synthetic oligonucleotide
  Antisense strand to SEQ ID NO: 2118728
uuccaagagauucaaagag

SEQ ID NO: 2118730 - RNA, 19 nt, Artificial Sequence
  Description of Artificial Sequence: Synthetic oligonucleotide
  Sense strand starting at position 2616 of SEQ ID NO: 1882407
uuugaaucucuuggaauag

SEQ ID NO: 2118731 - RNA, 19 nt, Artificial Sequence
  Description of Artificial Sequence: Synthetic oligonucleotide
  Antisense strand to SEQ ID NO: 2118730
cuauuccaagagauucaaa

SEQ ID NO: 2118732 - RNA, 19 nt, Artificial Sequence
  Description of Artificial Sequence: Synthetic oligonucleotide
  Sense strand starting at position 2821 of SEQ ID NO: 1882407
uuuccugagcgagacaauu

SEQ ID NO: 2118733 - RNA, 19 nt, Artificial Sequence
  Description of Artificial Sequence: Synthetic oligonucleotide
  Antisense strand to SEQ ID NO: 2118732
aauugucucgcucaggaaa

SEQ ID NO: 2118734 - RNA, 19 nt, Artificial Sequence
  Description of Artificial Sequence: Synthetic oligonucleotide
  Sense strand starting at position 2834 of SEQ ID NO: 1882407
acaauuuggucucaaggga

SEQ ID NO: 2118735 - RNA, 19 nt, Artificial Sequence
  Description of Artificial Sequence: Synthetic oligonucleotide
  Antisense strand to SEQ ID NO: 2118734
ucccuugagaccaaauugu

SEQ ID NO: 2118736 - RNA, 19 nt, Artificial Sequence
  Description of Artificial Sequence: Synthetic oligonucleotide
  Sense strand starting at position 2944 of SEQ ID NO: 1882407
aagagaagauuguuauccu

SEQ ID NO: 2118737 - RNA, 19 nt, Artificial Sequence
  Description of Artificial Sequence: Synthetic oligonucleotide
  Antisense strand to SEQ ID NO: 2118736
aggauaacaaucuucucuu

SEQ ID NO: 2118738 - RNA, 19 nt, Artificial Sequence
  Description of Artificial Sequence: Synthetic oligonucleotide
  Sense strand starting at position 3050 of SEQ ID NO: 1882407
uuaggagauucuucucagu

SEQ ID NO: 2118739 - RNA, 19 nt, Artificial Sequence
  Description of Artificial Sequence: Synthetic oligonucleotide
  Antisense strand to SEQ ID NO: 2118738
acugagaagaaucuccuaa

SEQ ID NO: 2118740 - RNA, 19 nt, Artificial Sequence
  Description of Artificial Sequence: Synthetic oligonucleotide
  Sense strand starting at position 3052 of SEQ ID NO: 1882407
aggagauucuucucaguug

SEQ ID NO: 2118741 - RNA, 19 nt, Artificial Sequence
  Description of Artificial Sequence: Synthetic oligonucleotide
  Antisense strand to SEQ ID NO: 2118740
caacugagaagaaucuccu

SEQ ID NO: 2118742 - RNA, 19 nt, Artificial Sequence
  Description of Artificial Sequence: Synthetic oligonucleotide
  Sense strand starting at position 3244 of SEQ ID NO: 1882407
ccagaaaguuaggcucaaa

SEQ ID NO: 2118743 - RNA, 19 nt, Artificial Sequence
  Description of Artificial Sequence: Synthetic oligonucleotide
  Antisense strand to SEQ ID NO: 2118742
uuugagccuaacuuucugg

SEQ ID NO: 2118744 - RNA, 19 nt, Artificial Sequence
  Description of Artificial Sequence: Synthetic oligonucleotide
  Sense strand starting at position 3418 of SEQ ID NO: 1882407
acaaauauggaguguguua

SEQ ID NO: 2118745 - RNA, 19 nt, Artificial Sequence
  Description of Artificial Sequence: Synthetic oligonucleotide
  Antisense strand to SEQ ID NO: 2118744
uaacacacuccauauuugu

SEQ ID NO: 2118746 - RNA, 19 nt, Artificial Sequence
  Description of Artificial Sequence: Synthetic oligonucleotide
  Sense strand starting at position 3465 of SEQ ID NO: 1882407
gagccaaaugugcaaauau

SEQ ID NO: 2118747 - RNA, 19 nt, Artificial Sequence
  Description of Artificial Sequence: Synthetic oligonucleotide
  Antisense strand to SEQ ID NO: 2118746
auauuugcacauuuggcuc

SEQ ID NO: 2118748 - RNA, 19 nt, Artificial Sequence
  Description of Artificial Sequence: Synthetic oligonucleotide
  Sense strand starting at position 3591 of SEQ ID NO: 1882407
uuacauauuccugaguguu

SEQ ID NO: 2118749 - RNA, 19 nt, Artificial Sequence
  Description of Artificial Sequence: Synthetic oligonucleotide
  Antisense strand to SEQ ID NO: 2118748
aacacucaggaauauguaa

SEQ ID NO: 2118750 - RNA, 19 nt, Artificial Sequence
  Description of Artificial Sequence: Synthetic oligonucleotide
  Sense strand starting at position 3627 of SEQ ID NO: 1882407
uggcucugaaagugggaua

SEQ ID NO: 2118751 - RNA, 19 nt, Artificial Sequence
  Description of Artificial Sequence: Synthetic oligonucleotide
  Antisense strand to SEQ ID NO: 2118750
uaucccacuuucagagcca

SEQ ID NO: 2118752 - RNA, 19 nt, Artificial Sequence
  Description of Artificial Sequence: Synthetic oligonucleotide
  Sense strand starting at position 3641 of SEQ ID NO: 1882407
ggauaccuuugcuuugaga

SEQ ID NO: 2118753 - RNA, 19 nt, Artificial Sequence
  Description of Artificial Sequence: Synthetic oligonucleotide
  Antisense strand to SEQ ID NO: 2118752
ucucaaagcaaagguaucc

SEQ ID NO: 2118754 - RNA, 19 nt, Artificial Sequence
  Description of Artificial Sequence: Synthetic oligonucleotide
  Sense strand starting at position 3643 of SEQ ID NO: 1882407
auaccuuugcuuugagaga

SEQ ID NO: 2118755 - RNA, 19 nt, Artificial Sequence
  Description of Artificial Sequence: Synthetic oligonucleotide
  Antisense strand to SEQ ID NO: 2118754
ucucucaaagcaaagguau

SEQ ID NO: 2118756 - RNA, 19 nt, Artificial Sequence
  Description of Artificial Sequence: Synthetic oligonucleotide
  Sense strand starting at position 3713 of SEQ ID NO: 1882407
ugacguuuccuguucgagu

SEQ ID NO: 2118757 - RNA, 19 nt, Artificial Sequence
  Description of Artificial Sequence: Synthetic oligonucleotide
  Antisense strand to SEQ ID NO: 2118756
acucgaacaggaaacguca

SEQ ID NO: 2118758 - RNA, 19 nt, Artificial Sequence
  Description of Artificial Sequence: Synthetic oligonucleotide
  Sense strand starting at position 3766 of SEQ ID NO: 1882407
uuucuuguucuacagagag

SEQ ID NO: 2118759 - RNA, 19 nt, Artificial Sequence
  Description of Artificial Sequence: Synthetic oligonucleotide
  Antisense strand to SEQ ID NO: 2118758
cucucuguagaacaagaaa

SEQ ID NO: 2118760 - RNA, 19 nt, Artificial Sequence
  Description of Artificial Sequence: Synthetic oligonucleotide
  Sense strand starting at position 163 of SEQ ID NO: 1882408
ggcugcuccacuggacaaa

SEQ ID NO: 2118761 - RNA, 19 nt, Artificial Sequence
  Description of Artificial Sequence: Synthetic oligonucleotide
  Antisense strand to SEQ ID NO: 2118760
uuuguccaguggagcagcc

SEQ ID NO: 2118762 - RNA, 19 nt, Artificial Sequence
  Description of Artificial Sequence: Synthetic oligonucleotide
  Sense strand starting at position 164 of SEQ ID NO: 1882408
gcugcuccacuggacaaau

SEQ ID NO: 2118763 - RNA, 19 nt, Artificial Sequence
  Description of Artificial Sequence: Synthetic oligonucleotide
  Antisense strand to SEQ ID NO: 2118762
auuuguccaguggagcagc

SEQ ID NO: 2118764 - RNA, 19 nt, Artificial Sequence
  Description of Artificial Sequence: Synthetic oligonucleotide
  Sense strand starting at position 520 of SEQ ID NO: 1882408
gugcaauccuuugcacaca

SEQ ID NO: 2118765 - RNA, 19 nt, Artificial Sequence
  Description of Artificial Sequence: Synthetic oligonucleotide
  Antisense strand to SEQ ID NO: 2118764
ugugugcaaaggauugcac

SEQ ID NO: 2118766 - RNA, 19 nt, Artificial Sequence
  Description of Artificial Sequence: Synthetic oligonucleotide
  Sense strand starting at position 546 of SEQ ID NO: 1882408
cucaguaagaaguguugaa

SEQ ID NO: 2118767 - RNA, 19 nt, Artificial Sequence
  Description of Artificial Sequence: Synthetic oligonucleotide
  Antisense strand to SEQ ID NO: 2118766
uucaacacuucuuacugag

SEQ ID NO: 2118768 - RNA, 19 nt, Artificial Sequence
  Description of Artificial Sequence: Synthetic oligonucleotide
  Sense strand starting at position 558 of SEQ ID NO: 1882408
uguugaauugguugacuau

SEQ ID NO: 2118769 - RNA, 19 nt, Artificial Sequence
  Description of Artificial Sequence: Synthetic oligonucleotide
  Antisense strand to SEQ ID NO: 2118768
auagucaaccaauucaaca

SEQ ID NO: 2118770 - RNA, 19 nt, Artificial Sequence
  Description of Artificial Sequence: Synthetic oligonucleotide
  Sense strand starting at position 559 of SEQ ID NO: 1882408
guugaauugguugacuauu

SEQ ID NO: 2118771 - RNA, 19 nt, Artificial Sequence
  Description of Artificial Sequence: Synthetic oligonucleotide
  Antisense strand to SEQ ID NO: 2118770
aauagucaaccaauucaac

SEQ ID NO: 2118772 - RNA, 19 nt, Artificial Sequence
  Description of Artificial Sequence: Synthetic oligonucleotide
  Sense strand starting at position 567 of SEQ ID NO: 1882408
gguugacuauucuugccaa

SEQ ID NO: 2118773 - RNA, 19 nt, Artificial Sequence
  Description of Artificial Sequence: Synthetic oligonucleotide
  Antisense strand to SEQ ID NO: 2118772
uuggcaagaauagucaacc

SEQ ID NO: 2118774 - RNA, 19 nt, Artificial Sequence
  Description of Artificial Sequence: Synthetic oligonucleotide
  Sense strand starting at position 965 of SEQ ID NO: 1882408
agggcaagaucgucucaaa

SEQ ID NO: 2118775 - RNA, 19 nt, Artificial Sequence
  Description of Artificial Sequence: Synthetic oligonucleotide
  Antisense strand to SEQ ID NO: 2118774
uuugagacgaucuugcccu

SEQ ID NO: 2118776 - RNA, 19 nt, Artificial Sequence
  Description of Artificial Sequence: Synthetic oligonucleotide
  Sense strand starting at position 1021 of SEQ ID NO: 1882408
cugccauccucacuauguu

SEQ ID NO: 2118777 - RNA, 19 nt, Artificial Sequence
  Description of Artificial Sequence: Synthetic oligonucleotide
  Antisense strand to SEQ ID NO: 2118776
aacauagugaggauggcag

SEQ ID NO: 2118778 - RNA, 19 nt, Artificial Sequence
  Description of Artificial Sequence: Synthetic oligonucleotide
  Sense strand starting at position 1022 of SEQ ID NO: 1882408
ugccauccucacuauguua

SEQ ID NO: 2118779 - RNA, 19 nt, Artificial Sequence
  Description of Artificial Sequence: Synthetic oligonucleotide
  Antisense strand to SEQ ID NO: 2118778
uaacauagugaggauggca

SEQ ID NO: 2118780 - RNA, 19 nt, Artificial Sequence
  Description of Artificial Sequence: Synthetic oligonucleotide
  Sense strand starting at position 1024 of SEQ ID NO: 1882408
ccauccucacuauguuaga

SEQ ID NO: 2118781 - RNA, 19 nt, Artificial Sequence
  Description of Artificial Sequence: Synthetic oligonucleotide
  Antisense strand to SEQ ID NO: 2118780
ucuaacauagugaggaugg

SEQ ID NO: 2118782 - RNA, 19 nt, Artificial Sequence
  Description of Artificial Sequence: Synthetic oligonucleotide
  Sense strand starting at position 1092 of SEQ ID NO: 1882408
aagucuuaucccgggcaau

SEQ ID NO: 2118783 - RNA, 19 nt, Artificial Sequence
  Description of Artificial Sequence: Synthetic oligonucleotide
  Antisense strand to SEQ ID NO: 2118782
auugcccgggauaagacuu

SEQ ID NO: 2118784 - RNA, 19 nt, Artificial Sequence
  Description of Artificial Sequence: Synthetic oligonucleotide
  Sense strand starting at position 1093 of SEQ ID NO: 1882408
agucuuaucccgggcaaua

SEQ ID NO: 2118785 - RNA, 19 nt, Artificial Sequence
  Description of Artificial Sequence: Synthetic oligonucleotide
  Antisense strand to SEQ ID NO: 2118784
uauugcccgggauaagacu

SEQ ID NO: 2118786 - RNA, 19 nt, Artificial Sequence
  Description of Artificial Sequence: Synthetic oligonucleotide
  Sense strand starting at position 1240 of SEQ ID NO: 1882408
guguucggucccuugaguu

SEQ ID NO: 2118787 - RNA, 19 nt, Artificial Sequence
  Description of Artificial Sequence: Synthetic oligonucleotide
  Antisense strand to SEQ ID NO: 2118786
aacucaagggaccgaacac

SEQ ID NO: 2118788 - RNA, 19 nt, Artificial Sequence
  Description of Artificial Sequence: Synthetic oligonucleotide
  Sense strand starting at position 1334 of SEQ ID NO: 1882408
ucuuuaaagccagguugau

SEQ ID NO: 2118789 - RNA, 19 nt, Artificial Sequence
  Description of Artificial Sequence: Synthetic oligonucleotide
  Antisense strand to SEQ ID NO: 2118788
aucaaccuggcuuuaaaga

SEQ ID NO: 2118790 - RNA, 19 nt, Artificial Sequence
  Description of Artificial Sequence: Synthetic oligonucleotide
  Sense strand starting at position 1346 of SEQ ID NO: 1882408
gguugaugcugaccagaac

SEQ ID NO: 2118791 - RNA, 19 nt, Artificial Sequence
  Description of Artificial Sequence: Synthetic oligonucleotide
  Antisense strand to SEQ ID NO: 2118790
guucuggucagcaucaacc

SEQ ID NO: 2118792 - RNA, 19 nt, Artificial Sequence
  Description of Artificial Sequence: Synthetic oligonucleotide
  Sense strand starting at position 1611 of SEQ ID NO: 1882408
guggccuguccugagaaga

SEQ ID NO: 2118793 - RNA, 19 nt, Artificial Sequence
  Description of Artificial Sequence: Synthetic oligonucleotide
  Antisense strand to SEQ ID NO: 2118792
ucuucucaggacaggccac

SEQ ID NO: 2118794 - RNA, 19 nt, Artificial Sequence
  Description of Artificial Sequence: Synthetic oligonucleotide
  Sense strand starting at position 1649 of SEQ ID NO: 1882408
ucgagcuuuaacuguggaa

SEQ ID NO: 2118795 - RNA, 19 nt, Artificial Sequence
  Description of Artificial Sequence: Synthetic oligonucleotide
  Antisense strand to SEQ ID NO: 2118794
uuccacaguuaaagcucga

SEQ ID NO: 2118796 - RNA, 19 nt, Artificial Sequence
  Description of Artificial Sequence: Synthetic oligonucleotide
  Sense strand starting at position 1651 of SEQ ID NO: 1882408
gagcuuuaacuguggaaug

SEQ ID NO: 2118797 - RNA, 19 nt, Artificial Sequence
  Description of Artificial Sequence: Synthetic oligonucleotide
  Antisense strand to SEQ ID NO: 2118796
cauuccacaguuaaagcuc

SEQ ID NO: 2118798 - RNA, 19 nt, Artificial Sequence
  Description of Artificial Sequence: Synthetic oligonucleotide
  Sense strand starting at position 1762 of SEQ ID NO: 1882408
agugccaugucccuggaaa

SEQ ID NO: 2118799 - RNA, 19 nt, Artificial Sequence
  Description of Artificial Sequence: Synthetic oligonucleotide
  Antisense strand to SEQ ID NO: 2118798
uuuccagggacauggcacu

SEQ ID NO: 2118800 - RNA, 19 nt, Artificial Sequence
  Description of Artificial Sequence: Synthetic oligonucleotide
  Sense strand starting at position 1763 of SEQ ID NO: 1882408
gugccaugucccuggaaag

SEQ ID NO: 2118801 - RNA, 19 nt, Artificial Sequence
  Description of Artificial Sequence: Synthetic oligonucleotide
  Antisense strand to SEQ ID NO: 2118800
cuuuccagggacauggcac

SEQ ID NO: 2118802 - RNA, 19 nt, Artificial Sequence
  Description of Artificial Sequence: Synthetic oligonucleotide
  Sense strand starting at position 2249 of SEQ ID NO: 1882408
acagaaucguuucuggaag

SEQ ID NO: 2118803 - RNA, 19 nt, Artificial Sequence
  Description of Artificial Sequence: Synthetic oligonucleotide
  Antisense strand to SEQ ID NO: 2118802
cuuccagaaacgauucugu

SEQ ID NO: 2118804 - RNA, 19 nt, Artificial Sequence
  Description of Artificial Sequence: Synthetic oligonucleotide
  Sense strand starting at position 2277 of SEQ ID NO: 1882408
ugaacugguuucuugccaa

SEQ ID NO: 2118805 - RNA, 19 nt, Artificial Sequence
  Description of Artificial Sequence: Synthetic oligonucleotide
  Antisense strand to SEQ ID NO: 2118804
uuggcaagaaaccaguuca

SEQ ID NO: 2118806 - RNA, 19 nt, Artificial Sequence
  Description of Artificial Sequence: Synthetic oligonucleotide
  Sense strand starting at position 2354 of SEQ ID NO: 1882408
gagagagugguccaggguu

SEQ ID NO: 2118807 - RNA, 19 nt, Artificial Sequence
  Description of Artificial Sequence: Synthetic oligonucleotide
  Antisense strand to SEQ ID NO: 2118806
aacccuggaccacucucuc

SEQ ID NO: 2118808 - RNA, 19 nt, Artificial Sequence
  Description of Artificial Sequence: Synthetic oligonucleotide
  Sense strand starting at position 2477 of SEQ ID NO: 1882408
gaagaaucacgcuggccua

SEQ ID NO: 2118809 - RNA, 19 nt, Artificial Sequence
  Description of Artificial Sequence: Synthetic oligonucleotide
  Antisense strand to SEQ ID NO: 2118808
uaggccagcgugauucuuc

SEQ ID NO: 2118810 - RNA, 19 nt, Artificial Sequence
  Description of Artificial Sequence: Synthetic oligonucleotide
  Sense strand starting at position 2643 of SEQ ID NO: 1882408
ccgcuauuaagagggauau

SEQ ID NO: 2118811 - RNA, 19 nt, Artificial Sequence
  Description of Artificial Sequence: Synthetic oligonucleotide
  Antisense strand to SEQ ID NO: 2118810
auaucccucuuaauagcgg

SEQ ID NO: 2118812 - RNA, 19 nt, Artificial Sequence
  Description of Artificial Sequence: Synthetic oligonucleotide
  Sense strand starting at position 2644 of SEQ ID NO: 1882408
cgcuauuaagagggauaug

SEQ ID NO: 2118813 - RNA, 19 nt, Artificial Sequence
  Description of Artificial Sequence: Synthetic oligonucleotide
  Antisense strand to SEQ ID NO: 2118812
cauaucccucuuaauagcg

SEQ ID NO: 2118814 - RNA, 19 nt, Artificial Sequence
  Description of Artificial Sequence: Synthetic oligonucleotide
  Sense strand starting at position 2752 of SEQ ID NO: 1882408
ucaugaucacuccgggcua

SEQ ID NO: 2118815 - RNA, 19 nt, Artificial Sequence
  Description of Artificial Sequence: Synthetic oligonucleotide
  Antisense strand to SEQ ID NO: 2118814
uagcccggagugaucauga

SEQ ID NO: 2118816 - RNA, 19 nt, Artificial Sequence
  Description of Artificial Sequence: Synthetic oligonucleotide
  Sense strand starting at position 2819 of SEQ ID NO: 1882408
ccucgauugucacccaaga

SEQ ID NO: 2118817 - RNA, 19 nt, Artificial Sequence
  Description of Artificial Sequence: Synthetic oligonucleotide
  Antisense strand to SEQ ID NO: 2118816
ucuugggugacaaucgagg

SEQ ID NO: 2118818 - RNA, 19 nt, Artificial Sequence
  Description of Artificial Sequence: Synthetic oligonucleotide
  Sense strand starting at position 2821 of SEQ ID NO: 1882408
ucgauugucacccaagaag

SEQ ID NO: 2118819 - RNA, 19 nt, Artificial Sequence
  Description of Artificial Sequence: Synthetic oligonucleotide
  Antisense strand to SEQ ID NO: 2118818
cuucuugggugacaaucga

SEQ ID NO: 2118820 - RNA, 19 nt, Artificial Sequence
  Description of Artificial Sequence: Synthetic oligonucleotide
  Sense strand starting at position 2867 of SEQ ID NO: 1882408
uguggucgucuguuacagu

SEQ ID NO: 2118821 - RNA, 19 nt, Artificial Sequence
  Description of Artificial Sequence: Synthetic oligonucleotide
  Antisense strand to SEQ ID NO: 2118820
acuguaacagacgaccaca

SEQ ID NO: 2118822 - RNA, 19 nt, Artificial Sequence
  Description of Artificial Sequence: Synthetic oligonucleotide
  Sense strand starting at position 3256 of SEQ ID NO: 1882408
aucaauuaggaguaugcua

SEQ ID NO: 2118823 - RNA, 19 nt, Artificial Sequence
  Description of Artificial Sequence: Synthetic oligonucleotide
  Antisense strand to SEQ ID NO: 2118822
uagcauacuccuaauugau

SEQ ID NO: 2118824 - RNA, 19 nt, Artificial Sequence
  Description of Artificial Sequence: Synthetic oligonucleotide
  Sense strand starting at position 3258 of SEQ ID NO: 1882408
caauuaggaguaugcuaau

SEQ ID NO: 2118825 - RNA, 19 nt, Artificial Sequence
  Description of Artificial Sequence: Synthetic oligonucleotide
  Antisense strand to SEQ ID NO: 2118824
auuagcauacuccuaauug

SEQ ID NO: 2118826 - RNA, 19 nt, Artificial Sequence
  Description of Artificial Sequence: Synthetic oligonucleotide
  Sense strand starting at position 3366 of SEQ ID NO: 1882408
gggcgucuccgugcuuaga

SEQ ID NO: 2118827 - RNA, 19 nt, Artificial Sequence
  Description of Artificial Sequence: Synthetic oligonucleotide
  Antisense strand to SEQ ID NO: 2118826
ucuaagcacggagacgccc

SEQ ID NO: 2118828 - RNA, 19 nt, Artificial Sequence
  Description of Artificial Sequence: Synthetic oligonucleotide
  Sense strand starting at position 3448 of SEQ ID NO: 1882408
ccgcuuugucccgcaguua

SEQ ID NO: 2118829 - RNA, 19 nt, Artificial Sequence
  Description of Artificial Sequence: Synthetic oligonucleotide
  Antisense strand to SEQ ID NO: 2118828
uaacugcgggacaaagcgg

SEQ ID NO: 2118830 - RNA, 19 nt, Artificial Sequence
  Description of Artificial Sequence: Synthetic oligonucleotide
  Sense strand starting at position 3542 of SEQ ID NO: 1882408
cuucuaagaccuggagagu

SEQ ID NO: 2118831 - RNA, 19 nt, Artificial Sequence
  Description of Artificial Sequence: Synthetic oligonucleotide
  Antisense strand to SEQ ID NO: 2118830
acucuccaggucuuagaag

SEQ ID NO: 2118832 - RNA, 19 nt, Artificial Sequence
  Description of Artificial Sequence: Synthetic oligonucleotide
  Sense strand starting at position 3636 of SEQ ID NO: 1882408
cugagaugcggugacauaa

SEQ ID NO: 2118833 - RNA, 19 nt, Artificial Sequence
  Description of Artificial Sequence: Synthetic oligonucleotide
  Antisense strand to SEQ ID NO: 2118832
uuaugucaccgcaucucag

SEQ ID NO: 2118834 - RNA, 19 nt, Artificial Sequence
  Description of Artificial Sequence: Synthetic oligonucleotide
  Sense strand starting at position 3843 of SEQ ID NO: 1882408
gcggauuuauuauaauuga

SEQ ID NO: 2118835 - RNA, 19 nt, Artificial Sequence
  Description of Artificial Sequence: Synthetic oligonucleotide
  Antisense strand to SEQ ID NO: 2118834
ucaauuauaauaaauccgc

SEQ ID NO: 2118836 - RNA, 19 nt, Artificial Sequence
  Description of Artificial Sequence: Synthetic oligonucleotide
  Sense strand starting at position 3879 of SEQ ID NO: 1882408
aucggugcaguguaaauau

SEQ ID NO: 2118837 - RNA, 19 nt, Artificial Sequence
  Description of Artificial Sequence: Synthetic oligonucleotide
  Antisense strand to SEQ ID NO: 2118836
auauuuacacugcaccgau

SEQ ID NO: 2118838 - RNA, 19 nt, Artificial Sequence
  Description of Artificial Sequence: Synthetic oligonucleotide
  Sense strand starting at position 3899 of SEQ ID NO: 1882408
ugugaaauuuacuaggaga

SEQ ID NO: 2118839 - RNA, 19 nt, Artificial Sequence
  Description of Artificial Sequence: Synthetic oligonucleotide
  Antisense strand to SEQ ID NO: 2118838
ucuccuaguaaauuucaca

SEQ ID NO: 2118840 - RNA, 19 nt, Artificial Sequence
  Description of Artificial Sequence: Synthetic oligonucleotide
  Sense strand starting at position 31 of SEQ ID NO: 1882409
ugcuaaauggcggaaugaa

SEQ ID NO: 2118841 - RNA, 19 nt, Artificial Sequence
  Description of Artificial Sequence: Synthetic oligonucleotide
  Antisense strand to SEQ ID NO: 2118840
uucauuccgccauuuagca

SEQ ID NO: 2118842 - RNA, 19 nt, Artificial Sequence
  Description of Artificial Sequence: Synthetic oligonucleotide
  Sense strand starting at position 171 of SEQ ID NO: 1882409
cagagaaguuaggcaauau

SEQ ID NO: 2118843 - RNA, 19 nt, Artificial Sequence
  Description of Artificial Sequence: Synthetic oligonucleotide
  Antisense strand to SEQ ID NO: 2118842
auauugccuaacuucucug

SEQ ID NO: 2118844 - RNA, 19 nt, Artificial Sequence
  Description of Artificial Sequence: Synthetic oligonucleotide
  Sense strand starting at position 253 of SEQ ID NO: 1882409
aacucuuagccagggaaug

SEQ ID NO: 2118845 - RNA, 19 nt, Artificial Sequence
  Description of Artificial Sequence: Synthetic oligonucleotide
  Antisense strand to SEQ ID NO: 2118844
cauucccuggcuaagaguu

SEQ ID NO: 2118846 - RNA, 19 nt, Artificial Sequence
  Description of Artificial Sequence: Synthetic oligonucleotide
  Sense strand starting at position 373 of SEQ ID NO: 1882409
ggaggaaauuccguggauu

SEQ ID NO: 2118847 - RNA, 19 nt, Artificial Sequence
  Description of Artificial Sequence: Synthetic oligonucleotide
  Antisense strand to SEQ ID NO: 2118846
aauccacggaauuuccucc

SEQ ID NO: 2118848 - RNA, 19 nt, Artificial Sequence
  Description of Artificial Sequence: Synthetic oligonucleotide
  Sense strand starting at position 374 of SEQ ID NO: 1882409
gaggaaauuccguggauug

SEQ ID NO: 2118849 - RNA, 19 nt, Artificial Sequence
  Description of Artificial Sequence: Synthetic oligonucleotide
  Antisense strand to SEQ ID NO: 2118848
caauccacggaauuuccuc

SEQ ID NO: 2118850 - RNA, 19 nt, Artificial Sequence
  Description of Artificial Sequence: Synthetic oligonucleotide
  Sense strand starting at position 376 of SEQ ID NO: 1882409
ggaaauuccguggauuggu

SEQ ID NO: 2118851 - RNA, 19 nt, Artificial Sequence
  Description of Artificial Sequence: Synthetic oligonucleotide
  Antisense strand to SEQ ID NO: 2118850
accaauccacggaauuucc

SEQ ID NO: 2118852 - RNA, 19 nt, Artificial Sequence
  Description of Artificial Sequence: Synthetic oligonucleotide
  Sense strand starting at position 384 of SEQ ID NO: 1882409
cguggauugguuuaggaug

SEQ ID NO: 2118853 - RNA, 19 nt, Artificial Sequence
  Description of Artificial Sequence: Synthetic oligonucleotide
  Antisense strand to SEQ ID NO: 2118852
cauccuaaaccaauccacg

SEQ ID NO: 2118854 - RNA, 19 nt, Artificial Sequence
  Description of Artificial Sequence: Synthetic oligonucleotide
  Sense strand starting at position 402 of SEQ ID NO: 1882409
ggugacacucauuaucuuu

SEQ ID NO: 2118855 - RNA, 19 nt, Artificial Sequence
  Description of Artificial Sequence: Synthetic oligonucleotide
  Antisense strand to SEQ ID NO: 2118854
aaagauaaugagugucacc

SEQ ID NO: 2118856 - RNA, 19 nt, Artificial Sequence
  Description of Artificial Sequence: Synthetic oligonucleotide
  Sense strand starting at position 525 of SEQ ID NO: 1882409
auacaaucccuggaugcuu

SEQ ID NO: 2118857 - RNA, 19 nt, Artificial Sequence
  Description of Artificial Sequence: Synthetic oligonucleotide
  Antisense strand to SEQ ID NO: 2118856
aagcauccagggauuguau

SEQ ID NO: 2118858 - RNA, 19 nt, Artificial Sequence
  Description of Artificial Sequence: Synthetic oligonucleotide
  Sense strand starting at position 579 of SEQ ID NO: 1882409
ucagguuaagcugaaaguu

SEQ ID NO: 2118859 - RNA, 19 nt, Artificial Sequence
  Description of Artificial Sequence: Synthetic oligonucleotide
  Antisense strand to SEQ ID NO: 2118858
aacuuucagcuuaaccuga

SEQ ID NO: 2118860 - RNA, 19 nt, Artificial Sequence
  Description of Artificial Sequence: Synthetic oligonucleotide
  Sense strand starting at position 731 of SEQ ID NO: 1882409
uguuccuuauuuguaaguu

SEQ ID NO: 2118861 - RNA, 19 nt, Artificial Sequence
  Description of Artificial Sequence: Synthetic oligonucleotide
  Antisense strand to SEQ ID NO: 2118860
aacuuacaaauaaggaaca

SEQ ID NO: 2118862 - RNA, 19 nt, Artificial Sequence
  Description of Artificial Sequence: Synthetic oligonucleotide
  Sense strand starting at position 860 of SEQ ID NO: 1882409
cagagcuggcguuugcuua

SEQ ID NO: 2118863 - RNA, 19 nt, Artificial Sequence
  Description of Artificial Sequence: Synthetic oligonucleotide
  Antisense strand to SEQ ID NO: 2118862
uaagcaaacgccagcucug

SEQ ID NO: 2118864 - RNA, 19 nt, Artificial Sequence
  Description of Artificial Sequence: Synthetic oligonucleotide
  Sense strand starting at position 1030 of SEQ ID NO: 1882409
auggcacuuguugaugaaa

SEQ ID NO: 2118865 - RNA, 19 nt, Artificial Sequence
  Description of Artificial Sequence: Synthetic oligonucleotide
  Antisense strand to SEQ ID NO: 2118864
uuucaucaacaagugccau

SEQ ID NO: 2118866 - RNA, 19 nt, Artificial Sequence
  Description of Artificial Sequence: Synthetic oligonucleotide
  Sense strand starting at position 1033 of SEQ ID NO: 1882409
gcacuuguugaugaaauca

SEQ ID NO: 2118867 - RNA, 19 nt, Artificial Sequence
  Description of Artificial Sequence: Synthetic oligonucleotide
  Antisense strand to SEQ ID NO: 2118866
ugauuucaucaacaagugc

SEQ ID NO: 2118868 - RNA, 19 nt, Artificial Sequence
  Description of Artificial Sequence: Synthetic oligonucleotide
  Sense strand starting at position 1058 of SEQ ID NO: 1882409
ccaguuauauuugaaggag

SEQ ID NO: 2118869 - RNA, 19 nt, Artificial Sequence
  Description of Artificial Sequence: Synthetic oligonucleotide
  Antisense strand to SEQ ID NO: 2118868
cuccuucaaauauaacugg

SEQ ID NO: 2118870 - RNA, 19 nt, Artificial Sequence
  Description of Artificial Sequence: Synthetic oligonucleotide
  Sense strand starting at position 1412 of SEQ ID NO: 1882409
aacugagauucugugaaau

SEQ ID NO: 2118871 - RNA, 19 nt, Artificial Sequence
  Description of Artificial Sequence: Synthetic oligonucleotide
  Antisense strand to SEQ ID NO: 2118870
auuucacagaaucucaguu

SEQ ID NO: 2118872 - RNA, 19 nt, Artificial Sequence
  Description of Artificial Sequence: Synthetic oligonucleotide
  Sense strand starting at position 2094 of SEQ ID NO: 1882409
ucaaguauuccgccucguu

SEQ ID NO: 2118873 - RNA, 19 nt, Artificial Sequence
  Description of Artificial Sequence: Synthetic oligonucleotide
  Antisense strand to SEQ ID NO: 2118872
aacgaggcggaauacuuga

SEQ ID NO: 2118874 - RNA, 19 nt, Artificial Sequence
  Description of Artificial Sequence: Synthetic oligonucleotide
  Sense strand starting at position 2119 of SEQ ID NO: 1882409
ccacauagguaaucagacu

SEQ ID NO: 2118875 - RNA, 19 nt, Artificial Sequence
  Description of Artificial Sequence: Synthetic oligonucleotide
  Antisense strand to SEQ ID NO: 2118874
agucugauuaccuaugugg

SEQ ID NO: 2118876 - RNA, 19 nt, Artificial Sequence
  Description of Artificial Sequence: Synthetic oligonucleotide
  Sense strand starting at position 2203 of SEQ ID NO: 1882409
gaauguguuguuuaacaca

SEQ ID NO: 2118877 - RNA, 19 nt, Artificial Sequence
  Description of Artificial Sequence: Synthetic oligonucleotide
  Antisense strand to SEQ ID NO: 2118876
uguguuaaacaacacauuc

SEQ ID NO: 2118878 - RNA, 19 nt, Artificial Sequence
  Description of Artificial Sequence: Synthetic oligonucleotide
  Sense strand starting at position 2221 of SEQ ID NO: 1882409
accgaauuucugugcagug

SEQ ID NO: 2118879 - RNA, 19 nt, Artificial Sequence
  Description of Artificial Sequence: Synthetic oligonucleotide
  Antisense strand to SEQ ID NO: 2118878
cacugcacagaaauucggu

SEQ ID NO: 2118880 - RNA, 19 nt, Artificial Sequence
  Description of Artificial Sequence: Synthetic oligonucleotide
  Sense strand starting at position 2222 of SEQ ID NO: 1882409
ccgaauuucugugcaguga

SEQ ID NO: 2118881 - RNA, 19 nt, Artificial Sequence
  Description of Artificial Sequence: Synthetic oligonucleotide
  Antisense strand to SEQ ID NO: 2118880
ucacugcacagaaauucgg

SEQ ID NO: 2118882 - RNA, 19 nt, Artificial Sequence
  Description of Artificial Sequence: Synthetic oligonucleotide
  Sense strand starting at position 2271 of SEQ ID NO: 1882409
agcuuuagccuggagauag

SEQ ID NO: 2118883 - RNA, 19 nt, Artificial Sequence
  Description of Artificial Sequence: Synthetic oligonucleotide
  Antisense strand to SEQ ID NO: 2118882
cuaucuccaggcuaaagcu

SEQ ID NO: 2118884 - RNA, 19 nt, Artificial Sequence
  Description of Artificial Sequence: Synthetic oligonucleotide
  Sense strand starting at position 2335 of SEQ ID NO: 1882409
ggaggacuguguuuaagaa

SEQ ID NO: 2118885 - RNA, 19 nt, Artificial Sequence
  Description of Artificial Sequence: Synthetic oligonucleotide
  Antisense strand to SEQ ID NO: 2118884
uucuuaaacacaguccucc

SEQ ID NO: 2118886 - RNA, 19 nt, Artificial Sequence
  Description of Artificial Sequence: Synthetic oligonucleotide
  Sense strand starting at position 2373 of SEQ ID NO: 1882409
gagaucugagcugggagau

SEQ ID NO: 2118887 - RNA, 19 nt, Artificial Sequence
  Description of Artificial Sequence: Synthetic oligonucleotide
  Antisense strand to SEQ ID NO: 2118886
aucucccagcucagaucuc

SEQ ID NO: 2118888 - RNA, 19 nt, Artificial Sequence
  Description of Artificial Sequence: Synthetic oligonucleotide
  Sense strand starting at position 2374 of SEQ ID NO: 1882409
agaucugagcugggagauu

SEQ ID NO: 2118889 - RNA, 19 nt, Artificial Sequence
  Description of Artificial Sequence: Synthetic oligonucleotide
  Antisense strand to SEQ ID NO: 2118888
aaucucccagcucagaucu

SEQ ID NO: 2118890 - RNA, 19 nt, Artificial Sequence
  Description of Artificial Sequence: Synthetic oligonucleotide
  Sense strand starting at position 2393 of SEQ ID NO: 1882409
uaagacuaugguugacuau

SEQ ID NO: 2118891 - RNA, 19 nt, Artificial Sequence
  Description of Artificial Sequence: Synthetic oligonucleotide
  Antisense strand to SEQ ID NO: 2118890
auagucaaccauagucuua

SEQ ID NO: 2118892 - RNA, 19 nt, Artificial Sequence
  Description of Artificial Sequence: Synthetic oligonucleotide
  Sense strand starting at position 2396 of SEQ ID NO: 1882409
gacuaugguugacuauaca

SEQ ID NO: 2118893 - RNA, 19 nt, Artificial Sequence
  Description of Artificial Sequence: Synthetic oligonucleotide
  Antisense strand to SEQ ID NO: 2118892
uguauagucaaccauaguc

SEQ ID NO: 2118894 - RNA, 19 nt, Artificial Sequence
  Description of Artificial Sequence: Synthetic oligonucleotide
  Sense strand starting at position 2790 of SEQ ID NO: 1882409
guugucaauuucucuaguu

SEQ ID NO: 2118895 - RNA, 19 nt, Artificial Sequence
  Description of Artificial Sequence: Synthetic oligonucleotide
  Antisense strand to SEQ ID NO: 2118894
aacuagagaaauugacaac

SEQ ID NO: 2118896 - RNA, 19 nt, Artificial Sequence
  Description of Artificial Sequence: Synthetic oligonucleotide
  Sense strand starting at position 3080 of SEQ ID NO: 1882409
gcuuucuauguagauauaa

SEQ ID NO: 2118897 - RNA, 19 nt, Artificial Sequence
  Description of Artificial Sequence: Synthetic oligonucleotide
  Antisense strand to SEQ ID NO: 2118896
uuauaucuacauagaaagc

SEQ ID NO: 2118898 - RNA, 19 nt, Artificial Sequence
  Description of Artificial Sequence: Synthetic oligonucleotide
  Sense strand starting at position 3115 of SEQ ID NO: 1882409
uggcuaucauggcuauuua

SEQ ID NO: 2118899 - RNA, 19 nt, Artificial Sequence
  Description of Artificial Sequence: Synthetic oligonucleotide
  Antisense strand to SEQ ID NO: 2118898
uaaauagccaugauagcca

SEQ ID NO: 2118900 - RNA, 19 nt, Artificial Sequence
  Description of Artificial Sequence: Synthetic oligonucleotide
  Sense strand starting at position 3242 of SEQ ID NO: 1882409
gugcaaucuaauuagagug

SEQ ID NO: 2118901 - RNA, 19 nt, Artificial Sequence
  Description of Artificial Sequence: Synthetic oligonucleotide
  Antisense strand to SEQ ID NO: 2118900
cacucuaauuagauugcac

SEQ ID NO: 2118902 - RNA, 19 nt, Artificial Sequence
  Description of Artificial Sequence: Synthetic oligonucleotide
  Sense strand starting at position 3314 of SEQ ID NO: 1882409
gcauauacagaauguauga

SEQ ID NO: 2118903 - RNA, 19 nt, Artificial Sequence
  Description of Artificial Sequence: Synthetic oligonucleotide
  Antisense strand to SEQ ID NO: 2118902
ucauacauucuguauaugc

SEQ ID NO: 2118904 - RNA, 19 nt, Artificial Sequence
  Description of Artificial Sequence: Synthetic oligonucleotide
  Sense strand starting at position 3648 of SEQ ID NO: 1882409
auggguaugaagugacaca

SEQ ID NO: 2118905 - RNA, 19 nt, Artificial Sequence
  Description of Artificial Sequence: Synthetic oligonucleotide
  Antisense strand to SEQ ID NO: 2118904
ugugucacuucauacccau

SEQ ID NO: 2118906 - RNA, 19 nt, Artificial Sequence
  Description of Artificial Sequence: Synthetic oligonucleotide
  Sense strand starting at position 3754 of SEQ ID NO: 1882409
agugauaugagcugggaaa

SEQ ID NO: 2118907 - RNA, 19 nt, Artificial Sequence
  Description of Artificial Sequence: Synthetic oligonucleotide
  Antisense strand to SEQ ID NO: 2118906
uuucccagcucauaucacu

SEQ ID NO: 2118908 - RNA, 19 nt, Artificial Sequence
  Description of Artificial Sequence: Synthetic oligonucleotide
  Sense strand starting at position 3824 of SEQ ID NO: 1882409
ugcuaugaagauuaaagca

SEQ ID NO: 2118909 - RNA, 19 nt, Artificial Sequence
  Description of Artificial Sequence: Synthetic oligonucleotide
  Antisense strand to SEQ ID NO: 2118908
ugcuuuaaucuucauagca

SEQ ID NO: 2118910 - RNA, 19 nt, Artificial Sequence
  Description of Artificial Sequence: Synthetic oligonucleotide
  Sense strand starting at position 3831 of SEQ ID NO: 1882409
aagauuaaagcauguggau

SEQ ID NO: 2118911 - RNA, 19 nt, Artificial Sequence
  Description of Artificial Sequence: Synthetic oligonucleotide
  Antisense strand to SEQ ID NO: 2118910
auccacaugcuuuaaucuu

SEQ ID NO: 2118912 - RNA, 19 nt, Artificial Sequence
  Description of Artificial Sequence: Synthetic oligonucleotide
  Sense strand starting at position 3846 of SEQ ID NO: 1882409
ggauaagccauguaaagug

SEQ ID NO: 2118913 - RNA, 19 nt, Artificial Sequence
  Description of Artificial Sequence: Synthetic oligonucleotide
  Antisense strand to SEQ ID NO: 2118912
cacuuuacauggcuuaucc

SEQ ID NO: 2118914 - RNA, 19 nt, Artificial Sequence
  Description of Artificial Sequence: Synthetic oligonucleotide
  Sense strand starting at position 3856 of SEQ ID NO: 1882409
uguaaagugcuugaaacag

SEQ ID NO: 2118915 - RNA, 19 nt, Artificial Sequence
  Description of Artificial Sequence: Synthetic oligonucleotide
  Antisense strand to SEQ ID NO: 2118914
cuguuucaagcacuuuaca

SEQ ID NO: 2118916 - RNA, 19 nt, Artificial Sequence
  Description of Artificial Sequence: Synthetic oligonucleotide
  Sense strand starting at position 3866 of SEQ ID NO: 1882409
uugaaacagugccuacaaa

SEQ ID NO: 2118917 - RNA, 19 nt, Artificial Sequence
  Description of Artificial Sequence: Synthetic oligonucleotide
  Antisense strand to SEQ ID NO: 2118916
uuuguaggcacuguuucaa

SEQ ID NO: 2118918 - RNA, 19 nt, Artificial Sequence
  Description of Artificial Sequence: Synthetic oligonucleotide
  Sense strand starting at position 3970 of SEQ ID NO: 1882409
uuagcaaaguaaucaagaa

SEQ ID NO: 2118919 - RNA, 19 nt, Artificial Sequence
  Description of Artificial Sequence: Synthetic oligonucleotide
  Antisense strand to SEQ ID NO: 2118918
uucuugauuacuuugcuaa

SEQ ID NO: 2118920 - RNA, 19 nt, Artificial Sequence
  Description of Artificial Sequence: Synthetic oligonucleotide
  Sense strand starting at position 604 of SEQ ID NO: 1882410
gccaaauaccucuaugguc

SEQ ID NO: 2118921 - RNA, 19 nt, Artificial Sequence
  Description of Artificial Sequence: Synthetic oligonucleotide
  Antisense strand to SEQ ID NO: 2118920
gaccauagagguauuuggc

SEQ ID NO: 2118922 - RNA, 19 nt, Artificial Sequence
  Description of Artificial Sequence: Synthetic oligonucleotide
  Sense strand starting at position 701 of SEQ ID NO: 1882410
agaguuucugcucauauac

SEQ ID NO: 2118923 - RNA, 19 nt, Artificial Sequence
  Description of Artificial Sequence: Synthetic oligonucleotide
  Antisense strand to SEQ ID NO: 2118922
guauaugagcagaaacucu

SEQ ID NO: 2118924 - RNA, 19 nt, Artificial Sequence
  Description of Artificial Sequence: Synthetic oligonucleotide
  Sense strand starting at position 760 of SEQ ID NO: 1882410
ugauguucucuuuagaaca

SEQ ID NO: 2118925 - RNA, 19 nt, Artificial Sequence
  Description of Artificial Sequence: Synthetic oligonucleotide
  Antisense strand to SEQ ID NO: 2118924
uguucuaaagagaacauca

SEQ ID NO: 2118926 - RNA, 19 nt, Artificial Sequence
  Description of Artificial Sequence: Synthetic oligonucleotide
  Sense strand starting at position 1087 of SEQ ID NO: 1882410
ggauaaccuuuccuugagu

SEQ ID NO: 2118927 - RNA, 19 nt, Artificial Sequence
  Description of Artificial Sequence: Synthetic oligonucleotide
  Antisense strand to SEQ ID NO: 2118926
acucaaggaaagguuaucc

SEQ ID NO: 2118928 - RNA, 19 nt, Artificial Sequence
  Description of Artificial Sequence: Synthetic oligonucleotide
  Sense strand starting at position 1145 of SEQ ID NO: 1882410
cagaauggccucuaaugua

SEQ ID NO: 2118929 - RNA, 19 nt, Artificial Sequence
  Description of Artificial Sequence: Synthetic oligonucleotide
  Antisense strand to SEQ ID NO: 2118928
uacauuagaggccauucug

SEQ ID NO: 2118930 - RNA, 19 nt, Artificial Sequence
  Description of Artificial Sequence: Synthetic oligonucleotide
  Sense strand starting at position 1484 of SEQ ID NO: 1882410
uggauuuauugacaggaua

SEQ ID NO: 2118931 - RNA, 19 nt, Artificial Sequence
  Description of Artificial Sequence: Synthetic oligonucleotide
  Antisense strand to SEQ ID NO: 2118930
uauccugucaauaaaucca

SEQ ID NO: 2118932 - RNA, 19 nt, Artificial Sequence
  Description of Artificial Sequence: Synthetic oligonucleotide
  Sense strand starting at position 1648 of SEQ ID NO: 1882410
gggaauaauuacuuucuuu

SEQ ID NO: 2118933 - RNA, 19 nt, Artificial Sequence
  Description of Artificial Sequence: Synthetic oligonucleotide
  Antisense strand to SEQ ID NO: 2118932
aaagaaaguaauuauuccc

SEQ ID NO: 2118934 - RNA, 19 nt, Artificial Sequence
  Description of Artificial Sequence: Synthetic oligonucleotide
  Sense strand starting at position 1751 of SEQ ID NO: 1882410
acaaauaagugaccuguua

SEQ ID NO: 2118935 - RNA, 19 nt, Artificial Sequence
  Description of Artificial Sequence: Synthetic oligonucleotide
  Antisense strand to SEQ ID NO: 2118934
uaacaggucacuuauuugu

SEQ ID NO: 2118936 - RNA, 19 nt, Artificial Sequence
  Description of Artificial Sequence: Synthetic oligonucleotide
  Sense strand starting at position 1772 of SEQ ID NO: 1882410
gacauugauguuggcaaua

SEQ ID NO: 2118937 - RNA, 19 nt, Artificial Sequence
  Description of Artificial Sequence: Synthetic oligonucleotide
  Antisense strand to SEQ ID NO: 2118936
uauugccaacaucaauguc

SEQ ID NO: 2118938 - RNA, 19 nt, Artificial Sequence
  Description of Artificial Sequence: Synthetic oligonucleotide
  Sense strand starting at position 1777 of SEQ ID NO: 1882410
ugauguuggcaauaucagu

SEQ ID NO: 2118939 - RNA, 19 nt, Artificial Sequence
  Description of Artificial Sequence: Synthetic oligonucleotide
  Antisense strand to SEQ ID NO: 2118938
acugauauugccaacauca

SEQ ID NO: 2118940 - RNA, 19 nt, Artificial Sequence
  Description of Artificial Sequence: Synthetic oligonucleotide
  Sense strand starting at position 1783 of SEQ ID NO: 1882410
uggcaauaucaguaggucu

SEQ ID NO: 2118941 - RNA, 19 nt, Artificial Sequence
  Description of Artificial Sequence: Synthetic oligonucleotide
  Antisense strand to SEQ ID NO: 2118940
agaccuacugauauugcca

SEQ ID NO: 2118942 - RNA, 19 nt, Artificial Sequence
  Description of Artificial Sequence: Synthetic oligonucleotide
  Sense strand starting at position 1906 of SEQ ID NO: 1882410
gggagugagagcugaaauc

SEQ ID NO: 2118943 - RNA, 19 nt, Artificial Sequence
  Description of Artificial Sequence: Synthetic oligonucleotide
  Antisense strand to SEQ ID NO: 2118942
gauuucagcucucacuccc

SEQ ID NO: 2118944 - RNA, 19 nt, Artificial Sequence
  Description of Artificial Sequence: Synthetic oligonucleotide
  Sense strand starting at position 1996 of SEQ ID NO: 1882410
ggcuguuugauuuguggac

SEQ ID NO: 2118945 - RNA, 19 nt, Artificial Sequence
  Description of Artificial Sequence: Synthetic oligonucleotide
  Antisense strand to SEQ ID NO: 2118944
guccacaaaucaaacagcc

SEQ ID NO: 2118946 - RNA, 19 nt, Artificial Sequence
  Description of Artificial Sequence: Synthetic oligonucleotide
  Sense strand starting at position 1997 of SEQ ID NO: 1882410
gcuguuugauuuguggacu

SEQ ID NO: 2118947 - RNA, 19 nt, Artificial Sequence
  Description of Artificial Sequence: Synthetic oligonucleotide
  Antisense strand to SEQ ID NO: 2118946
aguccacaaaucaaacagc

SEQ ID NO: 2118948 - RNA, 19 nt, Artificial Sequence
  Description of Artificial Sequence: Synthetic oligonucleotide
  Sense strand starting at position 2079 of SEQ ID NO: 1882410
uuuaaagggucacuagaua

SEQ ID NO: 2118949 - RNA, 19 nt, Artificial Sequence
  Description of Artificial Sequence: Synthetic oligonucleotide
  Antisense strand to SEQ ID NO: 2118948
uaucuagugacccuuuaaa

SEQ ID NO: 2118950 - RNA, 19 nt, Artificial Sequence
  Description of Artificial Sequence: Synthetic oligonucleotide
  Sense strand starting at position 2084 of SEQ ID NO: 1882410
agggucacuagauagcuau

SEQ ID NO: 2118951 - RNA, 19 nt, Artificial Sequence
  Description of Artificial Sequence: Synthetic oligonucleotide
  Antisense strand to SEQ ID NO: 2118950
auagcuaucuagugacccu

SEQ ID NO: 2118952 - RNA, 19 nt, Artificial Sequence
  Description of Artificial Sequence: Synthetic oligonucleotide
  Sense strand starting at position 2087 of SEQ ID NO: 1882410
gucacuagauagcuaugau

SEQ ID NO: 2118953 - RNA, 19 nt, Artificial Sequence
  Description of Artificial Sequence: Synthetic oligonucleotide
  Antisense strand to SEQ ID NO: 2118952
aucauagcuaucuagugac

SEQ ID NO: 2118954 - RNA, 19 nt, Artificial Sequence
  Description of Artificial Sequence: Synthetic oligonucleotide
  Sense strand starting at position 2217 of SEQ ID NO: 1882410
caaggucacuucucgauaa

SEQ ID NO: 2118955 - RNA, 19 nt, Artificial Sequence
  Description of Artificial Sequence: Synthetic oligonucleotide
  Antisense strand to SEQ ID NO: 2118954
uuaucgagaagugaccuug

SEQ ID NO: 2118956 - RNA, 19 nt, Artificial Sequence
  Description of Artificial Sequence: Synthetic oligonucleotide
  Sense strand starting at position 2219 of SEQ ID NO: 1882410
aggucacuucucgauaaua

SEQ ID NO: 2118957 - RNA, 19 nt, Artificial Sequence
  Description of Artificial Sequence: Synthetic oligonucleotide
  Antisense strand to SEQ ID NO: 2118956
uauuaucgagaagugaccu

SEQ ID NO: 2118958 - RNA, 19 nt, Artificial Sequence
  Description of Artificial Sequence: Synthetic oligonucleotide
  Sense strand starting at position 2221 of SEQ ID NO: 1882410
gucacuucucgauaauauc

SEQ ID NO: 2118959 - RNA, 19 nt, Artificial Sequence
  Description of Artificial Sequence: Synthetic oligonucleotide
  Antisense strand to SEQ ID NO: 2118958
gauauuaucgagaagugac

SEQ ID NO: 2118960 - RNA, 19 nt, Artificial Sequence
  Description of Artificial Sequence: Synthetic oligonucleotide
  Sense strand starting at position 2227 of SEQ ID NO: 1882410
ucucgauaauaucuagaug

SEQ ID NO: 2118961 - RNA, 19 nt, Artificial Sequence
  Description of Artificial Sequence: Synthetic oligonucleotide
  Antisense strand to SEQ ID NO: 2118960
caucuagauauuaucgaga

SEQ ID NO: 2118962 - RNA, 19 nt, Artificial Sequence
  Description of Artificial Sequence: Synthetic oligonucleotide
  Sense strand starting at position 2302 of SEQ ID NO: 1882410
gugacaacacacugauucu

SEQ ID NO: 2118963 - RNA, 19 nt, Artificial Sequence
  Description of Artificial Sequence: Synthetic oligonucleotide
  Antisense strand to SEQ ID NO: 2118962
agaaucaguguguugucac

SEQ ID NO: 2118964 - RNA, 19 nt, Artificial Sequence
  Description of Artificial Sequence: Synthetic oligonucleotide
  Sense strand starting at position 2345 of SEQ ID NO: 1882410
acacuuucucaguauguau

SEQ ID NO: 2118965 - RNA, 19 nt, Artificial Sequence
  Description of Artificial Sequence: Synthetic oligonucleotide
  Antisense strand to SEQ ID NO: 2118964
auacauacugagaaagugu

SEQ ID NO: 2118966 - RNA, 19 nt, Artificial Sequence
  Description of Artificial Sequence: Synthetic oligonucleotide
  Sense strand starting at position 2347 of SEQ ID NO: 1882410
acuuucucaguauguauuu

SEQ ID NO: 2118967 - RNA, 19 nt, Artificial Sequence
  Description of Artificial Sequence: Synthetic oligonucleotide
  Antisense strand to SEQ ID NO: 2118966
aaauacauacugagaaagu

SEQ ID NO: 2118968 - RNA, 19 nt, Artificial Sequence
  Description of Artificial Sequence: Synthetic oligonucleotide
  Sense strand starting at position 3114 of SEQ ID NO: 1882410
ggaacucaguaaguauaau

SEQ ID NO: 2118969 - RNA, 19 nt, Artificial Sequence
  Description of Artificial Sequence: Synthetic oligonucleotide
  Antisense strand to SEQ ID NO: 2118968
auuauacuuacugaguucc

SEQ ID NO: 2118970 - RNA, 19 nt, Artificial Sequence
  Description of Artificial Sequence: Synthetic oligonucleotide
  Sense strand starting at position 3213 of SEQ ID NO: 1882410
gucuguggugacuagagaa

SEQ ID NO: 2118971 - RNA, 19 nt, Artificial Sequence
  Description of Artificial Sequence: Synthetic oligonucleotide
  Antisense strand to SEQ ID NO: 2118970
uucucuagucaccacagac

SEQ ID NO: 2118972 - RNA, 19 nt, Artificial Sequence
  Description of Artificial Sequence: Synthetic oligonucleotide
  Sense strand starting at position 3240 of SEQ ID NO: 1882410
auuuaucaguaacagagaa

SEQ ID NO: 2118973 - RNA, 19 nt, Artificial Sequence
  Description of Artificial Sequence: Synthetic oligonucleotide
  Antisense strand to SEQ ID NO: 2118972
uucucuguuacugauaaau

SEQ ID NO: 2118974 - RNA, 19 nt, Artificial Sequence
  Description of Artificial Sequence: Synthetic oligonucleotide
  Sense strand starting at position 3257 of SEQ ID NO: 1882410
aaaugccuuguguaaggau

SEQ ID NO: 2118975 - RNA, 19 nt, Artificial Sequence
  Description of Artificial Sequence: Synthetic oligonucleotide
  Antisense strand to SEQ ID NO: 2118974
auccuuacacaaggcauuu

SEQ ID NO: 2118976 - RNA, 19 nt, Artificial Sequence
  Description of Artificial Sequence: Synthetic oligonucleotide
  Sense strand starting at position 3310 of SEQ ID NO: 1882410
cauggaagaucaguauucu

SEQ ID NO: 2118977 - RNA, 19 nt, Artificial Sequence
  Description of Artificial Sequence: Synthetic oligonucleotide
  Antisense strand to SEQ ID NO: 2118976
agaauacugaucuuccaug

SEQ ID NO: 2118978 - RNA, 19 nt, Artificial Sequence
  Description of Artificial Sequence: Synthetic oligonucleotide
  Sense strand starting at position 3347 of SEQ ID NO: 1882410
aguaaaugucauggaggag

SEQ ID NO: 2118979 - RNA, 19 nt, Artificial Sequence
  Description of Artificial Sequence: Synthetic oligonucleotide
  Antisense strand to SEQ ID NO: 2118978
cuccuccaugacauuuacu

SEQ ID NO: 2118980 - RNA, 19 nt, Artificial Sequence
  Description of Artificial Sequence: Synthetic oligonucleotide
  Sense strand starting at position 3348 of SEQ ID NO: 1882410
guaaaugucauggaggagu

SEQ ID NO: 2118981 - RNA, 19 nt, Artificial Sequence
  Description of Artificial Sequence: Synthetic oligonucleotide
  Antisense strand to SEQ ID NO: 2118980
acuccuccaugacauuuac

SEQ ID NO: 2118982 - RNA, 19 nt, Artificial Sequence
  Description of Artificial Sequence: Synthetic oligonucleotide
  Sense strand starting at position 3350 of SEQ ID NO: 1882410
aaaugucauggaggaguca

SEQ ID NO: 2118983 - RNA, 19 nt, Artificial Sequence
  Description of Artificial Sequence: Synthetic oligonucleotide
  Antisense strand to SEQ ID NO: 2118982
ugacuccuccaugacauuu

SEQ ID NO: 2118984 - RNA, 19 nt, Artificial Sequence
  Description of Artificial Sequence: Synthetic oligonucleotide
  Sense strand starting at position 3396 of SEQ ID NO: 1882410
gaauuaaacucuuuggagu

SEQ ID NO: 2118985 - RNA, 19 nt, Artificial Sequence
  Description of Artificial Sequence: Synthetic oligonucleotide
  Antisense strand to SEQ ID NO: 2118984
acuccaaagaguuuaauuc

SEQ ID NO: 2118986 - RNA, 19 nt, Artificial Sequence
  Description of Artificial Sequence: Synthetic oligonucleotide
  Sense strand starting at position 3457 of SEQ ID NO: 1882410
uggucuaaugaacggagaa

SEQ ID NO: 2118987 - RNA, 19 nt, Artificial Sequence
  Description of Artificial Sequence: Synthetic oligonucleotide
  Antisense strand to SEQ ID NO: 2118986
uucuccguucauuagacca

SEQ ID NO: 2118988 - RNA, 19 nt, Artificial Sequence
  Description of Artificial Sequence: Synthetic oligonucleotide
  Sense strand starting at position 3489 of SEQ ID NO: 1882410
auuucuuugugaguaagca

SEQ ID NO: 2118989 - RNA, 19 nt, Artificial Sequence
  Description of Artificial Sequence: Synthetic oligonucleotide
  Antisense strand to SEQ ID NO: 2118988
ugcuuacucacaaagaaau

SEQ ID NO: 2118990 - RNA, 19 nt, Artificial Sequence
  Description of Artificial Sequence: Synthetic oligonucleotide
  Sense strand starting at position 3536 of SEQ ID NO: 1882410
uacggacacugagcuauaa

SEQ ID NO: 2118991 - RNA, 19 nt, Artificial Sequence
  Description of Artificial Sequence: Synthetic oligonucleotide
  Antisense strand to SEQ ID NO: 2118990
uuauagcucaguguccgua

SEQ ID NO: 2118992 - RNA, 19 nt, Artificial Sequence
  Description of Artificial Sequence: Synthetic oligonucleotide
  Sense strand starting at position 3538 of SEQ ID NO: 1882410
cggacacugagcuauaauu

SEQ ID NO: 2118993 - RNA, 19 nt, Artificial Sequence
  Description of Artificial Sequence: Synthetic oligonucleotide
  Antisense strand to SEQ ID NO: 2118992
aauuauagcucaguguccg

SEQ ID NO: 2118994 - RNA, 19 nt, Artificial Sequence
  Description of Artificial Sequence: Synthetic oligonucleotide
  Sense strand starting at position 3579 of SEQ ID NO: 1882410
gaaaguuacgaaggguauu

SEQ ID NO: 2118995 - RNA, 19 nt, Artificial Sequence
  Description of Artificial Sequence: Synthetic oligonucleotide
  Antisense strand to SEQ ID NO: 2118994
aauacccuucguaacuuuc

SEQ ID NO: 2118996 - RNA, 19 nt, Artificial Sequence
  Description of Artificial Sequence: Synthetic oligonucleotide
  Sense strand starting at position 3591 of SEQ ID NO: 1882410
ggguauugugaagacguga

SEQ ID NO: 2118997 - RNA, 19 nt, Artificial Sequence
  Description of Artificial Sequence: Synthetic oligonucleotide
  Antisense strand to SEQ ID NO: 2118996
ucacgucuucacaauaccc

SEQ ID NO: 2118998 - RNA, 19 nt, Artificial Sequence
  Description of Artificial Sequence: Synthetic oligonucleotide
  Sense strand starting at position 3659 of SEQ ID NO: 1882410
uaaagauauuggccaguug

SEQ ID NO: 2118999 - RNA, 19 nt, Artificial Sequence
  Description of Artificial Sequence: Synthetic oligonucleotide
  Antisense strand to SEQ ID NO: 2118998
caacuggccaauaucuuua

SEQ ID NO: 2119000 - RNA, 19 nt, Artificial Sequence
  Description of Artificial Sequence: Synthetic oligonucleotide
  Sense strand starting at position 551 of SEQ ID NO: 1882411
gccaaauaccucuaugguc

SEQ ID NO: 2119001 - RNA, 19 nt, Artificial Sequence
  Description of Artificial Sequence: Synthetic oligonucleotide
  Antisense strand to SEQ ID NO: 2119000
gaccauagagguauuuggc

SEQ ID NO: 2119002 - RNA, 19 nt, Artificial Sequence
  Description of Artificial Sequence: Synthetic oligonucleotide
  Sense strand starting at position 648 of SEQ ID NO: 1882411
agaguuucugcucauauac

SEQ ID NO: 2119003 - RNA, 19 nt, Artificial Sequence
  Description of Artificial Sequence: Synthetic oligonucleotide
  Antisense strand to SEQ ID NO: 2119002
guauaugagcagaaacucu

SEQ ID NO: 2119004 - RNA, 19 nt, Artificial Sequence
  Description of Artificial Sequence: Synthetic oligonucleotide
  Sense strand starting at position 707 of SEQ ID NO: 1882411
ugauguucucuuuagaaca

SEQ ID NO: 2119005 - RNA, 19 nt, Artificial Sequence
  Description of Artificial Sequence: Synthetic oligonucleotide
  Antisense strand to SEQ ID NO: 2119004
uguucuaaagagaacauca

SEQ ID NO: 2119006 - RNA, 19 nt, Artificial Sequence
  Description of Artificial Sequence: Synthetic oligonucleotide
  Sense strand starting at position 1034 of SEQ ID NO: 1882411
ggauaaccuuuccuugagu

SEQ ID NO: 2119007 - RNA, 19 nt, Artificial Sequence
  Description of Artificial Sequence: Synthetic oligonucleotide
  Antisense strand to SEQ ID NO: 2119006
acucaaggaaagguuaucc

SEQ ID NO: 2119008 - RNA, 19 nt, Artificial Sequence
  Description of Artificial Sequence: Synthetic oligonucleotide
  Sense strand starting at position 1092 of SEQ ID NO: 1882411
cagaauggccucuaaugua

SEQ ID NO: 2119009 - RNA, 19 nt, Artificial Sequence
  Description of Artificial Sequence: Synthetic oligonucleotide
  Antisense strand to SEQ ID NO: 2119008
uacauuagaggccauucug

SEQ ID NO: 2119010 - RNA, 19 nt, Artificial Sequence
  Description of Artificial Sequence: Synthetic oligonucleotide
  Sense strand starting at position 1431 of SEQ ID NO: 1882411
uggauuuauugacaggaua

SEQ ID NO: 2119011 - RNA, 19 nt, Artificial Sequence
  Description of Artificial Sequence: Synthetic oligonucleotide
  Antisense strand to SEQ ID NO: 2119010
uauccugucaauaaaucca

SEQ ID NO: 2119012 - RNA, 19 nt, Artificial Sequence
  Description of Artificial Sequence: Synthetic oligonucleotide
  Sense strand starting at position 1595 of SEQ ID NO: 1882411
gggaauaauuacuuucuuu

SEQ ID NO: 2119013 - RNA, 19 nt, Artificial Sequence
  Description of Artificial Sequence: Synthetic oligonucleotide
  Antisense strand to SEQ ID NO: 2119012
aaagaaaguaauuauuccc

SEQ ID NO: 2119014 - RNA, 19 nt, Artificial Sequence
  Description of Artificial Sequence: Synthetic oligonucleotide
  Sense strand starting at position 1698 of SEQ ID NO: 1882411
acaaauaagugaccuguua

SEQ ID NO: 2119015 - RNA, 19 nt, Artificial Sequence
  Description of Artificial Sequence: Synthetic oligonucleotide
  Antisense strand to SEQ ID NO: 2119014
uaacaggucacuuauuugu

SEQ ID NO: 2119016 - RNA, 19 nt, Artificial Sequence
  Description of Artificial Sequence: Synthetic oligonucleotide
  Sense strand starting at position 1719 of SEQ ID NO: 1882411
gacauugauguuggcaaua

SEQ ID NO: 2119017 - RNA, 19 nt, Artificial Sequence
  Description of Artificial Sequence: Synthetic oligonucleotide
  Antisense strand to SEQ ID NO: 2119016
uauugccaacaucaauguc

SEQ ID NO: 2119018 - RNA, 19 nt, Artificial Sequence
  Description of Artificial Sequence: Synthetic oligonucleotide
  Sense strand starting at position 1724 of SEQ ID NO: 1882411
ugauguuggcaauaucagu

SEQ ID NO: 2119019 - RNA, 19 nt, Artificial Sequence
  Description of Artificial Sequence: Synthetic oligonucleotide
  Antisense strand to SEQ ID NO: 2119018
acugauauugccaacauca

SEQ ID NO: 2119020 - RNA, 19 nt, Artificial Sequence
  Description of Artificial Sequence: Synthetic oligonucleotide
  Sense strand starting at position 1730 of SEQ ID NO: 1882411
uggcaauaucaguaggucu

SEQ ID NO: 2119021 - RNA, 19 nt, Artificial Sequence
  Description of Artificial Sequence: Synthetic oligonucleotide
  Antisense strand to SEQ ID NO: 2119020
agaccuacugauauugcca

SEQ ID NO: 2119022 - RNA, 19 nt, Artificial Sequence
  Description of Artificial Sequence: Synthetic oligonucleotide
  Sense strand starting at position 1853 of SEQ ID NO: 1882411
gggagugagagcugaaauc

SEQ ID NO: 2119023 - RNA, 19 nt, Artificial Sequence
  Description of Artificial Sequence: Synthetic oligonucleotide
  Antisense strand to SEQ ID NO: 2119022
gauuucagcucucacuccc

SEQ ID NO: 2119024 - RNA, 19 nt, Artificial Sequence
  Description of Artificial Sequence: Synthetic oligonucleotide
  Sense strand starting at position 1943 of SEQ ID NO: 1882411
ggcuguuugauuuguggac

SEQ ID NO: 2119025 - RNA, 19 nt, Artificial Sequence
  Description of Artificial Sequence: Synthetic oligonucleotide
  Antisense strand to SEQ ID NO: 2119024
guccacaaaucaaacagcc

SEQ ID NO: 2119026 - RNA, 19 nt, Artificial Sequence
  Description of Artificial Sequence: Synthetic oligonucleotide
  Sense strand starting at position 1944 of SEQ ID NO: 1882411
gcuguuugauuuguggacu

SEQ ID NO: 2119027 - RNA, 19 nt, Artificial Sequence
  Description of Artificial Sequence: Synthetic oligonucleotide
  Antisense strand to SEQ ID NO: 2119026
aguccacaaaucaaacagc

SEQ ID NO: 2119028 - RNA, 19 nt, Artificial Sequence
  Description of Artificial Sequence: Synthetic oligonucleotide
  Sense strand starting at position 2026 of SEQ ID NO: 1882411
uuuaaagggucacuagaua

SEQ ID NO: 2119029 - RNA, 19 nt, Artificial Sequence
  Description of Artificial Sequence: Synthetic oligonucleotide
  Antisense strand to SEQ ID NO: 2119028
uaucuagugacccuuuaaa

SEQ ID NO: 2119030 - RNA, 19 nt, Artificial Sequence
  Description of Artificial Sequence: Synthetic oligonucleotide
  Sense strand starting at position 2031 of SEQ ID NO: 1882411
agggucacuagauagcuau

SEQ ID NO: 2119031 - RNA, 19 nt, Artificial Sequence
  Description of Artificial Sequence: Synthetic oligonucleotide
  Antisense strand to SEQ ID NO: 2119030
auagcuaucuagugacccu

SEQ ID NO: 2119032 - RNA, 19 nt, Artificial Sequence
  Description of Artificial Sequence: Synthetic oligonucleotide
  Sense strand starting at position 2034 of SEQ ID NO: 1882411
gucacuagauagcuaugau

SEQ ID NO: 2119033 - RNA, 19 nt, Artificial Sequence
  Description of Artificial Sequence: Synthetic oligonucleotide
  Antisense strand to SEQ ID NO: 2119032
aucauagcuaucuagugac

SEQ ID NO: 2119034 - RNA, 19 nt, Artificial Sequence
  Description of Artificial Sequence: Synthetic oligonucleotide
  Sense strand starting at position 2164 of SEQ ID NO: 1882411
caaggucacuucucgauaa

SEQ ID NO: 2119035 - RNA, 19 nt, Artificial Sequence
  Description of Artificial Sequence: Synthetic oligonucleotide
  Antisense strand to SEQ ID NO: 2119034
uuaucgagaagugaccuug

SEQ ID NO: 2119036 - RNA, 19 nt, Artificial Sequence
  Description of Artificial Sequence: Synthetic oligonucleotide
  Sense strand starting at position 2166 of SEQ ID NO: 1882411
aggucacuucucgauaaua

SEQ ID NO: 2119037 - RNA, 19 nt, Artificial Sequence
  Description of Artificial Sequence: Synthetic oligonucleotide
  Antisense strand to SEQ ID NO: 2119036
uauuaucgagaagugaccu

SEQ ID NO: 2119038 - RNA, 19 nt, Artificial Sequence
  Description of Artificial Sequence: Synthetic oligonucleotide
  Sense strand starting at position 2168 of SEQ ID NO: 1882411
gucacuucucgauaauauc

SEQ ID NO: 2119039 - RNA, 19 nt, Artificial Sequence
  Description of Artificial Sequence: Synthetic oligonucleotide
  Antisense strand to SEQ ID NO: 2119038
gauauuaucgagaagugac

SEQ ID NO: 2119040 - RNA, 19 nt, Artificial Sequence
  Description of Artificial Sequence: Synthetic oligonucleotide
  Sense strand starting at position 2174 of SEQ ID NO: 1882411
ucucgauaauaucuagaug

SEQ ID NO: 2119041 - RNA, 19 nt, Artificial Sequence
  Description of Artificial Sequence: Synthetic oligonucleotide
  Antisense strand to SEQ ID NO: 2119040
caucuagauauuaucgaga

SEQ ID NO: 2119042 - RNA, 19 nt, Artificial Sequence
  Description of Artificial Sequence: Synthetic oligonucleotide
  Sense strand starting at position 2249 of SEQ ID NO: 1882411
gugacaacacacugauucu

SEQ ID NO: 2119043 - RNA, 19 nt, Artificial Sequence
  Description of Artificial Sequence: Synthetic oligonucleotide
  Antisense strand to SEQ ID NO: 2119042
agaaucaguguguugucac

SEQ ID NO: 2119044 - RNA, 19 nt, Artificial Sequence
  Description of Artificial Sequence: Synthetic oligonucleotide
  Sense strand starting at position 2292 of SEQ ID NO: 1882411
acacuuucucaguauguau

SEQ ID NO: 2119045 - RNA, 19 nt, Artificial Sequence
  Description of Artificial Sequence: Synthetic oligonucleotide
  Antisense strand to SEQ ID NO: 2119044
auacauacugagaaagugu

SEQ ID NO: 2119046 - RNA, 19 nt, Artificial Sequence
  Description of Artificial Sequence: Synthetic oligonucleotide
  Sense strand starting at position 2294 of SEQ ID NO: 1882411
acuuucucaguauguauuu

SEQ ID NO: 2119047 - RNA, 19 nt, Artificial Sequence
  Description of Artificial Sequence: Synthetic oligonucleotide
  Antisense strand to SEQ ID NO: 2119046
aaauacauacugagaaagu

SEQ ID NO: 2119048 - RNA, 19 nt, Artificial Sequence
  Description of Artificial Sequence: Synthetic oligonucleotide
  Sense strand starting at position 3061 of SEQ ID NO: 1882411
ggaacucaguaaguauaau

SEQ ID NO: 2119049 - RNA, 19 nt, Artificial Sequence
  Description of Artificial Sequence: Synthetic oligonucleotide
  Antisense strand to SEQ ID NO: 2119048
auuauacuuacugaguucc

SEQ ID NO: 2119050 - RNA, 19 nt, Artificial Sequence
  Description of Artificial Sequence: Synthetic oligonucleotide
  Sense strand starting at position 3160 of SEQ ID NO: 1882411
gucuguggugacuagagaa

SEQ ID NO: 2119051 - RNA, 19 nt, Artificial Sequence
  Description of Artificial Sequence: Synthetic oligonucleotide
  Antisense strand to SEQ ID NO: 2119050
uucucuagucaccacagac

SEQ ID NO: 2119052 - RNA, 19 nt, Artificial Sequence
  Description of Artificial Sequence: Synthetic oligonucleotide
  Sense strand starting at position 3187 of SEQ ID NO: 1882411
auuuaucaguaacagagaa

SEQ ID NO: 2119053 - RNA, 19 nt, Artificial Sequence
  Description of Artificial Sequence: Synthetic oligonucleotide
  Antisense strand to SEQ ID NO: 2119052
uucucuguuacugauaaau

SEQ ID NO: 2119054 - RNA, 19 nt, Artificial Sequence
  Description of Artificial Sequence: Synthetic oligonucleotide
  Sense strand starting at position 3204 of SEQ ID NO: 1882411
aaaugccuuguguaaggau

SEQ ID NO: 2119055 - RNA, 19 nt, Artificial Sequence
  Description of Artificial Sequence: Synthetic oligonucleotide
  Antisense strand to SEQ ID NO: 2119054
auccuuacacaaggcauuu

SEQ ID NO: 2119056 - RNA, 19 nt, Artificial Sequence
  Description of Artificial Sequence: Synthetic oligonucleotide
  Sense strand starting at position 3257 of SEQ ID NO: 1882411
cauggaagaucaguauucu

SEQ ID NO: 2119057 - RNA, 19 nt, Artificial Sequence
  Description of Artificial Sequence: Synthetic oligonucleotide
  Antisense strand to SEQ ID NO: 2119056
agaauacugaucuuccaug

SEQ ID NO: 2119058 - RNA, 19 nt, Artificial Sequence
  Description of Artificial Sequence: Synthetic oligonucleotide
  Sense strand starting at position 3294 of SEQ ID NO: 1882411
aguaaaugucauggaggag

SEQ ID NO: 2119059 - RNA, 19 nt, Artificial Sequence
  Description of Artificial Sequence: Synthetic oligonucleotide
  Antisense strand to SEQ ID NO: 2119058
cuccuccaugacauuuacu

SEQ ID NO: 2119060 - RNA, 19 nt, Artificial Sequence
  Description of Artificial Sequence: Synthetic oligonucleotide
  Sense strand starting at position 3295 of SEQ ID NO: 1882411
guaaaugucauggaggagu

SEQ ID NO: 2119061 - RNA, 19 nt, Artificial Sequence
  Description of Artificial Sequence: Synthetic oligonucleotide
  Antisense strand to SEQ ID NO: 2119060
acuccuccaugacauuuac

SEQ ID NO: 2119062 - RNA, 19 nt, Artificial Sequence
  Description of Artificial Sequence: Synthetic oligonucleotide
  Sense strand starting at position 3297 of SEQ ID NO: 1882411
aaaugucauggaggaguca

SEQ ID NO: 2119063 - RNA, 19 nt, Artificial Sequence
  Description of Artificial Sequence: Synthetic oligonucleotide
  Antisense strand to SEQ ID NO: 2119062
ugacuccuccaugacauuu

SEQ ID NO: 2119064 - RNA, 19 nt, Artificial Sequence
  Description of Artificial Sequence: Synthetic oligonucleotide
  Sense strand starting at position 3343 of SEQ ID NO: 1882411
gaauuaaacucuuuggagu

SEQ ID NO: 2119065 - RNA, 19 nt, Artificial Sequence
  Description of Artificial Sequence: Synthetic oligonucleotide
  Antisense strand to SEQ ID NO: 2119064
acuccaaagaguuuaauuc

SEQ ID NO: 2119066 - RNA, 19 nt, Artificial Sequence
  Description of Artificial Sequence: Synthetic oligonucleotide
  Sense strand starting at position 3404 of SEQ ID NO: 1882411
uggucuaaugaacggagaa

SEQ ID NO: 2119067 - RNA, 19 nt, Artificial Sequence
  Description of Artificial Sequence: Synthetic oligonucleotide
  Antisense strand to SEQ ID NO: 2119066
uucuccguucauuagacca

SEQ ID NO: 2119068 - RNA, 19 nt, Artificial Sequence
  Description of Artificial Sequence: Synthetic oligonucleotide
  Sense strand starting at position 3436 of SEQ ID NO: 1882411
auuucuuugugaguaagca

SEQ ID NO: 2119069 - RNA, 19 nt, Artificial Sequence
  Description of Artificial Sequence: Synthetic oligonucleotide
  Antisense strand to SEQ ID NO: 2119068
ugcuuacucacaaagaaau

SEQ ID NO: 2119070 - RNA, 19 nt, Artificial Sequence
  Description of Artificial Sequence: Synthetic oligonucleotide
  Sense strand starting at position 3483 of SEQ ID NO: 1882411
uacggacacugagcuauaa

SEQ ID NO: 2119071 - RNA, 19 nt, Artificial Sequence
  Description of Artificial Sequence: Synthetic oligonucleotide
  Antisense strand to SEQ ID NO: 2119070
uuauagcucaguguccgua

SEQ ID NO: 2119072 - RNA, 19 nt, Artificial Sequence
  Description of Artificial Sequence: Synthetic oligonucleotide
  Sense strand starting at position 3485 of SEQ ID NO: 1882411
cggacacugagcuauaauu

SEQ ID NO: 2119073 - RNA, 19 nt, Artificial Sequence
  Description of Artificial Sequence: Synthetic oligonucleotide
  Antisense strand to SEQ ID NO: 2119072
aauuauagcucaguguccg

SEQ ID NO: 2119074 - RNA, 19 nt, Artificial Sequence
  Description of Artificial Sequence: Synthetic oligonucleotide
  Sense strand starting at position 3526 of SEQ ID NO: 1882411
gaaaguuacgaaggguauu

SEQ ID NO: 2119075 - RNA, 19 nt, Artificial Sequence
  Description of Artificial Sequence: Synthetic oligonucleotide
  Antisense strand to SEQ ID NO: 2119074
aauacccuucguaacuuuc

SEQ ID NO: 2119076 - RNA, 19 nt, Artificial Sequence
  Description of Artificial Sequence: Synthetic oligonucleotide
  Sense strand starting at position 3538 of SEQ ID NO: 1882411
ggguauugugaagacguga

SEQ ID NO: 2119077 - RNA, 19 nt, Artificial Sequence
  Description of Artificial Sequence: Synthetic oligonucleotide
  Antisense strand to SEQ ID NO: 2119076
ucacgucuucacaauaccc

SEQ ID NO: 2119078 - RNA, 19 nt, Artificial Sequence
  Description of Artificial Sequence: Synthetic oligonucleotide
  Sense strand starting at position 3606 of SEQ ID NO: 1882411
uaaagauauuggccaguug

SEQ ID NO: 2119079 - RNA, 19 nt, Artificial Sequence
  Description of Artificial Sequence: Synthetic oligonucleotide
  Antisense strand to SEQ ID NO: 2119078
caacuggccaauaucuuua

SEQ ID NO: 2119080 - RNA, 19 nt, Artificial Sequence
  Description of Artificial Sequence: Synthetic oligonucleotide
  Sense strand starting at position 135 of SEQ ID NO: 1882412
caauacuaggauugaaguu

SEQ ID NO: 2119081 - RNA, 19 nt, Artificial Sequence
  Description of Artificial Sequence: Synthetic oligonucleotide
  Antisense strand to SEQ ID NO: 2119080
aacuucaauccuaguauug

SEQ ID NO: 2119082 - RNA, 19 nt, Artificial Sequence
  Description of Artificial Sequence: Synthetic oligonucleotide
  Sense strand starting at position 144 of SEQ ID NO: 1882412
gauugaaguuugcuuccua

SEQ ID NO: 2119083 - RNA, 19 nt, Artificial Sequence
  Description of Artificial Sequence: Synthetic oligonucleotide
  Antisense strand to SEQ ID NO: 2119082
uaggaagcaaacuucaauc

SEQ ID NO: 2119084 - RNA, 19 nt, Artificial Sequence
  Description of Artificial Sequence: Synthetic oligonucleotide
  Sense strand starting at position 145 of SEQ ID NO: 1882412
auugaaguuugcuuccuaa

SEQ ID NO: 2119085 - RNA, 19 nt, Artificial Sequence
  Description of Artificial Sequence: Synthetic oligonucleotide
  Antisense strand to SEQ ID NO: 2119084
uuaggaagcaaacuucaau

SEQ ID NO: 2119086 - RNA, 19 nt, Artificial Sequence
  Description of Artificial Sequence: Synthetic oligonucleotide
  Sense strand starting at position 406 of SEQ ID NO: 1882412
caaggacagcgugacaaua

SEQ ID NO: 2119087 - RNA, 19 nt, Artificial Sequence
  Description of Artificial Sequence: Synthetic oligonucleotide
  Antisense strand to SEQ ID NO: 2119086
uauugucacgcuguccuug

SEQ ID NO: 2119088 - RNA, 19 nt, Artificial Sequence
  Description of Artificial Sequence: Synthetic oligonucleotide
  Sense strand starting at position 429 of SEQ ID NO: 1882412
auaaauguugcauaaugca

SEQ ID NO: 2119089 - RNA, 19 nt, Artificial Sequence
  Description of Artificial Sequence: Synthetic oligonucleotide
  Antisense strand to SEQ ID NO: 2119088
ugcauuaugcaacauuuau

SEQ ID NO: 2119090 - RNA, 19 nt, Artificial Sequence
  Description of Artificial Sequence: Synthetic oligonucleotide
  Sense strand starting at position 510 of SEQ ID NO: 1882412
agguuuguaauguggaauu

SEQ ID NO: 2119091 - RNA, 19 nt, Artificial Sequence
  Description of Artificial Sequence: Synthetic oligonucleotide
  Antisense strand to SEQ ID NO: 2119090
aauuccacauuacaaaccu

SEQ ID NO: 2119092 - RNA, 19 nt, Artificial Sequence
  Description of Artificial Sequence: Synthetic oligonucleotide
  Sense strand starting at position 512 of SEQ ID NO: 1882412
guuuguaauguggaauuac

SEQ ID NO: 2119093 - RNA, 19 nt, Artificial Sequence
  Description of Artificial Sequence: Synthetic oligonucleotide
  Antisense strand to SEQ ID NO: 2119092
guaauuccacauuacaaac

SEQ ID NO: 2119094 - RNA, 19 nt, Artificial Sequence
  Description of Artificial Sequence: Synthetic oligonucleotide
  Sense strand starting at position 556 of SEQ ID NO: 1882412
acauucuacugagccgaau

SEQ ID NO: 2119095 - RNA, 19 nt, Artificial Sequence
  Description of Artificial Sequence: Synthetic oligonucleotide
  Antisense strand to SEQ ID NO: 2119094
auucggcucaguagaaugu

SEQ ID NO: 2119096 - RNA, 19 nt, Artificial Sequence
  Description of Artificial Sequence: Synthetic oligonucleotide
  Sense strand starting at position 562 of SEQ ID NO: 1882412
uacugagccgaaugacauu

SEQ ID NO: 2119097 - RNA, 19 nt, Artificial Sequence
  Description of Artificial Sequence: Synthetic oligonucleotide
  Antisense strand to SEQ ID NO: 2119096
aaugucauucggcucagua

SEQ ID NO: 2119098 - RNA, 19 nt, Artificial Sequence
  Description of Artificial Sequence: Synthetic oligonucleotide
  Sense strand starting at position 824 of SEQ ID NO: 1882412
cuugguuguauugggauua

SEQ ID NO: 2119099 - RNA, 19 nt, Artificial Sequence
  Description of Artificial Sequence: Synthetic oligonucleotide
  Antisense strand to SEQ ID NO: 2119098
uaaucccaauacaaccaag

SEQ ID NO: 2119100 - RNA, 19 nt, Artificial Sequence
  Description of Artificial Sequence: Synthetic oligonucleotide
  Sense strand starting at position 1236 of SEQ ID NO: 1882412
uccugagcuucuguagaaa

SEQ ID NO: 2119101 - RNA, 19 nt, Artificial Sequence
  Description of Artificial Sequence: Synthetic oligonucleotide
  Antisense strand to SEQ ID NO: 2119100
uuucuacagaagcucagga

SEQ ID NO: 2119102 - RNA, 19 nt, Artificial Sequence
  Description of Artificial Sequence: Synthetic oligonucleotide
  Sense strand starting at position 1272 of SEQ ID NO: 1882412
gcaggaccucauggagaau

SEQ ID NO: 2119103 - RNA, 19 nt, Artificial Sequence
  Description of Artificial Sequence: Synthetic oligonucleotide
  Antisense strand to SEQ ID NO: 2119102
auucuccaugagguccugc

SEQ ID NO: 2119104 - RNA, 19 nt, Artificial Sequence
  Description of Artificial Sequence: Synthetic oligonucleotide
  Sense strand starting at position 1323 of SEQ ID NO: 1882412
gucugcauccuggaagcuu

SEQ ID NO: 2119105 - RNA, 19 nt, Artificial Sequence
  Description of Artificial Sequence: Synthetic oligonucleotide
  Antisense strand to SEQ ID NO: 2119104
aagcuuccaggaugcagac

SEQ ID NO: 2119106 - RNA, 19 nt, Artificial Sequence
  Description of Artificial Sequence: Synthetic oligonucleotide
  Sense strand starting at position 1435 of SEQ ID NO: 1882412
auccuugcuccuugggaaa

SEQ ID NO: 2119107 - RNA, 19 nt, Artificial Sequence
  Description of Artificial Sequence: Synthetic oligonucleotide
  Antisense strand to SEQ ID NO: 2119106
uuucccaaggagcaaggau

SEQ ID NO: 2119108 - RNA, 19 nt, Artificial Sequence
  Description of Artificial Sequence: Synthetic oligonucleotide
  Sense strand starting at position 1459 of SEQ ID NO: 1882412
gauaguuaacgugaccaag

SEQ ID NO: 2119109 - RNA, 19 nt, Artificial Sequence
  Description of Artificial Sequence: Synthetic oligonucleotide
  Antisense strand to SEQ ID NO: 2119108
cuuggucacguuaacuauc

SEQ ID NO: 2119110 - RNA, 19 nt, Artificial Sequence
  Description of Artificial Sequence: Synthetic oligonucleotide
  Sense strand starting at position 1490 of SEQ ID NO: 1882412
gcagccucccucguguuaa

SEQ ID NO: 2119111 - RNA, 19 nt, Artificial Sequence
  Description of Artificial Sequence: Synthetic oligonucleotide
  Antisense strand to SEQ ID NO: 2119110
uuaacacgagggaggcugc

SEQ ID NO: 2119112 - RNA, 19 nt, Artificial Sequence
  Description of Artificial Sequence: Synthetic oligonucleotide
  Sense strand starting at position 1559 of SEQ ID NO: 1882412
ccucaauggcucugggauu

SEQ ID NO: 2119113 - RNA, 19 nt, Artificial Sequence
  Description of Artificial Sequence: Synthetic oligonucleotide
  Antisense strand to SEQ ID NO: 2119112
aaucccagagccauugagg

SEQ ID NO: 2119114 - RNA, 19 nt, Artificial Sequence
  Description of Artificial Sequence: Synthetic oligonucleotide
  Sense strand starting at position 1781 of SEQ ID NO: 1882412
uugguuaaaugcucugaac

SEQ ID NO: 2119115 - RNA, 19 nt, Artificial Sequence
  Description of Artificial Sequence: Synthetic oligonucleotide
  Antisense strand to SEQ ID NO: 2119114
guucagagcauuuaaccaa

SEQ ID NO: 2119116 - RNA, 19 nt, Artificial Sequence
  Description of Artificial Sequence: Synthetic oligonucleotide
  Sense strand starting at position 1783 of SEQ ID NO: 1882412
gguuaaaugcucugaacug

SEQ ID NO: 2119117 - RNA, 19 nt, Artificial Sequence
  Description of Artificial Sequence: Synthetic oligonucleotide
  Antisense strand to SEQ ID NO: 2119116
caguucagagcauuuaacc

SEQ ID NO: 2119118 - RNA, 19 nt, Artificial Sequence
  Description of Artificial Sequence: Synthetic oligonucleotide
  Sense strand starting at position 2035 of SEQ ID NO: 1882412
gaagucggcucuuuaaaga

SEQ ID NO: 2119119 - RNA, 19 nt, Artificial Sequence
  Description of Artificial Sequence: Synthetic oligonucleotide
  Antisense strand to SEQ ID NO: 2119118
ucuuuaaagagccgacuuc

SEQ ID NO: 2119120 - RNA, 19 nt, Artificial Sequence
  Description of Artificial Sequence: Synthetic oligonucleotide
  Sense strand starting at position 2185 of SEQ ID NO: 1882412
gaaacagaaguccaguguu

SEQ ID NO: 2119121 - RNA, 19 nt, Artificial Sequence
  Description of Artificial Sequence: Synthetic oligonucleotide
  Antisense strand to SEQ ID NO: 2119120
aacacuggacuucuguuuc

SEQ ID NO: 2119122 - RNA, 19 nt, Artificial Sequence
  Description of Artificial Sequence: Synthetic oligonucleotide
  Sense strand starting at position 2188 of SEQ ID NO: 1882412
acagaaguccaguguuuau

SEQ ID NO: 2119123 - RNA, 19 nt, Artificial Sequence
  Description of Artificial Sequence: Synthetic oligonucleotide
  Antisense strand to SEQ ID NO: 2119122
auaaacacuggacuucugu

SEQ ID NO: 2119124 - RNA, 19 nt, Artificial Sequence
  Description of Artificial Sequence: Synthetic oligonucleotide
  Sense strand starting at position 2191 of SEQ ID NO: 1882412
gaaguccaguguuuaucca

SEQ ID NO: 2119125 - RNA, 19 nt, Artificial Sequence
  Description of Artificial Sequence: Synthetic oligonucleotide
  Antisense strand to SEQ ID NO: 2119124
uggauaaacacuggacuuc

SEQ ID NO: 2119126 - RNA, 19 nt, Artificial Sequence
  Description of Artificial Sequence: Synthetic oligonucleotide
  Sense strand starting at position 2195 of SEQ ID NO: 1882412
uccaguguuuauccagaug

SEQ ID NO: 2119127 - RNA, 19 nt, Artificial Sequence
  Description of Artificial Sequence: Synthetic oligonucleotide
  Antisense strand to SEQ ID NO: 2119126
caucuggauaaacacugga

SEQ ID NO: 2119128 - RNA, 19 nt, Artificial Sequence
  Description of Artificial Sequence: Synthetic oligonucleotide
  Sense strand starting at position 2198 of SEQ ID NO: 1882412
aguguuuauccagaugcau

SEQ ID NO: 2119129 - RNA, 19 nt, Artificial Sequence
  Description of Artificial Sequence: Synthetic oligonucleotide
  Antisense strand to SEQ ID NO: 2119128
augcaucuggauaaacacu

SEQ ID NO: 2119130 - RNA, 19 nt, Artificial Sequence
  Description of Artificial Sequence: Synthetic oligonucleotide
  Sense strand starting at position 2238 of SEQ ID NO: 1882412
gugaauuaauaacaaggaa

SEQ ID NO: 2119131 - RNA, 19 nt, Artificial Sequence
  Description of Artificial Sequence: Synthetic oligonucleotide
  Antisense strand to SEQ ID NO: 2119130
uuccuuguuauuaauucac

SEQ ID NO: 2119132 - RNA, 19 nt, Artificial Sequence
  Description of Artificial Sequence: Synthetic oligonucleotide
  Sense strand starting at position 2848 of SEQ ID NO: 1882412
gcauaaucgggacauugua

SEQ ID NO: 2119133 - RNA, 19 nt, Artificial Sequence
  Description of Artificial Sequence: Synthetic oligonucleotide
  Antisense strand to SEQ ID NO: 2119132
uacaaugucccgauuaugc

SEQ ID NO: 2119134 - RNA, 19 nt, Artificial Sequence
  Description of Artificial Sequence: Synthetic oligonucleotide
  Sense strand starting at position 2948 of SEQ ID NO: 1882412
gggugacauuuggagggaa

SEQ ID NO: 2119135 - RNA, 19 nt, Artificial Sequence
  Description of Artificial Sequence: Synthetic oligonucleotide
  Antisense strand to SEQ ID NO: 2119134
uucccuccaaaugucaccc

SEQ ID NO: 2119136 - RNA, 19 nt, Artificial Sequence
  Description of Artificial Sequence: Synthetic oligonucleotide
  Sense strand starting at position 3082 of SEQ ID NO: 1882412
cgugcuuguguucugagca

SEQ ID NO: 2119137 - RNA, 19 nt, Artificial Sequence
  Description of Artificial Sequence: Synthetic oligonucleotide
  Antisense strand to SEQ ID NO: 2119136
ugcucagaacacaagcacg

SEQ ID NO: 2119138 - RNA, 19 nt, Artificial Sequence
  Description of Artificial Sequence: Synthetic oligonucleotide
  Sense strand starting at position 3165 of SEQ ID NO: 1882412
ggguguuggcuguuucuuu

SEQ ID NO: 2119139 - RNA, 19 nt, Artificial Sequence
  Description of Artificial Sequence: Synthetic oligonucleotide
  Antisense strand to SEQ ID NO: 2119138
aaagaaacagccaacaccc

SEQ ID NO: 2119140 - RNA, 19 nt, Artificial Sequence
  Description of Artificial Sequence: Synthetic oligonucleotide
  Sense strand starting at position 3233 of SEQ ID NO: 1882412
cagagauuguguuucccug

SEQ ID NO: 2119141 - RNA, 19 nt, Artificial Sequence
  Description of Artificial Sequence: Synthetic oligonucleotide
  Antisense strand to SEQ ID NO: 2119140
cagggaaacacaaucucug

SEQ ID NO: 2119142 - RNA, 19 nt, Artificial Sequence
  Description of Artificial Sequence: Synthetic oligonucleotide
  Sense strand starting at position 3321 of SEQ ID NO: 1882412
uuuccauucugggauuucu

SEQ ID NO: 2119143 - RNA, 19 nt, Artificial Sequence
  Description of Artificial Sequence: Synthetic oligonucleotide
  Antisense strand to SEQ ID NO: 2119142
agaaaucccagaauggaaa

SEQ ID NO: 2119144 - RNA, 19 nt, Artificial Sequence
  Description of Artificial Sequence: Synthetic oligonucleotide
  Sense strand starting at position 3329 of SEQ ID NO: 1882412
cugggauuucugcgaucuc

SEQ ID NO: 2119145 - RNA, 19 nt, Artificial Sequence
  Description of Artificial Sequence: Synthetic oligonucleotide
  Antisense strand to SEQ ID NO: 2119144
gagaucgcagaaaucccag

SEQ ID NO: 2119146 - RNA, 19 nt, Artificial Sequence
  Description of Artificial Sequence: Synthetic oligonucleotide
  Sense strand starting at position 3359 of SEQ ID NO: 1882412
gccugcaauuccuuggaaa

SEQ ID NO: 2119147 - RNA, 19 nt, Artificial Sequence
  Description of Artificial Sequence: Synthetic oligonucleotide
  Antisense strand to SEQ ID NO: 2119146
uuuccaaggaauugcaggc

SEQ ID NO: 2119148 - RNA, 19 nt, Artificial Sequence
  Description of Artificial Sequence: Synthetic oligonucleotide
  Sense strand starting at position 3360 of SEQ ID NO: 1882412
ccugcaauuccuuggaaag

SEQ ID NO: 2119149 - RNA, 19 nt, Artificial Sequence
  Description of Artificial Sequence: Synthetic oligonucleotide
  Antisense strand to SEQ ID NO: 2119148
cuuuccaaggaauugcagg

SEQ ID NO: 2119150 - RNA, 19 nt, Artificial Sequence
  Description of Artificial Sequence: Synthetic oligonucleotide
  Sense strand starting at position 3361 of SEQ ID NO: 1882412
cugcaauuccuuggaaaga

SEQ ID NO: 2119151 - RNA, 19 nt, Artificial Sequence
  Description of Artificial Sequence: Synthetic oligonucleotide
  Antisense strand to SEQ ID NO: 2119150
ucuuuccaaggaauugcag

SEQ ID NO: 2119152 - RNA, 19 nt, Artificial Sequence
  Description of Artificial Sequence: Synthetic oligonucleotide
  Sense strand starting at position 3732 of SEQ ID NO: 1882412
augacacuucugcaugagu

SEQ ID NO: 2119153 - RNA, 19 nt, Artificial Sequence
  Description of Artificial Sequence: Synthetic oligonucleotide
  Antisense strand to SEQ ID NO: 2119152
acucaugcagaagugucau

SEQ ID NO: 2119154 - RNA, 19 nt, Artificial Sequence
  Description of Artificial Sequence: Synthetic oligonucleotide
  Sense strand starting at position 3839 of SEQ ID NO: 1882412
uguguucugagagaugcau

SEQ ID NO: 2119155 - RNA, 19 nt, Artificial Sequence
  Description of Artificial Sequence: Synthetic oligonucleotide
  Antisense strand to SEQ ID NO: 2119154
augcaucucucagaacaca

SEQ ID NO: 2119156 - RNA, 19 nt, Artificial Sequence
  Description of Artificial Sequence: Synthetic oligonucleotide
  Sense strand starting at position 3843 of SEQ ID NO: 1882412
uucugagagaugcauguga

SEQ ID NO: 2119157 - RNA, 19 nt, Artificial Sequence
  Description of Artificial Sequence: Synthetic oligonucleotide
  Antisense strand to SEQ ID NO: 2119156
ucacaugcaucucucagaa

SEQ ID NO: 2119158 - RNA, 19 nt, Artificial Sequence
  Description of Artificial Sequence: Synthetic oligonucleotide
  Sense strand starting at position 3877 of SEQ ID NO: 1882412
guguuaacaucacugagga

SEQ ID NO: 2119159 - RNA, 19 nt, Artificial Sequence
  Description of Artificial Sequence: Synthetic oligonucleotide
  Antisense strand to SEQ ID NO: 2119158
uccucagugauguuaacac

SEQ ID NO: 2119160 - RNA, 19 nt, Artificial Sequence
  Description of Artificial Sequence: Synthetic oligonucleotide
  Sense strand starting at position 7 of SEQ ID NO: 1882414
aggcuuuggucuuugauuu

SEQ ID NO: 2119161 - RNA, 19 nt, Artificial Sequence
  Description of Artificial Sequence: Synthetic oligonucleotide
  Antisense strand to SEQ ID NO: 2119160
aaaucaaagaccaaagccu

SEQ ID NO: 2119162 - RNA, 19 nt, Artificial Sequence
  Description of Artificial Sequence: Synthetic oligonucleotide
  Sense strand starting at position 488 of SEQ ID NO: 1882414
uguaucgagguuuaaagua

SEQ ID NO: 2119163 - RNA, 19 nt, Artificial Sequence
  Description of Artificial Sequence: Synthetic oligonucleotide
  Antisense strand to SEQ ID NO: 2119162
uacuuuaaaccucgauaca

SEQ ID NO: 2119164 - RNA, 19 nt, Artificial Sequence
  Description of Artificial Sequence: Synthetic oligonucleotide
  Sense strand starting at position 509 of SEQ ID NO: 1882414
cucugagauuugggagaga

SEQ ID NO: 2119165 - RNA, 19 nt, Artificial Sequence
  Description of Artificial Sequence: Synthetic oligonucleotide
  Antisense strand to SEQ ID NO: 2119164
ucucucccaaaucucagag

SEQ ID NO: 2119166 - RNA, 19 nt, Artificial Sequence
  Description of Artificial Sequence: Synthetic oligonucleotide
  Sense strand starting at position 575 of SEQ ID NO: 1882414
acuuuaccucuagaaacgu

SEQ ID NO: 2119167 - RNA, 19 nt, Artificial Sequence
  Description of Artificial Sequence: Synthetic oligonucleotide
  Antisense strand to SEQ ID NO: 2119166
acguuucuagagguaaagu

SEQ ID NO: 2119168 - RNA, 19 nt, Artificial Sequence
  Description of Artificial Sequence: Synthetic oligonucleotide
  Sense strand starting at position 614 of SEQ ID NO: 1882414
ugucaugcccuggagagaa

SEQ ID NO: 2119169 - RNA, 19 nt, Artificial Sequence
  Description of Artificial Sequence: Synthetic oligonucleotide
  Antisense strand to SEQ ID NO: 2119168
uucucuccagggcaugaca

SEQ ID NO: 2119170 - RNA, 19 nt, Artificial Sequence
  Description of Artificial Sequence: Synthetic oligonucleotide
  Sense strand starting at position 816 of SEQ ID NO: 1882414
aguagugacacucaagagu

SEQ ID NO: 2119171 - RNA, 19 nt, Artificial Sequence
  Description of Artificial Sequence: Synthetic oligonucleotide
  Antisense strand to SEQ ID NO: 2119170
acucuugagugucacuacu

SEQ ID NO: 2119172 - RNA, 19 nt, Artificial Sequence
  Description of Artificial Sequence: Synthetic oligonucleotide
  Sense strand starting at position 1064 of SEQ ID NO: 1882414
uguagaaacuagguaguua

SEQ ID NO: 2119173 - RNA, 19 nt, Artificial Sequence
  Description of Artificial Sequence: Synthetic oligonucleotide
  Antisense strand to SEQ ID NO: 2119172
uaacuaccuaguuucuaca

SEQ ID NO: 2119174 - RNA, 19 nt, Artificial Sequence
  Description of Artificial Sequence: Synthetic oligonucleotide
  Sense strand starting at position 1092 of SEQ ID NO: 1882414
gcugaucaaggcuauggua

SEQ ID NO: 2119175 - RNA, 19 nt, Artificial Sequence
  Description of Artificial Sequence: Synthetic oligonucleotide
  Antisense strand to SEQ ID NO: 2119174
uaccauagccuugaucagc

SEQ ID NO: 2119176 - RNA, 19 nt, Artificial Sequence
  Description of Artificial Sequence: Synthetic oligonucleotide
  Sense strand starting at position 1367 of SEQ ID NO: 1882414
uucccaugccuuuguauuu

SEQ ID NO: 2119177 - RNA, 19 nt, Artificial Sequence
  Description of Artificial Sequence: Synthetic oligonucleotide
  Antisense strand to SEQ ID NO: 2119176
aaauacaaaggcaugggaa

SEQ ID NO: 2119178 - RNA, 19 nt, Artificial Sequence
  Description of Artificial Sequence: Synthetic oligonucleotide
  Sense strand starting at position 1432 of SEQ ID NO: 1882414
acuguaggaguaugauaga

SEQ ID NO: 2119179 - RNA, 19 nt, Artificial Sequence
  Description of Artificial Sequence: Synthetic oligonucleotide
  Antisense strand to SEQ ID NO: 2119178
ucuaucauacuccuacagu

SEQ ID NO: 2119180 - RNA, 19 nt, Artificial Sequence
  Description of Artificial Sequence: Synthetic oligonucleotide
  Sense strand starting at position 1441 of SEQ ID NO: 1882414
guaugauagaucuauguug

SEQ ID NO: 2119181 - RNA, 19 nt, Artificial Sequence
  Description of Artificial Sequence: Synthetic oligonucleotide
  Antisense strand to SEQ ID NO: 2119180
caacauagaucuaucauac

SEQ ID NO: 2119182 - RNA, 19 nt, Artificial Sequence
  Description of Artificial Sequence: Synthetic oligonucleotide
  Sense strand starting at position 1443 of SEQ ID NO: 1882414
augauagaucuauguugac

SEQ ID NO: 2119183 - RNA, 19 nt, Artificial Sequence
  Description of Artificial Sequence: Synthetic oligonucleotide
  Antisense strand to SEQ ID NO: 2119182
gucaacauagaucuaucau

SEQ ID NO: 2119184 - RNA, 19 nt, Artificial Sequence
  Description of Artificial Sequence: Synthetic oligonucleotide
  Sense strand starting at position 1449 of SEQ ID NO: 1882414
gaucuauguugaccugaau

SEQ ID NO: 2119185 - RNA, 19 nt, Artificial Sequence
  Description of Artificial Sequence: Synthetic oligonucleotide
  Antisense strand to SEQ ID NO: 2119184
auucaggucaacauagauc

SEQ ID NO: 2119186 - RNA, 19 nt, Artificial Sequence
  Description of Artificial Sequence: Synthetic oligonucleotide
  Sense strand starting at position 1573 of SEQ ID NO: 1882414
aggcacauuucggauuuga

SEQ ID NO: 2119187 - RNA, 19 nt, Artificial Sequence
  Description of Artificial Sequence: Synthetic oligonucleotide
  Antisense strand to SEQ ID NO: 2119186
ucaaauccgaaaugugccu

SEQ ID NO: 2119188 - RNA, 19 nt, Artificial Sequence
  Description of Artificial Sequence: Synthetic oligonucleotide
  Sense strand starting at position 1663 of SEQ ID NO: 1882414
cgauuccuauucccagaua

SEQ ID NO: 2119189 - RNA, 19 nt, Artificial Sequence
  Description of Artificial Sequence: Synthetic oligonucleotide
  Antisense strand to SEQ ID NO: 2119188
uaucugggaauaggaaucg

SEQ ID NO: 2119190 - RNA, 19 nt, Artificial Sequence
  Description of Artificial Sequence: Synthetic oligonucleotide
  Sense strand starting at position 1850 of SEQ ID NO: 1882414
gagggaaagagguguguua

SEQ ID NO: 2119191 - RNA, 19 nt, Artificial Sequence
  Description of Artificial Sequence: Synthetic oligonucleotide
  Antisense strand to SEQ ID NO: 2119190
uaacacaccucuuucccuc

SEQ ID NO: 2119192 - RNA, 19 nt, Artificial Sequence
  Description of Artificial Sequence: Synthetic oligonucleotide
  Sense strand starting at position 1852 of SEQ ID NO: 1882414
gggaaagagguguguuacu

SEQ ID NO: 2119193 - RNA, 19 nt, Artificial Sequence
  Description of Artificial Sequence: Synthetic oligonucleotide
  Antisense strand to SEQ ID NO: 2119192
aguaacacaccucuuuccc

SEQ ID NO: 2119194 - RNA, 19 nt, Artificial Sequence
  Description of Artificial Sequence: Synthetic oligonucleotide
  Sense strand starting at position 2014 of SEQ ID NO: 1882414
aacagucuccuuggagaau

SEQ ID NO: 2119195 - RNA, 19 nt, Artificial Sequence
  Description of Artificial Sequence: Synthetic oligonucleotide
  Antisense strand to SEQ ID NO: 2119194
auucuccaaggagacuguu

SEQ ID NO: 2119196 - RNA, 19 nt, Artificial Sequence
  Description of Artificial Sequence: Synthetic oligonucleotide
  Sense strand starting at position 2025 of SEQ ID NO: 1882414
uggagaaucauguggccca

SEQ ID NO: 2119197 - RNA, 19 nt, Artificial Sequence
  Description of Artificial Sequence: Synthetic oligonucleotide
  Antisense strand to SEQ ID NO: 2119196
ugggccacaugauucucca

SEQ ID NO: 2119198 - RNA, 19 nt, Artificial Sequence
  Description of Artificial Sequence: Synthetic oligonucleotide
  Sense strand starting at position 2028 of SEQ ID NO: 1882414
agaaucauguggcccacaa

SEQ ID NO: 2119199 - RNA, 19 nt, Artificial Sequence
  Description of Artificial Sequence: Synthetic oligonucleotide
  Antisense strand to SEQ ID NO: 2119198
uugugggccacaugauucu

SEQ ID NO: 2119200 - RNA, 19 nt, Artificial Sequence
  Description of Artificial Sequence: Synthetic oligonucleotide
  Sense strand starting at position 2049 of SEQ ID NO: 1882414
gacuuuauguaauugagaa

SEQ ID NO: 2119201 - RNA, 19 nt, Artificial Sequence
  Description of Artificial Sequence: Synthetic oligonucleotide
  Antisense strand to SEQ ID NO: 2119200
uucucaauuacauaaaguc

SEQ ID NO: 2119202 - RNA, 19 nt, Artificial Sequence
  Description of Artificial Sequence: Synthetic oligonucleotide
  Sense strand starting at position 2130 of SEQ ID NO: 1882414
uguuuauucugacuacaca

SEQ ID NO: 2119203 - RNA, 19 nt, Artificial Sequence
  Description of Artificial Sequence: Synthetic oligonucleotide
  Antisense strand to SEQ ID NO: 2119202
uguguagucagaauaaaca

SEQ ID NO: 2119204 - RNA, 19 nt, Artificial Sequence
  Description of Artificial Sequence: Synthetic oligonucleotide
  Sense strand starting at position 2131 of SEQ ID NO: 1882414
guuuauucugacuacacau

SEQ ID NO: 2119205 - RNA, 19 nt, Artificial Sequence
  Description of Artificial Sequence: Synthetic oligonucleotide
  Antisense strand to SEQ ID NO: 2119204
auguguagucagaauaaac

SEQ ID NO: 2119206 - RNA, 19 nt, Artificial Sequence
  Description of Artificial Sequence: Synthetic oligonucleotide
  Sense strand starting at position 2168 of SEQ ID NO: 1882414
ucagucuguucucugauuu

SEQ ID NO: 2119207 - RNA, 19 nt, Artificial Sequence
  Description of Artificial Sequence: Synthetic oligonucleotide
  Antisense strand to SEQ ID NO: 2119206
aaaucagagaacagacuga

SEQ ID NO: 2119208 - RNA, 19 nt, Artificial Sequence
  Description of Artificial Sequence: Synthetic oligonucleotide
  Sense strand starting at position 2287 of SEQ ID NO: 1882414
acuggugguauguaggaua

SEQ ID NO: 2119209 - RNA, 19 nt, Artificial Sequence
  Description of Artificial Sequence: Synthetic oligonucleotide
  Antisense strand to SEQ ID NO: 2119208
uauccuacauaccaccagu

SEQ ID NO: 2119210 - RNA, 19 nt, Artificial Sequence
  Description of Artificial Sequence: Synthetic oligonucleotide
  Sense strand starting at position 2484 of SEQ ID NO: 1882414
auaauugaugugcagauau

SEQ ID NO: 2119211 - RNA, 19 nt, Artificial Sequence
  Description of Artificial Sequence: Synthetic oligonucleotide
  Antisense strand to SEQ ID NO: 2119210
auaucugcacaucaauuau

SEQ ID NO: 2119212 - RNA, 19 nt, Artificial Sequence
  Description of Artificial Sequence: Synthetic oligonucleotide
  Sense strand starting at position 2559 of SEQ ID NO: 1882414
ugauaaguuauauggugga

SEQ ID NO: 2119213 - RNA, 19 nt, Artificial Sequence
  Description of Artificial Sequence: Synthetic oligonucleotide
  Antisense strand to SEQ ID NO: 2119212
uccaccauauaacuuauca

SEQ ID NO: 2119214 - RNA, 19 nt, Artificial Sequence
  Description of Artificial Sequence: Synthetic oligonucleotide
  Sense strand starting at position 2687 of SEQ ID NO: 1882414
uguuuaaaucuaggaaccu

SEQ ID NO: 2119215 - RNA, 19 nt, Artificial Sequence
  Description of Artificial Sequence: Synthetic oligonucleotide
  Antisense strand to SEQ ID NO: 2119214
agguuccuagauuuaaaca

SEQ ID NO: 2119216 - RNA, 19 nt, Artificial Sequence
  Description of Artificial Sequence: Synthetic oligonucleotide
  Sense strand starting at position 2803 of SEQ ID NO: 1882414
aggcucaaaucagauuuaa

SEQ ID NO: 2119217 - RNA, 19 nt, Artificial Sequence
  Description of Artificial Sequence: Synthetic oligonucleotide
  Antisense strand to SEQ ID NO: 2119216
uuaaaucugauuugagccu

SEQ ID NO: 2119218 - RNA, 19 nt, Artificial Sequence
  Description of Artificial Sequence: Synthetic oligonucleotide
  Sense strand starting at position 2892 of SEQ ID NO: 1882414
augauuugcuuugcugaua

SEQ ID NO: 2119219 - RNA, 19 nt, Artificial Sequence
  Description of Artificial Sequence: Synthetic oligonucleotide
  Antisense strand to SEQ ID NO: 2119218
uaucagcaaagcaaaucau

SEQ ID NO: 2119220 - RNA, 19 nt, Artificial Sequence
  Description of Artificial Sequence: Synthetic oligonucleotide
  Sense strand starting at position 2893 of SEQ ID NO: 1882414
ugauuugcuuugcugauau

SEQ ID NO: 2119221 - RNA, 19 nt, Artificial Sequence
  Description of Artificial Sequence: Synthetic oligonucleotide
  Antisense strand to SEQ ID NO: 2119220
auaucagcaaagcaaauca

SEQ ID NO: 2119222 - RNA, 19 nt, Artificial Sequence
  Description of Artificial Sequence: Synthetic oligonucleotide
  Sense strand starting at position 3047 of SEQ ID NO: 1882414
cucacugugcuggagauua

SEQ ID NO: 2119223 - RNA, 19 nt, Artificial Sequence
  Description of Artificial Sequence: Synthetic oligonucleotide
  Antisense strand to SEQ ID NO: 2119222
uaaucuccagcacagugag

SEQ ID NO: 2119224 - RNA, 19 nt, Artificial Sequence
  Description of Artificial Sequence: Synthetic oligonucleotide
  Sense strand starting at position 3049 of SEQ ID NO: 1882414
cacugugcuggagauuaaa

SEQ ID NO: 2119225 - RNA, 19 nt, Artificial Sequence
  Description of Artificial Sequence: Synthetic oligonucleotide
  Antisense strand to SEQ ID NO: 2119224
uuuaaucuccagcacagug

SEQ ID NO: 2119226 - RNA, 19 nt, Artificial Sequence
  Description of Artificial Sequence: Synthetic oligonucleotide
  Sense strand starting at position 3093 of SEQ ID NO: 1882414
gccagugacauggaaguaa

SEQ ID NO: 2119227 - RNA, 19 nt, Artificial Sequence
  Description of Artificial Sequence: Synthetic oligonucleotide
  Antisense strand to SEQ ID NO: 2119226
uuacuuccaugucacuggc

SEQ ID NO: 2119228 - RNA, 19 nt, Artificial Sequence
  Description of Artificial Sequence: Synthetic oligonucleotide
  Sense strand starting at position 3130 of SEQ ID NO: 1882414
ggugacaucgacugcauuu

SEQ ID NO: 2119229 - RNA, 19 nt, Artificial Sequence
  Description of Artificial Sequence: Synthetic oligonucleotide
  Antisense strand to SEQ ID NO: 2119228
aaaugcagucgaugucacc

SEQ ID NO: 2119230 - RNA, 19 nt, Artificial Sequence
  Description of Artificial Sequence: Synthetic oligonucleotide
  Sense strand starting at position 3341 of SEQ ID NO: 1882414
uuaugaagaucaguccuuu

SEQ ID NO: 2119231 - RNA, 19 nt, Artificial Sequence
  Description of Artificial Sequence: Synthetic oligonucleotide
  Antisense strand to SEQ ID NO: 2119230
aaaggacugaucuucauaa

SEQ ID NO: 2119232 - RNA, 19 nt, Artificial Sequence
  Description of Artificial Sequence: Synthetic oligonucleotide
  Sense strand starting at position 3579 of SEQ ID NO: 1882414
gugaucgauguuuaucaaa

SEQ ID NO: 2119233 - RNA, 19 nt, Artificial Sequence
  Description of Artificial Sequence: Synthetic oligonucleotide
  Antisense strand to SEQ ID NO: 2119232
uuugauaaacaucgaucac

SEQ ID NO: 2119234 - RNA, 19 nt, Artificial Sequence
  Description of Artificial Sequence: Synthetic oligonucleotide
  Sense strand starting at position 3581 of SEQ ID NO: 1882414
gaucgauguuuaucaaaug

SEQ ID NO: 2119235 - RNA, 19 nt, Artificial Sequence
  Description of Artificial Sequence: Synthetic oligonucleotide
  Antisense strand to SEQ ID NO: 2119234
cauuugauaaacaucgauc

SEQ ID NO: 2119236 - RNA, 19 nt, Artificial Sequence
  Description of Artificial Sequence: Synthetic oligonucleotide
  Sense strand starting at position 3761 of SEQ ID NO: 1882414
guaguacaacgauggaaau

SEQ ID NO: 2119237 - RNA, 19 nt, Artificial Sequence
  Description of Artificial Sequence: Synthetic oligonucleotide
  Antisense strand to SEQ ID NO: 2119236
auuuccaucguuguacuac

SEQ ID NO: 2119238 - RNA, 19 nt, Artificial Sequence
  Description of Artificial Sequence: Synthetic oligonucleotide
  Sense strand starting at position 3795 of SEQ ID NO: 1882414
gguaaagagcaguacagua

SEQ ID NO: 2119239 - RNA, 19 nt, Artificial Sequence
  Description of Artificial Sequence: Synthetic oligonucleotide
  Antisense strand to SEQ ID NO: 2119238
uacuguacugcucuuuacc

SEQ ID NO: 2119240 - RNA, 19 nt, Artificial Sequence
  Description of Artificial Sequence: Synthetic oligonucleotide
  Sense strand starting at position 25 of SEQ ID NO: 1882413
guuguaaauuucuugcaca

SEQ ID NO: 2119241 - RNA, 19 nt, Artificial Sequence
  Description of Artificial Sequence: Synthetic oligonucleotide
  Antisense strand to SEQ ID NO: 2119240
ugugcaagaaauuuacaac

SEQ ID NO: 2119242 - RNA, 19 nt, Artificial Sequence
  Description of Artificial Sequence: Synthetic oligonucleotide
  Sense strand starting at position 210 of SEQ ID NO: 1882413
cuuguagaauuucugucuu

SEQ ID NO: 2119243 - RNA, 19 nt, Artificial Sequence
  Description of Artificial Sequence: Synthetic oligonucleotide
  Antisense strand to SEQ ID NO: 2119242
aagacagaaauucuacaag

SEQ ID NO: 2119244 - RNA, 19 nt, Artificial Sequence
  Description of Artificial Sequence: Synthetic oligonucleotide
  Sense strand starting at position 244 of SEQ ID NO: 1882413
gcaguugcaauggauugau

SEQ ID NO: 2119245 - RNA, 19 nt, Artificial Sequence
  Description of Artificial Sequence: Synthetic oligonucleotide
  Antisense strand to SEQ ID NO: 2119244
aucaauccauugcaacugc

SEQ ID NO: 2119246 - RNA, 19 nt, Artificial Sequence
  Description of Artificial Sequence: Synthetic oligonucleotide
  Sense strand starting at position 247 of SEQ ID NO: 1882413
guugcaauggauugaucua

SEQ ID NO: 2119247 - RNA, 19 nt, Artificial Sequence
  Description of Artificial Sequence: Synthetic oligonucleotide
  Antisense strand to SEQ ID NO: 2119246
uagaucaauccauugcaac

SEQ ID NO: 2119248 - RNA, 19 nt, Artificial Sequence
  Description of Artificial Sequence: Synthetic oligonucleotide
  Sense strand starting at position 299 of SEQ ID NO: 1882413
guauuugauucuguaucuu

SEQ ID NO: 2119249 - RNA, 19 nt, Artificial Sequence
  Description of Artificial Sequence: Synthetic oligonucleotide
  Antisense strand to SEQ ID NO: 2119248
aagauacagaaucaaauac

SEQ ID NO: 2119250 - RNA, 19 nt, Artificial Sequence
  Description of Artificial Sequence: Synthetic oligonucleotide
  Sense strand starting at position 451 of SEQ ID NO: 1882413
uuuaaucagcucugaauga

SEQ ID NO: 2119251 - RNA, 19 nt, Artificial Sequence
  Description of Artificial Sequence: Synthetic oligonucleotide
  Antisense strand to SEQ ID NO: 2119250
ucauucagagcugauuaaa

SEQ ID NO: 2119252 - RNA, 19 nt, Artificial Sequence
  Description of Artificial Sequence: Synthetic oligonucleotide
  Sense strand starting at position 455 of SEQ ID NO: 1882413
aucagcucugaaugagacu

SEQ ID NO: 2119253 - RNA, 19 nt, Artificial Sequence
  Description of Artificial Sequence: Synthetic oligonucleotide
  Antisense strand to SEQ ID NO: 2119252
agucucauucagagcugau

SEQ ID NO: 2119254 - RNA, 19 nt, Artificial Sequence
  Description of Artificial Sequence: Synthetic oligonucleotide
  Sense strand starting at position 474 of SEQ ID NO: 1882413
cuacuauguggacagcaau

SEQ ID NO: 2119255 - RNA, 19 nt, Artificial Sequence
  Description of Artificial Sequence: Synthetic oligonucleotide
  Antisense strand to SEQ ID NO: 2119254
auugcuguccacauaguag

SEQ ID NO: 2119256 - RNA, 19 nt, Artificial Sequence
  Description of Artificial Sequence: Synthetic oligonucleotide
  Sense strand starting at position 480 of SEQ ID NO: 1882413
uguggacagcaaugaguaa

SEQ ID NO: 2119257 - RNA, 19 nt, Artificial Sequence
  Description of Artificial Sequence: Synthetic oligonucleotide
  Antisense strand to SEQ ID NO: 2119256
uuacucauugcuguccaca

SEQ ID NO: 2119258 - RNA, 19 nt, Artificial Sequence
  Description of Artificial Sequence: Synthetic oligonucleotide
  Sense strand starting at position 583 of SEQ ID NO: 1882413
uguaauaugggcuauagua

SEQ ID NO: 2119259 - RNA, 19 nt, Artificial Sequence
  Description of Artificial Sequence: Synthetic oligonucleotide
  Antisense strand to SEQ ID NO: 2119258
uacuauagcccauauuaca

SEQ ID NO: 2119260 - RNA, 19 nt, Artificial Sequence
  Description of Artificial Sequence: Synthetic oligonucleotide
  Sense strand starting at position 665 of SEQ ID NO: 1882413
cuaagcugucaugaaggau

SEQ ID NO: 2119261 - RNA, 19 nt, Artificial Sequence
  Description of Artificial Sequence: Synthetic oligonucleotide
  Antisense strand to SEQ ID NO: 2119260
auccuucaugacagcuuag

SEQ ID NO: 2119262 - RNA, 19 nt, Artificial Sequence
  Description of Artificial Sequence: Synthetic oligonucleotide
  Sense strand starting at position 896 of SEQ ID NO: 1882413
ggguaaugucaagaguuga

SEQ ID NO: 2119263 - RNA, 19 nt, Artificial Sequence
  Description of Artificial Sequence: Synthetic oligonucleotide
  Antisense strand to SEQ ID NO: 2119262
ucaacucuugacauuaccc

SEQ ID NO: 2119264 - RNA, 19 nt, Artificial Sequence
  Description of Artificial Sequence: Synthetic oligonucleotide
  Sense strand starting at position 961 of SEQ ID NO: 1882413
guaauaaacuggccagacu

SEQ ID NO: 2119265 - RNA, 19 nt, Artificial Sequence
  Description of Artificial Sequence: Synthetic oligonucleotide
  Antisense strand to SEQ ID NO: 2119264
agucuggccaguuuauuac

SEQ ID NO: 2119266 - RNA, 19 nt, Artificial Sequence
  Description of Artificial Sequence: Synthetic oligonucleotide
  Sense strand starting at position 1292 of SEQ ID NO: 1882413
agaagauuagguuguugcu

SEQ ID NO: 2119267 - RNA, 19 nt, Artificial Sequence
  Description of Artificial Sequence: Synthetic oligonucleotide
  Antisense strand to SEQ ID NO: 2119266
agcaacaaccuaaucuucu

SEQ ID NO: 2119268 - RNA, 19 nt, Artificial Sequence
  Description of Artificial Sequence: Synthetic oligonucleotide
  Sense strand starting at position 1339 of SEQ ID NO: 1882413
ugagaaguuguuggagaag

SEQ ID NO: 2119269 - RNA, 19 nt, Artificial Sequence
  Description of Artificial Sequence: Synthetic oligonucleotide
  Antisense strand to SEQ ID NO: 2119268
cuucuccaacaacuucuca

SEQ ID NO: 2119270 - RNA, 19 nt, Artificial Sequence
  Description of Artificial Sequence: Synthetic oligonucleotide
  Sense strand starting at position 1583 of SEQ ID NO: 1882413
ucugcauucccacagaagu

SEQ ID NO: 2119271 - RNA, 19 nt, Artificial Sequence
  Description of Artificial Sequence: Synthetic oligonucleotide
  Antisense strand to SEQ ID NO: 2119270
acuucugugggaaugcaga

SEQ ID NO: 2119272 - RNA, 19 nt, Artificial Sequence
  Description of Artificial Sequence: Synthetic oligonucleotide
  Sense strand starting at position 1593 of SEQ ID NO: 1882413
cacagaaguaguggugaga

SEQ ID NO: 2119273 - RNA, 19 nt, Artificial Sequence
  Description of Artificial Sequence: Synthetic oligonucleotide
  Antisense strand to SEQ ID NO: 2119272
ucucaccacuacuucugug

SEQ ID NO: 2119274 - RNA, 19 nt, Artificial Sequence
  Description of Artificial Sequence: Synthetic oligonucleotide
  Sense strand starting at position 1624 of SEQ ID NO: 1882413
ccacgugaccuugaaugaa

SEQ ID NO: 2119275 - RNA, 19 nt, Artificial Sequence
  Description of Artificial Sequence: Synthetic oligonucleotide
  Antisense strand to SEQ ID NO: 2119274
uucauucaaggucacgugg

SEQ ID NO: 2119276 - RNA, 19 nt, Artificial Sequence
  Description of Artificial Sequence: Synthetic oligonucleotide
  Sense strand starting at position 1627 of SEQ ID NO: 1882413
cgugaccuugaaugaaaga

SEQ ID NO: 2119277 - RNA, 19 nt, Artificial Sequence
  Description of Artificial Sequence: Synthetic oligonucleotide
  Antisense strand to SEQ ID NO: 2119276
ucuuucauucaaggucacg

SEQ ID NO: 2119278 - RNA, 19 nt, Artificial Sequence
  Description of Artificial Sequence: Synthetic oligonucleotide
  Sense strand starting at position 1632 of SEQ ID NO: 1882413
ccuugaaugaaagacguuu

SEQ ID NO: 2119279 - RNA, 19 nt, Artificial Sequence
  Description of Artificial Sequence: Synthetic oligonucleotide
  Antisense strand to SEQ ID NO: 2119278
aaacgucuuucauucaagg

SEQ ID NO: 2119280 - RNA, 19 nt, Artificial Sequence
  Description of Artificial Sequence: Synthetic oligonucleotide
  Sense strand starting at position 1698 of SEQ ID NO: 1882413
agcuuugcugaguaccaga

SEQ ID NO: 2119281 - RNA, 19 nt, Artificial Sequence
  Description of Artificial Sequence: Synthetic oligonucleotide
  Antisense strand to SEQ ID NO: 2119280
ucugguacucagcaaagcu

SEQ ID NO: 2119282 - RNA, 19 nt, Artificial Sequence
  Description of Artificial Sequence: Synthetic oligonucleotide
  Sense strand starting at position 1712 of SEQ ID NO: 1882413
ccagaaggccaguaaguaa

SEQ ID NO: 2119283 - RNA, 19 nt, Artificial Sequence
  Description of Artificial Sequence: Synthetic oligonucleotide
  Antisense strand to SEQ ID NO: 2119282
uuacuuacuggccuucugg

SEQ ID NO: 2119284 - RNA, 19 nt, Artificial Sequence
  Description of Artificial Sequence: Synthetic oligonucleotide
  Sense strand starting at position 1741 of SEQ ID NO: 1882413
cagggagagcuggguuauu

SEQ ID NO: 2119285 - RNA, 19 nt, Artificial Sequence
  Description of Artificial Sequence: Synthetic oligonucleotide
  Antisense strand to SEQ ID NO: 2119284
aauaacccagcucucccug

SEQ ID NO: 2119286 - RNA, 19 nt, Artificial Sequence
  Description of Artificial Sequence: Synthetic oligonucleotide
  Sense strand starting at position 1791 of SEQ ID NO: 1882413
gcucaugaagucugaggaa

SEQ ID NO: 2119287 - RNA, 19 nt, Artificial Sequence
  Description of Artificial Sequence: Synthetic oligonucleotide
  Antisense strand to SEQ ID NO: 2119286
uuccucagacuucaugagc

SEQ ID NO: 2119288 - RNA, 19 nt, Artificial Sequence
  Description of Artificial Sequence: Synthetic oligonucleotide
  Sense strand starting at position 1919 of SEQ ID NO: 1882413
ugacaugagugguuccuuu

SEQ ID NO: 2119289 - RNA, 19 nt, Artificial Sequence
  Description of Artificial Sequence: Synthetic oligonucleotide
  Antisense strand to SEQ ID NO: 2119288
aaaggaaccacucauguca

SEQ ID NO: 2119290 - RNA, 19 nt, Artificial Sequence
  Description of Artificial Sequence: Synthetic oligonucleotide
  Sense strand starting at position 2103 of SEQ ID NO: 1882413
uuggaauaaucuguuuacu

SEQ ID NO: 2119291 - RNA, 19 nt, Artificial Sequence
  Description of Artificial Sequence: Synthetic oligonucleotide
  Antisense strand to SEQ ID NO: 2119290
aguaaacagauuauuccaa

SEQ ID NO: 2119292 - RNA, 19 nt, Artificial Sequence
  Description of Artificial Sequence: Synthetic oligonucleotide
  Sense strand starting at position 2105 of SEQ ID NO: 1882413
ggaauaaucuguuuacuug

SEQ ID NO: 2119293 - RNA, 19 nt, Artificial Sequence
  Description of Artificial Sequence: Synthetic oligonucleotide
  Antisense strand to SEQ ID NO: 2119292
caaguaaacagauuauucc

SEQ ID NO: 2119294 - RNA, 19 nt, Artificial Sequence
  Description of Artificial Sequence: Synthetic oligonucleotide
  Sense strand starting at position 2111 of SEQ ID NO: 1882413
aucuguuuacuugauguau

SEQ ID NO: 2119295 - RNA, 19 nt, Artificial Sequence
  Description of Artificial Sequence: Synthetic oligonucleotide
  Antisense strand to SEQ ID NO: 2119294
auacaucaaguaaacagau

SEQ ID NO: 2119296 - RNA, 19 nt, Artificial Sequence
  Description of Artificial Sequence: Synthetic oligonucleotide
  Sense strand starting at position 2267 of SEQ ID NO: 1882413
ggaaguuuacaaugaggcu

SEQ ID NO: 2119297 - RNA, 19 nt, Artificial Sequence
  Description of Artificial Sequence: Synthetic oligonucleotide
  Antisense strand to SEQ ID NO: 2119296
agccucauuguaaacuucc

SEQ ID NO: 2119298 - RNA, 19 nt, Artificial Sequence
  Description of Artificial Sequence: Synthetic oligonucleotide
  Sense strand starting at position 2618 of SEQ ID NO: 1882413
acagacucucauugugaaa

SEQ ID NO: 2119299 - RNA, 19 nt, Artificial Sequence
  Description of Artificial Sequence: Synthetic oligonucleotide
  Antisense strand to SEQ ID NO: 2119298
uuucacaaugagagucugu

SEQ ID NO: 2119300 - RNA, 19 nt, Artificial Sequence
  Description of Artificial Sequence: Synthetic oligonucleotide
  Sense strand starting at position 2703 of SEQ ID NO: 1882413
gguaaugaguaguugaauu

SEQ ID NO: 2119301 - RNA, 19 nt, Artificial Sequence
  Description of Artificial Sequence: Synthetic oligonucleotide
  Antisense strand to SEQ ID NO: 2119300
aauucaacuacucauuacc

SEQ ID NO: 2119302 - RNA, 19 nt, Artificial Sequence
  Description of Artificial Sequence: Synthetic oligonucleotide
  Sense strand starting at position 2845 of SEQ ID NO: 1882413
ugauuccacguagaggauu

SEQ ID NO: 2119303 - RNA, 19 nt, Artificial Sequence
  Description of Artificial Sequence: Synthetic oligonucleotide
  Antisense strand to SEQ ID NO: 2119302
aauccucuacguggaauca

SEQ ID NO: 2119304 - RNA, 19 nt, Artificial Sequence
  Description of Artificial Sequence: Synthetic oligonucleotide
  Sense strand starting at position 2948 of SEQ ID NO: 1882413
guuuaacagguuuggaguu

SEQ ID NO: 2119305 - RNA, 19 nt, Artificial Sequence
  Description of Artificial Sequence: Synthetic oligonucleotide
  Antisense strand to SEQ ID NO: 2119304
aacuccaaaccuguuaaac

SEQ ID NO: 2119306 - RNA, 19 nt, Artificial Sequence
  Description of Artificial Sequence: Synthetic oligonucleotide
  Sense strand starting at position 2989 of SEQ ID NO: 1882413
ucuggaaacaguggugaau

SEQ ID NO: 2119307 - RNA, 19 nt, Artificial Sequence
  Description of Artificial Sequence: Synthetic oligonucleotide
  Antisense strand to SEQ ID NO: 2119306
auucaccacuguuuccaga

SEQ ID NO: 2119308 - RNA, 19 nt, Artificial Sequence
  Description of Artificial Sequence: Synthetic oligonucleotide
  Sense strand starting at position 3155 of SEQ ID NO: 1882413
cccaaaugcagagaguagu

SEQ ID NO: 2119309 - RNA, 19 nt, Artificial Sequence
  Description of Artificial Sequence: Synthetic oligonucleotide
  Antisense strand to SEQ ID NO: 2119308
acuacucucugcauuuggg

SEQ ID NO: 2119310 - RNA, 19 nt, Artificial Sequence
  Description of Artificial Sequence: Synthetic oligonucleotide
  Sense strand starting at position 3186 of SEQ ID NO: 1882413
aaaccaguuacgugugaga

SEQ ID NO: 2119311 - RNA, 19 nt, Artificial Sequence
  Description of Artificial Sequence: Synthetic oligonucleotide
  Antisense strand to SEQ ID NO: 2119310
ucucacacguaacugguuu

SEQ ID NO: 2119312 - RNA, 19 nt, Artificial Sequence
  Description of Artificial Sequence: Synthetic oligonucleotide
  Sense strand starting at position 3534 of SEQ ID NO: 1882413
guucuuucucuugacauag

SEQ ID NO: 2119313 - RNA, 19 nt, Artificial Sequence
  Description of Artificial Sequence: Synthetic oligonucleotide
  Antisense strand to SEQ ID NO: 2119312
cuaugucaagagaaagaac

SEQ ID NO: 2119314 - RNA, 19 nt, Artificial Sequence
  Description of Artificial Sequence: Synthetic oligonucleotide
  Sense strand starting at position 3544 of SEQ ID NO: 1882413
uugacauaguguuuaggga

SEQ ID NO: 2119315 - RNA, 19 nt, Artificial Sequence
  Description of Artificial Sequence: Synthetic oligonucleotide
  Antisense strand to SEQ ID NO: 2119314
ucccuaaacacuaugucaa

SEQ ID NO: 2119316 - RNA, 19 nt, Artificial Sequence
  Description of Artificial Sequence: Synthetic oligonucleotide
  Sense strand starting at position 3653 of SEQ ID NO: 1882413
uauuuauucuggcugcgca

SEQ ID NO: 2119317 - RNA, 19 nt, Artificial Sequence
  Description of Artificial Sequence: Synthetic oligonucleotide
  Antisense strand to SEQ ID NO: 2119316
ugcgcagccagaauaaaua

SEQ ID NO: 2119318 - RNA, 19 nt, Artificial Sequence
  Description of Artificial Sequence: Synthetic oligonucleotide
  Sense strand starting at position 3978 of SEQ ID NO: 1882413
uuauacuucugucuaugga

SEQ ID NO: 2119319 - RNA, 19 nt, Artificial Sequence
  Description of Artificial Sequence: Synthetic oligonucleotide
  Antisense strand to SEQ ID NO: 2119318
uccauagacagaaguauaa

SEQ ID NO: 2119320 - RNA, 19 nt, Artificial Sequence
  Description of Artificial Sequence: Synthetic oligonucleotide
  Sense strand starting at position 212 of SEQ ID NO: 1882415
agugguagcuauucucaga

SEQ ID NO: 2119321 - RNA, 19 nt, Artificial Sequence
  Description of Artificial Sequence: Synthetic oligonucleotide
  Antisense strand to SEQ ID NO: 2119320
ucugagaauagcuaccacu

SEQ ID NO: 2119322 - RNA, 19 nt, Artificial Sequence
  Description of Artificial Sequence: Synthetic oligonucleotide
  Sense strand starting at position 215 of SEQ ID NO: 1882415
gguagcuauucucagagaa

SEQ ID NO: 2119323 - RNA, 19 nt, Artificial Sequence
  Description of Artificial Sequence: Synthetic oligonucleotide
  Antisense strand to SEQ ID NO: 2119322
uucucugagaauagcuacc

SEQ ID NO: 2119324 - RNA, 19 nt, Artificial Sequence
  Description of Artificial Sequence: Synthetic oligonucleotide
  Sense strand starting at position 275 of SEQ ID NO: 1882415
gacuguguauaaugauaaa

SEQ ID NO: 2119325 - RNA, 19 nt, Artificial Sequence
  Description of Artificial Sequence: Synthetic oligonucleotide
  Antisense strand to SEQ ID NO: 2119324
uuuaucauuauacacaguc

SEQ ID NO: 2119326 - RNA, 19 nt, Artificial Sequence
  Description of Artificial Sequence: Synthetic oligonucleotide
  Sense strand starting at position 749 of SEQ ID NO: 1882415
gaauaugagcauuggguca

SEQ ID NO: 2119327 - RNA, 19 nt, Artificial Sequence
  Description of Artificial Sequence: Synthetic oligonucleotide
  Antisense strand to SEQ ID NO: 2119326
ugacccaaugcucauauuc

SEQ ID NO: 2119328 - RNA, 19 nt, Artificial Sequence
  Description of Artificial Sequence: Synthetic oligonucleotide
  Sense strand starting at position 751 of SEQ ID NO: 1882415
auaugagcauugggucaaa

SEQ ID NO: 2119329 - RNA, 19 nt, Artificial Sequence
  Description of Artificial Sequence: Synthetic oligonucleotide
  Antisense strand to SEQ ID NO: 2119328
uuugacccaaugcucauau

SEQ ID NO: 2119330 - RNA, 19 nt, Artificial Sequence
  Description of Artificial Sequence: Synthetic oligonucleotide
  Sense strand starting at position 1844 of SEQ ID NO: 1882415
ucagcauaugagggacaua

SEQ ID NO: 2119331 - RNA, 19 nt, Artificial Sequence
  Description of Artificial Sequence: Synthetic oligonucleotide
  Antisense strand to SEQ ID NO: 2119330
uaugucccucauaugcuga

SEQ ID NO: 2119332 - RNA, 19 nt, Artificial Sequence
  Description of Artificial Sequence: Synthetic oligonucleotide
  Sense strand starting at position 1992 of SEQ ID NO: 1882415
cauaguacuggguguccua

SEQ ID NO: 2119333 - RNA, 19 nt, Artificial Sequence
  Description of Artificial Sequence: Synthetic oligonucleotide
  Antisense strand to SEQ ID NO: 2119332
uaggacacccaguacuaug

SEQ ID NO: 2119334 - RNA, 19 nt, Artificial Sequence
  Description of Artificial Sequence: Synthetic oligonucleotide
  Sense strand starting at position 2003 of SEQ ID NO: 1882415
guguccuagccagagcaau

SEQ ID NO: 2119335 - RNA, 19 nt, Artificial Sequence
  Description of Artificial Sequence: Synthetic oligonucleotide
  Antisense strand to SEQ ID NO: 2119334
auugcucuggcuaggacac

SEQ ID NO: 2119336 - RNA, 19 nt, Artificial Sequence
  Description of Artificial Sequence: Synthetic oligonucleotide
  Sense strand starting at position 2159 of SEQ ID NO: 1882415
ucagcaaagucuccgaaua

SEQ ID NO: 2119337 - RNA, 19 nt, Artificial Sequence
  Description of Artificial Sequence: Synthetic oligonucleotide
  Antisense strand to SEQ ID NO: 2119336
uauucggagacuuugcuga

SEQ ID NO: 2119338 - RNA, 19 nt, Artificial Sequence
  Description of Artificial Sequence: Synthetic oligonucleotide
  Sense strand starting at position 2160 of SEQ ID NO: 1882415
cagcaaagucuccgaauac

SEQ ID NO: 2119339 - RNA, 19 nt, Artificial Sequence
  Description of Artificial Sequence: Synthetic oligonucleotide
  Antisense strand to SEQ ID NO: 2119338
guauucggagacuuugcug

SEQ ID NO: 2119340 - RNA, 19 nt, Artificial Sequence
  Description of Artificial Sequence: Synthetic oligonucleotide
  Sense strand starting at position 2161 of SEQ ID NO: 1882415
agcaaagucuccgaauaca

SEQ ID NO: 2119341 - RNA, 19 nt, Artificial Sequence
  Description of Artificial Sequence: Synthetic oligonucleotide
  Antisense strand to SEQ ID NO: 2119340
uguauucggagacuuugcu

SEQ ID NO: 2119342 - RNA, 19 nt, Artificial Sequence
  Description of Artificial Sequence: Synthetic oligonucleotide
  Sense strand starting at position 2733 of SEQ ID NO: 1882415
ccaacaggucuuugacaaa

SEQ ID NO: 2119343 - RNA, 19 nt, Artificial Sequence
  Description of Artificial Sequence: Synthetic oligonucleotide
  Antisense strand to SEQ ID NO: 2119342
uuugucaaagaccuguugg

SEQ ID NO: 2119344 - RNA, 19 nt, Artificial Sequence
  Description of Artificial Sequence: Synthetic oligonucleotide
  Sense strand starting at position 2736 of SEQ ID NO: 1882415
acaggucuuugacaaagca

SEQ ID NO: 2119345 - RNA, 19 nt, Artificial Sequence
  Description of Artificial Sequence: Synthetic oligonucleotide
  Antisense strand to SEQ ID NO: 2119344
ugcuuugucaaagaccugu

SEQ ID NO: 2119346 - RNA, 19 nt, Artificial Sequence
  Description of Artificial Sequence: Synthetic oligonucleotide
  Sense strand starting at position 2802 of SEQ ID NO: 1882415
cugggauaauuggcaacaa

SEQ ID NO: 2119347 - RNA, 19 nt, Artificial Sequence
  Description of Artificial Sequence: Synthetic oligonucleotide
  Antisense strand to SEQ ID NO: 2119346
uuguugccaauuaucccag

SEQ ID NO: 2119348 - RNA, 19 nt, Artificial Sequence
  Description of Artificial Sequence: Synthetic oligonucleotide
  Sense strand starting at position 2803 of SEQ ID NO: 1882415
ugggauaauuggcaacaaa

SEQ ID NO: 2119349 - RNA, 19 nt, Artificial Sequence
  Description of Artificial Sequence: Synthetic oligonucleotide
  Antisense strand to SEQ ID NO: 2119348
uuuguugccaauuauccca

SEQ ID NO: 2119350 - RNA, 19 nt, Artificial Sequence
  Description of Artificial Sequence: Synthetic oligonucleotide
  Sense strand starting at position 2847 of SEQ ID NO: 1882415
acugguuccucaucucuua

SEQ ID NO: 2119351 - RNA, 19 nt, Artificial Sequence
  Description of Artificial Sequence: Synthetic oligonucleotide
  Antisense strand to SEQ ID NO: 2119350
uaagagaugaggaaccagu

SEQ ID NO: 2119352 - RNA, 19 nt, Artificial Sequence
  Description of Artificial Sequence: Synthetic oligonucleotide
  Sense strand starting at position 3207 of SEQ ID NO: 1882415
ccguaaauaagugggcuaa

SEQ ID NO: 2119353 - RNA, 19 nt, Artificial Sequence
  Description of Artificial Sequence: Synthetic oligonucleotide
  Antisense strand to SEQ ID NO: 2119352
uuagcccacuuauuuacgg

SEQ ID NO: 2119354 - RNA, 19 nt, Artificial Sequence
  Description of Artificial Sequence: Synthetic oligonucleotide
  Sense strand starting at position 3661 of SEQ ID NO: 1882415
uaaagaaacugugagauca

SEQ ID NO: 2119355 - RNA, 19 nt, Artificial Sequence
  Description of Artificial Sequence: Synthetic oligonucleotide
  Antisense strand to SEQ ID NO: 2119354
ugaucucacaguuucuuua

SEQ ID NO: 2119356 - RNA, 19 nt, Artificial Sequence
  Description of Artificial Sequence: Synthetic oligonucleotide
  Sense strand starting at position 3944 of SEQ ID NO: 1882415
ugauguaacucaggaauug

SEQ ID NO: 2119357 - RNA, 19 nt, Artificial Sequence
  Description of Artificial Sequence: Synthetic oligonucleotide
  Antisense strand to SEQ ID NO: 2119356
caauuccugaguuacauca

SEQ ID NO: 2119358 - RNA, 19 nt, Artificial Sequence
  Description of Artificial Sequence: Synthetic oligonucleotide
  Sense strand starting at position 110 of SEQ ID NO: 1882416
accucuuucccugacaugu

SEQ ID NO: 2119359 - RNA, 19 nt, Artificial Sequence
  Description of Artificial Sequence: Synthetic oligonucleotide
  Antisense strand to SEQ ID NO: 2119358
acaugucagggaaagaggu

SEQ ID NO: 2119360 - RNA, 19 nt, Artificial Sequence
  Description of Artificial Sequence: Synthetic oligonucleotide
  Sense strand starting at position 158 of SEQ ID NO: 1882416
cucucaagauguucugaau

SEQ ID NO: 2119361 - RNA, 19 nt, Artificial Sequence
  Description of Artificial Sequence: Synthetic oligonucleotide
  Antisense strand to SEQ ID NO: 2119360
auucagaacaucuugagag

SEQ ID NO: 2119362 - RNA, 19 nt, Artificial Sequence
  Description of Artificial Sequence: Synthetic oligonucleotide
  Sense strand starting at position 348 of SEQ ID NO: 1882416
gugcgauuagucaguaagu

SEQ ID NO: 2119363 - RNA, 19 nt, Artificial Sequence
  Description of Artificial Sequence: Synthetic oligonucleotide
  Antisense strand to SEQ ID NO: 2119362
acuuacugacuaaucgcac

SEQ ID NO: 2119364 - RNA, 19 nt, Artificial Sequence
  Description of Artificial Sequence: Synthetic oligonucleotide
  Sense strand starting at position 463 of SEQ ID NO: 1882416
uucguauguauucuagcga

SEQ ID NO: 2119365 - RNA, 19 nt, Artificial Sequence
  Description of Artificial Sequence: Synthetic oligonucleotide
  Antisense strand to SEQ ID NO: 2119364
ucgcuagaauacauacgaa

SEQ ID NO: 2119366 - RNA, 19 nt, Artificial Sequence
  Description of Artificial Sequence: Synthetic oligonucleotide
  Sense strand starting at position 468 of SEQ ID NO: 1882416
auguauucuagcgagauca

SEQ ID NO: 2119367 - RNA, 19 nt, Artificial Sequence
  Description of Artificial Sequence: Synthetic oligonucleotide
  Antisense strand to SEQ ID NO: 2119366
ugaucucgcuagaauacau

SEQ ID NO: 2119368 - RNA, 19 nt, Artificial Sequence
  Description of Artificial Sequence: Synthetic oligonucleotide
  Sense strand starting at position 470 of SEQ ID NO: 1882416
guauucuagcgagaucaac

SEQ ID NO: 2119369 - RNA, 19 nt, Artificial Sequence
  Description of Artificial Sequence: Synthetic oligonucleotide
  Antisense strand to SEQ ID NO: 2119368
guugaucucgcuagaauac

SEQ ID NO: 2119370 - RNA, 19 nt, Artificial Sequence
  Description of Artificial Sequence: Synthetic oligonucleotide
  Sense strand starting at position 507 of SEQ ID NO: 1882416
acgucaccuccagaagguu

SEQ ID NO: 2119371 - RNA, 19 nt, Artificial Sequence
  Description of Artificial Sequence: Synthetic oligonucleotide
  Antisense strand to SEQ ID NO: 2119370
aaccuucuggaggugacgu

SEQ ID NO: 2119372 - RNA, 19 nt, Artificial Sequence
  Description of Artificial Sequence: Synthetic oligonucleotide
  Sense strand starting at position 733 of SEQ ID NO: 1882416
gcagaaggauuguccuauu

SEQ ID NO: 2119373 - RNA, 19 nt, Artificial Sequence
  Description of Artificial Sequence: Synthetic oligonucleotide
  Antisense strand to SEQ ID NO: 2119372
aauaggacaauccuucugc

SEQ ID NO: 2119374 - RNA, 19 nt, Artificial Sequence
  Description of Artificial Sequence: Synthetic oligonucleotide
  Sense strand starting at position 791 of SEQ ID NO: 1882416
aguugaauccaagagcucu

SEQ ID NO: 2119375 - RNA, 19 nt, Artificial Sequence
  Description of Artificial Sequence: Synthetic oligonucleotide
  Antisense strand to SEQ ID NO: 2119374
agagcucuuggauucaacu

SEQ ID NO: 2119376 - RNA, 19 nt, Artificial Sequence
  Description of Artificial Sequence: Synthetic oligonucleotide
  Sense strand starting at position 817 of SEQ ID NO: 1882416
uggagugucggaugaaauc

SEQ ID NO: 2119377 - RNA, 19 nt, Artificial Sequence
  Description of Artificial Sequence: Synthetic oligonucleotide
  Antisense strand to SEQ ID NO: 2119376
gauuucauccgacacucca

SEQ ID NO: 2119378 - RNA, 19 nt, Artificial Sequence
  Description of Artificial Sequence: Synthetic oligonucleotide
  Sense strand starting at position 917 of SEQ ID NO: 1882416
ccacaaucaccaggucaga

SEQ ID NO: 2119379 - RNA, 19 nt, Artificial Sequence
  Description of Artificial Sequence: Synthetic oligonucleotide
  Antisense strand to SEQ ID NO: 2119378
ucugaccuggugauugugg

SEQ ID NO: 2119380 - RNA, 19 nt, Artificial Sequence
  Description of Artificial Sequence: Synthetic oligonucleotide
  Sense strand starting at position 1041 of SEQ ID NO: 1882416
aaugcuugccaccagaagu

SEQ ID NO: 2119381 - RNA, 19 nt, Artificial Sequence
  Description of Artificial Sequence: Synthetic oligonucleotide
  Antisense strand to SEQ ID NO: 2119380
acuucugguggcaagcauu

SEQ ID NO: 2119382 - RNA, 19 nt, Artificial Sequence
  Description of Artificial Sequence: Synthetic oligonucleotide
  Sense strand starting at position 1138 of SEQ ID NO: 1882416
gaagucagauuagcgauau

SEQ ID NO: 2119383 - RNA, 19 nt, Artificial Sequence
  Description of Artificial Sequence: Synthetic oligonucleotide
  Antisense strand to SEQ ID NO: 2119382
auaucgcuaaucugacuuc

SEQ ID NO: 2119384 - RNA, 19 nt, Artificial Sequence
  Description of Artificial Sequence: Synthetic oligonucleotide
  Sense strand starting at position 1142 of SEQ ID NO: 1882416
ucagauuagcgauauuaaa

SEQ ID NO: 2119385 - RNA, 19 nt, Artificial Sequence
  Description of Artificial Sequence: Synthetic oligonucleotide
  Antisense strand to SEQ ID NO: 2119384
uuuaauaucgcuaaucuga

SEQ ID NO: 2119386 - RNA, 19 nt, Artificial Sequence
  Description of Artificial Sequence: Synthetic oligonucleotide
  Sense strand starting at position 1256 of SEQ ID NO: 1882416
guguaaucaggccauugau

SEQ ID NO: 2119387 - RNA, 19 nt, Artificial Sequence
  Description of Artificial Sequence: Synthetic oligonucleotide
  Antisense strand to SEQ ID NO: 2119386
aucaauggccugauuacac

SEQ ID NO: 2119388 - RNA, 19 nt, Artificial Sequence
  Description of Artificial Sequence: Synthetic oligonucleotide
  Sense strand starting at position 1286 of SEQ ID NO: 1882416
gugugaguagaaugaucac

SEQ ID NO: 2119389 - RNA, 19 nt, Artificial Sequence
  Description of Artificial Sequence: Synthetic oligonucleotide
  Antisense strand to SEQ ID NO: 2119388
gugaucauucuacucacac

SEQ ID NO: 2119390 - RNA, 19 nt, Artificial Sequence
  Description of Artificial Sequence: Synthetic oligonucleotide
  Sense strand starting at position 1292 of SEQ ID NO: 1882416
guagaaugaucaccaguag

SEQ ID NO: 2119391 - RNA, 19 nt, Artificial Sequence
  Description of Artificial Sequence: Synthetic oligonucleotide
  Antisense strand to SEQ ID NO: 2119390
cuacuggugaucauucuac

SEQ ID NO: 2119392 - RNA, 19 nt, Artificial Sequence
  Description of Artificial Sequence: Synthetic oligonucleotide
  Sense strand starting at position 1415 of SEQ ID NO: 1882416
gcucucuugcgugcuccaa

SEQ ID NO: 2119393 - RNA, 19 nt, Artificial Sequence
  Description of Artificial Sequence: Synthetic oligonucleotide
  Antisense strand to SEQ ID NO: 2119392
uuggagcacgcaagagagc

SEQ ID NO: 2119394 - RNA, 19 nt, Artificial Sequence
  Description of Artificial Sequence: Synthetic oligonucleotide
  Sense strand starting at position 1416 of SEQ ID NO: 1882416
cucucuugcgugcuccaau

SEQ ID NO: 2119395 - RNA, 19 nt, Artificial Sequence
  Description of Artificial Sequence: Synthetic oligonucleotide
  Antisense strand to SEQ ID NO: 2119394
auuggagcacgcaagagag

SEQ ID NO: 2119396 - RNA, 19 nt, Artificial Sequence
  Description of Artificial Sequence: Synthetic oligonucleotide
  Sense strand starting at position 1479 of SEQ ID NO: 1882416
gauucuucccugcagguga

SEQ ID NO: 2119397 - RNA, 19 nt, Artificial Sequence
  Description of Artificial Sequence: Synthetic oligonucleotide
  Antisense strand to SEQ ID NO: 2119396
ucaccugcagggaagaauc

SEQ ID NO: 2119398 - RNA, 19 nt, Artificial Sequence
  Description of Artificial Sequence: Synthetic oligonucleotide
  Sense strand starting at position 1490 of SEQ ID NO: 1882416
gcaggugacaaguacuaau

SEQ ID NO: 2119399 - RNA, 19 nt, Artificial Sequence
  Description of Artificial Sequence: Synthetic oligonucleotide
  Antisense strand to SEQ ID NO: 2119398
auuaguacuugucaccugc

SEQ ID NO: 2119400 - RNA, 19 nt, Artificial Sequence
  Description of Artificial Sequence: Synthetic oligonucleotide
  Sense strand starting at position 1687 of SEQ ID NO: 1882416
cugaaacucuccuuugagu

SEQ ID NO: 2119401 - RNA, 19 nt, Artificial Sequence
  Description of Artificial Sequence: Synthetic oligonucleotide
  Antisense strand to SEQ ID NO: 2119400
acucaaaggagaguuucag

SEQ ID NO: 2119402 - RNA, 19 nt, Artificial Sequence
  Description of Artificial Sequence: Synthetic oligonucleotide
  Sense strand starting at position 1934 of SEQ ID NO: 1882416
uguguugacccucauagau

SEQ ID NO: 2119403 - RNA, 19 nt, Artificial Sequence
  Description of Artificial Sequence: Synthetic oligonucleotide
  Antisense strand to SEQ ID NO: 2119402
aucuaugagggucaacaca

SEQ ID NO: 2119404 - RNA, 19 nt, Artificial Sequence
  Description of Artificial Sequence: Synthetic oligonucleotide
  Sense strand starting at position 1944 of SEQ ID NO: 1882416
cucauagaucccugaagca

SEQ ID NO: 2119405 - RNA, 19 nt, Artificial Sequence
  Description of Artificial Sequence: Synthetic oligonucleotide
  Antisense strand to SEQ ID NO: 2119404
ugcuucagggaucuaugag

SEQ ID NO: 2119406 - RNA, 19 nt, Artificial Sequence
  Description of Artificial Sequence: Synthetic oligonucleotide
  Sense strand starting at position 2015 of SEQ ID NO: 1882416
aaggaauuguguuuaaaug

SEQ ID NO: 2119407 - RNA, 19 nt, Artificial Sequence
  Description of Artificial Sequence: Synthetic oligonucleotide
  Antisense strand to SEQ ID NO: 2119406
cauuuaaacacaauuccuu

SEQ ID NO: 2119408 - RNA, 19 nt, Artificial Sequence
  Description of Artificial Sequence: Synthetic oligonucleotide
  Sense strand starting at position 2016 of SEQ ID NO: 1882416
aggaauuguguuuaaaugu

SEQ ID NO: 2119409 - RNA, 19 nt, Artificial Sequence
  Description of Artificial Sequence: Synthetic oligonucleotide
  Antisense strand to SEQ ID NO: 2119408
acauuuaaacacaauuccu

SEQ ID NO: 2119410 - RNA, 19 nt, Artificial Sequence
  Description of Artificial Sequence: Synthetic oligonucleotide
  Sense strand starting at position 2074 of SEQ ID NO: 1882416
ucuuguuguaaggaauaug

SEQ ID NO: 2119411 - RNA, 19 nt, Artificial Sequence
  Description of Artificial Sequence: Synthetic oligonucleotide
  Antisense strand to SEQ ID NO: 2119410
cauauuccuuacaacaaga

SEQ ID NO: 2119412 - RNA, 19 nt, Artificial Sequence
  Description of Artificial Sequence: Synthetic oligonucleotide
  Sense strand starting at position 2082 of SEQ ID NO: 1882416
uaaggaauaugccugguaa

SEQ ID NO: 2119413 - RNA, 19 nt, Artificial Sequence
  Description of Artificial Sequence: Synthetic oligonucleotide
  Antisense strand to SEQ ID NO: 2119412
uuaccaggcauauuccuua

SEQ ID NO: 2119414 - RNA, 19 nt, Artificial Sequence
  Description of Artificial Sequence: Synthetic oligonucleotide
  Sense strand starting at position 2083 of SEQ ID NO: 1882416
aaggaauaugccugguaau

SEQ ID NO: 2119415 - RNA, 19 nt, Artificial Sequence
  Description of Artificial Sequence: Synthetic oligonucleotide
  Antisense strand to SEQ ID NO: 2119414
auuaccaggcauauuccuu

SEQ ID NO: 2119416 - RNA, 19 nt, Artificial Sequence
  Description of Artificial Sequence: Synthetic oligonucleotide
  Sense strand starting at position 2084 of SEQ ID NO: 1882416
aggaauaugccugguaaug

SEQ ID NO: 2119417 - RNA, 19 nt, Artificial Sequence
  Description of Artificial Sequence: Synthetic oligonucleotide
  Antisense strand to SEQ ID NO: 2119416
cauuaccaggcauauuccu

SEQ ID NO: 2119418 - RNA, 19 nt, Artificial Sequence
  Description of Artificial Sequence: Synthetic oligonucleotide
  Sense strand starting at position 2252 of SEQ ID NO: 1882416
cggcaucugcuccugaguu

SEQ ID NO: 2119419 - RNA, 19 nt, Artificial Sequence
  Description of Artificial Sequence: Synthetic oligonucleotide
  Antisense strand to SEQ ID NO: 2119418
aacucaggagcagaugccg

SEQ ID NO: 2119420 - RNA, 19 nt, Artificial Sequence
  Description of Artificial Sequence: Synthetic oligonucleotide
  Sense strand starting at position 2483 of SEQ ID NO: 1882416
aggagcuucucccucuaga

SEQ ID NO: 2119421 - RNA, 19 nt, Artificial Sequence
  Description of Artificial Sequence: Synthetic oligonucleotide
  Antisense strand to SEQ ID NO: 2119420
ucuagagggagaagcuccu

SEQ ID NO: 2119422 - RNA, 19 nt, Artificial Sequence
  Description of Artificial Sequence: Synthetic oligonucleotide
  Sense strand starting at position 2685 of SEQ ID NO: 1882416
aagaaacaccggugacuuu

SEQ ID NO: 2119423 - RNA, 19 nt, Artificial Sequence
  Description of Artificial Sequence: Synthetic oligonucleotide
  Antisense strand to SEQ ID NO: 2119422
aaagucaccgguguuucuu

SEQ ID NO: 2119424 - RNA, 19 nt, Artificial Sequence
  Description of Artificial Sequence: Synthetic oligonucleotide
  Sense strand starting at position 2792 of SEQ ID NO: 1882416
agcagcacucaguagaaga

SEQ ID NO: 2119425 - RNA, 19 nt, Artificial Sequence
  Description of Artificial Sequence: Synthetic oligonucleotide
  Antisense strand to SEQ ID NO: 2119424
ucuucuacugagugcugcu

SEQ ID NO: 2119426 - RNA, 19 nt, Artificial Sequence
  Description of Artificial Sequence: Synthetic oligonucleotide
  Sense strand starting at position 2956 of SEQ ID NO: 1882416
gggagcaccauauauguca

SEQ ID NO: 2119427 - RNA, 19 nt, Artificial Sequence
  Description of Artificial Sequence: Synthetic oligonucleotide
  Antisense strand to SEQ ID NO: 2119426
ugacauauauggugcuccc

SEQ ID NO: 2119428 - RNA, 19 nt, Artificial Sequence
  Description of Artificial Sequence: Synthetic oligonucleotide
  Sense strand starting at position 3180 of SEQ ID NO: 1882416
uacagagugcuauaaaguu

SEQ ID NO: 2119429 - RNA, 19 nt, Artificial Sequence
  Description of Artificial Sequence: Synthetic oligonucleotide
  Antisense strand to SEQ ID NO: 2119428
aacuuuauagcacucugua

SEQ ID NO: 2119430 - RNA, 19 nt, Artificial Sequence
  Description of Artificial Sequence: Synthetic oligonucleotide
  Sense strand starting at position 3284 of SEQ ID NO: 1882416
agaaaugaucacugugacu

SEQ ID NO: 2119431 - RNA, 19 nt, Artificial Sequence
  Description of Artificial Sequence: Synthetic oligonucleotide
  Antisense strand to SEQ ID NO: 2119430
agucacagugaucauuucu

SEQ ID NO: 2119432 - RNA, 19 nt, Artificial Sequence
  Description of Artificial Sequence: Synthetic oligonucleotide
  Sense strand starting at position 3562 of SEQ ID NO: 1882416
guaaauacagguuaagcau

SEQ ID NO: 2119433 - RNA, 19 nt, Artificial Sequence
  Description of Artificial Sequence: Synthetic oligonucleotide
  Antisense strand to SEQ ID NO: 2119432
augcuuaaccuguauuuac

SEQ ID NO: 2119434 - RNA, 19 nt, Artificial Sequence
  Description of Artificial Sequence: Synthetic oligonucleotide
  Sense strand starting at position 3681 of SEQ ID NO: 1882416
uagggaugcucagccagaa

SEQ ID NO: 2119435 - RNA, 19 nt, Artificial Sequence
  Description of Artificial Sequence: Synthetic oligonucleotide
  Antisense strand to SEQ ID NO: 2119434
uucuggcugagcaucccua

SEQ ID NO: 2119436 - RNA, 19 nt, Artificial Sequence
  Description of Artificial Sequence: Synthetic oligonucleotide
  Sense strand starting at position 3685 of SEQ ID NO: 1882416
gaugcucagccagaaugaa

SEQ ID NO: 2119437 - RNA, 19 nt, Artificial Sequence
  Description of Artificial Sequence: Synthetic oligonucleotide
  Antisense strand to SEQ ID NO: 2119436
uucauucuggcugagcauc

SEQ ID NO: 2119438 - RNA, 19 nt, Artificial Sequence
  Description of Artificial Sequence: Synthetic oligonucleotide
  Sense strand starting at position 198 of SEQ ID NO: 1882417
ugcugcgauguguuuguca

SEQ ID NO: 2119439 - RNA, 19 nt, Artificial Sequence
  Description of Artificial Sequence: Synthetic oligonucleotide
  Antisense strand to SEQ ID NO: 2119438
ugacaaacacaucgcagca

SEQ ID NO: 2119440 - RNA, 19 nt, Artificial Sequence
  Description of Artificial Sequence: Synthetic oligonucleotide
  Sense strand starting at position 212 of SEQ ID NO: 1882417
ugucaaagaguuuacuuag

SEQ ID NO: 2119441 - RNA, 19 nt, Artificial Sequence
  Description of Artificial Sequence: Synthetic oligonucleotide
  Antisense strand to SEQ ID NO: 2119440
cuaaguaaacucuuugaca

SEQ ID NO: 2119442 - RNA, 19 nt, Artificial Sequence
  Description of Artificial Sequence: Synthetic oligonucleotide
  Sense strand starting at position 480 of SEQ ID NO: 1882417
auuagcauuugagaggaaa

SEQ ID NO: 2119443 - RNA, 19 nt, Artificial Sequence
  Description of Artificial Sequence: Synthetic oligonucleotide
  Antisense strand to SEQ ID NO: 2119442
uuuccucucaaaugcuaau

SEQ ID NO: 2119444 - RNA, 19 nt, Artificial Sequence
  Description of Artificial Sequence: Synthetic oligonucleotide
  Sense strand starting at position 614 of SEQ ID NO: 1882417
gacuguaccugggugauga

SEQ ID NO: 2119445 - RNA, 19 nt, Artificial Sequence
  Description of Artificial Sequence: Synthetic oligonucleotide
  Antisense strand to SEQ ID NO: 2119444
ucaucacccagguacaguc

SEQ ID NO: 2119446 - RNA, 19 nt, Artificial Sequence
  Description of Artificial Sequence: Synthetic oligonucleotide
  Sense strand starting at position 645 of SEQ ID NO: 1882417
aggccauagcacuauaauu

SEQ ID NO: 2119447 - RNA, 19 nt, Artificial Sequence
  Description of Artificial Sequence: Synthetic oligonucleotide
  Antisense strand to SEQ ID NO: 2119446
aauuauagugcuauggccu

SEQ ID NO: 2119448 - RNA, 19 nt, Artificial Sequence
  Description of Artificial Sequence: Synthetic oligonucleotide
  Sense strand starting at position 1008 of SEQ ID NO: 1882417
uguuguaaggccguguuau

SEQ ID NO: 2119449 - RNA, 19 nt, Artificial Sequence
  Description of Artificial Sequence: Synthetic oligonucleotide
  Antisense strand to SEQ ID NO: 2119448
auaacacggccuuacaaca

SEQ ID NO: 2119450 - RNA, 19 nt, Artificial Sequence
  Description of Artificial Sequence: Synthetic oligonucleotide
  Sense strand starting at position 1062 of SEQ ID NO: 1882417
ucgaaauucugaccauucu

SEQ ID NO: 2119451 - RNA, 19 nt, Artificial Sequence
  Description of Artificial Sequence: Synthetic oligonucleotide
  Antisense strand to SEQ ID NO: 2119450
agaauggucagaauuucga

SEQ ID NO: 2119452 - RNA, 19 nt, Artificial Sequence
  Description of Artificial Sequence: Synthetic oligonucleotide
  Sense strand starting at position 1139 of SEQ ID NO: 1882417
ccgguaagcgucuuucgag

SEQ ID NO: 2119453 - RNA, 19 nt, Artificial Sequence
  Description of Artificial Sequence: Synthetic oligonucleotide
  Antisense strand to SEQ ID NO: 2119452
cucgaaagacgcuuaccgg

SEQ ID NO: 2119454 - RNA, 19 nt, Artificial Sequence
  Description of Artificial Sequence: Synthetic oligonucleotide
  Sense strand starting at position 1312 of SEQ ID NO: 1882417
uguggaaauuaugagauuu

SEQ ID NO: 2119455 - RNA, 19 nt, Artificial Sequence
  Description of Artificial Sequence: Synthetic oligonucleotide
  Antisense strand to SEQ ID NO: 2119454
aaaucucauaauuuccaca

SEQ ID NO: 2119456 - RNA, 19 nt, Artificial Sequence
  Description of Artificial Sequence: Synthetic oligonucleotide
  Sense strand starting at position 1418 of SEQ ID NO: 1882417
agaauuaaauguguacucu

SEQ ID NO: 2119457 - RNA, 19 nt, Artificial Sequence
  Description of Artificial Sequence: Synthetic oligonucleotide
  Antisense strand to SEQ ID NO: 2119456
agaguacacauuuaauucu

SEQ ID NO: 2119458 - RNA, 19 nt, Artificial Sequence
  Description of Artificial Sequence: Synthetic oligonucleotide
  Sense strand starting at position 1463 of SEQ ID NO: 1882417
cuuccagcccauugagaaa

SEQ ID NO: 2119459 - RNA, 19 nt, Artificial Sequence
  Description of Artificial Sequence: Synthetic oligonucleotide
  Antisense strand to SEQ ID NO: 2119458
uuucucaaugggcuggaag

SEQ ID NO: 2119460 - RNA, 19 nt, Artificial Sequence
  Description of Artificial Sequence: Synthetic oligonucleotide
  Sense strand starting at position 1506 of SEQ ID NO: 1882417
cccguaaauuugucuuucu

SEQ ID NO: 2119461 - RNA, 19 nt, Artificial Sequence
  Description of Artificial Sequence: Synthetic oligonucleotide
  Antisense strand to SEQ ID NO: 2119460
agaaagacaaauuuacggg

SEQ ID NO: 2119462 - RNA, 19 nt, Artificial Sequence
  Description of Artificial Sequence: Synthetic oligonucleotide
  Sense strand starting at position 1517 of SEQ ID NO: 1882417
gucuuucugagguaauaag

SEQ ID NO: 2119463 - RNA, 19 nt, Artificial Sequence
  Description of Artificial Sequence: Synthetic oligonucleotide
  Antisense strand to SEQ ID NO: 2119462
cuuauuaccucagaaagac

SEQ ID NO: 2119464 - RNA, 19 nt, Artificial Sequence
  Description of Artificial Sequence: Synthetic oligonucleotide
  Sense strand starting at position 1592 of SEQ ID NO: 1882417
acccaaugccgugaauaag

SEQ ID NO: 2119465 - RNA, 19 nt, Artificial Sequence
  Description of Artificial Sequence: Synthetic oligonucleotide
  Antisense strand to SEQ ID NO: 2119464
cuuauucacggcauugggu

SEQ ID NO: 2119466 - RNA, 19 nt, Artificial Sequence
  Description of Artificial Sequence: Synthetic oligonucleotide
  Sense strand starting at position 1667 of SEQ ID NO: 1882417
auggauuguuacucaggga

SEQ ID NO: 2119467 - RNA, 19 nt, Artificial Sequence
  Description of Artificial Sequence: Synthetic oligonucleotide
  Antisense strand to SEQ ID NO: 2119466
ucccugaguaacaauccau

SEQ ID NO: 2119468 - RNA, 19 nt, Artificial Sequence
  Description of Artificial Sequence: Synthetic oligonucleotide
  Sense strand starting at position 1730 of SEQ ID NO: 1882417
acaacagucuaggugagau

SEQ ID NO: 2119469 - RNA, 19 nt, Artificial Sequence
  Description of Artificial Sequence: Synthetic oligonucleotide
  Antisense strand to SEQ ID NO: 2119468
aucucaccuagacuguugu

SEQ ID NO: 2119470 - RNA, 19 nt, Artificial Sequence
  Description of Artificial Sequence: Synthetic oligonucleotide
  Sense strand starting at position 1787 of SEQ ID NO: 1882417
accaaaugguuuccacaga

SEQ ID NO: 2119471 - RNA, 19 nt, Artificial Sequence
  Description of Artificial Sequence: Synthetic oligonucleotide
  Antisense strand to SEQ ID NO: 2119470
ucuguggaaaccauuuggu

SEQ ID NO: 2119472 - RNA, 19 nt, Artificial Sequence
  Description of Artificial Sequence: Synthetic oligonucleotide
  Sense strand starting at position 1810 of SEQ ID NO: 1882417
auguguagaagggauugua

SEQ ID NO: 2119473 - RNA, 19 nt, Artificial Sequence
  Description of Artificial Sequence: Synthetic oligonucleotide
  Antisense strand to SEQ ID NO: 2119472
uacaaucccuucuacacau

SEQ ID NO: 2119474 - RNA, 19 nt, Artificial Sequence
  Description of Artificial Sequence: Synthetic oligonucleotide
  Sense strand starting at position 1954 of SEQ ID NO: 1882417
uuuggcugcagguaagaau

SEQ ID NO: 2119475 - RNA, 19 nt, Artificial Sequence
  Description of Artificial Sequence: Synthetic oligonucleotide
  Antisense strand to SEQ ID NO: 2119474
auucuuaccugcagccaaa

SEQ ID NO: 2119476 - RNA, 19 nt, Artificial Sequence
  Description of Artificial Sequence: Synthetic oligonucleotide
  Sense strand starting at position 1978 of SEQ ID NO: 1882417
aggacuaaccuggguguua

SEQ ID NO: 2119477 - RNA, 19 nt, Artificial Sequence
  Description of Artificial Sequence: Synthetic oligonucleotide
  Antisense strand to SEQ ID NO: 2119476
uaacacccagguuaguccu

SEQ ID NO: 2119478 - RNA, 19 nt, Artificial Sequence
  Description of Artificial Sequence: Synthetic oligonucleotide
  Sense strand starting at position 2056 of SEQ ID NO: 1882417
cuuggaguggccuggaaga

SEQ ID NO: 2119479 - RNA, 19 nt, Artificial Sequence
  Description of Artificial Sequence: Synthetic oligonucleotide
  Antisense strand to SEQ ID NO: 2119478
ucuuccaggccacuccaag

SEQ ID NO: 2119480 - RNA, 19 nt, Artificial Sequence
  Description of Artificial Sequence: Synthetic oligonucleotide
  Sense strand starting at position 2276 of SEQ ID NO: 1882417
guuuauugaggguaucaug

SEQ ID NO: 2119481 - RNA, 19 nt, Artificial Sequence
  Description of Artificial Sequence: Synthetic oligonucleotide
  Antisense strand to SEQ ID NO: 2119480
caugauacccucaauaaac

SEQ ID NO: 2119482 - RNA, 19 nt, Artificial Sequence
  Description of Artificial Sequence: Synthetic oligonucleotide
  Sense strand starting at position 2558 of SEQ ID NO: 1882417
acgcuaaagcaucauaaua

SEQ ID NO: 2119483 - RNA, 19 nt, Artificial Sequence
  Description of Artificial Sequence: Synthetic oligonucleotide
  Antisense strand to SEQ ID NO: 2119482
uauuaugaugcuuuagcgu

SEQ ID NO: 2119484 - RNA, 19 nt, Artificial Sequence
  Description of Artificial Sequence: Synthetic oligonucleotide
  Sense strand starting at position 2649 of SEQ ID NO: 1882417
aggugaccucauuagccua

SEQ ID NO: 2119485 - RNA, 19 nt, Artificial Sequence
  Description of Artificial Sequence: Synthetic oligonucleotide
  Antisense strand to SEQ ID NO: 2119484
uaggcuaaugaggucaccu

SEQ ID NO: 2119486 - RNA, 19 nt, Artificial Sequence
  Description of Artificial Sequence: Synthetic oligonucleotide
  Sense strand starting at position 2654 of SEQ ID NO: 1882417
accucauuagccuacaguu

SEQ ID NO: 2119487 - RNA, 19 nt, Artificial Sequence
  Description of Artificial Sequence: Synthetic oligonucleotide
  Antisense strand to SEQ ID NO: 2119486
aacuguaggcuaaugaggu

SEQ ID NO: 2119488 - RNA, 19 nt, Artificial Sequence
  Description of Artificial Sequence: Synthetic oligonucleotide
  Sense strand starting at position 2666 of SEQ ID NO: 1882417
uacaguugcccugagaacu

SEQ ID NO: 2119489 - RNA, 19 nt, Artificial Sequence
  Description of Artificial Sequence: Synthetic oligonucleotide
  Antisense strand to SEQ ID NO: 2119488
aguucucagggcaacugua

SEQ ID NO: 2119490 - RNA, 19 nt, Artificial Sequence
  Description of Artificial Sequence: Synthetic oligonucleotide
  Sense strand starting at position 2676 of SEQ ID NO: 1882417
cugagaacugguggcagaa

SEQ ID NO: 2119491 - RNA, 19 nt, Artificial Sequence
  Description of Artificial Sequence: Synthetic oligonucleotide
  Antisense strand to SEQ ID NO: 2119490
uucugccaccaguucucag

SEQ ID NO: 2119492 - RNA, 19 nt, Artificial Sequence
  Description of Artificial Sequence: Synthetic oligonucleotide
  Sense strand starting at position 2942 of SEQ ID NO: 1882417
ccuggaugccaggaaaugu

SEQ ID NO: 2119493 - RNA, 19 nt, Artificial Sequence
  Description of Artificial Sequence: Synthetic oligonucleotide
  Antisense strand to SEQ ID NO: 2119492
acauuuccuggcauccagg

SEQ ID NO: 2119494 - RNA, 19 nt, Artificial Sequence
  Description of Artificial Sequence: Synthetic oligonucleotide
  Sense strand starting at position 2950 of SEQ ID NO: 1882417
ccaggaaaugucuggacca

SEQ ID NO: 2119495 - RNA, 19 nt, Artificial Sequence
  Description of Artificial Sequence: Synthetic oligonucleotide
  Antisense strand to SEQ ID NO: 2119494
ugguccagacauuuccugg

SEQ ID NO: 2119496 - RNA, 19 nt, Artificial Sequence
  Description of Artificial Sequence: Synthetic oligonucleotide
  Sense strand starting at position 3036 of SEQ ID NO: 1882417
aauccuuuccuagguagag

SEQ ID NO: 2119497 - RNA, 19 nt, Artificial Sequence
  Description of Artificial Sequence: Synthetic oligonucleotide
  Antisense strand to SEQ ID NO: 2119496
cucuaccuaggaaaggauu

SEQ ID NO: 2119498 - RNA, 19 nt, Artificial Sequence
  Description of Artificial Sequence: Synthetic oligonucleotide
  Sense strand starting at position 3037 of SEQ ID NO: 1882417
auccuuuccuagguagaga

SEQ ID NO: 2119499 - RNA, 19 nt, Artificial Sequence
  Description of Artificial Sequence: Synthetic oligonucleotide
  Antisense strand to SEQ ID NO: 2119498
ucucuaccuaggaaaggau

SEQ ID NO: 2119500 - RNA, 19 nt, Artificial Sequence
  Description of Artificial Sequence: Synthetic oligonucleotide
  Sense strand starting at position 3064 of SEQ ID NO: 1882417
cuagcaaugugacugauca

SEQ ID NO: 2119501 - RNA, 19 nt, Artificial Sequence
  Description of Artificial Sequence: Synthetic oligonucleotide
  Antisense strand to SEQ ID NO: 2119500
ugaucagucacauugcuag

SEQ ID NO: 2119502 - RNA, 19 nt, Artificial Sequence
  Description of Artificial Sequence: Synthetic oligonucleotide
  Sense strand starting at position 3065 of SEQ ID NO: 1882417
uagcaaugugacugaucac

SEQ ID NO: 2119503 - RNA, 19 nt, Artificial Sequence
  Description of Artificial Sequence: Synthetic oligonucleotide
  Antisense strand to SEQ ID NO: 2119502
gugaucagucacauugcua

SEQ ID NO: 2119504 - RNA, 19 nt, Artificial Sequence
  Description of Artificial Sequence: Synthetic oligonucleotide
  Sense strand starting at position 3092 of SEQ ID NO: 1882417
uuaucuguuugaucaacug

SEQ ID NO: 2119505 - RNA, 19 nt, Artificial Sequence
  Description of Artificial Sequence: Synthetic oligonucleotide
  Antisense strand to SEQ ID NO: 2119504
caguugaucaaacagauaa

SEQ ID NO: 2119506 - RNA, 19 nt, Artificial Sequence
  Description of Artificial Sequence: Synthetic oligonucleotide
  Sense strand starting at position 3175 of SEQ ID NO: 1882417
auaauuccuuguguaaaug

SEQ ID NO: 2119507 - RNA, 19 nt, Artificial Sequence
  Description of Artificial Sequence: Synthetic oligonucleotide
  Antisense strand to SEQ ID NO: 2119506
cauuuacacaaggaauuau

SEQ ID NO: 2119508 - RNA, 19 nt, Artificial Sequence
  Description of Artificial Sequence: Synthetic oligonucleotide
  Sense strand starting at position 3374 of SEQ ID NO: 1882417
uuucuugauccaggaccau

SEQ ID NO: 2119509 - RNA, 19 nt, Artificial Sequence
  Description of Artificial Sequence: Synthetic oligonucleotide
  Antisense strand to SEQ ID NO: 2119508
augguccuggaucaagaaa

SEQ ID NO: 2119510 - RNA, 19 nt, Artificial Sequence
  Description of Artificial Sequence: Synthetic oligonucleotide
  Sense strand starting at position 3424 of SEQ ID NO: 1882417
gagaacagcguauaagauu

SEQ ID NO: 2119511 - RNA, 19 nt, Artificial Sequence
  Description of Artificial Sequence: Synthetic oligonucleotide
  Antisense strand to SEQ ID NO: 2119510
aaucuuauacgcuguucuc

SEQ ID NO: 2119512 - RNA, 19 nt, Artificial Sequence
  Description of Artificial Sequence: Synthetic oligonucleotide
  Sense strand starting at position 3787 of SEQ ID NO: 1882417
acacauugcccucagcaga

SEQ ID NO: 2119513 - RNA, 19 nt, Artificial Sequence
  Description of Artificial Sequence: Synthetic oligonucleotide
  Antisense strand to SEQ ID NO: 2119512
ucugcugagggcaaugugu

SEQ ID NO: 2119514 - RNA, 19 nt, Artificial Sequence
  Description of Artificial Sequence: Synthetic oligonucleotide
  Sense strand starting at position 3834 of SEQ ID NO: 1882417
uuaacacuccgcuacagaa

SEQ ID NO: 2119515 - RNA, 19 nt, Artificial Sequence
  Description of Artificial Sequence: Synthetic oligonucleotide
  Antisense strand to SEQ ID NO: 2119514
uucuguagcggaguguuaa

SEQ ID NO: 2119516 - RNA, 19 nt, Artificial Sequence
  Description of Artificial Sequence: Synthetic oligonucleotide
  Sense strand starting at position 3919 of SEQ ID NO: 1882417
ucaagcaaagccuaugauu

SEQ ID NO: 2119517 - RNA, 19 nt, Artificial Sequence
  Description of Artificial Sequence: Synthetic oligonucleotide
  Antisense strand to SEQ ID NO: 2119516
aaucauaggcuuugcuuga

SEQ ID NO: 2119518 - RNA, 19 nt, Artificial Sequence
  Description of Artificial Sequence: Synthetic oligonucleotide
  Sense strand starting at position 803 of SEQ ID NO: 1882418
uuuaaaugaguccguggga

SEQ ID NO: 2119519 - RNA, 19 nt, Artificial Sequence
  Description of Artificial Sequence: Synthetic oligonucleotide
  Antisense strand to SEQ ID NO: 2119518
ucccacggacucauuuaaa

SEQ ID NO: 2119520 - RNA, 19 nt, Artificial Sequence
  Description of Artificial Sequence: Synthetic oligonucleotide
  Sense strand starting at position 804 of SEQ ID NO: 1882418
uuaaaugaguccgugggau

SEQ ID NO: 2119521 - RNA, 19 nt, Artificial Sequence
  Description of Artificial Sequence: Synthetic oligonucleotide
  Antisense strand to SEQ ID NO: 2119520
aucccacggacucauuuaa

SEQ ID NO: 2119522 - RNA, 19 nt, Artificial Sequence
  Description of Artificial Sequence: Synthetic oligonucleotide
  Sense strand starting at position 897 of SEQ ID NO: 1882418
ggcauuuguuaaguccauu

SEQ ID NO: 2119523 - RNA, 19 nt, Artificial Sequence
  Description of Artificial Sequence: Synthetic oligonucleotide
  Antisense strand to SEQ ID NO: 2119522
aauggacuuaacaaaugcc

SEQ ID NO: 2119524 - RNA, 19 nt, Artificial Sequence
  Description of Artificial Sequence: Synthetic oligonucleotide
  Sense strand starting at position 939 of SEQ ID NO: 1882418
aucaaaguaucccuguaau

SEQ ID NO: 2119525 - RNA, 19 nt, Artificial Sequence
  Description of Artificial Sequence: Synthetic oligonucleotide
  Antisense strand to SEQ ID NO: 2119524
auuacagggauacuuugau

SEQ ID NO: 2119526 - RNA, 19 nt, Artificial Sequence
  Description of Artificial Sequence: Synthetic oligonucleotide
  Sense strand starting at position 949 of SEQ ID NO: 1882418
cccuguaaugaagaggcau

SEQ ID NO: 2119527 - RNA, 19 nt, Artificial Sequence
  Description of Artificial Sequence: Synthetic oligonucleotide
  Antisense strand to SEQ ID NO: 2119526
augccucuucauuacaggg

SEQ ID NO: 2119528 - RNA, 19 nt, Artificial Sequence
  Description of Artificial Sequence: Synthetic oligonucleotide
  Sense strand starting at position 1117 of SEQ ID NO: 1882418
uccagucugccauaagaca

SEQ ID NO: 2119529 - RNA, 19 nt, Artificial Sequence
  Description of Artificial Sequence: Synthetic oligonucleotide
  Antisense strand to SEQ ID NO: 2119528
ugucuuauggcagacugga

SEQ ID NO: 2119530 - RNA, 19 nt, Artificial Sequence
  Description of Artificial Sequence: Synthetic oligonucleotide
  Sense strand starting at position 1197 of SEQ ID NO: 1882418
ucagucuuuggguggucaa

SEQ ID NO: 2119531 - RNA, 19 nt, Artificial Sequence
  Description of Artificial Sequence: Synthetic oligonucleotide
  Antisense strand to SEQ ID NO: 2119530
uugaccacccaaagacuga

SEQ ID NO: 2119532 - RNA, 19 nt, Artificial Sequence
  Description of Artificial Sequence: Synthetic oligonucleotide
  Sense strand starting at position 1200 of SEQ ID NO: 1882418
gucuuuggguggucaagau

SEQ ID NO: 2119533 - RNA, 19 nt, Artificial Sequence
  Description of Artificial Sequence: Synthetic oligonucleotide
  Antisense strand to SEQ ID NO: 2119532
aucuugaccacccaaagac

SEQ ID NO: 2119534 - RNA, 19 nt, Artificial Sequence
  Description of Artificial Sequence: Synthetic oligonucleotide
  Sense strand starting at position 1317 of SEQ ID NO: 1882418
ggcacauuccugugguuuc

SEQ ID NO: 2119535 - RNA, 19 nt, Artificial Sequence
  Description of Artificial Sequence: Synthetic oligonucleotide
  Antisense strand to SEQ ID NO: 2119534
gaaaccacaggaaugugcc

SEQ ID NO: 2119536 - RNA, 19 nt, Artificial Sequence
  Description of Artificial Sequence: Synthetic oligonucleotide
  Sense strand starting at position 1481 of SEQ ID NO: 1882418
guaugucagagauggaaag

SEQ ID NO: 2119537 - RNA, 19 nt, Artificial Sequence
  Description of Artificial Sequence: Synthetic oligonucleotide
  Antisense strand to SEQ ID NO: 2119536
cuuuccaucucugacauac

SEQ ID NO: 2119538 - RNA, 19 nt, Artificial Sequence
  Description of Artificial Sequence: Synthetic oligonucleotide
  Sense strand starting at position 1493 of SEQ ID NO: 1882418
uggaaagacucuuuccagu

SEQ ID NO: 2119539 - RNA, 19 nt, Artificial Sequence
  Description of Artificial Sequence: Synthetic oligonucleotide
  Antisense strand to SEQ ID NO: 2119538
acuggaaagagucuuucca

SEQ ID NO: 2119540 - RNA, 19 nt, Artificial Sequence
  Description of Artificial Sequence: Synthetic oligonucleotide
  Sense strand starting at position 1506 of SEQ ID NO: 1882418
uccagucuuuaugucucau

SEQ ID NO: 2119541 - RNA, 19 nt, Artificial Sequence
  Description of Artificial Sequence: Synthetic oligonucleotide
  Antisense strand to SEQ ID NO: 2119540
augagacauaaagacugga

SEQ ID NO: 2119542 - RNA, 19 nt, Artificial Sequence
  Description of Artificial Sequence: Synthetic oligonucleotide
  Sense strand starting at position 1512 of SEQ ID NO: 1882418
cuuuaugucucauuggaca

SEQ ID NO: 2119543 - RNA, 19 nt, Artificial Sequence
  Description of Artificial Sequence: Synthetic oligonucleotide
  Antisense strand to SEQ ID NO: 2119542
uguccaaugagacauaaag

SEQ ID NO: 2119544 - RNA, 19 nt, Artificial Sequence
  Description of Artificial Sequence: Synthetic oligonucleotide
  Sense strand starting at position 1882 of SEQ ID NO: 1882418
gucagguuuguggaggaga

SEQ ID NO: 2119545 - RNA, 19 nt, Artificial Sequence
  Description of Artificial Sequence: Synthetic oligonucleotide
  Antisense strand to SEQ ID NO: 2119544
ucuccuccacaaaccugac

SEQ ID NO: 2119546 - RNA, 19 nt, Artificial Sequence
  Description of Artificial Sequence: Synthetic oligonucleotide
  Sense strand starting at position 1883 of SEQ ID NO: 1882418
ucagguuuguggaggagaa

SEQ ID NO: 2119547 - RNA, 19 nt, Artificial Sequence
  Description of Artificial Sequence: Synthetic oligonucleotide
  Antisense strand to SEQ ID NO: 2119546
uucuccuccacaaaccuga

SEQ ID NO: 2119548 - RNA, 19 nt, Artificial Sequence
  Description of Artificial Sequence: Synthetic oligonucleotide
  Sense strand starting at position 1884 of SEQ ID NO: 1882418
cagguuuguggaggagaaa

SEQ ID NO: 2119549 - RNA, 19 nt, Artificial Sequence
  Description of Artificial Sequence: Synthetic oligonucleotide
  Antisense strand to SEQ ID NO: 2119548
uuucuccuccacaaaccug

SEQ ID NO: 2119550 - RNA, 19 nt, Artificial Sequence
  Description of Artificial Sequence: Synthetic oligonucleotide
  Sense strand starting at position 2061 of SEQ ID NO: 1882418
ccgaguccuguuuggguca

SEQ ID NO: 2119551 - RNA, 19 nt, Artificial Sequence
  Description of Artificial Sequence: Synthetic oligonucleotide
  Antisense strand to SEQ ID NO: 2119550
ugacccaaacaggacucgg

SEQ ID NO: 2119552 - RNA, 19 nt, Artificial Sequence
  Description of Artificial Sequence: Synthetic oligonucleotide
  Sense strand starting at position 2249 of SEQ ID NO: 1882418
cuuuaaauuggaggugacu

SEQ ID NO: 2119553 - RNA, 19 nt, Artificial Sequence
  Description of Artificial Sequence: Synthetic oligonucleotide
  Antisense strand to SEQ ID NO: 2119552
agucaccuccaauuuaaag

SEQ ID NO: 2119554 - RNA, 19 nt, Artificial Sequence
  Description of Artificial Sequence: Synthetic oligonucleotide
  Sense strand starting at position 2251 of SEQ ID NO: 1882418
uuaaauuggaggugacuuu

SEQ ID NO: 2119555 - RNA, 19 nt, Artificial Sequence
  Description of Artificial Sequence: Synthetic oligonucleotide
  Antisense strand to SEQ ID NO: 2119554
aaagucaccuccaauuuaa

SEQ ID NO: 2119556 - RNA, 19 nt, Artificial Sequence
  Description of Artificial Sequence: Synthetic oligonucleotide
  Sense strand starting at position 2328 of SEQ ID NO: 1882418
guuccuucugcugaaagag

SEQ ID NO: 2119557 - RNA, 19 nt, Artificial Sequence
  Description of Artificial Sequence: Synthetic oligonucleotide
  Antisense strand to SEQ ID NO: 2119556
cucuuucagcagaaggaac

SEQ ID NO: 2119558 - RNA, 19 nt, Artificial Sequence
  Description of Artificial Sequence: Synthetic oligonucleotide
  Sense strand starting at position 2671 of SEQ ID NO: 1882418
ugggaugauuaauuccauu

SEQ ID NO: 2119559 - RNA, 19 nt, Artificial Sequence
  Description of Artificial Sequence: Synthetic oligonucleotide
  Antisense strand to SEQ ID NO: 2119558
aauggaauuaaucauccca

SEQ ID NO: 2119560 - RNA, 19 nt, Artificial Sequence
  Description of Artificial Sequence: Synthetic oligonucleotide
  Sense strand starting at position 2758 of SEQ ID NO: 1882418
gguggcaaaugugacauuu

SEQ ID NO: 2119561 - RNA, 19 nt, Artificial Sequence
  Description of Artificial Sequence: Synthetic oligonucleotide
  Antisense strand to SEQ ID NO: 2119560
aaaugucacauuugccacc

SEQ ID NO: 2119562 - RNA, 19 nt, Artificial Sequence
  Description of Artificial Sequence: Synthetic oligonucleotide
  Sense strand starting at position 2956 of SEQ ID NO: 1882418
agggcuagaguguaaucau

SEQ ID NO: 2119563 - RNA, 19 nt, Artificial Sequence
  Description of Artificial Sequence: Synthetic oligonucleotide
  Antisense strand to SEQ ID NO: 2119562
augauuacacucuagcccu

SEQ ID NO: 2119564 - RNA, 19 nt, Artificial Sequence
  Description of Artificial Sequence: Synthetic oligonucleotide
  Sense strand starting at position 2959 of SEQ ID NO: 1882418
gcuagaguguaaucaugac

SEQ ID NO: 2119565 - RNA, 19 nt, Artificial Sequence
  Description of Artificial Sequence: Synthetic oligonucleotide
  Antisense strand to SEQ ID NO: 2119564
gucaugauuacacucuagc

SEQ ID NO: 2119566 - RNA, 19 nt, Artificial Sequence
  Description of Artificial Sequence: Synthetic oligonucleotide
  Sense strand starting at position 2963 of SEQ ID NO: 1882418
gaguguaaucaugacgaau

SEQ ID NO: 2119567 - RNA, 19 nt, Artificial Sequence
  Description of Artificial Sequence: Synthetic oligonucleotide
  Antisense strand to SEQ ID NO: 2119566
auucgucaugauuacacuc

SEQ ID NO: 2119568 - RNA, 19 nt, Artificial Sequence
  Description of Artificial Sequence: Synthetic oligonucleotide
  Sense strand starting at position 2997 of SEQ ID NO: 1882418
ugauauuucugacaccugu

SEQ ID NO: 2119569 - RNA, 19 nt, Artificial Sequence
  Description of Artificial Sequence: Synthetic oligonucleotide
  Antisense strand to SEQ ID NO: 2119568
acaggugucagaaauauca

SEQ ID NO: 2119570 - RNA, 19 nt, Artificial Sequence
  Description of Artificial Sequence: Synthetic oligonucleotide
  Sense strand starting at position 3004 of SEQ ID NO: 1882418
ucugacaccuguuugacua

SEQ ID NO: 2119571 - RNA, 19 nt, Artificial Sequence
  Description of Artificial Sequence: Synthetic oligonucleotide
  Antisense strand to SEQ ID NO: 2119570
uagucaaacaggugucaga

SEQ ID NO: 2119572 - RNA, 19 nt, Artificial Sequence
  Description of Artificial Sequence: Synthetic oligonucleotide
  Sense strand starting at position 3008 of SEQ ID NO: 1882418
acaccuguuugacuacaga

SEQ ID NO: 2119573 - RNA, 19 nt, Artificial Sequence
  Description of Artificial Sequence: Synthetic oligonucleotide
  Antisense strand to SEQ ID NO: 2119572
ucuguagucaaacaggugu

SEQ ID NO: 2119574 - RNA, 19 nt, Artificial Sequence
  Description of Artificial Sequence: Synthetic oligonucleotide
  Sense strand starting at position 3148 of SEQ ID NO: 1882418
aaguauugacuuugaggau

SEQ ID NO: 2119575 - RNA, 19 nt, Artificial Sequence
  Description of Artificial Sequence: Synthetic oligonucleotide
  Antisense strand to SEQ ID NO: 2119574
auccucaaagucaauacuu

SEQ ID NO: 2119576 - RNA, 19 nt, Artificial Sequence
  Description of Artificial Sequence: Synthetic oligonucleotide
  Sense strand starting at position 3208 of SEQ ID NO: 1882418
cucucaaauuuagaguguu

SEQ ID NO: 2119577 - RNA, 19 nt, Artificial Sequence
  Description of Artificial Sequence: Synthetic oligonucleotide
  Antisense strand to SEQ ID NO: 2119576
aacacucuaaauuugagag

SEQ ID NO: 2119578 - RNA, 19 nt, Artificial Sequence
  Description of Artificial Sequence: Synthetic oligonucleotide
  Sense strand starting at position 3600 of SEQ ID NO: 1882418
uccuauuguaagcgucuga

SEQ ID NO: 2119579 - RNA, 19 nt, Artificial Sequence
  Description of Artificial Sequence: Synthetic oligonucleotide
  Antisense strand to SEQ ID NO: 2119578
ucagacgcuuacaauagga

SEQ ID NO: 2119580 - RNA, 19 nt, Artificial Sequence
  Description of Artificial Sequence: Synthetic oligonucleotide
  Sense strand starting at position 3763 of SEQ ID NO: 1882418
uaggcaucaggcuaaagua

SEQ ID NO: 2119581 - RNA, 19 nt, Artificial Sequence
  Description of Artificial Sequence: Synthetic oligonucleotide
  Antisense strand to SEQ ID NO: 2119580
uacuuuagccugaugccua

SEQ ID NO: 2119582 - RNA, 19 nt, Artificial Sequence
  Description of Artificial Sequence: Synthetic oligonucleotide
  Sense strand starting at position 3784 of SEQ ID NO: 1882418
gcuguugagguccauaaug

SEQ ID NO: 2119583 - RNA, 19 nt, Artificial Sequence
  Description of Artificial Sequence: Synthetic oligonucleotide
  Antisense strand to SEQ ID NO: 2119582
cauuauggaccucaacagc

SEQ ID NO: 2119584 - RNA, 19 nt, Artificial Sequence
  Description of Artificial Sequence: Synthetic oligonucleotide
  Sense strand starting at position 3786 of SEQ ID NO: 1882418
uguugagguccauaauguc

SEQ ID NO: 2119585 - RNA, 19 nt, Artificial Sequence
  Description of Artificial Sequence: Synthetic oligonucleotide
  Antisense strand to SEQ ID NO: 2119584
gacauuauggaccucaaca

SEQ ID NO: 2119586 - RNA, 19 nt, Artificial Sequence
  Description of Artificial Sequence: Synthetic oligonucleotide
  Sense strand starting at position 3793 of SEQ ID NO: 1882418
guccauaaugucuacacca

SEQ ID NO: 2119587 - RNA, 19 nt, Artificial Sequence
  Description of Artificial Sequence: Synthetic oligonucleotide
  Antisense strand to SEQ ID NO: 2119586
ugguguagacauuauggac

SEQ ID NO: 2119588 - RNA, 19 nt, Artificial Sequence
  Description of Artificial Sequence: Synthetic oligonucleotide
  Sense strand starting at position 3864 of SEQ ID NO: 1882418
uucugauccugucucugaa

SEQ ID NO: 2119589 - RNA, 19 nt, Artificial Sequence
  Description of Artificial Sequence: Synthetic oligonucleotide
  Antisense strand to SEQ ID NO: 2119588
uucagagacaggaucagaa

SEQ ID NO: 2119590 - RNA, 19 nt, Artificial Sequence
  Description of Artificial Sequence: Synthetic oligonucleotide
  Sense strand starting at position 3907 of SEQ ID NO: 1882418
ccagcacugagcugugaau

SEQ ID NO: 2119591 - RNA, 19 nt, Artificial Sequence
  Description of Artificial Sequence: Synthetic oligonucleotide
  Antisense strand to SEQ ID NO: 2119590
auucacagcucagugcugg

SEQ ID NO: 2119592 - RNA, 19 nt, Artificial Sequence
  Description of Artificial Sequence: Synthetic oligonucleotide
  Sense strand starting at position 3909 of SEQ ID NO: 1882418
agcacugagcugugaauua

SEQ ID NO: 2119593 - RNA, 19 nt, Artificial Sequence
  Description of Artificial Sequence: Synthetic oligonucleotide
  Antisense strand to SEQ ID NO: 2119592
uaauucacagcucagugcu

SEQ ID NO: 2119594 - RNA, 19 nt, Artificial Sequence
  Description of Artificial Sequence: Synthetic oligonucleotide
  Sense strand starting at position 3914 of SEQ ID NO: 1882418
ugagcugugaauuaagauu

SEQ ID NO: 2119595 - RNA, 19 nt, Artificial Sequence
  Description of Artificial Sequence: Synthetic oligonucleotide
  Antisense strand to SEQ ID NO: 2119594
aaucuuaauucacagcuca

SEQ ID NO: 2119596 - RNA, 19 nt, Artificial Sequence
  Description of Artificial Sequence: Synthetic oligonucleotide
  Sense strand starting at position 3941 of SEQ ID NO: 1882418
gaaucaagguucuuguaaa

SEQ ID NO: 2119597 - RNA, 19 nt, Artificial Sequence
  Description of Artificial Sequence: Synthetic oligonucleotide
  Antisense strand to SEQ ID NO: 2119596
uuuacaagaaccuugauuc

SEQ ID NO: 2119598 - RNA, 19 nt, Artificial Sequence
  Description of Artificial Sequence: Synthetic oligonucleotide
  Sense strand starting at position 80 of SEQ ID NO: 1882419
auugguuggcuuuauuagu

SEQ ID NO: 2119599 - RNA, 19 nt, Artificial Sequence
  Description of Artificial Sequence: Synthetic oligonucleotide
  Antisense strand to SEQ ID NO: 2119598
acuaauaaagccaaccaau

SEQ ID NO: 2119600 - RNA, 19 nt, Artificial Sequence
  Description of Artificial Sequence: Synthetic oligonucleotide
  Sense strand starting at position 236 of SEQ ID NO: 1882419
uggguuauugcagaacaca

SEQ ID NO: 2119601 - RNA, 19 nt, Artificial Sequence
  Description of Artificial Sequence: Synthetic oligonucleotide
  Antisense strand to SEQ ID NO: 2119600
uguguucugcaauaaccca

SEQ ID NO: 2119602 - RNA, 19 nt, Artificial Sequence
  Description of Artificial Sequence: Synthetic oligonucleotide
  Sense strand starting at position 276 of SEQ ID NO: 1882419
ccauaaaugcuugguucca

SEQ ID NO: 2119603 - RNA, 19 nt, Artificial Sequence
  Description of Artificial Sequence: Synthetic oligonucleotide
  Antisense strand to SEQ ID NO: 2119602
uggaaccaagcauuuaugg

SEQ ID NO: 2119604 - RNA, 19 nt, Artificial Sequence
  Description of Artificial Sequence: Synthetic oligonucleotide
  Sense strand starting at position 278 of SEQ ID NO: 1882419
auaaaugcuugguuccaga

SEQ ID NO: 2119605 - RNA, 19 nt, Artificial Sequence
  Description of Artificial Sequence: Synthetic oligonucleotide
  Antisense strand to SEQ ID NO: 2119604
ucuggaaccaagcauuuau

SEQ ID NO: 2119606 - RNA, 19 nt, Artificial Sequence
  Description of Artificial Sequence: Synthetic oligonucleotide
  Sense strand starting at position 398 of SEQ ID NO: 1882419
gugacugagcugcaaguaa

SEQ ID NO: 2119607 - RNA, 19 nt, Artificial Sequence
  Description of Artificial Sequence: Synthetic oligonucleotide
  Antisense strand to SEQ ID NO: 2119606
uuacuugcagcucagucac

SEQ ID NO: 2119608 - RNA, 19 nt, Artificial Sequence
  Description of Artificial Sequence: Synthetic oligonucleotide
  Sense strand starting at position 491 of SEQ ID NO: 1882419
gagccagaguugucagaaa

SEQ ID NO: 2119609 - RNA, 19 nt, Artificial Sequence
  Description of Artificial Sequence: Synthetic oligonucleotide
  Antisense strand to SEQ ID NO: 2119608
uuucugacaacucuggcuc

SEQ ID NO: 2119610 - RNA, 19 nt, Artificial Sequence
  Description of Artificial Sequence: Synthetic oligonucleotide
  Sense strand starting at position 503 of SEQ ID NO: 1882419
ucagaaaguucucuaggga

SEQ ID NO: 2119611 - RNA, 19 nt, Artificial Sequence
  Description of Artificial Sequence: Synthetic oligonucleotide
  Antisense strand to SEQ ID NO: 2119610
ucccuagagaacuuucuga

SEQ ID NO: 2119612 - RNA, 19 nt, Artificial Sequence
  Description of Artificial Sequence: Synthetic oligonucleotide
  Sense strand starting at position 516 of SEQ ID NO: 1882419
uagggaaauccaugagcau

SEQ ID NO: 2119613 - RNA, 19 nt, Artificial Sequence
  Description of Artificial Sequence: Synthetic oligonucleotide
  Antisense strand to SEQ ID NO: 2119612
augcucauggauuucccua

SEQ ID NO: 2119614 - RNA, 19 nt, Artificial Sequence
  Description of Artificial Sequence: Synthetic oligonucleotide
  Sense strand starting at position 549 of SEQ ID NO: 1882419
aaggauuucuuaugcagag

SEQ ID NO: 2119615 - RNA, 19 nt, Artificial Sequence
  Description of Artificial Sequence: Synthetic oligonucleotide
  Antisense strand to SEQ ID NO: 2119614
cucugcauaagaaauccuu

SEQ ID NO: 2119616 - RNA, 19 nt, Artificial Sequence
  Description of Artificial Sequence: Synthetic oligonucleotide
  Sense strand starting at position 580 of SEQ ID NO: 1882419
cgugauuucucucacauga

SEQ ID NO: 2119617 - RNA, 19 nt, Artificial Sequence
  Description of Artificial Sequence: Synthetic oligonucleotide
  Antisense strand to SEQ ID NO: 2119616
ucaugugagagaaaucacg

SEQ ID NO: 2119618 - RNA, 19 nt, Artificial Sequence
  Description of Artificial Sequence: Synthetic oligonucleotide
  Sense strand starting at position 1120 of SEQ ID NO: 1882419
guggauguccuauagucua

SEQ ID NO: 2119619 - RNA, 19 nt, Artificial Sequence
  Description of Artificial Sequence: Synthetic oligonucleotide
  Antisense strand to SEQ ID NO: 2119618
uagacuauaggacauccac

SEQ ID NO: 2119620 - RNA, 19 nt, Artificial Sequence
  Description of Artificial Sequence: Synthetic oligonucleotide
  Sense strand starting at position 1177 of SEQ ID NO: 1882419
guggucugacccuaagauu

SEQ ID NO: 2119621 - RNA, 19 nt, Artificial Sequence
  Description of Artificial Sequence: Synthetic oligonucleotide
  Antisense strand to SEQ ID NO: 2119620
aaucuuagggucagaccac

SEQ ID NO: 2119622 - RNA, 19 nt, Artificial Sequence
  Description of Artificial Sequence: Synthetic oligonucleotide
  Sense strand starting at position 1501 of SEQ ID NO: 1882419
uggccaagacaauguuuau

SEQ ID NO: 2119623 - RNA, 19 nt, Artificial Sequence
  Description of Artificial Sequence: Synthetic oligonucleotide
  Antisense strand to SEQ ID NO: 2119622
auaaacauugucuuggcca

SEQ ID NO: 2119624 - RNA, 19 nt, Artificial Sequence
  Description of Artificial Sequence: Synthetic oligonucleotide
  Sense strand starting at position 1534 of SEQ ID NO: 1882419
guuauuuguggcugggcau

SEQ ID NO: 2119625 - RNA, 19 nt, Artificial Sequence
  Description of Artificial Sequence: Synthetic oligonucleotide
  Antisense strand to SEQ ID NO: 2119624
augcccagccacaaauaac

SEQ ID NO: 2119626 - RNA, 19 nt, Artificial Sequence
  Description of Artificial Sequence: Synthetic oligonucleotide
  Sense strand starting at position 1971 of SEQ ID NO: 1882419
acaugugugcauuggaguu

SEQ ID NO: 2119627 - RNA, 19 nt, Artificial Sequence
  Description of Artificial Sequence: Synthetic oligonucleotide
  Antisense strand to SEQ ID NO: 2119626
aacuccaaugcacacaugu

SEQ ID NO: 2119628 - RNA, 19 nt, Artificial Sequence
  Description of Artificial Sequence: Synthetic oligonucleotide
  Sense strand starting at position 2028 of SEQ ID NO: 1882419
caccuauuggaauguaugu

SEQ ID NO: 2119629 - RNA, 19 nt, Artificial Sequence
  Description of Artificial Sequence: Synthetic oligonucleotide
  Antisense strand to SEQ ID NO: 2119628
acauacauuccaauaggug

SEQ ID NO: 2119630 - RNA, 19 nt, Artificial Sequence
  Description of Artificial Sequence: Synthetic oligonucleotide
  Sense strand starting at position 2033 of SEQ ID NO: 1882419
auuggaauguaugucacaa

SEQ ID NO: 2119631 - RNA, 19 nt, Artificial Sequence
  Description of Artificial Sequence: Synthetic oligonucleotide
  Antisense strand to SEQ ID NO: 2119630
uugugacauacauuccaau

SEQ ID NO: 2119632 - RNA, 19 nt, Artificial Sequence
  Description of Artificial Sequence: Synthetic oligonucleotide
  Sense strand starting at position 2043 of SEQ ID NO: 1882419
augucacaauguguauuau

SEQ ID NO: 2119633 - RNA, 19 nt, Artificial Sequence
  Description of Artificial Sequence: Synthetic oligonucleotide
  Antisense strand to SEQ ID NO: 2119632
auaauacacauugugacau

SEQ ID NO: 2119634 - RNA, 19 nt, Artificial Sequence
  Description of Artificial Sequence: Synthetic oligonucleotide
  Sense strand starting at position 2044 of SEQ ID NO: 1882419
ugucacaauguguauuauu

SEQ ID NO: 2119635 - RNA, 19 nt, Artificial Sequence
  Description of Artificial Sequence: Synthetic oligonucleotide
  Antisense strand to SEQ ID NO: 2119634
aauaauacacauugugaca

SEQ ID NO: 2119636 - RNA, 19 nt, Artificial Sequence
  Description of Artificial Sequence: Synthetic oligonucleotide
  Sense strand starting at position 2049 of SEQ ID NO: 1882419
caauguguauuauuguguu

SEQ ID NO: 2119637 - RNA, 19 nt, Artificial Sequence
  Description of Artificial Sequence: Synthetic oligonucleotide
  Antisense strand to SEQ ID NO: 2119636
aacacaauaauacacauug

SEQ ID NO: 2119638 - RNA, 19 nt, Artificial Sequence
  Description of Artificial Sequence: Synthetic oligonucleotide
  Sense strand starting at position 2642 of SEQ ID NO: 1882419
acgugcuggaguuacagau

SEQ ID NO: 2119639 - RNA, 19 nt, Artificial Sequence
  Description of Artificial Sequence: Synthetic oligonucleotide
  Antisense strand to SEQ ID NO: 2119638
aucuguaacuccagcacgu

SEQ ID NO: 2119640 - RNA, 19 nt, Artificial Sequence
  Description of Artificial Sequence: Synthetic oligonucleotide
  Sense strand starting at position 2692 of SEQ ID NO: 1882419
uuuaaaugcuaaguguuga

SEQ ID NO: 2119641 - RNA, 19 nt, Artificial Sequence
  Description of Artificial Sequence: Synthetic oligonucleotide
  Antisense strand to SEQ ID NO: 2119640
ucaacacuuagcauuuaaa

SEQ ID NO: 2119642 - RNA, 19 nt, Artificial Sequence
  Description of Artificial Sequence: Synthetic oligonucleotide
  Sense strand starting at position 2697 of SEQ ID NO: 1882419
augcuaaguguugauagau

SEQ ID NO: 2119643 - RNA, 19 nt, Artificial Sequence
  Description of Artificial Sequence: Synthetic oligonucleotide
  Antisense strand to SEQ ID NO: 2119642
aucuaucaacacuuagcau

SEQ ID NO: 2119644 - RNA, 19 nt, Artificial Sequence
  Description of Artificial Sequence: Synthetic oligonucleotide
  Sense strand starting at position 2928 of SEQ ID NO: 1882419
gucagugagaaugguuaag

SEQ ID NO: 2119645 - RNA, 19 nt, Artificial Sequence
  Description of Artificial Sequence: Synthetic oligonucleotide
  Antisense strand to SEQ ID NO: 2119644
cuuaaccauucucacugac

SEQ ID NO: 2119646 - RNA, 19 nt, Artificial Sequence
  Description of Artificial Sequence: Synthetic oligonucleotide
  Sense strand starting at position 2930 of SEQ ID NO: 1882419
cagugagaaugguuaagug

SEQ ID NO: 2119647 - RNA, 19 nt, Artificial Sequence
  Description of Artificial Sequence: Synthetic oligonucleotide
  Antisense strand to SEQ ID NO: 2119646
cacuuaaccauucucacug

SEQ ID NO: 2119648 - RNA, 19 nt, Artificial Sequence
  Description of Artificial Sequence: Synthetic oligonucleotide
  Sense strand starting at position 2991 of SEQ ID NO: 1882419
uggcaaagauuggcagaaa

SEQ ID NO: 2119649 - RNA, 19 nt, Artificial Sequence
  Description of Artificial Sequence: Synthetic oligonucleotide
  Antisense strand to SEQ ID NO: 2119648
uuucugccaaucuuugcca

SEQ ID NO: 2119650 - RNA, 19 nt, Artificial Sequence
  Description of Artificial Sequence: Synthetic oligonucleotide
  Sense strand starting at position 3065 of SEQ ID NO: 1882419
gggcgaaucaacugagguu

SEQ ID NO: 2119651 - RNA, 19 nt, Artificial Sequence
  Description of Artificial Sequence: Synthetic oligonucleotide
  Antisense strand to SEQ ID NO: 2119650
aaccucaguugauucgccc

SEQ ID NO: 2119652 - RNA, 19 nt, Artificial Sequence
  Description of Artificial Sequence: Synthetic oligonucleotide
  Sense strand starting at position 3389 of SEQ ID NO: 1882419
ggcugaaccucaguaagaa

SEQ ID NO: 2119653 - RNA, 19 nt, Artificial Sequence
  Description of Artificial Sequence: Synthetic oligonucleotide
  Antisense strand to SEQ ID NO: 2119652
uucuuacugagguucagcc

SEQ ID NO: 2119654 - RNA, 19 nt, Artificial Sequence
  Description of Artificial Sequence: Synthetic oligonucleotide
  Sense strand starting at position 3390 of SEQ ID NO: 1882419
gcugaaccucaguaagaac

SEQ ID NO: 2119655 - RNA, 19 nt, Artificial Sequence
  Description of Artificial Sequence: Synthetic oligonucleotide
  Antisense strand to SEQ ID NO: 2119654
guucuuacugagguucagc

SEQ ID NO: 2119656 - RNA, 19 nt, Artificial Sequence
  Description of Artificial Sequence: Synthetic oligonucleotide
  Sense strand starting at position 3399 of SEQ ID NO: 1882419
caguaagaacaguacguuu

SEQ ID NO: 2119657 - RNA, 19 nt, Artificial Sequence
  Description of Artificial Sequence: Synthetic oligonucleotide
  Antisense strand to SEQ ID NO: 2119656
aaacguacuguucuuacug

SEQ ID NO: 2119658 - RNA, 19 nt, Artificial Sequence
  Description of Artificial Sequence: Synthetic oligonucleotide
  Sense strand starting at position 3569 of SEQ ID NO: 1882419
ccuagagaauugucauuac

SEQ ID NO: 2119659 - RNA, 19 nt, Artificial Sequence
  Description of Artificial Sequence: Synthetic oligonucleotide
  Antisense strand to SEQ ID NO: 2119658
guaaugacaauucucuagg

SEQ ID NO: 2119660 - RNA, 19 nt, Artificial Sequence
  Description of Artificial Sequence: Synthetic oligonucleotide
  Sense strand starting at position 3572 of SEQ ID NO: 1882419
agagaauugucauuacuag

SEQ ID NO: 2119661 - RNA, 19 nt, Artificial Sequence
  Description of Artificial Sequence: Synthetic oligonucleotide
  Antisense strand to SEQ ID NO: 2119660
cuaguaaugacaauucucu

SEQ ID NO: 2119662 - RNA, 19 nt, Artificial Sequence
  Description of Artificial Sequence: Synthetic oligonucleotide
  Sense strand starting at position 3587 of SEQ ID NO: 1882419
cuagacaugccugguuguu

SEQ ID NO: 2119663 - RNA, 19 nt, Artificial Sequence
  Description of Artificial Sequence: Synthetic oligonucleotide
  Antisense strand to SEQ ID NO: 2119662
aacaaccaggcaugucuag

SEQ ID NO: 2119664 - RNA, 19 nt, Artificial Sequence
  Description of Artificial Sequence: Synthetic oligonucleotide
  Sense strand starting at position 3651 of SEQ ID NO: 1882419
guuauuuggcuaggcuauu

SEQ ID NO: 2119665 - RNA, 19 nt, Artificial Sequence
  Description of Artificial Sequence: Synthetic oligonucleotide
  Antisense strand to SEQ ID NO: 2119664
aauagccuagccaaauaac

SEQ ID NO: 2119666 - RNA, 19 nt, Artificial Sequence
  Description of Artificial Sequence: Synthetic oligonucleotide
  Sense strand starting at position 3652 of SEQ ID NO: 1882419
uuauuuggcuaggcuauua

SEQ ID NO: 2119667 - RNA, 19 nt, Artificial Sequence
  Description of Artificial Sequence: Synthetic oligonucleotide
  Antisense strand to SEQ ID NO: 2119666
uaauagccuagccaaauaa

SEQ ID NO: 2119668 - RNA, 19 nt, Artificial Sequence
  Description of Artificial Sequence: Synthetic oligonucleotide
  Sense strand starting at position 3875 of SEQ ID NO: 1882419
auguauggugaguaaaggu

SEQ ID NO: 2119669 - RNA, 19 nt, Artificial Sequence
  Description of Artificial Sequence: Synthetic oligonucleotide
  Antisense strand to SEQ ID NO: 2119668
accuuuacucaccauacau

SEQ ID NO: 2119670 - RNA, 19 nt, Artificial Sequence
  Description of Artificial Sequence: Synthetic oligonucleotide
  Sense strand starting at position 3884 of SEQ ID NO: 1882419
gaguaaagguuaccuuguu

SEQ ID NO: 2119671 - RNA, 19 nt, Artificial Sequence
  Description of Artificial Sequence: Synthetic oligonucleotide
  Antisense strand to SEQ ID NO: 2119670
aacaagguaaccuuuacuc

SEQ ID NO: 2119672 - RNA, 19 nt, Artificial Sequence
  Description of Artificial Sequence: Synthetic oligonucleotide
  Sense strand starting at position 3885 of SEQ ID NO: 1882419
aguaaagguuaccuuguua

SEQ ID NO: 2119673 - RNA, 19 nt, Artificial Sequence
  Description of Artificial Sequence: Synthetic oligonucleotide
  Antisense strand to SEQ ID NO: 2119672
uaacaagguaaccuuuacu

SEQ ID NO: 2119674 - RNA, 19 nt, Artificial Sequence
  Description of Artificial Sequence: Synthetic oligonucleotide
  Sense strand starting at position 3889 of SEQ ID NO: 1882419
aagguuaccuuguuacaga

SEQ ID NO: 2119675 - RNA, 19 nt, Artificial Sequence
  Description of Artificial Sequence: Synthetic oligonucleotide
  Antisense strand to SEQ ID NO: 2119674
ucuguaacaagguaaccuu

SEQ ID NO: 2119676 - RNA, 19 nt, Artificial Sequence
  Description of Artificial Sequence: Synthetic oligonucleotide
  Sense strand starting at position 3944 of SEQ ID NO: 1882419
aguucucuuccugguauaa

SEQ ID NO: 2119677 - RNA, 19 nt, Artificial Sequence
  Description of Artificial Sequence: Synthetic oligonucleotide
  Antisense strand to SEQ ID NO: 2119676
uuauaccaggaagagaacu

SEQ ID NO: 2119678 - RNA, 19 nt, Artificial Sequence
  Description of Artificial Sequence: Synthetic oligonucleotide
  Sense strand starting at position 73 of SEQ ID NO: 1882420
uuagguugcagccaagaaa

SEQ ID NO: 2119679 - RNA, 19 nt, Artificial Sequence
  Description of Artificial Sequence: Synthetic oligonucleotide
  Antisense strand to SEQ ID NO: 2119678
uuucuuggcugcaaccuaa

SEQ ID NO: 2119680 - RNA, 19 nt, Artificial Sequence
  Description of Artificial Sequence: Synthetic oligonucleotide
  Sense strand starting at position 142 of SEQ ID NO: 1882420
ggaagugaggguugcagaa

SEQ ID NO: 2119681 - RNA, 19 nt, Artificial Sequence
  Description of Artificial Sequence: Synthetic oligonucleotide
  Antisense strand to SEQ ID NO: 2119680
uucugcaacccucacuucc

SEQ ID NO: 2119682 - RNA, 19 nt, Artificial Sequence
  Description of Artificial Sequence: Synthetic oligonucleotide
  Sense strand starting at position 237 of SEQ ID NO: 1882420
gggauuuauucucagaucc

SEQ ID NO: 2119683 - RNA, 19 nt, Artificial Sequence
  Description of Artificial Sequence: Synthetic oligonucleotide
  Antisense strand to SEQ ID NO: 2119682
ggaucugagaauaaauccc

SEQ ID NO: 2119684 - RNA, 19 nt, Artificial Sequence
  Description of Artificial Sequence: Synthetic oligonucleotide
  Sense strand starting at position 421 of SEQ ID NO: 1882420
aauagagugccaggaauga

SEQ ID NO: 2119685 - RNA, 19 nt, Artificial Sequence
  Description of Artificial Sequence: Synthetic oligonucleotide
  Antisense strand to SEQ ID NO: 2119684
ucauuccuggcacucuauu

SEQ ID NO: 2119686 - RNA, 19 nt, Artificial Sequence
  Description of Artificial Sequence: Synthetic oligonucleotide
  Sense strand starting at position 879 of SEQ ID NO: 1882420
ggcaucuucugacuccaga

SEQ ID NO: 2119687 - RNA, 19 nt, Artificial Sequence
  Description of Artificial Sequence: Synthetic oligonucleotide
  Antisense strand to SEQ ID NO: 2119686
ucuggagucagaagaugcc

SEQ ID NO: 2119688 - RNA, 19 nt, Artificial Sequence
  Description of Artificial Sequence: Synthetic oligonucleotide
  Sense strand starting at position 928 of SEQ ID NO: 1882420
gaggcugagaggugauacu

SEQ ID NO: 2119689 - RNA, 19 nt, Artificial Sequence
  Description of Artificial Sequence: Synthetic oligonucleotide
  Antisense strand to SEQ ID NO: 2119688
aguaucaccucucagccuc

SEQ ID NO: 2119690 - RNA, 19 nt, Artificial Sequence
  Description of Artificial Sequence: Synthetic oligonucleotide
  Sense strand starting at position 937 of SEQ ID NO: 1882420
aggugauacuuccaaauuu

SEQ ID NO: 2119691 - RNA, 19 nt, Artificial Sequence
  Description of Artificial Sequence: Synthetic oligonucleotide
  Antisense strand to SEQ ID NO: 2119690
aaauuuggaaguaucaccu

SEQ ID NO: 2119692 - RNA, 19 nt, Artificial Sequence
  Description of Artificial Sequence: Synthetic oligonucleotide
  Sense strand starting at position 1011 of SEQ ID NO: 1882420
uccgaaucccuuuagguua

SEQ ID NO: 2119693 - RNA, 19 nt, Artificial Sequence
  Description of Artificial Sequence: Synthetic oligonucleotide
  Antisense strand to SEQ ID NO: 2119692
uaaccuaaagggauucgga

SEQ ID NO: 2119694 - RNA, 19 nt, Artificial Sequence
  Description of Artificial Sequence: Synthetic oligonucleotide
  Sense strand starting at position 1076 of SEQ ID NO: 1882420
aggucacucugguuagaag

SEQ ID NO: 2119695 - RNA, 19 nt, Artificial Sequence
  Description of Artificial Sequence: Synthetic oligonucleotide
  Antisense strand to SEQ ID NO: 2119694
cuucuaaccagagugaccu

SEQ ID NO: 2119696 - RNA, 19 nt, Artificial Sequence
  Description of Artificial Sequence: Synthetic oligonucleotide
  Sense strand starting at position 1122 of SEQ ID NO: 1882420
gucauuguucugccgccaa

SEQ ID NO: 2119697 - RNA, 19 nt, Artificial Sequence
  Description of Artificial Sequence: Synthetic oligonucleotide
  Antisense strand to SEQ ID NO: 2119696
uuggcggcagaacaaugac

SEQ ID NO: 2119698 - RNA, 19 nt, Artificial Sequence
  Description of Artificial Sequence: Synthetic oligonucleotide
  Sense strand starting at position 1124 of SEQ ID NO: 1882420
cauuguucugccgccaagu

SEQ ID NO: 2119699 - RNA, 19 nt, Artificial Sequence
  Description of Artificial Sequence: Synthetic oligonucleotide
  Antisense strand to SEQ ID NO: 2119698
acuuggcggcagaacaaug

SEQ ID NO: 2119700 - RNA, 19 nt, Artificial Sequence
  Description of Artificial Sequence: Synthetic oligonucleotide
  Sense strand starting at position 1134 of SEQ ID NO: 1882420
ccgccaaguccuuaaagaa

SEQ ID NO: 2119701 - RNA, 19 nt, Artificial Sequence
  Description of Artificial Sequence: Synthetic oligonucleotide
  Antisense strand to SEQ ID NO: 2119700
uucuuuaaggacuuggcgg

SEQ ID NO: 2119702 - RNA, 19 nt, Artificial Sequence
  Description of Artificial Sequence: Synthetic oligonucleotide
  Sense strand starting at position 1141 of SEQ ID NO: 1882420
guccuuaaagaauggcaga

SEQ ID NO: 2119703 - RNA, 19 nt, Artificial Sequence
  Description of Artificial Sequence: Synthetic oligonucleotide
  Antisense strand to SEQ ID NO: 2119702
ucugccauucuuuaaggac

SEQ ID NO: 2119704 - RNA, 19 nt, Artificial Sequence
  Description of Artificial Sequence: Synthetic oligonucleotide
  Sense strand starting at position 1174 of SEQ ID NO: 1882420
accugcuaaguacaagauu

SEQ ID NO: 2119705 - RNA, 19 nt, Artificial Sequence
  Description of Artificial Sequence: Synthetic oligonucleotide
  Antisense strand to SEQ ID NO: 2119704
aaucuuguacuuagcaggu

SEQ ID NO: 2119706 - RNA, 19 nt, Artificial Sequence
  Description of Artificial Sequence: Synthetic oligonucleotide
  Sense strand starting at position 1177 of SEQ ID NO: 1882420
ugcuaaguacaagauucua

SEQ ID NO: 2119707 - RNA, 19 nt, Artificial Sequence
  Description of Artificial Sequence: Synthetic oligonucleotide
  Antisense strand to SEQ ID NO: 2119706
uagaaucuuguacuuagca

SEQ ID NO: 2119708 - RNA, 19 nt, Artificial Sequence
  Description of Artificial Sequence: Synthetic oligonucleotide
  Sense strand starting at position 1185 of SEQ ID NO: 1882420
acaagauucuaugcuggag

SEQ ID NO: 2119709 - RNA, 19 nt, Artificial Sequence
  Description of Artificial Sequence: Synthetic oligonucleotide
  Antisense strand to SEQ ID NO: 2119708
cuccagcauagaaucuugu

SEQ ID NO: 2119710 - RNA, 19 nt, Artificial Sequence
  Description of Artificial Sequence: Synthetic oligonucleotide
  Sense strand starting at position 1188 of SEQ ID NO: 1882420
agauucuaugcuggagaug

SEQ ID NO: 2119711 - RNA, 19 nt, Artificial Sequence
  Description of Artificial Sequence: Synthetic oligonucleotide
  Antisense strand to SEQ ID NO: 2119710
caucuccagcauagaaucu

SEQ ID NO: 2119712 - RNA, 19 nt, Artificial Sequence
  Description of Artificial Sequence: Synthetic oligonucleotide
  Sense strand starting at position 1222 of SEQ ID NO: 1882420
ucaagagcacuuugucaaa

SEQ ID NO: 2119713 - RNA, 19 nt, Artificial Sequence
  Description of Artificial Sequence: Synthetic oligonucleotide
  Antisense strand to SEQ ID NO: 2119712
uuugacaaagugcucuuga

SEQ ID NO: 2119714 - RNA, 19 nt, Artificial Sequence
  Description of Artificial Sequence: Synthetic oligonucleotide
  Sense strand starting at position 1434 of SEQ ID NO: 1882420
aaggaacaggguugucaau

SEQ ID NO: 2119715 - RNA, 19 nt, Artificial Sequence
  Description of Artificial Sequence: Synthetic oligonucleotide
  Antisense strand to SEQ ID NO: 2119714
auugacaacccuguuccuu

SEQ ID NO: 2119716 - RNA, 19 nt, Artificial Sequence
  Description of Artificial Sequence: Synthetic oligonucleotide
  Sense strand starting at position 1441 of SEQ ID NO: 1882420
aggguugucaaugggcaua

SEQ ID NO: 2119717 - RNA, 19 nt, Artificial Sequence
  Description of Artificial Sequence: Synthetic oligonucleotide
  Antisense strand to SEQ ID NO: 2119716
uaugcccauugacaacccu

SEQ ID NO: 2119718 - RNA, 19 nt, Artificial Sequence
  Description of Artificial Sequence: Synthetic oligonucleotide
  Sense strand starting at position 2404 of SEQ ID NO: 1882420
aggugaugccuccaaguuc

SEQ ID NO: 2119719 - RNA, 19 nt, Artificial Sequence
  Description of Artificial Sequence: Synthetic oligonucleotide
  Antisense strand to SEQ ID NO: 2119718
gaacuuggaggcaucaccu

SEQ ID NO: 2119720 - RNA, 19 nt, Artificial Sequence
  Description of Artificial Sequence: Synthetic oligonucleotide
  Sense strand starting at position 2526 of SEQ ID NO: 1882420
ucaaguggauccucagacu

SEQ ID NO: 2119721 - RNA, 19 nt, Artificial Sequence
  Description of Artificial Sequence: Synthetic oligonucleotide
  Antisense strand to SEQ ID NO: 2119720
agucugaggauccacuuga

SEQ ID NO: 2119722 - RNA, 19 nt, Artificial Sequence
  Description of Artificial Sequence: Synthetic oligonucleotide
  Sense strand starting at position 2547 of SEQ ID NO: 1882420
ucuggcaggucuccaaaua

SEQ ID NO: 2119723 - RNA, 19 nt, Artificial Sequence
  Description of Artificial Sequence: Synthetic oligonucleotide
  Antisense strand to SEQ ID NO: 2119722
uauuuggagaccugccaga

SEQ ID NO: 2119724 - RNA, 19 nt, Artificial Sequence
  Description of Artificial Sequence: Synthetic oligonucleotide
  Sense strand starting at position 2587 of SEQ ID NO: 1882420
ggauuccacuucuuggaaa

SEQ ID NO: 2119725 - RNA, 19 nt, Artificial Sequence
  Description of Artificial Sequence: Synthetic oligonucleotide
  Antisense strand to SEQ ID NO: 2119724
uuuccaagaaguggaaucc

SEQ ID NO: 2119726 - RNA, 19 nt, Artificial Sequence
  Description of Artificial Sequence: Synthetic oligonucleotide
  Sense strand starting at position 2683 of SEQ ID NO: 1882420
uuacuauaugcccagagcu

SEQ ID NO: 2119727 - RNA, 19 nt, Artificial Sequence
  Description of Artificial Sequence: Synthetic oligonucleotide
  Antisense strand to SEQ ID NO: 2119726
agcucugggcauauaguaa

SEQ ID NO: 2119728 - RNA, 19 nt, Artificial Sequence
  Description of Artificial Sequence: Synthetic oligonucleotide
  Sense strand starting at position 2767 of SEQ ID NO: 1882420
ugccaucugcuggaauauc

SEQ ID NO: 2119729 - RNA, 19 nt, Artificial Sequence
  Description of Artificial Sequence: Synthetic oligonucleotide
  Antisense strand to SEQ ID NO: 2119728
gauauuccagcagauggca

SEQ ID NO: 2119730 - RNA, 19 nt, Artificial Sequence
  Description of Artificial Sequence: Synthetic oligonucleotide
  Sense strand starting at position 2776 of SEQ ID NO: 1882420
cuggaauaucauugccaca

SEQ ID NO: 2119731 - RNA, 19 nt, Artificial Sequence
  Description of Artificial Sequence: Synthetic oligonucleotide
  Antisense strand to SEQ ID NO: 2119730
uguggcaaugauauuccag

SEQ ID NO: 2119732 - RNA, 19 nt, Artificial Sequence
  Description of Artificial Sequence: Synthetic oligonucleotide
  Sense strand starting at position 2778 of SEQ ID NO: 1882420
ggaauaucauugccacaua

SEQ ID NO: 2119733 - RNA, 19 nt, Artificial Sequence
  Description of Artificial Sequence: Synthetic oligonucleotide
  Antisense strand to SEQ ID NO: 2119732
uauguggcaaugauauucc

SEQ ID NO: 2119734 - RNA, 19 nt, Artificial Sequence
  Description of Artificial Sequence: Synthetic oligonucleotide
  Sense strand starting at position 2789 of SEQ ID NO: 1882420
gccacauacugguuaugau

SEQ ID NO: 2119735 - RNA, 19 nt, Artificial Sequence
  Description of Artificial Sequence: Synthetic oligonucleotide
  Antisense strand to SEQ ID NO: 2119734
aucauaaccaguauguggc

SEQ ID NO: 2119736 - RNA, 19 nt, Artificial Sequence
  Description of Artificial Sequence: Synthetic oligonucleotide
  Sense strand starting at position 2855 of SEQ ID NO: 1882420
uggacaaaucuaugauggu

SEQ ID NO: 2119737 - RNA, 19 nt, Artificial Sequence
  Description of Artificial Sequence: Synthetic oligonucleotide
  Antisense strand to SEQ ID NO: 2119736
accaucauagauuugucca

SEQ ID NO: 2119738 - RNA, 19 nt, Artificial Sequence
  Description of Artificial Sequence: Synthetic oligonucleotide
  Sense strand starting at position 2870 of SEQ ID NO: 1882420
ugguacguuauggacaaua

SEQ ID NO: 2119739 - RNA, 19 nt, Artificial Sequence
  Description of Artificial Sequence: Synthetic oligonucleotide
  Antisense strand to SEQ ID NO: 2119738
uauuguccauaacguacca

SEQ ID NO: 2119740 - RNA, 19 nt, Artificial Sequence
  Description of Artificial Sequence: Synthetic oligonucleotide
  Sense strand starting at position 2872 of SEQ ID NO: 1882420
guacguuauggacaauaca

SEQ ID NO: 2119741 - RNA, 19 nt, Artificial Sequence
  Description of Artificial Sequence: Synthetic oligonucleotide
  Antisense strand to SEQ ID NO: 2119740
uguauuguccauaacguac

SEQ ID NO: 2119742 - RNA, 19 nt, Artificial Sequence
  Description of Artificial Sequence: Synthetic oligonucleotide
  Sense strand starting at position 2957 of SEQ ID NO: 1882420
cgagaaggcuucuccgaaa

SEQ ID NO: 2119743 - RNA, 19 nt, Artificial Sequence
  Description of Artificial Sequence: Synthetic oligonucleotide
  Antisense strand to SEQ ID NO: 2119742
uuucggagaagccuucucg

SEQ ID NO: 2119744 - RNA, 19 nt, Artificial Sequence
  Description of Artificial Sequence: Synthetic oligonucleotide
  Sense strand starting at position 3302 of SEQ ID NO: 1882420
agacuauauccugggaccu

SEQ ID NO: 2119745 - RNA, 19 nt, Artificial Sequence
  Description of Artificial Sequence: Synthetic oligonucleotide
  Antisense strand to SEQ ID NO: 2119744
aggucccaggauauagucu

SEQ ID NO: 2119746 - RNA, 19 nt, Artificial Sequence
  Description of Artificial Sequence: Synthetic oligonucleotide
  Sense strand starting at position 3600 of SEQ ID NO: 1882420
gcaggaugucuauaguccu

SEQ ID NO: 2119747 - RNA, 19 nt, Artificial Sequence
  Description of Artificial Sequence: Synthetic oligonucleotide
  Antisense strand to SEQ ID NO: 2119746
aggacuauagacauccugc

SEQ ID NO: 2119748 - RNA, 19 nt, Artificial Sequence
  Description of Artificial Sequence: Synthetic oligonucleotide
  Sense strand starting at position 3603 of SEQ ID NO: 1882420
ggaugucuauaguccuuaa

SEQ ID NO: 2119749 - RNA, 19 nt, Artificial Sequence
  Description of Artificial Sequence: Synthetic oligonucleotide
  Antisense strand to SEQ ID NO: 2119748
uuaaggacuauagacaucc

SEQ ID NO: 2119750 - RNA, 19 nt, Artificial Sequence
  Description of Artificial Sequence: Synthetic oligonucleotide
  Sense strand starting at position 3625 of SEQ ID NO: 1882420
cuuuaauugccauaggaua

SEQ ID NO: 2119751 - RNA, 19 nt, Artificial Sequence
  Description of Artificial Sequence: Synthetic oligonucleotide
  Antisense strand to SEQ ID NO: 2119750
uauccuauggcaauuaaag

SEQ ID NO: 2119752 - RNA, 19 nt, Artificial Sequence
  Description of Artificial Sequence: Synthetic oligonucleotide
  Sense strand starting at position 3637 of SEQ ID NO: 1882420
uaggauaaauggucauguu

SEQ ID NO: 2119753 - RNA, 19 nt, Artificial Sequence
  Description of Artificial Sequence: Synthetic oligonucleotide
  Antisense strand to SEQ ID NO: 2119752
aacaugaccauuuauccua

SEQ ID NO: 2119754 - RNA, 19 nt, Artificial Sequence
  Description of Artificial Sequence: Synthetic oligonucleotide
  Sense strand starting at position 3647 of SEQ ID NO: 1882420
ggucauguuccagaaguuu

SEQ ID NO: 2119755 - RNA, 19 nt, Artificial Sequence
  Description of Artificial Sequence: Synthetic oligonucleotide
  Antisense strand to SEQ ID NO: 2119754
aaacuucuggaacaugacc

SEQ ID NO: 2119756 - RNA, 19 nt, Artificial Sequence
  Description of Artificial Sequence: Synthetic oligonucleotide
  Sense strand starting at position 3758 of SEQ ID NO: 1882420
acugaauugaggcacuagu

SEQ ID NO: 2119757 - RNA, 19 nt, Artificial Sequence
  Description of Artificial Sequence: Synthetic oligonucleotide
  Antisense strand to SEQ ID NO: 2119756
acuagugccucaauucagu

SEQ ID NO: 2119758 - RNA, 19 nt, Artificial Sequence
  Description of Artificial Sequence: Synthetic oligonucleotide
  Sense strand starting at position 79 of SEQ ID NO: 1882421
gaaugaguauugcuccaaa

SEQ ID NO: 2119759 - RNA, 19 nt, Artificial Sequence
  Description of Artificial Sequence: Synthetic oligonucleotide
  Antisense strand to SEQ ID NO: 2119758
uuuggagcaauacucauuc

SEQ ID NO: 2119760 - RNA, 19 nt, Artificial Sequence
  Description of Artificial Sequence: Synthetic oligonucleotide
  Sense strand starting at position 82 of SEQ ID NO: 1882421
ugaguauugcuccaaacuc

SEQ ID NO: 2119761 - RNA, 19 nt, Artificial Sequence
  Description of Artificial Sequence: Synthetic oligonucleotide
  Antisense strand to SEQ ID NO: 2119760
gaguuuggagcaauacuca

SEQ ID NO: 2119762 - RNA, 19 nt, Artificial Sequence
  Description of Artificial Sequence: Synthetic oligonucleotide
  Sense strand starting at position 187 of SEQ ID NO: 1882421
ggucaugcccaucaagaau

SEQ ID NO: 2119763 - RNA, 19 nt, Artificial Sequence
  Description of Artificial Sequence: Synthetic oligonucleotide
  Antisense strand to SEQ ID NO: 2119762
auucuugaugggcaugacc

SEQ ID NO: 2119764 - RNA, 19 nt, Artificial Sequence
  Description of Artificial Sequence: Synthetic oligonucleotide
  Sense strand starting at position 532 of SEQ ID NO: 1882421
acacaagauuuaggaacua

SEQ ID NO: 2119765 - RNA, 19 nt, Artificial Sequence
  Description of Artificial Sequence: Synthetic oligonucleotide
  Antisense strand to SEQ ID NO: 2119764
uaguuccuaaaucuugugu

SEQ ID NO: 2119766 - RNA, 19 nt, Artificial Sequence
  Description of Artificial Sequence: Synthetic oligonucleotide
  Sense strand starting at position 855 of SEQ ID NO: 1882421
gcgguuagaauugggaaga

SEQ ID NO: 2119767 - RNA, 19 nt, Artificial Sequence
  Description of Artificial Sequence: Synthetic oligonucleotide
  Antisense strand to SEQ ID NO: 2119766
ucuucccaauucuaaccgc

SEQ ID NO: 2119768 - RNA, 19 nt, Artificial Sequence
  Description of Artificial Sequence: Synthetic oligonucleotide
  Sense strand starting at position 946 of SEQ ID NO: 1882421
ucaagucagccagauacga

SEQ ID NO: 2119769 - RNA, 19 nt, Artificial Sequence
  Description of Artificial Sequence: Synthetic oligonucleotide
  Antisense strand to SEQ ID NO: 2119768
ucguaucuggcugacuuga

SEQ ID NO: 2119770 - RNA, 19 nt, Artificial Sequence
  Description of Artificial Sequence: Synthetic oligonucleotide
  Sense strand starting at position 1115 of SEQ ID NO: 1882421
cuggaaucccggcacuuua

SEQ ID NO: 2119771 - RNA, 19 nt, Artificial Sequence
  Description of Artificial Sequence: Synthetic oligonucleotide
  Antisense strand to SEQ ID NO: 2119770
uaaagugccgggauuccag

SEQ ID NO: 2119772 - RNA, 19 nt, Artificial Sequence
  Description of Artificial Sequence: Synthetic oligonucleotide
  Sense strand starting at position 1480 of SEQ ID NO: 1882421
aagagauugcgaugggaag

SEQ ID NO: 2119773 - RNA, 19 nt, Artificial Sequence
  Description of Artificial Sequence: Synthetic oligonucleotide
  Antisense strand to SEQ ID NO: 2119772
cuucccaucgcaaucucuu

SEQ ID NO: 2119774 - RNA, 19 nt, Artificial Sequence
  Description of Artificial Sequence: Synthetic oligonucleotide
  Sense strand starting at position 1481 of SEQ ID NO: 1882421
agagauugcgaugggaaga

SEQ ID NO: 2119775 - RNA, 19 nt, Artificial Sequence
  Description of Artificial Sequence: Synthetic oligonucleotide
  Antisense strand to SEQ ID NO: 2119774
ucuucccaucgcaaucucu

SEQ ID NO: 2119776 - RNA, 19 nt, Artificial Sequence
  Description of Artificial Sequence: Synthetic oligonucleotide
  Sense strand starting at position 1508 of SEQ ID NO: 1882421
gggaaauccgugggacagu

SEQ ID NO: 2119777 - RNA, 19 nt, Artificial Sequence
  Description of Artificial Sequence: Synthetic oligonucleotide
  Antisense strand to SEQ ID NO: 2119776
acugucccacggauuuccc

SEQ ID NO: 2119778 - RNA, 19 nt, Artificial Sequence
  Description of Artificial Sequence: Synthetic oligonucleotide
  Sense strand starting at position 1646 of SEQ ID NO: 1882421
cuugaucuucgauaauacu

SEQ ID NO: 2119779 - RNA, 19 nt, Artificial Sequence
  Description of Artificial Sequence: Synthetic oligonucleotide
  Antisense strand to SEQ ID NO: 2119778
aguauuaucgaagaucaag

SEQ ID NO: 2119780 - RNA, 19 nt, Artificial Sequence
  Description of Artificial Sequence: Synthetic oligonucleotide
  Sense strand starting at position 1664 of SEQ ID NO: 1882421
ugggaaauguaaccaaugu

SEQ ID NO: 2119781 - RNA, 19 nt, Artificial Sequence
  Description of Artificial Sequence: Synthetic oligonucleotide
  Antisense strand to SEQ ID NO: 2119780
acauugguuacauuuccca

SEQ ID NO: 2119782 - RNA, 19 nt, Artificial Sequence
  Description of Artificial Sequence: Synthetic oligonucleotide
  Sense strand starting at position 2120 of SEQ ID NO: 1882421
cuauuaucggucgugccaa

SEQ ID NO: 2119783 - RNA, 19 nt, Artificial Sequence
  Description of Artificial Sequence: Synthetic oligonucleotide
  Antisense strand to SEQ ID NO: 2119782
uuggcacgaccgauaauag

SEQ ID NO: 2119784 - RNA, 19 nt, Artificial Sequence
  Description of Artificial Sequence: Synthetic oligonucleotide
  Sense strand starting at position 2164 of SEQ ID NO: 1882421
uugaauucgcuauacugga

SEQ ID NO: 2119785 - RNA, 19 nt, Artificial Sequence
  Description of Artificial Sequence: Synthetic oligonucleotide
  Antisense strand to SEQ ID NO: 2119784
uccaguauagcgaauucaa

SEQ ID NO: 2119786 - RNA, 19 nt, Artificial Sequence
  Description of Artificial Sequence: Synthetic oligonucleotide
  Sense strand starting at position 2177 of SEQ ID NO: 1882421
acuggauauuguuuccuga

SEQ ID NO: 2119787 - RNA, 19 nt, Artificial Sequence
  Description of Artificial Sequence: Synthetic oligonucleotide
  Antisense strand to SEQ ID NO: 2119786
ucaggaaacaauauccagu

SEQ ID NO: 2119788 - RNA, 19 nt, Artificial Sequence
  Description of Artificial Sequence: Synthetic oligonucleotide
  Sense strand starting at position 2179 of SEQ ID NO: 1882421
uggauauuguuuccugacu

SEQ ID NO: 2119789 - RNA, 19 nt, Artificial Sequence
  Description of Artificial Sequence: Synthetic oligonucleotide
  Antisense strand to SEQ ID NO: 2119788
agucaggaaacaauaucca

SEQ ID NO: 2119790 - RNA, 19 nt, Artificial Sequence
  Description of Artificial Sequence: Synthetic oligonucleotide
  Sense strand starting at position 2180 of SEQ ID NO: 1882421
ggauauuguuuccugacug

SEQ ID NO: 2119791 - RNA, 19 nt, Artificial Sequence
  Description of Artificial Sequence: Synthetic oligonucleotide
  Antisense strand to SEQ ID NO: 2119790
cagucaggaaacaauaucc

SEQ ID NO: 2119792 - RNA, 19 nt, Artificial Sequence
  Description of Artificial Sequence: Synthetic oligonucleotide
  Sense strand starting at position 2341 of SEQ ID NO: 1882421
cagagaaaggucugugaug

SEQ ID NO: 2119793 - RNA, 19 nt, Artificial Sequence
  Description of Artificial Sequence: Synthetic oligonucleotide
  Antisense strand to SEQ ID NO: 2119792
caucacagaccuuucucug

SEQ ID NO: 2119794 - RNA, 19 nt, Artificial Sequence
  Description of Artificial Sequence: Synthetic oligonucleotide
  Sense strand starting at position 2360 of SEQ ID NO: 1882421
gggugauucugcuuggaaa

SEQ ID NO: 2119795 - RNA, 19 nt, Artificial Sequence
  Description of Artificial Sequence: Synthetic oligonucleotide
  Antisense strand to SEQ ID NO: 2119794
uuuccaagcagaaucaccc

SEQ ID NO: 2119796 - RNA, 19 nt, Artificial Sequence
  Description of Artificial Sequence: Synthetic oligonucleotide
  Sense strand starting at position 2361 of SEQ ID NO: 1882421
ggugauucugcuuggaaag

SEQ ID NO: 2119797 - RNA, 19 nt, Artificial Sequence
  Description of Artificial Sequence: Synthetic oligonucleotide
  Antisense strand to SEQ ID NO: 2119796
cuuuccaagcagaaucacc

SEQ ID NO: 2119798 - RNA, 19 nt, Artificial Sequence
  Description of Artificial Sequence: Synthetic oligonucleotide
  Sense strand starting at position 2396 of SEQ ID NO: 1882421
gagcauaacgcagaaagau

SEQ ID NO: 2119799 - RNA, 19 nt, Artificial Sequence
  Description of Artificial Sequence: Synthetic oligonucleotide
  Antisense strand to SEQ ID NO: 2119798
aucuuucugcguuaugcuc

SEQ ID NO: 2119800 - RNA, 19 nt, Artificial Sequence
  Description of Artificial Sequence: Synthetic oligonucleotide
  Sense strand starting at position 2665 of SEQ ID NO: 1882421
ggcggaauccuccacggaa

SEQ ID NO: 2119801 - RNA, 19 nt, Artificial Sequence
  Description of Artificial Sequence: Synthetic oligonucleotide
  Antisense strand to SEQ ID NO: 2119800
uuccguggaggauuccgcc

SEQ ID NO: 2119802 - RNA, 19 nt, Artificial Sequence
  Description of Artificial Sequence: Synthetic oligonucleotide
  Sense strand starting at position 2667 of SEQ ID NO: 1882421
cggaauccuccacggaaua

SEQ ID NO: 2119803 - RNA, 19 nt, Artificial Sequence
  Description of Artificial Sequence: Synthetic oligonucleotide
  Antisense strand to SEQ ID NO: 2119802
uauuccguggaggauuccg

SEQ ID NO: 2119804 - RNA, 19 nt, Artificial Sequence
  Description of Artificial Sequence: Synthetic oligonucleotide
  Sense strand starting at position 2668 of SEQ ID NO: 1882421
ggaauccuccacggaauaa

SEQ ID NO: 2119805 - RNA, 19 nt, Artificial Sequence
  Description of Artificial Sequence: Synthetic oligonucleotide
  Antisense strand to SEQ ID NO: 2119804
uuauuccguggaggauucc

SEQ ID NO: 2119806 - RNA, 19 nt, Artificial Sequence
  Description of Artificial Sequence: Synthetic oligonucleotide
  Sense strand starting at position 2704 of SEQ ID NO: 1882421
ggcgauuuaugacugcaua

SEQ ID NO: 2119807 - RNA, 19 nt, Artificial Sequence
  Description of Artificial Sequence: Synthetic oligonucleotide
  Antisense strand to SEQ ID NO: 2119806
uaugcagucauaaaucgcc

SEQ ID NO: 2119808 - RNA, 19 nt, Artificial Sequence
  Description of Artificial Sequence: Synthetic oligonucleotide
  Sense strand starting at position 2705 of SEQ ID NO: 1882421
gcgauuuaugacugcauaa

SEQ ID NO: 2119809 - RNA, 19 nt, Artificial Sequence
  Description of Artificial Sequence: Synthetic oligonucleotide
  Antisense strand to SEQ ID NO: 2119808
uuaugcagucauaaaucgc

SEQ ID NO: 2119810 - RNA, 19 nt, Artificial Sequence
  Description of Artificial Sequence: Synthetic oligonucleotide
  Sense strand starting at position 2904 of SEQ ID NO: 1882421
cgcucucauccuuaaggga

SEQ ID NO: 2119811 - RNA, 19 nt, Artificial Sequence
  Description of Artificial Sequence: Synthetic oligonucleotide
  Antisense strand to SEQ ID NO: 2119810
ucccuuaaggaugagagcg

SEQ ID NO: 2119812 - RNA, 19 nt, Artificial Sequence
  Description of Artificial Sequence: Synthetic oligonucleotide
  Sense strand starting at position 2985 of SEQ ID NO: 1882421
ggccuuccugaccagucaa

SEQ ID NO: 2119813 - RNA, 19 nt, Artificial Sequence
  Description of Artificial Sequence: Synthetic oligonucleotide
  Antisense strand to SEQ ID NO: 2119812
uugacuggucaggaaggcc

SEQ ID NO: 2119814 - RNA, 19 nt, Artificial Sequence
  Description of Artificial Sequence: Synthetic oligonucleotide
  Sense strand starting at position 3028 of SEQ ID NO: 1882421
aguggacagacaugcgaaa

SEQ ID NO: 2119815 - RNA, 19 nt, Artificial Sequence
  Description of Artificial Sequence: Synthetic oligonucleotide
  Antisense strand to SEQ ID NO: 2119814
uuucgcaugucuguccacu

SEQ ID NO: 2119816 - RNA, 19 nt, Artificial Sequence
  Description of Artificial Sequence: Synthetic oligonucleotide
  Sense strand starting at position 3250 of SEQ ID NO: 1882421
ccaauuaaaguaggugaua

SEQ ID NO: 2119817 - RNA, 19 nt, Artificial Sequence
  Description of Artificial Sequence: Synthetic oligonucleotide
  Antisense strand to SEQ ID NO: 2119816
uaucaccuacuuuaauugg

SEQ ID NO: 2119818 - RNA, 19 nt, Artificial Sequence
  Description of Artificial Sequence: Synthetic oligonucleotide
  Sense strand starting at position 3261 of SEQ ID NO: 1882421
aggugauaagaccgucaau

SEQ ID NO: 2119819 - RNA, 19 nt, Artificial Sequence
  Description of Artificial Sequence: Synthetic oligonucleotide
  Antisense strand to SEQ ID NO: 2119818
auugacggucuuaucaccu

SEQ ID NO: 2119820 - RNA, 19 nt, Artificial Sequence
  Description of Artificial Sequence: Synthetic oligonucleotide
  Sense strand starting at position 3568 of SEQ ID NO: 1882421
gcaaaugucugaucacaaa

SEQ ID NO: 2119821 - RNA, 19 nt, Artificial Sequence
  Description of Artificial Sequence: Synthetic oligonucleotide
  Antisense strand to SEQ ID NO: 2119820
uuugugaucagacauuugc

SEQ ID NO: 2119822 - RNA, 19 nt, Artificial Sequence
  Description of Artificial Sequence: Synthetic oligonucleotide
  Sense strand starting at position 3699 of SEQ ID NO: 1882421
uggugaaucagugacugca

SEQ ID NO: 2119823 - RNA, 19 nt, Artificial Sequence
  Description of Artificial Sequence: Synthetic oligonucleotide
  Antisense strand to SEQ ID NO: 2119822
ugcagucacugauucacca

SEQ ID NO: 2119824 - RNA, 19 nt, Artificial Sequence
  Description of Artificial Sequence: Synthetic oligonucleotide
  Sense strand starting at position 3702 of SEQ ID NO: 1882421
ugaaucagugacugcaauu

SEQ ID NO: 2119825 - RNA, 19 nt, Artificial Sequence
  Description of Artificial Sequence: Synthetic oligonucleotide
  Antisense strand to SEQ ID NO: 2119824
aauugcagucacugauuca

SEQ ID NO: 2119826 - RNA, 19 nt, Artificial Sequence
  Description of Artificial Sequence: Synthetic oligonucleotide
  Sense strand starting at position 3743 of SEQ ID NO: 1882421
aggaauaaauguuugugaa

SEQ ID NO: 2119827 - RNA, 19 nt, Artificial Sequence
  Description of Artificial Sequence: Synthetic oligonucleotide
  Antisense strand to SEQ ID NO: 2119826
uucacaaacauuuauuccu

SEQ ID NO: 2119828 - RNA, 19 nt, Artificial Sequence
  Description of Artificial Sequence: Synthetic oligonucleotide
  Sense strand starting at position 3744 of SEQ ID NO: 1882421
ggaauaaauguuugugaaa

SEQ ID NO: 2119829 - RNA, 19 nt, Artificial Sequence
  Description of Artificial Sequence: Synthetic oligonucleotide
  Antisense strand to SEQ ID NO: 2119828
uuucacaaacauuuauucc

SEQ ID NO: 2119830 - RNA, 19 nt, Artificial Sequence
  Description of Artificial Sequence: Synthetic oligonucleotide
  Sense strand starting at position 3751 of SEQ ID NO: 1882421
auguuugugaaauagcagu

SEQ ID NO: 2119831 - RNA, 19 nt, Artificial Sequence
  Description of Artificial Sequence: Synthetic oligonucleotide
  Antisense strand to SEQ ID NO: 2119830
acugcuauuucacaaacau

SEQ ID NO: 2119832 - RNA, 19 nt, Artificial Sequence
  Description of Artificial Sequence: Synthetic oligonucleotide
  Sense strand starting at position 3857 of SEQ ID NO: 1882421
ccacaaguccuccggauga

SEQ ID NO: 2119833 - RNA, 19 nt, Artificial Sequence
  Description of Artificial Sequence: Synthetic oligonucleotide
  Antisense strand to SEQ ID NO: 2119832
ucauccggaggacuugugg

SEQ ID NO: 2119834 - RNA, 19 nt, Artificial Sequence
  Description of Artificial Sequence: Synthetic oligonucleotide
  Sense strand starting at position 3859 of SEQ ID NO: 1882421
acaaguccuccggaugagu

SEQ ID NO: 2119835 - RNA, 19 nt, Artificial Sequence
  Description of Artificial Sequence: Synthetic oligonucleotide
  Antisense strand to SEQ ID NO: 2119834
acucauccggaggacuugu

SEQ ID NO: 2119836 - RNA, 19 nt, Artificial Sequence
  Description of Artificial Sequence: Synthetic oligonucleotide
  Sense strand starting at position 3928 of SEQ ID NO: 1882421
ggauguguuauagaguuuc

SEQ ID NO: 2119837 - RNA, 19 nt, Artificial Sequence
  Description of Artificial Sequence: Synthetic oligonucleotide
  Antisense strand to SEQ ID NO: 2119836
gaaacucuauaacacaucc

SEQ ID NO: 2119838 - RNA, 19 nt, Artificial Sequence
  Description of Artificial Sequence: Synthetic oligonucleotide
  Sense strand starting at position 46 of SEQ ID NO: 1882422
ugagcaggacugugacaaa

SEQ ID NO: 2119839 - RNA, 19 nt, Artificial Sequence
  Description of Artificial Sequence: Synthetic oligonucleotide
  Antisense strand to SEQ ID NO: 2119838
uuugucacaguccugcuca

SEQ ID NO: 2119840 - RNA, 19 nt, Artificial Sequence
  Description of Artificial Sequence: Synthetic oligonucleotide
  Sense strand starting at position 405 of SEQ ID NO: 1882422
ggagucucgacggacuaaa

SEQ ID NO: 2119841 - RNA, 19 nt, Artificial Sequence
  Description of Artificial Sequence: Synthetic oligonucleotide
  Antisense strand to SEQ ID NO: 2119840
uuuaguccgucgagacucc

SEQ ID NO: 2119842 - RNA, 19 nt, Artificial Sequence
  Description of Artificial Sequence: Synthetic oligonucleotide
  Sense strand starting at position 491 of SEQ ID NO: 1882422
gcauuuagaugucauuugu

SEQ ID NO: 2119843 - RNA, 19 nt, Artificial Sequence
  Description of Artificial Sequence: Synthetic oligonucleotide
  Antisense strand to SEQ ID NO: 2119842
acaaaugacaucuaaaugc

SEQ ID NO: 2119844 - RNA, 19 nt, Artificial Sequence
  Description of Artificial Sequence: Synthetic oligonucleotide
  Sense strand starting at position 709 of SEQ ID NO: 1882422
ccugaagccucaucaaaug

SEQ ID NO: 2119845 - RNA, 19 nt, Artificial Sequence
  Description of Artificial Sequence: Synthetic oligonucleotide
  Antisense strand to SEQ ID NO: 2119844
cauuugaugaggcuucagg

SEQ ID NO: 2119846 - RNA, 19 nt, Artificial Sequence
  Description of Artificial Sequence: Synthetic oligonucleotide
  Sense strand starting at position 774 of SEQ ID NO: 1882422
agaaauucuuaugcaaguc

SEQ ID NO: 2119847 - RNA, 19 nt, Artificial Sequence
  Description of Artificial Sequence: Synthetic oligonucleotide
  Antisense strand to SEQ ID NO: 2119846
gacuugcauaagaauuucu

SEQ ID NO: 2119848 - RNA, 19 nt, Artificial Sequence
  Description of Artificial Sequence: Synthetic oligonucleotide
  Sense strand starting at position 904 of SEQ ID NO: 1882422
cgucgaagucucuuucugu

SEQ ID NO: 2119849 - RNA, 19 nt, Artificial Sequence
  Description of Artificial Sequence: Synthetic oligonucleotide
  Antisense strand to SEQ ID NO: 2119848
acagaaagagacuucgacg

SEQ ID NO: 2119850 - RNA, 19 nt, Artificial Sequence
  Description of Artificial Sequence: Synthetic oligonucleotide
  Sense strand starting at position 994 of SEQ ID NO: 1882422
gacagugaauuccucggaa

SEQ ID NO: 2119851 - RNA, 19 nt, Artificial Sequence
  Description of Artificial Sequence: Synthetic oligonucleotide
  Antisense strand to SEQ ID NO: 2119850
uuccgaggaauucacuguc

SEQ ID NO: 2119852 - RNA, 19 nt, Artificial Sequence
  Description of Artificial Sequence: Synthetic oligonucleotide
  Sense strand starting at position 1376 of SEQ ID NO: 1882422
gggugagguagguauucuu

SEQ ID NO: 2119853 - RNA, 19 nt, Artificial Sequence
  Description of Artificial Sequence: Synthetic oligonucleotide
  Antisense strand to SEQ ID NO: 2119852
aagaauaccuaccucaccc

SEQ ID NO: 2119854 - RNA, 19 nt, Artificial Sequence
  Description of Artificial Sequence: Synthetic oligonucleotide
  Sense strand starting at position 1393 of SEQ ID NO: 1882422
uuauuuccauugccagagu

SEQ ID NO: 2119855 - RNA, 19 nt, Artificial Sequence
  Description of Artificial Sequence: Synthetic oligonucleotide
  Antisense strand to SEQ ID NO: 2119854
acucuggcaauggaaauaa

SEQ ID NO: 2119856 - RNA, 19 nt, Artificial Sequence
  Description of Artificial Sequence: Synthetic oligonucleotide
  Sense strand starting at position 1396 of SEQ ID NO: 1882422
uuuccauugccagagugaa

SEQ ID NO: 2119857 - RNA, 19 nt, Artificial Sequence
  Description of Artificial Sequence: Synthetic oligonucleotide
  Antisense strand to SEQ ID NO: 2119856
uucacucuggcaauggaaa

SEQ ID NO: 2119858 - RNA, 19 nt, Artificial Sequence
  Description of Artificial Sequence: Synthetic oligonucleotide
  Sense strand starting at position 1563 of SEQ ID NO: 1882422
ccgcuuuccagggacugaa

SEQ ID NO: 2119859 - RNA, 19 nt, Artificial Sequence
  Description of Artificial Sequence: Synthetic oligonucleotide
  Antisense strand to SEQ ID NO: 2119858
uucagucccuggaaagcgg

SEQ ID NO: 2119860 - RNA, 19 nt, Artificial Sequence
  Description of Artificial Sequence: Synthetic oligonucleotide
  Sense strand starting at position 1708 of SEQ ID NO: 1882422
ggcuccuuagcauaugaau

SEQ ID NO: 2119861 - RNA, 19 nt, Artificial Sequence
  Description of Artificial Sequence: Synthetic oligonucleotide
  Antisense strand to SEQ ID NO: 2119860
auucauaugcuaaggagcc

SEQ ID NO: 2119862 - RNA, 19 nt, Artificial Sequence
  Description of Artificial Sequence: Synthetic oligonucleotide
  Sense strand starting at position 1953 of SEQ ID NO: 1882422
cccugaaauugucugggau

SEQ ID NO: 2119863 - RNA, 19 nt, Artificial Sequence
  Description of Artificial Sequence: Synthetic oligonucleotide
  Antisense strand to SEQ ID NO: 2119862
aucccagacaauuucaggg

SEQ ID NO: 2119864 - RNA, 19 nt, Artificial Sequence
  Description of Artificial Sequence: Synthetic oligonucleotide
  Sense strand starting at position 1954 of SEQ ID NO: 1882422
ccugaaauugucugggauc

SEQ ID NO: 2119865 - RNA, 19 nt, Artificial Sequence
  Description of Artificial Sequence: Synthetic oligonucleotide
  Antisense strand to SEQ ID NO: 2119864
gaucccagacaauuucagg

SEQ ID NO: 2119866 - RNA, 19 nt, Artificial Sequence
  Description of Artificial Sequence: Synthetic oligonucleotide
  Sense strand starting at position 1956 of SEQ ID NO: 1882422
ugaaauugucugggaucca

SEQ ID NO: 2119867 - RNA, 19 nt, Artificial Sequence
  Description of Artificial Sequence: Synthetic oligonucleotide
  Antisense strand to SEQ ID NO: 2119866
uggaucccagacaauuuca

SEQ ID NO: 2119868 - RNA, 19 nt, Artificial Sequence
  Description of Artificial Sequence: Synthetic oligonucleotide
  Sense strand starting at position 2088 of SEQ ID NO: 1882422
ggucacgagcuugaggaau

SEQ ID NO: 2119869 - RNA, 19 nt, Artificial Sequence
  Description of Artificial Sequence: Synthetic oligonucleotide
  Antisense strand to SEQ ID NO: 2119868
auuccucaagcucgugacc

SEQ ID NO: 2119870 - RNA, 19 nt, Artificial Sequence
  Description of Artificial Sequence: Synthetic oligonucleotide
  Sense strand starting at position 2176 of SEQ ID NO: 1882422
uuauaucauuaccuuggga

SEQ ID NO: 2119871 - RNA, 19 nt, Artificial Sequence
  Description of Artificial Sequence: Synthetic oligonucleotide
  Antisense strand to SEQ ID NO: 2119870
ucccaagguaaugauauaa

SEQ ID NO: 2119872 - RNA, 19 nt, Artificial Sequence
  Description of Artificial Sequence: Synthetic oligonucleotide
  Sense strand starting at position 2179 of SEQ ID NO: 1882422
uaucauuaccuugggagau

SEQ ID NO: 2119873 - RNA, 19 nt, Artificial Sequence
  Description of Artificial Sequence: Synthetic oligonucleotide
  Antisense strand to SEQ ID NO: 2119872
aucucccaagguaaugaua

SEQ ID NO: 2119874 - RNA, 19 nt, Artificial Sequence
  Description of Artificial Sequence: Synthetic oligonucleotide
  Sense strand starting at position 2261 of SEQ ID NO: 1882422
augacugaauguucugaaa

SEQ ID NO: 2119875 - RNA, 19 nt, Artificial Sequence
  Description of Artificial Sequence: Synthetic oligonucleotide
  Antisense strand to SEQ ID NO: 2119874
uuucagaacauucagucau

SEQ ID NO: 2119876 - RNA, 19 nt, Artificial Sequence
  Description of Artificial Sequence: Synthetic oligonucleotide
  Sense strand starting at position 2393 of SEQ ID NO: 1882422
aaguauagauaguugagua

SEQ ID NO: 2119877 - RNA, 19 nt, Artificial Sequence
  Description of Artificial Sequence: Synthetic oligonucleotide
  Antisense strand to SEQ ID NO: 2119876
uacucaacuaucuauacuu

SEQ ID NO: 2119878 - RNA, 19 nt, Artificial Sequence
  Description of Artificial Sequence: Synthetic oligonucleotide
  Sense strand starting at position 2394 of SEQ ID NO: 1882422
aguauagauaguugaguau

SEQ ID NO: 2119879 - RNA, 19 nt, Artificial Sequence
  Description of Artificial Sequence: Synthetic oligonucleotide
  Antisense strand to SEQ ID NO: 2119878
auacucaacuaucuauacu

SEQ ID NO: 2119880 - RNA, 19 nt, Artificial Sequence
  Description of Artificial Sequence: Synthetic oligonucleotide
  Sense strand starting at position 2398 of SEQ ID NO: 1882422
uagauaguugaguaugcua

SEQ ID NO: 2119881 - RNA, 19 nt, Artificial Sequence
  Description of Artificial Sequence: Synthetic oligonucleotide
  Antisense strand to SEQ ID NO: 2119880
uagcauacucaacuaucua

SEQ ID NO: 2119882 - RNA, 19 nt, Artificial Sequence
  Description of Artificial Sequence: Synthetic oligonucleotide
  Sense strand starting at position 2405 of SEQ ID NO: 1882422
uugaguaugcuacauuauu

SEQ ID NO: 2119883 - RNA, 19 nt, Artificial Sequence
  Description of Artificial Sequence: Synthetic oligonucleotide
  Antisense strand to SEQ ID NO: 2119882
aauaauguagcauacucaa

SEQ ID NO: 2119884 - RNA, 19 nt, Artificial Sequence
  Description of Artificial Sequence: Synthetic oligonucleotide
  Sense strand starting at position 2467 of SEQ ID NO: 1882422
ccuugcgaggcauaaagaa

SEQ ID NO: 2119885 - RNA, 19 nt, Artificial Sequence
  Description of Artificial Sequence: Synthetic oligonucleotide
  Antisense strand to SEQ ID NO: 2119884
uucuuuaugccucgcaagg

SEQ ID NO: 2119886 - RNA, 19 nt, Artificial Sequence
  Description of Artificial Sequence: Synthetic oligonucleotide
  Sense strand starting at position 2618 of SEQ ID NO: 1882422
acaacuucugcuggaaauu

SEQ ID NO: 2119887 - RNA, 19 nt, Artificial Sequence
  Description of Artificial Sequence: Synthetic oligonucleotide
  Antisense strand to SEQ ID NO: 2119886
aauuuccagcagaaguugu

SEQ ID NO: 2119888 - RNA, 19 nt, Artificial Sequence
  Description of Artificial Sequence: Synthetic oligonucleotide
  Sense strand starting at position 2629 of SEQ ID NO: 1882422
uggaaauugcuccacucuu

SEQ ID NO: 2119889 - RNA, 19 nt, Artificial Sequence
  Description of Artificial Sequence: Synthetic oligonucleotide
  Antisense strand to SEQ ID NO: 2119888
aagaguggagcaauuucca

SEQ ID NO: 2119890 - RNA, 19 nt, Artificial Sequence
  Description of Artificial Sequence: Synthetic oligonucleotide
  Sense strand starting at position 2872 of SEQ ID NO: 1882422
cagacauucucccuggaga

SEQ ID NO: 2119891 - RNA, 19 nt, Artificial Sequence
  Description of Artificial Sequence: Synthetic oligonucleotide
  Antisense strand to SEQ ID NO: 2119890
ucuccagggagaaugucug

SEQ ID NO: 2119892 - RNA, 19 nt, Artificial Sequence
  Description of Artificial Sequence: Synthetic oligonucleotide
  Sense strand starting at position 2974 of SEQ ID NO: 1882422
gggaguuacauccagaugu

SEQ ID NO: 2119893 - RNA, 19 nt, Artificial Sequence
  Description of Artificial Sequence: Synthetic oligonucleotide
  Antisense strand to SEQ ID NO: 2119892
acaucuggauguaacuccc

SEQ ID NO: 2119894 - RNA, 19 nt, Artificial Sequence
  Description of Artificial Sequence: Synthetic oligonucleotide
  Sense strand starting at position 3025 of SEQ ID NO: 1882422
augucucaggguuaucuuu

SEQ ID NO: 2119895 - RNA, 19 nt, Artificial Sequence
  Description of Artificial Sequence: Synthetic oligonucleotide
  Antisense strand to SEQ ID NO: 2119894
aaagauaacccugagacau

SEQ ID NO: 2119896 - RNA, 19 nt, Artificial Sequence
  Description of Artificial Sequence: Synthetic oligonucleotide
  Sense strand starting at position 3131 of SEQ ID NO: 1882422
agcguuucggaugugucua

SEQ ID NO: 2119897 - RNA, 19 nt, Artificial Sequence
  Description of Artificial Sequence: Synthetic oligonucleotide
  Antisense strand to SEQ ID NO: 2119896
uagacacauccgaaacgcu

SEQ ID NO: 2119898 - RNA, 19 nt, Artificial Sequence
  Description of Artificial Sequence: Synthetic oligonucleotide
  Sense strand starting at position 3191 of SEQ ID NO: 1882422
gggccuucugagggacaca

SEQ ID NO: 2119899 - RNA, 19 nt, Artificial Sequence
  Description of Artificial Sequence: Synthetic oligonucleotide
  Antisense strand to SEQ ID NO: 2119898
ugugucccucagaaggccc

SEQ ID NO: 2119900 - RNA, 19 nt, Artificial Sequence
  Description of Artificial Sequence: Synthetic oligonucleotide
  Sense strand starting at position 3260 of SEQ ID NO: 1882422
acaaccauguguucugaga

SEQ ID NO: 2119901 - RNA, 19 nt, Artificial Sequence
  Description of Artificial Sequence: Synthetic oligonucleotide
  Antisense strand to SEQ ID NO: 2119900
ucucagaacacaugguugu

SEQ ID NO: 2119902 - RNA, 19 nt, Artificial Sequence
  Description of Artificial Sequence: Synthetic oligonucleotide
  Sense strand starting at position 3277 of SEQ ID NO: 1882422
gacgguggccauuacagaa

SEQ ID NO: 2119903 - RNA, 19 nt, Artificial Sequence
  Description of Artificial Sequence: Synthetic oligonucleotide
  Antisense strand to SEQ ID NO: 2119902
uucuguaauggccaccguc

SEQ ID NO: 2119904 - RNA, 19 nt, Artificial Sequence
  Description of Artificial Sequence: Synthetic oligonucleotide
  Sense strand starting at position 3324 of SEQ ID NO: 1882422
gggcaaucucaaggaauca

SEQ ID NO: 2119905 - RNA, 19 nt, Artificial Sequence
  Description of Artificial Sequence: Synthetic oligonucleotide
  Antisense strand to SEQ ID NO: 2119904
ugauuccuugagauugccc

SEQ ID NO: 2119906 - RNA, 19 nt, Artificial Sequence
  Description of Artificial Sequence: Synthetic oligonucleotide
  Sense strand starting at position 3337 of SEQ ID NO: 1882422
gaaucaagaucuguaggca

SEQ ID NO: 2119907 - RNA, 19 nt, Artificial Sequence
  Description of Artificial Sequence: Synthetic oligonucleotide
  Antisense strand to SEQ ID NO: 2119906
ugccuacagaucuugauuc

SEQ ID NO: 2119908 - RNA, 19 nt, Artificial Sequence
  Description of Artificial Sequence: Synthetic oligonucleotide
  Sense strand starting at position 3429 of SEQ ID NO: 1882422
gcugauguucuaggagaac

SEQ ID NO: 2119909 - RNA, 19 nt, Artificial Sequence
  Description of Artificial Sequence: Synthetic oligonucleotide
  Antisense strand to SEQ ID NO: 2119908
guucuccuagaacaucagc

SEQ ID NO: 2119910 - RNA, 19 nt, Artificial Sequence
  Description of Artificial Sequence: Synthetic oligonucleotide
  Sense strand starting at position 3467 of SEQ ID NO: 1882422
gggagaaauuaggccguau

SEQ ID NO: 2119911 - RNA, 19 nt, Artificial Sequence
  Description of Artificial Sequence: Synthetic oligonucleotide
  Antisense strand to SEQ ID NO: 2119910
auacggccuaauuucuccc

SEQ ID NO: 2119912 - RNA, 19 nt, Artificial Sequence
  Description of Artificial Sequence: Synthetic oligonucleotide
  Sense strand starting at position 3513 of SEQ ID NO: 1882422
gguguugugauuugaguca

SEQ ID NO: 2119913 - RNA, 19 nt, Artificial Sequence
  Description of Artificial Sequence: Synthetic oligonucleotide
  Antisense strand to SEQ ID NO: 2119912
ugacucaaaucacaacacc

SEQ ID NO: 2119914 - RNA, 19 nt, Artificial Sequence
  Description of Artificial Sequence: Synthetic oligonucleotide
  Sense strand starting at position 3566 of SEQ ID NO: 1882422
auaaauaacuuugcaguga

SEQ ID NO: 2119915 - RNA, 19 nt, Artificial Sequence
  Description of Artificial Sequence: Synthetic oligonucleotide
  Antisense strand to SEQ ID NO: 2119914
ucacugcaaaguuauuuau

SEQ ID NO: 2119916 - RNA, 19 nt, Artificial Sequence
  Description of Artificial Sequence: Synthetic oligonucleotide
  Sense strand starting at position 3837 of SEQ ID NO: 1882422
gugcuauggauggaauguu

SEQ ID NO: 2119917 - RNA, 19 nt, Artificial Sequence
  Description of Artificial Sequence: Synthetic oligonucleotide
  Antisense strand to SEQ ID NO: 2119916
aacauuccauccauagcac

SEQ ID NO: 2119918 - RNA, 19 nt, Artificial Sequence
  Description of Artificial Sequence: Synthetic oligonucleotide
  Sense strand starting at position 343 of SEQ ID NO: 1882423
agaaauaucugggaggauc

SEQ ID NO: 2119919 - RNA, 19 nt, Artificial Sequence
  Description of Artificial Sequence: Synthetic oligonucleotide
  Antisense strand to SEQ ID NO: 2119918
gauccucccagauauuucu

SEQ ID NO: 2119920 - RNA, 19 nt, Artificial Sequence
  Description of Artificial Sequence: Synthetic oligonucleotide
  Sense strand starting at position 675 of SEQ ID NO: 1882423
agaugugggucaucgucau

SEQ ID NO: 2119921 - RNA, 19 nt, Artificial Sequence
  Description of Artificial Sequence: Synthetic oligonucleotide
  Antisense strand to SEQ ID NO: 2119920
augacgaugacccacaucu

SEQ ID NO: 2119922 - RNA, 19 nt, Artificial Sequence
  Description of Artificial Sequence: Synthetic oligonucleotide
  Sense strand starting at position 682 of SEQ ID NO: 1882423
ggucaucgucaucagcuaa

SEQ ID NO: 2119923 - RNA, 19 nt, Artificial Sequence
  Description of Artificial Sequence: Synthetic oligonucleotide
  Antisense strand to SEQ ID NO: 2119922
uuagcugaugacgaugacc

SEQ ID NO: 2119924 - RNA, 19 nt, Artificial Sequence
  Description of Artificial Sequence: Synthetic oligonucleotide
  Sense strand starting at position 751 of SEQ ID NO: 1882423
gagaaauaagcucggcaau

SEQ ID NO: 2119925 - RNA, 19 nt, Artificial Sequence
  Description of Artificial Sequence: Synthetic oligonucleotide
  Antisense strand to SEQ ID NO: 2119924
auugccgagcuuauuucuc

SEQ ID NO: 2119926 - RNA, 19 nt, Artificial Sequence
  Description of Artificial Sequence: Synthetic oligonucleotide
  Sense strand starting at position 752 of SEQ ID NO: 1882423
agaaauaagcucggcaauu

SEQ ID NO: 2119927 - RNA, 19 nt, Artificial Sequence
  Description of Artificial Sequence: Synthetic oligonucleotide
  Antisense strand to SEQ ID NO: 2119926
aauugccgagcuuauuucu

SEQ ID NO: 2119928 - RNA, 19 nt, Artificial Sequence
  Description of Artificial Sequence: Synthetic oligonucleotide
  Sense strand starting at position 815 of SEQ ID NO: 1882423
ccaauuaugagguguaaug

SEQ ID NO: 2119929 - RNA, 19 nt, Artificial Sequence
  Description of Artificial Sequence: Synthetic oligonucleotide
  Antisense strand to SEQ ID NO: 2119928
cauuacaccucauaauugg

SEQ ID NO: 2119930 - RNA, 19 nt, Artificial Sequence
  Description of Artificial Sequence: Synthetic oligonucleotide
  Sense strand starting at position 1086 of SEQ ID NO: 1882423
ugagucaaaguguguccau

SEQ ID NO: 2119931 - RNA, 19 nt, Artificial Sequence
  Description of Artificial Sequence: Synthetic oligonucleotide
  Antisense strand to SEQ ID NO: 2119930
auggacacacuuugacuca

SEQ ID NO: 2119932 - RNA, 19 nt, Artificial Sequence
  Description of Artificial Sequence: Synthetic oligonucleotide
  Sense strand starting at position 1087 of SEQ ID NO: 1882423
gagucaaaguguguccauu

SEQ ID NO: 2119933 - RNA, 19 nt, Artificial Sequence
  Description of Artificial Sequence: Synthetic oligonucleotide
  Antisense strand to SEQ ID NO: 2119932
aauggacacacuuugacuc

SEQ ID NO: 2119934 - RNA, 19 nt, Artificial Sequence
  Description of Artificial Sequence: Synthetic oligonucleotide
  Sense strand starting at position 1089 of SEQ ID NO: 1882423
gucaaaguguguccauuuc

SEQ ID NO: 2119935 - RNA, 19 nt, Artificial Sequence
  Description of Artificial Sequence: Synthetic oligonucleotide
  Antisense strand to SEQ ID NO: 2119934
gaaauggacacacuuugac

SEQ ID NO: 2119936 - RNA, 19 nt, Artificial Sequence
  Description of Artificial Sequence: Synthetic oligonucleotide
  Sense strand starting at position 1110 of SEQ ID NO: 1882423
ccaaauuuguuuggaacaa

SEQ ID NO: 2119937 - RNA, 19 nt, Artificial Sequence
  Description of Artificial Sequence: Synthetic oligonucleotide
  Antisense strand to SEQ ID NO: 2119936
uuguuccaaacaaauuugg

SEQ ID NO: 2119938 - RNA, 19 nt, Artificial Sequence
  Description of Artificial Sequence: Synthetic oligonucleotide
  Sense strand starting at position 1211 of SEQ ID NO: 1882423
aaguacuuguggcugacaa

SEQ ID NO: 2119939 - RNA, 19 nt, Artificial Sequence
  Description of Artificial Sequence: Synthetic oligonucleotide
  Antisense strand to SEQ ID NO: 2119938
uugucagccacaaguacuu

SEQ ID NO: 2119940 - RNA, 19 nt, Artificial Sequence
  Description of Artificial Sequence: Synthetic oligonucleotide
  Sense strand starting at position 1212 of SEQ ID NO: 1882423
aguacuuguggcugacaac

SEQ ID NO: 2119941 - RNA, 19 nt, Artificial Sequence
  Description of Artificial Sequence: Synthetic oligonucleotide
  Antisense strand to SEQ ID NO: 2119940
guugucagccacaaguacu

SEQ ID NO: 2119942 - RNA, 19 nt, Artificial Sequence
  Description of Artificial Sequence: Synthetic oligonucleotide
  Sense strand starting at position 1213 of SEQ ID NO: 1882423
guacuuguggcugacaaca

SEQ ID NO: 2119943 - RNA, 19 nt, Artificial Sequence
  Description of Artificial Sequence: Synthetic oligonucleotide
  Antisense strand to SEQ ID NO: 2119942
uguugucagccacaaguac

SEQ ID NO: 2119944 - RNA, 19 nt, Artificial Sequence
  Description of Artificial Sequence: Synthetic oligonucleotide
  Sense strand starting at position 1233 of SEQ ID NO: 1882423
acucaacaucccugggaau

SEQ ID NO: 2119945 - RNA, 19 nt, Artificial Sequence
  Description of Artificial Sequence: Synthetic oligonucleotide
  Antisense strand to SEQ ID NO: 2119944
auucccagggauguugagu

SEQ ID NO: 2119946 - RNA, 19 nt, Artificial Sequence
  Description of Artificial Sequence: Synthetic oligonucleotide
  Sense strand starting at position 1234 of SEQ ID NO: 1882423
cucaacaucccugggaauu

SEQ ID NO: 2119947 - RNA, 19 nt, Artificial Sequence
  Description of Artificial Sequence: Synthetic oligonucleotide
  Antisense strand to SEQ ID NO: 2119946
aauucccagggauguugag

SEQ ID NO: 2119948 - RNA, 19 nt, Artificial Sequence
  Description of Artificial Sequence: Synthetic oligonucleotide
  Sense strand starting at position 1366 of SEQ ID NO: 1882423
ccuucuguagcugaaaucu

SEQ ID NO: 2119949 - RNA, 19 nt, Artificial Sequence
  Description of Artificial Sequence: Synthetic oligonucleotide
  Antisense strand to SEQ ID NO: 2119948
agauuucagcuacagaagg

SEQ ID NO: 2119950 - RNA, 19 nt, Artificial Sequence
  Description of Artificial Sequence: Synthetic oligonucleotide
  Sense strand starting at position 1404 of SEQ ID NO: 1882423
gugagucagcaucagaugu

SEQ ID NO: 2119951 - RNA, 19 nt, Artificial Sequence
  Description of Artificial Sequence: Synthetic oligonucleotide
  Antisense strand to SEQ ID NO: 2119950
acaucugaugcugacucac

SEQ ID NO: 2119952 - RNA, 19 nt, Artificial Sequence
  Description of Artificial Sequence: Synthetic oligonucleotide
  Sense strand starting at position 1421 of SEQ ID NO: 1882423
guacaauugggauguguuc

SEQ ID NO: 2119953 - RNA, 19 nt, Artificial Sequence
  Description of Artificial Sequence: Synthetic oligonucleotide
  Antisense strand to SEQ ID NO: 2119952
gaacacaucccaauuguac

SEQ ID NO: 2119954 - RNA, 19 nt, Artificial Sequence
  Description of Artificial Sequence: Synthetic oligonucleotide
  Sense strand starting at position 1476 of SEQ ID NO: 1882423
cuuuguuuccuguuugcua

SEQ ID NO: 2119955 - RNA, 19 nt, Artificial Sequence
  Description of Artificial Sequence: Synthetic oligonucleotide
  Antisense strand to SEQ ID NO: 2119954
uagcaaacaggaaacaaag

SEQ ID NO: 2119956 - RNA, 19 nt, Artificial Sequence
  Description of Artificial Sequence: Synthetic oligonucleotide
  Sense strand starting at position 1544 of SEQ ID NO: 1882423
acaacugugcugugaaagu

SEQ ID NO: 2119957 - RNA, 19 nt, Artificial Sequence
  Description of Artificial Sequence: Synthetic oligonucleotide
  Antisense strand to SEQ ID NO: 2119956
acuuucacagcacaguugu

SEQ ID NO: 2119958 - RNA, 19 nt, Artificial Sequence
  Description of Artificial Sequence: Synthetic oligonucleotide
  Sense strand starting at position 1599 of SEQ ID NO: 1882423
uggacagaagccugucauu

SEQ ID NO: 2119959 - RNA, 19 nt, Artificial Sequence
  Description of Artificial Sequence: Synthetic oligonucleotide
  Antisense strand to SEQ ID NO: 2119958
aaugacaggcuucugucca

SEQ ID NO: 2119960 - RNA, 19 nt, Artificial Sequence
  Description of Artificial Sequence: Synthetic oligonucleotide
  Sense strand starting at position 1604 of SEQ ID NO: 1882423
agaagccugucauuauugu

SEQ ID NO: 2119961 - RNA, 19 nt, Artificial Sequence
  Description of Artificial Sequence: Synthetic oligonucleotide
  Antisense strand to SEQ ID NO: 2119960
acaauaaugacaggcuucu

SEQ ID NO: 2119962 - RNA, 19 nt, Artificial Sequence
  Description of Artificial Sequence: Synthetic oligonucleotide
  Sense strand starting at position 1613 of SEQ ID NO: 1882423
ucauuauugucaccgguga

SEQ ID NO: 2119963 - RNA, 19 nt, Artificial Sequence
  Description of Artificial Sequence: Synthetic oligonucleotide
  Antisense strand to SEQ ID NO: 2119962
ucaccggugacaauaauga

SEQ ID NO: 2119964 - RNA, 19 nt, Artificial Sequence
  Description of Artificial Sequence: Synthetic oligonucleotide
  Sense strand starting at position 1895 of SEQ ID NO: 1882423
acuagacguuugucccaaa

SEQ ID NO: 2119965 - RNA, 19 nt, Artificial Sequence
  Description of Artificial Sequence: Synthetic oligonucleotide
  Antisense strand to SEQ ID NO: 2119964
uuugggacaaacgucuagu

SEQ ID NO: 2119966 - RNA, 19 nt, Artificial Sequence
  Description of Artificial Sequence: Synthetic oligonucleotide
  Sense strand starting at position 1941 of SEQ ID NO: 1882423
caucucugccuugggaaga

SEQ ID NO: 2119967 - RNA, 19 nt, Artificial Sequence
  Description of Artificial Sequence: Synthetic oligonucleotide
  Antisense strand to SEQ ID NO: 2119966
ucuucccaaggcagagaug

SEQ ID NO: 2119968 - RNA, 19 nt, Artificial Sequence
  Description of Artificial Sequence: Synthetic oligonucleotide
  Sense strand starting at position 1973 of SEQ ID NO: 1882423
gcuugcuugauuugcagau

SEQ ID NO: 2119969 - RNA, 19 nt, Artificial Sequence
  Description of Artificial Sequence: Synthetic oligonucleotide
  Antisense strand to SEQ ID NO: 2119968
aucugcaaaucaagcaagc

SEQ ID NO: 2119970 - RNA, 19 nt, Artificial Sequence
  Description of Artificial Sequence: Synthetic oligonucleotide
  Sense strand starting at position 1974 of SEQ ID NO: 1882423
cuugcuugauuugcagaua

SEQ ID NO: 2119971 - RNA, 19 nt, Artificial Sequence
  Description of Artificial Sequence: Synthetic oligonucleotide
  Antisense strand to SEQ ID NO: 2119970
uaucugcaaaucaagcaag

SEQ ID NO: 2119972 - RNA, 19 nt, Artificial Sequence
  Description of Artificial Sequence: Synthetic oligonucleotide
  Sense strand starting at position 2199 of SEQ ID NO: 1882423
gucccaucauuggcacauu

SEQ ID NO: 2119973 - RNA, 19 nt, Artificial Sequence
  Description of Artificial Sequence: Synthetic oligonucleotide
  Antisense strand to SEQ ID NO: 2119972
aaugugccaaugaugggac

SEQ ID NO: 2119974 - RNA, 19 nt, Artificial Sequence
  Description of Artificial Sequence: Synthetic oligonucleotide
  Sense strand starting at position 2263 of SEQ ID NO: 1882423
cgaugcauaguucaggauu

SEQ ID NO: 2119975 - RNA, 19 nt, Artificial Sequence
  Description of Artificial Sequence: Synthetic oligonucleotide
  Antisense strand to SEQ ID NO: 2119974
aauccugaacuaugcaucg

SEQ ID NO: 2119976 - RNA, 19 nt, Artificial Sequence
  Description of Artificial Sequence: Synthetic oligonucleotide
  Sense strand starting at position 2274 of SEQ ID NO: 1882423
ucaggauucuguguccauc

SEQ ID NO: 2119977 - RNA, 19 nt, Artificial Sequence
  Description of Artificial Sequence: Synthetic oligonucleotide
  Antisense strand to SEQ ID NO: 2119976
gauggacacagaauccuga

SEQ ID NO: 2119978 - RNA, 19 nt, Artificial Sequence
  Description of Artificial Sequence: Synthetic oligonucleotide
  Sense strand starting at position 2378 of SEQ ID NO: 1882423
acaguuguaucuuuaaaug

SEQ ID NO: 2119979 - RNA, 19 nt, Artificial Sequence
  Description of Artificial Sequence: Synthetic oligonucleotide
  Antisense strand to SEQ ID NO: 2119978
cauuuaaagauacaacugu

SEQ ID NO: 2119980 - RNA, 19 nt, Artificial Sequence
  Description of Artificial Sequence: Synthetic oligonucleotide
  Sense strand starting at position 3006 of SEQ ID NO: 1882423
gggugcuugccagauaaca

SEQ ID NO: 2119981 - RNA, 19 nt, Artificial Sequence
  Description of Artificial Sequence: Synthetic oligonucleotide
  Antisense strand to SEQ ID NO: 2119980
uguuaucuggcaagcaccc

SEQ ID NO: 2119982 - RNA, 19 nt, Artificial Sequence
  Description of Artificial Sequence: Synthetic oligonucleotide
  Sense strand starting at position 3243 of SEQ ID NO: 1882423
gagggaucgccugagcaca

SEQ ID NO: 2119983 - RNA, 19 nt, Artificial Sequence
  Description of Artificial Sequence: Synthetic oligonucleotide
  Antisense strand to SEQ ID NO: 2119982
ugugcucaggcgaucccuc

SEQ ID NO: 2119984 - RNA, 19 nt, Artificial Sequence
  Description of Artificial Sequence: Synthetic oligonucleotide
  Sense strand starting at position 3306 of SEQ ID NO: 1882423
cuugucaguuagccauaga

SEQ ID NO: 2119985 - RNA, 19 nt, Artificial Sequence
  Description of Artificial Sequence: Synthetic oligonucleotide
  Antisense strand to SEQ ID NO: 2119984
ucuauggcuaacugacaag

SEQ ID NO: 2119986 - RNA, 19 nt, Artificial Sequence
  Description of Artificial Sequence: Synthetic oligonucleotide
  Sense strand starting at position 3309 of SEQ ID NO: 1882423
gucaguuagccauagacug

SEQ ID NO: 2119987 - RNA, 19 nt, Artificial Sequence
  Description of Artificial Sequence: Synthetic oligonucleotide
  Antisense strand to SEQ ID NO: 2119986
cagucuauggcuaacugac

SEQ ID NO: 2119988 - RNA, 19 nt, Artificial Sequence
  Description of Artificial Sequence: Synthetic oligonucleotide
  Sense strand starting at position 3348 of SEQ ID NO: 1882423
cauugugguccugagaaau

SEQ ID NO: 2119989 - RNA, 19 nt, Artificial Sequence
  Description of Artificial Sequence: Synthetic oligonucleotide
  Antisense strand to SEQ ID NO: 2119988
auuucucaggaccacaaug

SEQ ID NO: 2119990 - RNA, 19 nt, Artificial Sequence
  Description of Artificial Sequence: Synthetic oligonucleotide
  Sense strand starting at position 3519 of SEQ ID NO: 1882423
ucaagaauucuacaggcuu

SEQ ID NO: 2119991 - RNA, 19 nt, Artificial Sequence
  Description of Artificial Sequence: Synthetic oligonucleotide
  Antisense strand to SEQ ID NO: 2119990
aagccuguagaauucuuga

SEQ ID NO: 2119992 - RNA, 19 nt, Artificial Sequence
  Description of Artificial Sequence: Synthetic oligonucleotide
  Sense strand starting at position 3720 of SEQ ID NO: 1882423
cuuuccucugaagaaguua

SEQ ID NO: 2119993 - RNA, 19 nt, Artificial Sequence
  Description of Artificial Sequence: Synthetic oligonucleotide
  Antisense strand to SEQ ID NO: 2119992
uaacuucuucagaggaaag

SEQ ID NO: 2119994 - RNA, 19 nt, Artificial Sequence
  Description of Artificial Sequence: Synthetic oligonucleotide
  Sense strand starting at position 3731 of SEQ ID NO: 1882423
agaaguuaacaugguuaac

SEQ ID NO: 2119995 - RNA, 19 nt, Artificial Sequence
  Description of Artificial Sequence: Synthetic oligonucleotide
  Antisense strand to SEQ ID NO: 2119994
guuaaccauguuaacuucu

SEQ ID NO: 2119996 - RNA, 19 nt, Artificial Sequence
  Description of Artificial Sequence: Synthetic oligonucleotide
  Sense strand starting at position 3818 of SEQ ID NO: 1882423
uugagccucacggaagaau

SEQ ID NO: 2119997 - RNA, 19 nt, Artificial Sequence
  Description of Artificial Sequence: Synthetic oligonucleotide
  Antisense strand to SEQ ID NO: 2119996
auucuuccgugaggcucaa

SEQ ID NO: 2119998 - RNA, 19 nt, Artificial Sequence
  Description of Artificial Sequence: Synthetic oligonucleotide
  Sense strand starting at position 37 of SEQ ID NO: 1882424
gagcacucucaagggaaca

SEQ ID NO: 2119999 - RNA, 19 nt, Artificial Sequence
  Description of Artificial Sequence: Synthetic oligonucleotide
  Antisense strand to SEQ ID NO: 2119998
uguucccuugagagugcuc

SEQ ID NO: 2120000 - RNA, 19 nt, Artificial Sequence
  Description of Artificial Sequence: Synthetic oligonucleotide
  Sense strand starting at position 133 of SEQ ID NO: 1882424
ucuagauggucacuaucca

SEQ ID NO: 2120001 - RNA, 19 nt, Artificial Sequence
  Description of Artificial Sequence: Synthetic oligonucleotide
  Antisense strand to SEQ ID NO: 2120000
uggauagugaccaucuaga

SEQ ID NO: 2120002 - RNA, 19 nt, Artificial Sequence
  Description of Artificial Sequence: Synthetic oligonucleotide
  Sense strand starting at position 179 of SEQ ID NO: 1882424
gagucuuaggaauguagaa

SEQ ID NO: 2120003 - RNA, 19 nt, Artificial Sequence
  Description of Artificial Sequence: Synthetic oligonucleotide
  Antisense strand to SEQ ID NO: 2120002
uucuacauuccuaagacuc

SEQ ID NO: 2120004 - RNA, 19 nt, Artificial Sequence
  Description of Artificial Sequence: Synthetic oligonucleotide
  Sense strand starting at position 197 of SEQ ID NO: 1882424
agcagugaugaaggugaau

SEQ ID NO: 2120005 - RNA, 19 nt, Artificial Sequence
  Description of Artificial Sequence: Synthetic oligonucleotide
  Antisense strand to SEQ ID NO: 2120004
auucaccuucaucacugcu

SEQ ID NO: 2120006 - RNA, 19 nt, Artificial Sequence
  Description of Artificial Sequence: Synthetic oligonucleotide
  Sense strand starting at position 503 of SEQ ID NO: 1882424
cucugaucuuuauugaaga

SEQ ID NO: 2120007 - RNA, 19 nt, Artificial Sequence
  Description of Artificial Sequence: Synthetic oligonucleotide
  Antisense strand to SEQ ID NO: 2120006
ucuucaauaaagaucagag

SEQ ID NO: 2120008 - RNA, 19 nt, Artificial Sequence
  Description of Artificial Sequence: Synthetic oligonucleotide
  Sense strand starting at position 539 of SEQ ID NO: 1882424
uaggguugacuaugguaua

SEQ ID NO: 2120009 - RNA, 19 nt, Artificial Sequence
  Description of Artificial Sequence: Synthetic oligonucleotide
  Antisense strand to SEQ ID NO: 2120008
uauaccauagucaacccua

SEQ ID NO: 2120010 - RNA, 19 nt, Artificial Sequence
  Description of Artificial Sequence: Synthetic oligonucleotide
  Sense strand starting at position 724 of SEQ ID NO: 1882424
aagaguaaaugcuuggaau

SEQ ID NO: 2120011 - RNA, 19 nt, Artificial Sequence
  Description of Artificial Sequence: Synthetic oligonucleotide
  Antisense strand to SEQ ID NO: 2120010
auuccaagcauuuacucuu

SEQ ID NO: 2120012 - RNA, 19 nt, Artificial Sequence
  Description of Artificial Sequence: Synthetic oligonucleotide
  Sense strand starting at position 725 of SEQ ID NO: 1882424
agaguaaaugcuuggaauu

SEQ ID NO: 2120013 - RNA, 19 nt, Artificial Sequence
  Description of Artificial Sequence: Synthetic oligonucleotide
  Antisense strand to SEQ ID NO: 2120012
aauuccaagcauuuacucu

SEQ ID NO: 2120014 - RNA, 19 nt, Artificial Sequence
  Description of Artificial Sequence: Synthetic oligonucleotide
  Sense strand starting at position 726 of SEQ ID NO: 1882424
gaguaaaugcuuggaauug

SEQ ID NO: 2120015 - RNA, 19 nt, Artificial Sequence
  Description of Artificial Sequence: Synthetic oligonucleotide
  Antisense strand to SEQ ID NO: 2120014
caauuccaagcauuuacuc

SEQ ID NO: 2120016 - RNA, 19 nt, Artificial Sequence
  Description of Artificial Sequence: Synthetic oligonucleotide
  Sense strand starting at position 873 of SEQ ID NO: 1882424
uguuuaaccugauuugcau

SEQ ID NO: 2120017 - RNA, 19 nt, Artificial Sequence
  Description of Artificial Sequence: Synthetic oligonucleotide
  Antisense strand to SEQ ID NO: 2120016
augcaaaucagguuaaaca

SEQ ID NO: 2120018 - RNA, 19 nt, Artificial Sequence
  Description of Artificial Sequence: Synthetic oligonucleotide
  Sense strand starting at position 899 of SEQ ID NO: 1882424
agaagauauguuuagcauu

SEQ ID NO: 2120019 - RNA, 19 nt, Artificial Sequence
  Description of Artificial Sequence: Synthetic oligonucleotide
  Antisense strand to SEQ ID NO: 2120018
aaugcuaaacauaucuucu

SEQ ID NO: 2120020 - RNA, 19 nt, Artificial Sequence
  Description of Artificial Sequence: Synthetic oligonucleotide
  Sense strand starting at position 1037 of SEQ ID NO: 1882424
gguucuuggcaacaauauc

SEQ ID NO: 2120021 - RNA, 19 nt, Artificial Sequence
  Description of Artificial Sequence: Synthetic oligonucleotide
  Antisense strand to SEQ ID NO: 2120020
gauauuguugccaagaacc

SEQ ID NO: 2120022 - RNA, 19 nt, Artificial Sequence
  Description of Artificial Sequence: Synthetic oligonucleotide
  Sense strand starting at position 1097 of SEQ ID NO: 1882424
ggauuacaaagauguugca

SEQ ID NO: 2120023 - RNA, 19 nt, Artificial Sequence
  Description of Artificial Sequence: Synthetic oligonucleotide
  Antisense strand to SEQ ID NO: 2120022
ugcaacaucuuuguaaucc

SEQ ID NO: 2120024 - RNA, 19 nt, Artificial Sequence
  Description of Artificial Sequence: Synthetic oligonucleotide
  Sense strand starting at position 1227 of SEQ ID NO: 1882424
uaucccuauugggcagaua

SEQ ID NO: 2120025 - RNA, 19 nt, Artificial Sequence
  Description of Artificial Sequence: Synthetic oligonucleotide
  Antisense strand to SEQ ID NO: 2120024
uaucugcccaauagggaua

SEQ ID NO: 2120026 - RNA, 19 nt, Artificial Sequence
  Description of Artificial Sequence: Synthetic oligonucleotide
  Sense strand starting at position 1299 of SEQ ID NO: 1882424
gaggaauagcugcagguua

SEQ ID NO: 2120027 - RNA, 19 nt, Artificial Sequence
  Description of Artificial Sequence: Synthetic oligonucleotide
  Antisense strand to SEQ ID NO: 2120026
uaaccugcagcuauuccuc

SEQ ID NO: 2120028 - RNA, 19 nt, Artificial Sequence
  Description of Artificial Sequence: Synthetic oligonucleotide
  Sense strand starting at position 1404 of SEQ ID NO: 1882424
cgaacagugaccuaaguaa

SEQ ID NO: 2120029 - RNA, 19 nt, Artificial Sequence
  Description of Artificial Sequence: Synthetic oligonucleotide
  Antisense strand to SEQ ID NO: 2120028
uuacuuaggucacuguucg

SEQ ID NO: 2120030 - RNA, 19 nt, Artificial Sequence
  Description of Artificial Sequence: Synthetic oligonucleotide
  Sense strand starting at position 1571 of SEQ ID NO: 1882424
ugacuuauagcuuaauggu

SEQ ID NO: 2120031 - RNA, 19 nt, Artificial Sequence
  Description of Artificial Sequence: Synthetic oligonucleotide
  Antisense strand to SEQ ID NO: 2120030
accauuaagcuauaaguca

SEQ ID NO: 2120032 - RNA, 19 nt, Artificial Sequence
  Description of Artificial Sequence: Synthetic oligonucleotide
  Sense strand starting at position 1816 of SEQ ID NO: 1882424
aguugugagauuugccuga

SEQ ID NO: 2120033 - RNA, 19 nt, Artificial Sequence
  Description of Artificial Sequence: Synthetic oligonucleotide
  Antisense strand to SEQ ID NO: 2120032
ucaggcaaaucucacaacu

SEQ ID NO: 2120034 - RNA, 19 nt, Artificial Sequence
  Description of Artificial Sequence: Synthetic oligonucleotide
  Sense strand starting at position 1820 of SEQ ID NO: 1882424
gugagauuugccugagguu

SEQ ID NO: 2120035 - RNA, 19 nt, Artificial Sequence
  Description of Artificial Sequence: Synthetic oligonucleotide
  Antisense strand to SEQ ID NO: 2120034
aaccucaggcaaaucucac

SEQ ID NO: 2120036 - RNA, 19 nt, Artificial Sequence
  Description of Artificial Sequence: Synthetic oligonucleotide
  Sense strand starting at position 2046 of SEQ ID NO: 1882424
uuggaaaucugaucuccca

SEQ ID NO: 2120037 - RNA, 19 nt, Artificial Sequence
  Description of Artificial Sequence: Synthetic oligonucleotide
  Antisense strand to SEQ ID NO: 2120036
ugggagaucagauuuccaa

SEQ ID NO: 2120038 - RNA, 19 nt, Artificial Sequence
  Description of Artificial Sequence: Synthetic oligonucleotide
  Sense strand starting at position 2060 of SEQ ID NO: 1882424
ucccaugagagcugaggaa

SEQ ID NO: 2120039 - RNA, 19 nt, Artificial Sequence
  Description of Artificial Sequence: Synthetic oligonucleotide
  Antisense strand to SEQ ID NO: 2120038
uuccucagcucucauggga

SEQ ID NO: 2120040 - RNA, 19 nt, Artificial Sequence
  Description of Artificial Sequence: Synthetic oligonucleotide
  Sense strand starting at position 2222 of SEQ ID NO: 1882424
uugugagaagccugaaaug

SEQ ID NO: 2120041 - RNA, 19 nt, Artificial Sequence
  Description of Artificial Sequence: Synthetic oligonucleotide
  Antisense strand to SEQ ID NO: 2120040
cauuucaggcuucucacaa

SEQ ID NO: 2120042 - RNA, 19 nt, Artificial Sequence
  Description of Artificial Sequence: Synthetic oligonucleotide
  Sense strand starting at position 2231 of SEQ ID NO: 1882424
gccugaaauggguaugagu

SEQ ID NO: 2120043 - RNA, 19 nt, Artificial Sequence
  Description of Artificial Sequence: Synthetic oligonucleotide
  Antisense strand to SEQ ID NO: 2120042
acucauacccauuucaggc

SEQ ID NO: 2120044 - RNA, 19 nt, Artificial Sequence
  Description of Artificial Sequence: Synthetic oligonucleotide
  Sense strand starting at position 2233 of SEQ ID NO: 1882424
cugaaauggguaugaguuu

SEQ ID NO: 2120045 - RNA, 19 nt, Artificial Sequence
  Description of Artificial Sequence: Synthetic oligonucleotide
  Antisense strand to SEQ ID NO: 2120044
aaacucauacccauuucag

SEQ ID NO: 2120046 - RNA, 19 nt, Artificial Sequence
  Description of Artificial Sequence: Synthetic oligonucleotide
  Sense strand starting at position 2239 of SEQ ID NO: 1882424
uggguaugaguuuaucuca

SEQ ID NO: 2120047 - RNA, 19 nt, Artificial Sequence
  Description of Artificial Sequence: Synthetic oligonucleotide
  Antisense strand to SEQ ID NO: 2120046
ugagauaaacucauaccca

SEQ ID NO: 2120048 - RNA, 19 nt, Artificial Sequence
  Description of Artificial Sequence: Synthetic oligonucleotide
  Sense strand starting at position 2351 of SEQ ID NO: 1882424
ggauucuugggucaacgau

SEQ ID NO: 2120049 - RNA, 19 nt, Artificial Sequence
  Description of Artificial Sequence: Synthetic oligonucleotide
  Antisense strand to SEQ ID NO: 2120048
aucguugacccaagaaucc

SEQ ID NO: 2120050 - RNA, 19 nt, Artificial Sequence
  Description of Artificial Sequence: Synthetic oligonucleotide
  Sense strand starting at position 2456 of SEQ ID NO: 1882424
gagugagguccuggagaau

SEQ ID NO: 2120051 - RNA, 19 nt, Artificial Sequence
  Description of Artificial Sequence: Synthetic oligonucleotide
  Antisense strand to SEQ ID NO: 2120050
auucuccaggaccucacuc

SEQ ID NO: 2120052 - RNA, 19 nt, Artificial Sequence
  Description of Artificial Sequence: Synthetic oligonucleotide
  Sense strand starting at position 2468 of SEQ ID NO: 1882424
ggagaauauucugcacaug

SEQ ID NO: 2120053 - RNA, 19 nt, Artificial Sequence
  Description of Artificial Sequence: Synthetic oligonucleotide
  Antisense strand to SEQ ID NO: 2120052
caugugcagaauauucucc

SEQ ID NO: 2120054 - RNA, 19 nt, Artificial Sequence
  Description of Artificial Sequence: Synthetic oligonucleotide
  Sense strand starting at position 2603 of SEQ ID NO: 1882424
gaggaacagcucugaaagu

SEQ ID NO: 2120055 - RNA, 19 nt, Artificial Sequence
  Description of Artificial Sequence: Synthetic oligonucleotide
  Antisense strand to SEQ ID NO: 2120054
acuuucagagcuguuccuc

SEQ ID NO: 2120056 - RNA, 19 nt, Artificial Sequence
  Description of Artificial Sequence: Synthetic oligonucleotide
  Sense strand starting at position 2637 of SEQ ID NO: 1882424
gcucucacagcgcuuagua

SEQ ID NO: 2120057 - RNA, 19 nt, Artificial Sequence
  Description of Artificial Sequence: Synthetic oligonucleotide
  Antisense strand to SEQ ID NO: 2120056
uacuaagcgcugugagagc

SEQ ID NO: 2120058 - RNA, 19 nt, Artificial Sequence
  Description of Artificial Sequence: Synthetic oligonucleotide
  Sense strand starting at position 2690 of SEQ ID NO: 1882424
cguaauacugcuuaauaag

SEQ ID NO: 2120059 - RNA, 19 nt, Artificial Sequence
  Description of Artificial Sequence: Synthetic oligonucleotide
  Antisense strand to SEQ ID NO: 2120058
cuuauuaagcaguauuacg

SEQ ID NO: 2120060 - RNA, 19 nt, Artificial Sequence
  Description of Artificial Sequence: Synthetic oligonucleotide
  Sense strand starting at position 2762 of SEQ ID NO: 1882424
gagauaguggucgagacca

SEQ ID NO: 2120061 - RNA, 19 nt, Artificial Sequence
  Description of Artificial Sequence: Synthetic oligonucleotide
  Antisense strand to SEQ ID NO: 2120060
uggucucgaccacuaucuc

SEQ ID NO: 2120062 - RNA, 19 nt, Artificial Sequence
  Description of Artificial Sequence: Synthetic oligonucleotide
  Sense strand starting at position 2914 of SEQ ID NO: 1882424
aguuguguugcugccaaua

SEQ ID NO: 2120063 - RNA, 19 nt, Artificial Sequence
  Description of Artificial Sequence: Synthetic oligonucleotide
  Antisense strand to SEQ ID NO: 2120062
uauuggcagcaacacaacu

SEQ ID NO: 2120064 - RNA, 19 nt, Artificial Sequence
  Description of Artificial Sequence: Synthetic oligonucleotide
  Sense strand starting at position 3022 of SEQ ID NO: 1882424
uuuguauagaguugaaaug

SEQ ID NO: 2120065 - RNA, 19 nt, Artificial Sequence
  Description of Artificial Sequence: Synthetic oligonucleotide
  Antisense strand to SEQ ID NO: 2120064
cauuucaacucuauacaaa

SEQ ID NO: 2120066 - RNA, 19 nt, Artificial Sequence
  Description of Artificial Sequence: Synthetic oligonucleotide
  Sense strand starting at position 3023 of SEQ ID NO: 1882424
uuguauagaguugaaaugu

SEQ ID NO: 2120067 - RNA, 19 nt, Artificial Sequence
  Description of Artificial Sequence: Synthetic oligonucleotide
  Antisense strand to SEQ ID NO: 2120066
acauuucaacucuauacaa

SEQ ID NO: 2120068 - RNA, 19 nt, Artificial Sequence
  Description of Artificial Sequence: Synthetic oligonucleotide
  Sense strand starting at position 3034 of SEQ ID NO: 1882424
ugaaauguccauggguaua

SEQ ID NO: 2120069 - RNA, 19 nt, Artificial Sequence
  Description of Artificial Sequence: Synthetic oligonucleotide
  Antisense strand to SEQ ID NO: 2120068
uauacccauggacauuuca

SEQ ID NO: 2120070 - RNA, 19 nt, Artificial Sequence
  Description of Artificial Sequence: Synthetic oligonucleotide
  Sense strand starting at position 3126 of SEQ ID NO: 1882424
uuagaagucuuaucauaug

SEQ ID NO: 2120071 - RNA, 19 nt, Artificial Sequence
  Description of Artificial Sequence: Synthetic oligonucleotide
  Antisense strand to SEQ ID NO: 2120070
cauaugauaagacuucuaa

SEQ ID NO: 2120072 - RNA, 19 nt, Artificial Sequence
  Description of Artificial Sequence: Synthetic oligonucleotide
  Sense strand starting at position 3265 of SEQ ID NO: 1882424
ucauaaacuugauugagca

SEQ ID NO: 2120073 - RNA, 19 nt, Artificial Sequence
  Description of Artificial Sequence: Synthetic oligonucleotide
  Antisense strand to SEQ ID NO: 2120072
ugcucaaucaaguuuauga

SEQ ID NO: 2120074 - RNA, 19 nt, Artificial Sequence
  Description of Artificial Sequence: Synthetic oligonucleotide
  Sense strand starting at position 3336 of SEQ ID NO: 1882424
cuacaagaauugucuuuga

SEQ ID NO: 2120075 - RNA, 19 nt, Artificial Sequence
  Description of Artificial Sequence: Synthetic oligonucleotide
  Antisense strand to SEQ ID NO: 2120074
ucaaagacaauucuuguag

SEQ ID NO: 2120076 - RNA, 19 nt, Artificial Sequence
  Description of Artificial Sequence: Synthetic oligonucleotide
  Sense strand starting at position 3484 of SEQ ID NO: 1882424
gugugauggcucucgccua

SEQ ID NO: 2120077 - RNA, 19 nt, Artificial Sequence
  Description of Artificial Sequence: Synthetic oligonucleotide
  Antisense strand to SEQ ID NO: 2120076
uaggcgagagccaucacac

SEQ ID NO: 2120078 - RNA, 19 nt, Artificial Sequence
  Description of Artificial Sequence: Synthetic oligonucleotide
  Sense strand starting at position 184 of SEQ ID NO: 1882425
agaauuuguuucuagagau

SEQ ID NO: 2120079 - RNA, 19 nt, Artificial Sequence
  Description of Artificial Sequence: Synthetic oligonucleotide
  Antisense strand to SEQ ID NO: 2120078
aucucuagaaacaaauucu

SEQ ID NO: 2120080 - RNA, 19 nt, Artificial Sequence
  Description of Artificial Sequence: Synthetic oligonucleotide
  Sense strand starting at position 286 of SEQ ID NO: 1882425
uugcuugagagugaagagu

SEQ ID NO: 2120081 - RNA, 19 nt, Artificial Sequence
  Description of Artificial Sequence: Synthetic oligonucleotide
  Antisense strand to SEQ ID NO: 2120080
acucuucacucucaagcaa

SEQ ID NO: 2120082 - RNA, 19 nt, Artificial Sequence
  Description of Artificial Sequence: Synthetic oligonucleotide
  Sense strand starting at position 449 of SEQ ID NO: 1882425
uuaguccagcucugaaaga

SEQ ID NO: 2120083 - RNA, 19 nt, Artificial Sequence
  Description of Artificial Sequence: Synthetic oligonucleotide
  Antisense strand to SEQ ID NO: 2120082
ucuuucagagcuggacuaa

SEQ ID NO: 2120084 - RNA, 19 nt, Artificial Sequence
  Description of Artificial Sequence: Synthetic oligonucleotide
  Sense strand starting at position 488 of SEQ ID NO: 1882425
gucacauuccaucaaguua

SEQ ID NO: 2120085 - RNA, 19 nt, Artificial Sequence
  Description of Artificial Sequence: Synthetic oligonucleotide
  Antisense strand to SEQ ID NO: 2120084
uaacuugauggaaugugac

SEQ ID NO: 2120086 - RNA, 19 nt, Artificial Sequence
  Description of Artificial Sequence: Synthetic oligonucleotide
  Sense strand starting at position 537 of SEQ ID NO: 1882425
ggacgucuggccuauuaag

SEQ ID NO: 2120087 - RNA, 19 nt, Artificial Sequence
  Description of Artificial Sequence: Synthetic oligonucleotide
  Antisense strand to SEQ ID NO: 2120086
cuuaauaggccagacgucc

SEQ ID NO: 2120088 - RNA, 19 nt, Artificial Sequence
  Description of Artificial Sequence: Synthetic oligonucleotide
  Sense strand starting at position 744 of SEQ ID NO: 1882425
gaugauuucgucugaguuc

SEQ ID NO: 2120089 - RNA, 19 nt, Artificial Sequence
  Description of Artificial Sequence: Synthetic oligonucleotide
  Antisense strand to SEQ ID NO: 2120088
gaacucagacgaaaucauc

SEQ ID NO: 2120090 - RNA, 19 nt, Artificial Sequence
  Description of Artificial Sequence: Synthetic oligonucleotide
  Sense strand starting at position 807 of SEQ ID NO: 1882425
cugagcucuguggagagaa

SEQ ID NO: 2120091 - RNA, 19 nt, Artificial Sequence
  Description of Artificial Sequence: Synthetic oligonucleotide
  Antisense strand to SEQ ID NO: 2120090
uucucuccacagagcucag

SEQ ID NO: 2120092 - RNA, 19 nt, Artificial Sequence
  Description of Artificial Sequence: Synthetic oligonucleotide
  Sense strand starting at position 819 of SEQ ID NO: 1882425
gagagaaagcuuugcacug

SEQ ID NO: 2120093 - RNA, 19 nt, Artificial Sequence
  Description of Artificial Sequence: Synthetic oligonucleotide
  Antisense strand to SEQ ID NO: 2120092
cagugcaaagcuuucucuc

SEQ ID NO: 2120094 - RNA, 19 nt, Artificial Sequence
  Description of Artificial Sequence: Synthetic oligonucleotide
  Sense strand starting at position 1179 of SEQ ID NO: 1882425
aucauuccaguguaaacau

SEQ ID NO: 2120095 - RNA, 19 nt, Artificial Sequence
  Description of Artificial Sequence: Synthetic oligonucleotide
  Antisense strand to SEQ ID NO: 2120094
auguuuacacuggaaugau

SEQ ID NO: 2120096 - RNA, 19 nt, Artificial Sequence
  Description of Artificial Sequence: Synthetic oligonucleotide
  Sense strand starting at position 1212 of SEQ ID NO: 1882425
aguauaucugugcaagaaa

SEQ ID NO: 2120097 - RNA, 19 nt, Artificial Sequence
  Description of Artificial Sequence: Synthetic oligonucleotide
  Antisense strand to SEQ ID NO: 2120096
uuucuugcacagauauacu

SEQ ID NO: 2120098 - RNA, 19 nt, Artificial Sequence
  Description of Artificial Sequence: Synthetic oligonucleotide
  Sense strand starting at position 1400 of SEQ ID NO: 1882425
acaggagaguguguaauga

SEQ ID NO: 2120099 - RNA, 19 nt, Artificial Sequence
  Description of Artificial Sequence: Synthetic oligonucleotide
  Antisense strand to SEQ ID NO: 2120098
ucauuacacacucuccugu

SEQ ID NO: 2120100 - RNA, 19 nt, Artificial Sequence
  Description of Artificial Sequence: Synthetic oligonucleotide
  Sense strand starting at position 1402 of SEQ ID NO: 1882425
aggagaguguguaaugaga

SEQ ID NO: 2120101 - RNA, 19 nt, Artificial Sequence
  Description of Artificial Sequence: Synthetic oligonucleotide
  Antisense strand to SEQ ID NO: 2120100
ucucauuacacacucuccu

SEQ ID NO: 2120102 - RNA, 19 nt, Artificial Sequence
  Description of Artificial Sequence: Synthetic oligonucleotide
  Sense strand starting at position 1524 of SEQ ID NO: 1882425
uuguuaggucuccauucua

SEQ ID NO: 2120103 - RNA, 19 nt, Artificial Sequence
  Description of Artificial Sequence: Synthetic oligonucleotide
  Antisense strand to SEQ ID NO: 2120102
uagaauggagaccuaacaa

SEQ ID NO: 2120104 - RNA, 19 nt, Artificial Sequence
  Description of Artificial Sequence: Synthetic oligonucleotide
  Sense strand starting at position 1539 of SEQ ID NO: 1882425
ucuaguucugaguacaaau

SEQ ID NO: 2120105 - RNA, 19 nt, Artificial Sequence
  Description of Artificial Sequence: Synthetic oligonucleotide
  Antisense strand to SEQ ID NO: 2120104
auuuguacucagaacuaga

SEQ ID NO: 2120106 - RNA, 19 nt, Artificial Sequence
  Description of Artificial Sequence: Synthetic oligonucleotide
  Sense strand starting at position 1565 of SEQ ID NO: 1882425
ugacauauggucuaagcca

SEQ ID NO: 2120107 - RNA, 19 nt, Artificial Sequence
  Description of Artificial Sequence: Synthetic oligonucleotide
  Antisense strand to SEQ ID NO: 2120106
uggcuuagaccauauguca

SEQ ID NO: 2120108 - RNA, 19 nt, Artificial Sequence
  Description of Artificial Sequence: Synthetic oligonucleotide
  Sense strand starting at position 1664 of SEQ ID NO: 1882425
aaagaagaguuucugcauu

SEQ ID NO: 2120109 - RNA, 19 nt, Artificial Sequence
  Description of Artificial Sequence: Synthetic oligonucleotide
  Antisense strand to SEQ ID NO: 2120108
aaugcagaaacucuucuuu

SEQ ID NO: 2120110 - RNA, 19 nt, Artificial Sequence
  Description of Artificial Sequence: Synthetic oligonucleotide
  Sense strand starting at position 1676 of SEQ ID NO: 1882425
cugcauuugcacugagcua

SEQ ID NO: 2120111 - RNA, 19 nt, Artificial Sequence
  Description of Artificial Sequence: Synthetic oligonucleotide
  Antisense strand to SEQ ID NO: 2120110
uagcucagugcaaaugcag

SEQ ID NO: 2120112 - RNA, 19 nt, Artificial Sequence
  Description of Artificial Sequence: Synthetic oligonucleotide
  Sense strand starting at position 1997 of SEQ ID NO: 1882425
cagaauggccuuuggaaca

SEQ ID NO: 2120113 - RNA, 19 nt, Artificial Sequence
  Description of Artificial Sequence: Synthetic oligonucleotide
  Antisense strand to SEQ ID NO: 2120112
uguuccaaaggccauucug

SEQ ID NO: 2120114 - RNA, 19 nt, Artificial Sequence
  Description of Artificial Sequence: Synthetic oligonucleotide
  Sense strand starting at position 2240 of SEQ ID NO: 1882425
uuguaacacuuauugguga

SEQ ID NO: 2120115 - RNA, 19 nt, Artificial Sequence
  Description of Artificial Sequence: Synthetic oligonucleotide
  Antisense strand to SEQ ID NO: 2120114
ucaccaauaaguguuacaa

SEQ ID NO: 2120116 - RNA, 19 nt, Artificial Sequence
  Description of Artificial Sequence: Synthetic oligonucleotide
  Sense strand starting at position 2668 of SEQ ID NO: 1882425
agcagaccuugcuuauaag

SEQ ID NO: 2120117 - RNA, 19 nt, Artificial Sequence
  Description of Artificial Sequence: Synthetic oligonucleotide
  Antisense strand to SEQ ID NO: 2120116
cuuauaagcaaggucugcu

SEQ ID NO: 2120118 - RNA, 19 nt, Artificial Sequence
  Description of Artificial Sequence: Synthetic oligonucleotide
  Sense strand starting at position 2669 of SEQ ID NO: 1882425
gcagaccuugcuuauaaga

SEQ ID NO: 2120119 - RNA, 19 nt, Artificial Sequence
  Description of Artificial Sequence: Synthetic oligonucleotide
  Antisense strand to SEQ ID NO: 2120118
ucuuauaagcaaggucugc

SEQ ID NO: 2120120 - RNA, 19 nt, Artificial Sequence
  Description of Artificial Sequence: Synthetic oligonucleotide
  Sense strand starting at position 2708 of SEQ ID NO: 1882425
guguuugugaaucaggaua

SEQ ID NO: 2120121 - RNA, 19 nt, Artificial Sequence
  Description of Artificial Sequence: Synthetic oligonucleotide
  Antisense strand to SEQ ID NO: 2120120
uauccugauucacaaacac

SEQ ID NO: 2120122 - RNA, 19 nt, Artificial Sequence
  Description of Artificial Sequence: Synthetic oligonucleotide
  Sense strand starting at position 2736 of SEQ ID NO: 1882425
agugugucugucguuagga

SEQ ID NO: 2120123 - RNA, 19 nt, Artificial Sequence
  Description of Artificial Sequence: Synthetic oligonucleotide
  Antisense strand to SEQ ID NO: 2120122
uccuaacgacagacacacu

SEQ ID NO: 2120124 - RNA, 19 nt, Artificial Sequence
  Description of Artificial Sequence: Synthetic oligonucleotide
  Sense strand starting at position 2793 of SEQ ID NO: 1882425
caagcuggccuuggagaaa

SEQ ID NO: 2120125 - RNA, 19 nt, Artificial Sequence
  Description of Artificial Sequence: Synthetic oligonucleotide
  Antisense strand to SEQ ID NO: 2120124
uuucuccaaggccagcuug

SEQ ID NO: 2120126 - RNA, 19 nt, Artificial Sequence
  Description of Artificial Sequence: Synthetic oligonucleotide
  Sense strand starting at position 2821 of SEQ ID NO: 1882425
gagaucaaccuuuggcagu

SEQ ID NO: 2120127 - RNA, 19 nt, Artificial Sequence
  Description of Artificial Sequence: Synthetic oligonucleotide
  Antisense strand to SEQ ID NO: 2120126
acugccaaagguugaucuc

SEQ ID NO: 2120128 - RNA, 19 nt, Artificial Sequence
  Description of Artificial Sequence: Synthetic oligonucleotide
  Sense strand starting at position 3172 of SEQ ID NO: 1882425
guaauucaggagugaaaug

SEQ ID NO: 2120129 - RNA, 19 nt, Artificial Sequence
  Description of Artificial Sequence: Synthetic oligonucleotide
  Antisense strand to SEQ ID NO: 2120128
cauuucacuccugaauuac

SEQ ID NO: 2120130 - RNA, 19 nt, Artificial Sequence
  Description of Artificial Sequence: Synthetic oligonucleotide
  Sense strand starting at position 3201 of SEQ ID NO: 1882425
cucuuuggugucuaucaua

SEQ ID NO: 2120131 - RNA, 19 nt, Artificial Sequence
  Description of Artificial Sequence: Synthetic oligonucleotide
  Antisense strand to SEQ ID NO: 2120130
uaugauagacaccaaagag

SEQ ID NO: 2120132 - RNA, 19 nt, Artificial Sequence
  Description of Artificial Sequence: Synthetic oligonucleotide
  Sense strand starting at position 3628 of SEQ ID NO: 1882425
gagcuugaccacugaacga

SEQ ID NO: 2120133 - RNA, 19 nt, Artificial Sequence
  Description of Artificial Sequence: Synthetic oligonucleotide
  Antisense strand to SEQ ID NO: 2120132
ucguucaguggucaagcuc

SEQ ID NO: 2120134 - RNA, 19 nt, Artificial Sequence
  Description of Artificial Sequence: Synthetic oligonucleotide
  Sense strand starting at position 3670 of SEQ ID NO: 1882425
ccgggugaucuuugaugag

SEQ ID NO: 2120135 - RNA, 19 nt, Artificial Sequence
  Description of Artificial Sequence: Synthetic oligonucleotide
  Antisense strand to SEQ ID NO: 2120134
cucaucaaagaucacccgg

SEQ ID NO: 2120136 - RNA, 19 nt, Artificial Sequence
  Description of Artificial Sequence: Synthetic oligonucleotide
  Sense strand starting at position 3674 of SEQ ID NO: 1882425
gugaucuuugaugagugaa

SEQ ID NO: 2120137 - RNA, 19 nt, Artificial Sequence
  Description of Artificial Sequence: Synthetic oligonucleotide
  Antisense strand to SEQ ID NO: 2120136
uucacucaucaaagaucac

SEQ ID NO: 2120138 - RNA, 19 nt, Artificial Sequence
  Description of Artificial Sequence: Synthetic oligonucleotide
  Sense strand starting at position 3676 of SEQ ID NO: 1882425
gaucuuugaugagugaaug

SEQ ID NO: 2120139 - RNA, 19 nt, Artificial Sequence
  Description of Artificial Sequence: Synthetic oligonucleotide
  Antisense strand to SEQ ID NO: 2120138
cauucacucaucaaagauc

SEQ ID NO: 2120140 - RNA, 19 nt, Artificial Sequence
  Description of Artificial Sequence: Synthetic oligonucleotide
  Sense strand starting at position 3696 of SEQ ID NO: 1882425
gucccauagguguaaugaa

SEQ ID NO: 2120141 - RNA, 19 nt, Artificial Sequence
  Description of Artificial Sequence: Synthetic oligonucleotide
  Antisense strand to SEQ ID NO: 2120140
uucauuacaccuaugggac

SEQ ID NO: 2120142 - RNA, 19 nt, Artificial Sequence
  Description of Artificial Sequence: Synthetic oligonucleotide
  Sense strand starting at position 3703 of SEQ ID NO: 1882425
agguguaaugaaugugaua

SEQ ID NO: 2120143 - RNA, 19 nt, Artificial Sequence
  Description of Artificial Sequence: Synthetic oligonucleotide
  Antisense strand to SEQ ID NO: 2120142
uaucacauucauuacaccu

SEQ ID NO: 2120144 - RNA, 19 nt, Artificial Sequence
  Description of Artificial Sequence: Synthetic oligonucleotide
  Sense strand starting at position 3705 of SEQ ID NO: 1882425
guguaaugaaugugauagg

SEQ ID NO: 2120145 - RNA, 19 nt, Artificial Sequence
  Description of Artificial Sequence: Synthetic oligonucleotide
  Antisense strand to SEQ ID NO: 2120144
ccuaucacauucauuacac

SEQ ID NO: 2120146 - RNA, 19 nt, Artificial Sequence
  Description of Artificial Sequence: Synthetic oligonucleotide
  Sense strand starting at position 3723 of SEQ ID NO: 1882425
ggcacagaauguucuauga

SEQ ID NO: 2120147 - RNA, 19 nt, Artificial Sequence
  Description of Artificial Sequence: Synthetic oligonucleotide
  Antisense strand to SEQ ID NO: 2120146
ucauagaacauucugugcc

SEQ ID NO: 2120148 - RNA, 19 nt, Artificial Sequence
  Description of Artificial Sequence: Synthetic oligonucleotide
  Sense strand starting at position 3727 of SEQ ID NO: 1882425
cagaauguucuaugaguug

SEQ ID NO: 2120149 - RNA, 19 nt, Artificial Sequence
  Description of Artificial Sequence: Synthetic oligonucleotide
  Antisense strand to SEQ ID NO: 2120148
caacucauagaacauucug

SEQ ID NO: 2120150 - RNA, 19 nt, Artificial Sequence
  Description of Artificial Sequence: Synthetic oligonucleotide
  Sense strand starting at position 3786 of SEQ ID NO: 1882425
gggaacuucuuuguccuca

SEQ ID NO: 2120151 - RNA, 19 nt, Artificial Sequence
  Description of Artificial Sequence: Synthetic oligonucleotide
  Antisense strand to SEQ ID NO: 2120150
ugaggacaaagaaguuccc

SEQ ID NO: 2120152 - RNA, 19 nt, Artificial Sequence
  Description of Artificial Sequence: Synthetic oligonucleotide
  Sense strand starting at position 3837 of SEQ ID NO: 1882425
gggcgcuagcguucaggaa

SEQ ID NO: 2120153 - RNA, 19 nt, Artificial Sequence
  Description of Artificial Sequence: Synthetic oligonucleotide
  Antisense strand to SEQ ID NO: 2120152
uuccugaacgcuagcgccc

SEQ ID NO: 2120154 - RNA, 19 nt, Artificial Sequence
  Description of Artificial Sequence: Synthetic oligonucleotide
  Sense strand starting at position 3909 of SEQ ID NO: 1882425
acaauugucagcgcugcau

SEQ ID NO: 2120155 - RNA, 19 nt, Artificial Sequence
  Description of Artificial Sequence: Synthetic oligonucleotide
  Antisense strand to SEQ ID NO: 2120154
augcagcgcugacaauugu

SEQ ID NO: 2120156 - RNA, 19 nt, Artificial Sequence
  Description of Artificial Sequence: Synthetic oligonucleotide
  Sense strand starting at position 3912 of SEQ ID NO: 1882425
auugucagcgcugcauuau

SEQ ID NO: 2120157 - RNA, 19 nt, Artificial Sequence
  Description of Artificial Sequence: Synthetic oligonucleotide
  Antisense strand to SEQ ID NO: 2120156
auaaugcagcgcugacaau

SEQ ID NO: 2120158 - RNA, 19 nt, Artificial Sequence
  Description of Artificial Sequence: Synthetic oligonucleotide
  Sense strand starting at position 1999 of SEQ ID NO: 1882426
gugugcaucuugguugauu

SEQ ID NO: 2120159 - RNA, 19 nt, Artificial Sequence
  Description of Artificial Sequence: Synthetic oligonucleotide
  Antisense strand to SEQ ID NO: 2120158
aaucaaccaagaugcacac

SEQ ID NO: 2120160 - RNA, 19 nt, Artificial Sequence
  Description of Artificial Sequence: Synthetic oligonucleotide
  Sense strand starting at position 2000 of SEQ ID NO: 1882426
ugugcaucuugguugauuu

SEQ ID NO: 2120161 - RNA, 19 nt, Artificial Sequence
  Description of Artificial Sequence: Synthetic oligonucleotide
  Antisense strand to SEQ ID NO: 2120160
aaaucaaccaagaugcaca

SEQ ID NO: 2120162 - RNA, 19 nt, Artificial Sequence
  Description of Artificial Sequence: Synthetic oligonucleotide
  Sense strand starting at position 2071 of SEQ ID NO: 1882426
cagggagcucugugaguua

SEQ ID NO: 2120163 - RNA, 19 nt, Artificial Sequence
  Description of Artificial Sequence: Synthetic oligonucleotide
  Antisense strand to SEQ ID NO: 2120162
uaacucacagagcucccug

SEQ ID NO: 2120164 - RNA, 19 nt, Artificial Sequence
  Description of Artificial Sequence: Synthetic oligonucleotide
  Sense strand starting at position 2078 of SEQ ID NO: 1882426
cucugugaguuauggugaa

SEQ ID NO: 2120165 - RNA, 19 nt, Artificial Sequence
  Description of Artificial Sequence: Synthetic oligonucleotide
  Antisense strand to SEQ ID NO: 2120164
uucaccauaacucacagag

SEQ ID NO: 2120166 - RNA, 19 nt, Artificial Sequence
  Description of Artificial Sequence: Synthetic oligonucleotide
  Sense strand starting at position 2132 of SEQ ID NO: 1882426
gugugcuguugcugucaga

SEQ ID NO: 2120167 - RNA, 19 nt, Artificial Sequence
  Description of Artificial Sequence: Synthetic oligonucleotide
  Antisense strand to SEQ ID NO: 2120166
ucugacagcaacagcacac

SEQ ID NO: 2120168 - RNA, 19 nt, Artificial Sequence
  Description of Artificial Sequence: Synthetic oligonucleotide
  Sense strand starting at position 2133 of SEQ ID NO: 1882426
ugugcuguugcugucagaa

SEQ ID NO: 2120169 - RNA, 19 nt, Artificial Sequence
  Description of Artificial Sequence: Synthetic oligonucleotide
  Antisense strand to SEQ ID NO: 2120168
uucugacagcaacagcaca

SEQ ID NO: 2120170 - RNA, 19 nt, Artificial Sequence
  Description of Artificial Sequence: Synthetic oligonucleotide
  Sense strand starting at position 2135 of SEQ ID NO: 1882426
ugcuguugcugucagaagu

SEQ ID NO: 2120171 - RNA, 19 nt, Artificial Sequence
  Description of Artificial Sequence: Synthetic oligonucleotide
  Antisense strand to SEQ ID NO: 2120170
acuucugacagcaacagca

SEQ ID NO: 2120172 - RNA, 19 nt, Artificial Sequence
  Description of Artificial Sequence: Synthetic oligonucleotide
  Sense strand starting at position 2141 of SEQ ID NO: 1882426
ugcugucagaagugaggaa

SEQ ID NO: 2120173 - RNA, 19 nt, Artificial Sequence
  Description of Artificial Sequence: Synthetic oligonucleotide
  Antisense strand to SEQ ID NO: 2120172
uuccucacuucugacagca

SEQ ID NO: 2120174 - RNA, 19 nt, Artificial Sequence
  Description of Artificial Sequence: Synthetic oligonucleotide
  Sense strand starting at position 2198 of SEQ ID NO: 1882426
aaccuuugucacuggcuga

SEQ ID NO: 2120175 - RNA, 19 nt, Artificial Sequence
  Description of Artificial Sequence: Synthetic oligonucleotide
  Antisense strand to SEQ ID NO: 2120174
ucagccagugacaaagguu

SEQ ID NO: 2120176 - RNA, 19 nt, Artificial Sequence
  Description of Artificial Sequence: Synthetic oligonucleotide
  Sense strand starting at position 2342 of SEQ ID NO: 1882426
cccacauucucgcuuggga

SEQ ID NO: 2120177 - RNA, 19 nt, Artificial Sequence
  Description of Artificial Sequence: Synthetic oligonucleotide
  Antisense strand to SEQ ID NO: 2120176
ucccaagcgagaauguggg

SEQ ID NO: 2120178 - RNA, 19 nt, Artificial Sequence
  Description of Artificial Sequence: Synthetic oligonucleotide
  Sense strand starting at position 2344 of SEQ ID NO: 1882426
cacauucucgcuugggagu

SEQ ID NO: 2120179 - RNA, 19 nt, Artificial Sequence
  Description of Artificial Sequence: Synthetic oligonucleotide
  Antisense strand to SEQ ID NO: 2120178
acucccaagcgagaaugug

SEQ ID NO: 2120180 - RNA, 19 nt, Artificial Sequence
  Description of Artificial Sequence: Synthetic oligonucleotide
  Sense strand starting at position 2345 of SEQ ID NO: 1882426
acauucucgcuugggagua

SEQ ID NO: 2120181 - RNA, 19 nt, Artificial Sequence
  Description of Artificial Sequence: Synthetic oligonucleotide
  Antisense strand to SEQ ID NO: 2120180
uacucccaagcgagaaugu

SEQ ID NO: 2120182 - RNA, 19 nt, Artificial Sequence
  Description of Artificial Sequence: Synthetic oligonucleotide
  Sense strand starting at position 2430 of SEQ ID NO: 1882426
gcuccacguccugaugaga

SEQ ID NO: 2120183 - RNA, 19 nt, Artificial Sequence
  Description of Artificial Sequence: Synthetic oligonucleotide
  Antisense strand to SEQ ID NO: 2120182
ucucaucaggacguggagc

SEQ ID NO: 2120184 - RNA, 19 nt, Artificial Sequence
  Description of Artificial Sequence: Synthetic oligonucleotide
  Sense strand starting at position 2648 of SEQ ID NO: 1882426
uccucaaaggucugcuaga

SEQ ID NO: 2120185 - RNA, 19 nt, Artificial Sequence
  Description of Artificial Sequence: Synthetic oligonucleotide
  Antisense strand to SEQ ID NO: 2120184
ucuagcagaccuuugagga

SEQ ID NO: 2120186 - RNA, 19 nt, Artificial Sequence
  Description of Artificial Sequence: Synthetic oligonucleotide
  Sense strand starting at position 2653 of SEQ ID NO: 1882426
aaaggucugcuagacauac

SEQ ID NO: 2120187 - RNA, 19 nt, Artificial Sequence
  Description of Artificial Sequence: Synthetic oligonucleotide
  Antisense strand to SEQ ID NO: 2120186
guaugucuagcagaccuuu

SEQ ID NO: 2120188 - RNA, 19 nt, Artificial Sequence
  Description of Artificial Sequence: Synthetic oligonucleotide
  Sense strand starting at position 2685 of SEQ ID NO: 1882426
ggaggucuuauguguaacc

SEQ ID NO: 2120189 - RNA, 19 nt, Artificial Sequence
  Description of Artificial Sequence: Synthetic oligonucleotide
  Antisense strand to SEQ ID NO: 2120188
gguuacacauaagaccucc

SEQ ID NO: 2120190 - RNA, 19 nt, Artificial Sequence
  Description of Artificial Sequence: Synthetic oligonucleotide
  Sense strand starting at position 2686 of SEQ ID NO: 1882426
gaggucuuauguguaacca

SEQ ID NO: 2120191 - RNA, 19 nt, Artificial Sequence
  Description of Artificial Sequence: Synthetic oligonucleotide
  Antisense strand to SEQ ID NO: 2120190
ugguuacacauaagaccuc

SEQ ID NO: 2120192 - RNA, 19 nt, Artificial Sequence
  Description of Artificial Sequence: Synthetic oligonucleotide
  Sense strand starting at position 2690 of SEQ ID NO: 1882426
ucuuauguguaaccagaca

SEQ ID NO: 2120193 - RNA, 19 nt, Artificial Sequence
  Description of Artificial Sequence: Synthetic oligonucleotide
  Antisense strand to SEQ ID NO: 2120192
ugucugguuacacauaaga

SEQ ID NO: 2120194 - RNA, 19 nt, Artificial Sequence
  Description of Artificial Sequence: Synthetic oligonucleotide
  Sense strand starting at position 2733 of SEQ ID NO: 1882426
cgugaagacuccugcagac

SEQ ID NO: 2120195 - RNA, 19 nt, Artificial Sequence
  Description of Artificial Sequence: Synthetic oligonucleotide
  Antisense strand to SEQ ID NO: 2120194
gucugcaggagucuucacg

SEQ ID NO: 2120196 - RNA, 19 nt, Artificial Sequence
  Description of Artificial Sequence: Synthetic oligonucleotide
  Sense strand starting at position 2760 of SEQ ID NO: 1882426
aguaucaccugcuaugaga

SEQ ID NO: 2120197 - RNA, 19 nt, Artificial Sequence
  Description of Artificial Sequence: Synthetic oligonucleotide
  Antisense strand to SEQ ID NO: 2120196
ucucauagcaggugauacu

SEQ ID NO: 2120198 - RNA, 19 nt, Artificial Sequence
  Description of Artificial Sequence: Synthetic oligonucleotide
  Sense strand starting at position 2836 of SEQ ID NO: 1882426
agcggugucacccugcuau

SEQ ID NO: 2120199 - RNA, 19 nt, Artificial Sequence
  Description of Artificial Sequence: Synthetic oligonucleotide
  Antisense strand to SEQ ID NO: 2120198
auagcagggugacaccgcu

SEQ ID NO: 2120200 - RNA, 19 nt, Artificial Sequence
  Description of Artificial Sequence: Synthetic oligonucleotide
  Sense strand starting at position 2840 of SEQ ID NO: 1882426
gugucacccugcuaugaga

SEQ ID NO: 2120201 - RNA, 19 nt, Artificial Sequence
  Description of Artificial Sequence: Synthetic oligonucleotide
  Antisense strand to SEQ ID NO: 2120200
ucucauagcagggugacac

SEQ ID NO: 2120202 - RNA, 19 nt, Artificial Sequence
  Description of Artificial Sequence: Synthetic oligonucleotide
  Sense strand starting at position 3046 of SEQ ID NO: 1882426
gaaguagguuuggaaggau

SEQ ID NO: 2120203 - RNA, 19 nt, Artificial Sequence
  Description of Artificial Sequence: Synthetic oligonucleotide
  Antisense strand to SEQ ID NO: 2120202
auccuuccaaaccuacuuc

SEQ ID NO: 2120204 - RNA, 19 nt, Artificial Sequence
  Description of Artificial Sequence: Synthetic oligonucleotide
  Sense strand starting at position 3093 of SEQ ID NO: 1882426
ccaagagcagcauauguaa

SEQ ID NO: 2120205 - RNA, 19 nt, Artificial Sequence
  Description of Artificial Sequence: Synthetic oligonucleotide
  Antisense strand to SEQ ID NO: 2120204
uuacauaugcugcucuugg

SEQ ID NO: 2120206 - RNA, 19 nt, Artificial Sequence
  Description of Artificial Sequence: Synthetic oligonucleotide
  Sense strand starting at position 3144 of SEQ ID NO: 1882426
agugaauaaccugauggcu

SEQ ID NO: 2120207 - RNA, 19 nt, Artificial Sequence
  Description of Artificial Sequence: Synthetic oligonucleotide
  Antisense strand to SEQ ID NO: 2120206
agccaucagguuauucacu

SEQ ID NO: 2120208 - RNA, 19 nt, Artificial Sequence
  Description of Artificial Sequence: Synthetic oligonucleotide
  Sense strand starting at position 3146 of SEQ ID NO: 1882426
ugaauaaccugauggcuga

SEQ ID NO: 2120209 - RNA, 19 nt, Artificial Sequence
  Description of Artificial Sequence: Synthetic oligonucleotide
  Antisense strand to SEQ ID NO: 2120208
ucagccaucagguuauuca

SEQ ID NO: 2120210 - RNA, 19 nt, Artificial Sequence
  Description of Artificial Sequence: Synthetic oligonucleotide
  Sense strand starting at position 3206 of SEQ ID NO: 1882426
augggagccucucagacau

SEQ ID NO: 2120211 - RNA, 19 nt, Artificial Sequence
  Description of Artificial Sequence: Synthetic oligonucleotide
  Antisense strand to SEQ ID NO: 2120210
augucugagaggcucccau

SEQ ID NO: 2120212 - RNA, 19 nt, Artificial Sequence
  Description of Artificial Sequence: Synthetic oligonucleotide
  Sense strand starting at position 3375 of SEQ ID NO: 1882426
ugcaacaucugauucugaa

SEQ ID NO: 2120213 - RNA, 19 nt, Artificial Sequence
  Description of Artificial Sequence: Synthetic oligonucleotide
  Antisense strand to SEQ ID NO: 2120212
uucagaaucagauguugca

SEQ ID NO: 2120214 - RNA, 19 nt, Artificial Sequence
  Description of Artificial Sequence: Synthetic oligonucleotide
  Sense strand starting at position 3382 of SEQ ID NO: 1882426
ucugauucugaaugacuga

SEQ ID NO: 2120215 - RNA, 19 nt, Artificial Sequence
  Description of Artificial Sequence: Synthetic oligonucleotide
  Antisense strand to SEQ ID NO: 2120214
ucagucauucagaaucaga

SEQ ID NO: 2120216 - RNA, 19 nt, Artificial Sequence
  Description of Artificial Sequence: Synthetic oligonucleotide
  Sense strand starting at position 3454 of SEQ ID NO: 1882426
cuccgugcuguggaguuau

SEQ ID NO: 2120217 - RNA, 19 nt, Artificial Sequence
  Description of Artificial Sequence: Synthetic oligonucleotide
  Antisense strand to SEQ ID NO: 2120216
auaacuccacagcacggag

SEQ ID NO: 2120218 - RNA, 19 nt, Artificial Sequence
  Description of Artificial Sequence: Synthetic oligonucleotide
  Sense strand starting at position 3457 of SEQ ID NO: 1882426
cgugcuguggaguuaugca

SEQ ID NO: 2120219 - RNA, 19 nt, Artificial Sequence
  Description of Artificial Sequence: Synthetic oligonucleotide
  Antisense strand to SEQ ID NO: 2120218
ugcauaacuccacagcacg

SEQ ID NO: 2120220 - RNA, 19 nt, Artificial Sequence
  Description of Artificial Sequence: Synthetic oligonucleotide
  Sense strand starting at position 3462 of SEQ ID NO: 1882426
uguggaguuaugcaaguga

SEQ ID NO: 2120221 - RNA, 19 nt, Artificial Sequence
  Description of Artificial Sequence: Synthetic oligonucleotide
  Antisense strand to SEQ ID NO: 2120220
ucacuugcauaacuccaca

SEQ ID NO: 2120222 - RNA, 19 nt, Artificial Sequence
  Description of Artificial Sequence: Synthetic oligonucleotide
  Sense strand starting at position 3476 of SEQ ID NO: 1882426
agugaaugaggcugaucaa

SEQ ID NO: 2120223 - RNA, 19 nt, Artificial Sequence
  Description of Artificial Sequence: Synthetic oligonucleotide
  Antisense strand to SEQ ID NO: 2120222
uugaucagccucauucacu

SEQ ID NO: 2120224 - RNA, 19 nt, Artificial Sequence
  Description of Artificial Sequence: Synthetic oligonucleotide
  Sense strand starting at position 3479 of SEQ ID NO: 1882426
gaaugaggcugaucaacuu

SEQ ID NO: 2120225 - RNA, 19 nt, Artificial Sequence
  Description of Artificial Sequence: Synthetic oligonucleotide
  Antisense strand to SEQ ID NO: 2120224
aaguugaucagccucauuc

SEQ ID NO: 2120226 - RNA, 19 nt, Artificial Sequence
  Description of Artificial Sequence: Synthetic oligonucleotide
  Sense strand starting at position 174 of SEQ ID NO: 1882427
uaccaucggugacucauua

SEQ ID NO: 2120227 - RNA, 19 nt, Artificial Sequence
  Description of Artificial Sequence: Synthetic oligonucleotide
  Antisense strand to SEQ ID NO: 2120226
uaaugagucaccgauggua

SEQ ID NO: 2120228 - RNA, 19 nt, Artificial Sequence
  Description of Artificial Sequence: Synthetic oligonucleotide
  Sense strand starting at position 347 of SEQ ID NO: 1882427
gacagucaaccuugagcaa

SEQ ID NO: 2120229 - RNA, 19 nt, Artificial Sequence
  Description of Artificial Sequence: Synthetic oligonucleotide
  Antisense strand to SEQ ID NO: 2120228
uugcucaagguugacuguc

SEQ ID NO: 2120230 - RNA, 19 nt, Artificial Sequence
  Description of Artificial Sequence: Synthetic oligonucleotide
  Sense strand starting at position 358 of SEQ ID NO: 1882427
uugagcaacguuggaauau

SEQ ID NO: 2120231 - RNA, 19 nt, Artificial Sequence
  Description of Artificial Sequence: Synthetic oligonucleotide
  Antisense strand to SEQ ID NO: 2120230
auauuccaacguugcucaa

SEQ ID NO: 2120232 - RNA, 19 nt, Artificial Sequence
  Description of Artificial Sequence: Synthetic oligonucleotide
  Sense strand starting at position 371 of SEQ ID NO: 1882427
gaauaugagguuugaaagu

SEQ ID NO: 2120233 - RNA, 19 nt, Artificial Sequence
  Description of Artificial Sequence: Synthetic oligonucleotide
  Antisense strand to SEQ ID NO: 2120232
acuuucaaaccucauauuc

SEQ ID NO: 2120234 - RNA, 19 nt, Artificial Sequence
  Description of Artificial Sequence: Synthetic oligonucleotide
  Sense strand starting at position 767 of SEQ ID NO: 1882427
ccacucaaauguucuguga

SEQ ID NO: 2120235 - RNA, 19 nt, Artificial Sequence
  Description of Artificial Sequence: Synthetic oligonucleotide
  Antisense strand to SEQ ID NO: 2120234
ucacagaacauuugagugg

SEQ ID NO: 2120236 - RNA, 19 nt, Artificial Sequence
  Description of Artificial Sequence: Synthetic oligonucleotide
  Sense strand starting at position 858 of SEQ ID NO: 1882427
cugucuauugcugaugaug

SEQ ID NO: 2120237 - RNA, 19 nt, Artificial Sequence
  Description of Artificial Sequence: Synthetic oligonucleotide
  Antisense strand to SEQ ID NO: 2120236
caucaucagcaauagacag

SEQ ID NO: 2120238 - RNA, 19 nt, Artificial Sequence
  Description of Artificial Sequence: Synthetic oligonucleotide
  Sense strand starting at position 866 of SEQ ID NO: 1882427
ugcugaugauguccugaca

SEQ ID NO: 2120239 - RNA, 19 nt, Artificial Sequence
  Description of Artificial Sequence: Synthetic oligonucleotide
  Antisense strand to SEQ ID NO: 2120238
ugucaggacaucaucagca

SEQ ID NO: 2120240 - RNA, 19 nt, Artificial Sequence
  Description of Artificial Sequence: Synthetic oligonucleotide
  Sense strand starting at position 945 of SEQ ID NO: 1882427
auccauuucugagggauga

SEQ ID NO: 2120241 - RNA, 19 nt, Artificial Sequence
  Description of Artificial Sequence: Synthetic oligonucleotide
  Antisense strand to SEQ ID NO: 2120240
ucaucccucagaaauggau

SEQ ID NO: 2120242 - RNA, 19 nt, Artificial Sequence
  Description of Artificial Sequence: Synthetic oligonucleotide
  Sense strand starting at position 955 of SEQ ID NO: 1882427
gagggaugacuguguuccu

SEQ ID NO: 2120243 - RNA, 19 nt, Artificial Sequence
  Description of Artificial Sequence: Synthetic oligonucleotide
  Antisense strand to SEQ ID NO: 2120242
aggaacacagucaucccuc

SEQ ID NO: 2120244 - RNA, 19 nt, Artificial Sequence
  Description of Artificial Sequence: Synthetic oligonucleotide
  Sense strand starting at position 958 of SEQ ID NO: 1882427
ggaugacuguguuccugaa

SEQ ID NO: 2120245 - RNA, 19 nt, Artificial Sequence
  Description of Artificial Sequence: Synthetic oligonucleotide
  Antisense strand to SEQ ID NO: 2120244
uucaggaacacagucaucc

SEQ ID NO: 2120246 - RNA, 19 nt, Artificial Sequence
  Description of Artificial Sequence: Synthetic oligonucleotide
  Sense strand starting at position 960 of SEQ ID NO: 1882427
augacuguguuccugaaac

SEQ ID NO: 2120247 - RNA, 19 nt, Artificial Sequence
  Description of Artificial Sequence: Synthetic oligonucleotide
  Antisense strand to SEQ ID NO: 2120246
guuucaggaacacagucau

SEQ ID NO: 2120248 - RNA, 19 nt, Artificial Sequence
  Description of Artificial Sequence: Synthetic oligonucleotide
  Sense strand starting at position 962 of SEQ ID NO: 1882427
gacuguguuccugaaacaa

SEQ ID NO: 2120249 - RNA, 19 nt, Artificial Sequence
  Description of Artificial Sequence: Synthetic oligonucleotide
  Antisense strand to SEQ ID NO: 2120248
uuguuucaggaacacaguc

SEQ ID NO: 2120250 - RNA, 19 nt, Artificial Sequence
  Description of Artificial Sequence: Synthetic oligonucleotide
  Sense strand starting at position 1560 of SEQ ID NO: 1882427
caaggaucuugaguguauc

SEQ ID NO: 2120251 - RNA, 19 nt, Artificial Sequence
  Description of Artificial Sequence: Synthetic oligonucleotide
  Antisense strand to SEQ ID NO: 2120250
gauacacucaagauccuug

SEQ ID NO: 2120252 - RNA, 19 nt, Artificial Sequence
  Description of Artificial Sequence: Synthetic oligonucleotide
  Sense strand starting at position 1643 of SEQ ID NO: 1882427
aggugacuuaucuguggac

SEQ ID NO: 2120253 - RNA, 19 nt, Artificial Sequence
  Description of Artificial Sequence: Synthetic oligonucleotide
  Antisense strand to SEQ ID NO: 2120252
guccacagauaagucaccu

SEQ ID NO: 2120254 - RNA, 19 nt, Artificial Sequence
  Description of Artificial Sequence: Synthetic oligonucleotide
  Sense strand starting at position 1645 of SEQ ID NO: 1882427
gugacuuaucuguggacca

SEQ ID NO: 2120255 - RNA, 19 nt, Artificial Sequence
  Description of Artificial Sequence: Synthetic oligonucleotide
  Antisense strand to SEQ ID NO: 2120254
ugguccacagauaagucac

SEQ ID NO: 2120256 - RNA, 19 nt, Artificial Sequence
  Description of Artificial Sequence: Synthetic oligonucleotide
  Sense strand starting at position 2178 of SEQ ID NO: 1882427
aucuguagugaaugaagga

SEQ ID NO: 2120257 - RNA, 19 nt, Artificial Sequence
  Description of Artificial Sequence: Synthetic oligonucleotide
  Antisense strand to SEQ ID NO: 2120256
uccuucauucacuacagau

SEQ ID NO: 2120258 - RNA, 19 nt, Artificial Sequence
  Description of Artificial Sequence: Synthetic oligonucleotide
  Sense strand starting at position 2308 of SEQ ID NO: 1882427
auggucuuccuacagauac

SEQ ID NO: 2120259 - RNA, 19 nt, Artificial Sequence
  Description of Artificial Sequence: Synthetic oligonucleotide
  Antisense strand to SEQ ID NO: 2120258
guaucuguaggaagaccau

SEQ ID NO: 2120260 - RNA, 19 nt, Artificial Sequence
  Description of Artificial Sequence: Synthetic oligonucleotide
  Sense strand starting at position 2371 of SEQ ID NO: 1882427
guauccauuguuuagaacu

SEQ ID NO: 2120261 - RNA, 19 nt, Artificial Sequence
  Description of Artificial Sequence: Synthetic oligonucleotide
  Antisense strand to SEQ ID NO: 2120260
aguucuaaacaauggauac

SEQ ID NO: 2120262 - RNA, 19 nt, Artificial Sequence
  Description of Artificial Sequence: Synthetic oligonucleotide
  Sense strand starting at position 2379 of SEQ ID NO: 1882427
uguuuagaacuguaaucau

SEQ ID NO: 2120263 - RNA, 19 nt, Artificial Sequence
  Description of Artificial Sequence: Synthetic oligonucleotide
  Antisense strand to SEQ ID NO: 2120262
augauuacaguucuaaaca

SEQ ID NO: 2120264 - RNA, 19 nt, Artificial Sequence
  Description of Artificial Sequence: Synthetic oligonucleotide
  Sense strand starting at position 2444 of SEQ ID NO: 1882427
cccucugguucuuuagaca

SEQ ID NO: 2120265 - RNA, 19 nt, Artificial Sequence
  Description of Artificial Sequence: Synthetic oligonucleotide
  Antisense strand to SEQ ID NO: 2120264
ugucuaaagaaccagaggg

SEQ ID NO: 2120266 - RNA, 19 nt, Artificial Sequence
  Description of Artificial Sequence: Synthetic oligonucleotide
  Sense strand starting at position 2449 of SEQ ID NO: 1882427
ugguucuuuagacagugaa

SEQ ID NO: 2120267 - RNA, 19 nt, Artificial Sequence
  Description of Artificial Sequence: Synthetic oligonucleotide
  Antisense strand to SEQ ID NO: 2120266
uucacugucuaaagaacca

SEQ ID NO: 2120268 - RNA, 19 nt, Artificial Sequence
  Description of Artificial Sequence: Synthetic oligonucleotide
  Sense strand starting at position 2452 of SEQ ID NO: 1882427
uucuuuagacagugaauac

SEQ ID NO: 2120269 - RNA, 19 nt, Artificial Sequence
  Description of Artificial Sequence: Synthetic oligonucleotide
  Antisense strand to SEQ ID NO: 2120268
guauucacugucuaaagaa

SEQ ID NO: 2120270 - RNA, 19 nt, Artificial Sequence
  Description of Artificial Sequence: Synthetic oligonucleotide
  Sense strand starting at position 2464 of SEQ ID NO: 1882427
ugaauacuguguucuuuau

SEQ ID NO: 2120271 - RNA, 19 nt, Artificial Sequence
  Description of Artificial Sequence: Synthetic oligonucleotide
  Antisense strand to SEQ ID NO: 2120270
auaaagaacacaguauuca

SEQ ID NO: 2120272 - RNA, 19 nt, Artificial Sequence
  Description of Artificial Sequence: Synthetic oligonucleotide
  Sense strand starting at position 2609 of SEQ ID NO: 1882427
ucaagaugagcaugaauua

SEQ ID NO: 2120273 - RNA, 19 nt, Artificial Sequence
  Description of Artificial Sequence: Synthetic oligonucleotide
  Antisense strand to SEQ ID NO: 2120272
uaauucaugcucaucuuga

SEQ ID NO: 2120274 - RNA, 19 nt, Artificial Sequence
  Description of Artificial Sequence: Synthetic oligonucleotide
  Sense strand starting at position 2673 of SEQ ID NO: 1882427
aagcuagaguucucugaca

SEQ ID NO: 2120275 - RNA, 19 nt, Artificial Sequence
  Description of Artificial Sequence: Synthetic oligonucleotide
  Antisense strand to SEQ ID NO: 2120274
ugucagagaacucuagcuu

SEQ ID NO: 2120276 - RNA, 19 nt, Artificial Sequence
  Description of Artificial Sequence: Synthetic oligonucleotide
  Sense strand starting at position 2675 of SEQ ID NO: 1882427
gcuagaguucucugacaug

SEQ ID NO: 2120277 - RNA, 19 nt, Artificial Sequence
  Description of Artificial Sequence: Synthetic oligonucleotide
  Antisense strand to SEQ ID NO: 2120276
caugucagagaacucuagc

SEQ ID NO: 2120278 - RNA, 19 nt, Artificial Sequence
  Description of Artificial Sequence: Synthetic oligonucleotide
  Sense strand starting at position 2684 of SEQ ID NO: 1882427
cucugacauggauggcuua

SEQ ID NO: 2120279 - RNA, 19 nt, Artificial Sequence
  Description of Artificial Sequence: Synthetic oligonucleotide
  Antisense strand to SEQ ID NO: 2120278
uaagccauccaugucagag

SEQ ID NO: 2120280 - RNA, 19 nt, Artificial Sequence
  Description of Artificial Sequence: Synthetic oligonucleotide
  Sense strand starting at position 2717 of SEQ ID NO: 1882427
uagacuugaugagagaaca

SEQ ID NO: 2120281 - RNA, 19 nt, Artificial Sequence
  Description of Artificial Sequence: Synthetic oligonucleotide
  Antisense strand to SEQ ID NO: 2120280
uguucucucaucaagucua

SEQ ID NO: 2120282 - RNA, 19 nt, Artificial Sequence
  Description of Artificial Sequence: Synthetic oligonucleotide
  Sense strand starting at position 2751 of SEQ ID NO: 1882427
guguguauuugcagggaag

SEQ ID NO: 2120283 - RNA, 19 nt, Artificial Sequence
  Description of Artificial Sequence: Synthetic oligonucleotide
  Antisense strand to SEQ ID NO: 2120282
cuucccugcaaauacacac

SEQ ID NO: 2120284 - RNA, 19 nt, Artificial Sequence
  Description of Artificial Sequence: Synthetic oligonucleotide
  Sense strand starting at position 2929 of SEQ ID NO: 1882427
uuccaaaugcccgauacuu

SEQ ID NO: 2120285 - RNA, 19 nt, Artificial Sequence
  Description of Artificial Sequence: Synthetic oligonucleotide
  Antisense strand to SEQ ID NO: 2120284
aaguaucgggcauuuggaa

SEQ ID NO: 2120286 - RNA, 19 nt, Artificial Sequence
  Description of Artificial Sequence: Synthetic oligonucleotide
  Sense strand starting at position 2974 of SEQ ID NO: 1882427
gaucccaaagucugugaga

SEQ ID NO: 2120287 - RNA, 19 nt, Artificial Sequence
  Description of Artificial Sequence: Synthetic oligonucleotide
  Antisense strand to SEQ ID NO: 2120286
ucucacagacuuugggauc

SEQ ID NO: 2120288 - RNA, 19 nt, Artificial Sequence
  Description of Artificial Sequence: Synthetic oligonucleotide
  Sense strand starting at position 2976 of SEQ ID NO: 1882427
ucccaaagucugugagaga

SEQ ID NO: 2120289 - RNA, 19 nt, Artificial Sequence
  Description of Artificial Sequence: Synthetic oligonucleotide
  Antisense strand to SEQ ID NO: 2120288
ucucucacagacuuuggga

SEQ ID NO: 2120290 - RNA, 19 nt, Artificial Sequence
  Description of Artificial Sequence: Synthetic oligonucleotide
  Sense strand starting at position 3133 of SEQ ID NO: 1882427
cauguaacugcaggguaau

SEQ ID NO: 2120291 - RNA, 19 nt, Artificial Sequence
  Description of Artificial Sequence: Synthetic oligonucleotide
  Antisense strand to SEQ ID NO: 2120290
auuacccugcaguuacaug

SEQ ID NO: 2120292 - RNA, 19 nt, Artificial Sequence
  Description of Artificial Sequence: Synthetic oligonucleotide
  Sense strand starting at position 3134 of SEQ ID NO: 1882427
auguaacugcaggguaauu

SEQ ID NO: 2120293 - RNA, 19 nt, Artificial Sequence
  Description of Artificial Sequence: Synthetic oligonucleotide
  Antisense strand to SEQ ID NO: 2120292
aauuacccugcaguuacau

SEQ ID NO: 2120294 - RNA, 19 nt, Artificial Sequence
  Description of Artificial Sequence: Synthetic oligonucleotide
  Sense strand starting at position 3233 of SEQ ID NO: 1882427
auagaaauaugccuugugu

SEQ ID NO: 2120295 - RNA, 19 nt, Artificial Sequence
  Description of Artificial Sequence: Synthetic oligonucleotide
  Antisense strand to SEQ ID NO: 2120294
acacaaggcauauuucuau

SEQ ID NO: 2120296 - RNA, 19 nt, Artificial Sequence
  Description of Artificial Sequence: Synthetic oligonucleotide
  Sense strand starting at position 3248 of SEQ ID NO: 1882427
gugugcuaaucauuuccau

SEQ ID NO: 2120297 - RNA, 19 nt, Artificial Sequence
  Description of Artificial Sequence: Synthetic oligonucleotide
  Antisense strand to SEQ ID NO: 2120296
auggaaaugauuagcacac

SEQ ID NO: 2120298 - RNA, 19 nt, Artificial Sequence
  Description of Artificial Sequence: Synthetic oligonucleotide
  Sense strand starting at position 3390 of SEQ ID NO: 1882427
aagaguuaaggucagaguu

SEQ ID NO: 2120299 - RNA, 19 nt, Artificial Sequence
  Description of Artificial Sequence: Synthetic oligonucleotide
  Antisense strand to SEQ ID NO: 2120298
aacucugaccuuaacucuu

SEQ ID NO: 2120300 - RNA, 19 nt, Artificial Sequence
  Description of Artificial Sequence: Synthetic oligonucleotide
  Sense strand starting at position 3398 of SEQ ID NO: 1882427
aggucagaguugguacuuu

SEQ ID NO: 2120301 - RNA, 19 nt, Artificial Sequence
  Description of Artificial Sequence: Synthetic oligonucleotide
  Antisense strand to SEQ ID NO: 2120300
aaaguaccaacucugaccu

SEQ ID NO: 2120302 - RNA, 19 nt, Artificial Sequence
  Description of Artificial Sequence: Synthetic oligonucleotide
  Sense strand starting at position 3529 of SEQ ID NO: 1882427
uuaagaacccagugcuaug

SEQ ID NO: 2120303 - RNA, 19 nt, Artificial Sequence
  Description of Artificial Sequence: Synthetic oligonucleotide
  Antisense strand to SEQ ID NO: 2120302
cauagcacuggguucuuaa

SEQ ID NO: 2120304 - RNA, 19 nt, Artificial Sequence
  Description of Artificial Sequence: Synthetic oligonucleotide
  Sense strand starting at position 3750 of SEQ ID NO: 1882427
guuugaaaguauuccuaaa

SEQ ID NO: 2120305 - RNA, 19 nt, Artificial Sequence
  Description of Artificial Sequence: Synthetic oligonucleotide
  Antisense strand to SEQ ID NO: 2120304
uuuaggaauacuuucaaac

SEQ ID NO: 2120306 - RNA, 19 nt, Artificial Sequence
  Description of Artificial Sequence: Synthetic oligonucleotide
  Sense strand starting at position 4 of SEQ ID NO: 1882428
gcucuaggaucuguuccaa

SEQ ID NO: 2120307 - RNA, 19 nt, Artificial Sequence
  Description of Artificial Sequence: Synthetic oligonucleotide
  Antisense strand to SEQ ID NO: 2120306
uuggaacagauccuagagc

SEQ ID NO: 2120308 - RNA, 19 nt, Artificial Sequence
  Description of Artificial Sequence: Synthetic oligonucleotide
  Sense strand starting at position 34 of SEQ ID NO: 1882428
guggaucaaucauccagau

SEQ ID NO: 2120309 - RNA, 19 nt, Artificial Sequence
  Description of Artificial Sequence: Synthetic oligonucleotide
  Antisense strand to SEQ ID NO: 2120308
aucuggaugauugauccac

SEQ ID NO: 2120310 - RNA, 19 nt, Artificial Sequence
  Description of Artificial Sequence: Synthetic oligonucleotide
  Sense strand starting at position 103 of SEQ ID NO: 1882428
aggaguuuccuaggaagca

SEQ ID NO: 2120311 - RNA, 19 nt, Artificial Sequence
  Description of Artificial Sequence: Synthetic oligonucleotide
  Antisense strand to SEQ ID NO: 2120310
ugcuuccuaggaaacuccu

SEQ ID NO: 2120312 - RNA, 19 nt, Artificial Sequence
  Description of Artificial Sequence: Synthetic oligonucleotide
  Sense strand starting at position 196 of SEQ ID NO: 1882428
ucaguuucccaagauguaa

SEQ ID NO: 2120313 - RNA, 19 nt, Artificial Sequence
  Description of Artificial Sequence: Synthetic oligonucleotide
  Antisense strand to SEQ ID NO: 2120312
uuacaucuugggaaacuga

SEQ ID NO: 2120314 - RNA, 19 nt, Artificial Sequence
  Description of Artificial Sequence: Synthetic oligonucleotide
  Sense strand starting at position 237 of SEQ ID NO: 1882428
acaauuucuucugagaagg

SEQ ID NO: 2120315 - RNA, 19 nt, Artificial Sequence
  Description of Artificial Sequence: Synthetic oligonucleotide
  Antisense strand to SEQ ID NO: 2120314
ccuucucagaagaaauugu

SEQ ID NO: 2120316 - RNA, 19 nt, Artificial Sequence
  Description of Artificial Sequence: Synthetic oligonucleotide
  Sense strand starting at position 262 of SEQ ID NO: 1882428
aguagacucugguucuaau

SEQ ID NO: 2120317 - RNA, 19 nt, Artificial Sequence
  Description of Artificial Sequence: Synthetic oligonucleotide
  Antisense strand to SEQ ID NO: 2120316
auuagaaccagagucuacu

SEQ ID NO: 2120318 - RNA, 19 nt, Artificial Sequence
  Description of Artificial Sequence: Synthetic oligonucleotide
  Sense strand starting at position 287 of SEQ ID NO: 1882428
uggcauuucuuaguagcau

SEQ ID NO: 2120319 - RNA, 19 nt, Artificial Sequence
  Description of Artificial Sequence: Synthetic oligonucleotide
  Antisense strand to SEQ ID NO: 2120318
augcuacuaagaaaugcca

SEQ ID NO: 2120320 - RNA, 19 nt, Artificial Sequence
  Description of Artificial Sequence: Synthetic oligonucleotide
  Sense strand starting at position 325 of SEQ ID NO: 1882428
cuuucugagccacaagauu

SEQ ID NO: 2120321 - RNA, 19 nt, Artificial Sequence
  Description of Artificial Sequence: Synthetic oligonucleotide
  Antisense strand to SEQ ID NO: 2120320
aaucuuguggcucagaaag

SEQ ID NO: 2120322 - RNA, 19 nt, Artificial Sequence
  Description of Artificial Sequence: Synthetic oligonucleotide
  Sense strand starting at position 472 of SEQ ID NO: 1882428
acauauaaaucgguccuca

SEQ ID NO: 2120323 - RNA, 19 nt, Artificial Sequence
  Description of Artificial Sequence: Synthetic oligonucleotide
  Antisense strand to SEQ ID NO: 2120322
ugaggaccgauuuauaugu

SEQ ID NO: 2120324 - RNA, 19 nt, Artificial Sequence
  Description of Artificial Sequence: Synthetic oligonucleotide
  Sense strand starting at position 686 of SEQ ID NO: 1882428
cugaaaugcuuaucuaaga

SEQ ID NO: 2120325 - RNA, 19 nt, Artificial Sequence
  Description of Artificial Sequence: Synthetic oligonucleotide
  Antisense strand to SEQ ID NO: 2120324
ucuuagauaagcauuucag

SEQ ID NO: 2120326 - RNA, 19 nt, Artificial Sequence
  Description of Artificial Sequence: Synthetic oligonucleotide
  Sense strand starting at position 687 of SEQ ID NO: 1882428
ugaaaugcuuaucuaagaa

SEQ ID NO: 2120327 - RNA, 19 nt, Artificial Sequence
  Description of Artificial Sequence: Synthetic oligonucleotide
  Antisense strand to SEQ ID NO: 2120326
uucuuagauaagcauuuca

SEQ ID NO: 2120328 - RNA, 19 nt, Artificial Sequence
  Description of Artificial Sequence: Synthetic oligonucleotide
  Sense strand starting at position 918 of SEQ ID NO: 1882428
aggaaugccuucucuugga

SEQ ID NO: 2120329 - RNA, 19 nt, Artificial Sequence
  Description of Artificial Sequence: Synthetic oligonucleotide
  Antisense strand to SEQ ID NO: 2120328
uccaagagaaggcauuccu

SEQ ID NO: 2120330 - RNA, 19 nt, Artificial Sequence
  Description of Artificial Sequence: Synthetic oligonucleotide
  Sense strand starting at position 922 of SEQ ID NO: 1882428
augccuucucuuggaaaug

SEQ ID NO: 2120331 - RNA, 19 nt, Artificial Sequence
  Description of Artificial Sequence: Synthetic oligonucleotide
  Antisense strand to SEQ ID NO: 2120330
cauuuccaagagaaggcau

SEQ ID NO: 2120332 - RNA, 19 nt, Artificial Sequence
  Description of Artificial Sequence: Synthetic oligonucleotide
  Sense strand starting at position 2102 of SEQ ID NO: 1882428
cucuaaaucccgcggauuu

SEQ ID NO: 2120333 - RNA, 19 nt, Artificial Sequence
  Description of Artificial Sequence: Synthetic oligonucleotide
  Antisense strand to SEQ ID NO: 2120332
aaauccgcgggauuuagag

SEQ ID NO: 2120334 - RNA, 19 nt, Artificial Sequence
  Description of Artificial Sequence: Synthetic oligonucleotide
  Sense strand starting at position 2113 of SEQ ID NO: 1882428
gcggauuuguccucuagca

SEQ ID NO: 2120335 - RNA, 19 nt, Artificial Sequence
  Description of Artificial Sequence: Synthetic oligonucleotide
  Antisense strand to SEQ ID NO: 2120334
ugcuagaggacaaauccgc

SEQ ID NO: 2120336 - RNA, 19 nt, Artificial Sequence
  Description of Artificial Sequence: Synthetic oligonucleotide
  Sense strand starting at position 2164 of SEQ ID NO: 1882428
aagagaucccgcggaagga

SEQ ID NO: 2120337 - RNA, 19 nt, Artificial Sequence
  Description of Artificial Sequence: Synthetic oligonucleotide
  Antisense strand to SEQ ID NO: 2120336
uccuuccgcgggaucucuu

SEQ ID NO: 2120338 - RNA, 19 nt, Artificial Sequence
  Description of Artificial Sequence: Synthetic oligonucleotide
  Sense strand starting at position 2165 of SEQ ID NO: 1882428
agagaucccgcggaaggau

SEQ ID NO: 2120339 - RNA, 19 nt, Artificial Sequence
  Description of Artificial Sequence: Synthetic oligonucleotide
  Antisense strand to SEQ ID NO: 2120338
auccuuccgcgggaucucu

SEQ ID NO: 2120340 - RNA, 19 nt, Artificial Sequence
  Description of Artificial Sequence: Synthetic oligonucleotide
  Sense strand starting at position 2464 of SEQ ID NO: 1882428
uuaggauauuuauaccgau

SEQ ID NO: 2120341 - RNA, 19 nt, Artificial Sequence
  Description of Artificial Sequence: Synthetic oligonucleotide
  Antisense strand to SEQ ID NO: 2120340
aucgguauaaauauccuaa

SEQ ID NO: 2120342 - RNA, 19 nt, Artificial Sequence
  Description of Artificial Sequence: Synthetic oligonucleotide
  Sense strand starting at position 2486 of SEQ ID NO: 1882428
uauugaaaucucgacaagu

SEQ ID NO: 2120343 - RNA, 19 nt, Artificial Sequence
  Description of Artificial Sequence: Synthetic oligonucleotide
  Antisense strand to SEQ ID NO: 2120342
acuugucgagauuucaaua

SEQ ID NO: 2120344 - RNA, 19 nt, Artificial Sequence
  Description of Artificial Sequence: Synthetic oligonucleotide
  Sense strand starting at position 2543 of SEQ ID NO: 1882428
uugccuuuccuaugaaagg

SEQ ID NO: 2120345 - RNA, 19 nt, Artificial Sequence
  Description of Artificial Sequence: Synthetic oligonucleotide
  Antisense strand to SEQ ID NO: 2120344
ccuuucauaggaaaggcaa

SEQ ID NO: 2120346 - RNA, 19 nt, Artificial Sequence
  Description of Artificial Sequence: Synthetic oligonucleotide
  Sense strand starting at position 2585 of SEQ ID NO: 1882428
ggguuugauucggcuagga

SEQ ID NO: 2120347 - RNA, 19 nt, Artificial Sequence
  Description of Artificial Sequence: Synthetic oligonucleotide
  Antisense strand to SEQ ID NO: 2120346
uccuagccgaaucaaaccc

SEQ ID NO: 2120348 - RNA, 19 nt, Artificial Sequence
  Description of Artificial Sequence: Synthetic oligonucleotide
  Sense strand starting at position 2587 of SEQ ID NO: 1882428
guuugauucggcuaggaaa

SEQ ID NO: 2120349 - RNA, 19 nt, Artificial Sequence
  Description of Artificial Sequence: Synthetic oligonucleotide
  Antisense strand to SEQ ID NO: 2120348
uuuccuagccgaaucaaac

SEQ ID NO: 2120350 - RNA, 19 nt, Artificial Sequence
  Description of Artificial Sequence: Synthetic oligonucleotide
  Sense strand starting at position 2612 of SEQ ID NO: 1882428
uuagcacguuauuugcaaa

SEQ ID NO: 2120351 - RNA, 19 nt, Artificial Sequence
  Description of Artificial Sequence: Synthetic oligonucleotide
  Antisense strand to SEQ ID NO: 2120350
uuugcaaauaacgugcuaa

SEQ ID NO: 2120352 - RNA, 19 nt, Artificial Sequence
  Description of Artificial Sequence: Synthetic oligonucleotide
  Sense strand starting at position 2687 of SEQ ID NO: 1882428
gggaaacuagagugauggu

SEQ ID NO: 2120353 - RNA, 19 nt, Artificial Sequence
  Description of Artificial Sequence: Synthetic oligonucleotide
  Antisense strand to SEQ ID NO: 2120352
accaucacucuaguuuccc

SEQ ID NO: 2120354 - RNA, 19 nt, Artificial Sequence
  Description of Artificial Sequence: Synthetic oligonucleotide
  Sense strand starting at position 2704 of SEQ ID NO: 1882428
gucuacaaucugggauguu

SEQ ID NO: 2120355 - RNA, 19 nt, Artificial Sequence
  Description of Artificial Sequence: Synthetic oligonucleotide
  Antisense strand to SEQ ID NO: 2120354
aacaucccagauuguagac

SEQ ID NO: 2120356 - RNA, 19 nt, Artificial Sequence
  Description of Artificial Sequence: Synthetic oligonucleotide
  Sense strand starting at position 2707 of SEQ ID NO: 1882428
uacaaucugggauguuaaa

SEQ ID NO: 2120357 - RNA, 19 nt, Artificial Sequence
  Description of Artificial Sequence: Synthetic oligonucleotide
  Antisense strand to SEQ ID NO: 2120356
uuuaacaucccagauugua

SEQ ID NO: 2120358 - RNA, 19 nt, Artificial Sequence
  Description of Artificial Sequence: Synthetic oligonucleotide
  Sense strand starting at position 2900 of SEQ ID NO: 1882428
guuggacaagcuuaguaca

SEQ ID NO: 2120359 - RNA, 19 nt, Artificial Sequence
  Description of Artificial Sequence: Synthetic oligonucleotide
  Antisense strand to SEQ ID NO: 2120358
uguacuaagcuuguccaac

SEQ ID NO: 2120360 - RNA, 19 nt, Artificial Sequence
  Description of Artificial Sequence: Synthetic oligonucleotide
  Sense strand starting at position 2902 of SEQ ID NO: 1882428
uggacaagcuuaguacaua

SEQ ID NO: 2120361 - RNA, 19 nt, Artificial Sequence
  Description of Artificial Sequence: Synthetic oligonucleotide
  Antisense strand to SEQ ID NO: 2120360
uauguacuaagcuugucca

SEQ ID NO: 2120362 - RNA, 19 nt, Artificial Sequence
  Description of Artificial Sequence: Synthetic oligonucleotide
  Sense strand starting at position 2970 of SEQ ID NO: 1882428
guaguacaguguccugaaa

SEQ ID NO: 2120363 - RNA, 19 nt, Artificial Sequence
  Description of Artificial Sequence: Synthetic oligonucleotide
  Antisense strand to SEQ ID NO: 2120362
uuucaggacacuguacuac

SEQ ID NO: 2120364 - RNA, 19 nt, Artificial Sequence
  Description of Artificial Sequence: Synthetic oligonucleotide
  Sense strand starting at position 3348 of SEQ ID NO: 1882428
cuaccuuacagagguggaa

SEQ ID NO: 2120365 - RNA, 19 nt, Artificial Sequence
  Description of Artificial Sequence: Synthetic oligonucleotide
  Antisense strand to SEQ ID NO: 2120364
uuccaccucuguaagguag

SEQ ID NO: 2120366 - RNA, 19 nt, Artificial Sequence
  Description of Artificial Sequence: Synthetic oligonucleotide
  Sense strand starting at position 3396 of SEQ ID NO: 1882428
acagcuaagaagugucaga

SEQ ID NO: 2120367 - RNA, 19 nt, Artificial Sequence
  Description of Artificial Sequence: Synthetic oligonucleotide
  Antisense strand to SEQ ID NO: 2120366
ucugacacuucuuagcugu

SEQ ID NO: 2120368 - RNA, 19 nt, Artificial Sequence
  Description of Artificial Sequence: Synthetic oligonucleotide
  Sense strand starting at position 3470 of SEQ ID NO: 1882428
cucagucucccagguugaa

SEQ ID NO: 2120369 - RNA, 19 nt, Artificial Sequence
  Description of Artificial Sequence: Synthetic oligonucleotide
  Antisense strand to SEQ ID NO: 2120368
uucaaccugggagacugag

SEQ ID NO: 2120370 - RNA, 19 nt, Artificial Sequence
  Description of Artificial Sequence: Synthetic oligonucleotide
  Sense strand starting at position 3734 of SEQ ID NO: 1882428
ggcccagauccagguuuaa

SEQ ID NO: 2120371 - RNA, 19 nt, Artificial Sequence
  Description of Artificial Sequence: Synthetic oligonucleotide
  Antisense strand to SEQ ID NO: 2120370
uuaaaccuggaucugggcc

SEQ ID NO: 2120372 - RNA, 19 nt, Artificial Sequence
  Description of Artificial Sequence: Synthetic oligonucleotide
  Sense strand starting at position 3790 of SEQ ID NO: 1882428
ccggguuuaagucaaagcu

SEQ ID NO: 2120373 - RNA, 19 nt, Artificial Sequence
  Description of Artificial Sequence: Synthetic oligonucleotide
  Antisense strand to SEQ ID NO: 2120372
agcuuugacuuaaacccgg

SEQ ID NO: 2120374 - RNA, 19 nt, Artificial Sequence
  Description of Artificial Sequence: Synthetic oligonucleotide
  Sense strand starting at position 3844 of SEQ ID NO: 1882428
uuaugacuagcacguaaga

SEQ ID NO: 2120375 - RNA, 19 nt, Artificial Sequence
  Description of Artificial Sequence: Synthetic oligonucleotide
  Antisense strand to SEQ ID NO: 2120374
ucuuacgugcuagucauaa

SEQ ID NO: 2120376 - RNA, 19 nt, Artificial Sequence
  Description of Artificial Sequence: Synthetic oligonucleotide
  Sense strand starting at position 3846 of SEQ ID NO: 1882428
augacuagcacguaagaga

SEQ ID NO: 2120377 - RNA, 19 nt, Artificial Sequence
  Description of Artificial Sequence: Synthetic oligonucleotide
  Antisense strand to SEQ ID NO: 2120376
ucucuuacgugcuagucau

SEQ ID NO: 2120378 - RNA, 19 nt, Artificial Sequence
  Description of Artificial Sequence: Synthetic oligonucleotide
  Sense strand starting at position 3853 of SEQ ID NO: 1882428
gcacguaagagauacucaa

SEQ ID NO: 2120379 - RNA, 19 nt, Artificial Sequence
  Description of Artificial Sequence: Synthetic oligonucleotide
  Antisense strand to SEQ ID NO: 2120378
uugaguaucucuuacgugc

SEQ ID NO: 2120380 - RNA, 19 nt, Artificial Sequence
  Description of Artificial Sequence: Synthetic oligonucleotide
  Sense strand starting at position 3960 of SEQ ID NO: 1882428
aguaguagugcuuauugga

SEQ ID NO: 2120381 - RNA, 19 nt, Artificial Sequence
  Description of Artificial Sequence: Synthetic oligonucleotide
  Antisense strand to SEQ ID NO: 2120380
uccaauaagcacuacuacu

SEQ ID NO: 2120382 - RNA, 19 nt, Artificial Sequence
  Description of Artificial Sequence: Synthetic oligonucleotide
  Sense strand starting at position 3968 of SEQ ID NO: 1882428
ugcuuauuggaugggugaa

SEQ ID NO: 2120383 - RNA, 19 nt, Artificial Sequence
  Description of Artificial Sequence: Synthetic oligonucleotide
  Antisense strand to SEQ ID NO: 2120382
uucacccauccaauaagca

SEQ ID NO: 2120384 - RNA, 19 nt, Artificial Sequence
  Description of Artificial Sequence: Synthetic oligonucleotide
  Sense strand starting at position 3969 of SEQ ID NO: 1882428
gcuuauuggaugggugaau

SEQ ID NO: 2120385 - RNA, 19 nt, Artificial Sequence
  Description of Artificial Sequence: Synthetic oligonucleotide
  Antisense strand to SEQ ID NO: 2120384
auucacccauccaauaagc

SEQ ID NO: 2120386 - RNA, 19 nt, Artificial Sequence
  Description of Artificial Sequence: Synthetic oligonucleotide
  Sense strand starting at position 21 of SEQ ID NO: 1882429
cuuugauacuuuguugaau

SEQ ID NO: 2120387 - RNA, 19 nt, Artificial Sequence
  Description of Artificial Sequence: Synthetic oligonucleotide
  Antisense strand to SEQ ID NO: 2120386
auucaacaaaguaucaaag

SEQ ID NO: 2120388 - RNA, 19 nt, Artificial Sequence
  Description of Artificial Sequence: Synthetic oligonucleotide
  Sense strand starting at position 22 of SEQ ID NO: 1882429
uuugauacuuuguugaaug

SEQ ID NO: 2120389 - RNA, 19 nt, Artificial Sequence
  Description of Artificial Sequence: Synthetic oligonucleotide
  Antisense strand to SEQ ID NO: 2120388
cauucaacaaaguaucaaa

SEQ ID NO: 2120390 - RNA, 19 nt, Artificial Sequence
  Description of Artificial Sequence: Synthetic oligonucleotide
  Sense strand starting at position 301 of SEQ ID NO: 1882429
aacauuuauugugaugaug

SEQ ID NO: 2120391 - RNA, 19 nt, Artificial Sequence
  Description of Artificial Sequence: Synthetic oligonucleotide
  Antisense strand to SEQ ID NO: 2120390
caucaucacaauaaauguu

SEQ ID NO: 2120392 - RNA, 19 nt, Artificial Sequence
  Description of Artificial Sequence: Synthetic oligonucleotide
  Sense strand starting at position 361 of SEQ ID NO: 1882429
gccguaaauggaugaauua

SEQ ID NO: 2120393 - RNA, 19 nt, Artificial Sequence
  Description of Artificial Sequence: Synthetic oligonucleotide
  Antisense strand to SEQ ID NO: 2120392
uaauucauccauuuacggc

SEQ ID NO: 2120394 - RNA, 19 nt, Artificial Sequence
  Description of Artificial Sequence: Synthetic oligonucleotide
  Sense strand starting at position 554 of SEQ ID NO: 1882429
cagggcaagucaucuaacu

SEQ ID NO: 2120395 - RNA, 19 nt, Artificial Sequence
  Description of Artificial Sequence: Synthetic oligonucleotide
  Antisense strand to SEQ ID NO: 2120394
aguuagaugacuugcccug

SEQ ID NO: 2120396 - RNA, 19 nt, Artificial Sequence
  Description of Artificial Sequence: Synthetic oligonucleotide
  Sense strand starting at position 649 of SEQ ID NO: 1882429
uccagagacuugucucaag

SEQ ID NO: 2120397 - RNA, 19 nt, Artificial Sequence
  Description of Artificial Sequence: Synthetic oligonucleotide
  Antisense strand to SEQ ID NO: 2120396
cuugagacaagucucugga

SEQ ID NO: 2120398 - RNA, 19 nt, Artificial Sequence
  Description of Artificial Sequence: Synthetic oligonucleotide
  Sense strand starting at position 848 of SEQ ID NO: 1882429
ggaaguacaucacuuucuu

SEQ ID NO: 2120399 - RNA, 19 nt, Artificial Sequence
  Description of Artificial Sequence: Synthetic oligonucleotide
  Antisense strand to SEQ ID NO: 2120398
aagaaagugauguacuucc

SEQ ID NO: 2120400 - RNA, 19 nt, Artificial Sequence
  Description of Artificial Sequence: Synthetic oligonucleotide
  Sense strand starting at position 888 of SEQ ID NO: 1882429
uaauuagauucugcaagug

SEQ ID NO: 2120401 - RNA, 19 nt, Artificial Sequence
  Description of Artificial Sequence: Synthetic oligonucleotide
  Antisense strand to SEQ ID NO: 2120400
cacuugcagaaucuaauua

SEQ ID NO: 2120402 - RNA, 19 nt, Artificial Sequence
  Description of Artificial Sequence: Synthetic oligonucleotide
  Sense strand starting at position 893 of SEQ ID NO: 1882429
agauucugcaaguggcaaa

SEQ ID NO: 2120403 - RNA, 19 nt, Artificial Sequence
  Description of Artificial Sequence: Synthetic oligonucleotide
  Antisense strand to SEQ ID NO: 2120402
uuugccacuugcagaaucu

SEQ ID NO: 2120404 - RNA, 19 nt, Artificial Sequence
  Description of Artificial Sequence: Synthetic oligonucleotide
  Sense strand starting at position 936 of SEQ ID NO: 1882429
cugggauguguuuagauua

SEQ ID NO: 2120405 - RNA, 19 nt, Artificial Sequence
  Description of Artificial Sequence: Synthetic oligonucleotide
  Antisense strand to SEQ ID NO: 2120404
uaaucuaaacacaucccag

SEQ ID NO: 2120406 - RNA, 19 nt, Artificial Sequence
  Description of Artificial Sequence: Synthetic oligonucleotide
  Sense strand starting at position 1062 of SEQ ID NO: 1882429
uuggucucugggcaaauaa

SEQ ID NO: 2120407 - RNA, 19 nt, Artificial Sequence
  Description of Artificial Sequence: Synthetic oligonucleotide
  Antisense strand to SEQ ID NO: 2120406
uuauuugcccagagaccaa

SEQ ID NO: 2120408 - RNA, 19 nt, Artificial Sequence
  Description of Artificial Sequence: Synthetic oligonucleotide
  Sense strand starting at position 1094 of SEQ ID NO: 1882429
agucuagauuuccuuguuu

SEQ ID NO: 2120409 - RNA, 19 nt, Artificial Sequence
  Description of Artificial Sequence: Synthetic oligonucleotide
  Antisense strand to SEQ ID NO: 2120408
aaacaaggaaaucuagacu

SEQ ID NO: 2120410 - RNA, 19 nt, Artificial Sequence
  Description of Artificial Sequence: Synthetic oligonucleotide
  Sense strand starting at position 1147 of SEQ ID NO: 1882429
ccaugagcucaauaagcua

SEQ ID NO: 2120411 - RNA, 19 nt, Artificial Sequence
  Description of Artificial Sequence: Synthetic oligonucleotide
  Antisense strand to SEQ ID NO: 2120410
uagcuuauugagcucaugg

SEQ ID NO: 2120412 - RNA, 19 nt, Artificial Sequence
  Description of Artificial Sequence: Synthetic oligonucleotide
  Sense strand starting at position 1160 of SEQ ID NO: 1882429
aagcuacugucuguaaaga

SEQ ID NO: 2120413 - RNA, 19 nt, Artificial Sequence
  Description of Artificial Sequence: Synthetic oligonucleotide
  Antisense strand to SEQ ID NO: 2120412
ucuuuacagacaguagcuu

SEQ ID NO: 2120414 - RNA, 19 nt, Artificial Sequence
  Description of Artificial Sequence: Synthetic oligonucleotide
  Sense strand starting at position 1161 of SEQ ID NO: 1882429
agcuacugucuguaaagaa

SEQ ID NO: 2120415 - RNA, 19 nt, Artificial Sequence
  Description of Artificial Sequence: Synthetic oligonucleotide
  Antisense strand to SEQ ID NO: 2120414
uucuuuacagacaguagcu

SEQ ID NO: 2120416 - RNA, 19 nt, Artificial Sequence
  Description of Artificial Sequence: Synthetic oligonucleotide
  Sense strand starting at position 1253 of SEQ ID NO: 1882429
gagugaguauuugcugagu

SEQ ID NO: 2120417 - RNA, 19 nt, Artificial Sequence
  Description of Artificial Sequence: Synthetic oligonucleotide
  Antisense strand to SEQ ID NO: 2120416
acucagcaaauacucacuc

SEQ ID NO: 2120418 - RNA, 19 nt, Artificial Sequence
  Description of Artificial Sequence: Synthetic oligonucleotide
  Sense strand starting at position 1258 of SEQ ID NO: 1882429
aguauuugcugagucacua

SEQ ID NO: 2120419 - RNA, 19 nt, Artificial Sequence
  Description of Artificial Sequence: Synthetic oligonucleotide
  Antisense strand to SEQ ID NO: 2120418
uagugacucagcaaauacu

SEQ ID NO: 2120420 - RNA, 19 nt, Artificial Sequence
  Description of Artificial Sequence: Synthetic oligonucleotide
  Sense strand starting at position 1327 of SEQ ID NO: 1882429
gaagcaaacguauaccuau

SEQ ID NO: 2120421 - RNA, 19 nt, Artificial Sequence
  Description of Artificial Sequence: Synthetic oligonucleotide
  Antisense strand to SEQ ID NO: 2120420
auagguauacguuugcuuc

SEQ ID NO: 2120422 - RNA, 19 nt, Artificial Sequence
  Description of Artificial Sequence: Synthetic oligonucleotide
  Sense strand starting at position 1333 of SEQ ID NO: 1882429
aacguauaccuauggaaag

SEQ ID NO: 2120423 - RNA, 19 nt, Artificial Sequence
  Description of Artificial Sequence: Synthetic oligonucleotide
  Antisense strand to SEQ ID NO: 2120422
cuuuccauagguauacguu

SEQ ID NO: 2120424 - RNA, 19 nt, Artificial Sequence
  Description of Artificial Sequence: Synthetic oligonucleotide
  Sense strand starting at position 1384 of SEQ ID NO: 1882429
ugagucccacuccaugaau

SEQ ID NO: 2120425 - RNA, 19 nt, Artificial Sequence
  Description of Artificial Sequence: Synthetic oligonucleotide
  Antisense strand to SEQ ID NO: 2120424
auucauggagugggacuca

SEQ ID NO: 2120426 - RNA, 19 nt, Artificial Sequence
  Description of Artificial Sequence: Synthetic oligonucleotide
  Sense strand starting at position 1512 of SEQ ID NO: 1882429
aggugaagagcuugaccau

SEQ ID NO: 2120427 - RNA, 19 nt, Artificial Sequence
  Description of Artificial Sequence: Synthetic oligonucleotide
  Antisense strand to SEQ ID NO: 2120426
auggucaagcucuucaccu

SEQ ID NO: 2120428 - RNA, 19 nt, Artificial Sequence
  Description of Artificial Sequence: Synthetic oligonucleotide
  Sense strand starting at position 1572 of SEQ ID NO: 1882429
cuagacuggccaugaugua

SEQ ID NO: 2120429 - RNA, 19 nt, Artificial Sequence
  Description of Artificial Sequence: Synthetic oligonucleotide
  Antisense strand to SEQ ID NO: 2120428
uacaucauggccagucuag

SEQ ID NO: 2120430 - RNA, 19 nt, Artificial Sequence
  Description of Artificial Sequence: Synthetic oligonucleotide
  Sense strand starting at position 2137 of SEQ ID NO: 1882429
guaaguuguagggacaguu

SEQ ID NO: 2120431 - RNA, 19 nt, Artificial Sequence
  Description of Artificial Sequence: Synthetic oligonucleotide
  Antisense strand to SEQ ID NO: 2120430
aacugucccuacaacuuac

SEQ ID NO: 2120432 - RNA, 19 nt, Artificial Sequence
  Description of Artificial Sequence: Synthetic oligonucleotide
  Sense strand starting at position 2260 of SEQ ID NO: 1882429
agugacggauuauuccaaa

SEQ ID NO: 2120433 - RNA, 19 nt, Artificial Sequence
  Description of Artificial Sequence: Synthetic oligonucleotide
  Antisense strand to SEQ ID NO: 2120432
uuuggaauaauccgucacu

SEQ ID NO: 2120434 - RNA, 19 nt, Artificial Sequence
  Description of Artificial Sequence: Synthetic oligonucleotide
  Sense strand starting at position 2486 of SEQ ID NO: 1882429
gacugaugucagcaaucaa

SEQ ID NO: 2120435 - RNA, 19 nt, Artificial Sequence
  Description of Artificial Sequence: Synthetic oligonucleotide
  Antisense strand to SEQ ID NO: 2120434
uugauugcugacaucaguc

SEQ ID NO: 2120436 - RNA, 19 nt, Artificial Sequence
  Description of Artificial Sequence: Synthetic oligonucleotide
  Sense strand starting at position 2573 of SEQ ID NO: 1882429
cuggcaauccucuaggacu

SEQ ID NO: 2120437 - RNA, 19 nt, Artificial Sequence
  Description of Artificial Sequence: Synthetic oligonucleotide
  Antisense strand to SEQ ID NO: 2120436
aguccuagaggauugccag

SEQ ID NO: 2120438 - RNA, 19 nt, Artificial Sequence
  Description of Artificial Sequence: Synthetic oligonucleotide
  Sense strand starting at position 2641 of SEQ ID NO: 1882429
uuauuaccucaugggacaa

SEQ ID NO: 2120439 - RNA, 19 nt, Artificial Sequence
  Description of Artificial Sequence: Synthetic oligonucleotide
  Antisense strand to SEQ ID NO: 2120438
uugucccaugagguaauaa

SEQ ID NO: 2120440 - RNA, 19 nt, Artificial Sequence
  Description of Artificial Sequence: Synthetic oligonucleotide
  Sense strand starting at position 2660 of SEQ ID NO: 1882429
cuaagcauuagagguuagu

SEQ ID NO: 2120441 - RNA, 19 nt, Artificial Sequence
  Description of Artificial Sequence: Synthetic oligonucleotide
  Antisense strand to SEQ ID NO: 2120440
acuaaccucuaaugcuuag

SEQ ID NO: 2120442 - RNA, 19 nt, Artificial Sequence
  Description of Artificial Sequence: Synthetic oligonucleotide
  Sense strand starting at position 2663 of SEQ ID NO: 1882429
agcauuagagguuagucua

SEQ ID NO: 2120443 - RNA, 19 nt, Artificial Sequence
  Description of Artificial Sequence: Synthetic oligonucleotide
  Antisense strand to SEQ ID NO: 2120442
uagacuaaccucuaaugcu

SEQ ID NO: 2120444 - RNA, 19 nt, Artificial Sequence
  Description of Artificial Sequence: Synthetic oligonucleotide
  Sense strand starting at position 2666 of SEQ ID NO: 1882429
auuagagguuagucuaaac

SEQ ID NO: 2120445 - RNA, 19 nt, Artificial Sequence
  Description of Artificial Sequence: Synthetic oligonucleotide
  Antisense strand to SEQ ID NO: 2120444
guuuagacuaaccucuaau

SEQ ID NO: 2120446 - RNA, 19 nt, Artificial Sequence
  Description of Artificial Sequence: Synthetic oligonucleotide
  Sense strand starting at position 2720 of SEQ ID NO: 1882429
ccauuuauuguagguuugu

SEQ ID NO: 2120447 - RNA, 19 nt, Artificial Sequence
  Description of Artificial Sequence: Synthetic oligonucleotide
  Antisense strand to SEQ ID NO: 2120446
acaaaccuacaauaaaugg

SEQ ID NO: 2120448 - RNA, 19 nt, Artificial Sequence
  Description of Artificial Sequence: Synthetic oligonucleotide
  Sense strand starting at position 2739 of SEQ ID NO: 1882429
cuaucugugccagauacaa

SEQ ID NO: 2120449 - RNA, 19 nt, Artificial Sequence
  Description of Artificial Sequence: Synthetic oligonucleotide
  Antisense strand to SEQ ID NO: 2120448
uuguaucuggcacagauag

SEQ ID NO: 2120450 - RNA, 19 nt, Artificial Sequence
  Description of Artificial Sequence: Synthetic oligonucleotide
  Sense strand starting at position 2841 of SEQ ID NO: 1882429
uugaaauuugcuugcccau

SEQ ID NO: 2120451 - RNA, 19 nt, Artificial Sequence
  Description of Artificial Sequence: Synthetic oligonucleotide
  Antisense strand to SEQ ID NO: 2120450
augggcaagcaaauuucaa

SEQ ID NO: 2120452 - RNA, 19 nt, Artificial Sequence
  Description of Artificial Sequence: Synthetic oligonucleotide
  Sense strand starting at position 3430 of SEQ ID NO: 1882429
gggugauuagcauacuccu

SEQ ID NO: 2120453 - RNA, 19 nt, Artificial Sequence
  Description of Artificial Sequence: Synthetic oligonucleotide
  Antisense strand to SEQ ID NO: 2120452
aggaguaugcuaaucaccc

SEQ ID NO: 2120454 - RNA, 19 nt, Artificial Sequence
  Description of Artificial Sequence: Synthetic oligonucleotide
  Sense strand starting at position 3539 of SEQ ID NO: 1882429
gucacccuaguguauaaua

SEQ ID NO: 2120455 - RNA, 19 nt, Artificial Sequence
  Description of Artificial Sequence: Synthetic oligonucleotide
  Antisense strand to SEQ ID NO: 2120454
uauuauacacuagggugac

SEQ ID NO: 2120456 - RNA, 19 nt, Artificial Sequence
  Description of Artificial Sequence: Synthetic oligonucleotide
  Sense strand starting at position 3671 of SEQ ID NO: 1882429
cugucuaauucugugaaau

SEQ ID NO: 2120457 - RNA, 19 nt, Artificial Sequence
  Description of Artificial Sequence: Synthetic oligonucleotide
  Antisense strand to SEQ ID NO: 2120456
auuucacagaauuagacag

SEQ ID NO: 2120458 - RNA, 19 nt, Artificial Sequence
  Description of Artificial Sequence: Synthetic oligonucleotide
  Sense strand starting at position 3672 of SEQ ID NO: 1882429
ugucuaauucugugaaauc

SEQ ID NO: 2120459 - RNA, 19 nt, Artificial Sequence
  Description of Artificial Sequence: Synthetic oligonucleotide
  Antisense strand to SEQ ID NO: 2120458
gauuucacagaauuagaca

SEQ ID NO: 2120460 - RNA, 19 nt, Artificial Sequence
  Description of Artificial Sequence: Synthetic oligonucleotide
  Sense strand starting at position 3885 of SEQ ID NO: 1882429
auaauauuguuagcuagac

SEQ ID NO: 2120461 - RNA, 19 nt, Artificial Sequence
  Description of Artificial Sequence: Synthetic oligonucleotide
  Antisense strand to SEQ ID NO: 2120460
gucuagcuaacaauauuau

SEQ ID NO: 2120462 - RNA, 19 nt, Artificial Sequence
  Description of Artificial Sequence: Synthetic oligonucleotide
  Sense strand starting at position 3938 of SEQ ID NO: 1882429
uucugauaccuagguguaa

SEQ ID NO: 2120463 - RNA, 19 nt, Artificial Sequence
  Description of Artificial Sequence: Synthetic oligonucleotide
  Antisense strand to SEQ ID NO: 2120462
uuacaccuagguaucagaa

SEQ ID NO: 2120464 - RNA, 19 nt, Artificial Sequence
  Description of Artificial Sequence: Synthetic oligonucleotide
  Sense strand starting at position 3939 of SEQ ID NO: 1882429
ucugauaccuagguguaau

SEQ ID NO: 2120465 - RNA, 19 nt, Artificial Sequence
  Description of Artificial Sequence: Synthetic oligonucleotide
  Antisense strand to SEQ ID NO: 2120464
auuacaccuagguaucaga

SEQ ID NO: 2120466 - RNA, 19 nt, Artificial Sequence
  Description of Artificial Sequence: Synthetic oligonucleotide
  Sense strand starting at position 32 of SEQ ID NO: 1882430
cuugguuucugucucauuu

SEQ ID NO: 2120467 - RNA, 19 nt, Artificial Sequence
  Description of Artificial Sequence: Synthetic oligonucleotide
  Antisense strand to SEQ ID NO: 2120466
aaaugagacagaaaccaag

SEQ ID NO: 2120468 - RNA, 19 nt, Artificial Sequence
  Description of Artificial Sequence: Synthetic oligonucleotide
  Sense strand starting at position 356 of SEQ ID NO: 1882430
ggcaguguucugggaaagc

SEQ ID NO: 2120469 - RNA, 19 nt, Artificial Sequence
  Description of Artificial Sequence: Synthetic oligonucleotide
  Antisense strand to SEQ ID NO: 2120468
gcuuucccagaacacugcc

SEQ ID NO: 2120470 - RNA, 19 nt, Artificial Sequence
  Description of Artificial Sequence: Synthetic oligonucleotide
  Sense strand starting at position 606 of SEQ ID NO: 1882430
gguugcagcuuucucagau

SEQ ID NO: 2120471 - RNA, 19 nt, Artificial Sequence
  Description of Artificial Sequence: Synthetic oligonucleotide
  Antisense strand to SEQ ID NO: 2120470
aucugagaaagcugcaacc

SEQ ID NO: 2120472 - RNA, 19 nt, Artificial Sequence
  Description of Artificial Sequence: Synthetic oligonucleotide
  Sense strand starting at position 607 of SEQ ID NO: 1882430
guugcagcuuucucagauu

SEQ ID NO: 2120473 - RNA, 19 nt, Artificial Sequence
  Description of Artificial Sequence: Synthetic oligonucleotide
  Antisense strand to SEQ ID NO: 2120472
aaucugagaaagcugcaac

SEQ ID NO: 2120474 - RNA, 19 nt, Artificial Sequence
  Description of Artificial Sequence: Synthetic oligonucleotide
  Sense strand starting at position 774 of SEQ ID NO: 1882430
agucaugagcugcauacau

SEQ ID NO: 2120475 - RNA, 19 nt, Artificial Sequence
  Description of Artificial Sequence: Synthetic oligonucleotide
  Antisense strand to SEQ ID NO: 2120474
auguaugcagcucaugacu

SEQ ID NO: 2120476 - RNA, 19 nt, Artificial Sequence
  Description of Artificial Sequence: Synthetic oligonucleotide
  Sense strand starting at position 776 of SEQ ID NO: 1882430
ucaugagcugcauacauca

SEQ ID NO: 2120477 - RNA, 19 nt, Artificial Sequence
  Description of Artificial Sequence: Synthetic oligonucleotide
  Antisense strand to SEQ ID NO: 2120476
ugauguaugcagcucauga

SEQ ID NO: 2120478 - RNA, 19 nt, Artificial Sequence
  Description of Artificial Sequence: Synthetic oligonucleotide
  Sense strand starting at position 968 of SEQ ID NO: 1882430
ucaaguuccucaucuguga

SEQ ID NO: 2120479 - RNA, 19 nt, Artificial Sequence
  Description of Artificial Sequence: Synthetic oligonucleotide
  Antisense strand to SEQ ID NO: 2120478
ucacagaugaggaacuuga

SEQ ID NO: 2120480 - RNA, 19 nt, Artificial Sequence
  Description of Artificial Sequence: Synthetic oligonucleotide
  Sense strand starting at position 1000 of SEQ ID NO: 1882430
cuguuauaaucguucccag

SEQ ID NO: 2120481 - RNA, 19 nt, Artificial Sequence
  Description of Artificial Sequence: Synthetic oligonucleotide
  Antisense strand to SEQ ID NO: 2120480
cugggaacgauuauaacag

SEQ ID NO: 2120482 - RNA, 19 nt, Artificial Sequence
  Description of Artificial Sequence: Synthetic oligonucleotide
  Sense strand starting at position 1595 of SEQ ID NO: 1882430
cagauauacugacuagggu

SEQ ID NO: 2120483 - RNA, 19 nt, Artificial Sequence
  Description of Artificial Sequence: Synthetic oligonucleotide
  Antisense strand to SEQ ID NO: 2120482
acccuagucaguauaucug

SEQ ID NO: 2120484 - RNA, 19 nt, Artificial Sequence
  Description of Artificial Sequence: Synthetic oligonucleotide
  Sense strand starting at position 1604 of SEQ ID NO: 1882430
ugacuagggucuggaaacu

SEQ ID NO: 2120485 - RNA, 19 nt, Artificial Sequence
  Description of Artificial Sequence: Synthetic oligonucleotide
  Antisense strand to SEQ ID NO: 2120484
aguuuccagacccuaguca

SEQ ID NO: 2120486 - RNA, 19 nt, Artificial Sequence
  Description of Artificial Sequence: Synthetic oligonucleotide
  Sense strand starting at position 1623 of SEQ ID NO: 1882430
gggacccuucuggguuuaa

SEQ ID NO: 2120487 - RNA, 19 nt, Artificial Sequence
  Description of Artificial Sequence: Synthetic oligonucleotide
  Antisense strand to SEQ ID NO: 2120486
uuaaacccagaaggguccc

SEQ ID NO: 2120488 - RNA, 19 nt, Artificial Sequence
  Description of Artificial Sequence: Synthetic oligonucleotide
  Sense strand starting at position 1632 of SEQ ID NO: 1882430
cuggguuuaagaggaauuc

SEQ ID NO: 2120489 - RNA, 19 nt, Artificial Sequence
  Description of Artificial Sequence: Synthetic oligonucleotide
  Antisense strand to SEQ ID NO: 2120488
gaauuccucuuaaacccag

SEQ ID NO: 2120490 - RNA, 19 nt, Artificial Sequence
  Description of Artificial Sequence: Synthetic oligonucleotide
  Sense strand starting at position 1732 of SEQ ID NO: 1882430
agcagagacucagaggauu

SEQ ID NO: 2120491 - RNA, 19 nt, Artificial Sequence
  Description of Artificial Sequence: Synthetic oligonucleotide
  Antisense strand to SEQ ID NO: 2120490
aauccucugagucucugcu

SEQ ID NO: 2120492 - RNA, 19 nt, Artificial Sequence
  Description of Artificial Sequence: Synthetic oligonucleotide
  Sense strand starting at position 1998 of SEQ ID NO: 1882430
cagcauuguuaggagagga

SEQ ID NO: 2120493 - RNA, 19 nt, Artificial Sequence
  Description of Artificial Sequence: Synthetic oligonucleotide
  Antisense strand to SEQ ID NO: 2120492
uccucuccuaacaaugcug

SEQ ID NO: 2120494 - RNA, 19 nt, Artificial Sequence
  Description of Artificial Sequence: Synthetic oligonucleotide
  Sense strand starting at position 2080 of SEQ ID NO: 1882430
gccauaaucugccucagcu

SEQ ID NO: 2120495 - RNA, 19 nt, Artificial Sequence
  Description of Artificial Sequence: Synthetic oligonucleotide
  Antisense strand to SEQ ID NO: 2120494
agcugaggcagauuauggc

SEQ ID NO: 2120496 - RNA, 19 nt, Artificial Sequence
  Description of Artificial Sequence: Synthetic oligonucleotide
  Sense strand starting at position 2147 of SEQ ID NO: 1882430
ucaggugucuuccuugauu

SEQ ID NO: 2120497 - RNA, 19 nt, Artificial Sequence
  Description of Artificial Sequence: Synthetic oligonucleotide
  Antisense strand to SEQ ID NO: 2120496
aaucaaggaagacaccuga

SEQ ID NO: 2120498 - RNA, 19 nt, Artificial Sequence
  Description of Artificial Sequence: Synthetic oligonucleotide
  Sense strand starting at position 2149 of SEQ ID NO: 1882430
aggugucuuccuugauuaa

SEQ ID NO: 2120499 - RNA, 19 nt, Artificial Sequence
  Description of Artificial Sequence: Synthetic oligonucleotide
  Antisense strand to SEQ ID NO: 2120498
uuaaucaaggaagacaccu

SEQ ID NO: 2120500 - RNA, 19 nt, Artificial Sequence
  Description of Artificial Sequence: Synthetic oligonucleotide
  Sense strand starting at position 2150 of SEQ ID NO: 1882430
ggugucuuccuugauuaac

SEQ ID NO: 2120501 - RNA, 19 nt, Artificial Sequence
  Description of Artificial Sequence: Synthetic oligonucleotide
  Antisense strand to SEQ ID NO: 2120500
guuaaucaaggaagacacc

SEQ ID NO: 2120502 - RNA, 19 nt, Artificial Sequence
  Description of Artificial Sequence: Synthetic oligonucleotide
  Sense strand starting at position 2204 of SEQ ID NO: 1882430
accucuugaucuuggcaua

SEQ ID NO: 2120503 - RNA, 19 nt, Artificial Sequence
  Description of Artificial Sequence: Synthetic oligonucleotide
  Antisense strand to SEQ ID NO: 2120502
uaugccaagaucaagaggu

SEQ ID NO: 2120504 - RNA, 19 nt, Artificial Sequence
  Description of Artificial Sequence: Synthetic oligonucleotide
  Sense strand starting at position 2205 of SEQ ID NO: 1882430
ccucuugaucuuggcauau

SEQ ID NO: 2120505 - RNA, 19 nt, Artificial Sequence
  Description of Artificial Sequence: Synthetic oligonucleotide
  Antisense strand to SEQ ID NO: 2120504
auaugccaagaucaagagg

SEQ ID NO: 2120506 - RNA, 19 nt, Artificial Sequence
  Description of Artificial Sequence: Synthetic oligonucleotide
  Sense strand starting at position 2207 of SEQ ID NO: 1882430
ucuugaucuuggcauaugu

SEQ ID NO: 2120507 - RNA, 19 nt, Artificial Sequence
  Description of Artificial Sequence: Synthetic oligonucleotide
  Antisense strand to SEQ ID NO: 2120506
acauaugccaagaucaaga

SEQ ID NO: 2120508 - RNA, 19 nt, Artificial Sequence
  Description of Artificial Sequence: Synthetic oligonucleotide
  Sense strand starting at position 2216 of SEQ ID NO: 1882430
uggcauaugucuguggaca

SEQ ID NO: 2120509 - RNA, 19 nt, Artificial Sequence
  Description of Artificial Sequence: Synthetic oligonucleotide
  Antisense strand to SEQ ID NO: 2120508
uguccacagacauaugcca

SEQ ID NO: 2120510 - RNA, 19 nt, Artificial Sequence
  Description of Artificial Sequence: Synthetic oligonucleotide
  Sense strand starting at position 2217 of SEQ ID NO: 1882430
ggcauaugucuguggacac

SEQ ID NO: 2120511 - RNA, 19 nt, Artificial Sequence
  Description of Artificial Sequence: Synthetic oligonucleotide
  Antisense strand to SEQ ID NO: 2120510
guguccacagacauaugcc

SEQ ID NO: 2120512 - RNA, 19 nt, Artificial Sequence
  Description of Artificial Sequence: Synthetic oligonucleotide
  Sense strand starting at position 2297 of SEQ ID NO: 1882430
ugguguucugcagcucuau

SEQ ID NO: 2120513 - RNA, 19 nt, Artificial Sequence
  Description of Artificial Sequence: Synthetic oligonucleotide
  Antisense strand to SEQ ID NO: 2120512
auagagcugcagaacacca

SEQ ID NO: 2120514 - RNA, 19 nt, Artificial Sequence
  Description of Artificial Sequence: Synthetic oligonucleotide
  Sense strand starting at position 2323 of SEQ ID NO: 1882430
gcugcuuggcugucugauu

SEQ ID NO: 2120515 - RNA, 19 nt, Artificial Sequence
  Description of Artificial Sequence: Synthetic oligonucleotide
  Antisense strand to SEQ ID NO: 2120514
aaucagacagccaagcagc

SEQ ID NO: 2120516 - RNA, 19 nt, Artificial Sequence
  Description of Artificial Sequence: Synthetic oligonucleotide
  Sense strand starting at position 2324 of SEQ ID NO: 1882430
cugcuuggcugucugauua

SEQ ID NO: 2120517 - RNA, 19 nt, Artificial Sequence
  Description of Artificial Sequence: Synthetic oligonucleotide
  Antisense strand to SEQ ID NO: 2120516
uaaucagacagccaagcag

SEQ ID NO: 2120518 - RNA, 19 nt, Artificial Sequence
  Description of Artificial Sequence: Synthetic oligonucleotide
  Sense strand starting at position 2328 of SEQ ID NO: 1882430
uuggcugucugauuaacaa

SEQ ID NO: 2120519 - RNA, 19 nt, Artificial Sequence
  Description of Artificial Sequence: Synthetic oligonucleotide
  Antisense strand to SEQ ID NO: 2120518
uuguuaaucagacagccaa

SEQ ID NO: 2120520 - RNA, 19 nt, Artificial Sequence
  Description of Artificial Sequence: Synthetic oligonucleotide
  Sense strand starting at position 2377 of SEQ ID NO: 1882430
cuacaugagcccuguggau

SEQ ID NO: 2120521 - RNA, 19 nt, Artificial Sequence
  Description of Artificial Sequence: Synthetic oligonucleotide
  Antisense strand to SEQ ID NO: 2120520
auccacagggcucauguag

SEQ ID NO: 2120522 - RNA, 19 nt, Artificial Sequence
  Description of Artificial Sequence: Synthetic oligonucleotide
  Sense strand starting at position 2383 of SEQ ID NO: 1882430
gagcccuguggauagauca

SEQ ID NO: 2120523 - RNA, 19 nt, Artificial Sequence
  Description of Artificial Sequence: Synthetic oligonucleotide
  Antisense strand to SEQ ID NO: 2120522
ugaucuauccacagggcuc

SEQ ID NO: 2120524 - RNA, 19 nt, Artificial Sequence
  Description of Artificial Sequence: Synthetic oligonucleotide
  Sense strand starting at position 2405 of SEQ ID NO: 1882430
acagaaaguuggugacaag

SEQ ID NO: 2120525 - RNA, 19 nt, Artificial Sequence
  Description of Artificial Sequence: Synthetic oligonucleotide
  Antisense strand to SEQ ID NO: 2120524
cuugucaccaacuuucugu

SEQ ID NO: 2120526 - RNA, 19 nt, Artificial Sequence
  Description of Artificial Sequence: Synthetic oligonucleotide
  Sense strand starting at position 2419 of SEQ ID NO: 1882430
acaaguuggugacaggaaa

SEQ ID NO: 2120527 - RNA, 19 nt, Artificial Sequence
  Description of Artificial Sequence: Synthetic oligonucleotide
  Antisense strand to SEQ ID NO: 2120526
uuuccugucaccaacuugu

SEQ ID NO: 2120528 - RNA, 19 nt, Artificial Sequence
  Description of Artificial Sequence: Synthetic oligonucleotide
  Sense strand starting at position 2435 of SEQ ID NO: 1882430
aaaggaggugugggcaaua

SEQ ID NO: 2120529 - RNA, 19 nt, Artificial Sequence
  Description of Artificial Sequence: Synthetic oligonucleotide
  Antisense strand to SEQ ID NO: 2120528
uauugcccacaccuccuuu

SEQ ID NO: 2120530 - RNA, 19 nt, Artificial Sequence
  Description of Artificial Sequence: Synthetic oligonucleotide
  Sense strand starting at position 2557 of SEQ ID NO: 1882430
guggcacugugauggagaa

SEQ ID NO: 2120531 - RNA, 19 nt, Artificial Sequence
  Description of Artificial Sequence: Synthetic oligonucleotide
  Antisense strand to SEQ ID NO: 2120530
uucuccaucacagugccac

SEQ ID NO: 2120532 - RNA, 19 nt, Artificial Sequence
  Description of Artificial Sequence: Synthetic oligonucleotide
  Sense strand starting at position 2830 of SEQ ID NO: 1882430
gugcaaacauagggugaaa

SEQ ID NO: 2120533 - RNA, 19 nt, Artificial Sequence
  Description of Artificial Sequence: Synthetic oligonucleotide
  Antisense strand to SEQ ID NO: 2120532
uuucacccuauguuugcac

SEQ ID NO: 2120534 - RNA, 19 nt, Artificial Sequence
  Description of Artificial Sequence: Synthetic oligonucleotide
  Sense strand starting at position 2849 of SEQ ID NO: 1882430
ugagaauaauuguacagug

SEQ ID NO: 2120535 - RNA, 19 nt, Artificial Sequence
  Description of Artificial Sequence: Synthetic oligonucleotide
  Antisense strand to SEQ ID NO: 2120534
cacuguacaauuauucuca

SEQ ID NO: 2120536 - RNA, 19 nt, Artificial Sequence
  Description of Artificial Sequence: Synthetic oligonucleotide
  Sense strand starting at position 2854 of SEQ ID NO: 1882430
auaauuguacagugaacau

SEQ ID NO: 2120537 - RNA, 19 nt, Artificial Sequence
  Description of Artificial Sequence: Synthetic oligonucleotide
  Antisense strand to SEQ ID NO: 2120536
auguucacuguacaauuau

SEQ ID NO: 2120538 - RNA, 19 nt, Artificial Sequence
  Description of Artificial Sequence: Synthetic oligonucleotide
  Sense strand starting at position 3061 of SEQ ID NO: 1882430
acaugaggcuuuguagaaa

SEQ ID NO: 2120539 - RNA, 19 nt, Artificial Sequence
  Description of Artificial Sequence: Synthetic oligonucleotide
  Antisense strand to SEQ ID NO: 2120538
uuucuacaaagccucaugu

SEQ ID NO: 2120540 - RNA, 19 nt, Artificial Sequence
  Description of Artificial Sequence: Synthetic oligonucleotide
  Sense strand starting at position 3301 of SEQ ID NO: 1882430
gcuuaacauugacuggagu

SEQ ID NO: 2120541 - RNA, 19 nt, Artificial Sequence
  Description of Artificial Sequence: Synthetic oligonucleotide
  Antisense strand to SEQ ID NO: 2120540
acuccagucaauguuaagc

SEQ ID NO: 2120542 - RNA, 19 nt, Artificial Sequence
  Description of Artificial Sequence: Synthetic oligonucleotide
  Sense strand starting at position 3302 of SEQ ID NO: 1882430
cuuaacauugacuggaguu

SEQ ID NO: 2120543 - RNA, 19 nt, Artificial Sequence
  Description of Artificial Sequence: Synthetic oligonucleotide
  Antisense strand to SEQ ID NO: 2120542
aacuccagucaauguuaag

SEQ ID NO: 2120544 - RNA, 19 nt, Artificial Sequence
  Description of Artificial Sequence: Synthetic oligonucleotide
  Sense strand starting at position 3968 of SEQ ID NO: 1882430
gcugguauuauaggcaaga

SEQ ID NO: 2120545 - RNA, 19 nt, Artificial Sequence
  Description of Artificial Sequence: Synthetic oligonucleotide
  Antisense strand to SEQ ID NO: 2120544
ucuugccuauaauaccagc

SEQ ID NO: 2120546 - RNA, 19 nt, Artificial Sequence
  Description of Artificial Sequence: Synthetic oligonucleotide
  Sense strand starting at position 70 of SEQ ID NO: 1882431
cagaauagguguucuuuau

SEQ ID NO: 2120547 - RNA, 19 nt, Artificial Sequence
  Description of Artificial Sequence: Synthetic oligonucleotide
  Antisense strand to SEQ ID NO: 2120546
auaaagaacaccuauucug

SEQ ID NO: 2120548 - RNA, 19 nt, Artificial Sequence
  Description of Artificial Sequence: Synthetic oligonucleotide
  Sense strand starting at position 79 of SEQ ID NO: 1882431
uguucuuuaugagguugga

SEQ ID NO: 2120549 - RNA, 19 nt, Artificial Sequence
  Description of Artificial Sequence: Synthetic oligonucleotide
  Antisense strand to SEQ ID NO: 2120548
uccaaccucauaaagaaca

SEQ ID NO: 2120550 - RNA, 19 nt, Artificial Sequence
  Description of Artificial Sequence: Synthetic oligonucleotide
  Sense strand starting at position 491 of SEQ ID NO: 1882431
ucuggucugugggaugaaa

SEQ ID NO: 2120551 - RNA, 19 nt, Artificial Sequence
  Description of Artificial Sequence: Synthetic oligonucleotide
  Antisense strand to SEQ ID NO: 2120550
uuucaucccacagaccaga

SEQ ID NO: 2120552 - RNA, 19 nt, Artificial Sequence
  Description of Artificial Sequence: Synthetic oligonucleotide
  Sense strand starting at position 493 of SEQ ID NO: 1882431
uggucugugggaugaaaga

SEQ ID NO: 2120553 - RNA, 19 nt, Artificial Sequence
  Description of Artificial Sequence: Synthetic oligonucleotide
  Antisense strand to SEQ ID NO: 2120552
ucuuucaucccacagacca

SEQ ID NO: 2120554 - RNA, 19 nt, Artificial Sequence
  Description of Artificial Sequence: Synthetic oligonucleotide
  Sense strand starting at position 557 of SEQ ID NO: 1882431
uagggagccuccuggagaa

SEQ ID NO: 2120555 - RNA, 19 nt, Artificial Sequence
  Description of Artificial Sequence: Synthetic oligonucleotide
  Antisense strand to SEQ ID NO: 2120554
uucuccaggaggcucccua

SEQ ID NO: 2120556 - RNA, 19 nt, Artificial Sequence
  Description of Artificial Sequence: Synthetic oligonucleotide
  Sense strand starting at position 584 of SEQ ID NO: 1882431
ggaccagaguccuaccuga

SEQ ID NO: 2120557 - RNA, 19 nt, Artificial Sequence
  Description of Artificial Sequence: Synthetic oligonucleotide
  Antisense strand to SEQ ID NO: 2120556
ucagguaggacucuggucc

SEQ ID NO: 2120558 - RNA, 19 nt, Artificial Sequence
  Description of Artificial Sequence: Synthetic oligonucleotide
  Sense strand starting at position 858 of SEQ ID NO: 1882431
gaggaaagcugacagaagu

SEQ ID NO: 2120559 - RNA, 19 nt, Artificial Sequence
  Description of Artificial Sequence: Synthetic oligonucleotide
  Antisense strand to SEQ ID NO: 2120558
acuucugucagcuuuccuc

SEQ ID NO: 2120560 - RNA, 19 nt, Artificial Sequence
  Description of Artificial Sequence: Synthetic oligonucleotide
  Sense strand starting at position 1230 of SEQ ID NO: 1882431
uugagagaugcgcagacau

SEQ ID NO: 2120561 - RNA, 19 nt, Artificial Sequence
  Description of Artificial Sequence: Synthetic oligonucleotide
  Antisense strand to SEQ ID NO: 2120560
augucugcgcaucucucaa

SEQ ID NO: 2120562 - RNA, 19 nt, Artificial Sequence
  Description of Artificial Sequence: Synthetic oligonucleotide
  Sense strand starting at position 1232 of SEQ ID NO: 1882431
gagagaugcgcagacauga

SEQ ID NO: 2120563 - RNA, 19 nt, Artificial Sequence
  Description of Artificial Sequence: Synthetic oligonucleotide
  Antisense strand to SEQ ID NO: 2120562
ucaugucugcgcaucucuc

SEQ ID NO: 2120564 - RNA, 19 nt, Artificial Sequence
  Description of Artificial Sequence: Synthetic oligonucleotide
  Sense strand starting at position 1408 of SEQ ID NO: 1882431
agaagcaacacgugaaaua

SEQ ID NO: 2120565 - RNA, 19 nt, Artificial Sequence
  Description of Artificial Sequence: Synthetic oligonucleotide
  Antisense strand to SEQ ID NO: 2120564
uauuucacguguugcuucu

SEQ ID NO: 2120566 - RNA, 19 nt, Artificial Sequence
  Description of Artificial Sequence: Synthetic oligonucleotide
  Sense strand starting at position 1468 of SEQ ID NO: 1882431
gggagacaguuauucucaa

SEQ ID NO: 2120567 - RNA, 19 nt, Artificial Sequence
  Description of Artificial Sequence: Synthetic oligonucleotide
  Antisense strand to SEQ ID NO: 2120566
uugagaauaacugucuccc

SEQ ID NO: 2120568 - RNA, 19 nt, Artificial Sequence
  Description of Artificial Sequence: Synthetic oligonucleotide
  Sense strand starting at position 1469 of SEQ ID NO: 1882431
ggagacaguuauucucaaa

SEQ ID NO: 2120569 - RNA, 19 nt, Artificial Sequence
  Description of Artificial Sequence: Synthetic oligonucleotide
  Antisense strand to SEQ ID NO: 2120568
uuugagaauaacugucucc

SEQ ID NO: 2120570 - RNA, 19 nt, Artificial Sequence
  Description of Artificial Sequence: Synthetic oligonucleotide
  Sense strand starting at position 1762 of SEQ ID NO: 1882431
ucaggaaucugggagaggu

SEQ ID NO: 2120571 - RNA, 19 nt, Artificial Sequence
  Description of Artificial Sequence: Synthetic oligonucleotide
  Antisense strand to SEQ ID NO: 2120570
accucucccagauuccuga

SEQ ID NO: 2120572 - RNA, 19 nt, Artificial Sequence
  Description of Artificial Sequence: Synthetic oligonucleotide
  Sense strand starting at position 1800 of SEQ ID NO: 1882431
cgggauuuguagaguugga

SEQ ID NO: 2120573 - RNA, 19 nt, Artificial Sequence
  Description of Artificial Sequence: Synthetic oligonucleotide
  Antisense strand to SEQ ID NO: 2120572
uccaacucuacaaaucccg

SEQ ID NO: 2120574 - RNA, 19 nt, Artificial Sequence
  Description of Artificial Sequence: Synthetic oligonucleotide
  Sense strand starting at position 1805 of SEQ ID NO: 1882431
uuuguagaguuggagcauu

SEQ ID NO: 2120575 - RNA, 19 nt, Artificial Sequence
  Description of Artificial Sequence: Synthetic oligonucleotide
  Antisense strand to SEQ ID NO: 2120574
aaugcuccaacucuacaaa

SEQ ID NO: 2120576 - RNA, 19 nt, Artificial Sequence
  Description of Artificial Sequence: Synthetic oligonucleotide
  Sense strand starting at position 1880 of SEQ ID NO: 1882431
gcggaaccaugaccagauu

SEQ ID NO: 2120577 - RNA, 19 nt, Artificial Sequence
  Description of Artificial Sequence: Synthetic oligonucleotide
  Antisense strand to SEQ ID NO: 2120576
aaucuggucaugguuccgc

SEQ ID NO: 2120578 - RNA, 19 nt, Artificial Sequence
  Description of Artificial Sequence: Synthetic oligonucleotide
  Sense strand starting at position 1985 of SEQ ID NO: 1882431
ucagcauguugucucugua

SEQ ID NO: 2120579 - RNA, 19 nt, Artificial Sequence
  Description of Artificial Sequence: Synthetic oligonucleotide
  Antisense strand to SEQ ID NO: 2120578
uacagagacaacaugcuga

SEQ ID NO: 2120580 - RNA, 19 nt, Artificial Sequence
  Description of Artificial Sequence: Synthetic oligonucleotide
  Sense strand starting at position 1988 of SEQ ID NO: 1882431
gcauguugucucuguaacu

SEQ ID NO: 2120581 - RNA, 19 nt, Artificial Sequence
  Description of Artificial Sequence: Synthetic oligonucleotide
  Antisense strand to SEQ ID NO: 2120580
aguuacagagacaacaugc

SEQ ID NO: 2120582 - RNA, 19 nt, Artificial Sequence
  Description of Artificial Sequence: Synthetic oligonucleotide
  Sense strand starting at position 2183 of SEQ ID NO: 1882431
gcguggaucuguuugagug

SEQ ID NO: 2120583 - RNA, 19 nt, Artificial Sequence
  Description of Artificial Sequence: Synthetic oligonucleotide
  Antisense strand to SEQ ID NO: 2120582
cacucaaacagauccacgc

SEQ ID NO: 2120584 - RNA, 19 nt, Artificial Sequence
  Description of Artificial Sequence: Synthetic oligonucleotide
  Sense strand starting at position 2184 of SEQ ID NO: 1882431
cguggaucuguuugagugu

SEQ ID NO: 2120585 - RNA, 19 nt, Artificial Sequence
  Description of Artificial Sequence: Synthetic oligonucleotide
  Antisense strand to SEQ ID NO: 2120584
acacucaaacagauccacg

SEQ ID NO: 2120586 - RNA, 19 nt, Artificial Sequence
  Description of Artificial Sequence: Synthetic oligonucleotide
  Sense strand starting at position 2187 of SEQ ID NO: 1882431
ggaucuguuugaguguaga

SEQ ID NO: 2120587 - RNA, 19 nt, Artificial Sequence
  Description of Artificial Sequence: Synthetic oligonucleotide
  Antisense strand to SEQ ID NO: 2120586
ucuacacucaaacagaucc

SEQ ID NO: 2120588 - RNA, 19 nt, Artificial Sequence
  Description of Artificial Sequence: Synthetic oligonucleotide
  Sense strand starting at position 2190 of SEQ ID NO: 1882431
ucuguuugaguguagaauc

SEQ ID NO: 2120589 - RNA, 19 nt, Artificial Sequence
  Description of Artificial Sequence: Synthetic oligonucleotide
  Antisense strand to SEQ ID NO: 2120588
gauucuacacucaaacaga

SEQ ID NO: 2120590 - RNA, 19 nt, Artificial Sequence
  Description of Artificial Sequence: Synthetic oligonucleotide
  Sense strand starting at position 2674 of SEQ ID NO: 1882431
ucuuuaugagguuauauca

SEQ ID NO: 2120591 - RNA, 19 nt, Artificial Sequence
  Description of Artificial Sequence: Synthetic oligonucleotide
  Antisense strand to SEQ ID NO: 2120590
ugauauaaccucauaaaga

SEQ ID NO: 2120592 - RNA, 19 nt, Artificial Sequence
  Description of Artificial Sequence: Synthetic oligonucleotide
  Sense strand starting at position 2830 of SEQ ID NO: 1882431
cagugagaagcugagcauu

SEQ ID NO: 2120593 - RNA, 19 nt, Artificial Sequence
  Description of Artificial Sequence: Synthetic oligonucleotide
  Antisense strand to SEQ ID NO: 2120592
aaugcucagcuucucacug

SEQ ID NO: 2120594 - RNA, 19 nt, Artificial Sequence
  Description of Artificial Sequence: Synthetic oligonucleotide
  Sense strand starting at position 2836 of SEQ ID NO: 1882431
gaagcugagcauugcuuua

SEQ ID NO: 2120595 - RNA, 19 nt, Artificial Sequence
  Description of Artificial Sequence: Synthetic oligonucleotide
  Antisense strand to SEQ ID NO: 2120594
uaaagcaaugcucagcuuc

SEQ ID NO: 2120596 - RNA, 19 nt, Artificial Sequence
  Description of Artificial Sequence: Synthetic oligonucleotide
  Sense strand starting at position 2838 of SEQ ID NO: 1882431
agcugagcauugcuuuaca

SEQ ID NO: 2120597 - RNA, 19 nt, Artificial Sequence
  Description of Artificial Sequence: Synthetic oligonucleotide
  Antisense strand to SEQ ID NO: 2120596
uguaaagcaaugcucagcu

SEQ ID NO: 2120598 - RNA, 19 nt, Artificial Sequence
  Description of Artificial Sequence: Synthetic oligonucleotide
  Sense strand starting at position 2873 of SEQ ID NO: 1882431
gucaggcuucgugggagau

SEQ ID NO: 2120599 - RNA, 19 nt, Artificial Sequence
  Description of Artificial Sequence: Synthetic oligonucleotide
  Antisense strand to SEQ ID NO: 2120598
aucucccacgaagccugac

SEQ ID NO: 2120600 - RNA, 19 nt, Artificial Sequence
  Description of Artificial Sequence: Synthetic oligonucleotide
  Sense strand starting at position 2883 of SEQ ID NO: 1882431
gugggagaugccuggguuu

SEQ ID NO: 2120601 - RNA, 19 nt, Artificial Sequence
  Description of Artificial Sequence: Synthetic oligonucleotide
  Antisense strand to SEQ ID NO: 2120600
aaacccaggcaucucccac

SEQ ID NO: 2120602 - RNA, 19 nt, Artificial Sequence
  Description of Artificial Sequence: Synthetic oligonucleotide
  Sense strand starting at position 2943 of SEQ ID NO: 1882431
uucguugaaguccaguaua

SEQ ID NO: 2120603 - RNA, 19 nt, Artificial Sequence
  Description of Artificial Sequence: Synthetic oligonucleotide
  Antisense strand to SEQ ID NO: 2120602
uauacuggacuucaacgaa

SEQ ID NO: 2120604 - RNA, 19 nt, Artificial Sequence
  Description of Artificial Sequence: Synthetic oligonucleotide
  Sense strand starting at position 2946 of SEQ ID NO: 1882431
guugaaguccaguauauga

SEQ ID NO: 2120605 - RNA, 19 nt, Artificial Sequence
  Description of Artificial Sequence: Synthetic oligonucleotide
  Antisense strand to SEQ ID NO: 2120604
ucauauacuggacuucaac

SEQ ID NO: 2120606 - RNA, 19 nt, Artificial Sequence
  Description of Artificial Sequence: Synthetic oligonucleotide
  Sense strand starting at position 2951 of SEQ ID NO: 1882431
aguccaguauaugaagaaa

SEQ ID NO: 2120607 - RNA, 19 nt, Artificial Sequence
  Description of Artificial Sequence: Synthetic oligonucleotide
  Antisense strand to SEQ ID NO: 2120606
uuucuucauauacuggacu

SEQ ID NO: 2120608 - RNA, 19 nt, Artificial Sequence
  Description of Artificial Sequence: Synthetic oligonucleotide
  Sense strand starting at position 3005 of SEQ ID NO: 1882431
ccucaaggacccugugaaa

SEQ ID NO: 2120609 - RNA, 19 nt, Artificial Sequence
  Description of Artificial Sequence: Synthetic oligonucleotide
  Antisense strand to SEQ ID NO: 2120608
uuucacaggguccuugagg

SEQ ID NO: 2120610 - RNA, 19 nt, Artificial Sequence
  Description of Artificial Sequence: Synthetic oligonucleotide
  Sense strand starting at position 3018 of SEQ ID NO: 1882431
gugaaaggguaucagggau

SEQ ID NO: 2120611 - RNA, 19 nt, Artificial Sequence
  Description of Artificial Sequence: Synthetic oligonucleotide
  Antisense strand to SEQ ID NO: 2120610
aucccugauacccuuucac

SEQ ID NO: 2120612 - RNA, 19 nt, Artificial Sequence
  Description of Artificial Sequence: Synthetic oligonucleotide
  Sense strand starting at position 3043 of SEQ ID NO: 1882431
ggguucuuguugguccaca

SEQ ID NO: 2120613 - RNA, 19 nt, Artificial Sequence
  Description of Artificial Sequence: Synthetic oligonucleotide
  Antisense strand to SEQ ID NO: 2120612
uguggaccaacaagaaccc

SEQ ID NO: 2120614 - RNA, 19 nt, Artificial Sequence
  Description of Artificial Sequence: Synthetic oligonucleotide
  Sense strand starting at position 3060 of SEQ ID NO: 1882431
cagacugcugcugaggaua

SEQ ID NO: 2120615 - RNA, 19 nt, Artificial Sequence
  Description of Artificial Sequence: Synthetic oligonucleotide
  Antisense strand to SEQ ID NO: 2120614
uauccucagcagcagucug

SEQ ID NO: 2120616 - RNA, 19 nt, Artificial Sequence
  Description of Artificial Sequence: Synthetic oligonucleotide
  Sense strand starting at position 3062 of SEQ ID NO: 1882431
gacugcugcugaggauaaa

SEQ ID NO: 2120617 - RNA, 19 nt, Artificial Sequence
  Description of Artificial Sequence: Synthetic oligonucleotide
  Antisense strand to SEQ ID NO: 2120616
uuuauccucagcagcaguc

SEQ ID NO: 2120618 - RNA, 19 nt, Artificial Sequence
  Description of Artificial Sequence: Synthetic oligonucleotide
  Sense strand starting at position 3164 of SEQ ID NO: 1882431
ggagacucuuucuuccuuu

SEQ ID NO: 2120619 - RNA, 19 nt, Artificial Sequence
  Description of Artificial Sequence: Synthetic oligonucleotide
  Antisense strand to SEQ ID NO: 2120618
aaaggaagaaagagucucc

SEQ ID NO: 2120620 - RNA, 19 nt, Artificial Sequence
  Description of Artificial Sequence: Synthetic oligonucleotide
  Sense strand starting at position 3278 of SEQ ID NO: 1882431
cgggcagacugcgaugaaa

SEQ ID NO: 2120621 - RNA, 19 nt, Artificial Sequence
  Description of Artificial Sequence: Synthetic oligonucleotide
  Antisense strand to SEQ ID NO: 2120620
uuucaucgcagucugcccg

SEQ ID NO: 2120622 - RNA, 19 nt, Artificial Sequence
  Description of Artificial Sequence: Synthetic oligonucleotide
  Sense strand starting at position 3556 of SEQ ID NO: 1882431
aaccgugaguccucaguuu

SEQ ID NO: 2120623 - RNA, 19 nt, Artificial Sequence
  Description of Artificial Sequence: Synthetic oligonucleotide
  Antisense strand to SEQ ID NO: 2120622
aaacugaggacucacgguu

SEQ ID NO: 2120624 - RNA, 19 nt, Artificial Sequence
  Description of Artificial Sequence: Synthetic oligonucleotide
  Sense strand starting at position 3791 of SEQ ID NO: 1882431
ggcccauuagcucacaaau

SEQ ID NO: 2120625 - RNA, 19 nt, Artificial Sequence
  Description of Artificial Sequence: Synthetic oligonucleotide
  Antisense strand to SEQ ID NO: 2120624
auuugugagcuaaugggcc

SEQ ID NO: 2120626 - RNA, 19 nt, Artificial Sequence
  Description of Artificial Sequence: Synthetic oligonucleotide
  Sense strand starting at position 308 of SEQ ID NO: 1882432
acagucuucuauuucguga

SEQ ID NO: 2120627 - RNA, 19 nt, Artificial Sequence
  Description of Artificial Sequence: Synthetic oligonucleotide
  Antisense strand to SEQ ID NO: 2120626
ucacgaaauagaagacugu

SEQ ID NO: 2120628 - RNA, 19 nt, Artificial Sequence
  Description of Artificial Sequence: Synthetic oligonucleotide
  Sense strand starting at position 311 of SEQ ID NO: 1882432
gucuucuauuucgugauga

SEQ ID NO: 2120629 - RNA, 19 nt, Artificial Sequence
  Description of Artificial Sequence: Synthetic oligonucleotide
  Antisense strand to SEQ ID NO: 2120628
ucaucacgaaauagaagac

SEQ ID NO: 2120630 - RNA, 19 nt, Artificial Sequence
  Description of Artificial Sequence: Synthetic oligonucleotide
  Sense strand starting at position 358 of SEQ ID NO: 1882432
gcugaaauacagugaagua

SEQ ID NO: 2120631 - RNA, 19 nt, Artificial Sequence
  Description of Artificial Sequence: Synthetic oligonucleotide
  Antisense strand to SEQ ID NO: 2120630
uacuucacuguauuucagc

SEQ ID NO: 2120632 - RNA, 19 nt, Artificial Sequence
  Description of Artificial Sequence: Synthetic oligonucleotide
  Sense strand starting at position 367 of SEQ ID NO: 1882432
cagugaaguaucuggagga

SEQ ID NO: 2120633 - RNA, 19 nt, Artificial Sequence
  Description of Artificial Sequence: Synthetic oligonucleotide
  Antisense strand to SEQ ID NO: 2120632
uccuccagauacuucacug

SEQ ID NO: 2120634 - RNA, 19 nt, Artificial Sequence
  Description of Artificial Sequence: Synthetic oligonucleotide
  Sense strand starting at position 633 of SEQ ID NO: 1882432
auagguaaagccuggaaau

SEQ ID NO: 2120635 - RNA, 19 nt, Artificial Sequence
  Description of Artificial Sequence: Synthetic oligonucleotide
  Antisense strand to SEQ ID NO: 2120634
auuuccaggcuuuaccuau

SEQ ID NO: 2120636 - RNA, 19 nt, Artificial Sequence
  Description of Artificial Sequence: Synthetic oligonucleotide
  Sense strand starting at position 634 of SEQ ID NO: 1882432
uagguaaagccuggaaauu

SEQ ID NO: 2120637 - RNA, 19 nt, Artificial Sequence
  Description of Artificial Sequence: Synthetic oligonucleotide
  Antisense strand to SEQ ID NO: 2120636
aauuuccaggcuuuaccua

SEQ ID NO: 2120638 - RNA, 19 nt, Artificial Sequence
  Description of Artificial Sequence: Synthetic oligonucleotide
  Sense strand starting at position 693 of SEQ ID NO: 1882432
gaguuuaucccucauggau

SEQ ID NO: 2120639 - RNA, 19 nt, Artificial Sequence
  Description of Artificial Sequence: Synthetic oligonucleotide
  Antisense strand to SEQ ID NO: 2120638
auccaugagggauaaacuc

SEQ ID NO: 2120640 - RNA, 19 nt, Artificial Sequence
  Description of Artificial Sequence: Synthetic oligonucleotide
  Sense strand starting at position 714 of SEQ ID NO: 1882432
uuugguaaggucuagagau

SEQ ID NO: 2120641 - RNA, 19 nt, Artificial Sequence
  Description of Artificial Sequence: Synthetic oligonucleotide
  Antisense strand to SEQ ID NO: 2120640
aucucuagaccuuaccaaa

SEQ ID NO: 2120642 - RNA, 19 nt, Artificial Sequence
  Description of Artificial Sequence: Synthetic oligonucleotide
  Sense strand starting at position 810 of SEQ ID NO: 1882432
uccuaugaugugcagaaca

SEQ ID NO: 2120643 - RNA, 19 nt, Artificial Sequence
  Description of Artificial Sequence: Synthetic oligonucleotide
  Antisense strand to SEQ ID NO: 2120642
uguucugcacaucauagga

SEQ ID NO: 2120644 - RNA, 19 nt, Artificial Sequence
  Description of Artificial Sequence: Synthetic oligonucleotide
  Sense strand starting at position 881 of SEQ ID NO: 1882432
ggaauccugcuuuaagguu

SEQ ID NO: 2120645 - RNA, 19 nt, Artificial Sequence
  Description of Artificial Sequence: Synthetic oligonucleotide
  Antisense strand to SEQ ID NO: 2120644
aaccuuaaagcaggauucc

SEQ ID NO: 2120646 - RNA, 19 nt, Artificial Sequence
  Description of Artificial Sequence: Synthetic oligonucleotide
  Sense strand starting at position 940 of SEQ ID NO: 1882432
gcaaacaaucacuggagau

SEQ ID NO: 2120647 - RNA, 19 nt, Artificial Sequence
  Description of Artificial Sequence: Synthetic oligonucleotide
  Antisense strand to SEQ ID NO: 2120646
aucuccagugauuguuugc

SEQ ID NO: 2120648 - RNA, 19 nt, Artificial Sequence
  Description of Artificial Sequence: Synthetic oligonucleotide
  Sense strand starting at position 1012 of SEQ ID NO: 1882432
gcaguaucuaguggaggaa

SEQ ID NO: 2120649 - RNA, 19 nt, Artificial Sequence
  Description of Artificial Sequence: Synthetic oligonucleotide
  Antisense strand to SEQ ID NO: 2120648
uuccuccacuagauacugc

SEQ ID NO: 2120650 - RNA, 19 nt, Artificial Sequence
  Description of Artificial Sequence: Synthetic oligonucleotide
  Sense strand starting at position 1015 of SEQ ID NO: 1882432
guaucuaguggaggaauga

SEQ ID NO: 2120651 - RNA, 19 nt, Artificial Sequence
  Description of Artificial Sequence: Synthetic oligonucleotide
  Antisense strand to SEQ ID NO: 2120650
ucauuccuccacuagauac

SEQ ID NO: 2120652 - RNA, 19 nt, Artificial Sequence
  Description of Artificial Sequence: Synthetic oligonucleotide
  Sense strand starting at position 1073 of SEQ ID NO: 1882432
caaagugccugaguggaaa

SEQ ID NO: 2120653 - RNA, 19 nt, Artificial Sequence
  Description of Artificial Sequence: Synthetic oligonucleotide
  Antisense strand to SEQ ID NO: 2120652
uuuccacucaggcacuuug

SEQ ID NO: 2120654 - RNA, 19 nt, Artificial Sequence
  Description of Artificial Sequence: Synthetic oligonucleotide
  Sense strand starting at position 1337 of SEQ ID NO: 1882432
gacuuuguucuuuauugag

SEQ ID NO: 2120655 - RNA, 19 nt, Artificial Sequence
  Description of Artificial Sequence: Synthetic oligonucleotide
  Antisense strand to SEQ ID NO: 2120654
cucaauaaagaacaaaguc

SEQ ID NO: 2120656 - RNA, 19 nt, Artificial Sequence
  Description of Artificial Sequence: Synthetic oligonucleotide
  Sense strand starting at position 1629 of SEQ ID NO: 1882432
caggaacuaucgucuccaa

SEQ ID NO: 2120657 - RNA, 19 nt, Artificial Sequence
  Description of Artificial Sequence: Synthetic oligonucleotide
  Antisense strand to SEQ ID NO: 2120656
uuggagacgauaguuccug

SEQ ID NO: 2120658 - RNA, 19 nt, Artificial Sequence
  Description of Artificial Sequence: Synthetic oligonucleotide
  Sense strand starting at position 1706 of SEQ ID NO: 1882432
gaaggaguccaaugagcau

SEQ ID NO: 2120659 - RNA, 19 nt, Artificial Sequence
  Description of Artificial Sequence: Synthetic oligonucleotide
  Antisense strand to SEQ ID NO: 2120658
augcucauuggacuccuuc

SEQ ID NO: 2120660 - RNA, 19 nt, Artificial Sequence
  Description of Artificial Sequence: Synthetic oligonucleotide
  Sense strand starting at position 1883 of SEQ ID NO: 1882432
cagcaauguggaugauaaa

SEQ ID NO: 2120661 - RNA, 19 nt, Artificial Sequence
  Description of Artificial Sequence: Synthetic oligonucleotide
  Antisense strand to SEQ ID NO: 2120660
uuuaucauccacauugcug

SEQ ID NO: 2120662 - RNA, 19 nt, Artificial Sequence
  Description of Artificial Sequence: Synthetic oligonucleotide
  Sense strand starting at position 1909 of SEQ ID NO: 1882432
ggaacacuacauuggcaaa

SEQ ID NO: 2120663 - RNA, 19 nt, Artificial Sequence
  Description of Artificial Sequence: Synthetic oligonucleotide
  Antisense strand to SEQ ID NO: 2120662
uuugccaauguaguguucc

SEQ ID NO: 2120664 - RNA, 19 nt, Artificial Sequence
  Description of Artificial Sequence: Synthetic oligonucleotide
  Sense strand starting at position 2075 of SEQ ID NO: 1882432
cacaauacccgggagcaau

SEQ ID NO: 2120665 - RNA, 19 nt, Artificial Sequence
  Description of Artificial Sequence: Synthetic oligonucleotide
  Antisense strand to SEQ ID NO: 2120664
auugcucccggguauugug

SEQ ID NO: 2120666 - RNA, 19 nt, Artificial Sequence
  Description of Artificial Sequence: Synthetic oligonucleotide
  Sense strand starting at position 2085 of SEQ ID NO: 1882432
gggagcaauuuguuuguuu

SEQ ID NO: 2120667 - RNA, 19 nt, Artificial Sequence
  Description of Artificial Sequence: Synthetic oligonucleotide
  Antisense strand to SEQ ID NO: 2120666
aaacaaacaaauugcuccc

SEQ ID NO: 2120668 - RNA, 19 nt, Artificial Sequence
  Description of Artificial Sequence: Synthetic oligonucleotide
  Sense strand starting at position 2086 of SEQ ID NO: 1882432
ggagcaauuuguuuguuug

SEQ ID NO: 2120669 - RNA, 19 nt, Artificial Sequence
  Description of Artificial Sequence: Synthetic oligonucleotide
  Antisense strand to SEQ ID NO: 2120668
caaacaaacaaauugcucc

SEQ ID NO: 2120670 - RNA, 19 nt, Artificial Sequence
  Description of Artificial Sequence: Synthetic oligonucleotide
  Sense strand starting at position 2087 of SEQ ID NO: 1882432
gagcaauuuguuuguuugu

SEQ ID NO: 2120671 - RNA, 19 nt, Artificial Sequence
  Description of Artificial Sequence: Synthetic oligonucleotide
  Antisense strand to SEQ ID NO: 2120670
acaaacaaacaaauugcuc

SEQ ID NO: 2120672 - RNA, 19 nt, Artificial Sequence
  Description of Artificial Sequence: Synthetic oligonucleotide
  Sense strand starting at position 2819 of SEQ ID NO: 1882432
gugcuuacuguggaucaga

SEQ ID NO: 2120673 - RNA, 19 nt, Artificial Sequence
  Description of Artificial Sequence: Synthetic oligonucleotide
  Antisense strand to SEQ ID NO: 2120672
ucugauccacaguaagcac

SEQ ID NO: 2120674 - RNA, 19 nt, Artificial Sequence
  Description of Artificial Sequence: Synthetic oligonucleotide
  Sense strand starting at position 2917 of SEQ ID NO: 1882432
cagcuauuaguacaaggua

SEQ ID NO: 2120675 - RNA, 19 nt, Artificial Sequence
  Description of Artificial Sequence: Synthetic oligonucleotide
  Antisense strand to SEQ ID NO: 2120674
uaccuuguacuaauagcug

SEQ ID NO: 2120676 - RNA, 19 nt, Artificial Sequence
  Description of Artificial Sequence: Synthetic oligonucleotide
  Sense strand starting at position 2920 of SEQ ID NO: 1882432
cuauuaguacaagguaaac

SEQ ID NO: 2120677 - RNA, 19 nt, Artificial Sequence
  Description of Artificial Sequence: Synthetic oligonucleotide
  Antisense strand to SEQ ID NO: 2120676
guuuaccuuguacuaauag

SEQ ID NO: 2120678 - RNA, 19 nt, Artificial Sequence
  Description of Artificial Sequence: Synthetic oligonucleotide
  Sense strand starting at position 2931 of SEQ ID NO: 1882432
agguaaacccucuguuaaa

SEQ ID NO: 2120679 - RNA, 19 nt, Artificial Sequence
  Description of Artificial Sequence: Synthetic oligonucleotide
  Antisense strand to SEQ ID NO: 2120678
uuuaacagaggguuuaccu

SEQ ID NO: 2120680 - RNA, 19 nt, Artificial Sequence
  Description of Artificial Sequence: Synthetic oligonucleotide
  Sense strand starting at position 2963 of SEQ ID NO: 1882432
ucuccaguccagugggaaa

SEQ ID NO: 2120681 - RNA, 19 nt, Artificial Sequence
  Description of Artificial Sequence: Synthetic oligonucleotide
  Antisense strand to SEQ ID NO: 2120680
uuucccacuggacuggaga

SEQ ID NO: 2120682 - RNA, 19 nt, Artificial Sequence
  Description of Artificial Sequence: Synthetic oligonucleotide
  Sense strand starting at position 3034 of SEQ ID NO: 1882432
agcucuggccuuuaagaaa

SEQ ID NO: 2120683 - RNA, 19 nt, Artificial Sequence
  Description of Artificial Sequence: Synthetic oligonucleotide
  Antisense strand to SEQ ID NO: 2120682
uuucuuaaaggccagagcu

SEQ ID NO: 2120684 - RNA, 19 nt, Artificial Sequence
  Description of Artificial Sequence: Synthetic oligonucleotide
  Sense strand starting at position 3078 of SEQ ID NO: 1882432
ggauaagccacguagcaaa

SEQ ID NO: 2120685 - RNA, 19 nt, Artificial Sequence
  Description of Artificial Sequence: Synthetic oligonucleotide
  Antisense strand to SEQ ID NO: 2120684
uuugcuacguggcuuaucc

SEQ ID NO: 2120686 - RNA, 19 nt, Artificial Sequence
  Description of Artificial Sequence: Synthetic oligonucleotide
  Sense strand starting at position 3090 of SEQ ID NO: 1882432
uagcaaagugcagagugau

SEQ ID NO: 2120687 - RNA, 19 nt, Artificial Sequence
  Description of Artificial Sequence: Synthetic oligonucleotide
  Antisense strand to SEQ ID NO: 2120686
aucacucugcacuuugcua

SEQ ID NO: 2120688 - RNA, 19 nt, Artificial Sequence
  Description of Artificial Sequence: Synthetic oligonucleotide
  Sense strand starting at position 3093 of SEQ ID NO: 1882432
caaagugcagagugauaca

SEQ ID NO: 2120689 - RNA, 19 nt, Artificial Sequence
  Description of Artificial Sequence: Synthetic oligonucleotide
  Antisense strand to SEQ ID NO: 2120688
uguaucacucugcacuuug

SEQ ID NO: 2120690 - RNA, 19 nt, Artificial Sequence
  Description of Artificial Sequence: Synthetic oligonucleotide
  Sense strand starting at position 3098 of SEQ ID NO: 1882432
ugcagagugauacauguuu

SEQ ID NO: 2120691 - RNA, 19 nt, Artificial Sequence
  Description of Artificial Sequence: Synthetic oligonucleotide
  Antisense strand to SEQ ID NO: 2120690
aaacauguaucacucugca

SEQ ID NO: 2120692 - RNA, 19 nt, Artificial Sequence
  Description of Artificial Sequence: Synthetic oligonucleotide
  Sense strand starting at position 3357 of SEQ ID NO: 1882432
uugugauguggaggaugga

SEQ ID NO: 2120693 - RNA, 19 nt, Artificial Sequence
  Description of Artificial Sequence: Synthetic oligonucleotide
  Antisense strand to SEQ ID NO: 2120692
uccauccuccacaucacaa

SEQ ID NO: 2120694 - RNA, 19 nt, Artificial Sequence
  Description of Artificial Sequence: Synthetic oligonucleotide
  Sense strand starting at position 3419 of SEQ ID NO: 1882432
agauaagccauuggagcuu

SEQ ID NO: 2120695 - RNA, 19 nt, Artificial Sequence
  Description of Artificial Sequence: Synthetic oligonucleotide
  Antisense strand to SEQ ID NO: 2120694
aagcuccaauggcuuaucu

SEQ ID NO: 2120696 - RNA, 19 nt, Artificial Sequence
  Description of Artificial Sequence: Synthetic oligonucleotide
  Sense strand starting at position 3433 of SEQ ID NO: 1882432
agcuuugugaaugagcaga

SEQ ID NO: 2120697 - RNA, 19 nt, Artificial Sequence
  Description of Artificial Sequence: Synthetic oligonucleotide
  Antisense strand to SEQ ID NO: 2120696
ucugcucauucacaaagcu

SEQ ID NO: 2120698 - RNA, 19 nt, Artificial Sequence
  Description of Artificial Sequence: Synthetic oligonucleotide
  Sense strand starting at position 3609 of SEQ ID NO: 1882432
auuagaaaggcaggucuua

SEQ ID NO: 2120699 - RNA, 19 nt, Artificial Sequence
  Description of Artificial Sequence: Synthetic oligonucleotide
  Antisense strand to SEQ ID NO: 2120698
uaagaccugccuuucuaau

SEQ ID NO: 2120700 - RNA, 19 nt, Artificial Sequence
  Description of Artificial Sequence: Synthetic oligonucleotide
  Sense strand starting at position 3664 of SEQ ID NO: 1882432
aguauuaaugucuacucaa

SEQ ID NO: 2120701 - RNA, 19 nt, Artificial Sequence
  Description of Artificial Sequence: Synthetic oligonucleotide
  Antisense strand to SEQ ID NO: 2120700
uugaguagacauuaauacu

SEQ ID NO: 2120702 - RNA, 19 nt, Artificial Sequence
  Description of Artificial Sequence: Synthetic oligonucleotide
  Sense strand starting at position 3869 of SEQ ID NO: 1882432
uguuuauuccauggaugga

SEQ ID NO: 2120703 - RNA, 19 nt, Artificial Sequence
  Description of Artificial Sequence: Synthetic oligonucleotide
  Antisense strand to SEQ ID NO: 2120702
uccauccauggaauaaaca

SEQ ID NO: 2120704 - RNA, 19 nt, Artificial Sequence
  Description of Artificial Sequence: Synthetic oligonucleotide
  Sense strand starting at position 3909 of SEQ ID NO: 1882432
acaugauguuggcuuugaa

SEQ ID NO: 2120705 - RNA, 19 nt, Artificial Sequence
  Description of Artificial Sequence: Synthetic oligonucleotide
  Antisense strand to SEQ ID NO: 2120704
uucaaagccaacaucaugu

SEQ ID NO: 2120706 - RNA, 19 nt, Artificial Sequence
  Description of Artificial Sequence: Synthetic oligonucleotide
  Sense strand starting at position 832 of SEQ ID NO: 1882433
gaguaaucaucauccggau

SEQ ID NO: 2120707 - RNA, 19 nt, Artificial Sequence
  Description of Artificial Sequence: Synthetic oligonucleotide
  Antisense strand to SEQ ID NO: 2120706
auccggaugaugauuacuc

SEQ ID NO: 2120708 - RNA, 19 nt, Artificial Sequence
  Description of Artificial Sequence: Synthetic oligonucleotide
  Sense strand starting at position 836 of SEQ ID NO: 1882433
aaucaucauccggauugua

SEQ ID NO: 2120709 - RNA, 19 nt, Artificial Sequence
  Description of Artificial Sequence: Synthetic oligonucleotide
  Antisense strand to SEQ ID NO: 2120708
uacaauccggaugaugauu

SEQ ID NO: 2120710 - RNA, 19 nt, Artificial Sequence
  Description of Artificial Sequence: Synthetic oligonucleotide
  Sense strand starting at position 848 of SEQ ID NO: 1882433
gauuguauccuguagaaua

SEQ ID NO: 2120711 - RNA, 19 nt, Artificial Sequence
  Description of Artificial Sequence: Synthetic oligonucleotide
  Antisense strand to SEQ ID NO: 2120710
uauucuacaggauacaauc

SEQ ID NO: 2120712 - RNA, 19 nt, Artificial Sequence
  Description of Artificial Sequence: Synthetic oligonucleotide
  Sense strand starting at position 850 of SEQ ID NO: 1882433
uuguauccuguagaauaaa

SEQ ID NO: 2120713 - RNA, 19 nt, Artificial Sequence
  Description of Artificial Sequence: Synthetic oligonucleotide
  Antisense strand to SEQ ID NO: 2120712
uuuauucuacaggauacaa

SEQ ID NO: 2120714 - RNA, 19 nt, Artificial Sequence
  Description of Artificial Sequence: Synthetic oligonucleotide
  Sense strand starting at position 868 of SEQ ID NO: 1882433
agugaaaucugguuauagu

SEQ ID NO: 2120715 - RNA, 19 nt, Artificial Sequence
  Description of Artificial Sequence: Synthetic oligonucleotide
  Antisense strand to SEQ ID NO: 2120714
acuauaaccagauuucacu

SEQ ID NO: 2120716 - RNA, 19 nt, Artificial Sequence
  Description of Artificial Sequence: Synthetic oligonucleotide
  Sense strand starting at position 869 of SEQ ID NO: 1882433
gugaaaucugguuauaguu

SEQ ID NO: 2120717 - RNA, 19 nt, Artificial Sequence
  Description of Artificial Sequence: Synthetic oligonucleotide
  Antisense strand to SEQ ID NO: 2120716
aacuauaaccagauuucac

SEQ ID NO: 2120718 - RNA, 19 nt, Artificial Sequence
  Description of Artificial Sequence: Synthetic oligonucleotide
  Sense strand starting at position 894 of SEQ ID NO: 1882433
gguuaaacaagguauagcu

SEQ ID NO: 2120719 - RNA, 19 nt, Artificial Sequence
  Description of Artificial Sequence: Synthetic oligonucleotide
  Antisense strand to SEQ ID NO: 2120718
agcuauaccuuguuuaacc

SEQ ID NO: 2120720 - RNA, 19 nt, Artificial Sequence
  Description of Artificial Sequence: Synthetic oligonucleotide
  Sense strand starting at position 1028 of SEQ ID NO: 1882433
agugaugaugcugaagagu

SEQ ID NO: 2120721 - RNA, 19 nt, Artificial Sequence
  Description of Artificial Sequence: Synthetic oligonucleotide
  Antisense strand to SEQ ID NO: 2120720
acucuucagcaucaucacu

SEQ ID NO: 2120722 - RNA, 19 nt, Artificial Sequence
  Description of Artificial Sequence: Synthetic oligonucleotide
  Sense strand starting at position 1034 of SEQ ID NO: 1882433
gaugcugaagaguguagau

SEQ ID NO: 2120723 - RNA, 19 nt, Artificial Sequence
  Description of Artificial Sequence: Synthetic oligonucleotide
  Antisense strand to SEQ ID NO: 2120722
aucuacacucuucagcauc

SEQ ID NO: 2120724 - RNA, 19 nt, Artificial Sequence
  Description of Artificial Sequence: Synthetic oligonucleotide
  Sense strand starting at position 1156 of SEQ ID NO: 1882433
auuccaagaugucugcuaa

SEQ ID NO: 2120725 - RNA, 19 nt, Artificial Sequence
  Description of Artificial Sequence: Synthetic oligonucleotide
  Antisense strand to SEQ ID NO: 2120724
uuagcagacaucuuggaau

SEQ ID NO: 2120726 - RNA, 19 nt, Artificial Sequence
  Description of Artificial Sequence: Synthetic oligonucleotide
  Sense strand starting at position 1157 of SEQ ID NO: 1882433
uuccaagaugucugcuaaa

SEQ ID NO: 2120727 - RNA, 19 nt, Artificial Sequence
  Description of Artificial Sequence: Synthetic oligonucleotide
  Antisense strand to SEQ ID NO: 2120726
uuuagcagacaucuuggaa

SEQ ID NO: 2120728 - RNA, 19 nt, Artificial Sequence
  Description of Artificial Sequence: Synthetic oligonucleotide
  Sense strand starting at position 1208 of SEQ ID NO: 1882433
ggguuaggaucuguccuca

SEQ ID NO: 2120729 - RNA, 19 nt, Artificial Sequence
  Description of Artificial Sequence: Synthetic oligonucleotide
  Antisense strand to SEQ ID NO: 2120728
ugaggacagauccuaaccc

SEQ ID NO: 2120730 - RNA, 19 nt, Artificial Sequence
  Description of Artificial Sequence: Synthetic oligonucleotide
  Sense strand starting at position 1216 of SEQ ID NO: 1882433
aucuguccucaccaugauu

SEQ ID NO: 2120731 - RNA, 19 nt, Artificial Sequence
  Description of Artificial Sequence: Synthetic oligonucleotide
  Antisense strand to SEQ ID NO: 2120730
aaucauggugaggacagau

SEQ ID NO: 2120732 - RNA, 19 nt, Artificial Sequence
  Description of Artificial Sequence: Synthetic oligonucleotide
  Sense strand starting at position 1363 of SEQ ID NO: 1882433
agaacuuguugccuucuua

SEQ ID NO: 2120733 - RNA, 19 nt, Artificial Sequence
  Description of Artificial Sequence: Synthetic oligonucleotide
  Antisense strand to SEQ ID NO: 2120732
uaagaaggcaacaaguucu

SEQ ID NO: 2120734 - RNA, 19 nt, Artificial Sequence
  Description of Artificial Sequence: Synthetic oligonucleotide
  Sense strand starting at position 1475 of SEQ ID NO: 1882433
acuucucguuggucaauuu

SEQ ID NO: 2120735 - RNA, 19 nt, Artificial Sequence
  Description of Artificial Sequence: Synthetic oligonucleotide
  Antisense strand to SEQ ID NO: 2120734
aaauugaccaacgagaagu

SEQ ID NO: 2120736 - RNA, 19 nt, Artificial Sequence
  Description of Artificial Sequence: Synthetic oligonucleotide
  Sense strand starting at position 1605 of SEQ ID NO: 1882433
ggaggucuaagcugaggua

SEQ ID NO: 2120737 - RNA, 19 nt, Artificial Sequence
  Description of Artificial Sequence: Synthetic oligonucleotide
  Antisense strand to SEQ ID NO: 2120736
uaccucagcuuagaccucc

SEQ ID NO: 2120738 - RNA, 19 nt, Artificial Sequence
  Description of Artificial Sequence: Synthetic oligonucleotide
  Sense strand starting at position 1606 of SEQ ID NO: 1882433
gaggucuaagcugagguaa

SEQ ID NO: 2120739 - RNA, 19 nt, Artificial Sequence
  Description of Artificial Sequence: Synthetic oligonucleotide
  Antisense strand to SEQ ID NO: 2120738
uuaccucagcuuagaccuc

SEQ ID NO: 2120740 - RNA, 19 nt, Artificial Sequence
  Description of Artificial Sequence: Synthetic oligonucleotide
  Sense strand starting at position 1857 of SEQ ID NO: 1882433
uugguaaucucauuugcug

SEQ ID NO: 2120741 - RNA, 19 nt, Artificial Sequence
  Description of Artificial Sequence: Synthetic oligonucleotide
  Antisense strand to SEQ ID NO: 2120740
cagcaaaugagauuaccaa

SEQ ID NO: 2120742 - RNA, 19 nt, Artificial Sequence
  Description of Artificial Sequence: Synthetic oligonucleotide
  Sense strand starting at position 1884 of SEQ ID NO: 1882433
agcucagugcaauagacuu

SEQ ID NO: 2120743 - RNA, 19 nt, Artificial Sequence
  Description of Artificial Sequence: Synthetic oligonucleotide
  Antisense strand to SEQ ID NO: 2120742
aagucuauugcacugagcu

SEQ ID NO: 2120744 - RNA, 19 nt, Artificial Sequence
  Description of Artificial Sequence: Synthetic oligonucleotide
  Sense strand starting at position 2137 of SEQ ID NO: 1882433
cagguaagcugcuuuggaa

SEQ ID NO: 2120745 - RNA, 19 nt, Artificial Sequence
  Description of Artificial Sequence: Synthetic oligonucleotide
  Antisense strand to SEQ ID NO: 2120744
uuccaaagcagcuuaccug

SEQ ID NO: 2120746 - RNA, 19 nt, Artificial Sequence
  Description of Artificial Sequence: Synthetic oligonucleotide
  Sense strand starting at position 3020 of SEQ ID NO: 1882433
uacacaugccuuuggguua

SEQ ID NO: 2120747 - RNA, 19 nt, Artificial Sequence
  Description of Artificial Sequence: Synthetic oligonucleotide
  Antisense strand to SEQ ID NO: 2120746
uaacccaaaggcaugugua

SEQ ID NO: 2120748 - RNA, 19 nt, Artificial Sequence
  Description of Artificial Sequence: Synthetic oligonucleotide
  Sense strand starting at position 3023 of SEQ ID NO: 1882433
acaugccuuuggguuaaau

SEQ ID NO: 2120749 - RNA, 19 nt, Artificial Sequence
  Description of Artificial Sequence: Synthetic oligonucleotide
  Antisense strand to SEQ ID NO: 2120748
auuuaacccaaaggcaugu

SEQ ID NO: 2120750 - RNA, 19 nt, Artificial Sequence
  Description of Artificial Sequence: Synthetic oligonucleotide
  Sense strand starting at position 3025 of SEQ ID NO: 1882433
augccuuuggguuaaauca

SEQ ID NO: 2120751 - RNA, 19 nt, Artificial Sequence
  Description of Artificial Sequence: Synthetic oligonucleotide
  Antisense strand to SEQ ID NO: 2120750
ugauuuaacccaaaggcau

SEQ ID NO: 2120752 - RNA, 19 nt, Artificial Sequence
  Description of Artificial Sequence: Synthetic oligonucleotide
  Sense strand starting at position 3040 of SEQ ID NO: 1882433
aucacuagaaguggaguua

SEQ ID NO: 2120753 - RNA, 19 nt, Artificial Sequence
  Description of Artificial Sequence: Synthetic oligonucleotide
  Antisense strand to SEQ ID NO: 2120752
uaacuccacuucuagugau

SEQ ID NO: 2120754 - RNA, 19 nt, Artificial Sequence
  Description of Artificial Sequence: Synthetic oligonucleotide
  Sense strand starting at position 3049 of SEQ ID NO: 1882433
aguggaguuagcgaaucuu

SEQ ID NO: 2120755 - RNA, 19 nt, Artificial Sequence
  Description of Artificial Sequence: Synthetic oligonucleotide
  Antisense strand to SEQ ID NO: 2120754
aagauucgcuaacuccacu

SEQ ID NO: 2120756 - RNA, 19 nt, Artificial Sequence
  Description of Artificial Sequence: Synthetic oligonucleotide
  Sense strand starting at position 3088 of SEQ ID NO: 1882433
ugguguuguaucgaauuaa

SEQ ID NO: 2120757 - RNA, 19 nt, Artificial Sequence
  Description of Artificial Sequence: Synthetic oligonucleotide
  Antisense strand to SEQ ID NO: 2120756
uuaauucgauacaacacca

SEQ ID NO: 2120758 - RNA, 19 nt, Artificial Sequence
  Description of Artificial Sequence: Synthetic oligonucleotide
  Sense strand starting at position 3290 of SEQ ID NO: 1882433
gguccuggcacauguaaga

SEQ ID NO: 2120759 - RNA, 19 nt, Artificial Sequence
  Description of Artificial Sequence: Synthetic oligonucleotide
  Antisense strand to SEQ ID NO: 2120758
ucuuacaugugccaggacc

SEQ ID NO: 2120760 - RNA, 19 nt, Artificial Sequence
  Description of Artificial Sequence: Synthetic oligonucleotide
  Sense strand starting at position 3338 of SEQ ID NO: 1882433
ccaggcauuguaugaauga

SEQ ID NO: 2120761 - RNA, 19 nt, Artificial Sequence
  Description of Artificial Sequence: Synthetic oligonucleotide
  Antisense strand to SEQ ID NO: 2120760
ucauucauacaaugccugg

SEQ ID NO: 2120762 - RNA, 19 nt, Artificial Sequence
  Description of Artificial Sequence: Synthetic oligonucleotide
  Sense strand starting at position 3351 of SEQ ID NO: 1882433
gaaugaugcuaacugcaug

SEQ ID NO: 2120763 - RNA, 19 nt, Artificial Sequence
  Description of Artificial Sequence: Synthetic oligonucleotide
  Antisense strand to SEQ ID NO: 2120762
caugcaguuagcaucauuc

SEQ ID NO: 2120764 - RNA, 19 nt, Artificial Sequence
  Description of Artificial Sequence: Synthetic oligonucleotide
  Sense strand starting at position 3356 of SEQ ID NO: 1882433
augcuaacugcaugaucau

SEQ ID NO: 2120765 - RNA, 19 nt, Artificial Sequence
  Description of Artificial Sequence: Synthetic oligonucleotide
  Antisense strand to SEQ ID NO: 2120764
augaucaugcaguuagcau

SEQ ID NO: 2120766 - RNA, 19 nt, Artificial Sequence
  Description of Artificial Sequence: Synthetic oligonucleotide
  Sense strand starting at position 3357 of SEQ ID NO: 1882433
ugcuaacugcaugaucaua

SEQ ID NO: 2120767 - RNA, 19 nt, Artificial Sequence
  Description of Artificial Sequence: Synthetic oligonucleotide
  Antisense strand to SEQ ID NO: 2120766
uaugaucaugcaguuagca

SEQ ID NO: 2120768 - RNA, 19 nt, Artificial Sequence
  Description of Artificial Sequence: Synthetic oligonucleotide
  Sense strand starting at position 3406 of SEQ ID NO: 1882433
auacauuagcuguaauagu

SEQ ID NO: 2120769 - RNA, 19 nt, Artificial Sequence
  Description of Artificial Sequence: Synthetic oligonucleotide
  Antisense strand to SEQ ID NO: 2120768
acuauuacagcuaauguau

SEQ ID NO: 2120770 - RNA, 19 nt, Artificial Sequence
  Description of Artificial Sequence: Synthetic oligonucleotide
  Sense strand starting at position 3512 of SEQ ID NO: 1882433
uccguuuaugaugaggaca

SEQ ID NO: 2120771 - RNA, 19 nt, Artificial Sequence
  Description of Artificial Sequence: Synthetic oligonucleotide
  Antisense strand to SEQ ID NO: 2120770
uguccucaucauaaacgga

SEQ ID NO: 2120772 - RNA, 19 nt, Artificial Sequence
  Description of Artificial Sequence: Synthetic oligonucleotide
  Sense strand starting at position 3734 of SEQ ID NO: 1882433
gauguuaagcuguaucaau

SEQ ID NO: 2120773 - RNA, 19 nt, Artificial Sequence
  Description of Artificial Sequence: Synthetic oligonucleotide
  Antisense strand to SEQ ID NO: 2120772
auugauacagcuuaacauc

SEQ ID NO: 2120774 - RNA, 19 nt, Artificial Sequence
  Description of Artificial Sequence: Synthetic oligonucleotide
  Sense strand starting at position 3835 of SEQ ID NO: 1882433
ugaguaaucuguccagaau

SEQ ID NO: 2120775 - RNA, 19 nt, Artificial Sequence
  Description of Artificial Sequence: Synthetic oligonucleotide
  Antisense strand to SEQ ID NO: 2120774
auucuggacagauuacuca

SEQ ID NO: 2120776 - RNA, 19 nt, Artificial Sequence
  Description of Artificial Sequence: Synthetic oligonucleotide
  Sense strand starting at position 3836 of SEQ ID NO: 1882433
gaguaaucuguccagaauu

SEQ ID NO: 2120777 - RNA, 19 nt, Artificial Sequence
  Description of Artificial Sequence: Synthetic oligonucleotide
  Antisense strand to SEQ ID NO: 2120776
aauucuggacagauuacuc

SEQ ID NO: 2120778 - RNA, 19 nt, Artificial Sequence
  Description of Artificial Sequence: Synthetic oligonucleotide
  Sense strand starting at position 3838 of SEQ ID NO: 1882433
guaaucuguccagaauugu

SEQ ID NO: 2120779 - RNA, 19 nt, Artificial Sequence
  Description of Artificial Sequence: Synthetic oligonucleotide
  Antisense strand to SEQ ID NO: 2120778
acaauucuggacagauuac

SEQ ID NO: 2120780 - RNA, 19 nt, Artificial Sequence
  Description of Artificial Sequence: Synthetic oligonucleotide
  Sense strand starting at position 3911 of SEQ ID NO: 1882433
ggacucuaguuucuuguaa

SEQ ID NO: 2120781 - RNA, 19 nt, Artificial Sequence
  Description of Artificial Sequence: Synthetic oligonucleotide
  Antisense strand to SEQ ID NO: 2120780
uuacaagaaacuagagucc

SEQ ID NO: 2120782 - RNA, 19 nt, Artificial Sequence
  Description of Artificial Sequence: Synthetic oligonucleotide
  Sense strand starting at position 3938 of SEQ ID NO: 1882433
uuaguacuguucucuauaa

SEQ ID NO: 2120783 - RNA, 19 nt, Artificial Sequence
  Description of Artificial Sequence: Synthetic oligonucleotide
  Antisense strand to SEQ ID NO: 2120782
uuauagagaacaguacuaa

SEQ ID NO: 2120784 - RNA, 19 nt, Artificial Sequence
  Description of Artificial Sequence: Synthetic oligonucleotide
  Sense strand starting at position 3940 of SEQ ID NO: 1882433
aguacuguucucuauaauc

SEQ ID NO: 2120785 - RNA, 19 nt, Artificial Sequence
  Description of Artificial Sequence: Synthetic oligonucleotide
  Antisense strand to SEQ ID NO: 2120784
gauuauagagaacaguacu

SEQ ID NO: 2120786 - RNA, 19 nt, Artificial Sequence
  Description of Artificial Sequence: Synthetic oligonucleotide
  Sense strand starting at position 5 of SEQ ID NO: 1882434
gggccucauuugcucauaa

SEQ ID NO: 2120787 - RNA, 19 nt, Artificial Sequence
  Description of Artificial Sequence: Synthetic oligonucleotide
  Antisense strand to SEQ ID NO: 2120786
uuaugagcaaaugaggccc

SEQ ID NO: 2120788 - RNA, 19 nt, Artificial Sequence
  Description of Artificial Sequence: Synthetic oligonucleotide
  Sense strand starting at position 57 of SEQ ID NO: 1882434
guccuuagagauugucuag

SEQ ID NO: 2120789 - RNA, 19 nt, Artificial Sequence
  Description of Artificial Sequence: Synthetic oligonucleotide
  Antisense strand to SEQ ID NO: 2120788
cuagacaaucucuaaggac

SEQ ID NO: 2120790 - RNA, 19 nt, Artificial Sequence
  Description of Artificial Sequence: Synthetic oligonucleotide
  Sense strand starting at position 64 of SEQ ID NO: 1882434
gagauugucuaguccaaca

SEQ ID NO: 2120791 - RNA, 19 nt, Artificial Sequence
  Description of Artificial Sequence: Synthetic oligonucleotide
  Antisense strand to SEQ ID NO: 2120790
uguuggacuagacaaucuc

SEQ ID NO: 2120792 - RNA, 19 nt, Artificial Sequence
  Description of Artificial Sequence: Synthetic oligonucleotide
  Sense strand starting at position 66 of SEQ ID NO: 1882434
gauugucuaguccaacagu

SEQ ID NO: 2120793 - RNA, 19 nt, Artificial Sequence
  Description of Artificial Sequence: Synthetic oligonucleotide
  Antisense strand to SEQ ID NO: 2120792
acuguuggacuagacaauc

SEQ ID NO: 2120794 - RNA, 19 nt, Artificial Sequence
  Description of Artificial Sequence: Synthetic oligonucleotide
  Sense strand starting at position 69 of SEQ ID NO: 1882434
ugucuaguccaacagucua

SEQ ID NO: 2120795 - RNA, 19 nt, Artificial Sequence
  Description of Artificial Sequence: Synthetic oligonucleotide
  Antisense strand to SEQ ID NO: 2120794
uagacuguuggacuagaca

SEQ ID NO: 2120796 - RNA, 19 nt, Artificial Sequence
  Description of Artificial Sequence: Synthetic oligonucleotide
  Sense strand starting at position 119 of SEQ ID NO: 1882434
uugagagacuuguccaagu

SEQ ID NO: 2120797 - RNA, 19 nt, Artificial Sequence
  Description of Artificial Sequence: Synthetic oligonucleotide
  Antisense strand to SEQ ID NO: 2120796
acuuggacaagucucucaa

SEQ ID NO: 2120798 - RNA, 19 nt, Artificial Sequence
  Description of Artificial Sequence: Synthetic oligonucleotide
  Sense strand starting at position 248 of SEQ ID NO: 1882434
cugaguaagcuuuaaugac

SEQ ID NO: 2120799 - RNA, 19 nt, Artificial Sequence
  Description of Artificial Sequence: Synthetic oligonucleotide
  Antisense strand to SEQ ID NO: 2120798
gucauuaaagcuuacucag

SEQ ID NO: 2120800 - RNA, 19 nt, Artificial Sequence
  Description of Artificial Sequence: Synthetic oligonucleotide
  Sense strand starting at position 289 of SEQ ID NO: 1882434
ggugaaaucaaaugguuuc

SEQ ID NO: 2120801 - RNA, 19 nt, Artificial Sequence
  Description of Artificial Sequence: Synthetic oligonucleotide
  Antisense strand to SEQ ID NO: 2120800
gaaaccauuugauuucacc

SEQ ID NO: 2120802 - RNA, 19 nt, Artificial Sequence
  Description of Artificial Sequence: Synthetic oligonucleotide
  Sense strand starting at position 333 of SEQ ID NO: 1882434
guguuuccucaacagacuu

SEQ ID NO: 2120803 - RNA, 19 nt, Artificial Sequence
  Description of Artificial Sequence: Synthetic oligonucleotide
  Antisense strand to SEQ ID NO: 2120802
aagucuguugaggaaacac

SEQ ID NO: 2120804 - RNA, 19 nt, Artificial Sequence
  Description of Artificial Sequence: Synthetic oligonucleotide
  Sense strand starting at position 341 of SEQ ID NO: 1882434
ucaacagacuugguuaagu

SEQ ID NO: 2120805 - RNA, 19 nt, Artificial Sequence
  Description of Artificial Sequence: Synthetic oligonucleotide
  Antisense strand to SEQ ID NO: 2120804
acuuaaccaagucuguuga

SEQ ID NO: 2120806 - RNA, 19 nt, Artificial Sequence
  Description of Artificial Sequence: Synthetic oligonucleotide
  Sense strand starting at position 436 of SEQ ID NO: 1882434
agucaaagucauuaaguaa

SEQ ID NO: 2120807 - RNA, 19 nt, Artificial Sequence
  Description of Artificial Sequence: Synthetic oligonucleotide
  Antisense strand to SEQ ID NO: 2120806
uuacuuaaugacuuugacu

SEQ ID NO: 2120808 - RNA, 19 nt, Artificial Sequence
  Description of Artificial Sequence: Synthetic oligonucleotide
  Sense strand starting at position 480 of SEQ ID NO: 1882434
ccacuuaacuggguggaua

SEQ ID NO: 2120809 - RNA, 19 nt, Artificial Sequence
  Description of Artificial Sequence: Synthetic oligonucleotide
  Antisense strand to SEQ ID NO: 2120808
uauccacccaguuaagugg

SEQ ID NO: 2120810 - RNA, 19 nt, Artificial Sequence
  Description of Artificial Sequence: Synthetic oligonucleotide
  Sense strand starting at position 495 of SEQ ID NO: 1882434
gauacaaccucagugguau

SEQ ID NO: 2120811 - RNA, 19 nt, Artificial Sequence
  Description of Artificial Sequence: Synthetic oligonucleotide
  Antisense strand to SEQ ID NO: 2120810
auaccacugagguuguauc

SEQ ID NO: 2120812 - RNA, 19 nt, Artificial Sequence
  Description of Artificial Sequence: Synthetic oligonucleotide
  Sense strand starting at position 578 of SEQ ID NO: 1882434
gagagucauugcuuaagag

SEQ ID NO: 2120813 - RNA, 19 nt, Artificial Sequence
  Description of Artificial Sequence: Synthetic oligonucleotide
  Antisense strand to SEQ ID NO: 2120812
cucuuaagcaaugacucuc

SEQ ID NO: 2120814 - RNA, 19 nt, Artificial Sequence
  Description of Artificial Sequence: Synthetic oligonucleotide
  Sense strand starting at position 620 of SEQ ID NO: 1882434
agagguuguacugggcaga

SEQ ID NO: 2120815 - RNA, 19 nt, Artificial Sequence
  Description of Artificial Sequence: Synthetic oligonucleotide
  Antisense strand to SEQ ID NO: 2120814
ucugcccaguacaaccucu

SEQ ID NO: 2120816 - RNA, 19 nt, Artificial Sequence
  Description of Artificial Sequence: Synthetic oligonucleotide
  Sense strand starting at position 743 of SEQ ID NO: 1882434
uggccagucaccuaaguga

SEQ ID NO: 2120817 - RNA, 19 nt, Artificial Sequence
  Description of Artificial Sequence: Synthetic oligonucleotide
  Antisense strand to SEQ ID NO: 2120816
ucacuuaggugacuggcca

SEQ ID NO: 2120818 - RNA, 19 nt, Artificial Sequence
  Description of Artificial Sequence: Synthetic oligonucleotide
  Sense strand starting at position 754 of SEQ ID NO: 1882434
cuaagugaggcuugaggua

SEQ ID NO: 2120819 - RNA, 19 nt, Artificial Sequence
  Description of Artificial Sequence: Synthetic oligonucleotide
  Antisense strand to SEQ ID NO: 2120818
uaccucaagccucacuuag

SEQ ID NO: 2120820 - RNA, 19 nt, Artificial Sequence
  Description of Artificial Sequence: Synthetic oligonucleotide
  Sense strand starting at position 796 of SEQ ID NO: 1882434
auucuuucucaugggaaua

SEQ ID NO: 2120821 - RNA, 19 nt, Artificial Sequence
  Description of Artificial Sequence: Synthetic oligonucleotide
  Antisense strand to SEQ ID NO: 2120820
uauucccaugagaaagaau

SEQ ID NO: 2120822 - RNA, 19 nt, Artificial Sequence
  Description of Artificial Sequence: Synthetic oligonucleotide
  Sense strand starting at position 831 of SEQ ID NO: 1882434
agagacagguaguuaguaa

SEQ ID NO: 2120823 - RNA, 19 nt, Artificial Sequence
  Description of Artificial Sequence: Synthetic oligonucleotide
  Antisense strand to SEQ ID NO: 2120822
uuacuaacuaccugucucu

SEQ ID NO: 2120824 - RNA, 19 nt, Artificial Sequence
  Description of Artificial Sequence: Synthetic oligonucleotide
  Sense strand starting at position 1053 of SEQ ID NO: 1882434
aguuuaggcccucaauauc

SEQ ID NO: 2120825 - RNA, 19 nt, Artificial Sequence
  Description of Artificial Sequence: Synthetic oligonucleotide
  Antisense strand to SEQ ID NO: 2120824
gauauugagggccuaaacu

SEQ ID NO: 2120826 - RNA, 19 nt, Artificial Sequence
  Description of Artificial Sequence: Synthetic oligonucleotide
  Sense strand starting at position 1104 of SEQ ID NO: 1882434
ucuggugagccaggagaaa

SEQ ID NO: 2120827 - RNA, 19 nt, Artificial Sequence
  Description of Artificial Sequence: Synthetic oligonucleotide
  Antisense strand to SEQ ID NO: 2120826
uuucuccuggcucaccaga

SEQ ID NO: 2120828 - RNA, 19 nt, Artificial Sequence
  Description of Artificial Sequence: Synthetic oligonucleotide
  Sense strand starting at position 1225 of SEQ ID NO: 1882434
uuacgacaccuaggaaauu

SEQ ID NO: 2120829 - RNA, 19 nt, Artificial Sequence
  Description of Artificial Sequence: Synthetic oligonucleotide
  Antisense strand to SEQ ID NO: 2120828
aauuuccuaggugucguaa

SEQ ID NO: 2120830 - RNA, 19 nt, Artificial Sequence
  Description of Artificial Sequence: Synthetic oligonucleotide
  Sense strand starting at position 1270 of SEQ ID NO: 1882434
agcuuugucgcaguguacu

SEQ ID NO: 2120831 - RNA, 19 nt, Artificial Sequence
  Description of Artificial Sequence: Synthetic oligonucleotide
  Antisense strand to SEQ ID NO: 2120830
aguacacugcgacaaagcu

SEQ ID NO: 2120832 - RNA, 19 nt, Artificial Sequence
  Description of Artificial Sequence: Synthetic oligonucleotide
  Sense strand starting at position 1318 of SEQ ID NO: 1882434
uccagugcucaagggaagu

SEQ ID NO: 2120833 - RNA, 19 nt, Artificial Sequence
  Description of Artificial Sequence: Synthetic oligonucleotide
  Antisense strand to SEQ ID NO: 2120832
acuucccuugagcacugga

SEQ ID NO: 2120834 - RNA, 19 nt, Artificial Sequence
  Description of Artificial Sequence: Synthetic oligonucleotide
  Sense strand starting at position 1689 of SEQ ID NO: 1882434
cugggucaccuguaauugu

SEQ ID NO: 2120835 - RNA, 19 nt, Artificial Sequence
  Description of Artificial Sequence: Synthetic oligonucleotide
  Antisense strand to SEQ ID NO: 2120834
acaauuacaggugacccag

SEQ ID NO: 2120836 - RNA, 19 nt, Artificial Sequence
  Description of Artificial Sequence: Synthetic oligonucleotide
  Sense strand starting at position 2236 of SEQ ID NO: 1882434
ggcggagacauuuguguuu

SEQ ID NO: 2120837 - RNA, 19 nt, Artificial Sequence
  Description of Artificial Sequence: Synthetic oligonucleotide
  Antisense strand to SEQ ID NO: 2120836
aaacacaaaugucuccgcc

SEQ ID NO: 2120838 - RNA, 19 nt, Artificial Sequence
  Description of Artificial Sequence: Synthetic oligonucleotide
  Sense strand starting at position 2771 of SEQ ID NO: 1882434
uuacauuggccguggauuu

SEQ ID NO: 2120839 - RNA, 19 nt, Artificial Sequence
  Description of Artificial Sequence: Synthetic oligonucleotide
  Antisense strand to SEQ ID NO: 2120838
aaauccacggccaauguaa

SEQ ID NO: 2120840 - RNA, 19 nt, Artificial Sequence
  Description of Artificial Sequence: Synthetic oligonucleotide
  Sense strand starting at position 2874 of SEQ ID NO: 1882434
gguuguagacuuuggagaa

SEQ ID NO: 2120841 - RNA, 19 nt, Artificial Sequence
  Description of Artificial Sequence: Synthetic oligonucleotide
  Antisense strand to SEQ ID NO: 2120840
uucuccaaagucuacaacc

SEQ ID NO: 2120842 - RNA, 19 nt, Artificial Sequence
  Description of Artificial Sequence: Synthetic oligonucleotide
  Sense strand starting at position 2887 of SEQ ID NO: 1882434
ggagaauaauuagagaccu

SEQ ID NO: 2120843 - RNA, 19 nt, Artificial Sequence
  Description of Artificial Sequence: Synthetic oligonucleotide
  Antisense strand to SEQ ID NO: 2120842
aggucucuaauuauucucc

SEQ ID NO: 2120844 - RNA, 19 nt, Artificial Sequence
  Description of Artificial Sequence: Synthetic oligonucleotide
  Sense strand starting at position 2914 of SEQ ID NO: 1882434
uuaggcuuucuccaagaag

SEQ ID NO: 2120845 - RNA, 19 nt, Artificial Sequence
  Description of Artificial Sequence: Synthetic oligonucleotide
  Antisense strand to SEQ ID NO: 2120844
cuucuuggagaaagccuaa

SEQ ID NO: 2120846 - RNA, 19 nt, Artificial Sequence
  Description of Artificial Sequence: Synthetic oligonucleotide
  Sense strand starting at position 2987 of SEQ ID NO: 1882434
aucuuauuaaaguggugga

SEQ ID NO: 2120847 - RNA, 19 nt, Artificial Sequence
  Description of Artificial Sequence: Synthetic oligonucleotide
  Antisense strand to SEQ ID NO: 2120846
uccaccacuuuaauaagau

SEQ ID NO: 2120848 - RNA, 19 nt, Artificial Sequence
  Description of Artificial Sequence: Synthetic oligonucleotide
  Sense strand starting at position 2988 of SEQ ID NO: 1882434
ucuuauuaaagugguggau

SEQ ID NO: 2120849 - RNA, 19 nt, Artificial Sequence
  Description of Artificial Sequence: Synthetic oligonucleotide
  Antisense strand to SEQ ID NO: 2120848
auccaccacuuuaauaaga

SEQ ID NO: 2120850 - RNA, 19 nt, Artificial Sequence
  Description of Artificial Sequence: Synthetic oligonucleotide
  Sense strand starting at position 2991 of SEQ ID NO: 1882434
uauuaaagugguggauaaa

SEQ ID NO: 2120851 - RNA, 19 nt, Artificial Sequence
  Description of Artificial Sequence: Synthetic oligonucleotide
  Antisense strand to SEQ ID NO: 2120850
uuuauccaccacuuuaaua

SEQ ID NO: 2120852 - RNA, 19 nt, Artificial Sequence
  Description of Artificial Sequence: Synthetic oligonucleotide
  Sense strand starting at position 2994 of SEQ ID NO: 1882434
uaaagugguggauaaaguu

SEQ ID NO: 2120853 - RNA, 19 nt, Artificial Sequence
  Description of Artificial Sequence: Synthetic oligonucleotide
  Antisense strand to SEQ ID NO: 2120852
aacuuuauccaccacuuua

SEQ ID NO: 2120854 - RNA, 19 nt, Artificial Sequence
  Description of Artificial Sequence: Synthetic oligonucleotide
  Sense strand starting at position 3099 of SEQ ID NO: 1882434
uuuggaaucuugcuuuaug

SEQ ID NO: 2120855 - RNA, 19 nt, Artificial Sequence
  Description of Artificial Sequence: Synthetic oligonucleotide
  Antisense strand to SEQ ID NO: 2120854
cauaaagcaagauuccaaa

SEQ ID NO: 2120856 - RNA, 19 nt, Artificial Sequence
  Description of Artificial Sequence: Synthetic oligonucleotide
  Sense strand starting at position 3102 of SEQ ID NO: 1882434
ggaaucuugcuuuauguaa

SEQ ID NO: 2120857 - RNA, 19 nt, Artificial Sequence
  Description of Artificial Sequence: Synthetic oligonucleotide
  Antisense strand to SEQ ID NO: 2120856
uuacauaaagcaagauucc

SEQ ID NO: 2120858 - RNA, 19 nt, Artificial Sequence
  Description of Artificial Sequence: Synthetic oligonucleotide
  Sense strand starting at position 3252 of SEQ ID NO: 1882434
gcuuuaguguauuugguuu

SEQ ID NO: 2120859 - RNA, 19 nt, Artificial Sequence
  Description of Artificial Sequence: Synthetic oligonucleotide
  Antisense strand to SEQ ID NO: 2120858
aaaccaaauacacuaaagc

SEQ ID NO: 2120860 - RNA, 19 nt, Artificial Sequence
  Description of Artificial Sequence: Synthetic oligonucleotide
  Sense strand starting at position 3673 of SEQ ID NO: 1882434
cuuaccauucuuuagugua

SEQ ID NO: 2120861 - RNA, 19 nt, Artificial Sequence
  Description of Artificial Sequence: Synthetic oligonucleotide
  Antisense strand to SEQ ID NO: 2120860
uacacuaaagaaugguaag

SEQ ID NO: 2120862 - RNA, 19 nt, Artificial Sequence
  Description of Artificial Sequence: Synthetic oligonucleotide
  Sense strand starting at position 3888 of SEQ ID NO: 1882434
uggucaggucauugagcaa

SEQ ID NO: 2120863 - RNA, 19 nt, Artificial Sequence
  Description of Artificial Sequence: Synthetic oligonucleotide
  Antisense strand to SEQ ID NO: 2120862
uugcucaaugaccugacca

SEQ ID NO: 2120864 - RNA, 19 nt, Artificial Sequence
  Description of Artificial Sequence: Synthetic oligonucleotide
  Sense strand starting at position 3892 of SEQ ID NO: 1882434
caggucauugagcaaaucu

SEQ ID NO: 2120865 - RNA, 19 nt, Artificial Sequence
  Description of Artificial Sequence: Synthetic oligonucleotide
  Antisense strand to SEQ ID NO: 2120864
agauuugcucaaugaccug

SEQ ID NO: 2120866 - RNA, 19 nt, Artificial Sequence
  Description of Artificial Sequence: Synthetic oligonucleotide
  Sense strand starting at position 52 of SEQ ID NO: 1882435
cuauauaggucauccaaag

SEQ ID NO: 2120867 - RNA, 19 nt, Artificial Sequence
  Description of Artificial Sequence: Synthetic oligonucleotide
  Antisense strand to SEQ ID NO: 2120866
cuuuggaugaccuauauag

SEQ ID NO: 2120868 - RNA, 19 nt, Artificial Sequence
  Description of Artificial Sequence: Synthetic oligonucleotide
  Sense strand starting at position 615 of SEQ ID NO: 1882435
ugauguuauguugggaaga

SEQ ID NO: 2120869 - RNA, 19 nt, Artificial Sequence
  Description of Artificial Sequence: Synthetic oligonucleotide
  Antisense strand to SEQ ID NO: 2120868
ucuucccaacauaacauca

SEQ ID NO: 2120870 - RNA, 19 nt, Artificial Sequence
  Description of Artificial Sequence: Synthetic oligonucleotide
  Sense strand starting at position 631 of SEQ ID NO: 1882435
agaaucuuguaagcaagaa

SEQ ID NO: 2120871 - RNA, 19 nt, Artificial Sequence
  Description of Artificial Sequence: Synthetic oligonucleotide
  Antisense strand to SEQ ID NO: 2120870
uucuugcuuacaagauucu

SEQ ID NO: 2120872 - RNA, 19 nt, Artificial Sequence
  Description of Artificial Sequence: Synthetic oligonucleotide
  Sense strand starting at position 635 of SEQ ID NO: 1882435
ucuuguaagcaagaaagca

SEQ ID NO: 2120873 - RNA, 19 nt, Artificial Sequence
  Description of Artificial Sequence: Synthetic oligonucleotide
  Antisense strand to SEQ ID NO: 2120872
ugcuuucuugcuuacaaga

SEQ ID NO: 2120874 - RNA, 19 nt, Artificial Sequence
  Description of Artificial Sequence: Synthetic oligonucleotide
  Sense strand starting at position 759 of SEQ ID NO: 1882435
uccauaaacuaagagaaga

SEQ ID NO: 2120875 - RNA, 19 nt, Artificial Sequence
  Description of Artificial Sequence: Synthetic oligonucleotide
  Antisense strand to SEQ ID NO: 2120874
ucuucucuuaguuuaugga

SEQ ID NO: 2120876 - RNA, 19 nt, Artificial Sequence
  Description of Artificial Sequence: Synthetic oligonucleotide
  Sense strand starting at position 986 of SEQ ID NO: 1882435
cgaugugccagucuaguuu

SEQ ID NO: 2120877 - RNA, 19 nt, Artificial Sequence
  Description of Artificial Sequence: Synthetic oligonucleotide
  Antisense strand to SEQ ID NO: 2120876
aaacuagacuggcacaucg

SEQ ID NO: 2120878 - RNA, 19 nt, Artificial Sequence
  Description of Artificial Sequence: Synthetic oligonucleotide
  Sense strand starting at position 992 of SEQ ID NO: 1882435
gccagucuaguuuauggga

SEQ ID NO: 2120879 - RNA, 19 nt, Artificial Sequence
  Description of Artificial Sequence: Synthetic oligonucleotide
  Antisense strand to SEQ ID NO: 2120878
ucccauaaacuagacuggc

SEQ ID NO: 2120880 - RNA, 19 nt, Artificial Sequence
  Description of Artificial Sequence: Synthetic oligonucleotide
  Sense strand starting at position 1001 of SEQ ID NO: 1882435
guuuaugggaaauggacuu

SEQ ID NO: 2120881 - RNA, 19 nt, Artificial Sequence
  Description of Artificial Sequence: Synthetic oligonucleotide
  Antisense strand to SEQ ID NO: 2120880
aaguccauuucccauaaac

SEQ ID NO: 2120882 - RNA, 19 nt, Artificial Sequence
  Description of Artificial Sequence: Synthetic oligonucleotide
  Sense strand starting at position 1126 of SEQ ID NO: 1882435
uagggaaucguacauaugu

SEQ ID NO: 2120883 - RNA, 19 nt, Artificial Sequence
  Description of Artificial Sequence: Synthetic oligonucleotide
  Antisense strand to SEQ ID NO: 2120882
acauauguacgauucccua

SEQ ID NO: 2120884 - RNA, 19 nt, Artificial Sequence
  Description of Artificial Sequence: Synthetic oligonucleotide
  Sense strand starting at position 1128 of SEQ ID NO: 1882435
gggaaucguacauauguaa

SEQ ID NO: 2120885 - RNA, 19 nt, Artificial Sequence
  Description of Artificial Sequence: Synthetic oligonucleotide
  Antisense strand to SEQ ID NO: 2120884
uuacauauguacgauuccc

SEQ ID NO: 2120886 - RNA, 19 nt, Artificial Sequence
  Description of Artificial Sequence: Synthetic oligonucleotide
  Sense strand starting at position 1221 of SEQ ID NO: 1882435
uagagagucuucuuucuag

SEQ ID NO: 2120887 - RNA, 19 nt, Artificial Sequence
  Description of Artificial Sequence: Synthetic oligonucleotide
  Antisense strand to SEQ ID NO: 2120886
cuagaaagaagacucucua

SEQ ID NO: 2120888 - RNA, 19 nt, Artificial Sequence
  Description of Artificial Sequence: Synthetic oligonucleotide
  Sense strand starting at position 1224 of SEQ ID NO: 1882435
agagucuucuuucuagaag

SEQ ID NO: 2120889 - RNA, 19 nt, Artificial Sequence
  Description of Artificial Sequence: Synthetic oligonucleotide
  Antisense strand to SEQ ID NO: 2120888
cuucuagaaagaagacucu

SEQ ID NO: 2120890 - RNA, 19 nt, Artificial Sequence
  Description of Artificial Sequence: Synthetic oligonucleotide
  Sense strand starting at position 1227 of SEQ ID NO: 1882435
gucuucuuucuagaagacu

SEQ ID NO: 2120891 - RNA, 19 nt, Artificial Sequence
  Description of Artificial Sequence: Synthetic oligonucleotide
  Antisense strand to SEQ ID NO: 2120890
agucuucuagaaagaagac

SEQ ID NO: 2120892 - RNA, 19 nt, Artificial Sequence
  Description of Artificial Sequence: Synthetic oligonucleotide
  Sense strand starting at position 1442 of SEQ ID NO: 1882435
guuacuauguaaccaaaca

SEQ ID NO: 2120893 - RNA, 19 nt, Artificial Sequence
  Description of Artificial Sequence: Synthetic oligonucleotide
  Antisense strand to SEQ ID NO: 2120892
uguuugguuacauaguaac

SEQ ID NO: 2120894 - RNA, 19 nt, Artificial Sequence
  Description of Artificial Sequence: Synthetic oligonucleotide
  Sense strand starting at position 1488 of SEQ ID NO: 1882435
gcuaauguaagauggaaac

SEQ ID NO: 2120895 - RNA, 19 nt, Artificial Sequence
  Description of Artificial Sequence: Synthetic oligonucleotide
  Antisense strand to SEQ ID NO: 2120894
guuuccaucuuacauuagc

SEQ ID NO: 2120896 - RNA, 19 nt, Artificial Sequence
  Description of Artificial Sequence: Synthetic oligonucleotide
  Sense strand starting at position 1644 of SEQ ID NO: 1882435
ugggcuuccaaguaaaguu

SEQ ID NO: 2120897 - RNA, 19 nt, Artificial Sequence
  Description of Artificial Sequence: Synthetic oligonucleotide
  Antisense strand to SEQ ID NO: 2120896
aacuuuacuuggaagccca

SEQ ID NO: 2120898 - RNA, 19 nt, Artificial Sequence
  Description of Artificial Sequence: Synthetic oligonucleotide
  Sense strand starting at position 1777 of SEQ ID NO: 1882435
auguguccucuguaauaca

SEQ ID NO: 2120899 - RNA, 19 nt, Artificial Sequence
  Description of Artificial Sequence: Synthetic oligonucleotide
  Antisense strand to SEQ ID NO: 2120898
uguauuacagaggacacau

SEQ ID NO: 2120900 - RNA, 19 nt, Artificial Sequence
  Description of Artificial Sequence: Synthetic oligonucleotide
  Sense strand starting at position 1845 of SEQ ID NO: 1882435
guucuacuugcagaaauag

SEQ ID NO: 2120901 - RNA, 19 nt, Artificial Sequence
  Description of Artificial Sequence: Synthetic oligonucleotide
  Antisense strand to SEQ ID NO: 2120900
cuauuucugcaaguagaac

SEQ ID NO: 2120902 - RNA, 19 nt, Artificial Sequence
  Description of Artificial Sequence: Synthetic oligonucleotide
  Sense strand starting at position 2472 of SEQ ID NO: 1882435
cgccgccuccucuuugaaa

SEQ ID NO: 2120903 - RNA, 19 nt, Artificial Sequence
  Description of Artificial Sequence: Synthetic oligonucleotide
  Antisense strand to SEQ ID NO: 2120902
uuucaaagaggaggcggcg

SEQ ID NO: 2120904 - RNA, 19 nt, Artificial Sequence
  Description of Artificial Sequence: Synthetic oligonucleotide
  Sense strand starting at position 2738 of SEQ ID NO: 1882435
ccuguuaacguguuuggca

SEQ ID NO: 2120905 - RNA, 19 nt, Artificial Sequence
  Description of Artificial Sequence: Synthetic oligonucleotide
  Antisense strand to SEQ ID NO: 2120904
ugccaaacacguuaacagg

SEQ ID NO: 2120906 - RNA, 19 nt, Artificial Sequence
  Description of Artificial Sequence: Synthetic oligonucleotide
  Sense strand starting at position 2745 of SEQ ID NO: 1882435
acguguuuggcacugucau

SEQ ID NO: 2120907 - RNA, 19 nt, Artificial Sequence
  Description of Artificial Sequence: Synthetic oligonucleotide
  Antisense strand to SEQ ID NO: 2120906
augacagugccaaacacgu

SEQ ID NO: 2120908 - RNA, 19 nt, Artificial Sequence
  Description of Artificial Sequence: Synthetic oligonucleotide
  Sense strand starting at position 2882 of SEQ ID NO: 1882435
guuguaagacccuacggau

SEQ ID NO: 2120909 - RNA, 19 nt, Artificial Sequence
  Description of Artificial Sequence: Synthetic oligonucleotide
  Antisense strand to SEQ ID NO: 2120908
auccguagggucuuacaac

SEQ ID NO: 2120910 - RNA, 19 nt, Artificial Sequence
  Description of Artificial Sequence: Synthetic oligonucleotide
  Sense strand starting at position 3011 of SEQ ID NO: 1882435
aaaguauugaggcaguagu

SEQ ID NO: 2120911 - RNA, 19 nt, Artificial Sequence
  Description of Artificial Sequence: Synthetic oligonucleotide
  Antisense strand to SEQ ID NO: 2120910
acuacugccucaauacuuu

SEQ ID NO: 2120912 - RNA, 19 nt, Artificial Sequence
  Description of Artificial Sequence: Synthetic oligonucleotide
  Sense strand starting at position 3019 of SEQ ID NO: 1882435
gaggcaguaguuugaaaca

SEQ ID NO: 2120913 - RNA, 19 nt, Artificial Sequence
  Description of Artificial Sequence: Synthetic oligonucleotide
  Antisense strand to SEQ ID NO: 2120912
uguuucaaacuacugccuc

SEQ ID NO: 2120914 - RNA, 19 nt, Artificial Sequence
  Description of Artificial Sequence: Synthetic oligonucleotide
  Sense strand starting at position 3148 of SEQ ID NO: 1882435
ugcugugaauuuguggauu

SEQ ID NO: 2120915 - RNA, 19 nt, Artificial Sequence
  Description of Artificial Sequence: Synthetic oligonucleotide
  Antisense strand to SEQ ID NO: 2120914
aauccacaaauucacagca

SEQ ID NO: 2120916 - RNA, 19 nt, Artificial Sequence
  Description of Artificial Sequence: Synthetic oligonucleotide
  Sense strand starting at position 3241 of SEQ ID NO: 1882435
gcuguuauucgugugacga

SEQ ID NO: 2120917 - RNA, 19 nt, Artificial Sequence
  Description of Artificial Sequence: Synthetic oligonucleotide
  Antisense strand to SEQ ID NO: 2120916
ucgucacacgaauaacagc

SEQ ID NO: 2120918 - RNA, 19 nt, Artificial Sequence
  Description of Artificial Sequence: Synthetic oligonucleotide
  Sense strand starting at position 3256 of SEQ ID NO: 1882435
acgaauagugaauguauga

SEQ ID NO: 2120919 - RNA, 19 nt, Artificial Sequence
  Description of Artificial Sequence: Synthetic oligonucleotide
  Antisense strand to SEQ ID NO: 2120918
ucauacauucacuauucgu

SEQ ID NO: 2120920 - RNA, 19 nt, Artificial Sequence
  Description of Artificial Sequence: Synthetic oligonucleotide
  Sense strand starting at position 3263 of SEQ ID NO: 1882435
gugaauguaugaucauaaa

SEQ ID NO: 2120921 - RNA, 19 nt, Artificial Sequence
  Description of Artificial Sequence: Synthetic oligonucleotide
  Antisense strand to SEQ ID NO: 2120920
uuuaugaucauacauucac

SEQ ID NO: 2120922 - RNA, 19 nt, Artificial Sequence
  Description of Artificial Sequence: Synthetic oligonucleotide
  Sense strand starting at position 3284 of SEQ ID NO: 1882435
agaauaagcugucuuuaga

SEQ ID NO: 2120923 - RNA, 19 nt, Artificial Sequence
  Description of Artificial Sequence: Synthetic oligonucleotide
  Antisense strand to SEQ ID NO: 2120922
ucuaaagacagcuuauucu

SEQ ID NO: 2120924 - RNA, 19 nt, Artificial Sequence
  Description of Artificial Sequence: Synthetic oligonucleotide
  Sense strand starting at position 3287 of SEQ ID NO: 1882435
auaagcugucuuuagauga

SEQ ID NO: 2120925 - RNA, 19 nt, Artificial Sequence
  Description of Artificial Sequence: Synthetic oligonucleotide
  Antisense strand to SEQ ID NO: 2120924
ucaucuaaagacagcuuau

SEQ ID NO: 2120926 - RNA, 19 nt, Artificial Sequence
  Description of Artificial Sequence: Synthetic oligonucleotide
  Sense strand starting at position 3292 of SEQ ID NO: 1882435
cugucuuuagaugaaguuu

SEQ ID NO: 2120927 - RNA, 19 nt, Artificial Sequence
  Description of Artificial Sequence: Synthetic oligonucleotide
  Antisense strand to SEQ ID NO: 2120926
aaacuucaucuaaagacag

SEQ ID NO: 2120928 - RNA, 19 nt, Artificial Sequence
  Description of Artificial Sequence: Synthetic oligonucleotide
  Sense strand starting at position 3301 of SEQ ID NO: 1882435
gaugaaguuugggcacagu

SEQ ID NO: 2120929 - RNA, 19 nt, Artificial Sequence
  Description of Artificial Sequence: Synthetic oligonucleotide
  Antisense strand to SEQ ID NO: 2120928
acugugcccaaacuucauc

SEQ ID NO: 2120930 - RNA, 19 nt, Artificial Sequence
  Description of Artificial Sequence: Synthetic oligonucleotide
  Sense strand starting at position 3316 of SEQ ID NO: 1882435
caguuuauggaguagguaa

SEQ ID NO: 2120931 - RNA, 19 nt, Artificial Sequence
  Description of Artificial Sequence: Synthetic oligonucleotide
  Antisense strand to SEQ ID NO: 2120930
uuaccuacuccauaaacug

SEQ ID NO: 2120932 - RNA, 19 nt, Artificial Sequence
  Description of Artificial Sequence: Synthetic oligonucleotide
  Sense strand starting at position 3347 of SEQ ID NO: 1882435
guuuauuagguacauaauc

SEQ ID NO: 2120933 - RNA, 19 nt, Artificial Sequence
  Description of Artificial Sequence: Synthetic oligonucleotide
  Antisense strand to SEQ ID NO: 2120932
gauuauguaccuaauaaac

SEQ ID NO: 2120934 - RNA, 19 nt, Artificial Sequence
  Description of Artificial Sequence: Synthetic oligonucleotide
  Sense strand starting at position 3355 of SEQ ID NO: 1882435
gguacauaauccuuaauug

SEQ ID NO: 2120935 - RNA, 19 nt, Artificial Sequence
  Description of Artificial Sequence: Synthetic oligonucleotide
  Antisense strand to SEQ ID NO: 2120934
caauuaaggauuauguacc

SEQ ID NO: 2120936 - RNA, 19 nt, Artificial Sequence
  Description of Artificial Sequence: Synthetic oligonucleotide
  Sense strand starting at position 3421 of SEQ ID NO: 1882435
acugguguauccucuaaau

SEQ ID NO: 2120937 - RNA, 19 nt, Artificial Sequence
  Description of Artificial Sequence: Synthetic oligonucleotide
  Antisense strand to SEQ ID NO: 2120936
auuuagaggauacaccagu

SEQ ID NO: 2120938 - RNA, 19 nt, Artificial Sequence
  Description of Artificial Sequence: Synthetic oligonucleotide
  Sense strand starting at position 3466 of SEQ ID NO: 1882435
ggcagaauagcauggacaa

SEQ ID NO: 2120939 - RNA, 19 nt, Artificial Sequence
  Description of Artificial Sequence: Synthetic oligonucleotide
  Antisense strand to SEQ ID NO: 2120938
uuguccaugcuauucugcc

SEQ ID NO: 2120940 - RNA, 19 nt, Artificial Sequence
  Description of Artificial Sequence: Synthetic oligonucleotide
  Sense strand starting at position 3523 of SEQ ID NO: 1882435
cuaggugauuaaccuuaga

SEQ ID NO: 2120941 - RNA, 19 nt, Artificial Sequence
  Description of Artificial Sequence: Synthetic oligonucleotide
  Antisense strand to SEQ ID NO: 2120940
ucuaagguuaaucaccuag

SEQ ID NO: 2120942 - RNA, 19 nt, Artificial Sequence
  Description of Artificial Sequence: Synthetic oligonucleotide
  Sense strand starting at position 3970 of SEQ ID NO: 1882435
uucuguuaaccagagggua

SEQ ID NO: 2120943 - RNA, 19 nt, Artificial Sequence
  Description of Artificial Sequence: Synthetic oligonucleotide
  Antisense strand to SEQ ID NO: 2120942
uacccucugguuaacagaa

SEQ ID NO: 2120944 - RNA, 19 nt, Artificial Sequence
  Description of Artificial Sequence: Synthetic oligonucleotide
  Sense strand starting at position 3972 of SEQ ID NO: 1882435
cuguuaaccagaggguaca

SEQ ID NO: 2120945 - RNA, 19 nt, Artificial Sequence
  Description of Artificial Sequence: Synthetic oligonucleotide
  Antisense strand to SEQ ID NO: 2120944
uguacccucugguuaacag

SEQ ID NO: 2120946 - RNA, 19 nt, Artificial Sequence
  Description of Artificial Sequence: Synthetic oligonucleotide
  Sense strand starting at position 69 of SEQ ID NO: 1882436
guccauuucuuuccggagu

SEQ ID NO: 2120947 - RNA, 19 nt, Artificial Sequence
  Description of Artificial Sequence: Synthetic oligonucleotide
  Antisense strand to SEQ ID NO: 2120946
acuccggaaagaaauggac

SEQ ID NO: 2120948 - RNA, 19 nt, Artificial Sequence
  Description of Artificial Sequence: Synthetic oligonucleotide
  Sense strand starting at position 496 of SEQ ID NO: 1882436
cagagaaguuguuccuuag

SEQ ID NO: 2120949 - RNA, 19 nt, Artificial Sequence
  Description of Artificial Sequence: Synthetic oligonucleotide
  Antisense strand to SEQ ID NO: 2120948
cuaaggaacaacuucucug

SEQ ID NO: 2120950 - RNA, 19 nt, Artificial Sequence
  Description of Artificial Sequence: Synthetic oligonucleotide
  Sense strand starting at position 499 of SEQ ID NO: 1882436
agaaguuguuccuuagaag

SEQ ID NO: 2120951 - RNA, 19 nt, Artificial Sequence
  Description of Artificial Sequence: Synthetic oligonucleotide
  Antisense strand to SEQ ID NO: 2120950
cuucuaaggaacaacuucu

SEQ ID NO: 2120952 - RNA, 19 nt, Artificial Sequence
  Description of Artificial Sequence: Synthetic oligonucleotide
  Sense strand starting at position 500 of SEQ ID NO: 1882436
gaaguuguuccuuagaagu

SEQ ID NO: 2120953 - RNA, 19 nt, Artificial Sequence
  Description of Artificial Sequence: Synthetic oligonucleotide
  Antisense strand to SEQ ID NO: 2120952
acuucuaaggaacaacuuc

SEQ ID NO: 2120954 - RNA, 19 nt, Artificial Sequence
  Description of Artificial Sequence: Synthetic oligonucleotide
  Sense strand starting at position 740 of SEQ ID NO: 1882436
aggagcugccgagguauuu

SEQ ID NO: 2120955 - RNA, 19 nt, Artificial Sequence
  Description of Artificial Sequence: Synthetic oligonucleotide
  Antisense strand to SEQ ID NO: 2120954
aaauaccucggcagcuccu

SEQ ID NO: 2120956 - RNA, 19 nt, Artificial Sequence
  Description of Artificial Sequence: Synthetic oligonucleotide
  Sense strand starting at position 786 of SEQ ID NO: 1882436
uugcaaguuuacucuggga

SEQ ID NO: 2120957 - RNA, 19 nt, Artificial Sequence
  Description of Artificial Sequence: Synthetic oligonucleotide
  Antisense strand to SEQ ID NO: 2120956
ucccagaguaaacuugcaa

SEQ ID NO: 2120958 - RNA, 19 nt, Artificial Sequence
  Description of Artificial Sequence: Synthetic oligonucleotide
  Sense strand starting at position 788 of SEQ ID NO: 1882436
gcaaguuuacucugggaug

SEQ ID NO: 2120959 - RNA, 19 nt, Artificial Sequence
  Description of Artificial Sequence: Synthetic oligonucleotide
  Antisense strand to SEQ ID NO: 2120958
caucccagaguaaacuugc

SEQ ID NO: 2120960 - RNA, 19 nt, Artificial Sequence
  Description of Artificial Sequence: Synthetic oligonucleotide
  Sense strand starting at position 790 of SEQ ID NO: 1882436
aaguuuacucugggaugca

SEQ ID NO: 2120961 - RNA, 19 nt, Artificial Sequence
  Description of Artificial Sequence: Synthetic oligonucleotide
  Antisense strand to SEQ ID NO: 2120960
ugcaucccagaguaaacuu

SEQ ID NO: 2120962 - RNA, 19 nt, Artificial Sequence
  Description of Artificial Sequence: Synthetic oligonucleotide
  Sense strand starting at position 863 of SEQ ID NO: 1882436
gggaaauucucaguuaugg

SEQ ID NO: 2120963 - RNA, 19 nt, Artificial Sequence
  Description of Artificial Sequence: Synthetic oligonucleotide
  Antisense strand to SEQ ID NO: 2120962
ccauaacugagaauuuccc

SEQ ID NO: 2120964 - RNA, 19 nt, Artificial Sequence
  Description of Artificial Sequence: Synthetic oligonucleotide
  Sense strand starting at position 956 of SEQ ID NO: 1882436
aaaugcuuugguuaccgaa

SEQ ID NO: 2120965 - RNA, 19 nt, Artificial Sequence
  Description of Artificial Sequence: Synthetic oligonucleotide
  Antisense strand to SEQ ID NO: 2120964
uucgguaaccaaagcauuu

SEQ ID NO: 2120966 - RNA, 19 nt, Artificial Sequence
  Description of Artificial Sequence: Synthetic oligonucleotide
  Sense strand starting at position 1220 of SEQ ID NO: 1882436
ucgauuuccgaaugucucu

SEQ ID NO: 2120967 - RNA, 19 nt, Artificial Sequence
  Description of Artificial Sequence: Synthetic oligonucleotide
  Antisense strand to SEQ ID NO: 2120966
agagacauucggaaaucga

SEQ ID NO: 2120968 - RNA, 19 nt, Artificial Sequence
  Description of Artificial Sequence: Synthetic oligonucleotide
  Sense strand starting at position 1450 of SEQ ID NO: 1882436
ggaggagucgccggacaga

SEQ ID NO: 2120969 - RNA, 19 nt, Artificial Sequence
  Description of Artificial Sequence: Synthetic oligonucleotide
  Antisense strand to SEQ ID NO: 2120968
ucuguccggcgacuccucc

SEQ ID NO: 2120970 - RNA, 19 nt, Artificial Sequence
  Description of Artificial Sequence: Synthetic oligonucleotide
  Sense strand starting at position 2415 of SEQ ID NO: 1882436
gacauaaagucuccggaau

SEQ ID NO: 2120971 - RNA, 19 nt, Artificial Sequence
  Description of Artificial Sequence: Synthetic oligonucleotide
  Antisense strand to SEQ ID NO: 2120970
auuccggagacuuuauguc

SEQ ID NO: 2120972 - RNA, 19 nt, Artificial Sequence
  Description of Artificial Sequence: Synthetic oligonucleotide
  Sense strand starting at position 2416 of SEQ ID NO: 1882436
acauaaagucuccggaauu

SEQ ID NO: 2120973 - RNA, 19 nt, Artificial Sequence
  Description of Artificial Sequence: Synthetic oligonucleotide
  Antisense strand to SEQ ID NO: 2120972
aauuccggagacuuuaugu

SEQ ID NO: 2120974 - RNA, 19 nt, Artificial Sequence
  Description of Artificial Sequence: Synthetic oligonucleotide
  Sense strand starting at position 2426 of SEQ ID NO: 1882436
uccggaauuccagauuauu

SEQ ID NO: 2120975 - RNA, 19 nt, Artificial Sequence
  Description of Artificial Sequence: Synthetic oligonucleotide
  Antisense strand to SEQ ID NO: 2120974
aauaaucuggaauuccgga

SEQ ID NO: 2120976 - RNA, 19 nt, Artificial Sequence
  Description of Artificial Sequence: Synthetic oligonucleotide
  Sense strand starting at position 2505 of SEQ ID NO: 1882436
agcgaucucccagaaacuu

SEQ ID NO: 2120977 - RNA, 19 nt, Artificial Sequence
  Description of Artificial Sequence: Synthetic oligonucleotide
  Antisense strand to SEQ ID NO: 2120976
aaguuucugggagaucgcu

SEQ ID NO: 2120978 - RNA, 19 nt, Artificial Sequence
  Description of Artificial Sequence: Synthetic oligonucleotide
  Sense strand starting at position 2772 of SEQ ID NO: 1882436
ugagcuuugauaggugaaa

SEQ ID NO: 2120979 - RNA, 19 nt, Artificial Sequence
  Description of Artificial Sequence: Synthetic oligonucleotide
  Antisense strand to SEQ ID NO: 2120978
uuucaccuaucaaagcuca

SEQ ID NO: 2120980 - RNA, 19 nt, Artificial Sequence
  Description of Artificial Sequence: Synthetic oligonucleotide
  Sense strand starting at position 2773 of SEQ ID NO: 1882436
gagcuuugauaggugaaac

SEQ ID NO: 2120981 - RNA, 19 nt, Artificial Sequence
  Description of Artificial Sequence: Synthetic oligonucleotide
  Antisense strand to SEQ ID NO: 2120980
guuucaccuaucaaagcuc

SEQ ID NO: 2120982 - RNA, 19 nt, Artificial Sequence
  Description of Artificial Sequence: Synthetic oligonucleotide
  Sense strand starting at position 2868 of SEQ ID NO: 1882436
ugaaauuagcuauauugug

SEQ ID NO: 2120983 - RNA, 19 nt, Artificial Sequence
  Description of Artificial Sequence: Synthetic oligonucleotide
  Antisense strand to SEQ ID NO: 2120982
cacaauauagcuaauuuca

SEQ ID NO: 2120984 - RNA, 19 nt, Artificial Sequence
  Description of Artificial Sequence: Synthetic oligonucleotide
  Sense strand starting at position 2877 of SEQ ID NO: 1882436
cuauauugugcucaaagua

SEQ ID NO: 2120985 - RNA, 19 nt, Artificial Sequence
  Description of Artificial Sequence: Synthetic oligonucleotide
  Antisense strand to SEQ ID NO: 2120984
uacuuugagcacaauauag

SEQ ID NO: 2120986 - RNA, 19 nt, Artificial Sequence
  Description of Artificial Sequence: Synthetic oligonucleotide
  Sense strand starting at position 2882 of SEQ ID NO: 1882436
uugugcucaaaguauguua

SEQ ID NO: 2120987 - RNA, 19 nt, Artificial Sequence
  Description of Artificial Sequence: Synthetic oligonucleotide
  Antisense strand to SEQ ID NO: 2120986
uaacauacuuugagcacaa

SEQ ID NO: 2120988 - RNA, 19 nt, Artificial Sequence
  Description of Artificial Sequence: Synthetic oligonucleotide
  Sense strand starting at position 2901 of SEQ ID NO: 1882436
cugacauuucuccgucguu

SEQ ID NO: 2120989 - RNA, 19 nt, Artificial Sequence
  Description of Artificial Sequence: Synthetic oligonucleotide
  Antisense strand to SEQ ID NO: 2120988
aacgacggagaaaugucag

SEQ ID NO: 2120990 - RNA, 19 nt, Artificial Sequence
  Description of Artificial Sequence: Synthetic oligonucleotide
  Sense strand starting at position 2902 of SEQ ID NO: 1882436
ugacauuucuccgucguua

SEQ ID NO: 2120991 - RNA, 19 nt, Artificial Sequence
  Description of Artificial Sequence: Synthetic oligonucleotide
  Antisense strand to SEQ ID NO: 2120990
uaacgacggagaaauguca

SEQ ID NO: 2120992 - RNA, 19 nt, Artificial Sequence
  Description of Artificial Sequence: Synthetic oligonucleotide
  Sense strand starting at position 2904 of SEQ ID NO: 1882436
acauuucuccgucguuaaa

SEQ ID NO: 2120993 - RNA, 19 nt, Artificial Sequence
  Description of Artificial Sequence: Synthetic oligonucleotide
  Antisense strand to SEQ ID NO: 2120992
uuuaacgacggagaaaugu

SEQ ID NO: 2120994 - RNA, 19 nt, Artificial Sequence
  Description of Artificial Sequence: Synthetic oligonucleotide
  Sense strand starting at position 2954 of SEQ ID NO: 1882436
gucuguauuauguauauag

SEQ ID NO: 2120995 - RNA, 19 nt, Artificial Sequence
  Description of Artificial Sequence: Synthetic oligonucleotide
  Antisense strand to SEQ ID NO: 2120994
cuauauacauaauacagac

SEQ ID NO: 2120996 - RNA, 19 nt, Artificial Sequence
  Description of Artificial Sequence: Synthetic oligonucleotide
  Sense strand starting at position 2961 of SEQ ID NO: 1882436
uuauguauauagccugaua

SEQ ID NO: 2120997 - RNA, 19 nt, Artificial Sequence
  Description of Artificial Sequence: Synthetic oligonucleotide
  Antisense strand to SEQ ID NO: 2120996
uaucaggcuauauacauaa

SEQ ID NO: 2120998 - RNA, 19 nt, Artificial Sequence
  Description of Artificial Sequence: Synthetic oligonucleotide
  Sense strand starting at position 2963 of SEQ ID NO: 1882436
auguauauagccugauagu

SEQ ID NO: 2120999 - RNA, 19 nt, Artificial Sequence
  Description of Artificial Sequence: Synthetic oligonucleotide
  Antisense strand to SEQ ID NO: 2120998
acuaucaggcuauauacau

SEQ ID NO: 2121000 - RNA, 19 nt, Artificial Sequence
  Description of Artificial Sequence: Synthetic oligonucleotide
  Sense strand starting at position 2981 of SEQ ID NO: 1882436
ugcugaauuucugaauuga

SEQ ID NO: 2121001 - RNA, 19 nt, Artificial Sequence
  Description of Artificial Sequence: Synthetic oligonucleotide
  Antisense strand to SEQ ID NO: 2121000
ucaauucagaaauucagca

SEQ ID NO: 2121002 - RNA, 19 nt, Artificial Sequence
  Description of Artificial Sequence: Synthetic oligonucleotide
  Sense strand starting at position 3120 of SEQ ID NO: 1882436
cuuaguaaagggugaggua

SEQ ID NO: 2121003 - RNA, 19 nt, Artificial Sequence
  Description of Artificial Sequence: Synthetic oligonucleotide
  Antisense strand to SEQ ID NO: 2121002
uaccucacccuuuacuaag

SEQ ID NO: 2121004 - RNA, 19 nt, Artificial Sequence
  Description of Artificial Sequence: Synthetic oligonucleotide
  Sense strand starting at position 3215 of SEQ ID NO: 1882436
acaaauugguauccaugua

SEQ ID NO: 2121005 - RNA, 19 nt, Artificial Sequence
  Description of Artificial Sequence: Synthetic oligonucleotide
  Antisense strand to SEQ ID NO: 2121004
uacauggauaccaauuugu

SEQ ID NO: 2121006 - RNA, 19 nt, Artificial Sequence
  Description of Artificial Sequence: Synthetic oligonucleotide
  Sense strand starting at position 3300 of SEQ ID NO: 1882436
auucuaguucucuacucga

SEQ ID NO: 2121007 - RNA, 19 nt, Artificial Sequence
  Description of Artificial Sequence: Synthetic oligonucleotide
  Antisense strand to SEQ ID NO: 2121006
ucgaguagagaacuagaau

SEQ ID NO: 2121008 - RNA, 19 nt, Artificial Sequence
  Description of Artificial Sequence: Synthetic oligonucleotide
  Sense strand starting at position 3303 of SEQ ID NO: 1882436
cuaguucucuacucgauuu

SEQ ID NO: 2121009 - RNA, 19 nt, Artificial Sequence
  Description of Artificial Sequence: Synthetic oligonucleotide
  Antisense strand to SEQ ID NO: 2121008
aaaucgaguagagaacuag

SEQ ID NO: 2121010 - RNA, 19 nt, Artificial Sequence
  Description of Artificial Sequence: Synthetic oligonucleotide
  Sense strand starting at position 3347 of SEQ ID NO: 1882436
cccuucuuagaaggcauau

SEQ ID NO: 2121011 - RNA, 19 nt, Artificial Sequence
  Description of Artificial Sequence: Synthetic oligonucleotide
  Antisense strand to SEQ ID NO: 2121010
auaugccuucuaagaaggg

SEQ ID NO: 2121012 - RNA, 19 nt, Artificial Sequence
  Description of Artificial Sequence: Synthetic oligonucleotide
  Sense strand starting at position 3616 of SEQ ID NO: 1882436
augcaucauguauagaaac

SEQ ID NO: 2121013 - RNA, 19 nt, Artificial Sequence
  Description of Artificial Sequence: Synthetic oligonucleotide
  Antisense strand to SEQ ID NO: 2121012
guuucuauacaugaugcau

SEQ ID NO: 2121014 - RNA, 19 nt, Artificial Sequence
  Description of Artificial Sequence: Synthetic oligonucleotide
  Sense strand starting at position 3691 of SEQ ID NO: 1882436
ccaugcuggguccaggaaa

SEQ ID NO: 2121015 - RNA, 19 nt, Artificial Sequence
  Description of Artificial Sequence: Synthetic oligonucleotide
  Antisense strand to SEQ ID NO: 2121014
uuuccuggacccagcaugg

SEQ ID NO: 2121016 - RNA, 19 nt, Artificial Sequence
  Description of Artificial Sequence: Synthetic oligonucleotide
  Sense strand starting at position 3840 of SEQ ID NO: 1882436
gaaagaagcuguucuuccu

SEQ ID NO: 2121017 - RNA, 19 nt, Artificial Sequence
  Description of Artificial Sequence: Synthetic oligonucleotide
  Antisense strand to SEQ ID NO: 2121016
aggaagaacagcuucuuuc

SEQ ID NO: 2121018 - RNA, 19 nt, Artificial Sequence
  Description of Artificial Sequence: Synthetic oligonucleotide
  Sense strand starting at position 3863 of SEQ ID NO: 1882436
cugaccuuugccuagggau

SEQ ID NO: 2121019 - RNA, 19 nt, Artificial Sequence
  Description of Artificial Sequence: Synthetic oligonucleotide
  Antisense strand to SEQ ID NO: 2121018
aucccuaggcaaaggucag

SEQ ID NO: 2121020 - RNA, 19 nt, Artificial Sequence
  Description of Artificial Sequence: Synthetic oligonucleotide
  Sense strand starting at position 3865 of SEQ ID NO: 1882436
gaccuuugccuagggauca

SEQ ID NO: 2121021 - RNA, 19 nt, Artificial Sequence
  Description of Artificial Sequence: Synthetic oligonucleotide
  Antisense strand to SEQ ID NO: 2121020
ugaucccuaggcaaagguc

SEQ ID NO: 2121022 - RNA, 19 nt, Artificial Sequence
  Description of Artificial Sequence: Synthetic oligonucleotide
  Sense strand starting at position 3908 of SEQ ID NO: 1882436
guuaguagaacucaguaag

SEQ ID NO: 2121023 - RNA, 19 nt, Artificial Sequence
  Description of Artificial Sequence: Synthetic oligonucleotide
  Antisense strand to SEQ ID NO: 2121022
cuuacugaguucuacuaac

SEQ ID NO: 2121024 - RNA, 19 nt, Artificial Sequence
  Description of Artificial Sequence: Synthetic oligonucleotide
  Sense strand starting at position 3911 of SEQ ID NO: 1882436
aguagaacucaguaaguau

SEQ ID NO: 2121025 - RNA, 19 nt, Artificial Sequence
  Description of Artificial Sequence: Synthetic oligonucleotide
  Antisense strand to SEQ ID NO: 2121024
auacuuacugaguucuacu

SEQ ID NO: 2121026 - RNA, 19 nt, Artificial Sequence
  Description of Artificial Sequence: Synthetic oligonucleotide
  Sense strand starting at position 105 of SEQ ID NO: 1882437
gggagaaugaugugugcuc

SEQ ID NO: 2121027 - RNA, 19 nt, Artificial Sequence
  Description of Artificial Sequence: Synthetic oligonucleotide
  Antisense strand to SEQ ID NO: 2121026
gagcacacaucauucuccc

SEQ ID NO: 2121028 - RNA, 19 nt, Artificial Sequence
  Description of Artificial Sequence: Synthetic oligonucleotide
  Sense strand starting at position 106 of SEQ ID NO: 1882437
ggagaaugaugugugcuca

SEQ ID NO: 2121029 - RNA, 19 nt, Artificial Sequence
  Description of Artificial Sequence: Synthetic oligonucleotide
  Antisense strand to SEQ ID NO: 2121028
ugagcacacaucauucucc

SEQ ID NO: 2121030 - RNA, 19 nt, Artificial Sequence
  Description of Artificial Sequence: Synthetic oligonucleotide
  Sense strand starting at position 107 of SEQ ID NO: 1882437
gagaaugaugugugcucau

SEQ ID NO: 2121031 - RNA, 19 nt, Artificial Sequence
  Description of Artificial Sequence: Synthetic oligonucleotide
  Antisense strand to SEQ ID NO: 2121030
augagcacacaucauucuc

SEQ ID NO: 2121032 - RNA, 19 nt, Artificial Sequence
  Description of Artificial Sequence: Synthetic oligonucleotide
  Sense strand starting at position 118 of SEQ ID NO: 1882437
gugcucauugcugucaagu

SEQ ID NO: 2121033 - RNA, 19 nt, Artificial Sequence
  Description of Artificial Sequence: Synthetic oligonucleotide
  Antisense strand to SEQ ID NO: 2121032
acuugacagcaaugagcac

SEQ ID NO: 2121034 - RNA, 19 nt, Artificial Sequence
  Description of Artificial Sequence: Synthetic oligonucleotide
  Sense strand starting at position 119 of SEQ ID NO: 1882437
ugcucauugcugucaaguc

SEQ ID NO: 2121035 - RNA, 19 nt, Artificial Sequence
  Description of Artificial Sequence: Synthetic oligonucleotide
  Antisense strand to SEQ ID NO: 2121034
gacuugacagcaaugagca

SEQ ID NO: 2121036 - RNA, 19 nt, Artificial Sequence
  Description of Artificial Sequence: Synthetic oligonucleotide
  Sense strand starting at position 416 of SEQ ID NO: 1882437
ugaaaugucugcccuccaa

SEQ ID NO: 2121037 - RNA, 19 nt, Artificial Sequence
  Description of Artificial Sequence: Synthetic oligonucleotide
  Antisense strand to SEQ ID NO: 2121036
uuggagggcagacauuuca

SEQ ID NO: 2121038 - RNA, 19 nt, Artificial Sequence
  Description of Artificial Sequence: Synthetic oligonucleotide
  Sense strand starting at position 547 of SEQ ID NO: 1882437
ccucgcugccgagauugaa

SEQ ID NO: 2121039 - RNA, 19 nt, Artificial Sequence
  Description of Artificial Sequence: Synthetic oligonucleotide
  Antisense strand to SEQ ID NO: 2121038
uucaaucucggcagcgagg

SEQ ID NO: 2121040 - RNA, 19 nt, Artificial Sequence
  Description of Artificial Sequence: Synthetic oligonucleotide
  Sense strand starting at position 589 of SEQ ID NO: 1882437
ccaucuaaucugugagccu

SEQ ID NO: 2121041 - RNA, 19 nt, Artificial Sequence
  Description of Artificial Sequence: Synthetic oligonucleotide
  Antisense strand to SEQ ID NO: 2121040
aggcucacagauuagaugg

SEQ ID NO: 2121042 - RNA, 19 nt, Artificial Sequence
  Description of Artificial Sequence: Synthetic oligonucleotide
  Sense strand starting at position 618 of SEQ ID NO: 1882437
uaguuuccugucugugaca

SEQ ID NO: 2121043 - RNA, 19 nt, Artificial Sequence
  Description of Artificial Sequence: Synthetic oligonucleotide
  Antisense strand to SEQ ID NO: 2121042
ugucacagacaggaaacua

SEQ ID NO: 2121044 - RNA, 19 nt, Artificial Sequence
  Description of Artificial Sequence: Synthetic oligonucleotide
  Sense strand starting at position 619 of SEQ ID NO: 1882437
aguuuccugucugugacau

SEQ ID NO: 2121045 - RNA, 19 nt, Artificial Sequence
  Description of Artificial Sequence: Synthetic oligonucleotide
  Antisense strand to SEQ ID NO: 2121044
augucacagacaggaaacu

SEQ ID NO: 2121046 - RNA, 19 nt, Artificial Sequence
  Description of Artificial Sequence: Synthetic oligonucleotide
  Sense strand starting at position 705 of SEQ ID NO: 1882437
ggaagugcucaauaugugu

SEQ ID NO: 2121047 - RNA, 19 nt, Artificial Sequence
  Description of Artificial Sequence: Synthetic oligonucleotide
  Antisense strand to SEQ ID NO: 2121046
acacauauugagcacuucc

SEQ ID NO: 2121048 - RNA, 19 nt, Artificial Sequence
  Description of Artificial Sequence: Synthetic oligonucleotide
  Sense strand starting at position 708 of SEQ ID NO: 1882437
agugcucaauauguguaua

SEQ ID NO: 2121049 - RNA, 19 nt, Artificial Sequence
  Description of Artificial Sequence: Synthetic oligonucleotide
  Antisense strand to SEQ ID NO: 2121048
uauacacauauugagcacu

SEQ ID NO: 2121050 - RNA, 19 nt, Artificial Sequence
  Description of Artificial Sequence: Synthetic oligonucleotide
  Sense strand starting at position 710 of SEQ ID NO: 1882437
ugcucaauauguguauauu

SEQ ID NO: 2121051 - RNA, 19 nt, Artificial Sequence
  Description of Artificial Sequence: Synthetic oligonucleotide
  Antisense strand to SEQ ID NO: 2121050
aauauacacauauugagca

SEQ ID NO: 2121052 - RNA, 19 nt, Artificial Sequence
  Description of Artificial Sequence: Synthetic oligonucleotide
  Sense strand starting at position 711 of SEQ ID NO: 1882437
gcucaauauguguauauug

SEQ ID NO: 2121053 - RNA, 19 nt, Artificial Sequence
  Description of Artificial Sequence: Synthetic oligonucleotide
  Antisense strand to SEQ ID NO: 2121052
caauauacacauauugagc

SEQ ID NO: 2121054 - RNA, 19 nt, Artificial Sequence
  Description of Artificial Sequence: Synthetic oligonucleotide
  Sense strand starting at position 727 of SEQ ID NO: 1882437
uugcuauuguuaucagggu

SEQ ID NO: 2121055 - RNA, 19 nt, Artificial Sequence
  Description of Artificial Sequence: Synthetic oligonucleotide
  Antisense strand to SEQ ID NO: 2121054
acccugauaacaauagcaa

SEQ ID NO: 2121056 - RNA, 19 nt, Artificial Sequence
  Description of Artificial Sequence: Synthetic oligonucleotide
  Sense strand starting at position 828 of SEQ ID NO: 1882437
gugccaauuuccucuguag

SEQ ID NO: 2121057 - RNA, 19 nt, Artificial Sequence
  Description of Artificial Sequence: Synthetic oligonucleotide
  Antisense strand to SEQ ID NO: 2121056
cuacagaggaaauuggcac

SEQ ID NO: 2121058 - RNA, 19 nt, Artificial Sequence
  Description of Artificial Sequence: Synthetic oligonucleotide
  Sense strand starting at position 894 of SEQ ID NO: 1882437
uuugaccucuuccuggaaa

SEQ ID NO: 2121059 - RNA, 19 nt, Artificial Sequence
  Description of Artificial Sequence: Synthetic oligonucleotide
  Antisense strand to SEQ ID NO: 2121058
uuuccaggaagaggucaaa

SEQ ID NO: 2121060 - RNA, 19 nt, Artificial Sequence
  Description of Artificial Sequence: Synthetic oligonucleotide
  Sense strand starting at position 896 of SEQ ID NO: 1882437
ugaccucuuccuggaaagu

SEQ ID NO: 2121061 - RNA, 19 nt, Artificial Sequence
  Description of Artificial Sequence: Synthetic oligonucleotide
  Antisense strand to SEQ ID NO: 2121060
acuuuccaggaagagguca

SEQ ID NO: 2121062 - RNA, 19 nt, Artificial Sequence
  Description of Artificial Sequence: Synthetic oligonucleotide
  Sense strand starting at position 1498 of SEQ ID NO: 1882437
cucgguguacucgucugua

SEQ ID NO: 2121063 - RNA, 19 nt, Artificial Sequence
  Description of Artificial Sequence: Synthetic oligonucleotide
  Antisense strand to SEQ ID NO: 2121062
uacagacgaguacaccgag

SEQ ID NO: 2121064 - RNA, 19 nt, Artificial Sequence
  Description of Artificial Sequence: Synthetic oligonucleotide
  Sense strand starting at position 1500 of SEQ ID NO: 1882437
cgguguacucgucuguaac

SEQ ID NO: 2121065 - RNA, 19 nt, Artificial Sequence
  Description of Artificial Sequence: Synthetic oligonucleotide
  Antisense strand to SEQ ID NO: 2121064
guuacagacgaguacaccg

SEQ ID NO: 2121066 - RNA, 19 nt, Artificial Sequence
  Description of Artificial Sequence: Synthetic oligonucleotide
  Sense strand starting at position 1503 of SEQ ID NO: 1882437
uguacucgucuguaacagu

SEQ ID NO: 2121067 - RNA, 19 nt, Artificial Sequence
  Description of Artificial Sequence: Synthetic oligonucleotide
  Antisense strand to SEQ ID NO: 2121066
acuguuacagacgaguaca

SEQ ID NO: 2121068 - RNA, 19 nt, Artificial Sequence
  Description of Artificial Sequence: Synthetic oligonucleotide
  Sense strand starting at position 1510 of SEQ ID NO: 1882437
gucuguaacagugaggauc

SEQ ID NO: 2121069 - RNA, 19 nt, Artificial Sequence
  Description of Artificial Sequence: Synthetic oligonucleotide
  Antisense strand to SEQ ID NO: 2121068
gauccucacuguuacagac

SEQ ID NO: 2121070 - RNA, 19 nt, Artificial Sequence
  Description of Artificial Sequence: Synthetic oligonucleotide
  Sense strand starting at position 1521 of SEQ ID NO: 1882437
ugaggaucugcccgaugaa

SEQ ID NO: 2121071 - RNA, 19 nt, Artificial Sequence
  Description of Artificial Sequence: Synthetic oligonucleotide
  Antisense strand to SEQ ID NO: 2121070
uucaucgggcagauccuca

SEQ ID NO: 2121072 - RNA, 19 nt, Artificial Sequence
  Description of Artificial Sequence: Synthetic oligonucleotide
  Sense strand starting at position 1522 of SEQ ID NO: 1882437
gaggaucugcccgaugaac

SEQ ID NO: 2121073 - RNA, 19 nt, Artificial Sequence
  Description of Artificial Sequence: Synthetic oligonucleotide
  Antisense strand to SEQ ID NO: 2121072
guucaucgggcagauccuc

SEQ ID NO: 2121074 - RNA, 19 nt, Artificial Sequence
  Description of Artificial Sequence: Synthetic oligonucleotide
  Sense strand starting at position 1545 of SEQ ID NO: 1882437
gggucuugcaaguguacag

SEQ ID NO: 2121075 - RNA, 19 nt, Artificial Sequence
  Description of Artificial Sequence: Synthetic oligonucleotide
  Antisense strand to SEQ ID NO: 2121074
cuguacacuugcaagaccc

SEQ ID NO: 2121076 - RNA, 19 nt, Artificial Sequence
  Description of Artificial Sequence: Synthetic oligonucleotide
  Sense strand starting at position 1556 of SEQ ID NO: 1882437
guguacaguccuggagaac

SEQ ID NO: 2121077 - RNA, 19 nt, Artificial Sequence
  Description of Artificial Sequence: Synthetic oligonucleotide
  Antisense strand to SEQ ID NO: 2121076
guucuccaggacuguacac

SEQ ID NO: 2121078 - RNA, 19 nt, Artificial Sequence
  Description of Artificial Sequence: Synthetic oligonucleotide
  Sense strand starting at position 1611 of SEQ ID NO: 1882437
ucagccacucggugagaaa

SEQ ID NO: 2121079 - RNA, 19 nt, Artificial Sequence
  Description of Artificial Sequence: Synthetic oligonucleotide
  Antisense strand to SEQ ID NO: 2121078
uuucucaccgaguggcuga

SEQ ID NO: 2121080 - RNA, 19 nt, Artificial Sequence
  Description of Artificial Sequence: Synthetic oligonucleotide
  Sense strand starting at position 2291 of SEQ ID NO: 1882437
ggaagagcucccugugacu

SEQ ID NO: 2121081 - RNA, 19 nt, Artificial Sequence
  Description of Artificial Sequence: Synthetic oligonucleotide
  Antisense strand to SEQ ID NO: 2121080
agucacagggagcucuucc

SEQ ID NO: 2121082 - RNA, 19 nt, Artificial Sequence
  Description of Artificial Sequence: Synthetic oligonucleotide
  Sense strand starting at position 2538 of SEQ ID NO: 1882437
ccacaucugauaggagguu

SEQ ID NO: 2121083 - RNA, 19 nt, Artificial Sequence
  Description of Artificial Sequence: Synthetic oligonucleotide
  Antisense strand to SEQ ID NO: 2121082
aaccuccuaucagaugugg

SEQ ID NO: 2121084 - RNA, 19 nt, Artificial Sequence
  Description of Artificial Sequence: Synthetic oligonucleotide
  Sense strand starting at position 3074 of SEQ ID NO: 1882437
gguucaaaugugcaggauu

SEQ ID NO: 2121085 - RNA, 19 nt, Artificial Sequence
  Description of Artificial Sequence: Synthetic oligonucleotide
  Antisense strand to SEQ ID NO: 2121084
aauccugcacauuugaacc

SEQ ID NO: 2121086 - RNA, 19 nt, Artificial Sequence
  Description of Artificial Sequence: Synthetic oligonucleotide
  Sense strand starting at position 3491 of SEQ ID NO: 1882437
gauggagauucuuugcuca

SEQ ID NO: 2121087 - RNA, 19 nt, Artificial Sequence
  Description of Artificial Sequence: Synthetic oligonucleotide
  Antisense strand to SEQ ID NO: 2121086
ugagcaaagaaucuccauc

SEQ ID NO: 2121088 - RNA, 19 nt, Artificial Sequence
  Description of Artificial Sequence: Synthetic oligonucleotide
  Sense strand starting at position 3493 of SEQ ID NO: 1882437
uggagauucuuugcucaaa

SEQ ID NO: 2121089 - RNA, 19 nt, Artificial Sequence
  Description of Artificial Sequence: Synthetic oligonucleotide
  Antisense strand to SEQ ID NO: 2121088
uuugagcaaagaaucucca

SEQ ID NO: 2121090 - RNA, 19 nt, Artificial Sequence
  Description of Artificial Sequence: Synthetic oligonucleotide
  Sense strand starting at position 3494 of SEQ ID NO: 1882437
ggagauucuuugcucaaac

SEQ ID NO: 2121091 - RNA, 19 nt, Artificial Sequence
  Description of Artificial Sequence: Synthetic oligonucleotide
  Antisense strand to SEQ ID NO: 2121090
guuugagcaaagaaucucc

SEQ ID NO: 2121092 - RNA, 19 nt, Artificial Sequence
  Description of Artificial Sequence: Synthetic oligonucleotide
  Sense strand starting at position 3799 of SEQ ID NO: 1882437
gaagaucauucugagauga

SEQ ID NO: 2121093 - RNA, 19 nt, Artificial Sequence
  Description of Artificial Sequence: Synthetic oligonucleotide
  Antisense strand to SEQ ID NO: 2121092
ucaucucagaaugaucuuc

SEQ ID NO: 2121094 - RNA, 19 nt, Artificial Sequence
  Description of Artificial Sequence: Synthetic oligonucleotide
  Sense strand starting at position 3801 of SEQ ID NO: 1882437
agaucauucugagaugagg

SEQ ID NO: 2121095 - RNA, 19 nt, Artificial Sequence
  Description of Artificial Sequence: Synthetic oligonucleotide
  Antisense strand to SEQ ID NO: 2121094
ccucaucucagaaugaucu

SEQ ID NO: 2121096 - RNA, 19 nt, Artificial Sequence
  Description of Artificial Sequence: Synthetic oligonucleotide
  Sense strand starting at position 3803 of SEQ ID NO: 1882437
aucauucugagaugagggu

SEQ ID NO: 2121097 - RNA, 19 nt, Artificial Sequence
  Description of Artificial Sequence: Synthetic oligonucleotide
  Antisense strand to SEQ ID NO: 2121096
acccucaucucagaaugau

SEQ ID NO: 2121098 - RNA, 19 nt, Artificial Sequence
  Description of Artificial Sequence: Synthetic oligonucleotide
  Sense strand starting at position 3889 of SEQ ID NO: 1882437
ggcacauggcaauauaaca

SEQ ID NO: 2121099 - RNA, 19 nt, Artificial Sequence
  Description of Artificial Sequence: Synthetic oligonucleotide
  Antisense strand to SEQ ID NO: 2121098
uguuauauugccaugugcc

SEQ ID NO: 2121100 - RNA, 19 nt, Artificial Sequence
  Description of Artificial Sequence: Synthetic oligonucleotide
  Sense strand starting at position 3933 of SEQ ID NO: 1882437
gagucagcccauuagaugu

SEQ ID NO: 2121101 - RNA, 19 nt, Artificial Sequence
  Description of Artificial Sequence: Synthetic oligonucleotide
  Antisense strand to SEQ ID NO: 2121100
acaucuaaugggcugacuc

SEQ ID NO: 2121102 - RNA, 19 nt, Artificial Sequence
  Description of Artificial Sequence: Synthetic oligonucleotide
  Sense strand starting at position 3981 of SEQ ID NO: 1882437
ugccaugugcccgucauua

SEQ ID NO: 2121103 - RNA, 19 nt, Artificial Sequence
  Description of Artificial Sequence: Synthetic oligonucleotide
  Antisense strand to SEQ ID NO: 2121102
uaaugacgggcacauggca

SEQ ID NO: 2121104 - RNA, 19 nt, Artificial Sequence
  Description of Artificial Sequence: Synthetic oligonucleotide
  Sense strand starting at position 3983 of SEQ ID NO: 1882437
ccaugugcccgucauuaag

SEQ ID NO: 2121105 - RNA, 19 nt, Artificial Sequence
  Description of Artificial Sequence: Synthetic oligonucleotide
  Antisense strand to SEQ ID NO: 2121104
cuuaaugacgggcacaugg

SEQ ID NO: 2121106 - RNA, 19 nt, Artificial Sequence
  Description of Artificial Sequence: Synthetic oligonucleotide
  Sense strand starting at position 29 of SEQ ID NO: 1882438
gguggucagacugaccuaa

SEQ ID NO: 2121107 - RNA, 19 nt, Artificial Sequence
  Description of Artificial Sequence: Synthetic oligonucleotide
  Antisense strand to SEQ ID NO: 2121106
uuaggucagucugaccacc

SEQ ID NO: 2121108 - RNA, 19 nt, Artificial Sequence
  Description of Artificial Sequence: Synthetic oligonucleotide
  Sense strand starting at position 84 of SEQ ID NO: 1882438
acauuucuccuucgguuua

SEQ ID NO: 2121109 - RNA, 19 nt, Artificial Sequence
  Description of Artificial Sequence: Synthetic oligonucleotide
  Antisense strand to SEQ ID NO: 2121108
uaaaccgaaggagaaaugu

SEQ ID NO: 2121110 - RNA, 19 nt, Artificial Sequence
  Description of Artificial Sequence: Synthetic oligonucleotide
  Sense strand starting at position 96 of SEQ ID NO: 1882438
cgguuuaucccagaagucu

SEQ ID NO: 2121111 - RNA, 19 nt, Artificial Sequence
  Description of Artificial Sequence: Synthetic oligonucleotide
  Antisense strand to SEQ ID NO: 2121110
agacuucugggauaaaccg

SEQ ID NO: 2121112 - RNA, 19 nt, Artificial Sequence
  Description of Artificial Sequence: Synthetic oligonucleotide
  Sense strand starting at position 314 of SEQ ID NO: 1882438
uuucuagcuguguagaaga

SEQ ID NO: 2121113 - RNA, 19 nt, Artificial Sequence
  Description of Artificial Sequence: Synthetic oligonucleotide
  Antisense strand to SEQ ID NO: 2121112
ucuucuacacagcuagaaa

SEQ ID NO: 2121114 - RNA, 19 nt, Artificial Sequence
  Description of Artificial Sequence: Synthetic oligonucleotide
  Sense strand starting at position 563 of SEQ ID NO: 1882438
guuucugacuuucuguauu

SEQ ID NO: 2121115 - RNA, 19 nt, Artificial Sequence
  Description of Artificial Sequence: Synthetic oligonucleotide
  Antisense strand to SEQ ID NO: 2121114
aauacagaaagucagaaac

SEQ ID NO: 2121116 - RNA, 19 nt, Artificial Sequence
  Description of Artificial Sequence: Synthetic oligonucleotide
  Sense strand starting at position 573 of SEQ ID NO: 1882438
uucuguauucugcaacuga

SEQ ID NO: 2121117 - RNA, 19 nt, Artificial Sequence
  Description of Artificial Sequence: Synthetic oligonucleotide
  Antisense strand to SEQ ID NO: 2121116
ucaguugcagaauacagaa

SEQ ID NO: 2121118 - RNA, 19 nt, Artificial Sequence
  Description of Artificial Sequence: Synthetic oligonucleotide
  Sense strand starting at position 604 of SEQ ID NO: 1882438
ggucacaucagguggaguu

SEQ ID NO: 2121119 - RNA, 19 nt, Artificial Sequence
  Description of Artificial Sequence: Synthetic oligonucleotide
  Antisense strand to SEQ ID NO: 2121118
aacuccaccugaugugacc

SEQ ID NO: 2121120 - RNA, 19 nt, Artificial Sequence
  Description of Artificial Sequence: Synthetic oligonucleotide
  Sense strand starting at position 624 of SEQ ID NO: 1882438
ucagucagguccucagagu

SEQ ID NO: 2121121 - RNA, 19 nt, Artificial Sequence
  Description of Artificial Sequence: Synthetic oligonucleotide
  Antisense strand to SEQ ID NO: 2121120
acucugaggaccugacuga

SEQ ID NO: 2121122 - RNA, 19 nt, Artificial Sequence
  Description of Artificial Sequence: Synthetic oligonucleotide
  Sense strand starting at position 637 of SEQ ID NO: 1882438
cagagugagccagguauga

SEQ ID NO: 2121123 - RNA, 19 nt, Artificial Sequence
  Description of Artificial Sequence: Synthetic oligonucleotide
  Antisense strand to SEQ ID NO: 2121122
ucauaccuggcucacucug

SEQ ID NO: 2121124 - RNA, 19 nt, Artificial Sequence
  Description of Artificial Sequence: Synthetic oligonucleotide
  Sense strand starting at position 654 of SEQ ID NO: 1882438
gaggguggcucaguaaaca

SEQ ID NO: 2121125 - RNA, 19 nt, Artificial Sequence
  Description of Artificial Sequence: Synthetic oligonucleotide
  Antisense strand to SEQ ID NO: 2121124
uguuuacugagccacccuc

SEQ ID NO: 2121126 - RNA, 19 nt, Artificial Sequence
  Description of Artificial Sequence: Synthetic oligonucleotide
  Sense strand starting at position 685 of SEQ ID NO: 1882438
ggcaaauguccaggucuca

SEQ ID NO: 2121127 - RNA, 19 nt, Artificial Sequence
  Description of Artificial Sequence: Synthetic oligonucleotide
  Antisense strand to SEQ ID NO: 2121126
ugagaccuggacauuugcc

SEQ ID NO: 2121128 - RNA, 19 nt, Artificial Sequence
  Description of Artificial Sequence: Synthetic oligonucleotide
  Sense strand starting at position 739 of SEQ ID NO: 1882438
gcaggugugcucuuguuaa

SEQ ID NO: 2121129 - RNA, 19 nt, Artificial Sequence
  Description of Artificial Sequence: Synthetic oligonucleotide
  Antisense strand to SEQ ID NO: 2121128
uuaacaagagcacaccugc

SEQ ID NO: 2121130 - RNA, 19 nt, Artificial Sequence
  Description of Artificial Sequence: Synthetic oligonucleotide
  Sense strand starting at position 883 of SEQ ID NO: 1882438
uuuacugauugggucacua

SEQ ID NO: 2121131 - RNA, 19 nt, Artificial Sequence
  Description of Artificial Sequence: Synthetic oligonucleotide
  Antisense strand to SEQ ID NO: 2121130
uagugacccaaucaguaaa

SEQ ID NO: 2121132 - RNA, 19 nt, Artificial Sequence
  Description of Artificial Sequence: Synthetic oligonucleotide
  Sense strand starting at position 885 of SEQ ID NO: 1882438
uacugauugggucacuacu

SEQ ID NO: 2121133 - RNA, 19 nt, Artificial Sequence
  Description of Artificial Sequence: Synthetic oligonucleotide
  Antisense strand to SEQ ID NO: 2121132
aguagugacccaaucagua

SEQ ID NO: 2121134 - RNA, 19 nt, Artificial Sequence
  Description of Artificial Sequence: Synthetic oligonucleotide
  Sense strand starting at position 887 of SEQ ID NO: 1882438
cugauugggucacuacuaa

SEQ ID NO: 2121135 - RNA, 19 nt, Artificial Sequence
  Description of Artificial Sequence: Synthetic oligonucleotide
  Antisense strand to SEQ ID NO: 2121134
uuaguagugacccaaucag

SEQ ID NO: 2121136 - RNA, 19 nt, Artificial Sequence
  Description of Artificial Sequence: Synthetic oligonucleotide
  Sense strand starting at position 902 of SEQ ID NO: 1882438
cuaaguaucccgcagaucu

SEQ ID NO: 2121137 - RNA, 19 nt, Artificial Sequence
  Description of Artificial Sequence: Synthetic oligonucleotide
  Antisense strand to SEQ ID NO: 2121136
agaucugcgggauacuuag

SEQ ID NO: 2121138 - RNA, 19 nt, Artificial Sequence
  Description of Artificial Sequence: Synthetic oligonucleotide
  Sense strand starting at position 975 of SEQ ID NO: 1882438
gaagguuucuugccaggaa

SEQ ID NO: 2121139 - RNA, 19 nt, Artificial Sequence
  Description of Artificial Sequence: Synthetic oligonucleotide
  Antisense strand to SEQ ID NO: 2121138
uuccuggcaagaaaccuuc

SEQ ID NO: 2121140 - RNA, 19 nt, Artificial Sequence
  Description of Artificial Sequence: Synthetic oligonucleotide
  Sense strand starting at position 978 of SEQ ID NO: 1882438
gguuucuugccaggaauca

SEQ ID NO: 2121141 - RNA, 19 nt, Artificial Sequence
  Description of Artificial Sequence: Synthetic oligonucleotide
  Antisense strand to SEQ ID NO: 2121140
ugauuccuggcaagaaacc

SEQ ID NO: 2121142 - RNA, 19 nt, Artificial Sequence
  Description of Artificial Sequence: Synthetic oligonucleotide
  Sense strand starting at position 979 of SEQ ID NO: 1882438
guuucuugccaggaaucac

SEQ ID NO: 2121143 - RNA, 19 nt, Artificial Sequence
  Description of Artificial Sequence: Synthetic oligonucleotide
  Antisense strand to SEQ ID NO: 2121142
gugauuccuggcaagaaac

SEQ ID NO: 2121144 - RNA, 19 nt, Artificial Sequence
  Description of Artificial Sequence: Synthetic oligonucleotide
  Sense strand starting at position 991 of SEQ ID NO: 1882438
gaaucacuguuguugccau

SEQ ID NO: 2121145 - RNA, 19 nt, Artificial Sequence
  Description of Artificial Sequence: Synthetic oligonucleotide
  Antisense strand to SEQ ID NO: 2121144
auggcaacaacagugauuc

SEQ ID NO: 2121146 - RNA, 19 nt, Artificial Sequence
  Description of Artificial Sequence: Synthetic oligonucleotide
  Sense strand starting at position 1028 of SEQ ID NO: 1882438
uagauaauuccuggacagu

SEQ ID NO: 2121147 - RNA, 19 nt, Artificial Sequence
  Description of Artificial Sequence: Synthetic oligonucleotide
  Antisense strand to SEQ ID NO: 2121146
acuguccaggaauuaucua

SEQ ID NO: 2121148 - RNA, 19 nt, Artificial Sequence
  Description of Artificial Sequence: Synthetic oligonucleotide
  Sense strand starting at position 1250 of SEQ ID NO: 1882438
uagacuaccgucuacagau

SEQ ID NO: 2121149 - RNA, 19 nt, Artificial Sequence
  Description of Artificial Sequence: Synthetic oligonucleotide
  Antisense strand to SEQ ID NO: 2121148
aucuguagacgguagucua

SEQ ID NO: 2121150 - RNA, 19 nt, Artificial Sequence
  Description of Artificial Sequence: Synthetic oligonucleotide
  Sense strand starting at position 1265 of SEQ ID NO: 1882438
agauucaucgcgcuuguuu

SEQ ID NO: 2121151 - RNA, 19 nt, Artificial Sequence
  Description of Artificial Sequence: Synthetic oligonucleotide
  Antisense strand to SEQ ID NO: 2121150
aaacaagcgcgaugaaucu

SEQ ID NO: 2121152 - RNA, 19 nt, Artificial Sequence
  Description of Artificial Sequence: Synthetic oligonucleotide
  Sense strand starting at position 1286 of SEQ ID NO: 1882438
uaaguagggucaucuaaau

SEQ ID NO: 2121153 - RNA, 19 nt, Artificial Sequence
  Description of Artificial Sequence: Synthetic oligonucleotide
  Antisense strand to SEQ ID NO: 2121152
auuuagaugacccuacuua

SEQ ID NO: 2121154 - RNA, 19 nt, Artificial Sequence
  Description of Artificial Sequence: Synthetic oligonucleotide
  Sense strand starting at position 1322 of SEQ ID NO: 1882438
ugaggacacugaugaaaga

SEQ ID NO: 2121155 - RNA, 19 nt, Artificial Sequence
  Description of Artificial Sequence: Synthetic oligonucleotide
  Antisense strand to SEQ ID NO: 2121154
ucuuucaucaguguccuca

SEQ ID NO: 2121156 - RNA, 19 nt, Artificial Sequence
  Description of Artificial Sequence: Synthetic oligonucleotide
  Sense strand starting at position 1370 of SEQ ID NO: 1882438
agaacuugauuacaggaaa

SEQ ID NO: 2121157 - RNA, 19 nt, Artificial Sequence
  Description of Artificial Sequence: Synthetic oligonucleotide
  Antisense strand to SEQ ID NO: 2121156
uuuccuguaaucaaguucu

SEQ ID NO: 2121158 - RNA, 19 nt, Artificial Sequence
  Description of Artificial Sequence: Synthetic oligonucleotide
  Sense strand starting at position 2563 of SEQ ID NO: 1882438
gucucuguggagugagagu

SEQ ID NO: 2121159 - RNA, 19 nt, Artificial Sequence
  Description of Artificial Sequence: Synthetic oligonucleotide
  Antisense strand to SEQ ID NO: 2121158
acucucacuccacagagac

SEQ ID NO: 2121160 - RNA, 19 nt, Artificial Sequence
  Description of Artificial Sequence: Synthetic oligonucleotide
  Sense strand starting at position 2707 of SEQ ID NO: 1882438
acaucaauguuacuuggaa

SEQ ID NO: 2121161 - RNA, 19 nt, Artificial Sequence
  Description of Artificial Sequence: Synthetic oligonucleotide
  Antisense strand to SEQ ID NO: 2121160
uuccaaguaacauugaugu

SEQ ID NO: 2121162 - RNA, 19 nt, Artificial Sequence
  Description of Artificial Sequence: Synthetic oligonucleotide
  Sense strand starting at position 2736 of SEQ ID NO: 1882438
aguuauugcuagguucuga

SEQ ID NO: 2121163 - RNA, 19 nt, Artificial Sequence
  Description of Artificial Sequence: Synthetic oligonucleotide
  Antisense strand to SEQ ID NO: 2121162
ucagaaccuagcaauaacu

SEQ ID NO: 2121164 - RNA, 19 nt, Artificial Sequence
  Description of Artificial Sequence: Synthetic oligonucleotide
  Sense strand starting at position 2785 of SEQ ID NO: 1882438
ggaaucgcuagcugaugaa

SEQ ID NO: 2121165 - RNA, 19 nt, Artificial Sequence
  Description of Artificial Sequence: Synthetic oligonucleotide
  Antisense strand to SEQ ID NO: 2121164
uucaucagcuagcgauucc

SEQ ID NO: 2121166 - RNA, 19 nt, Artificial Sequence
  Description of Artificial Sequence: Synthetic oligonucleotide
  Sense strand starting at position 2807 of SEQ ID NO: 1882438
ggguuucaggaagguaaua

SEQ ID NO: 2121167 - RNA, 19 nt, Artificial Sequence
  Description of Artificial Sequence: Synthetic oligonucleotide
  Antisense strand to SEQ ID NO: 2121166
uauuaccuuccugaaaccc

SEQ ID NO: 2121168 - RNA, 19 nt, Artificial Sequence
  Description of Artificial Sequence: Synthetic oligonucleotide
  Sense strand starting at position 3064 of SEQ ID NO: 1882438
auuaaauugccaggccaga

SEQ ID NO: 2121169 - RNA, 19 nt, Artificial Sequence
  Description of Artificial Sequence: Synthetic oligonucleotide
  Antisense strand to SEQ ID NO: 2121168
ucuggccuggcaauuuaau

SEQ ID NO: 2121170 - RNA, 19 nt, Artificial Sequence
  Description of Artificial Sequence: Synthetic oligonucleotide
  Sense strand starting at position 3253 of SEQ ID NO: 1882438
ugaggaucacuaggcuaga

SEQ ID NO: 2121171 - RNA, 19 nt, Artificial Sequence
  Description of Artificial Sequence: Synthetic oligonucleotide
  Antisense strand to SEQ ID NO: 2121170
ucuagccuagugauccuca

SEQ ID NO: 2121172 - RNA, 19 nt, Artificial Sequence
  Description of Artificial Sequence: Synthetic oligonucleotide
  Sense strand starting at position 3254 of SEQ ID NO: 1882438
gaggaucacuaggcuagau

SEQ ID NO: 2121173 - RNA, 19 nt, Artificial Sequence
  Description of Artificial Sequence: Synthetic oligonucleotide
  Antisense strand to SEQ ID NO: 2121172
aucuagccuagugauccuc

SEQ ID NO: 2121174 - RNA, 19 nt, Artificial Sequence
  Description of Artificial Sequence: Synthetic oligonucleotide
  Sense strand starting at position 3308 of SEQ ID NO: 1882438
ccagcauuggagcaacauu

SEQ ID NO: 2121175 - RNA, 19 nt, Artificial Sequence
  Description of Artificial Sequence: Synthetic oligonucleotide
  Antisense strand to SEQ ID NO: 2121174
aauguugcuccaaugcugg

SEQ ID NO: 2121176 - RNA, 19 nt, Artificial Sequence
  Description of Artificial Sequence: Synthetic oligonucleotide
  Sense strand starting at position 3351 of SEQ ID NO: 1882438
gcugaagugagguauauga

SEQ ID NO: 2121177 - RNA, 19 nt, Artificial Sequence
  Description of Artificial Sequence: Synthetic oligonucleotide
  Antisense strand to SEQ ID NO: 2121176
ucauauaccucacuucagc

SEQ ID NO: 2121178 - RNA, 19 nt, Artificial Sequence
  Description of Artificial Sequence: Synthetic oligonucleotide
  Sense strand starting at position 3412 of SEQ ID NO: 1882438
ucagauaugaguugcugga

SEQ ID NO: 2121179 - RNA, 19 nt, Artificial Sequence
  Description of Artificial Sequence: Synthetic oligonucleotide
  Antisense strand to SEQ ID NO: 2121178
uccagcaacucauaucuga

SEQ ID NO: 2121180 - RNA, 19 nt, Artificial Sequence
  Description of Artificial Sequence: Synthetic oligonucleotide
  Sense strand starting at position 3414 of SEQ ID NO: 1882438
agauaugaguugcuggaaa

SEQ ID NO: 2121181 - RNA, 19 nt, Artificial Sequence
  Description of Artificial Sequence: Synthetic oligonucleotide
  Antisense strand to SEQ ID NO: 2121180
uuuccagcaacucauaucu

SEQ ID NO: 2121182 - RNA, 19 nt, Artificial Sequence
  Description of Artificial Sequence: Synthetic oligonucleotide
  Sense strand starting at position 3452 of SEQ ID NO: 1882438
ggaaguauuucuggagcaa

SEQ ID NO: 2121183 - RNA, 19 nt, Artificial Sequence
  Description of Artificial Sequence: Synthetic oligonucleotide
  Antisense strand to SEQ ID NO: 2121182
uugcuccagaaauacuucc

SEQ ID NO: 2121184 - RNA, 19 nt, Artificial Sequence
  Description of Artificial Sequence: Synthetic oligonucleotide
  Sense strand starting at position 3764 of SEQ ID NO: 1882438
auguauuagccuuacacag

SEQ ID NO: 2121185 - RNA, 19 nt, Artificial Sequence
  Description of Artificial Sequence: Synthetic oligonucleotide
  Antisense strand to SEQ ID NO: 2121184
cuguguaaggcuaauacau

SEQ ID NO: 2121186 - RNA, 19 nt, Artificial Sequence
  Description of Artificial Sequence: Synthetic oligonucleotide
  Sense strand starting at position 33 of SEQ ID NO: 1882439
cugucuaugguuuacuuua

SEQ ID NO: 2121187 - RNA, 19 nt, Artificial Sequence
  Description of Artificial Sequence: Synthetic oligonucleotide
  Antisense strand to SEQ ID NO: 2121186
uaaaguaaaccauagacag

SEQ ID NO: 2121188 - RNA, 19 nt, Artificial Sequence
  Description of Artificial Sequence: Synthetic oligonucleotide
  Sense strand starting at position 268 of SEQ ID NO: 1882439
aauagugacgucuagcaca

SEQ ID NO: 2121189 - RNA, 19 nt, Artificial Sequence
  Description of Artificial Sequence: Synthetic oligonucleotide
  Antisense strand to SEQ ID NO: 2121188
ugugcuagacgucacuauu

SEQ ID NO: 2121190 - RNA, 19 nt, Artificial Sequence
  Description of Artificial Sequence: Synthetic oligonucleotide
  Sense strand starting at position 420 of SEQ ID NO: 1882439
uagauagaauucgucaaca

SEQ ID NO: 2121191 - RNA, 19 nt, Artificial Sequence
  Description of Artificial Sequence: Synthetic oligonucleotide
  Antisense strand to SEQ ID NO: 2121190
uguugacgaauucuaucua

SEQ ID NO: 2121192 - RNA, 19 nt, Artificial Sequence
  Description of Artificial Sequence: Synthetic oligonucleotide
  Sense strand starting at position 422 of SEQ ID NO: 1882439
gauagaauucgucaacauc

SEQ ID NO: 2121193 - RNA, 19 nt, Artificial Sequence
  Description of Artificial Sequence: Synthetic oligonucleotide
  Antisense strand to SEQ ID NO: 2121192
gauguugacgaauucuauc

SEQ ID NO: 2121194 - RNA, 19 nt, Artificial Sequence
  Description of Artificial Sequence: Synthetic oligonucleotide
  Sense strand starting at position 425 of SEQ ID NO: 1882439
agaauucgucaacaucauc

SEQ ID NO: 2121195 - RNA, 19 nt, Artificial Sequence
  Description of Artificial Sequence: Synthetic oligonucleotide
  Antisense strand to SEQ ID NO: 2121194
gaugauguugacgaauucu

SEQ ID NO: 2121196 - RNA, 19 nt, Artificial Sequence
  Description of Artificial Sequence: Synthetic oligonucleotide
  Sense strand starting at position 586 of SEQ ID NO: 1882439
aacauuuggucagggauag

SEQ ID NO: 2121197 - RNA, 19 nt, Artificial Sequence
  Description of Artificial Sequence: Synthetic oligonucleotide
  Antisense strand to SEQ ID NO: 2121196
cuaucccugaccaaauguu

SEQ ID NO: 2121198 - RNA, 19 nt, Artificial Sequence
  Description of Artificial Sequence: Synthetic oligonucleotide
  Sense strand starting at position 658 of SEQ ID NO: 1882439
gguguauaaacuuauagug

SEQ ID NO: 2121199 - RNA, 19 nt, Artificial Sequence
  Description of Artificial Sequence: Synthetic oligonucleotide
  Antisense strand to SEQ ID NO: 2121198
cacuauaaguuuauacacc

SEQ ID NO: 2121200 - RNA, 19 nt, Artificial Sequence
  Description of Artificial Sequence: Synthetic oligonucleotide
  Sense strand starting at position 753 of SEQ ID NO: 1882439
gccuaauaaaugggucaag

SEQ ID NO: 2121201 - RNA, 19 nt, Artificial Sequence
  Description of Artificial Sequence: Synthetic oligonucleotide
  Antisense strand to SEQ ID NO: 2121200
cuugacccauuuauuaggc

SEQ ID NO: 2121202 - RNA, 19 nt, Artificial Sequence
  Description of Artificial Sequence: Synthetic oligonucleotide
  Sense strand starting at position 754 of SEQ ID NO: 1882439
ccuaauaaaugggucaagu

SEQ ID NO: 2121203 - RNA, 19 nt, Artificial Sequence
  Description of Artificial Sequence: Synthetic oligonucleotide
  Antisense strand to SEQ ID NO: 2121202
acuugacccauuuauuagg

SEQ ID NO: 2121204 - RNA, 19 nt, Artificial Sequence
  Description of Artificial Sequence: Synthetic oligonucleotide
  Sense strand starting at position 756 of SEQ ID NO: 1882439
uaauaaaugggucaagugu

SEQ ID NO: 2121205 - RNA, 19 nt, Artificial Sequence
  Description of Artificial Sequence: Synthetic oligonucleotide
  Antisense strand to SEQ ID NO: 2121204
acacuugacccauuuauua

SEQ ID NO: 2121206 - RNA, 19 nt, Artificial Sequence
  Description of Artificial Sequence: Synthetic oligonucleotide
  Sense strand starting at position 1118 of SEQ ID NO: 1882439
ucugaaaggugcucuaaug

SEQ ID NO: 2121207 - RNA, 19 nt, Artificial Sequence
  Description of Artificial Sequence: Synthetic oligonucleotide
  Antisense strand to SEQ ID NO: 2121206
cauuagagcaccuuucaga

SEQ ID NO: 2121208 - RNA, 19 nt, Artificial Sequence
  Description of Artificial Sequence: Synthetic oligonucleotide
  Sense strand starting at position 1126 of SEQ ID NO: 1882439
gugcucuaaugacuauaau

SEQ ID NO: 2121209 - RNA, 19 nt, Artificial Sequence
  Description of Artificial Sequence: Synthetic oligonucleotide
  Antisense strand to SEQ ID NO: 2121208
auuauagucauuagagcac

SEQ ID NO: 2121210 - RNA, 19 nt, Artificial Sequence
  Description of Artificial Sequence: Synthetic oligonucleotide
  Sense strand starting at position 1262 of SEQ ID NO: 1882439
gguaguaccaaaugagcaa

SEQ ID NO: 2121211 - RNA, 19 nt, Artificial Sequence
  Description of Artificial Sequence: Synthetic oligonucleotide
  Antisense strand to SEQ ID NO: 2121210
uugcucauuugguacuacc

SEQ ID NO: 2121212 - RNA, 19 nt, Artificial Sequence
  Description of Artificial Sequence: Synthetic oligonucleotide
  Sense strand starting at position 1313 of SEQ ID NO: 1882439
aggucauaugccuaacagu

SEQ ID NO: 2121213 - RNA, 19 nt, Artificial Sequence
  Description of Artificial Sequence: Synthetic oligonucleotide
  Antisense strand to SEQ ID NO: 2121212
acuguuaggcauaugaccu

SEQ ID NO: 2121214 - RNA, 19 nt, Artificial Sequence
  Description of Artificial Sequence: Synthetic oligonucleotide
  Sense strand starting at position 1399 of SEQ ID NO: 1882439
gguggaaagugauccaacu

SEQ ID NO: 2121215 - RNA, 19 nt, Artificial Sequence
  Description of Artificial Sequence: Synthetic oligonucleotide
  Antisense strand to SEQ ID NO: 2121214
aguuggaucacuuuccacc

SEQ ID NO: 2121216 - RNA, 19 nt, Artificial Sequence
  Description of Artificial Sequence: Synthetic oligonucleotide
  Sense strand starting at position 1437 of SEQ ID NO: 1882439
cuuauuugcuaaguagcua

SEQ ID NO: 2121217 - RNA, 19 nt, Artificial Sequence
  Description of Artificial Sequence: Synthetic oligonucleotide
  Antisense strand to SEQ ID NO: 2121216
uagcuacuuagcaaauaag

SEQ ID NO: 2121218 - RNA, 19 nt, Artificial Sequence
  Description of Artificial Sequence: Synthetic oligonucleotide
  Sense strand starting at position 1515 of SEQ ID NO: 1882439
uuguacuggguggauuaaa

SEQ ID NO: 2121219 - RNA, 19 nt, Artificial Sequence
  Description of Artificial Sequence: Synthetic oligonucleotide
  Antisense strand to SEQ ID NO: 2121218
uuuaauccacccaguacaa

SEQ ID NO: 2121220 - RNA, 19 nt, Artificial Sequence
  Description of Artificial Sequence: Synthetic oligonucleotide
  Sense strand starting at position 1666 of SEQ ID NO: 1882439
ucuauuacugcuuagcuga

SEQ ID NO: 2121221 - RNA, 19 nt, Artificial Sequence
  Description of Artificial Sequence: Synthetic oligonucleotide
  Antisense strand to SEQ ID NO: 2121220
ucagcuaagcaguaauaga

SEQ ID NO: 2121222 - RNA, 19 nt, Artificial Sequence
  Description of Artificial Sequence: Synthetic oligonucleotide
  Sense strand starting at position 1703 of SEQ ID NO: 1882439
acaggaacuuuagugacua

SEQ ID NO: 2121223 - RNA, 19 nt, Artificial Sequence
  Description of Artificial Sequence: Synthetic oligonucleotide
  Antisense strand to SEQ ID NO: 2121222
uagucacuaaaguuccugu

SEQ ID NO: 2121224 - RNA, 19 nt, Artificial Sequence
  Description of Artificial Sequence: Synthetic oligonucleotide
  Sense strand starting at position 2525 of SEQ ID NO: 1882439
cuaagaguucgggaaggcu

SEQ ID NO: 2121225 - RNA, 19 nt, Artificial Sequence
  Description of Artificial Sequence: Synthetic oligonucleotide
  Antisense strand to SEQ ID NO: 2121224
agccuucccgaacucuuag

SEQ ID NO: 2121226 - RNA, 19 nt, Artificial Sequence
  Description of Artificial Sequence: Synthetic oligonucleotide
  Sense strand starting at position 2876 of SEQ ID NO: 1882439
ccuaauaucuuuguuugag

SEQ ID NO: 2121227 - RNA, 19 nt, Artificial Sequence
  Description of Artificial Sequence: Synthetic oligonucleotide
  Antisense strand to SEQ ID NO: 2121226
cucaaacaaagauauuagg

SEQ ID NO: 2121228 - RNA, 19 nt, Artificial Sequence
  Description of Artificial Sequence: Synthetic oligonucleotide
  Sense strand starting at position 2877 of SEQ ID NO: 1882439
cuaauaucuuuguuugagg

SEQ ID NO: 2121229 - RNA, 19 nt, Artificial Sequence
  Description of Artificial Sequence: Synthetic oligonucleotide
  Antisense strand to SEQ ID NO: 2121228
ccucaaacaaagauauuag

SEQ ID NO: 2121230 - RNA, 19 nt, Artificial Sequence
  Description of Artificial Sequence: Synthetic oligonucleotide
  Sense strand starting at position 2894 of SEQ ID NO: 1882439
gguggaaucuucuuauuaa

SEQ ID NO: 2121231 - RNA, 19 nt, Artificial Sequence
  Description of Artificial Sequence: Synthetic oligonucleotide
  Antisense strand to SEQ ID NO: 2121230
uuaauaagaagauuccacc

SEQ ID NO: 2121232 - RNA, 19 nt, Artificial Sequence
  Description of Artificial Sequence: Synthetic oligonucleotide
  Sense strand starting at position 3079 of SEQ ID NO: 1882439
auaauaaccuguuuguuag

SEQ ID NO: 2121233 - RNA, 19 nt, Artificial Sequence
  Description of Artificial Sequence: Synthetic oligonucleotide
  Antisense strand to SEQ ID NO: 2121232
cuaacaaacagguuauuau

SEQ ID NO: 2121234 - RNA, 19 nt, Artificial Sequence
  Description of Artificial Sequence: Synthetic oligonucleotide
  Sense strand starting at position 3095 of SEQ ID NO: 1882439
uaguauaacuuagugggua

SEQ ID NO: 2121235 - RNA, 19 nt, Artificial Sequence
  Description of Artificial Sequence: Synthetic oligonucleotide
  Antisense strand to SEQ ID NO: 2121234
uacccacuaaguuauacua

SEQ ID NO: 2121236 - RNA, 19 nt, Artificial Sequence
  Description of Artificial Sequence: Synthetic oligonucleotide
  Sense strand starting at position 3097 of SEQ ID NO: 1882439
guauaacuuaguggguaga

SEQ ID NO: 2121237 - RNA, 19 nt, Artificial Sequence
  Description of Artificial Sequence: Synthetic oligonucleotide
  Antisense strand to SEQ ID NO: 2121236
ucuacccacuaaguuauac

SEQ ID NO: 2121238 - RNA, 19 nt, Artificial Sequence
  Description of Artificial Sequence: Synthetic oligonucleotide
  Sense strand starting at position 3099 of SEQ ID NO: 1882439
auaacuuaguggguagaga

SEQ ID NO: 2121239 - RNA, 19 nt, Artificial Sequence
  Description of Artificial Sequence: Synthetic oligonucleotide
  Antisense strand to SEQ ID NO: 2121238
ucucuacccacuaaguuau

SEQ ID NO: 2121240 - RNA, 19 nt, Artificial Sequence
  Description of Artificial Sequence: Synthetic oligonucleotide
  Sense strand starting at position 3188 of SEQ ID NO: 1882439
uuggaucaggcauauguuu

SEQ ID NO: 2121241 - RNA, 19 nt, Artificial Sequence
  Description of Artificial Sequence: Synthetic oligonucleotide
  Antisense strand to SEQ ID NO: 2121240
aaacauaugccugauccaa

SEQ ID NO: 2121242 - RNA, 19 nt, Artificial Sequence
  Description of Artificial Sequence: Synthetic oligonucleotide
  Sense strand starting at position 3190 of SEQ ID NO: 1882439
ggaucaggcauauguuuaa

SEQ ID NO: 2121243 - RNA, 19 nt, Artificial Sequence
  Description of Artificial Sequence: Synthetic oligonucleotide
  Antisense strand to SEQ ID NO: 2121242
uuaaacauaugccugaucc

SEQ ID NO: 2121244 - RNA, 19 nt, Artificial Sequence
  Description of Artificial Sequence: Synthetic oligonucleotide
  Sense strand starting at position 3256 of SEQ ID NO: 1882439
cugucuuauggcuaugaca

SEQ ID NO: 2121245 - RNA, 19 nt, Artificial Sequence
  Description of Artificial Sequence: Synthetic oligonucleotide
  Antisense strand to SEQ ID NO: 2121244
ugucauagccauaagacag

SEQ ID NO: 2121246 - RNA, 19 nt, Artificial Sequence
  Description of Artificial Sequence: Synthetic oligonucleotide
  Sense strand starting at position 3258 of SEQ ID NO: 1882439
gucuuauggcuaugacaag

SEQ ID NO: 2121247 - RNA, 19 nt, Artificial Sequence
  Description of Artificial Sequence: Synthetic oligonucleotide
  Antisense strand to SEQ ID NO: 2121246
cuugucauagccauaagac

SEQ ID NO: 2121248 - RNA, 19 nt, Artificial Sequence
  Description of Artificial Sequence: Synthetic oligonucleotide
  Sense strand starting at position 3281 of SEQ ID NO: 1882439
uuacaagggcaauguuauu

SEQ ID NO: 2121249 - RNA, 19 nt, Artificial Sequence
  Description of Artificial Sequence: Synthetic oligonucleotide
  Antisense strand to SEQ ID NO: 2121248
aauaacauugcccuuguaa

SEQ ID NO: 2121250 - RNA, 19 nt, Artificial Sequence
  Description of Artificial Sequence: Synthetic oligonucleotide
  Sense strand starting at position 3300 of SEQ ID NO: 1882439
cgacucuuagccuaacaca

SEQ ID NO: 2121251 - RNA, 19 nt, Artificial Sequence
  Description of Artificial Sequence: Synthetic oligonucleotide
  Antisense strand to SEQ ID NO: 2121250
uguguuaggcuaagagucg

SEQ ID NO: 2121252 - RNA, 19 nt, Artificial Sequence
  Description of Artificial Sequence: Synthetic oligonucleotide
  Sense strand starting at position 3318 of SEQ ID NO: 1882439
agacuauuagacugcacaa

SEQ ID NO: 2121253 - RNA, 19 nt, Artificial Sequence
  Description of Artificial Sequence: Synthetic oligonucleotide
  Antisense strand to SEQ ID NO: 2121252
uugugcagucuaauagucu

SEQ ID NO: 2121254 - RNA, 19 nt, Artificial Sequence
  Description of Artificial Sequence: Synthetic oligonucleotide
  Sense strand starting at position 3400 of SEQ ID NO: 1882439
gccacagaauguuucugaa

SEQ ID NO: 2121255 - RNA, 19 nt, Artificial Sequence
  Description of Artificial Sequence: Synthetic oligonucleotide
  Antisense strand to SEQ ID NO: 2121254
uucagaaacauucuguggc

SEQ ID NO: 2121256 - RNA, 19 nt, Artificial Sequence
  Description of Artificial Sequence: Synthetic oligonucleotide
  Sense strand starting at position 3428 of SEQ ID NO: 1882439
uaguuaguuaaacggagau

SEQ ID NO: 2121257 - RNA, 19 nt, Artificial Sequence
  Description of Artificial Sequence: Synthetic oligonucleotide
  Antisense strand to SEQ ID NO: 2121256
aucuccguuuaacuaacua

SEQ ID NO: 2121258 - RNA, 19 nt, Artificial Sequence
  Description of Artificial Sequence: Synthetic oligonucleotide
  Sense strand starting at position 3658 of SEQ ID NO: 1882439
gugggcuaaaugcauaaga

SEQ ID NO: 2121259 - RNA, 19 nt, Artificial Sequence
  Description of Artificial Sequence: Synthetic oligonucleotide
  Antisense strand to SEQ ID NO: 2121258
ucuuaugcauuuagcccac

SEQ ID NO: 2121260 - RNA, 19 nt, Artificial Sequence
  Description of Artificial Sequence: Synthetic oligonucleotide
  Sense strand starting at position 3719 of SEQ ID NO: 1882439
acuuuaguccuagagucag

SEQ ID NO: 2121261 - RNA, 19 nt, Artificial Sequence
  Description of Artificial Sequence: Synthetic oligonucleotide
  Antisense strand to SEQ ID NO: 2121260
cugacucuaggacuaaagu

SEQ ID NO: 2121262 - RNA, 19 nt, Artificial Sequence
  Description of Artificial Sequence: Synthetic oligonucleotide
  Sense strand starting at position 3773 of SEQ ID NO: 1882439
uuggaugcccauuagaacu

SEQ ID NO: 2121263 - RNA, 19 nt, Artificial Sequence
  Description of Artificial Sequence: Synthetic oligonucleotide
  Antisense strand to SEQ ID NO: 2121262
aguucuaaugggcauccaa

SEQ ID NO: 2121264 - RNA, 19 nt, Artificial Sequence
  Description of Artificial Sequence: Synthetic oligonucleotide
  Sense strand starting at position 3781 of SEQ ID NO: 1882439
ccauuagaacuauggcuca

SEQ ID NO: 2121265 - RNA, 19 nt, Artificial Sequence
  Description of Artificial Sequence: Synthetic oligonucleotide
  Antisense strand to SEQ ID NO: 2121264
ugagccauaguucuaaugg

SEQ ID NO: 2121266 - RNA, 19 nt, Artificial Sequence
  Description of Artificial Sequence: Synthetic oligonucleotide
  Sense strand starting at position 96 of SEQ ID NO: 1882440
uugaguccacaguaaacuu

SEQ ID NO: 2121267 - RNA, 19 nt, Artificial Sequence
  Description of Artificial Sequence: Synthetic oligonucleotide
  Antisense strand to SEQ ID NO: 2121266
aaguuuacuguggacucaa

SEQ ID NO: 2121268 - RNA, 19 nt, Artificial Sequence
  Description of Artificial Sequence: Synthetic oligonucleotide
  Sense strand starting at position 136 of SEQ ID NO: 1882440
ugagaugaauguuuaagua

SEQ ID NO: 2121269 - RNA, 19 nt, Artificial Sequence
  Description of Artificial Sequence: Synthetic oligonucleotide
  Antisense strand to SEQ ID NO: 2121268
uacuuaaacauucaucuca

SEQ ID NO: 2121270 - RNA, 19 nt, Artificial Sequence
  Description of Artificial Sequence: Synthetic oligonucleotide
  Sense strand starting at position 150 of SEQ ID NO: 1882440
aaguaaggcuuucucauga

SEQ ID NO: 2121271 - RNA, 19 nt, Artificial Sequence
  Description of Artificial Sequence: Synthetic oligonucleotide
  Antisense strand to SEQ ID NO: 2121270
ucaugagaaagccuuacuu

SEQ ID NO: 2121272 - RNA, 19 nt, Artificial Sequence
  Description of Artificial Sequence: Synthetic oligonucleotide
  Sense strand starting at position 155 of SEQ ID NO: 1882440
aggcuuucucaugagccaa

SEQ ID NO: 2121273 - RNA, 19 nt, Artificial Sequence
  Description of Artificial Sequence: Synthetic oligonucleotide
  Antisense strand to SEQ ID NO: 2121272
uuggcucaugagaaagccu

SEQ ID NO: 2121274 - RNA, 19 nt, Artificial Sequence
  Description of Artificial Sequence: Synthetic oligonucleotide
  Sense strand starting at position 278 of SEQ ID NO: 1882440
ggucuuucugcugcuaagu

SEQ ID NO: 2121275 - RNA, 19 nt, Artificial Sequence
  Description of Artificial Sequence: Synthetic oligonucleotide
  Antisense strand to SEQ ID NO: 2121274
acuuagcagcagaaagacc

SEQ ID NO: 2121276 - RNA, 19 nt, Artificial Sequence
  Description of Artificial Sequence: Synthetic oligonucleotide
  Sense strand starting at position 437 of SEQ ID NO: 1882440
gcuaauaauuauguuggga

SEQ ID NO: 2121277 - RNA, 19 nt, Artificial Sequence
  Description of Artificial Sequence: Synthetic oligonucleotide
  Antisense strand to SEQ ID NO: 2121276
ucccaacauaauuauuagc

SEQ ID NO: 2121278 - RNA, 19 nt, Artificial Sequence
  Description of Artificial Sequence: Synthetic oligonucleotide
  Sense strand starting at position 486 of SEQ ID NO: 1882440
ggcauauggccauacuauu

SEQ ID NO: 2121279 - RNA, 19 nt, Artificial Sequence
  Description of Artificial Sequence: Synthetic oligonucleotide
  Antisense strand to SEQ ID NO: 2121278
aauaguauggccauaugcc

SEQ ID NO: 2121280 - RNA, 19 nt, Artificial Sequence
  Description of Artificial Sequence: Synthetic oligonucleotide
  Sense strand starting at position 702 of SEQ ID NO: 1882440
agaguugugugagcagaca

SEQ ID NO: 2121281 - RNA, 19 nt, Artificial Sequence
  Description of Artificial Sequence: Synthetic oligonucleotide
  Antisense strand to SEQ ID NO: 2121280
ugucugcucacacaacucu

SEQ ID NO: 2121282 - RNA, 19 nt, Artificial Sequence
  Description of Artificial Sequence: Synthetic oligonucleotide
  Sense strand starting at position 973 of SEQ ID NO: 1882440
gucugagauccuugaaggg

SEQ ID NO: 2121283 - RNA, 19 nt, Artificial Sequence
  Description of Artificial Sequence: Synthetic oligonucleotide
  Antisense strand to SEQ ID NO: 2121282
cccuucaaggaucucagac

SEQ ID NO: 2121284 - RNA, 19 nt, Artificial Sequence
  Description of Artificial Sequence: Synthetic oligonucleotide
  Sense strand starting at position 1344 of SEQ ID NO: 1882440
ccaucugauuggcugaaca

SEQ ID NO: 2121285 - RNA, 19 nt, Artificial Sequence
  Description of Artificial Sequence: Synthetic oligonucleotide
  Antisense strand to SEQ ID NO: 2121284
uguucagccaaucagaugg

SEQ ID NO: 2121286 - RNA, 19 nt, Artificial Sequence
  Description of Artificial Sequence: Synthetic oligonucleotide
  Sense strand starting at position 1346 of SEQ ID NO: 1882440
aucugauuggcugaacagu

SEQ ID NO: 2121287 - RNA, 19 nt, Artificial Sequence
  Description of Artificial Sequence: Synthetic oligonucleotide
  Antisense strand to SEQ ID NO: 2121286
acuguucagccaaucagau

SEQ ID NO: 2121288 - RNA, 19 nt, Artificial Sequence
  Description of Artificial Sequence: Synthetic oligonucleotide
  Sense strand starting at position 1355 of SEQ ID NO: 1882440
gcugaacagucaucaauga

SEQ ID NO: 2121289 - RNA, 19 nt, Artificial Sequence
  Description of Artificial Sequence: Synthetic oligonucleotide
  Antisense strand to SEQ ID NO: 2121288
ucauugaugacuguucagc

SEQ ID NO: 2121290 - RNA, 19 nt, Artificial Sequence
  Description of Artificial Sequence: Synthetic oligonucleotide
  Sense strand starting at position 1391 of SEQ ID NO: 1882440
guagccuuugcccagaacu

SEQ ID NO: 2121291 - RNA, 19 nt, Artificial Sequence
  Description of Artificial Sequence: Synthetic oligonucleotide
  Antisense strand to SEQ ID NO: 2121290
aguucugggcaaaggcuac

SEQ ID NO: 2121292 - RNA, 19 nt, Artificial Sequence
  Description of Artificial Sequence: Synthetic oligonucleotide
  Sense strand starting at position 1487 of SEQ ID NO: 1882440
aggaaucugucugccuuua

SEQ ID NO: 2121293 - RNA, 19 nt, Artificial Sequence
  Description of Artificial Sequence: Synthetic oligonucleotide
  Antisense strand to SEQ ID NO: 2121292
uaaaggcagacagauuccu

SEQ ID NO: 2121294 - RNA, 19 nt, Artificial Sequence
  Description of Artificial Sequence: Synthetic oligonucleotide
  Sense strand starting at position 2054 of SEQ ID NO: 1882440
cauagaaguuccuugaaga

SEQ ID NO: 2121295 - RNA, 19 nt, Artificial Sequence
  Description of Artificial Sequence: Synthetic oligonucleotide
  Antisense strand to SEQ ID NO: 2121294
ucuucaaggaacuucuaug

SEQ ID NO: 2121296 - RNA, 19 nt, Artificial Sequence
  Description of Artificial Sequence: Synthetic oligonucleotide
  Sense strand starting at position 2055 of SEQ ID NO: 1882440
auagaaguuccuugaagac

SEQ ID NO: 2121297 - RNA, 19 nt, Artificial Sequence
  Description of Artificial Sequence: Synthetic oligonucleotide
  Antisense strand to SEQ ID NO: 2121296
gucuucaaggaacuucuau

SEQ ID NO: 2121298 - RNA, 19 nt, Artificial Sequence
  Description of Artificial Sequence: Synthetic oligonucleotide
  Sense strand starting at position 2223 of SEQ ID NO: 1882440
uuaacacauguugacgaau

SEQ ID NO: 2121299 - RNA, 19 nt, Artificial Sequence
  Description of Artificial Sequence: Synthetic oligonucleotide
  Antisense strand to SEQ ID NO: 2121298
auucgucaacauguguuaa

SEQ ID NO: 2121300 - RNA, 19 nt, Artificial Sequence
  Description of Artificial Sequence: Synthetic oligonucleotide
  Sense strand starting at position 2475 of SEQ ID NO: 1882440
acgauauggucuccacacu

SEQ ID NO: 2121301 - RNA, 19 nt, Artificial Sequence
  Description of Artificial Sequence: Synthetic oligonucleotide
  Antisense strand to SEQ ID NO: 2121300
aguguggagaccauaucgu

SEQ ID NO: 2121302 - RNA, 19 nt, Artificial Sequence
  Description of Artificial Sequence: Synthetic oligonucleotide
  Sense strand starting at position 2637 of SEQ ID NO: 1882440
guccuaaagcagcaacauu

SEQ ID NO: 2121303 - RNA, 19 nt, Artificial Sequence
  Description of Artificial Sequence: Synthetic oligonucleotide
  Antisense strand to SEQ ID NO: 2121302
aauguugcugcuuuaggac

SEQ ID NO: 2121304 - RNA, 19 nt, Artificial Sequence
  Description of Artificial Sequence: Synthetic oligonucleotide
  Sense strand starting at position 2709 of SEQ ID NO: 1882440
cugcuauaucugcauagug

SEQ ID NO: 2121305 - RNA, 19 nt, Artificial Sequence
  Description of Artificial Sequence: Synthetic oligonucleotide
  Antisense strand to SEQ ID NO: 2121304
cacuaugcagauauagcag

SEQ ID NO: 2121306 - RNA, 19 nt, Artificial Sequence
  Description of Artificial Sequence: Synthetic oligonucleotide
  Sense strand starting at position 2711 of SEQ ID NO: 1882440
gcuauaucugcauagugaa

SEQ ID NO: 2121307 - RNA, 19 nt, Artificial Sequence
  Description of Artificial Sequence: Synthetic oligonucleotide
  Antisense strand to SEQ ID NO: 2121306
uucacuaugcagauauagc

SEQ ID NO: 2121308 - RNA, 19 nt, Artificial Sequence
  Description of Artificial Sequence: Synthetic oligonucleotide
  Sense strand starting at position 2718 of SEQ ID NO: 1882440
cugcauagugaaugggaaa

SEQ ID NO: 2121309 - RNA, 19 nt, Artificial Sequence
  Description of Artificial Sequence: Synthetic oligonucleotide
  Antisense strand to SEQ ID NO: 2121308
uuucccauucacuaugcag

SEQ ID NO: 2121310 - RNA, 19 nt, Artificial Sequence
  Description of Artificial Sequence: Synthetic oligonucleotide
  Sense strand starting at position 2908 of SEQ ID NO: 1882440
ugugguguuauuuggcaaa

SEQ ID NO: 2121311 - RNA, 19 nt, Artificial Sequence
  Description of Artificial Sequence: Synthetic oligonucleotide
  Antisense strand to SEQ ID NO: 2121310
uuugccaaauaacaccaca

SEQ ID NO: 2121312 - RNA, 19 nt, Artificial Sequence
  Description of Artificial Sequence: Synthetic oligonucleotide
  Sense strand starting at position 2933 of SEQ ID NO: 1882440
cagaaauaacuguguccug

SEQ ID NO: 2121313 - RNA, 19 nt, Artificial Sequence
  Description of Artificial Sequence: Synthetic oligonucleotide
  Antisense strand to SEQ ID NO: 2121312
caggacacaguuauuucug

SEQ ID NO: 2121314 - RNA, 19 nt, Artificial Sequence
  Description of Artificial Sequence: Synthetic oligonucleotide
  Sense strand starting at position 3186 of SEQ ID NO: 1882440
guugaauuaaaguggacuu

SEQ ID NO: 2121315 - RNA, 19 nt, Artificial Sequence
  Description of Artificial Sequence: Synthetic oligonucleotide
  Antisense strand to SEQ ID NO: 2121314
aaguccacuuuaauucaac

SEQ ID NO: 2121316 - RNA, 19 nt, Artificial Sequence
  Description of Artificial Sequence: Synthetic oligonucleotide
  Sense strand starting at position 3428 of SEQ ID NO: 1882440
cauucuguacucuguggaa

SEQ ID NO: 2121317 - RNA, 19 nt, Artificial Sequence
  Description of Artificial Sequence: Synthetic oligonucleotide
  Antisense strand to SEQ ID NO: 2121316
uuccacagaguacagaaug

SEQ ID NO: 2121318 - RNA, 19 nt, Artificial Sequence
  Description of Artificial Sequence: Synthetic oligonucleotide
  Sense strand starting at position 3523 of SEQ ID NO: 1882440
agugcuaagguuugaauaa

SEQ ID NO: 2121319 - RNA, 19 nt, Artificial Sequence
  Description of Artificial Sequence: Synthetic oligonucleotide
  Antisense strand to SEQ ID NO: 2121318
uuauucaaaccuuagcacu

SEQ ID NO: 2121320 - RNA, 19 nt, Artificial Sequence
  Description of Artificial Sequence: Synthetic oligonucleotide
  Sense strand starting at position 3573 of SEQ ID NO: 1882440
gggugucuugcucuuguuu

SEQ ID NO: 2121321 - RNA, 19 nt, Artificial Sequence
  Description of Artificial Sequence: Synthetic oligonucleotide
  Antisense strand to SEQ ID NO: 2121320
aaacaagagcaagacaccc

SEQ ID NO: 2121322 - RNA, 19 nt, Artificial Sequence
  Description of Artificial Sequence: Synthetic oligonucleotide
  Sense strand starting at position 3632 of SEQ ID NO: 1882440
cagaaauacucagugagcu

SEQ ID NO: 2121323 - RNA, 19 nt, Artificial Sequence
  Description of Artificial Sequence: Synthetic oligonucleotide
  Antisense strand to SEQ ID NO: 2121322
agcucacugaguauuucug

SEQ ID NO: 2121324 - RNA, 19 nt, Artificial Sequence
  Description of Artificial Sequence: Synthetic oligonucleotide
  Sense strand starting at position 3633 of SEQ ID NO: 1882440
agaaauacucagugagcuu

SEQ ID NO: 2121325 - RNA, 19 nt, Artificial Sequence
  Description of Artificial Sequence: Synthetic oligonucleotide
  Antisense strand to SEQ ID NO: 2121324
aagcucacugaguauuucu

SEQ ID NO: 2121326 - RNA, 19 nt, Artificial Sequence
  Description of Artificial Sequence: Synthetic oligonucleotide
  Sense strand starting at position 3669 of SEQ ID NO: 1882440
ucgccauucugaucagaga

SEQ ID NO: 2121327 - RNA, 19 nt, Artificial Sequence
  Description of Artificial Sequence: Synthetic oligonucleotide
  Antisense strand to SEQ ID NO: 2121326
ucucugaucagaauggcga

SEQ ID NO: 2121328 - RNA, 19 nt, Artificial Sequence
  Description of Artificial Sequence: Synthetic oligonucleotide
  Sense strand starting at position 3670 of SEQ ID NO: 1882440
cgccauucugaucagagau

SEQ ID NO: 2121329 - RNA, 19 nt, Artificial Sequence
  Description of Artificial Sequence: Synthetic oligonucleotide
  Antisense strand to SEQ ID NO: 2121328
aucucugaucagaauggcg

SEQ ID NO: 2121330 - RNA, 19 nt, Artificial Sequence
  Description of Artificial Sequence: Synthetic oligonucleotide
  Sense strand starting at position 3708 of SEQ ID NO: 1882440
agggcaauccaugggaagu

SEQ ID NO: 2121331 - RNA, 19 nt, Artificial Sequence
  Description of Artificial Sequence: Synthetic oligonucleotide
  Antisense strand to SEQ ID NO: 2121330
acuucccauggauugcccu

SEQ ID NO: 2121332 - RNA, 19 nt, Artificial Sequence
  Description of Artificial Sequence: Synthetic oligonucleotide
  Sense strand starting at position 3709 of SEQ ID NO: 1882440
gggcaauccaugggaaguu

SEQ ID NO: 2121333 - RNA, 19 nt, Artificial Sequence
  Description of Artificial Sequence: Synthetic oligonucleotide
  Antisense strand to SEQ ID NO: 2121332
aacuucccauggauugccc

SEQ ID NO: 2121334 - RNA, 19 nt, Artificial Sequence
  Description of Artificial Sequence: Synthetic oligonucleotide
  Sense strand starting at position 3735 of SEQ ID NO: 1882440
ugccuuaaacgaggugaga

SEQ ID NO: 2121335 - RNA, 19 nt, Artificial Sequence
  Description of Artificial Sequence: Synthetic oligonucleotide
  Antisense strand to SEQ ID NO: 2121334
ucucaccucguuuaaggca

SEQ ID NO: 2121336 - RNA, 19 nt, Artificial Sequence
  Description of Artificial Sequence: Synthetic oligonucleotide
  Sense strand starting at position 3737 of SEQ ID NO: 1882440
ccuuaaacgaggugagaau

SEQ ID NO: 2121337 - RNA, 19 nt, Artificial Sequence
  Description of Artificial Sequence: Synthetic oligonucleotide
  Antisense strand to SEQ ID NO: 2121336
auucucaccucguuuaagg

SEQ ID NO: 2121338 - RNA, 19 nt, Artificial Sequence
  Description of Artificial Sequence: Synthetic oligonucleotide
  Sense strand starting at position 3779 of SEQ ID NO: 1882440
agcucagagagaugcucuu

SEQ ID NO: 2121339 - RNA, 19 nt, Artificial Sequence
  Description of Artificial Sequence: Synthetic oligonucleotide
  Antisense strand to SEQ ID NO: 2121338
aagagcaucucucugagcu

SEQ ID NO: 2121340 - RNA, 19 nt, Artificial Sequence
  Description of Artificial Sequence: Synthetic oligonucleotide
  Sense strand starting at position 3912 of SEQ ID NO: 1882440
ucagaaauuuagggaaaua

SEQ ID NO: 2121341 - RNA, 19 nt, Artificial Sequence
  Description of Artificial Sequence: Synthetic oligonucleotide
  Antisense strand to SEQ ID NO: 2121340
uauuucccuaaauuucuga

SEQ ID NO: 2121342 - RNA, 19 nt, Artificial Sequence
  Description of Artificial Sequence: Synthetic oligonucleotide
  Sense strand starting at position 3931 of SEQ ID NO: 1882440
agaacuauauaucagaaug

SEQ ID NO: 2121343 - RNA, 19 nt, Artificial Sequence
  Description of Artificial Sequence: Synthetic oligonucleotide
  Antisense strand to SEQ ID NO: 2121342
cauucugauauauaguucu

SEQ ID NO: 2121344 - RNA, 19 nt, Artificial Sequence
  Description of Artificial Sequence: Synthetic oligonucleotide
  Sense strand starting at position 3980 of SEQ ID NO: 1882440
auuuguuucccuuggucua

SEQ ID NO: 2121345 - RNA, 19 nt, Artificial Sequence
  Description of Artificial Sequence: Synthetic oligonucleotide
  Antisense strand to SEQ ID NO: 2121344
uagaccaagggaaacaaau

SEQ ID NO: 2121346 - RNA, 19 nt, Artificial Sequence
  Description of Artificial Sequence: Synthetic oligonucleotide
  Sense strand starting at position 143 of SEQ ID NO: 1882441
ggacgucuggaugacugua

SEQ ID NO: 2121347 - RNA, 19 nt, Artificial Sequence
  Description of Artificial Sequence: Synthetic oligonucleotide
  Antisense strand to SEQ ID NO: 2121346
uacagucauccagacgucc

SEQ ID NO: 2121348 - RNA, 19 nt, Artificial Sequence
  Description of Artificial Sequence: Synthetic oligonucleotide
  Sense strand starting at position 145 of SEQ ID NO: 1882441
acgucuggaugacuguaaa

SEQ ID NO: 2121349 - RNA, 19 nt, Artificial Sequence
  Description of Artificial Sequence: Synthetic oligonucleotide
  Antisense strand to SEQ ID NO: 2121348
uuuacagucauccagacgu

SEQ ID NO: 2121350 - RNA, 19 nt, Artificial Sequence
  Description of Artificial Sequence: Synthetic oligonucleotide
  Sense strand starting at position 284 of SEQ ID NO: 1882441
gcaggucaucaucagcaga

SEQ ID NO: 2121351 - RNA, 19 nt, Artificial Sequence
  Description of Artificial Sequence: Synthetic oligonucleotide
  Antisense strand to SEQ ID NO: 2121350
ucugcugaugaugaccugc

SEQ ID NO: 2121352 - RNA, 19 nt, Artificial Sequence
  Description of Artificial Sequence: Synthetic oligonucleotide
  Sense strand starting at position 286 of SEQ ID NO: 1882441
aggucaucaucagcagaua

SEQ ID NO: 2121353 - RNA, 19 nt, Artificial Sequence
  Description of Artificial Sequence: Synthetic oligonucleotide
  Antisense strand to SEQ ID NO: 2121352
uaucugcugaugaugaccu

SEQ ID NO: 2121354 - RNA, 19 nt, Artificial Sequence
  Description of Artificial Sequence: Synthetic oligonucleotide
  Sense strand starting at position 287 of SEQ ID NO: 1882441
ggucaucaucagcagauau

SEQ ID NO: 2121355 - RNA, 19 nt, Artificial Sequence
  Description of Artificial Sequence: Synthetic oligonucleotide
  Antisense strand to SEQ ID NO: 2121354
auaucugcugaugaugacc

SEQ ID NO: 2121356 - RNA, 19 nt, Artificial Sequence
  Description of Artificial Sequence: Synthetic oligonucleotide
  Sense strand starting at position 643 of SEQ ID NO: 1882441
ggacuagagaugugcucua

SEQ ID NO: 2121357 - RNA, 19 nt, Artificial Sequence
  Description of Artificial Sequence: Synthetic oligonucleotide
  Antisense strand to SEQ ID NO: 2121356
uagagcacaucucuagucc

SEQ ID NO: 2121358 - RNA, 19 nt, Artificial Sequence
  Description of Artificial Sequence: Synthetic oligonucleotide
  Sense strand starting at position 648 of SEQ ID NO: 1882441
agagaugugcucuaccaug

SEQ ID NO: 2121359 - RNA, 19 nt, Artificial Sequence
  Description of Artificial Sequence: Synthetic oligonucleotide
  Antisense strand to SEQ ID NO: 2121358
caugguagagcacaucucu

SEQ ID NO: 2121360 - RNA, 19 nt, Artificial Sequence
  Description of Artificial Sequence: Synthetic oligonucleotide
  Sense strand starting at position 1449 of SEQ ID NO: 1882441
agugacucgauauauuaug

SEQ ID NO: 2121361 - RNA, 19 nt, Artificial Sequence
  Description of Artificial Sequence: Synthetic oligonucleotide
  Antisense strand to SEQ ID NO: 2121360
cauaauauaucgagucacu

SEQ ID NO: 2121362 - RNA, 19 nt, Artificial Sequence
  Description of Artificial Sequence: Synthetic oligonucleotide
  Sense strand starting at position 1547 of SEQ ID NO: 1882441
gcuccaauccaagguggau

SEQ ID NO: 2121363 - RNA, 19 nt, Artificial Sequence
  Description of Artificial Sequence: Synthetic oligonucleotide
  Antisense strand to SEQ ID NO: 2121362
auccaccuuggauuggagc

SEQ ID NO: 2121364 - RNA, 19 nt, Artificial Sequence
  Description of Artificial Sequence: Synthetic oligonucleotide
  Sense strand starting at position 1588 of SEQ ID NO: 1882441
uggagaauucaggagucgu

SEQ ID NO: 2121365 - RNA, 19 nt, Artificial Sequence
  Description of Artificial Sequence: Synthetic oligonucleotide
  Antisense strand to SEQ ID NO: 2121364
acgacuccugaauucucca

SEQ ID NO: 2121366 - RNA, 19 nt, Artificial Sequence
  Description of Artificial Sequence: Synthetic oligonucleotide
  Sense strand starting at position 1640 of SEQ ID NO: 1882441
cucagaaugguacagcaau

SEQ ID NO: 2121367 - RNA, 19 nt, Artificial Sequence
  Description of Artificial Sequence: Synthetic oligonucleotide
  Antisense strand to SEQ ID NO: 2121366
auugcuguaccauucugag

SEQ ID NO: 2121368 - RNA, 19 nt, Artificial Sequence
  Description of Artificial Sequence: Synthetic oligonucleotide
  Sense strand starting at position 1654 of SEQ ID NO: 1882441
gcaauuugccagugcuuga

SEQ ID NO: 2121369 - RNA, 19 nt, Artificial Sequence
  Description of Artificial Sequence: Synthetic oligonucleotide
  Antisense strand to SEQ ID NO: 2121368
ucaagcacuggcaaauugc

SEQ ID NO: 2121370 - RNA, 19 nt, Artificial Sequence
  Description of Artificial Sequence: Synthetic oligonucleotide
  Sense strand starting at position 1657 of SEQ ID NO: 1882441
auuugccagugcuugagua

SEQ ID NO: 2121371 - RNA, 19 nt, Artificial Sequence
  Description of Artificial Sequence: Synthetic oligonucleotide
  Antisense strand to SEQ ID NO: 2121370
uacucaagcacuggcaaau

SEQ ID NO: 2121372 - RNA, 19 nt, Artificial Sequence
  Description of Artificial Sequence: Synthetic oligonucleotide
  Sense strand starting at position 1877 of SEQ ID NO: 1882441
augacaggcugcucugaua

SEQ ID NO: 2121373 - RNA, 19 nt, Artificial Sequence
  Description of Artificial Sequence: Synthetic oligonucleotide
  Antisense strand to SEQ ID NO: 2121372
uaucagagcagccugucau

SEQ ID NO: 2121374 - RNA, 19 nt, Artificial Sequence
  Description of Artificial Sequence: Synthetic oligonucleotide
  Sense strand starting at position 1889 of SEQ ID NO: 1882441
ucugauagugcuggagaga

SEQ ID NO: 2121375 - RNA, 19 nt, Artificial Sequence
  Description of Artificial Sequence: Synthetic oligonucleotide
  Antisense strand to SEQ ID NO: 2121374
ucucuccagcacuaucaga

SEQ ID NO: 2121376 - RNA, 19 nt, Artificial Sequence
  Description of Artificial Sequence: Synthetic oligonucleotide
  Sense strand starting at position 2178 of SEQ ID NO: 1882441
cucagagugguacacugau

SEQ ID NO: 2121377 - RNA, 19 nt, Artificial Sequence
  Description of Artificial Sequence: Synthetic oligonucleotide
  Antisense strand to SEQ ID NO: 2121376
aucaguguaccacucugag

SEQ ID NO: 2121378 - RNA, 19 nt, Artificial Sequence
  Description of Artificial Sequence: Synthetic oligonucleotide
  Sense strand starting at position 2230 of SEQ ID NO: 1882441
auguaugaugcuggaaauu

SEQ ID NO: 2121379 - RNA, 19 nt, Artificial Sequence
  Description of Artificial Sequence: Synthetic oligonucleotide
  Antisense strand to SEQ ID NO: 2121378
aauuuccagcaucauacau

SEQ ID NO: 2121380 - RNA, 19 nt, Artificial Sequence
  Description of Artificial Sequence: Synthetic oligonucleotide
  Sense strand starting at position 2343 of SEQ ID NO: 1882441
ggauauaagcugcaaguaa

SEQ ID NO: 2121381 - RNA, 19 nt, Artificial Sequence
  Description of Artificial Sequence: Synthetic oligonucleotide
  Antisense strand to SEQ ID NO: 2121380
uuacuugcagcuuauaucc

SEQ ID NO: 2121382 - RNA, 19 nt, Artificial Sequence
  Description of Artificial Sequence: Synthetic oligonucleotide
  Sense strand starting at position 2443 of SEQ ID NO: 1882441
cagggauauccaggaggcu

SEQ ID NO: 2121383 - RNA, 19 nt, Artificial Sequence
  Description of Artificial Sequence: Synthetic oligonucleotide
  Antisense strand to SEQ ID NO: 2121382
agccuccuggauaucccug

SEQ ID NO: 2121384 - RNA, 19 nt, Artificial Sequence
  Description of Artificial Sequence: Synthetic oligonucleotide
  Sense strand starting at position 2446 of SEQ ID NO: 1882441
ggauauccaggaggcuaau

SEQ ID NO: 2121385 - RNA, 19 nt, Artificial Sequence
  Description of Artificial Sequence: Synthetic oligonucleotide
  Antisense strand to SEQ ID NO: 2121384
auuagccuccuggauaucc

SEQ ID NO: 2121386 - RNA, 19 nt, Artificial Sequence
  Description of Artificial Sequence: Synthetic oligonucleotide
  Sense strand starting at position 2485 of SEQ ID NO: 1882441
aagcuuacagucugagaaa

SEQ ID NO: 2121387 - RNA, 19 nt, Artificial Sequence
  Description of Artificial Sequence: Synthetic oligonucleotide
  Antisense strand to SEQ ID NO: 2121386
uuucucagacuguaagcuu

SEQ ID NO: 2121388 - RNA, 19 nt, Artificial Sequence
  Description of Artificial Sequence: Synthetic oligonucleotide
  Sense strand starting at position 2513 of SEQ ID NO: 1882441
uugaguuagcaauacaauu

SEQ ID NO: 2121389 - RNA, 19 nt, Artificial Sequence
  Description of Artificial Sequence: Synthetic oligonucleotide
  Antisense strand to SEQ ID NO: 2121388
aauuguauugcuaacucaa

SEQ ID NO: 2121390 - RNA, 19 nt, Artificial Sequence
  Description of Artificial Sequence: Synthetic oligonucleotide
  Sense strand starting at position 2578 of SEQ ID NO: 1882441
gauguuuaauggcuauuaa

SEQ ID NO: 2121391 - RNA, 19 nt, Artificial Sequence
  Description of Artificial Sequence: Synthetic oligonucleotide
  Antisense strand to SEQ ID NO: 2121390
uuaauagccauuaaacauc

SEQ ID NO: 2121392 - RNA, 19 nt, Artificial Sequence
  Description of Artificial Sequence: Synthetic oligonucleotide
  Sense strand starting at position 2707 of SEQ ID NO: 1882441
uuuggaaguagugaauagu

SEQ ID NO: 2121393 - RNA, 19 nt, Artificial Sequence
  Description of Artificial Sequence: Synthetic oligonucleotide
  Antisense strand to SEQ ID NO: 2121392
acuauucacuacuuccaaa

SEQ ID NO: 2121394 - RNA, 19 nt, Artificial Sequence
  Description of Artificial Sequence: Synthetic oligonucleotide
  Sense strand starting at position 2710 of SEQ ID NO: 1882441
ggaaguagugaauaguucu

SEQ ID NO: 2121395 - RNA, 19 nt, Artificial Sequence
  Description of Artificial Sequence: Synthetic oligonucleotide
  Antisense strand to SEQ ID NO: 2121394
agaacuauucacuacuucc

SEQ ID NO: 2121396 - RNA, 19 nt, Artificial Sequence
  Description of Artificial Sequence: Synthetic oligonucleotide
  Sense strand starting at position 2713 of SEQ ID NO: 1882441
aguagugaauaguucuacu

SEQ ID NO: 2121397 - RNA, 19 nt, Artificial Sequence
  Description of Artificial Sequence: Synthetic oligonucleotide
  Antisense strand to SEQ ID NO: 2121396
aguagaacuauucacuacu

SEQ ID NO: 2121398 - RNA, 19 nt, Artificial Sequence
  Description of Artificial Sequence: Synthetic oligonucleotide
  Sense strand starting at position 2723 of SEQ ID NO: 1882441
aguucuacuuuacuagaca

SEQ ID NO: 2121399 - RNA, 19 nt, Artificial Sequence
  Description of Artificial Sequence: Synthetic oligonucleotide
  Antisense strand to SEQ ID NO: 2121398
ugucuaguaaaguagaacu

SEQ ID NO: 2121400 - RNA, 19 nt, Artificial Sequence
  Description of Artificial Sequence: Synthetic oligonucleotide
  Sense strand starting at position 2884 of SEQ ID NO: 1882441
ugagaaauuuguugagaga

SEQ ID NO: 2121401 - RNA, 19 nt, Artificial Sequence
  Description of Artificial Sequence: Synthetic oligonucleotide
  Antisense strand to SEQ ID NO: 2121400
ucucucaacaaauuucuca

SEQ ID NO: 2121402 - RNA, 19 nt, Artificial Sequence
  Description of Artificial Sequence: Synthetic oligonucleotide
  Sense strand starting at position 2887 of SEQ ID NO: 1882441
gaaauuuguugagagacca

SEQ ID NO: 2121403 - RNA, 19 nt, Artificial Sequence
  Description of Artificial Sequence: Synthetic oligonucleotide
  Antisense strand to SEQ ID NO: 2121402
uggucucucaacaaauuuc

SEQ ID NO: 2121404 - RNA, 19 nt, Artificial Sequence
  Description of Artificial Sequence: Synthetic oligonucleotide
  Sense strand starting at position 2913 of SEQ ID NO: 1882441
ggcccacaugaaugucaau

SEQ ID NO: 2121405 - RNA, 19 nt, Artificial Sequence
  Description of Artificial Sequence: Synthetic oligonucleotide
  Antisense strand to SEQ ID NO: 2121404
auugacauucaugugggcc

SEQ ID NO: 2121406 - RNA, 19 nt, Artificial Sequence
  Description of Artificial Sequence: Synthetic oligonucleotide
  Sense strand starting at position 3005 of SEQ ID NO: 1882441
uuggcaaagguuugacuau

SEQ ID NO: 2121407 - RNA, 19 nt, Artificial Sequence
  Description of Artificial Sequence: Synthetic oligonucleotide
  Antisense strand to SEQ ID NO: 2121406
auagucaaaccuuugccaa

SEQ ID NO: 2121408 - RNA, 19 nt, Artificial Sequence
  Description of Artificial Sequence: Synthetic oligonucleotide
  Sense strand starting at position 3011 of SEQ ID NO: 1882441
aagguuugacuaugcaaau

SEQ ID NO: 2121409 - RNA, 19 nt, Artificial Sequence
  Description of Artificial Sequence: Synthetic oligonucleotide
  Antisense strand to SEQ ID NO: 2121408
auuugcauagucaaaccuu

SEQ ID NO: 2121410 - RNA, 19 nt, Artificial Sequence
  Description of Artificial Sequence: Synthetic oligonucleotide
  Sense strand starting at position 3012 of SEQ ID NO: 1882441
agguuugacuaugcaaaua

SEQ ID NO: 2121411 - RNA, 19 nt, Artificial Sequence
  Description of Artificial Sequence: Synthetic oligonucleotide
  Antisense strand to SEQ ID NO: 2121410
uauuugcauagucaaaccu

SEQ ID NO: 2121412 - RNA, 19 nt, Artificial Sequence
  Description of Artificial Sequence: Synthetic oligonucleotide
  Sense strand starting at position 3065 of SEQ ID NO: 1882441
gcagaauugguguagucaa

SEQ ID NO: 2121413 - RNA, 19 nt, Artificial Sequence
  Description of Artificial Sequence: Synthetic oligonucleotide
  Antisense strand to SEQ ID NO: 2121412
uugacuacaccaauucugc

SEQ ID NO: 2121414 - RNA, 19 nt, Artificial Sequence
  Description of Artificial Sequence: Synthetic oligonucleotide
  Sense strand starting at position 3080 of SEQ ID NO: 1882441
ucaaucuuauuuggaagau

SEQ ID NO: 2121415 - RNA, 19 nt, Artificial Sequence
  Description of Artificial Sequence: Synthetic oligonucleotide
  Antisense strand to SEQ ID NO: 2121414
aucuuccaaauaagauuga

SEQ ID NO: 2121416 - RNA, 19 nt, Artificial Sequence
  Description of Artificial Sequence: Synthetic oligonucleotide
  Sense strand starting at position 3145 of SEQ ID NO: 1882441
ucaguauaacacuggauag

SEQ ID NO: 2121417 - RNA, 19 nt, Artificial Sequence
  Description of Artificial Sequence: Synthetic oligonucleotide
  Antisense strand to SEQ ID NO: 2121416
cuauccaguguuauacuga

SEQ ID NO: 2121418 - RNA, 19 nt, Artificial Sequence
  Description of Artificial Sequence: Synthetic oligonucleotide
  Sense strand starting at position 3313 of SEQ ID NO: 1882441
ggugauaugucucuaggua

SEQ ID NO: 2121419 - RNA, 19 nt, Artificial Sequence
  Description of Artificial Sequence: Synthetic oligonucleotide
  Antisense strand to SEQ ID NO: 2121418
uaccuagagacauaucacc

SEQ ID NO: 2121420 - RNA, 19 nt, Artificial Sequence
  Description of Artificial Sequence: Synthetic oligonucleotide
  Sense strand starting at position 3314 of SEQ ID NO: 1882441
gugauaugucucuagguau

SEQ ID NO: 2121421 - RNA, 19 nt, Artificial Sequence
  Description of Artificial Sequence: Synthetic oligonucleotide
  Antisense strand to SEQ ID NO: 2121420
auaccuagagacauaucac

SEQ ID NO: 2121422 - RNA, 19 nt, Artificial Sequence
  Description of Artificial Sequence: Synthetic oligonucleotide
  Sense strand starting at position 3446 of SEQ ID NO: 1882441
uguugaauuucuucugcag

SEQ ID NO: 2121423 - RNA, 19 nt, Artificial Sequence
  Description of Artificial Sequence: Synthetic oligonucleotide
  Antisense strand to SEQ ID NO: 2121422
cugcagaagaaauucaaca

SEQ ID NO: 2121424 - RNA, 19 nt, Artificial Sequence
  Description of Artificial Sequence: Synthetic oligonucleotide
  Sense strand starting at position 3831 of SEQ ID NO: 1882441
ggguuugaacggcagagaa

SEQ ID NO: 2121425 - RNA, 19 nt, Artificial Sequence
  Description of Artificial Sequence: Synthetic oligonucleotide
  Antisense strand to SEQ ID NO: 2121424
uucucugccguucaaaccc

SEQ ID NO: 2121426 - RNA, 19 nt, Artificial Sequence
  Description of Artificial Sequence: Synthetic oligonucleotide
  Sense strand starting at position 67 of SEQ ID NO: 1882442
aguaauggccacuaaguau

SEQ ID NO: 2121427 - RNA, 19 nt, Artificial Sequence
  Description of Artificial Sequence: Synthetic oligonucleotide
  Antisense strand to SEQ ID NO: 2121426
auacuuaguggccauuacu

SEQ ID NO: 2121428 - RNA, 19 nt, Artificial Sequence
  Description of Artificial Sequence: Synthetic oligonucleotide
  Sense strand starting at position 80 of SEQ ID NO: 1882442
aaguauuagcagcagucaa

SEQ ID NO: 2121429 - RNA, 19 nt, Artificial Sequence
  Description of Artificial Sequence: Synthetic oligonucleotide
  Antisense strand to SEQ ID NO: 2121428
uugacugcugcuaauacuu

SEQ ID NO: 2121430 - RNA, 19 nt, Artificial Sequence
  Description of Artificial Sequence: Synthetic oligonucleotide
  Sense strand starting at position 500 of SEQ ID NO: 1882442
ugcugaauugaguaugaau

SEQ ID NO: 2121431 - RNA, 19 nt, Artificial Sequence
  Description of Artificial Sequence: Synthetic oligonucleotide
  Antisense strand to SEQ ID NO: 2121430
auucauacucaauucagca

SEQ ID NO: 2121432 - RNA, 19 nt, Artificial Sequence
  Description of Artificial Sequence: Synthetic oligonucleotide
  Sense strand starting at position 595 of SEQ ID NO: 1882442
uuugaaacagguugaaagu

SEQ ID NO: 2121433 - RNA, 19 nt, Artificial Sequence
  Description of Artificial Sequence: Synthetic oligonucleotide
  Antisense strand to SEQ ID NO: 2121432
acuuucaaccuguuucaaa

SEQ ID NO: 2121434 - RNA, 19 nt, Artificial Sequence
  Description of Artificial Sequence: Synthetic oligonucleotide
  Sense strand starting at position 772 of SEQ ID NO: 1882442
acuuuaauacugugacuga

SEQ ID NO: 2121435 - RNA, 19 nt, Artificial Sequence
  Description of Artificial Sequence: Synthetic oligonucleotide
  Antisense strand to SEQ ID NO: 2121434
ucagucacaguauuaaagu

SEQ ID NO: 2121436 - RNA, 19 nt, Artificial Sequence
  Description of Artificial Sequence: Synthetic oligonucleotide
  Sense strand starting at position 775 of SEQ ID NO: 1882442
uuaauacugugacugaaac

SEQ ID NO: 2121437 - RNA, 19 nt, Artificial Sequence
  Description of Artificial Sequence: Synthetic oligonucleotide
  Antisense strand to SEQ ID NO: 2121436
guuucagucacaguauuaa

SEQ ID NO: 2121438 - RNA, 19 nt, Artificial Sequence
  Description of Artificial Sequence: Synthetic oligonucleotide
  Sense strand starting at position 845 of SEQ ID NO: 1882442
auguguaagcacgaagaca

SEQ ID NO: 2121439 - RNA, 19 nt, Artificial Sequence
  Description of Artificial Sequence: Synthetic oligonucleotide
  Antisense strand to SEQ ID NO: 2121438
ugucuucgugcuuacacau

SEQ ID NO: 2121440 - RNA, 19 nt, Artificial Sequence
  Description of Artificial Sequence: Synthetic oligonucleotide
  Sense strand starting at position 873 of SEQ ID NO: 1882442
agguacuugagcugaacau

SEQ ID NO: 2121441 - RNA, 19 nt, Artificial Sequence
  Description of Artificial Sequence: Synthetic oligonucleotide
  Antisense strand to SEQ ID NO: 2121440
auguucagcucaaguaccu

SEQ ID NO: 2121442 - RNA, 19 nt, Artificial Sequence
  Description of Artificial Sequence: Synthetic oligonucleotide
  Sense strand starting at position 874 of SEQ ID NO: 1882442
gguacuugagcugaacaua

SEQ ID NO: 2121443 - RNA, 19 nt, Artificial Sequence
  Description of Artificial Sequence: Synthetic oligonucleotide
  Antisense strand to SEQ ID NO: 2121442
uauguucagcucaaguacc

SEQ ID NO: 2121444 - RNA, 19 nt, Artificial Sequence
  Description of Artificial Sequence: Synthetic oligonucleotide
  Sense strand starting at position 922 of SEQ ID NO: 1882442
cuuugaugguuuccaaucu

SEQ ID NO: 2121445 - RNA, 19 nt, Artificial Sequence
  Description of Artificial Sequence: Synthetic oligonucleotide
  Antisense strand to SEQ ID NO: 2121444
agauuggaaaccaucaaag

SEQ ID NO: 2121446 - RNA, 19 nt, Artificial Sequence
  Description of Artificial Sequence: Synthetic oligonucleotide
  Sense strand starting at position 1039 of SEQ ID NO: 1882442
gagugaggccuaggacaaa

SEQ ID NO: 2121447 - RNA, 19 nt, Artificial Sequence
  Description of Artificial Sequence: Synthetic oligonucleotide
  Antisense strand to SEQ ID NO: 2121446
uuuguccuaggccucacuc

SEQ ID NO: 2121448 - RNA, 19 nt, Artificial Sequence
  Description of Artificial Sequence: Synthetic oligonucleotide
  Sense strand starting at position 1198 of SEQ ID NO: 1882442
gcucuaauauuaccagaga

SEQ ID NO: 2121449 - RNA, 19 nt, Artificial Sequence
  Description of Artificial Sequence: Synthetic oligonucleotide
  Antisense strand to SEQ ID NO: 2121448
ucucugguaauauuagagc

SEQ ID NO: 2121450 - RNA, 19 nt, Artificial Sequence
  Description of Artificial Sequence: Synthetic oligonucleotide
  Sense strand starting at position 1314 of SEQ ID NO: 1882442
guugucuuaggaggaaaca

SEQ ID NO: 2121451 - RNA, 19 nt, Artificial Sequence
  Description of Artificial Sequence: Synthetic oligonucleotide
  Antisense strand to SEQ ID NO: 2121450
uguuuccuccuaagacaac

SEQ ID NO: 2121452 - RNA, 19 nt, Artificial Sequence
  Description of Artificial Sequence: Synthetic oligonucleotide
  Sense strand starting at position 1570 of SEQ ID NO: 1882442
cuaagauucugagcaucau

SEQ ID NO: 2121453 - RNA, 19 nt, Artificial Sequence
  Description of Artificial Sequence: Synthetic oligonucleotide
  Antisense strand to SEQ ID NO: 2121452
augaugcucagaaucuuag

SEQ ID NO: 2121454 - RNA, 19 nt, Artificial Sequence
  Description of Artificial Sequence: Synthetic oligonucleotide
  Sense strand starting at position 2296 of SEQ ID NO: 1882442
uuacuaaauguguacuaug

SEQ ID NO: 2121455 - RNA, 19 nt, Artificial Sequence
  Description of Artificial Sequence: Synthetic oligonucleotide
  Antisense strand to SEQ ID NO: 2121454
cauaguacacauuuaguaa

SEQ ID NO: 2121456 - RNA, 19 nt, Artificial Sequence
  Description of Artificial Sequence: Synthetic oligonucleotide
  Sense strand starting at position 2301 of SEQ ID NO: 1882442
aaauguguacuaugaguca

SEQ ID NO: 2121457 - RNA, 19 nt, Artificial Sequence
  Description of Artificial Sequence: Synthetic oligonucleotide
  Antisense strand to SEQ ID NO: 2121456
ugacucauaguacacauuu

SEQ ID NO: 2121458 - RNA, 19 nt, Artificial Sequence
  Description of Artificial Sequence: Synthetic oligonucleotide
  Sense strand starting at position 2336 of SEQ ID NO: 1882442
agaucucuguccucaaaga

SEQ ID NO: 2121459 - RNA, 19 nt, Artificial Sequence
  Description of Artificial Sequence: Synthetic oligonucleotide
  Antisense strand to SEQ ID NO: 2121458
ucuuugaggacagagaucu

SEQ ID NO: 2121460 - RNA, 19 nt, Artificial Sequence
  Description of Artificial Sequence: Synthetic oligonucleotide
  Sense strand starting at position 2399 of SEQ ID NO: 1882442
gagucuauacgguauagau

SEQ ID NO: 2121461 - RNA, 19 nt, Artificial Sequence
  Description of Artificial Sequence: Synthetic oligonucleotide
  Antisense strand to SEQ ID NO: 2121460
aucuauaccguauagacuc

SEQ ID NO: 2121462 - RNA, 19 nt, Artificial Sequence
  Description of Artificial Sequence: Synthetic oligonucleotide
  Sense strand starting at position 2480 of SEQ ID NO: 1882442
aggguaucaaauugcugaa

SEQ ID NO: 2121463 - RNA, 19 nt, Artificial Sequence
  Description of Artificial Sequence: Synthetic oligonucleotide
  Antisense strand to SEQ ID NO: 2121462
uucagcaauuugauacccu

SEQ ID NO: 2121464 - RNA, 19 nt, Artificial Sequence
  Description of Artificial Sequence: Synthetic oligonucleotide
  Sense strand starting at position 2493 of SEQ ID NO: 1882442
gcugaaacacaucguauuu

SEQ ID NO: 2121465 - RNA, 19 nt, Artificial Sequence
  Description of Artificial Sequence: Synthetic oligonucleotide
  Antisense strand to SEQ ID NO: 2121464
aaauacgauguguuucagc

SEQ ID NO: 2121466 - RNA, 19 nt, Artificial Sequence
  Description of Artificial Sequence: Synthetic oligonucleotide
  Sense strand starting at position 2549 of SEQ ID NO: 1882442
gaguuaggucaugaugagu

SEQ ID NO: 2121467 - RNA, 19 nt, Artificial Sequence
  Description of Artificial Sequence: Synthetic oligonucleotide
  Antisense strand to SEQ ID NO: 2121466
acucaucaugaccuaacuc

SEQ ID NO: 2121468 - RNA, 19 nt, Artificial Sequence
  Description of Artificial Sequence: Synthetic oligonucleotide
  Sense strand starting at position 2557 of SEQ ID NO: 1882442
ucaugaugaguccagcaag

SEQ ID NO: 2121469 - RNA, 19 nt, Artificial Sequence
  Description of Artificial Sequence: Synthetic oligonucleotide
  Antisense strand to SEQ ID NO: 2121468
cuugcuggacucaucauga

SEQ ID NO: 2121470 - RNA, 19 nt, Artificial Sequence
  Description of Artificial Sequence: Synthetic oligonucleotide
  Sense strand starting at position 2560 of SEQ ID NO: 1882442
ugaugaguccagcaaguca

SEQ ID NO: 2121471 - RNA, 19 nt, Artificial Sequence
  Description of Artificial Sequence: Synthetic oligonucleotide
  Antisense strand to SEQ ID NO: 2121470
ugacuugcuggacucauca

SEQ ID NO: 2121472 - RNA, 19 nt, Artificial Sequence
  Description of Artificial Sequence: Synthetic oligonucleotide
  Sense strand starting at position 3386 of SEQ ID NO: 1882442
agagaauaguuuccuaguc

SEQ ID NO: 2121473 - RNA, 19 nt, Artificial Sequence
  Description of Artificial Sequence: Synthetic oligonucleotide
  Antisense strand to SEQ ID NO: 2121472
gacuaggaaacuauucucu

SEQ ID NO: 2121474 - RNA, 19 nt, Artificial Sequence
  Description of Artificial Sequence: Synthetic oligonucleotide
  Sense strand starting at position 3387 of SEQ ID NO: 1882442
gagaauaguuuccuagucu

SEQ ID NO: 2121475 - RNA, 19 nt, Artificial Sequence
  Description of Artificial Sequence: Synthetic oligonucleotide
  Antisense strand to SEQ ID NO: 2121474
agacuaggaaacuauucuc

SEQ ID NO: 2121476 - RNA, 19 nt, Artificial Sequence
  Description of Artificial Sequence: Synthetic oligonucleotide
  Sense strand starting at position 3401 of SEQ ID NO: 1882442
agucucuaacuugggagau

SEQ ID NO: 2121477 - RNA, 19 nt, Artificial Sequence
  Description of Artificial Sequence: Synthetic oligonucleotide
  Antisense strand to SEQ ID NO: 2121476
aucucccaaguuagagacu

SEQ ID NO: 2121478 - RNA, 19 nt, Artificial Sequence
  Description of Artificial Sequence: Synthetic oligonucleotide
  Sense strand starting at position 3510 of SEQ ID NO: 1882442
cuuauaagcuaucuaggua

SEQ ID NO: 2121479 - RNA, 19 nt, Artificial Sequence
  Description of Artificial Sequence: Synthetic oligonucleotide
  Antisense strand to SEQ ID NO: 2121478
uaccuagauagcuuauaag

SEQ ID NO: 2121480 - RNA, 19 nt, Artificial Sequence
  Description of Artificial Sequence: Synthetic oligonucleotide
  Sense strand starting at position 3513 of SEQ ID NO: 1882442
auaagcuaucuagguagaa

SEQ ID NO: 2121481 - RNA, 19 nt, Artificial Sequence
  Description of Artificial Sequence: Synthetic oligonucleotide
  Antisense strand to SEQ ID NO: 2121480
uucuaccuagauagcuuau

SEQ ID NO: 2121482 - RNA, 19 nt, Artificial Sequence
  Description of Artificial Sequence: Synthetic oligonucleotide
  Sense strand starting at position 3514 of SEQ ID NO: 1882442
uaagcuaucuagguagaaa

SEQ ID NO: 2121483 - RNA, 19 nt, Artificial Sequence
  Description of Artificial Sequence: Synthetic oligonucleotide
  Antisense strand to SEQ ID NO: 2121482
uuucuaccuagauagcuua

SEQ ID NO: 2121484 - RNA, 19 nt, Artificial Sequence
  Description of Artificial Sequence: Synthetic oligonucleotide
  Sense strand starting at position 3537 of SEQ ID NO: 1882442
ggcagaccugaguaucaau

SEQ ID NO: 2121485 - RNA, 19 nt, Artificial Sequence
  Description of Artificial Sequence: Synthetic oligonucleotide
  Antisense strand to SEQ ID NO: 2121484
auugauacucaggucugcc

SEQ ID NO: 2121486 - RNA, 19 nt, Artificial Sequence
  Description of Artificial Sequence: Synthetic oligonucleotide
  Sense strand starting at position 3598 of SEQ ID NO: 1882442
gcaugaacaugugugaaca

SEQ ID NO: 2121487 - RNA, 19 nt, Artificial Sequence
  Description of Artificial Sequence: Synthetic oligonucleotide
  Antisense strand to SEQ ID NO: 2121486
uguucacacauguucaugc

SEQ ID NO: 2121488 - RNA, 19 nt, Artificial Sequence
  Description of Artificial Sequence: Synthetic oligonucleotide
  Sense strand starting at position 3671 of SEQ ID NO: 1882442
acaggagaguggucugcaa

SEQ ID NO: 2121489 - RNA, 19 nt, Artificial Sequence
  Description of Artificial Sequence: Synthetic oligonucleotide
  Antisense strand to SEQ ID NO: 2121488
uugcagaccacucuccugu

SEQ ID NO: 2121490 - RNA, 19 nt, Artificial Sequence
  Description of Artificial Sequence: Synthetic oligonucleotide
  Sense strand starting at position 3673 of SEQ ID NO: 1882442
aggagaguggucugcaaag

SEQ ID NO: 2121491 - RNA, 19 nt, Artificial Sequence
  Description of Artificial Sequence: Synthetic oligonucleotide
  Antisense strand to SEQ ID NO: 2121490
cuuugcagaccacucuccu

SEQ ID NO: 2121492 - RNA, 19 nt, Artificial Sequence
  Description of Artificial Sequence: Synthetic oligonucleotide
  Sense strand starting at position 3675 of SEQ ID NO: 1882442
gagaguggucugcaaaguc

SEQ ID NO: 2121493 - RNA, 19 nt, Artificial Sequence
  Description of Artificial Sequence: Synthetic oligonucleotide
  Antisense strand to SEQ ID NO: 2121492
gacuuugcagaccacucuc

SEQ ID NO: 2121494 - RNA, 19 nt, Artificial Sequence
  Description of Artificial Sequence: Synthetic oligonucleotide
  Sense strand starting at position 3706 of SEQ ID NO: 1882442
ucaagaaaguagucacuaa

SEQ ID NO: 2121495 - RNA, 19 nt, Artificial Sequence
  Description of Artificial Sequence: Synthetic oligonucleotide
  Antisense strand to SEQ ID NO: 2121494
uuagugacuacuuucuuga

SEQ ID NO: 2121496 - RNA, 19 nt, Artificial Sequence
  Description of Artificial Sequence: Synthetic oligonucleotide
  Sense strand starting at position 3737 of SEQ ID NO: 1882442
ggugcuaucaaguaagaua

SEQ ID NO: 2121497 - RNA, 19 nt, Artificial Sequence
  Description of Artificial Sequence: Synthetic oligonucleotide
  Antisense strand to SEQ ID NO: 2121496
uaucuuacuugauagcacc

SEQ ID NO: 2121498 - RNA, 19 nt, Artificial Sequence
  Description of Artificial Sequence: Synthetic oligonucleotide
  Sense strand starting at position 3768 of SEQ ID NO: 1882442
ggcugcuagauuuggucaa

SEQ ID NO: 2121499 - RNA, 19 nt, Artificial Sequence
  Description of Artificial Sequence: Synthetic oligonucleotide
  Antisense strand to SEQ ID NO: 2121498
uugaccaaaucuagcagcc

SEQ ID NO: 2121500 - RNA, 19 nt, Artificial Sequence
  Description of Artificial Sequence: Synthetic oligonucleotide
  Sense strand starting at position 3780 of SEQ ID NO: 1882442
uggucaauagaucacuagu

SEQ ID NO: 2121501 - RNA, 19 nt, Artificial Sequence
  Description of Artificial Sequence: Synthetic oligonucleotide
  Antisense strand to SEQ ID NO: 2121500
acuagugaucuauugacca

SEQ ID NO: 2121502 - RNA, 19 nt, Artificial Sequence
  Description of Artificial Sequence: Synthetic oligonucleotide
  Sense strand starting at position 3782 of SEQ ID NO: 1882442
gucaauagaucacuaguga

SEQ ID NO: 2121503 - RNA, 19 nt, Artificial Sequence
  Description of Artificial Sequence: Synthetic oligonucleotide
  Antisense strand to SEQ ID NO: 2121502
ucacuagugaucuauugac

SEQ ID NO: 2121504 - RNA, 19 nt, Artificial Sequence
  Description of Artificial Sequence: Synthetic oligonucleotide
  Sense strand starting at position 3869 of SEQ ID NO: 1882442
ugaagagacugggauaaau

SEQ ID NO: 2121505 - RNA, 19 nt, Artificial Sequence
  Description of Artificial Sequence: Synthetic oligonucleotide
  Antisense strand to SEQ ID NO: 2121504
auuuaucccagucucuuca

SEQ ID NO: 2121506 - RNA, 19 nt, Artificial Sequence
  Description of Artificial Sequence: Synthetic oligonucleotide
  Sense strand starting at position 37 of SEQ ID NO: 1882443
ugacuacagguguguuaca

SEQ ID NO: 2121507 - RNA, 19 nt, Artificial Sequence
  Description of Artificial Sequence: Synthetic oligonucleotide
  Antisense strand to SEQ ID NO: 2121506
uguaacacaccuguaguca

SEQ ID NO: 2121508 - RNA, 19 nt, Artificial Sequence
  Description of Artificial Sequence: Synthetic oligonucleotide
  Sense strand starting at position 38 of SEQ ID NO: 1882443
gacuacagguguguuacau

SEQ ID NO: 2121509 - RNA, 19 nt, Artificial Sequence
  Description of Artificial Sequence: Synthetic oligonucleotide
  Antisense strand to SEQ ID NO: 2121508
auguaacacaccuguaguc

SEQ ID NO: 2121510 - RNA, 19 nt, Artificial Sequence
  Description of Artificial Sequence: Synthetic oligonucleotide
  Sense strand starting at position 46 of SEQ ID NO: 1882443
guguguuacauccagguuc

SEQ ID NO: 2121511 - RNA, 19 nt, Artificial Sequence
  Description of Artificial Sequence: Synthetic oligonucleotide
  Antisense strand to SEQ ID NO: 2121510
gaaccuggauguaacacac

SEQ ID NO: 2121512 - RNA, 19 nt, Artificial Sequence
  Description of Artificial Sequence: Synthetic oligonucleotide
  Sense strand starting at position 165 of SEQ ID NO: 1882443
aguguacucgagugggacu

SEQ ID NO: 2121513 - RNA, 19 nt, Artificial Sequence
  Description of Artificial Sequence: Synthetic oligonucleotide
  Antisense strand to SEQ ID NO: 2121512
agucccacucgaguacacu

SEQ ID NO: 2121514 - RNA, 19 nt, Artificial Sequence
  Description of Artificial Sequence: Synthetic oligonucleotide
  Sense strand starting at position 332 of SEQ ID NO: 1882443
guuauacuccuaugcauau

SEQ ID NO: 2121515 - RNA, 19 nt, Artificial Sequence
  Description of Artificial Sequence: Synthetic oligonucleotide
  Antisense strand to SEQ ID NO: 2121514
auaugcauaggaguauaac

SEQ ID NO: 2121516 - RNA, 19 nt, Artificial Sequence
  Description of Artificial Sequence: Synthetic oligonucleotide
  Sense strand starting at position 510 of SEQ ID NO: 1882443
augauuuaguucuaggaua

SEQ ID NO: 2121517 - RNA, 19 nt, Artificial Sequence
  Description of Artificial Sequence: Synthetic oligonucleotide
  Antisense strand to SEQ ID NO: 2121516
uauccuagaacuaaaucau

SEQ ID NO: 2121518 - RNA, 19 nt, Artificial Sequence
  Description of Artificial Sequence: Synthetic oligonucleotide
  Sense strand starting at position 523 of SEQ ID NO: 1882443
aggauaucagcaugaauug

SEQ ID NO: 2121519 - RNA, 19 nt, Artificial Sequence
  Description of Artificial Sequence: Synthetic oligonucleotide
  Antisense strand to SEQ ID NO: 2121518
caauucaugcugauauccu

SEQ ID NO: 2121520 - RNA, 19 nt, Artificial Sequence
  Description of Artificial Sequence: Synthetic oligonucleotide
  Sense strand starting at position 703 of SEQ ID NO: 1882443
acaugcuagguuuacagau

SEQ ID NO: 2121521 - RNA, 19 nt, Artificial Sequence
  Description of Artificial Sequence: Synthetic oligonucleotide
  Antisense strand to SEQ ID NO: 2121520
aucuguaaaccuagcaugu

SEQ ID NO: 2121522 - RNA, 19 nt, Artificial Sequence
  Description of Artificial Sequence: Synthetic oligonucleotide
  Sense strand starting at position 795 of SEQ ID NO: 1882443
ggaaauguucuauacugug

SEQ ID NO: 2121523 - RNA, 19 nt, Artificial Sequence
  Description of Artificial Sequence: Synthetic oligonucleotide
  Antisense strand to SEQ ID NO: 2121522
cacaguauagaacauuucc

SEQ ID NO: 2121524 - RNA, 19 nt, Artificial Sequence
  Description of Artificial Sequence: Synthetic oligonucleotide
  Sense strand starting at position 815 of SEQ ID NO: 1882443
uuugaauaaugguuacaug

SEQ ID NO: 2121525 - RNA, 19 nt, Artificial Sequence
  Description of Artificial Sequence: Synthetic oligonucleotide
  Antisense strand to SEQ ID NO: 2121524
cauguaaccauuauucaaa

SEQ ID NO: 2121526 - RNA, 19 nt, Artificial Sequence
  Description of Artificial Sequence: Synthetic oligonucleotide
  Sense strand starting at position 823 of SEQ ID NO: 1882443
augguuacauggguguaua

SEQ ID NO: 2121527 - RNA, 19 nt, Artificial Sequence
  Description of Artificial Sequence: Synthetic oligonucleotide
  Antisense strand to SEQ ID NO: 2121526
uauacacccauguaaccau

SEQ ID NO: 2121528 - RNA, 19 nt, Artificial Sequence
  Description of Artificial Sequence: Synthetic oligonucleotide
  Sense strand starting at position 1409 of SEQ ID NO: 1882443
ggugaacggcucugaaauc

SEQ ID NO: 2121529 - RNA, 19 nt, Artificial Sequence
  Description of Artificial Sequence: Synthetic oligonucleotide
  Antisense strand to SEQ ID NO: 2121528
gauuucagagccguucacc

SEQ ID NO: 2121530 - RNA, 19 nt, Artificial Sequence
  Description of Artificial Sequence: Synthetic oligonucleotide
  Sense strand starting at position 1416 of SEQ ID NO: 1882443
ggcucugaaaucggagaaa

SEQ ID NO: 2121531 - RNA, 19 nt, Artificial Sequence
  Description of Artificial Sequence: Synthetic oligonucleotide
  Antisense strand to SEQ ID NO: 2121530
uuucuccgauuucagagcc

SEQ ID NO: 2121532 - RNA, 19 nt, Artificial Sequence
  Description of Artificial Sequence: Synthetic oligonucleotide
  Sense strand starting at position 1553 of SEQ ID NO: 1882443
aguaaauaguucuugucca

SEQ ID NO: 2121533 - RNA, 19 nt, Artificial Sequence
  Description of Artificial Sequence: Synthetic oligonucleotide
  Antisense strand to SEQ ID NO: 2121532
uggacaagaacuauuuacu

SEQ ID NO: 2121534 - RNA, 19 nt, Artificial Sequence
  Description of Artificial Sequence: Synthetic oligonucleotide
  Sense strand starting at position 1558 of SEQ ID NO: 1882443
auaguucuuguccauagaa

SEQ ID NO: 2121535 - RNA, 19 nt, Artificial Sequence
  Description of Artificial Sequence: Synthetic oligonucleotide
  Antisense strand to SEQ ID NO: 2121534
uucuauggacaagaacuau

SEQ ID NO: 2121536 - RNA, 19 nt, Artificial Sequence
  Description of Artificial Sequence: Synthetic oligonucleotide
  Sense strand starting at position 1560 of SEQ ID NO: 1882443
aguucuuguccauagaaau

SEQ ID NO: 2121537 - RNA, 19 nt, Artificial Sequence
  Description of Artificial Sequence: Synthetic oligonucleotide
  Antisense strand to SEQ ID NO: 2121536
auuucuauggacaagaacu

SEQ ID NO: 2121538 - RNA, 19 nt, Artificial Sequence
  Description of Artificial Sequence: Synthetic oligonucleotide
  Sense strand starting at position 1571 of SEQ ID NO: 1882443
auagaaaugucccugaagu

SEQ ID NO: 2121539 - RNA, 19 nt, Artificial Sequence
  Description of Artificial Sequence: Synthetic oligonucleotide
  Antisense strand to SEQ ID NO: 2121538
acuucagggacauuucuau

SEQ ID NO: 2121540 - RNA, 19 nt, Artificial Sequence
  Description of Artificial Sequence: Synthetic oligonucleotide
  Sense strand starting at position 1572 of SEQ ID NO: 1882443
uagaaaugucccugaaguu

SEQ ID NO: 2121541 - RNA, 19 nt, Artificial Sequence
  Description of Artificial Sequence: Synthetic oligonucleotide
  Antisense strand to SEQ ID NO: 2121540
aacuucagggacauuucua

SEQ ID NO: 2121542 - RNA, 19 nt, Artificial Sequence
  Description of Artificial Sequence: Synthetic oligonucleotide
  Sense strand starting at position 1573 of SEQ ID NO: 1882443
agaaaugucccugaaguuu

SEQ ID NO: 2121543 - RNA, 19 nt, Artificial Sequence
  Description of Artificial Sequence: Synthetic oligonucleotide
  Antisense strand to SEQ ID NO: 2121542
aaacuucagggacauuucu

SEQ ID NO: 2121544 - RNA, 19 nt, Artificial Sequence
  Description of Artificial Sequence: Synthetic oligonucleotide
  Sense strand starting at position 1581 of SEQ ID NO: 1882443
cccugaaguuugucugaua

SEQ ID NO: 2121545 - RNA, 19 nt, Artificial Sequence
  Description of Artificial Sequence: Synthetic oligonucleotide
  Antisense strand to SEQ ID NO: 2121544
uaucagacaaacuucaggg

SEQ ID NO: 2121546 - RNA, 19 nt, Artificial Sequence
  Description of Artificial Sequence: Synthetic oligonucleotide
  Sense strand starting at position 1582 of SEQ ID NO: 1882443
ccugaaguuugucugauag

SEQ ID NO: 2121547 - RNA, 19 nt, Artificial Sequence
  Description of Artificial Sequence: Synthetic oligonucleotide
  Antisense strand to SEQ ID NO: 2121546
cuaucagacaaacuucagg

SEQ ID NO: 2121548 - RNA, 19 nt, Artificial Sequence
  Description of Artificial Sequence: Synthetic oligonucleotide
  Sense strand starting at position 1599 of SEQ ID NO: 1882443
agaagugccguugacuauu

SEQ ID NO: 2121549 - RNA, 19 nt, Artificial Sequence
  Description of Artificial Sequence: Synthetic oligonucleotide
  Antisense strand to SEQ ID NO: 2121548
aauagucaacggcacuucu

SEQ ID NO: 2121550 - RNA, 19 nt, Artificial Sequence
  Description of Artificial Sequence: Synthetic oligonucleotide
  Sense strand starting at position 1610 of SEQ ID NO: 1882443
ugacuauuggcuuguagau

SEQ ID NO: 2121551 - RNA, 19 nt, Artificial Sequence
  Description of Artificial Sequence: Synthetic oligonucleotide
  Antisense strand to SEQ ID NO: 2121550
aucuacaagccaauaguca

SEQ ID NO: 2121552 - RNA, 19 nt, Artificial Sequence
  Description of Artificial Sequence: Synthetic oligonucleotide
  Sense strand starting at position 1689 of SEQ ID NO: 1882443
uucggacucuccuuugaac

SEQ ID NO: 2121553 - RNA, 19 nt, Artificial Sequence
  Description of Artificial Sequence: Synthetic oligonucleotide
  Antisense strand to SEQ ID NO: 2121552
guucaaaggagaguccgaa

SEQ ID NO: 2121554 - RNA, 19 nt, Artificial Sequence
  Description of Artificial Sequence: Synthetic oligonucleotide
  Sense strand starting at position 1746 of SEQ ID NO: 1882443
agcuaaagucuuugacaug

SEQ ID NO: 2121555 - RNA, 19 nt, Artificial Sequence
  Description of Artificial Sequence: Synthetic oligonucleotide
  Antisense strand to SEQ ID NO: 2121554
caugucaaagacuuuagcu

SEQ ID NO: 2121556 - RNA, 19 nt, Artificial Sequence
  Description of Artificial Sequence: Synthetic oligonucleotide
  Sense strand starting at position 1753 of SEQ ID NO: 1882443
gucuuugacauguauuagu

SEQ ID NO: 2121557 - RNA, 19 nt, Artificial Sequence
  Description of Artificial Sequence: Synthetic oligonucleotide
  Antisense strand to SEQ ID NO: 2121556
acuaauacaugucaaagac

SEQ ID NO: 2121558 - RNA, 19 nt, Artificial Sequence
  Description of Artificial Sequence: Synthetic oligonucleotide
  Sense strand starting at position 1999 of SEQ ID NO: 1882443
ggaguccuuagauggugau

SEQ ID NO: 2121559 - RNA, 19 nt, Artificial Sequence
  Description of Artificial Sequence: Synthetic oligonucleotide
  Antisense strand to SEQ ID NO: 2121558
aucaccaucuaaggacucc

SEQ ID NO: 2121560 - RNA, 19 nt, Artificial Sequence
  Description of Artificial Sequence: Synthetic oligonucleotide
  Sense strand starting at position 2009 of SEQ ID NO: 1882443
gauggugaucuuggugaag

SEQ ID NO: 2121561 - RNA, 19 nt, Artificial Sequence
  Description of Artificial Sequence: Synthetic oligonucleotide
  Antisense strand to SEQ ID NO: 2121560
cuucaccaagaucaccauc

SEQ ID NO: 2121562 - RNA, 19 nt, Artificial Sequence
  Description of Artificial Sequence: Synthetic oligonucleotide
  Sense strand starting at position 2062 of SEQ ID NO: 1882443
ugagguauuucugcccauc

SEQ ID NO: 2121563 - RNA, 19 nt, Artificial Sequence
  Description of Artificial Sequence: Synthetic oligonucleotide
  Antisense strand to SEQ ID NO: 2121562
gaugggcagaaauaccuca

SEQ ID NO: 2121564 - RNA, 19 nt, Artificial Sequence
  Description of Artificial Sequence: Synthetic oligonucleotide
  Sense strand starting at position 2833 of SEQ ID NO: 1882443
gccaaagaguaauuggaag

SEQ ID NO: 2121565 - RNA, 19 nt, Artificial Sequence
  Description of Artificial Sequence: Synthetic oligonucleotide
  Antisense strand to SEQ ID NO: 2121564
cuuccaauuacucuuuggc

SEQ ID NO: 2121566 - RNA, 19 nt, Artificial Sequence
  Description of Artificial Sequence: Synthetic oligonucleotide
  Sense strand starting at position 2888 of SEQ ID NO: 1882443
gcugcucucagaggauaga

SEQ ID NO: 2121567 - RNA, 19 nt, Artificial Sequence
  Description of Artificial Sequence: Synthetic oligonucleotide
  Antisense strand to SEQ ID NO: 2121566
ucuauccucugagagcagc

SEQ ID NO: 2121568 - RNA, 19 nt, Artificial Sequence
  Description of Artificial Sequence: Synthetic oligonucleotide
  Sense strand starting at position 3356 of SEQ ID NO: 1882443
ucugauuucugucauuuga

SEQ ID NO: 2121569 - RNA, 19 nt, Artificial Sequence
  Description of Artificial Sequence: Synthetic oligonucleotide
  Antisense strand to SEQ ID NO: 2121568
ucaaaugacagaaaucaga

SEQ ID NO: 2121570 - RNA, 19 nt, Artificial Sequence
  Description of Artificial Sequence: Synthetic oligonucleotide
  Sense strand starting at position 3399 of SEQ ID NO: 1882443
cugaauguuccacaaguau

SEQ ID NO: 2121571 - RNA, 19 nt, Artificial Sequence
  Description of Artificial Sequence: Synthetic oligonucleotide
  Antisense strand to SEQ ID NO: 2121570
auacuuguggaacauucag

SEQ ID NO: 2121572 - RNA, 19 nt, Artificial Sequence
  Description of Artificial Sequence: Synthetic oligonucleotide
  Sense strand starting at position 3464 of SEQ ID NO: 1882443
cucuguuaggaaggaugua

SEQ ID NO: 2121573 - RNA, 19 nt, Artificial Sequence
  Description of Artificial Sequence: Synthetic oligonucleotide
  Antisense strand to SEQ ID NO: 2121572
uacauccuuccuaacagag

SEQ ID NO: 2121574 - RNA, 19 nt, Artificial Sequence
  Description of Artificial Sequence: Synthetic oligonucleotide
  Sense strand starting at position 3512 of SEQ ID NO: 1882443
cucacauugugucuauaaa

SEQ ID NO: 2121575 - RNA, 19 nt, Artificial Sequence
  Description of Artificial Sequence: Synthetic oligonucleotide
  Antisense strand to SEQ ID NO: 2121574
uuuauagacacaaugugag

SEQ ID NO: 2121576 - RNA, 19 nt, Artificial Sequence
  Description of Artificial Sequence: Synthetic oligonucleotide
  Sense strand starting at position 3513 of SEQ ID NO: 1882443
ucacauugugucuauaaac

SEQ ID NO: 2121577 - RNA, 19 nt, Artificial Sequence
  Description of Artificial Sequence: Synthetic oligonucleotide
  Antisense strand to SEQ ID NO: 2121576
guuuauagacacaauguga

SEQ ID NO: 2121578 - RNA, 19 nt, Artificial Sequence
  Description of Artificial Sequence: Synthetic oligonucleotide
  Sense strand starting at position 3567 of SEQ ID NO: 1882443
aguugagaaucuuucuaug

SEQ ID NO: 2121579 - RNA, 19 nt, Artificial Sequence
  Description of Artificial Sequence: Synthetic oligonucleotide
  Antisense strand to SEQ ID NO: 2121578
cauagaaagauucucaacu

SEQ ID NO: 2121580 - RNA, 19 nt, Artificial Sequence
  Description of Artificial Sequence: Synthetic oligonucleotide
  Sense strand starting at position 3569 of SEQ ID NO: 1882443
uugagaaucuuucuaugcu

SEQ ID NO: 2121581 - RNA, 19 nt, Artificial Sequence
  Description of Artificial Sequence: Synthetic oligonucleotide
  Antisense strand to SEQ ID NO: 2121580
agcauagaaagauucucaa

SEQ ID NO: 2121582 - RNA, 19 nt, Artificial Sequence
  Description of Artificial Sequence: Synthetic oligonucleotide
  Sense strand starting at position 3678 of SEQ ID NO: 1882443
gcagaagugacuugcucaa

SEQ ID NO: 2121583 - RNA, 19 nt, Artificial Sequence
  Description of Artificial Sequence: Synthetic oligonucleotide
  Antisense strand to SEQ ID NO: 2121582
uugagcaagucacuucugc

SEQ ID NO: 2121584 - RNA, 19 nt, Artificial Sequence
  Description of Artificial Sequence: Synthetic oligonucleotide
  Sense strand starting at position 3807 of SEQ ID NO: 1882443
gugguuugaaaucaaaggu

SEQ ID NO: 2121585 - RNA, 19 nt, Artificial Sequence
  Description of Artificial Sequence: Synthetic oligonucleotide
  Antisense strand to SEQ ID NO: 2121584
accuuugauuucaaaccac

SEQ ID NO: 2121586 - RNA, 19 nt, Artificial Sequence
  Description of Artificial Sequence: Synthetic oligonucleotide
  Sense strand starting at position 40 of SEQ ID NO: 1882444
augguaagaucagucucau

SEQ ID NO: 2121587 - RNA, 19 nt, Artificial Sequence
  Description of Artificial Sequence: Synthetic oligonucleotide
  Antisense strand to SEQ ID NO: 2121586
augagacugaucuuaccau

SEQ ID NO: 2121588 - RNA, 19 nt, Artificial Sequence
  Description of Artificial Sequence: Synthetic oligonucleotide
  Sense strand starting at position 88 of SEQ ID NO: 1882444
auuauaugcuagucauaug

SEQ ID NO: 2121589 - RNA, 19 nt, Artificial Sequence
  Description of Artificial Sequence: Synthetic oligonucleotide
  Antisense strand to SEQ ID NO: 2121588
cauaugacuagcauauaau

SEQ ID NO: 2121590 - RNA, 19 nt, Artificial Sequence
  Description of Artificial Sequence: Synthetic oligonucleotide
  Sense strand starting at position 100 of SEQ ID NO: 1882444
ucauauguacuagggugaa

SEQ ID NO: 2121591 - RNA, 19 nt, Artificial Sequence
  Description of Artificial Sequence: Synthetic oligonucleotide
  Antisense strand to SEQ ID NO: 2121590
uucacccuaguacauauga

SEQ ID NO: 2121592 - RNA, 19 nt, Artificial Sequence
  Description of Artificial Sequence: Synthetic oligonucleotide
  Sense strand starting at position 666 of SEQ ID NO: 1882444
ggcuuauauuuggcucuuu

SEQ ID NO: 2121593 - RNA, 19 nt, Artificial Sequence
  Description of Artificial Sequence: Synthetic oligonucleotide
  Antisense strand to SEQ ID NO: 2121592
aaagagccaaauauaagcc

SEQ ID NO: 2121594 - RNA, 19 nt, Artificial Sequence
  Description of Artificial Sequence: Synthetic oligonucleotide
  Sense strand starting at position 667 of SEQ ID NO: 1882444
gcuuauauuuggcucuuua

SEQ ID NO: 2121595 - RNA, 19 nt, Artificial Sequence
  Description of Artificial Sequence: Synthetic oligonucleotide
  Antisense strand to SEQ ID NO: 2121594
uaaagagccaaauauaagc

SEQ ID NO: 2121596 - RNA, 19 nt, Artificial Sequence
  Description of Artificial Sequence: Synthetic oligonucleotide
  Sense strand starting at position 835 of SEQ ID NO: 1882444
ccaggucuuccugaaugca

SEQ ID NO: 2121597 - RNA, 19 nt, Artificial Sequence
  Description of Artificial Sequence: Synthetic oligonucleotide
  Antisense strand to SEQ ID NO: 2121596
ugcauucaggaagaccugg

SEQ ID NO: 2121598 - RNA, 19 nt, Artificial Sequence
  Description of Artificial Sequence: Synthetic oligonucleotide
  Sense strand starting at position 838 of SEQ ID NO: 1882444
ggucuuccugaaugcaaag

SEQ ID NO: 2121599 - RNA, 19 nt, Artificial Sequence
  Description of Artificial Sequence: Synthetic oligonucleotide
  Antisense strand to SEQ ID NO: 2121598
cuuugcauucaggaagacc

SEQ ID NO: 2121600 - RNA, 19 nt, Artificial Sequence
  Description of Artificial Sequence: Synthetic oligonucleotide
  Sense strand starting at position 933 of SEQ ID NO: 1882444
gucagaauacagcauguga

SEQ ID NO: 2121601 - RNA, 19 nt, Artificial Sequence
  Description of Artificial Sequence: Synthetic oligonucleotide
  Antisense strand to SEQ ID NO: 2121600
ucacaugcuguauucugac

SEQ ID NO: 2121602 - RNA, 19 nt, Artificial Sequence
  Description of Artificial Sequence: Synthetic oligonucleotide
  Sense strand starting at position 988 of SEQ ID NO: 1882444
acuuauuacugucuaaguu

SEQ ID NO: 2121603 - RNA, 19 nt, Artificial Sequence
  Description of Artificial Sequence: Synthetic oligonucleotide
  Antisense strand to SEQ ID NO: 2121602
aacuuagacaguaauaagu

SEQ ID NO: 2121604 - RNA, 19 nt, Artificial Sequence
  Description of Artificial Sequence: Synthetic oligonucleotide
  Sense strand starting at position 1058 of SEQ ID NO: 1882444
aggucagaauucucccuua

SEQ ID NO: 2121605 - RNA, 19 nt, Artificial Sequence
  Description of Artificial Sequence: Synthetic oligonucleotide
  Antisense strand to SEQ ID NO: 2121604
uaagggagaauucugaccu

SEQ ID NO: 2121606 - RNA, 19 nt, Artificial Sequence
  Description of Artificial Sequence: Synthetic oligonucleotide
  Sense strand starting at position 1093 of SEQ ID NO: 1882444
augagaacuuagcucauua

SEQ ID NO: 2121607 - RNA, 19 nt, Artificial Sequence
  Description of Artificial Sequence: Synthetic oligonucleotide
  Antisense strand to SEQ ID NO: 2121606
uaaugagcuaaguucucau

SEQ ID NO: 2121608 - RNA, 19 nt, Artificial Sequence
  Description of Artificial Sequence: Synthetic oligonucleotide
  Sense strand starting at position 1339 of SEQ ID NO: 1882444
uggugugacagguacuauu

SEQ ID NO: 2121609 - RNA, 19 nt, Artificial Sequence
  Description of Artificial Sequence: Synthetic oligonucleotide
  Antisense strand to SEQ ID NO: 2121608
aauaguaccugucacacca

SEQ ID NO: 2121610 - RNA, 19 nt, Artificial Sequence
  Description of Artificial Sequence: Synthetic oligonucleotide
  Sense strand starting at position 1382 of SEQ ID NO: 1882444
cugagaaaugauugcuuag

SEQ ID NO: 2121611 - RNA, 19 nt, Artificial Sequence
  Description of Artificial Sequence: Synthetic oligonucleotide
  Antisense strand to SEQ ID NO: 2121610
cuaagcaaucauuucucag

SEQ ID NO: 2121612 - RNA, 19 nt, Artificial Sequence
  Description of Artificial Sequence: Synthetic oligonucleotide
  Sense strand starting at position 1384 of SEQ ID NO: 1882444
gagaaaugauugcuuagug

SEQ ID NO: 2121613 - RNA, 19 nt, Artificial Sequence
  Description of Artificial Sequence: Synthetic oligonucleotide
  Antisense strand to SEQ ID NO: 2121612
cacuaagcaaucauuucuc

SEQ ID NO: 2121614 - RNA, 19 nt, Artificial Sequence
  Description of Artificial Sequence: Synthetic oligonucleotide
  Sense strand starting at position 1385 of SEQ ID NO: 1882444
agaaaugauugcuuaguga

SEQ ID NO: 2121615 - RNA, 19 nt, Artificial Sequence
  Description of Artificial Sequence: Synthetic oligonucleotide
  Antisense strand to SEQ ID NO: 2121614
ucacuaagcaaucauuucu

SEQ ID NO: 2121616 - RNA, 19 nt, Artificial Sequence
  Description of Artificial Sequence: Synthetic oligonucleotide
  Sense strand starting at position 1388 of SEQ ID NO: 1882444
aaugauugcuuagugaaua

SEQ ID NO: 2121617 - RNA, 19 nt, Artificial Sequence
  Description of Artificial Sequence: Synthetic oligonucleotide
  Antisense strand to SEQ ID NO: 2121616
uauucacuaagcaaucauu

SEQ ID NO: 2121618 - RNA, 19 nt, Artificial Sequence
  Description of Artificial Sequence: Synthetic oligonucleotide
  Sense strand starting at position 1393 of SEQ ID NO: 1882444
uugcuuagugaauagauau

SEQ ID NO: 2121619 - RNA, 19 nt, Artificial Sequence
  Description of Artificial Sequence: Synthetic oligonucleotide
  Antisense strand to SEQ ID NO: 2121618
auaucuauucacuaagcaa

SEQ ID NO: 2121620 - RNA, 19 nt, Artificial Sequence
  Description of Artificial Sequence: Synthetic oligonucleotide
  Sense strand starting at position 1403 of SEQ ID NO: 1882444
aauagauaucuugggcuga

SEQ ID NO: 2121621 - RNA, 19 nt, Artificial Sequence
  Description of Artificial Sequence: Synthetic oligonucleotide
  Antisense strand to SEQ ID NO: 2121620
ucagcccaagauaucuauu

SEQ ID NO: 2121622 - RNA, 19 nt, Artificial Sequence
  Description of Artificial Sequence: Synthetic oligonucleotide
  Sense strand starting at position 1405 of SEQ ID NO: 1882444
uagauaucuugggcugaau

SEQ ID NO: 2121623 - RNA, 19 nt, Artificial Sequence
  Description of Artificial Sequence: Synthetic oligonucleotide
  Antisense strand to SEQ ID NO: 2121622
auucagcccaagauaucua

SEQ ID NO: 2121624 - RNA, 19 nt, Artificial Sequence
  Description of Artificial Sequence: Synthetic oligonucleotide
  Sense strand starting at position 1407 of SEQ ID NO: 1882444
gauaucuugggcugaauag

SEQ ID NO: 2121625 - RNA, 19 nt, Artificial Sequence
  Description of Artificial Sequence: Synthetic oligonucleotide
  Antisense strand to SEQ ID NO: 2121624
cuauucagcccaagauauc

SEQ ID NO: 2121626 - RNA, 19 nt, Artificial Sequence
  Description of Artificial Sequence: Synthetic oligonucleotide
  Sense strand starting at position 1461 of SEQ ID NO: 1882444
cauauuuggugggauaggu

SEQ ID NO: 2121627 - RNA, 19 nt, Artificial Sequence
  Description of Artificial Sequence: Synthetic oligonucleotide
  Antisense strand to SEQ ID NO: 2121626
accuaucccaccaaauaug

SEQ ID NO: 2121628 - RNA, 19 nt, Artificial Sequence
  Description of Artificial Sequence: Synthetic oligonucleotide
  Sense strand starting at position 1481 of SEQ ID NO: 1882444
agaauuaugccuuggaacu

SEQ ID NO: 2121629 - RNA, 19 nt, Artificial Sequence
  Description of Artificial Sequence: Synthetic oligonucleotide
  Antisense strand to SEQ ID NO: 2121628
aguuccaaggcauaauucu

SEQ ID NO: 2121630 - RNA, 19 nt, Artificial Sequence
  Description of Artificial Sequence: Synthetic oligonucleotide
  Sense strand starting at position 1493 of SEQ ID NO: 1882444
uggaacuagccaugcuaua

SEQ ID NO: 2121631 - RNA, 19 nt, Artificial Sequence
  Description of Artificial Sequence: Synthetic oligonucleotide
  Antisense strand to SEQ ID NO: 2121630
uauagcauggcuaguucca

SEQ ID NO: 2121632 - RNA, 19 nt, Artificial Sequence
  Description of Artificial Sequence: Synthetic oligonucleotide
  Sense strand starting at position 1795 of SEQ ID NO: 1882444
agcauaagaauauggugaa

SEQ ID NO: 2121633 - RNA, 19 nt, Artificial Sequence
  Description of Artificial Sequence: Synthetic oligonucleotide
  Antisense strand to SEQ ID NO: 2121632
uucaccauauucuuaugcu

SEQ ID NO: 2121634 - RNA, 19 nt, Artificial Sequence
  Description of Artificial Sequence: Synthetic oligonucleotide
  Sense strand starting at position 1874 of SEQ ID NO: 1882444
ucuucuguuucuccaagga

SEQ ID NO: 2121635 - RNA, 19 nt, Artificial Sequence
  Description of Artificial Sequence: Synthetic oligonucleotide
  Antisense strand to SEQ ID NO: 2121634
uccuuggagaaacagaaga

SEQ ID NO: 2121636 - RNA, 19 nt, Artificial Sequence
  Description of Artificial Sequence: Synthetic oligonucleotide
  Sense strand starting at position 2044 of SEQ ID NO: 1882444
gcaucauuugucuaagccu

SEQ ID NO: 2121637 - RNA, 19 nt, Artificial Sequence
  Description of Artificial Sequence: Synthetic oligonucleotide
  Antisense strand to SEQ ID NO: 2121636
aggcuuagacaaaugaugc

SEQ ID NO: 2121638 - RNA, 19 nt, Artificial Sequence
  Description of Artificial Sequence: Synthetic oligonucleotide
  Sense strand starting at position 2047 of SEQ ID NO: 1882444
ucauuugucuaagccugua

SEQ ID NO: 2121639 - RNA, 19 nt, Artificial Sequence
  Description of Artificial Sequence: Synthetic oligonucleotide
  Antisense strand to SEQ ID NO: 2121638
uacaggcuuagacaaauga

SEQ ID NO: 2121640 - RNA, 19 nt, Artificial Sequence
  Description of Artificial Sequence: Synthetic oligonucleotide
  Sense strand starting at position 2131 of SEQ ID NO: 1882444
uuacaugauuuguacauac

SEQ ID NO: 2121641 - RNA, 19 nt, Artificial Sequence
  Description of Artificial Sequence: Synthetic oligonucleotide
  Antisense strand to SEQ ID NO: 2121640
guauguacaaaucauguaa

SEQ ID NO: 2121642 - RNA, 19 nt, Artificial Sequence
  Description of Artificial Sequence: Synthetic oligonucleotide
  Sense strand starting at position 2299 of SEQ ID NO: 1882444
gacaguaugccauaaugcu

SEQ ID NO: 2121643 - RNA, 19 nt, Artificial Sequence
  Description of Artificial Sequence: Synthetic oligonucleotide
  Antisense strand to SEQ ID NO: 2121642
agcauuauggcauacuguc

SEQ ID NO: 2121644 - RNA, 19 nt, Artificial Sequence
  Description of Artificial Sequence: Synthetic oligonucleotide
  Sense strand starting at position 2353 of SEQ ID NO: 1882444
uggcauauauucuuugaau

SEQ ID NO: 2121645 - RNA, 19 nt, Artificial Sequence
  Description of Artificial Sequence: Synthetic oligonucleotide
  Antisense strand to SEQ ID NO: 2121644
auucaaagaauauaugcca

SEQ ID NO: 2121646 - RNA, 19 nt, Artificial Sequence
  Description of Artificial Sequence: Synthetic oligonucleotide
  Sense strand starting at position 2354 of SEQ ID NO: 1882444
ggcauauauucuuugaaug

SEQ ID NO: 2121647 - RNA, 19 nt, Artificial Sequence
  Description of Artificial Sequence: Synthetic oligonucleotide
  Antisense strand to SEQ ID NO: 2121646
cauucaaagaauauaugcc

SEQ ID NO: 2121648 - RNA, 19 nt, Artificial Sequence
  Description of Artificial Sequence: Synthetic oligonucleotide
  Sense strand starting at position 2444 of SEQ ID NO: 1882444
uauauaagugaugguacau

SEQ ID NO: 2121649 - RNA, 19 nt, Artificial Sequence
  Description of Artificial Sequence: Synthetic oligonucleotide
  Antisense strand to SEQ ID NO: 2121648
auguaccaucacuuauaua

SEQ ID NO: 2121650 - RNA, 19 nt, Artificial Sequence
  Description of Artificial Sequence: Synthetic oligonucleotide
  Sense strand starting at position 3021 of SEQ ID NO: 1882444
aucauaucauagguauugu

SEQ ID NO: 2121651 - RNA, 19 nt, Artificial Sequence
  Description of Artificial Sequence: Synthetic oligonucleotide
  Antisense strand to SEQ ID NO: 2121650
acaauaccuaugauaugau

SEQ ID NO: 2121652 - RNA, 19 nt, Artificial Sequence
  Description of Artificial Sequence: Synthetic oligonucleotide
  Sense strand starting at position 3174 of SEQ ID NO: 1882444
agccauagacauugagguu

SEQ ID NO: 2121653 - RNA, 19 nt, Artificial Sequence
  Description of Artificial Sequence: Synthetic oligonucleotide
  Antisense strand to SEQ ID NO: 2121652
aaccucaaugucuauggcu

SEQ ID NO: 2121654 - RNA, 19 nt, Artificial Sequence
  Description of Artificial Sequence: Synthetic oligonucleotide
  Sense strand starting at position 3189 of SEQ ID NO: 1882444
gguuguuugguuuaacaag

SEQ ID NO: 2121655 - RNA, 19 nt, Artificial Sequence
  Description of Artificial Sequence: Synthetic oligonucleotide
  Antisense strand to SEQ ID NO: 2121654
cuuguuaaaccaaacaacc

SEQ ID NO: 2121656 - RNA, 19 nt, Artificial Sequence
  Description of Artificial Sequence: Synthetic oligonucleotide
  Sense strand starting at position 3328 of SEQ ID NO: 1882444
gcccgaaacaucuggaagu

SEQ ID NO: 2121657 - RNA, 19 nt, Artificial Sequence
  Description of Artificial Sequence: Synthetic oligonucleotide
  Antisense strand to SEQ ID NO: 2121656
acuuccagauguuucgggc

SEQ ID NO: 2121658 - RNA, 19 nt, Artificial Sequence
  Description of Artificial Sequence: Synthetic oligonucleotide
  Sense strand starting at position 3470 of SEQ ID NO: 1882444
gugggagagagcugacuaa

SEQ ID NO: 2121659 - RNA, 19 nt, Artificial Sequence
  Description of Artificial Sequence: Synthetic oligonucleotide
  Antisense strand to SEQ ID NO: 2121658
uuagucagcucucucccac

SEQ ID NO: 2121660 - RNA, 19 nt, Artificial Sequence
  Description of Artificial Sequence: Synthetic oligonucleotide
  Sense strand starting at position 3789 of SEQ ID NO: 1882444
gcaggagaagguuguaucu

SEQ ID NO: 2121661 - RNA, 19 nt, Artificial Sequence
  Description of Artificial Sequence: Synthetic oligonucleotide
  Antisense strand to SEQ ID NO: 2121660
agauacaaccuucuccugc

SEQ ID NO: 2121662 - RNA, 19 nt, Artificial Sequence
  Description of Artificial Sequence: Synthetic oligonucleotide
  Sense strand starting at position 3817 of SEQ ID NO: 1882444
gcuuguugcgaggcuuaau

SEQ ID NO: 2121663 - RNA, 19 nt, Artificial Sequence
  Description of Artificial Sequence: Synthetic oligonucleotide
  Antisense strand to SEQ ID NO: 2121662
auuaagccucgcaacaagc

SEQ ID NO: 2121664 - RNA, 19 nt, Artificial Sequence
  Description of Artificial Sequence: Synthetic oligonucleotide
  Sense strand starting at position 3909 of SEQ ID NO: 1882444
agacaauccugacugcuuu

SEQ ID NO: 2121665 - RNA, 19 nt, Artificial Sequence
  Description of Artificial Sequence: Synthetic oligonucleotide
  Antisense strand to SEQ ID NO: 2121664
aaagcagucaggauugucu

SEQ ID NO: 2121666 - RNA, 19 nt, Artificial Sequence
  Description of Artificial Sequence: Synthetic oligonucleotide
  Sense strand starting at position 711 of SEQ ID NO: 1882445
ccucgagucccagacagaa

SEQ ID NO: 2121667 - RNA, 19 nt, Artificial Sequence
  Description of Artificial Sequence: Synthetic oligonucleotide
  Antisense strand to SEQ ID NO: 2121666
uucugucugggacucgagg

SEQ ID NO: 2121668 - RNA, 19 nt, Artificial Sequence
  Description of Artificial Sequence: Synthetic oligonucleotide
  Sense strand starting at position 948 of SEQ ID NO: 1882445
gaggcugagucacuugaga

SEQ ID NO: 2121669 - RNA, 19 nt, Artificial Sequence
  Description of Artificial Sequence: Synthetic oligonucleotide
  Antisense strand to SEQ ID NO: 2121668
ucucaagugacucagccuc

SEQ ID NO: 2121670 - RNA, 19 nt, Artificial Sequence
  Description of Artificial Sequence: Synthetic oligonucleotide
  Sense strand starting at position 950 of SEQ ID NO: 1882445
ggcugagucacuugagaaa

SEQ ID NO: 2121671 - RNA, 19 nt, Artificial Sequence
  Description of Artificial Sequence: Synthetic oligonucleotide
  Antisense strand to SEQ ID NO: 2121670
uuucucaagugacucagcc

SEQ ID NO: 2121672 - RNA, 19 nt, Artificial Sequence
  Description of Artificial Sequence: Synthetic oligonucleotide
  Sense strand starting at position 1144 of SEQ ID NO: 1882445
ggagaaagaugugaauauu

SEQ ID NO: 2121673 - RNA, 19 nt, Artificial Sequence
  Description of Artificial Sequence: Synthetic oligonucleotide
  Antisense strand to SEQ ID NO: 2121672
aauauucacaucuuucucc

SEQ ID NO: 2121674 - RNA, 19 nt, Artificial Sequence
  Description of Artificial Sequence: Synthetic oligonucleotide
  Sense strand starting at position 1188 of SEQ ID NO: 1882445
gucguaaugcauuagugag

SEQ ID NO: 2121675 - RNA, 19 nt, Artificial Sequence
  Description of Artificial Sequence: Synthetic oligonucleotide
  Antisense strand to SEQ ID NO: 2121674
cucacuaaugcauuacgac

SEQ ID NO: 2121676 - RNA, 19 nt, Artificial Sequence
  Description of Artificial Sequence: Synthetic oligonucleotide
  Sense strand starting at position 1200 of SEQ ID NO: 1882445
uagugagcagccugaagau

SEQ ID NO: 2121677 - RNA, 19 nt, Artificial Sequence
  Description of Artificial Sequence: Synthetic oligonucleotide
  Antisense strand to SEQ ID NO: 2121676
aucuucaggcugcucacua

SEQ ID NO: 2121678 - RNA, 19 nt, Artificial Sequence
  Description of Artificial Sequence: Synthetic oligonucleotide
  Sense strand starting at position 1262 of SEQ ID NO: 1882445
agugccuucuucuuacaga

SEQ ID NO: 2121679 - RNA, 19 nt, Artificial Sequence
  Description of Artificial Sequence: Synthetic oligonucleotide
  Antisense strand to SEQ ID NO: 2121678
ucuguaagaagaaggcacu

SEQ ID NO: 2121680 - RNA, 19 nt, Artificial Sequence
  Description of Artificial Sequence: Synthetic oligonucleotide
  Sense strand starting at position 1328 of SEQ ID NO: 1882445
ggcaguucuggugauaggu

SEQ ID NO: 2121681 - RNA, 19 nt, Artificial Sequence
  Description of Artificial Sequence: Synthetic oligonucleotide
  Antisense strand to SEQ ID NO: 2121680
accuaucaccagaacugcc

SEQ ID NO: 2121682 - RNA, 19 nt, Artificial Sequence
  Description of Artificial Sequence: Synthetic oligonucleotide
  Sense strand starting at position 1393 of SEQ ID NO: 1882445
uggucacugugagcuauaa

SEQ ID NO: 2121683 - RNA, 19 nt, Artificial Sequence
  Description of Artificial Sequence: Synthetic oligonucleotide
  Antisense strand to SEQ ID NO: 2121682
uuauagcucacagugacca

SEQ ID NO: 2121684 - RNA, 19 nt, Artificial Sequence
  Description of Artificial Sequence: Synthetic oligonucleotide
  Sense strand starting at position 1743 of SEQ ID NO: 1882445
uaaacugagugugcauuaa

SEQ ID NO: 2121685 - RNA, 19 nt, Artificial Sequence
  Description of Artificial Sequence: Synthetic oligonucleotide
  Antisense strand to SEQ ID NO: 2121684
uuaaugcacacucaguuua

SEQ ID NO: 2121686 - RNA, 19 nt, Artificial Sequence
  Description of Artificial Sequence: Synthetic oligonucleotide
  Sense strand starting at position 1830 of SEQ ID NO: 1882445
uuuaaagcucuuuguagga

SEQ ID NO: 2121687 - RNA, 19 nt, Artificial Sequence
  Description of Artificial Sequence: Synthetic oligonucleotide
  Antisense strand to SEQ ID NO: 2121686
uccuacaaagagcuuuaaa

SEQ ID NO: 2121688 - RNA, 19 nt, Artificial Sequence
  Description of Artificial Sequence: Synthetic oligonucleotide
  Sense strand starting at position 1893 of SEQ ID NO: 1882445
guaaaugacacgugggaug

SEQ ID NO: 2121689 - RNA, 19 nt, Artificial Sequence
  Description of Artificial Sequence: Synthetic oligonucleotide
  Antisense strand to SEQ ID NO: 2121688
caucccacgugucauuuac

SEQ ID NO: 2121690 - RNA, 19 nt, Artificial Sequence
  Description of Artificial Sequence: Synthetic oligonucleotide
  Sense strand starting at position 1990 of SEQ ID NO: 1882445
gagguagagguuugcaacu

SEQ ID NO: 2121691 - RNA, 19 nt, Artificial Sequence
  Description of Artificial Sequence: Synthetic oligonucleotide
  Antisense strand to SEQ ID NO: 2121690
aguugcaaaccucuaccuc

SEQ ID NO: 2121692 - RNA, 19 nt, Artificial Sequence
  Description of Artificial Sequence: Synthetic oligonucleotide
  Sense strand starting at position 2156 of SEQ ID NO: 1882445
guugcuguucccuucugua

SEQ ID NO: 2121693 - RNA, 19 nt, Artificial Sequence
  Description of Artificial Sequence: Synthetic oligonucleotide
  Antisense strand to SEQ ID NO: 2121692
uacagaagggaacagcaac

SEQ ID NO: 2121694 - RNA, 19 nt, Artificial Sequence
  Description of Artificial Sequence: Synthetic oligonucleotide
  Sense strand starting at position 2176 of SEQ ID NO: 1882445
uuugcucaucuggauuauu

SEQ ID NO: 2121695 - RNA, 19 nt, Artificial Sequence
  Description of Artificial Sequence: Synthetic oligonucleotide
  Antisense strand to SEQ ID NO: 2121694
aauaauccagaugagcaaa

SEQ ID NO: 2121696 - RNA, 19 nt, Artificial Sequence
  Description of Artificial Sequence: Synthetic oligonucleotide
  Sense strand starting at position 2188 of SEQ ID NO: 1882445
gauuauuaggugggaaagu

SEQ ID NO: 2121697 - RNA, 19 nt, Artificial Sequence
  Description of Artificial Sequence: Synthetic oligonucleotide
  Antisense strand to SEQ ID NO: 2121696
acuuucccaccuaauaauc

SEQ ID NO: 2121698 - RNA, 19 nt, Artificial Sequence
  Description of Artificial Sequence: Synthetic oligonucleotide
  Sense strand starting at position 2211 of SEQ ID NO: 1882445
uguaauaagccaugaaucu

SEQ ID NO: 2121699 - RNA, 19 nt, Artificial Sequence
  Description of Artificial Sequence: Synthetic oligonucleotide
  Antisense strand to SEQ ID NO: 2121698
agauucauggcuuauuaca

SEQ ID NO: 2121700 - RNA, 19 nt, Artificial Sequence
  Description of Artificial Sequence: Synthetic oligonucleotide
  Sense strand starting at position 2212 of SEQ ID NO: 1882445
guaauaagccaugaaucug

SEQ ID NO: 2121701 - RNA, 19 nt, Artificial Sequence
  Description of Artificial Sequence: Synthetic oligonucleotide
  Antisense strand to SEQ ID NO: 2121700
cagauucauggcuuauuac

SEQ ID NO: 2121702 - RNA, 19 nt, Artificial Sequence
  Description of Artificial Sequence: Synthetic oligonucleotide
  Sense strand starting at position 2316 of SEQ ID NO: 1882445
aagagaaguuguguggcaa

SEQ ID NO: 2121703 - RNA, 19 nt, Artificial Sequence
  Description of Artificial Sequence: Synthetic oligonucleotide
  Antisense strand to SEQ ID NO: 2121702
uugccacacaacuucucuu

SEQ ID NO: 2121704 - RNA, 19 nt, Artificial Sequence
  Description of Artificial Sequence: Synthetic oligonucleotide
  Sense strand starting at position 2317 of SEQ ID NO: 1882445
agagaaguuguguggcaaa

SEQ ID NO: 2121705 - RNA, 19 nt, Artificial Sequence
  Description of Artificial Sequence: Synthetic oligonucleotide
  Antisense strand to SEQ ID NO: 2121704
uuugccacacaacuucucu

SEQ ID NO: 2121706 - RNA, 19 nt, Artificial Sequence
  Description of Artificial Sequence: Synthetic oligonucleotide
  Sense strand starting at position 2344 of SEQ ID NO: 1882445
guggccuuugguuaauuau

SEQ ID NO: 2121707 - RNA, 19 nt, Artificial Sequence
  Description of Artificial Sequence: Synthetic oligonucleotide
  Antisense strand to SEQ ID NO: 2121706
auaauuaaccaaaggccac

SEQ ID NO: 2121708 - RNA, 19 nt, Artificial Sequence
  Description of Artificial Sequence: Synthetic oligonucleotide
  Sense strand starting at position 2553 of SEQ ID NO: 1882445
agguuaagaucuucuaaau

SEQ ID NO: 2121709 - RNA, 19 nt, Artificial Sequence
  Description of Artificial Sequence: Synthetic oligonucleotide
  Antisense strand to SEQ ID NO: 2121708
auuuagaagaucuuaaccu

SEQ ID NO: 2121710 - RNA, 19 nt, Artificial Sequence
  Description of Artificial Sequence: Synthetic oligonucleotide
  Sense strand starting at position 2566 of SEQ ID NO: 1882445
cuaaauuaucaaugguaug

SEQ ID NO: 2121711 - RNA, 19 nt, Artificial Sequence
  Description of Artificial Sequence: Synthetic oligonucleotide
  Antisense strand to SEQ ID NO: 2121710
cauaccauugauaauuuag

SEQ ID NO: 2121712 - RNA, 19 nt, Artificial Sequence
  Description of Artificial Sequence: Synthetic oligonucleotide
  Sense strand starting at position 2571 of SEQ ID NO: 1882445
uuaucaaugguaugguaau

SEQ ID NO: 2121713 - RNA, 19 nt, Artificial Sequence
  Description of Artificial Sequence: Synthetic oligonucleotide
  Antisense strand to SEQ ID NO: 2121712
auuaccauaccauugauaa

SEQ ID NO: 2121714 - RNA, 19 nt, Artificial Sequence
  Description of Artificial Sequence: Synthetic oligonucleotide
  Sense strand starting at position 3059 of SEQ ID NO: 1882445
guuguacaauaauccuaga

SEQ ID NO: 2121715 - RNA, 19 nt, Artificial Sequence
  Description of Artificial Sequence: Synthetic oligonucleotide
  Antisense strand to SEQ ID NO: 2121714
ucuaggauuauuguacaac

SEQ ID NO: 2121716 - RNA, 19 nt, Artificial Sequence
  Description of Artificial Sequence: Synthetic oligonucleotide
  Sense strand starting at position 3485 of SEQ ID NO: 1882445
uugggaaguccaggucagu

SEQ ID NO: 2121717 - RNA, 19 nt, Artificial Sequence
  Description of Artificial Sequence: Synthetic oligonucleotide
  Antisense strand to SEQ ID NO: 2121716
acugaccuggacuucccaa

SEQ ID NO: 2121718 - RNA, 19 nt, Artificial Sequence
  Description of Artificial Sequence: Synthetic oligonucleotide
  Sense strand starting at position 3537 of SEQ ID NO: 1882445
gucugaugguugcucauuu

SEQ ID NO: 2121719 - RNA, 19 nt, Artificial Sequence
  Description of Artificial Sequence: Synthetic oligonucleotide
  Antisense strand to SEQ ID NO: 2121718
aaaugagcaaccaucagac

SEQ ID NO: 2121720 - RNA, 19 nt, Artificial Sequence
  Description of Artificial Sequence: Synthetic oligonucleotide
  Sense strand starting at position 3541 of SEQ ID NO: 1882445
gaugguugcucauuugcuu

SEQ ID NO: 2121721 - RNA, 19 nt, Artificial Sequence
  Description of Artificial Sequence: Synthetic oligonucleotide
  Antisense strand to SEQ ID NO: 2121720
aagcaaaugagcaaccauc

SEQ ID NO: 2121722 - RNA, 19 nt, Artificial Sequence
  Description of Artificial Sequence: Synthetic oligonucleotide
  Sense strand starting at position 3581 of SEQ ID NO: 1882445
guaaacuggaggcgugaua

SEQ ID NO: 2121723 - RNA, 19 nt, Artificial Sequence
  Description of Artificial Sequence: Synthetic oligonucleotide
  Antisense strand to SEQ ID NO: 2121722
uaucacgccuccaguuuac

SEQ ID NO: 2121724 - RNA, 19 nt, Artificial Sequence
  Description of Artificial Sequence: Synthetic oligonucleotide
  Sense strand starting at position 3628 of SEQ ID NO: 1882445
aggugaugccuguacuuua

SEQ ID NO: 2121725 - RNA, 19 nt, Artificial Sequence
  Description of Artificial Sequence: Synthetic oligonucleotide
  Antisense strand to SEQ ID NO: 2121724
uaaaguacaggcaucaccu

SEQ ID NO: 2121726 - RNA, 19 nt, Artificial Sequence
  Description of Artificial Sequence: Synthetic oligonucleotide
  Sense strand starting at position 3754 of SEQ ID NO: 1882445
ucaugucccuuuguaacaa

SEQ ID NO: 2121727 - RNA, 19 nt, Artificial Sequence
  Description of Artificial Sequence: Synthetic oligonucleotide
  Antisense strand to SEQ ID NO: 2121726
uuguuacaaagggacauga

SEQ ID NO: 2121728 - RNA, 19 nt, Artificial Sequence
  Description of Artificial Sequence: Synthetic oligonucleotide
  Sense strand starting at position 3773 of SEQ ID NO: 1882445
gaaccugugggcugauauc

SEQ ID NO: 2121729 - RNA, 19 nt, Artificial Sequence
  Description of Artificial Sequence: Synthetic oligonucleotide
  Antisense strand to SEQ ID NO: 2121728
gauaucagcccacagguuc

SEQ ID NO: 2121730 - RNA, 19 nt, Artificial Sequence
  Description of Artificial Sequence: Synthetic oligonucleotide
  Sense strand starting at position 3780 of SEQ ID NO: 1882445
ugggcugauaucuggcaua

SEQ ID NO: 2121731 - RNA, 19 nt, Artificial Sequence
  Description of Artificial Sequence: Synthetic oligonucleotide
  Antisense strand to SEQ ID NO: 2121730
uaugccagauaucagccca

SEQ ID NO: 2121732 - RNA, 19 nt, Artificial Sequence
  Description of Artificial Sequence: Synthetic oligonucleotide
  Sense strand starting at position 3785 of SEQ ID NO: 1882445
ugauaucuggcauagagug

SEQ ID NO: 2121733 - RNA, 19 nt, Artificial Sequence
  Description of Artificial Sequence: Synthetic oligonucleotide
  Antisense strand to SEQ ID NO: 2121732
cacucuaugccagauauca

SEQ ID NO: 2121734 - RNA, 19 nt, Artificial Sequence
  Description of Artificial Sequence: Synthetic oligonucleotide
  Sense strand starting at position 3829 of SEQ ID NO: 1882445
cauccaauggugugagcau

SEQ ID NO: 2121735 - RNA, 19 nt, Artificial Sequence
  Description of Artificial Sequence: Synthetic oligonucleotide
  Antisense strand to SEQ ID NO: 2121734
augcucacaccauuggaug

SEQ ID NO: 2121736 - RNA, 19 nt, Artificial Sequence
  Description of Artificial Sequence: Synthetic oligonucleotide
  Sense strand starting at position 3841 of SEQ ID NO: 1882445
ugagcauacauacgugauc

SEQ ID NO: 2121737 - RNA, 19 nt, Artificial Sequence
  Description of Artificial Sequence: Synthetic oligonucleotide
  Antisense strand to SEQ ID NO: 2121736
gaucacguauguaugcuca

SEQ ID NO: 2121738 - RNA, 19 nt, Artificial Sequence
  Description of Artificial Sequence: Synthetic oligonucleotide
  Sense strand starting at position 3854 of SEQ ID NO: 1882445
gugaucccugccugaauca

SEQ ID NO: 2121739 - RNA, 19 nt, Artificial Sequence
  Description of Artificial Sequence: Synthetic oligonucleotide
  Antisense strand to SEQ ID NO: 2121738
ugauucaggcagggaucac

SEQ ID NO: 2121740 - RNA, 19 nt, Artificial Sequence
  Description of Artificial Sequence: Synthetic oligonucleotide
  Sense strand starting at position 3855 of SEQ ID NO: 1882445
ugaucccugccugaaucau

SEQ ID NO: 2121741 - RNA, 19 nt, Artificial Sequence
  Description of Artificial Sequence: Synthetic oligonucleotide
  Antisense strand to SEQ ID NO: 2121740
augauucaggcagggauca

SEQ ID NO: 2121742 - RNA, 19 nt, Artificial Sequence
  Description of Artificial Sequence: Synthetic oligonucleotide
  Sense strand starting at position 3895 of SEQ ID NO: 1882445
ggucacauuucugauggaa

SEQ ID NO: 2121743 - RNA, 19 nt, Artificial Sequence
  Description of Artificial Sequence: Synthetic oligonucleotide
  Antisense strand to SEQ ID NO: 2121742
uuccaucagaaaugugacc

SEQ ID NO: 2121744 - RNA, 19 nt, Artificial Sequence
  Description of Artificial Sequence: Synthetic oligonucleotide
  Sense strand starting at position 3897 of SEQ ID NO: 1882445
ucacauuucugauggaacu

SEQ ID NO: 2121745 - RNA, 19 nt, Artificial Sequence
  Description of Artificial Sequence: Synthetic oligonucleotide
  Antisense strand to SEQ ID NO: 2121744
aguuccaucagaaauguga

SEQ ID NO: 2121746 - RNA, 19 nt, Artificial Sequence
  Description of Artificial Sequence: Synthetic oligonucleotide
  Sense strand starting at position 70 of SEQ ID NO: 1882446
ccaguuucugagcagagga

SEQ ID NO: 2121747 - RNA, 19 nt, Artificial Sequence
  Description of Artificial Sequence: Synthetic oligonucleotide
  Antisense strand to SEQ ID NO: 2121746
uccucugcucagaaacugg

SEQ ID NO: 2121748 - RNA, 19 nt, Artificial Sequence
  Description of Artificial Sequence: Synthetic oligonucleotide
  Sense strand starting at position 117 of SEQ ID NO: 1882446
ggaaguguaucauuagaac

SEQ ID NO: 2121749 - RNA, 19 nt, Artificial Sequence
  Description of Artificial Sequence: Synthetic oligonucleotide
  Antisense strand to SEQ ID NO: 2121748
guucuaaugauacacuucc

SEQ ID NO: 2121750 - RNA, 19 nt, Artificial Sequence
  Description of Artificial Sequence: Synthetic oligonucleotide
  Sense strand starting at position 267 of SEQ ID NO: 1882446
ccauaauaugcugauguca

SEQ ID NO: 2121751 - RNA, 19 nt, Artificial Sequence
  Description of Artificial Sequence: Synthetic oligonucleotide
  Antisense strand to SEQ ID NO: 2121750
ugacaucagcauauuaugg

SEQ ID NO: 2121752 - RNA, 19 nt, Artificial Sequence
  Description of Artificial Sequence: Synthetic oligonucleotide
  Sense strand starting at position 360 of SEQ ID NO: 1882446
ggauauuucuuugcugcgu

SEQ ID NO: 2121753 - RNA, 19 nt, Artificial Sequence
  Description of Artificial Sequence: Synthetic oligonucleotide
  Antisense strand to SEQ ID NO: 2121752
acgcagcaaagaaauaucc

SEQ ID NO: 2121754 - RNA, 19 nt, Artificial Sequence
  Description of Artificial Sequence: Synthetic oligonucleotide
  Sense strand starting at position 466 of SEQ ID NO: 1882446
aguugugacaauugagaau

SEQ ID NO: 2121755 - RNA, 19 nt, Artificial Sequence
  Description of Artificial Sequence: Synthetic oligonucleotide
  Antisense strand to SEQ ID NO: 2121754
auucucaauugucacaacu

SEQ ID NO: 2121756 - RNA, 19 nt, Artificial Sequence
  Description of Artificial Sequence: Synthetic oligonucleotide
  Sense strand starting at position 472 of SEQ ID NO: 1882446
gacaauugagaaugucucu

SEQ ID NO: 2121757 - RNA, 19 nt, Artificial Sequence
  Description of Artificial Sequence: Synthetic oligonucleotide
  Antisense strand to SEQ ID NO: 2121756
agagacauucucaauuguc

SEQ ID NO: 2121758 - RNA, 19 nt, Artificial Sequence
  Description of Artificial Sequence: Synthetic oligonucleotide
  Sense strand starting at position 475 of SEQ ID NO: 1882446
aauugagaaugucucuaga

SEQ ID NO: 2121759 - RNA, 19 nt, Artificial Sequence
  Description of Artificial Sequence: Synthetic oligonucleotide
  Antisense strand to SEQ ID NO: 2121758
ucuagagacauucucaauu

SEQ ID NO: 2121760 - RNA, 19 nt, Artificial Sequence
  Description of Artificial Sequence: Synthetic oligonucleotide
  Sense strand starting at position 477 of SEQ ID NO: 1882446
uugagaaugucucuagaca

SEQ ID NO: 2121761 - RNA, 19 nt, Artificial Sequence
  Description of Artificial Sequence: Synthetic oligonucleotide
  Antisense strand to SEQ ID NO: 2121760
ugucuagagacauucucaa

SEQ ID NO: 2121762 - RNA, 19 nt, Artificial Sequence
  Description of Artificial Sequence: Synthetic oligonucleotide
  Sense strand starting at position 562 of SEQ ID NO: 1882446
uucugugcucaguucugua

SEQ ID NO: 2121763 - RNA, 19 nt, Artificial Sequence
  Description of Artificial Sequence: Synthetic oligonucleotide
  Antisense strand to SEQ ID NO: 2121762
uacagaacugagcacagaa

SEQ ID NO: 2121764 - RNA, 19 nt, Artificial Sequence
  Description of Artificial Sequence: Synthetic oligonucleotide
  Sense strand starting at position 582 of SEQ ID NO: 1882446
cugucccaucucuaguaau

SEQ ID NO: 2121765 - RNA, 19 nt, Artificial Sequence
  Description of Artificial Sequence: Synthetic oligonucleotide
  Antisense strand to SEQ ID NO: 2121764
auuacuagagaugggacag

SEQ ID NO: 2121766 - RNA, 19 nt, Artificial Sequence
  Description of Artificial Sequence: Synthetic oligonucleotide
  Sense strand starting at position 601 of SEQ ID NO: 1882446
uuaccauguucuuccaagu

SEQ ID NO: 2121767 - RNA, 19 nt, Artificial Sequence
  Description of Artificial Sequence: Synthetic oligonucleotide
  Antisense strand to SEQ ID NO: 2121766
acuuggaagaacaugguaa

SEQ ID NO: 2121768 - RNA, 19 nt, Artificial Sequence
  Description of Artificial Sequence: Synthetic oligonucleotide
  Sense strand starting at position 666 of SEQ ID NO: 1882446
uuagauaacugucugguuu

SEQ ID NO: 2121769 - RNA, 19 nt, Artificial Sequence
  Description of Artificial Sequence: Synthetic oligonucleotide
  Antisense strand to SEQ ID NO: 2121768
aaaccagacaguuaucuaa

SEQ ID NO: 2121770 - RNA, 19 nt, Artificial Sequence
  Description of Artificial Sequence: Synthetic oligonucleotide
  Sense strand starting at position 983 of SEQ ID NO: 1882446
uuaagaacucaagguguaa

SEQ ID NO: 2121771 - RNA, 19 nt, Artificial Sequence
  Description of Artificial Sequence: Synthetic oligonucleotide
  Antisense strand to SEQ ID NO: 2121770
uuacaccuugaguucuuaa

SEQ ID NO: 2121772 - RNA, 19 nt, Artificial Sequence
  Description of Artificial Sequence: Synthetic oligonucleotide
  Sense strand starting at position 987 of SEQ ID NO: 1882446
gaacucaagguguaaaugu

SEQ ID NO: 2121773 - RNA, 19 nt, Artificial Sequence
  Description of Artificial Sequence: Synthetic oligonucleotide
  Antisense strand to SEQ ID NO: 2121772
acauuuacaccuugaguuc

SEQ ID NO: 2121774 - RNA, 19 nt, Artificial Sequence
  Description of Artificial Sequence: Synthetic oligonucleotide
  Sense strand starting at position 1057 of SEQ ID NO: 1882446
gucagaggugugggaugua

SEQ ID NO: 2121775 - RNA, 19 nt, Artificial Sequence
  Description of Artificial Sequence: Synthetic oligonucleotide
  Antisense strand to SEQ ID NO: 2121774
uacaucccacaccucugac

SEQ ID NO: 2121776 - RNA, 19 nt, Artificial Sequence
  Description of Artificial Sequence: Synthetic oligonucleotide
  Sense strand starting at position 1295 of SEQ ID NO: 1882446
aaggaacuugccuguuagu

SEQ ID NO: 2121777 - RNA, 19 nt, Artificial Sequence
  Description of Artificial Sequence: Synthetic oligonucleotide
  Antisense strand to SEQ ID NO: 2121776
acuaacaggcaaguuccuu

SEQ ID NO: 2121778 - RNA, 19 nt, Artificial Sequence
  Description of Artificial Sequence: Synthetic oligonucleotide
  Sense strand starting at position 1449 of SEQ ID NO: 1882446
uuauuaugguuuccugaac

SEQ ID NO: 2121779 - RNA, 19 nt, Artificial Sequence
  Description of Artificial Sequence: Synthetic oligonucleotide
  Antisense strand to SEQ ID NO: 2121778
guucaggaaaccauaauaa

SEQ ID NO: 2121780 - RNA, 19 nt, Artificial Sequence
  Description of Artificial Sequence: Synthetic oligonucleotide
  Sense strand starting at position 1504 of SEQ ID NO: 1882446
cugagaaacgcuugcaaua

SEQ ID NO: 2121781 - RNA, 19 nt, Artificial Sequence
  Description of Artificial Sequence: Synthetic oligonucleotide
  Antisense strand to SEQ ID NO: 2121780
uauugcaagcguuucucag

SEQ ID NO: 2121782 - RNA, 19 nt, Artificial Sequence
  Description of Artificial Sequence: Synthetic oligonucleotide
  Sense strand starting at position 1520 of SEQ ID NO: 1882446
auacacauggcuugaaaga

SEQ ID NO: 2121783 - RNA, 19 nt, Artificial Sequence
  Description of Artificial Sequence: Synthetic oligonucleotide
  Antisense strand to SEQ ID NO: 2121782
ucuuucaagccauguguau

SEQ ID NO: 2121784 - RNA, 19 nt, Artificial Sequence
  Description of Artificial Sequence: Synthetic oligonucleotide
  Sense strand starting at position 1729 of SEQ ID NO: 1882446
gccugaaaccuugggcuga

SEQ ID NO: 2121785 - RNA, 19 nt, Artificial Sequence
  Description of Artificial Sequence: Synthetic oligonucleotide
  Antisense strand to SEQ ID NO: 2121784
ucagcccaagguuucaggc

SEQ ID NO: 2121786 - RNA, 19 nt, Artificial Sequence
  Description of Artificial Sequence: Synthetic oligonucleotide
  Sense strand starting at position 1831 of SEQ ID NO: 1882446
gagucauuugcuggcacaa

SEQ ID NO: 2121787 - RNA, 19 nt, Artificial Sequence
  Description of Artificial Sequence: Synthetic oligonucleotide
  Antisense strand to SEQ ID NO: 2121786
uugugccagcaaaugacuc

SEQ ID NO: 2121788 - RNA, 19 nt, Artificial Sequence
  Description of Artificial Sequence: Synthetic oligonucleotide
  Sense strand starting at position 1996 of SEQ ID NO: 1882446
gaagcagugucauccagaa

SEQ ID NO: 2121789 - RNA, 19 nt, Artificial Sequence
  Description of Artificial Sequence: Synthetic oligonucleotide
  Antisense strand to SEQ ID NO: 2121788
uucuggaugacacugcuuc

SEQ ID NO: 2121790 - RNA, 19 nt, Artificial Sequence
  Description of Artificial Sequence: Synthetic oligonucleotide
  Sense strand starting at position 2070 of SEQ ID NO: 1882446
aggaaacucuuagcgagaa

SEQ ID NO: 2121791 - RNA, 19 nt, Artificial Sequence
  Description of Artificial Sequence: Synthetic oligonucleotide
  Antisense strand to SEQ ID NO: 2121790
uucucgcuaagaguuuccu

SEQ ID NO: 2121792 - RNA, 19 nt, Artificial Sequence
  Description of Artificial Sequence: Synthetic oligonucleotide
  Sense strand starting at position 2074 of SEQ ID NO: 1882446
aacucuuagcgagaagauc

SEQ ID NO: 2121793 - RNA, 19 nt, Artificial Sequence
  Description of Artificial Sequence: Synthetic oligonucleotide
  Antisense strand to SEQ ID NO: 2121792
gaucuucucgcuaagaguu

SEQ ID NO: 2121794 - RNA, 19 nt, Artificial Sequence
  Description of Artificial Sequence: Synthetic oligonucleotide
  Sense strand starting at position 2082 of SEQ ID NO: 1882446
gcgagaagaucacugggau

SEQ ID NO: 2121795 - RNA, 19 nt, Artificial Sequence
  Description of Artificial Sequence: Synthetic oligonucleotide
  Antisense strand to SEQ ID NO: 2121794
aucccagugaucuucucgc

SEQ ID NO: 2121796 - RNA, 19 nt, Artificial Sequence
  Description of Artificial Sequence: Synthetic oligonucleotide
  Sense strand starting at position 2142 of SEQ ID NO: 1882446
ugaaauaaaucuguuguga

SEQ ID NO: 2121797 - RNA, 19 nt, Artificial Sequence
  Description of Artificial Sequence: Synthetic oligonucleotide
  Antisense strand to SEQ ID NO: 2121796
ucacaacagauuuauuuca

SEQ ID NO: 2121798 - RNA, 19 nt, Artificial Sequence
  Description of Artificial Sequence: Synthetic oligonucleotide
  Sense strand starting at position 2334 of SEQ ID NO: 1882446
auguuugggauccagugaa

SEQ ID NO: 2121799 - RNA, 19 nt, Artificial Sequence
  Description of Artificial Sequence: Synthetic oligonucleotide
  Antisense strand to SEQ ID NO: 2121798
uucacuggaucccaaacau

SEQ ID NO: 2121800 - RNA, 19 nt, Artificial Sequence
  Description of Artificial Sequence: Synthetic oligonucleotide
  Sense strand starting at position 2410 of SEQ ID NO: 1882446
agccacucaugcuuagaaa

SEQ ID NO: 2121801 - RNA, 19 nt, Artificial Sequence
  Description of Artificial Sequence: Synthetic oligonucleotide
  Antisense strand to SEQ ID NO: 2121800
uuucuaagcaugaguggcu

SEQ ID NO: 2121802 - RNA, 19 nt, Artificial Sequence
  Description of Artificial Sequence: Synthetic oligonucleotide
  Sense strand starting at position 2411 of SEQ ID NO: 1882446
gccacucaugcuuagaaac

SEQ ID NO: 2121803 - RNA, 19 nt, Artificial Sequence
  Description of Artificial Sequence: Synthetic oligonucleotide
  Antisense strand to SEQ ID NO: 2121802
guuucuaagcaugaguggc

SEQ ID NO: 2121804 - RNA, 19 nt, Artificial Sequence
  Description of Artificial Sequence: Synthetic oligonucleotide
  Sense strand starting at position 2699 of SEQ ID NO: 1882446
aucugauucucugccagaa

SEQ ID NO: 2121805 - RNA, 19 nt, Artificial Sequence
  Description of Artificial Sequence: Synthetic oligonucleotide
  Antisense strand to SEQ ID NO: 2121804
uucuggcagagaaucagau

SEQ ID NO: 2121806 - RNA, 19 nt, Artificial Sequence
  Description of Artificial Sequence: Synthetic oligonucleotide
  Sense strand starting at position 3237 of SEQ ID NO: 1882446
ucgggcugaccuugggaau

SEQ ID NO: 2121807 - RNA, 19 nt, Artificial Sequence
  Description of Artificial Sequence: Synthetic oligonucleotide
  Antisense strand to SEQ ID NO: 2121806
auucccaaggucagcccga

SEQ ID NO: 2121808 - RNA, 19 nt, Artificial Sequence
  Description of Artificial Sequence: Synthetic oligonucleotide
  Sense strand starting at position 3251 of SEQ ID NO: 1882446
ggaaucauccaauggcuca

SEQ ID NO: 2121809 - RNA, 19 nt, Artificial Sequence
  Description of Artificial Sequence: Synthetic oligonucleotide
  Antisense strand to SEQ ID NO: 2121808
ugagccauuggaugauucc

SEQ ID NO: 2121810 - RNA, 19 nt, Artificial Sequence
  Description of Artificial Sequence: Synthetic oligonucleotide
  Sense strand starting at position 3277 of SEQ ID NO: 1882446
ccauccaauggcuauguaa

SEQ ID NO: 2121811 - RNA, 19 nt, Artificial Sequence
  Description of Artificial Sequence: Synthetic oligonucleotide
  Antisense strand to SEQ ID NO: 2121810
uuacauagccauuggaugg

SEQ ID NO: 2121812 - RNA, 19 nt, Artificial Sequence
  Description of Artificial Sequence: Synthetic oligonucleotide
  Sense strand starting at position 3549 of SEQ ID NO: 1882446
cuaguuacaucugucagau

SEQ ID NO: 2121813 - RNA, 19 nt, Artificial Sequence
  Description of Artificial Sequence: Synthetic oligonucleotide
  Antisense strand to SEQ ID NO: 2121812
aucugacagauguaacuag

SEQ ID NO: 2121814 - RNA, 19 nt, Artificial Sequence
  Description of Artificial Sequence: Synthetic oligonucleotide
  Sense strand starting at position 3582 of SEQ ID NO: 1882446
guguuuggcauuugaguug

SEQ ID NO: 2121815 - RNA, 19 nt, Artificial Sequence
  Description of Artificial Sequence: Synthetic oligonucleotide
  Antisense strand to SEQ ID NO: 2121814
caacucaaaugccaaacac

SEQ ID NO: 2121816 - RNA, 19 nt, Artificial Sequence
  Description of Artificial Sequence: Synthetic oligonucleotide
  Sense strand starting at position 3585 of SEQ ID NO: 1882446
uuuggcauuugaguuguga

SEQ ID NO: 2121817 - RNA, 19 nt, Artificial Sequence
  Description of Artificial Sequence: Synthetic oligonucleotide
  Antisense strand to SEQ ID NO: 2121816
ucacaacucaaaugccaaa

SEQ ID NO: 2121818 - RNA, 19 nt, Artificial Sequence
  Description of Artificial Sequence: Synthetic oligonucleotide
  Sense strand starting at position 3610 of SEQ ID NO: 1882446
aggguuugcaccgaugaga

SEQ ID NO: 2121819 - RNA, 19 nt, Artificial Sequence
  Description of Artificial Sequence: Synthetic oligonucleotide
  Antisense strand to SEQ ID NO: 2121818
ucucaucggugcaaacccu

SEQ ID NO: 2121820 - RNA, 19 nt, Artificial Sequence
  Description of Artificial Sequence: Synthetic oligonucleotide
  Sense strand starting at position 3712 of SEQ ID NO: 1882446
acauuuauguaggaauaca

SEQ ID NO: 2121821 - RNA, 19 nt, Artificial Sequence
  Description of Artificial Sequence: Synthetic oligonucleotide
  Antisense strand to SEQ ID NO: 2121820
uguauuccuacauaaaugu

SEQ ID NO: 2121822 - RNA, 19 nt, Artificial Sequence
  Description of Artificial Sequence: Synthetic oligonucleotide
  Sense strand starting at position 3774 of SEQ ID NO: 1882446
aguguaaacuaucccauua

SEQ ID NO: 2121823 - RNA, 19 nt, Artificial Sequence
  Description of Artificial Sequence: Synthetic oligonucleotide
  Antisense strand to SEQ ID NO: 2121822
uaaugggauaguuuacacu

SEQ ID NO: 2121824 - RNA, 19 nt, Artificial Sequence
  Description of Artificial Sequence: Synthetic oligonucleotide
  Sense strand starting at position 3933 of SEQ ID NO: 1882446
gaguccagguaacuaaauu

SEQ ID NO: 2121825 - RNA, 19 nt, Artificial Sequence
  Description of Artificial Sequence: Synthetic oligonucleotide
  Antisense strand to SEQ ID NO: 2121824
aauuuaguuaccuggacuc

SEQ ID NO: 2121826 - RNA, 19 nt, Artificial Sequence
  Description of Artificial Sequence: Synthetic oligonucleotide
  Sense strand starting at position 113 of SEQ ID NO: 1882447
ugagaagaucuggguucca

SEQ ID NO: 2121827 - RNA, 19 nt, Artificial Sequence
  Description of Artificial Sequence: Synthetic oligonucleotide
  Antisense strand to SEQ ID NO: 2121826
uggaacccagaucuucuca

SEQ ID NO: 2121828 - RNA, 19 nt, Artificial Sequence
  Description of Artificial Sequence: Synthetic oligonucleotide
  Sense strand starting at position 515 of SEQ ID NO: 1882447
gagagucaagucuauguau

SEQ ID NO: 2121829 - RNA, 19 nt, Artificial Sequence
  Description of Artificial Sequence: Synthetic oligonucleotide
  Antisense strand to SEQ ID NO: 2121828
auacauagacuugacucuc

SEQ ID NO: 2121830 - RNA, 19 nt, Artificial Sequence
  Description of Artificial Sequence: Synthetic oligonucleotide
  Sense strand starting at position 582 of SEQ ID NO: 1882447
acaguuugucucuaacuuu

SEQ ID NO: 2121831 - RNA, 19 nt, Artificial Sequence
  Description of Artificial Sequence: Synthetic oligonucleotide
  Antisense strand to SEQ ID NO: 2121830
aaaguuagagacaaacugu

SEQ ID NO: 2121832 - RNA, 19 nt, Artificial Sequence
  Description of Artificial Sequence: Synthetic oligonucleotide
  Sense strand starting at position 641 of SEQ ID NO: 1882447
ugaguuuggauauggacau

SEQ ID NO: 2121833 - RNA, 19 nt, Artificial Sequence
  Description of Artificial Sequence: Synthetic oligonucleotide
  Antisense strand to SEQ ID NO: 2121832
auguccauauccaaacuca

SEQ ID NO: 2121834 - RNA, 19 nt, Artificial Sequence
  Description of Artificial Sequence: Synthetic oligonucleotide
  Sense strand starting at position 946 of SEQ ID NO: 1882447
aggacagccuaggucuaua

SEQ ID NO: 2121835 - RNA, 19 nt, Artificial Sequence
  Description of Artificial Sequence: Synthetic oligonucleotide
  Antisense strand to SEQ ID NO: 2121834
uauagaccuaggcuguccu

SEQ ID NO: 2121836 - RNA, 19 nt, Artificial Sequence
  Description of Artificial Sequence: Synthetic oligonucleotide
  Sense strand starting at position 954 of SEQ ID NO: 1882447
cuaggucuauacuuagaug

SEQ ID NO: 2121837 - RNA, 19 nt, Artificial Sequence
  Description of Artificial Sequence: Synthetic oligonucleotide
  Antisense strand to SEQ ID NO: 2121836
caucuaaguauagaccuag

SEQ ID NO: 2121838 - RNA, 19 nt, Artificial Sequence
  Description of Artificial Sequence: Synthetic oligonucleotide
  Sense strand starting at position 962 of SEQ ID NO: 1882447
auacuuagaugcgcaaaga

SEQ ID NO: 2121839 - RNA, 19 nt, Artificial Sequence
  Description of Artificial Sequence: Synthetic oligonucleotide
  Antisense strand to SEQ ID NO: 2121838
ucuuugcgcaucuaaguau

SEQ ID NO: 2121840 - RNA, 19 nt, Artificial Sequence
  Description of Artificial Sequence: Synthetic oligonucleotide
  Sense strand starting at position 963 of SEQ ID NO: 1882447
uacuuagaugcgcaaagaa

SEQ ID NO: 2121841 - RNA, 19 nt, Artificial Sequence
  Description of Artificial Sequence: Synthetic oligonucleotide
  Antisense strand to SEQ ID NO: 2121840
uucuuugcgcaucuaagua

SEQ ID NO: 2121842 - RNA, 19 nt, Artificial Sequence
  Description of Artificial Sequence: Synthetic oligonucleotide
  Sense strand starting at position 984 of SEQ ID NO: 1882447
ugaugucagauguauauug

SEQ ID NO: 2121843 - RNA, 19 nt, Artificial Sequence
  Description of Artificial Sequence: Synthetic oligonucleotide
  Antisense strand to SEQ ID NO: 2121842
caauauacaucugacauca

SEQ ID NO: 2121844 - RNA, 19 nt, Artificial Sequence
  Description of Artificial Sequence: Synthetic oligonucleotide
  Sense strand starting at position 1046 of SEQ ID NO: 1882447
ccauuaguguucuugagag

SEQ ID NO: 2121845 - RNA, 19 nt, Artificial Sequence
  Description of Artificial Sequence: Synthetic oligonucleotide
  Antisense strand to SEQ ID NO: 2121844
cucucaagaacacuaaugg

SEQ ID NO: 2121846 - RNA, 19 nt, Artificial Sequence
  Description of Artificial Sequence: Synthetic oligonucleotide
  Sense strand starting at position 1048 of SEQ ID NO: 1882447
auuaguguucuugagagag

SEQ ID NO: 2121847 - RNA, 19 nt, Artificial Sequence
  Description of Artificial Sequence: Synthetic oligonucleotide
  Antisense strand to SEQ ID NO: 2121846
cucucucaagaacacuaau

SEQ ID NO: 2121848 - RNA, 19 nt, Artificial Sequence
  Description of Artificial Sequence: Synthetic oligonucleotide
  Sense strand starting at position 1100 of SEQ ID NO: 1882447
uuuggaacugccuacauua

SEQ ID NO: 2121849 - RNA, 19 nt, Artificial Sequence
  Description of Artificial Sequence: Synthetic oligonucleotide
  Antisense strand to SEQ ID NO: 2121848
uaauguaggcaguuccaaa

SEQ ID NO: 2121850 - RNA, 19 nt, Artificial Sequence
  Description of Artificial Sequence: Synthetic oligonucleotide
  Sense strand starting at position 1220 of SEQ ID NO: 1882447
ucacuuugacagcaaguua

SEQ ID NO: 2121851 - RNA, 19 nt, Artificial Sequence
  Description of Artificial Sequence: Synthetic oligonucleotide
  Antisense strand to SEQ ID NO: 2121850
uaacuugcugucaaaguga

SEQ ID NO: 2121852 - RNA, 19 nt, Artificial Sequence
  Description of Artificial Sequence: Synthetic oligonucleotide
  Sense strand starting at position 1266 of SEQ ID NO: 1882447
caucuuuggcagggugaaa

SEQ ID NO: 2121853 - RNA, 19 nt, Artificial Sequence
  Description of Artificial Sequence: Synthetic oligonucleotide
  Antisense strand to SEQ ID NO: 2121852
uuucacccugccaaagaug

SEQ ID NO: 2121854 - RNA, 19 nt, Artificial Sequence
  Description of Artificial Sequence: Synthetic oligonucleotide
  Sense strand starting at position 1319 of SEQ ID NO: 1882447
accagaagauguucuacca

SEQ ID NO: 2121855 - RNA, 19 nt, Artificial Sequence
  Description of Artificial Sequence: Synthetic oligonucleotide
  Antisense strand to SEQ ID NO: 2121854
ugguagaacaucuucuggu

SEQ ID NO: 2121856 - RNA, 19 nt, Artificial Sequence
  Description of Artificial Sequence: Synthetic oligonucleotide
  Sense strand starting at position 1410 of SEQ ID NO: 1882447
cccaucagucuuuaggauu

SEQ ID NO: 2121857 - RNA, 19 nt, Artificial Sequence
  Description of Artificial Sequence: Synthetic oligonucleotide
  Antisense strand to SEQ ID NO: 2121856
aauccuaaagacugauggg

SEQ ID NO: 2121858 - RNA, 19 nt, Artificial Sequence
  Description of Artificial Sequence: Synthetic oligonucleotide
  Sense strand starting at position 1458 of SEQ ID NO: 1882447
guuaaagaccucuaggcuu

SEQ ID NO: 2121859 - RNA, 19 nt, Artificial Sequence
  Description of Artificial Sequence: Synthetic oligonucleotide
  Antisense strand to SEQ ID NO: 2121858
aagccuagaggucuuuaac

SEQ ID NO: 2121860 - RNA, 19 nt, Artificial Sequence
  Description of Artificial Sequence: Synthetic oligonucleotide
  Sense strand starting at position 1530 of SEQ ID NO: 1882447
ccagauaguguauauucuu

SEQ ID NO: 2121861 - RNA, 19 nt, Artificial Sequence
  Description of Artificial Sequence: Synthetic oligonucleotide
  Antisense strand to SEQ ID NO: 2121860
aagaauauacacuaucugg

SEQ ID NO: 2121862 - RNA, 19 nt, Artificial Sequence
  Description of Artificial Sequence: Synthetic oligonucleotide
  Sense strand starting at position 1839 of SEQ ID NO: 1882447
acaaucagaugcucuggaa

SEQ ID NO: 2121863 - RNA, 19 nt, Artificial Sequence
  Description of Artificial Sequence: Synthetic oligonucleotide
  Antisense strand to SEQ ID NO: 2121862
uuccagagcaucugauugu

SEQ ID NO: 2121864 - RNA, 19 nt, Artificial Sequence
  Description of Artificial Sequence: Synthetic oligonucleotide
  Sense strand starting at position 2063 of SEQ ID NO: 1882447
guauaaucucuuuagguuu

SEQ ID NO: 2121865 - RNA, 19 nt, Artificial Sequence
  Description of Artificial Sequence: Synthetic oligonucleotide
  Antisense strand to SEQ ID NO: 2121864
aaaccuaaagagauuauac

SEQ ID NO: 2121866 - RNA, 19 nt, Artificial Sequence
  Description of Artificial Sequence: Synthetic oligonucleotide
  Sense strand starting at position 2087 of SEQ ID NO: 1882447
uuuguauuucugugcauau

SEQ ID NO: 2121867 - RNA, 19 nt, Artificial Sequence
  Description of Artificial Sequence: Synthetic oligonucleotide
  Antisense strand to SEQ ID NO: 2121866
auaugcacagaaauacaaa

SEQ ID NO: 2121868 - RNA, 19 nt, Artificial Sequence
  Description of Artificial Sequence: Synthetic oligonucleotide
  Sense strand starting at position 2088 of SEQ ID NO: 1882447
uuguauuucugugcauaug

SEQ ID NO: 2121869 - RNA, 19 nt, Artificial Sequence
  Description of Artificial Sequence: Synthetic oligonucleotide
  Antisense strand to SEQ ID NO: 2121868
cauaugcacagaaauacaa

SEQ ID NO: 2121870 - RNA, 19 nt, Artificial Sequence
  Description of Artificial Sequence: Synthetic oligonucleotide
  Sense strand starting at position 2152 of SEQ ID NO: 1882447
gcacuaagggcuuaucacu

SEQ ID NO: 2121871 - RNA, 19 nt, Artificial Sequence
  Description of Artificial Sequence: Synthetic oligonucleotide
  Antisense strand to SEQ ID NO: 2121870
agugauaagcccuuagugc

SEQ ID NO: 2121872 - RNA, 19 nt, Artificial Sequence
  Description of Artificial Sequence: Synthetic oligonucleotide
  Sense strand starting at position 2538 of SEQ ID NO: 1882447
aagucaagugcugauacau

SEQ ID NO: 2121873 - RNA, 19 nt, Artificial Sequence
  Description of Artificial Sequence: Synthetic oligonucleotide
  Antisense strand to SEQ ID NO: 2121872
auguaucagcacuugacuu

SEQ ID NO: 2121874 - RNA, 19 nt, Artificial Sequence
  Description of Artificial Sequence: Synthetic oligonucleotide
  Sense strand starting at position 2548 of SEQ ID NO: 1882447
cugauacaugugcacagaa

SEQ ID NO: 2121875 - RNA, 19 nt, Artificial Sequence
  Description of Artificial Sequence: Synthetic oligonucleotide
  Antisense strand to SEQ ID NO: 2121874
uucugugcacauguaucag

SEQ ID NO: 2121876 - RNA, 19 nt, Artificial Sequence
  Description of Artificial Sequence: Synthetic oligonucleotide
  Sense strand starting at position 2550 of SEQ ID NO: 1882447
gauacaugugcacagaauc

SEQ ID NO: 2121877 - RNA, 19 nt, Artificial Sequence
  Description of Artificial Sequence: Synthetic oligonucleotide
  Antisense strand to SEQ ID NO: 2121876
gauucugugcacauguauc

SEQ ID NO: 2121878 - RNA, 19 nt, Artificial Sequence
  Description of Artificial Sequence: Synthetic oligonucleotide
  Sense strand starting at position 2639 of SEQ ID NO: 1882447
accauagaguugccaucaa

SEQ ID NO: 2121879 - RNA, 19 nt, Artificial Sequence
  Description of Artificial Sequence: Synthetic oligonucleotide
  Antisense strand to SEQ ID NO: 2121878
uugauggcaacucuauggu

SEQ ID NO: 2121880 - RNA, 19 nt, Artificial Sequence
  Description of Artificial Sequence: Synthetic oligonucleotide
  Sense strand starting at position 2643 of SEQ ID NO: 1882447
uagaguugccaucaaugaa

SEQ ID NO: 2121881 - RNA, 19 nt, Artificial Sequence
  Description of Artificial Sequence: Synthetic oligonucleotide
  Antisense strand to SEQ ID NO: 2121880
uucauugauggcaacucua

SEQ ID NO: 2121882 - RNA, 19 nt, Artificial Sequence
  Description of Artificial Sequence: Synthetic oligonucleotide
  Sense strand starting at position 2646 of SEQ ID NO: 1882447
aguugccaucaaugaacaa

SEQ ID NO: 2121883 - RNA, 19 nt, Artificial Sequence
  Description of Artificial Sequence: Synthetic oligonucleotide
  Antisense strand to SEQ ID NO: 2121882
uuguucauugauggcaacu

SEQ ID NO: 2121884 - RNA, 19 nt, Artificial Sequence
  Description of Artificial Sequence: Synthetic oligonucleotide
  Sense strand starting at position 2667 of SEQ ID NO: 1882447
auugguaaacuucgaaaua

SEQ ID NO: 2121885 - RNA, 19 nt, Artificial Sequence
  Description of Artificial Sequence: Synthetic oligonucleotide
  Antisense strand to SEQ ID NO: 2121884
uauuucgaaguuuaccaau

SEQ ID NO: 2121886 - RNA, 19 nt, Artificial Sequence
  Description of Artificial Sequence: Synthetic oligonucleotide
  Sense strand starting at position 2693 of SEQ ID NO: 1882447
ccaauuaauuuaugagaga

SEQ ID NO: 2121887 - RNA, 19 nt, Artificial Sequence
  Description of Artificial Sequence: Synthetic oligonucleotide
  Antisense strand to SEQ ID NO: 2121886
ucucucauaaauuaauugg

SEQ ID NO: 2121888 - RNA, 19 nt, Artificial Sequence
  Description of Artificial Sequence: Synthetic oligonucleotide
  Sense strand starting at position 3267 of SEQ ID NO: 1882447
uuaggaacauuugagugaa

SEQ ID NO: 2121889 - RNA, 19 nt, Artificial Sequence
  Description of Artificial Sequence: Synthetic oligonucleotide
  Antisense strand to SEQ ID NO: 2121888
uucacucaaauguuccuaa

SEQ ID NO: 2121890 - RNA, 19 nt, Artificial Sequence
  Description of Artificial Sequence: Synthetic oligonucleotide
  Sense strand starting at position 3307 of SEQ ID NO: 1882447
acaugauauguuugacuac

SEQ ID NO: 2121891 - RNA, 19 nt, Artificial Sequence
  Description of Artificial Sequence: Synthetic oligonucleotide
  Antisense strand to SEQ ID NO: 2121890
guagucaaacauaucaugu

SEQ ID NO: 2121892 - RNA, 19 nt, Artificial Sequence
  Description of Artificial Sequence: Synthetic oligonucleotide
  Sense strand starting at position 3310 of SEQ ID NO: 1882447
ugauauguuugacuacuua

SEQ ID NO: 2121893 - RNA, 19 nt, Artificial Sequence
  Description of Artificial Sequence: Synthetic oligonucleotide
  Antisense strand to SEQ ID NO: 2121892
uaaguagucaaacauauca

SEQ ID NO: 2121894 - RNA, 19 nt, Artificial Sequence
  Description of Artificial Sequence: Synthetic oligonucleotide
  Sense strand starting at position 3446 of SEQ ID NO: 1882447
gaaggaauaugggaaagaa

SEQ ID NO: 2121895 - RNA, 19 nt, Artificial Sequence
  Description of Artificial Sequence: Synthetic oligonucleotide
  Antisense strand to SEQ ID NO: 2121894
uucuuucccauauuccuuc

SEQ ID NO: 2121896 - RNA, 19 nt, Artificial Sequence
  Description of Artificial Sequence: Synthetic oligonucleotide
  Sense strand starting at position 3519 of SEQ ID NO: 1882447
augauaugaugcuagauuu

SEQ ID NO: 2121897 - RNA, 19 nt, Artificial Sequence
  Description of Artificial Sequence: Synthetic oligonucleotide
  Antisense strand to SEQ ID NO: 2121896
aaaucuagcaucauaucau

SEQ ID NO: 2121898 - RNA, 19 nt, Artificial Sequence
  Description of Artificial Sequence: Synthetic oligonucleotide
  Sense strand starting at position 3606 of SEQ ID NO: 1882447
ugcuuauuucugugcauac

SEQ ID NO: 2121899 - RNA, 19 nt, Artificial Sequence
  Description of Artificial Sequence: Synthetic oligonucleotide
  Antisense strand to SEQ ID NO: 2121898
guaugcacagaaauaagca

SEQ ID NO: 2121900 - RNA, 19 nt, Artificial Sequence
  Description of Artificial Sequence: Synthetic oligonucleotide
  Sense strand starting at position 3607 of SEQ ID NO: 1882447
gcuuauuucugugcauaca

SEQ ID NO: 2121901 - RNA, 19 nt, Artificial Sequence
  Description of Artificial Sequence: Synthetic oligonucleotide
  Antisense strand to SEQ ID NO: 2121900
uguaugcacagaaauaagc

SEQ ID NO: 2121902 - RNA, 19 nt, Artificial Sequence
  Description of Artificial Sequence: Synthetic oligonucleotide
  Sense strand starting at position 3666 of SEQ ID NO: 1882447
gucacacuuccauagcauu

SEQ ID NO: 2121903 - RNA, 19 nt, Artificial Sequence
  Description of Artificial Sequence: Synthetic oligonucleotide
  Antisense strand to SEQ ID NO: 2121902
aaugcuauggaagugugac

SEQ ID NO: 2121904 - RNA, 19 nt, Artificial Sequence
  Description of Artificial Sequence: Synthetic oligonucleotide
  Sense strand starting at position 3835 of SEQ ID NO: 1882447
agcgguagucaacauacua

SEQ ID NO: 2121905 - RNA, 19 nt, Artificial Sequence
  Description of Artificial Sequence: Synthetic oligonucleotide
  Antisense strand to SEQ ID NO: 2121904
uaguauguugacuaccgcu

SEQ ID NO: 2121906 - RNA, 19 nt, Artificial Sequence
  Description of Artificial Sequence: Synthetic oligonucleotide
  Sense strand starting at position 213 of SEQ ID NO: 1882448
gaaggcaucagugaguaga

SEQ ID NO: 2121907 - RNA, 19 nt, Artificial Sequence
  Description of Artificial Sequence: Synthetic oligonucleotide
  Antisense strand to SEQ ID NO: 2121906
ucuacucacugaugccuuc

SEQ ID NO: 2121908 - RNA, 19 nt, Artificial Sequence
  Description of Artificial Sequence: Synthetic oligonucleotide
  Sense strand starting at position 215 of SEQ ID NO: 1882448
aggcaucagugaguagaaa

SEQ ID NO: 2121909 - RNA, 19 nt, Artificial Sequence
  Description of Artificial Sequence: Synthetic oligonucleotide
  Antisense strand to SEQ ID NO: 2121908
uuucuacucacugaugccu

SEQ ID NO: 2121910 - RNA, 19 nt, Artificial Sequence
  Description of Artificial Sequence: Synthetic oligonucleotide
  Sense strand starting at position 305 of SEQ ID NO: 1882448
ugagaagacccauguuggu

SEQ ID NO: 2121911 - RNA, 19 nt, Artificial Sequence
  Description of Artificial Sequence: Synthetic oligonucleotide
  Antisense strand to SEQ ID NO: 2121910
accaacaugggucuucuca

SEQ ID NO: 2121912 - RNA, 19 nt, Artificial Sequence
  Description of Artificial Sequence: Synthetic oligonucleotide
  Sense strand starting at position 311 of SEQ ID NO: 1882448
gacccauguuggucucuau

SEQ ID NO: 2121913 - RNA, 19 nt, Artificial Sequence
  Description of Artificial Sequence: Synthetic oligonucleotide
  Antisense strand to SEQ ID NO: 2121912
auagagaccaacauggguc

SEQ ID NO: 2121914 - RNA, 19 nt, Artificial Sequence
  Description of Artificial Sequence: Synthetic oligonucleotide
  Sense strand starting at position 315 of SEQ ID NO: 1882448
cauguuggucucuauagga

SEQ ID NO: 2121915 - RNA, 19 nt, Artificial Sequence
  Description of Artificial Sequence: Synthetic oligonucleotide
  Antisense strand to SEQ ID NO: 2121914
uccuauagagaccaacaug

SEQ ID NO: 2121916 - RNA, 19 nt, Artificial Sequence
  Description of Artificial Sequence: Synthetic oligonucleotide
  Sense strand starting at position 358 of SEQ ID NO: 1882448
gacugaugacuuggagcaa

SEQ ID NO: 2121917 - RNA, 19 nt, Artificial Sequence
  Description of Artificial Sequence: Synthetic oligonucleotide
  Antisense strand to SEQ ID NO: 2121916
uugcuccaagucaucaguc

SEQ ID NO: 2121918 - RNA, 19 nt, Artificial Sequence
  Description of Artificial Sequence: Synthetic oligonucleotide
  Sense strand starting at position 359 of SEQ ID NO: 1882448
acugaugacuuggagcaaa

SEQ ID NO: 2121919 - RNA, 19 nt, Artificial Sequence
  Description of Artificial Sequence: Synthetic oligonucleotide
  Antisense strand to SEQ ID NO: 2121918
uuugcuccaagucaucagu

SEQ ID NO: 2121920 - RNA, 19 nt, Artificial Sequence
  Description of Artificial Sequence: Synthetic oligonucleotide
  Sense strand starting at position 390 of SEQ ID NO: 1882448
agacuuuaguguccauuaa

SEQ ID NO: 2121921 - RNA, 19 nt, Artificial Sequence
  Description of Artificial Sequence: Synthetic oligonucleotide
  Antisense strand to SEQ ID NO: 2121920
uuaauggacacuaaagucu

SEQ ID NO: 2121922 - RNA, 19 nt, Artificial Sequence
  Description of Artificial Sequence: Synthetic oligonucleotide
  Sense strand starting at position 394 of SEQ ID NO: 1882448
uuuaguguccauuaacuaa

SEQ ID NO: 2121923 - RNA, 19 nt, Artificial Sequence
  Description of Artificial Sequence: Synthetic oligonucleotide
  Antisense strand to SEQ ID NO: 2121922
uuaguuaauggacacuaaa

SEQ ID NO: 2121924 - RNA, 19 nt, Artificial Sequence
  Description of Artificial Sequence: Synthetic oligonucleotide
  Sense strand starting at position 433 of SEQ ID NO: 1882448
gaggaucugagguggcuaa

SEQ ID NO: 2121925 - RNA, 19 nt, Artificial Sequence
  Description of Artificial Sequence: Synthetic oligonucleotide
  Antisense strand to SEQ ID NO: 2121924
uuagccaccucagauccuc

SEQ ID NO: 2121926 - RNA, 19 nt, Artificial Sequence
  Description of Artificial Sequence: Synthetic oligonucleotide
  Sense strand starting at position 446 of SEQ ID NO: 1882448
ggcuaaguggccuaggagu

SEQ ID NO: 2121927 - RNA, 19 nt, Artificial Sequence
  Description of Artificial Sequence: Synthetic oligonucleotide
  Antisense strand to SEQ ID NO: 2121926
acuccuaggccacuuagcc

SEQ ID NO: 2121928 - RNA, 19 nt, Artificial Sequence
  Description of Artificial Sequence: Synthetic oligonucleotide
  Sense strand starting at position 452 of SEQ ID NO: 1882448
guggccuaggagugaagau

SEQ ID NO: 2121929 - RNA, 19 nt, Artificial Sequence
  Description of Artificial Sequence: Synthetic oligonucleotide
  Antisense strand to SEQ ID NO: 2121928
aucuucacuccuaggccac

SEQ ID NO: 2121930 - RNA, 19 nt, Artificial Sequence
  Description of Artificial Sequence: Synthetic oligonucleotide
  Sense strand starting at position 461 of SEQ ID NO: 1882448
gagugaagauggcacaaau

SEQ ID NO: 2121931 - RNA, 19 nt, Artificial Sequence
  Description of Artificial Sequence: Synthetic oligonucleotide
  Antisense strand to SEQ ID NO: 2121930
auuugugccaucuucacuc

SEQ ID NO: 2121932 - RNA, 19 nt, Artificial Sequence
  Description of Artificial Sequence: Synthetic oligonucleotide
  Sense strand starting at position 474 of SEQ ID NO: 1882448
acaaaucugugguugggaa

SEQ ID NO: 2121933 - RNA, 19 nt, Artificial Sequence
  Description of Artificial Sequence: Synthetic oligonucleotide
  Antisense strand to SEQ ID NO: 2121932
uucccaaccacagauuugu

SEQ ID NO: 2121934 - RNA, 19 nt, Artificial Sequence
  Description of Artificial Sequence: Synthetic oligonucleotide
  Sense strand starting at position 475 of SEQ ID NO: 1882448
caaaucugugguugggaaa

SEQ ID NO: 2121935 - RNA, 19 nt, Artificial Sequence
  Description of Artificial Sequence: Synthetic oligonucleotide
  Antisense strand to SEQ ID NO: 2121934
uuucccaaccacagauuug

SEQ ID NO: 2121936 - RNA, 19 nt, Artificial Sequence
  Description of Artificial Sequence: Synthetic oligonucleotide
  Sense strand starting at position 522 of SEQ ID NO: 1882448
uggugcuaccuguauuaga

SEQ ID NO: 2121937 - RNA, 19 nt, Artificial Sequence
  Description of Artificial Sequence: Synthetic oligonucleotide
  Antisense strand to SEQ ID NO: 2121936
ucuaauacagguagcacca

SEQ ID NO: 2121938 - RNA, 19 nt, Artificial Sequence
  Description of Artificial Sequence: Synthetic oligonucleotide
  Sense strand starting at position 636 of SEQ ID NO: 1882448
cucccaaagugagucuuau

SEQ ID NO: 2121939 - RNA, 19 nt, Artificial Sequence
  Description of Artificial Sequence: Synthetic oligonucleotide
  Antisense strand to SEQ ID NO: 2121938
auaagacucacuuugggag

SEQ ID NO: 2121940 - RNA, 19 nt, Artificial Sequence
  Description of Artificial Sequence: Synthetic oligonucleotide
  Sense strand starting at position 645 of SEQ ID NO: 1882448
ugagucuuaugugcacuga

SEQ ID NO: 2121941 - RNA, 19 nt, Artificial Sequence
  Description of Artificial Sequence: Synthetic oligonucleotide
  Antisense strand to SEQ ID NO: 2121940
ucagugcacauaagacuca

SEQ ID NO: 2121942 - RNA, 19 nt, Artificial Sequence
  Description of Artificial Sequence: Synthetic oligonucleotide
  Sense strand starting at position 649 of SEQ ID NO: 1882448
ucuuaugugcacugacuua

SEQ ID NO: 2121943 - RNA, 19 nt, Artificial Sequence
  Description of Artificial Sequence: Synthetic oligonucleotide
  Antisense strand to SEQ ID NO: 2121942
uaagucagugcacauaaga

SEQ ID NO: 2121944 - RNA, 19 nt, Artificial Sequence
  Description of Artificial Sequence: Synthetic oligonucleotide
  Sense strand starting at position 659 of SEQ ID NO: 1882448
acugacuuaugacacugaa

SEQ ID NO: 2121945 - RNA, 19 nt, Artificial Sequence
  Description of Artificial Sequence: Synthetic oligonucleotide
  Antisense strand to SEQ ID NO: 2121944
uucagugucauaagucagu

SEQ ID NO: 2121946 - RNA, 19 nt, Artificial Sequence
  Description of Artificial Sequence: Synthetic oligonucleotide
  Sense strand starting at position 785 of SEQ ID NO: 1882448
gcgaaagugcuuuggaaag

SEQ ID NO: 2121947 - RNA, 19 nt, Artificial Sequence
  Description of Artificial Sequence: Synthetic oligonucleotide
  Antisense strand to SEQ ID NO: 2121946
cuuuccaaagcacuuucgc

SEQ ID NO: 2121948 - RNA, 19 nt, Artificial Sequence
  Description of Artificial Sequence: Synthetic oligonucleotide
  Sense strand starting at position 867 of SEQ ID NO: 1882448
gugugaugcggucugugga

SEQ ID NO: 2121949 - RNA, 19 nt, Artificial Sequence
  Description of Artificial Sequence: Synthetic oligonucleotide
  Antisense strand to SEQ ID NO: 2121948
uccacagaccgcaucacac

SEQ ID NO: 2121950 - RNA, 19 nt, Artificial Sequence
  Description of Artificial Sequence: Synthetic oligonucleotide
  Sense strand starting at position 870 of SEQ ID NO: 1882448
ugaugcggucuguggauau

SEQ ID NO: 2121951 - RNA, 19 nt, Artificial Sequence
  Description of Artificial Sequence: Synthetic oligonucleotide
  Antisense strand to SEQ ID NO: 2121950
auauccacagaccgcauca

SEQ ID NO: 2121952 - RNA, 19 nt, Artificial Sequence
  Description of Artificial Sequence: Synthetic oligonucleotide
  Sense strand starting at position 1382 of SEQ ID NO: 1882448
ggagacgucacccaccauu

SEQ ID NO: 2121953 - RNA, 19 nt, Artificial Sequence
  Description of Artificial Sequence: Synthetic oligonucleotide
  Antisense strand to SEQ ID NO: 2121952
aauggugggugacgucucc

SEQ ID NO: 2121954 - RNA, 19 nt, Artificial Sequence
  Description of Artificial Sequence: Synthetic oligonucleotide
  Sense strand starting at position 1486 of SEQ ID NO: 1882448
ggaguucugcgccacuuag

SEQ ID NO: 2121955 - RNA, 19 nt, Artificial Sequence
  Description of Artificial Sequence: Synthetic oligonucleotide
  Antisense strand to SEQ ID NO: 2121954
cuaaguggcgcagaacucc

SEQ ID NO: 2121956 - RNA, 19 nt, Artificial Sequence
  Description of Artificial Sequence: Synthetic oligonucleotide
  Sense strand starting at position 1778 of SEQ ID NO: 1882448
ccuucuaguccugagaaca

SEQ ID NO: 2121957 - RNA, 19 nt, Artificial Sequence
  Description of Artificial Sequence: Synthetic oligonucleotide
  Antisense strand to SEQ ID NO: 2121956
uguucucaggacuagaagg

SEQ ID NO: 2121958 - RNA, 19 nt, Artificial Sequence
  Description of Artificial Sequence: Synthetic oligonucleotide
  Sense strand starting at position 2149 of SEQ ID NO: 1882448
gcagaagccucuucgagga

SEQ ID NO: 2121959 - RNA, 19 nt, Artificial Sequence
  Description of Artificial Sequence: Synthetic oligonucleotide
  Antisense strand to SEQ ID NO: 2121958
uccucgaagaggcuucugc

SEQ ID NO: 2121960 - RNA, 19 nt, Artificial Sequence
  Description of Artificial Sequence: Synthetic oligonucleotide
  Sense strand starting at position 2159 of SEQ ID NO: 1882448
cuucgaggacucuagagua

SEQ ID NO: 2121961 - RNA, 19 nt, Artificial Sequence
  Description of Artificial Sequence: Synthetic oligonucleotide
  Antisense strand to SEQ ID NO: 2121960
uacucuagaguccucgaag

SEQ ID NO: 2121962 - RNA, 19 nt, Artificial Sequence
  Description of Artificial Sequence: Synthetic oligonucleotide
  Sense strand starting at position 2350 of SEQ ID NO: 1882448
uggccugucccugggacaa

SEQ ID NO: 2121963 - RNA, 19 nt, Artificial Sequence
  Description of Artificial Sequence: Synthetic oligonucleotide
  Antisense strand to SEQ ID NO: 2121962
uugucccagggacaggcca

SEQ ID NO: 2121964 - RNA, 19 nt, Artificial Sequence
  Description of Artificial Sequence: Synthetic oligonucleotide
  Sense strand starting at position 3208 of SEQ ID NO: 1882448
gcagaaacauuuggacaga

SEQ ID NO: 2121965 - RNA, 19 nt, Artificial Sequence
  Description of Artificial Sequence: Synthetic oligonucleotide
  Antisense strand to SEQ ID NO: 2121964
ucuguccaaauguuucugc

SEQ ID NO: 2121966 - RNA, 19 nt, Artificial Sequence
  Description of Artificial Sequence: Synthetic oligonucleotide
  Sense strand starting at position 3331 of SEQ ID NO: 1882448
ucauauagucuggguucua

SEQ ID NO: 2121967 - RNA, 19 nt, Artificial Sequence
  Description of Artificial Sequence: Synthetic oligonucleotide
  Antisense strand to SEQ ID NO: 2121966
uagaacccagacuauauga

SEQ ID NO: 2121968 - RNA, 19 nt, Artificial Sequence
  Description of Artificial Sequence: Synthetic oligonucleotide
  Sense strand starting at position 3378 of SEQ ID NO: 1882448
gccucauaccagugacuuc

SEQ ID NO: 2121969 - RNA, 19 nt, Artificial Sequence
  Description of Artificial Sequence: Synthetic oligonucleotide
  Antisense strand to SEQ ID NO: 2121968
gaagucacugguaugaggc

SEQ ID NO: 2121970 - RNA, 19 nt, Artificial Sequence
  Description of Artificial Sequence: Synthetic oligonucleotide
  Sense strand starting at position 3453 of SEQ ID NO: 1882448
cugccacaucuaugagaau

SEQ ID NO: 2121971 - RNA, 19 nt, Artificial Sequence
  Description of Artificial Sequence: Synthetic oligonucleotide
  Antisense strand to SEQ ID NO: 2121970
auucucauagauguggcag

SEQ ID NO: 2121972 - RNA, 19 nt, Artificial Sequence
  Description of Artificial Sequence: Synthetic oligonucleotide
  Sense strand starting at position 3710 of SEQ ID NO: 1882448
gaaauacucauguggguga

SEQ ID NO: 2121973 - RNA, 19 nt, Artificial Sequence
  Description of Artificial Sequence: Synthetic oligonucleotide
  Antisense strand to SEQ ID NO: 2121972
ucacccacaugaguauuuc

SEQ ID NO: 2121974 - RNA, 19 nt, Artificial Sequence
  Description of Artificial Sequence: Synthetic oligonucleotide
  Sense strand starting at position 3712 of SEQ ID NO: 1882448
aauacucaugugggugaaa

SEQ ID NO: 2121975 - RNA, 19 nt, Artificial Sequence
  Description of Artificial Sequence: Synthetic oligonucleotide
  Antisense strand to SEQ ID NO: 2121974
uuucacccacaugaguauu

SEQ ID NO: 2121976 - RNA, 19 nt, Artificial Sequence
  Description of Artificial Sequence: Synthetic oligonucleotide
  Sense strand starting at position 3809 of SEQ ID NO: 1882448
uaauguuugccaggaacug

SEQ ID NO: 2121977 - RNA, 19 nt, Artificial Sequence
  Description of Artificial Sequence: Synthetic oligonucleotide
  Antisense strand to SEQ ID NO: 2121976
caguuccuggcaaacauua

SEQ ID NO: 2121978 - RNA, 19 nt, Artificial Sequence
  Description of Artificial Sequence: Synthetic oligonucleotide
  Sense strand starting at position 3810 of SEQ ID NO: 1882448
aauguuugccaggaacugu

SEQ ID NO: 2121979 - RNA, 19 nt, Artificial Sequence
  Description of Artificial Sequence: Synthetic oligonucleotide
  Antisense strand to SEQ ID NO: 2121978
acaguuccuggcaaacauu

SEQ ID NO: 2121980 - RNA, 19 nt, Artificial Sequence
  Description of Artificial Sequence: Synthetic oligonucleotide
  Sense strand starting at position 3820 of SEQ ID NO: 1882448
aggaacugugcccaguauu

SEQ ID NO: 2121981 - RNA, 19 nt, Artificial Sequence
  Description of Artificial Sequence: Synthetic oligonucleotide
  Antisense strand to SEQ ID NO: 2121980
aauacugggcacaguuccu

SEQ ID NO: 2121982 - RNA, 19 nt, Artificial Sequence
  Description of Artificial Sequence: Synthetic oligonucleotide
  Sense strand starting at position 3877 of SEQ ID NO: 1882448
gagauugagucucugaaug

SEQ ID NO: 2121983 - RNA, 19 nt, Artificial Sequence
  Description of Artificial Sequence: Synthetic oligonucleotide
  Antisense strand to SEQ ID NO: 2121982
cauucagagacucaaucuc

SEQ ID NO: 2121984 - RNA, 19 nt, Artificial Sequence
  Description of Artificial Sequence: Synthetic oligonucleotide
  Sense strand starting at position 3882 of SEQ ID NO: 1882448
ugagucucugaaugauucu

SEQ ID NO: 2121985 - RNA, 19 nt, Artificial Sequence
  Description of Artificial Sequence: Synthetic oligonucleotide
  Antisense strand to SEQ ID NO: 2121984
agaaucauucagagacuca

SEQ ID NO: 2121986 - RNA, 19 nt, Artificial Sequence
  Description of Artificial Sequence: Synthetic oligonucleotide
  Sense strand starting at position 249 of SEQ ID NO: 1882449
acauuauuacuguggaaau

SEQ ID NO: 2121987 - RNA, 19 nt, Artificial Sequence
  Description of Artificial Sequence: Synthetic oligonucleotide
  Antisense strand to SEQ ID NO: 2121986
auuuccacaguaauaaugu

SEQ ID NO: 2121988 - RNA, 19 nt, Artificial Sequence
  Description of Artificial Sequence: Synthetic oligonucleotide
  Sense strand starting at position 251 of SEQ ID NO: 1882449
auuauuacuguggaaaugu

SEQ ID NO: 2121989 - RNA, 19 nt, Artificial Sequence
  Description of Artificial Sequence: Synthetic oligonucleotide
  Antisense strand to SEQ ID NO: 2121988
acauuuccacaguaauaau

SEQ ID NO: 2121990 - RNA, 19 nt, Artificial Sequence
  Description of Artificial Sequence: Synthetic oligonucleotide
  Sense strand starting at position 330 of SEQ ID NO: 1882449
gagguuuguauuuguugau

SEQ ID NO: 2121991 - RNA, 19 nt, Artificial Sequence
  Description of Artificial Sequence: Synthetic oligonucleotide
  Antisense strand to SEQ ID NO: 2121990
aucaacaaauacaaaccuc

SEQ ID NO: 2121992 - RNA, 19 nt, Artificial Sequence
  Description of Artificial Sequence: Synthetic oligonucleotide
  Sense strand starting at position 331 of SEQ ID NO: 1882449
agguuuguauuuguugauu

SEQ ID NO: 2121993 - RNA, 19 nt, Artificial Sequence
  Description of Artificial Sequence: Synthetic oligonucleotide
  Antisense strand to SEQ ID NO: 2121992
aaucaacaaauacaaaccu

SEQ ID NO: 2121994 - RNA, 19 nt, Artificial Sequence
  Description of Artificial Sequence: Synthetic oligonucleotide
  Sense strand starting at position 603 of SEQ ID NO: 1882449
agccgaguuauuugcucca

SEQ ID NO: 2121995 - RNA, 19 nt, Artificial Sequence
  Description of Artificial Sequence: Synthetic oligonucleotide
  Antisense strand to SEQ ID NO: 2121994
uggagcaaauaacucggcu

SEQ ID NO: 2121996 - RNA, 19 nt, Artificial Sequence
  Description of Artificial Sequence: Synthetic oligonucleotide
  Sense strand starting at position 762 of SEQ ID NO: 1882449
uagcuuuauguaugaggga

SEQ ID NO: 2121997 - RNA, 19 nt, Artificial Sequence
  Description of Artificial Sequence: Synthetic oligonucleotide
  Antisense strand to SEQ ID NO: 2121996
ucccucauacauaaagcua

SEQ ID NO: 2121998 - RNA, 19 nt, Artificial Sequence
  Description of Artificial Sequence: Synthetic oligonucleotide
  Sense strand starting at position 809 of SEQ ID NO: 1882449
cucuccaucccagguauua

SEQ ID NO: 2121999 - RNA, 19 nt, Artificial Sequence
  Description of Artificial Sequence: Synthetic oligonucleotide
  Antisense strand to SEQ ID NO: 2121998
uaauaccugggauggagag

SEQ ID NO: 2122000 - RNA, 19 nt, Artificial Sequence
  Description of Artificial Sequence: Synthetic oligonucleotide
  Sense strand starting at position 846 of SEQ ID NO: 1882449
uaaauagugguaugaucau

SEQ ID NO: 2122001 - RNA, 19 nt, Artificial Sequence
  Description of Artificial Sequence: Synthetic oligonucleotide
  Antisense strand to SEQ ID NO: 2122000
augaucauaccacuauuua

SEQ ID NO: 2122002 - RNA, 19 nt, Artificial Sequence
  Description of Artificial Sequence: Synthetic oligonucleotide
  Sense strand starting at position 1020 of SEQ ID NO: 1882449
ucuauauaaguguauccuu

SEQ ID NO: 2122003 - RNA, 19 nt, Artificial Sequence
  Description of Artificial Sequence: Synthetic oligonucleotide
  Antisense strand to SEQ ID NO: 2122002
aaggauacacuuauauaga

SEQ ID NO: 2122004 - RNA, 19 nt, Artificial Sequence
  Description of Artificial Sequence: Synthetic oligonucleotide
  Sense strand starting at position 1222 of SEQ ID NO: 1882449
aggauagaauuugauguau

SEQ ID NO: 2122005 - RNA, 19 nt, Artificial Sequence
  Description of Artificial Sequence: Synthetic oligonucleotide
  Antisense strand to SEQ ID NO: 2122004
auacaucaaauucuauccu

SEQ ID NO: 2122006 - RNA, 19 nt, Artificial Sequence
  Description of Artificial Sequence: Synthetic oligonucleotide
  Sense strand starting at position 1255 of SEQ ID NO: 1882449
agauaugaguuauugcaua

SEQ ID NO: 2122007 - RNA, 19 nt, Artificial Sequence
  Description of Artificial Sequence: Synthetic oligonucleotide
  Antisense strand to SEQ ID NO: 2122006
uaugcaauaacucauaucu

SEQ ID NO: 2122008 - RNA, 19 nt, Artificial Sequence
  Description of Artificial Sequence: Synthetic oligonucleotide
  Sense strand starting at position 1260 of SEQ ID NO: 1882449
ugaguuauugcauaaagcu

SEQ ID NO: 2122009 - RNA, 19 nt, Artificial Sequence
  Description of Artificial Sequence: Synthetic oligonucleotide
  Antisense strand to SEQ ID NO: 2122008
agcuuuaugcaauaacuca

SEQ ID NO: 2122010 - RNA, 19 nt, Artificial Sequence
  Description of Artificial Sequence: Synthetic oligonucleotide
  Sense strand starting at position 1381 of SEQ ID NO: 1882449
gaaucaguauuuguuuguu

SEQ ID NO: 2122011 - RNA, 19 nt, Artificial Sequence
  Description of Artificial Sequence: Synthetic oligonucleotide
  Antisense strand to SEQ ID NO: 2122010
aacaaacaaauacugauuc

SEQ ID NO: 2122012 - RNA, 19 nt, Artificial Sequence
  Description of Artificial Sequence: Synthetic oligonucleotide
  Sense strand starting at position 1404 of SEQ ID NO: 1882449
acacuuuauuaagcugaga

SEQ ID NO: 2122013 - RNA, 19 nt, Artificial Sequence
  Description of Artificial Sequence: Synthetic oligonucleotide
  Antisense strand to SEQ ID NO: 2122012
ucucagcuuaauaaagugu

SEQ ID NO: 2122014 - RNA, 19 nt, Artificial Sequence
  Description of Artificial Sequence: Synthetic oligonucleotide
  Sense strand starting at position 1636 of SEQ ID NO: 1882449
ugggaaauauugcccuacu

SEQ ID NO: 2122015 - RNA, 19 nt, Artificial Sequence
  Description of Artificial Sequence: Synthetic oligonucleotide
  Antisense strand to SEQ ID NO: 2122014
aguagggcaauauuuccca

SEQ ID NO: 2122016 - RNA, 19 nt, Artificial Sequence
  Description of Artificial Sequence: Synthetic oligonucleotide
  Sense strand starting at position 1637 of SEQ ID NO: 1882449
gggaaauauugcccuacua

SEQ ID NO: 2122017 - RNA, 19 nt, Artificial Sequence
  Description of Artificial Sequence: Synthetic oligonucleotide
  Antisense strand to SEQ ID NO: 2122016
uaguagggcaauauuuccc

SEQ ID NO: 2122018 - RNA, 19 nt, Artificial Sequence
  Description of Artificial Sequence: Synthetic oligonucleotide
  Sense strand starting at position 2054 of SEQ ID NO: 1882449
aaguaaucccagcaagugu

SEQ ID NO: 2122019 - RNA, 19 nt, Artificial Sequence
  Description of Artificial Sequence: Synthetic oligonucleotide
  Antisense strand to SEQ ID NO: 2122018
acacuugcugggauuacuu

SEQ ID NO: 2122020 - RNA, 19 nt, Artificial Sequence
  Description of Artificial Sequence: Synthetic oligonucleotide
  Sense strand starting at position 2261 of SEQ ID NO: 1882449
uauuguuagccacaagaag

SEQ ID NO: 2122021 - RNA, 19 nt, Artificial Sequence
  Description of Artificial Sequence: Synthetic oligonucleotide
  Antisense strand to SEQ ID NO: 2122020
cuucuuguggcuaacaaua

SEQ ID NO: 2122022 - RNA, 19 nt, Artificial Sequence
  Description of Artificial Sequence: Synthetic oligonucleotide
  Sense strand starting at position 2384 of SEQ ID NO: 1882449
cagcguaaagcguacauuu

SEQ ID NO: 2122023 - RNA, 19 nt, Artificial Sequence
  Description of Artificial Sequence: Synthetic oligonucleotide
  Antisense strand to SEQ ID NO: 2122022
aaauguacgcuuuacgcug

SEQ ID NO: 2122024 - RNA, 19 nt, Artificial Sequence
  Description of Artificial Sequence: Synthetic oligonucleotide
  Sense strand starting at position 2386 of SEQ ID NO: 1882449
gcguaaagcguacauuuaa

SEQ ID NO: 2122025 - RNA, 19 nt, Artificial Sequence
  Description of Artificial Sequence: Synthetic oligonucleotide
  Antisense strand to SEQ ID NO: 2122024
uuaaauguacgcuuuacgc

SEQ ID NO: 2122026 - RNA, 19 nt, Artificial Sequence
  Description of Artificial Sequence: Synthetic oligonucleotide
  Sense strand starting at position 2451 of SEQ ID NO: 1882449
aaaggucuacuuggaaagu

SEQ ID NO: 2122027 - RNA, 19 nt, Artificial Sequence
  Description of Artificial Sequence: Synthetic oligonucleotide
  Antisense strand to SEQ ID NO: 2122026
acuuuccaaguagaccuuu

SEQ ID NO: 2122028 - RNA, 19 nt, Artificial Sequence
  Description of Artificial Sequence: Synthetic oligonucleotide
  Sense strand starting at position 2632 of SEQ ID NO: 1882449
cauauaucaguauguggau

SEQ ID NO: 2122029 - RNA, 19 nt, Artificial Sequence
  Description of Artificial Sequence: Synthetic oligonucleotide
  Antisense strand to SEQ ID NO: 2122028
auccacauacugauauaug

SEQ ID NO: 2122030 - RNA, 19 nt, Artificial Sequence
  Description of Artificial Sequence: Synthetic oligonucleotide
  Sense strand starting at position 2639 of SEQ ID NO: 1882449
caguauguggaucaaaguu

SEQ ID NO: 2122031 - RNA, 19 nt, Artificial Sequence
  Description of Artificial Sequence: Synthetic oligonucleotide
  Antisense strand to SEQ ID NO: 2122030
aacuuugauccacauacug

SEQ ID NO: 2122032 - RNA, 19 nt, Artificial Sequence
  Description of Artificial Sequence: Synthetic oligonucleotide
  Sense strand starting at position 2772 of SEQ ID NO: 1882449
aagguuaagcucuaucagu

SEQ ID NO: 2122033 - RNA, 19 nt, Artificial Sequence
  Description of Artificial Sequence: Synthetic oligonucleotide
  Antisense strand to SEQ ID NO: 2122032
acugauagagcuuaaccuu

SEQ ID NO: 2122034 - RNA, 19 nt, Artificial Sequence
  Description of Artificial Sequence: Synthetic oligonucleotide
  Sense strand starting at position 2831 of SEQ ID NO: 1882449
gugaaagauuaaguugaua

SEQ ID NO: 2122035 - RNA, 19 nt, Artificial Sequence
  Description of Artificial Sequence: Synthetic oligonucleotide
  Antisense strand to SEQ ID NO: 2122034
uaucaacuuaaucuuucac

SEQ ID NO: 2122036 - RNA, 19 nt, Artificial Sequence
  Description of Artificial Sequence: Synthetic oligonucleotide
  Sense strand starting at position 2908 of SEQ ID NO: 1882449
ucuuaaauuguguaagucu

SEQ ID NO: 2122037 - RNA, 19 nt, Artificial Sequence
  Description of Artificial Sequence: Synthetic oligonucleotide
  Antisense strand to SEQ ID NO: 2122036
agacuuacacaauuuaaga

SEQ ID NO: 2122038 - RNA, 19 nt, Artificial Sequence
  Description of Artificial Sequence: Synthetic oligonucleotide
  Sense strand starting at position 2977 of SEQ ID NO: 1882449
gcaucauguuuacugaaac

SEQ ID NO: 2122039 - RNA, 19 nt, Artificial Sequence
  Description of Artificial Sequence: Synthetic oligonucleotide
  Antisense strand to SEQ ID NO: 2122038
guuucaguaaacaugaugc

SEQ ID NO: 2122040 - RNA, 19 nt, Artificial Sequence
  Description of Artificial Sequence: Synthetic oligonucleotide
  Sense strand starting at position 3039 of SEQ ID NO: 1882449
ggguaacucuaucccauua

SEQ ID NO: 2122041 - RNA, 19 nt, Artificial Sequence
  Description of Artificial Sequence: Synthetic oligonucleotide
  Antisense strand to SEQ ID NO: 2122040
uaaugggauagaguuaccc

SEQ ID NO: 2122042 - RNA, 19 nt, Artificial Sequence
  Description of Artificial Sequence: Synthetic oligonucleotide
  Sense strand starting at position 3276 of SEQ ID NO: 1882449
cugacuagagcuugaguca

SEQ ID NO: 2122043 - RNA, 19 nt, Artificial Sequence
  Description of Artificial Sequence: Synthetic oligonucleotide
  Antisense strand to SEQ ID NO: 2122042
ugacucaagcucuagucag

SEQ ID NO: 2122044 - RNA, 19 nt, Artificial Sequence
  Description of Artificial Sequence: Synthetic oligonucleotide
  Sense strand starting at position 3277 of SEQ ID NO: 1882449
ugacuagagcuugagucaa

SEQ ID NO: 2122045 - RNA, 19 nt, Artificial Sequence
  Description of Artificial Sequence: Synthetic oligonucleotide
  Antisense strand to SEQ ID NO: 2122044
uugacucaagcucuaguca

SEQ ID NO: 2122046 - RNA, 19 nt, Artificial Sequence
  Description of Artificial Sequence: Synthetic oligonucleotide
  Sense strand starting at position 3279 of SEQ ID NO: 1882449
acuagagcuugagucaauc

SEQ ID NO: 2122047 - RNA, 19 nt, Artificial Sequence
  Description of Artificial Sequence: Synthetic oligonucleotide
  Antisense strand to SEQ ID NO: 2122046
gauugacucaagcucuagu

SEQ ID NO: 2122048 - RNA, 19 nt, Artificial Sequence
  Description of Artificial Sequence: Synthetic oligonucleotide
  Sense strand starting at position 3327 of SEQ ID NO: 1882449
gugaacuucucaccaagau

SEQ ID NO: 2122049 - RNA, 19 nt, Artificial Sequence
  Description of Artificial Sequence: Synthetic oligonucleotide
  Antisense strand to SEQ ID NO: 2122048
aucuuggugagaaguucac

SEQ ID NO: 2122050 - RNA, 19 nt, Artificial Sequence
  Description of Artificial Sequence: Synthetic oligonucleotide
  Sense strand starting at position 3358 of SEQ ID NO: 1882449
uaaguuagccacgacuaga

SEQ ID NO: 2122051 - RNA, 19 nt, Artificial Sequence
  Description of Artificial Sequence: Synthetic oligonucleotide
  Antisense strand to SEQ ID NO: 2122050
ucuagucguggcuaacuua

SEQ ID NO: 2122052 - RNA, 19 nt, Artificial Sequence
  Description of Artificial Sequence: Synthetic oligonucleotide
  Sense strand starting at position 3377 of SEQ ID NO: 1882449
caggcagaguacucuuuaa

SEQ ID NO: 2122053 - RNA, 19 nt, Artificial Sequence
  Description of Artificial Sequence: Synthetic oligonucleotide
  Antisense strand to SEQ ID NO: 2122052
uuaaagaguacucugccug

SEQ ID NO: 2122054 - RNA, 19 nt, Artificial Sequence
  Description of Artificial Sequence: Synthetic oligonucleotide
  Sense strand starting at position 3439 of SEQ ID NO: 1882449
guauaucagugacucuuua

SEQ ID NO: 2122055 - RNA, 19 nt, Artificial Sequence
  Description of Artificial Sequence: Synthetic oligonucleotide
  Antisense strand to SEQ ID NO: 2122054
uaaagagucacugauauac

SEQ ID NO: 2122056 - RNA, 19 nt, Artificial Sequence
  Description of Artificial Sequence: Synthetic oligonucleotide
  Sense strand starting at position 3651 of SEQ ID NO: 1882449
gagaauugcugauccaagu

SEQ ID NO: 2122057 - RNA, 19 nt, Artificial Sequence
  Description of Artificial Sequence: Synthetic oligonucleotide
  Antisense strand to SEQ ID NO: 2122056
acuuggaucagcaauucuc

SEQ ID NO: 2122058 - RNA, 19 nt, Artificial Sequence
  Description of Artificial Sequence: Synthetic oligonucleotide
  Sense strand starting at position 3701 of SEQ ID NO: 1882449
aagcauguaguuuaaguaa

SEQ ID NO: 2122059 - RNA, 19 nt, Artificial Sequence
  Description of Artificial Sequence: Synthetic oligonucleotide
  Antisense strand to SEQ ID NO: 2122058
uuacuuaaacuacaugcuu

SEQ ID NO: 2122060 - RNA, 19 nt, Artificial Sequence
  Description of Artificial Sequence: Synthetic oligonucleotide
  Sense strand starting at position 3750 of SEQ ID NO: 1882449
ucuggcaucugacuggaau

SEQ ID NO: 2122061 - RNA, 19 nt, Artificial Sequence
  Description of Artificial Sequence: Synthetic oligonucleotide
  Antisense strand to SEQ ID NO: 2122060
auuccagucagaugccaga

SEQ ID NO: 2122062 - RNA, 19 nt, Artificial Sequence
  Description of Artificial Sequence: Synthetic oligonucleotide
  Sense strand starting at position 3751 of SEQ ID NO: 1882449
cuggcaucugacuggaaua

SEQ ID NO: 2122063 - RNA, 19 nt, Artificial Sequence
  Description of Artificial Sequence: Synthetic oligonucleotide
  Antisense strand to SEQ ID NO: 2122062
uauuccagucagaugccag

SEQ ID NO: 2122064 - RNA, 19 nt, Artificial Sequence
  Description of Artificial Sequence: Synthetic oligonucleotide
  Sense strand starting at position 3763 of SEQ ID NO: 1882449
uggaauaaaucugcuuuag

SEQ ID NO: 2122065 - RNA, 19 nt, Artificial Sequence
  Description of Artificial Sequence: Synthetic oligonucleotide
  Antisense strand to SEQ ID NO: 2122064
cuaaagcagauuuauucca

SEQ ID NO: 2122066 - RNA, 19 nt, Artificial Sequence
  Description of Artificial Sequence: Synthetic oligonucleotide
  Sense strand starting at position 402 of SEQ ID NO: 1882450
uuguaaguuccaugagaaa

SEQ ID NO: 2122067 - RNA, 19 nt, Artificial Sequence
  Description of Artificial Sequence: Synthetic oligonucleotide
  Antisense strand to SEQ ID NO: 2122066
uuucucauggaacuuacaa

SEQ ID NO: 2122068 - RNA, 19 nt, Artificial Sequence
  Description of Artificial Sequence: Synthetic oligonucleotide
  Sense strand starting at position 740 of SEQ ID NO: 1882450
uuauuucuuugagaagacu

SEQ ID NO: 2122069 - RNA, 19 nt, Artificial Sequence
  Description of Artificial Sequence: Synthetic oligonucleotide
  Antisense strand to SEQ ID NO: 2122068
agucuucucaaagaaauaa

SEQ ID NO: 2122070 - RNA, 19 nt, Artificial Sequence
  Description of Artificial Sequence: Synthetic oligonucleotide
  Sense strand starting at position 898 of SEQ ID NO: 1882450
ugcuaaagucauuguauuu

SEQ ID NO: 2122071 - RNA, 19 nt, Artificial Sequence
  Description of Artificial Sequence: Synthetic oligonucleotide
  Antisense strand to SEQ ID NO: 2122070
aaauacaaugacuuuagca

SEQ ID NO: 2122072 - RNA, 19 nt, Artificial Sequence
  Description of Artificial Sequence: Synthetic oligonucleotide
  Sense strand starting at position 1310 of SEQ ID NO: 1882450
cugguuaaggcugaacuua

SEQ ID NO: 2122073 - RNA, 19 nt, Artificial Sequence
  Description of Artificial Sequence: Synthetic oligonucleotide
  Antisense strand to SEQ ID NO: 2122072
uaaguucagccuuaaccag

SEQ ID NO: 2122074 - RNA, 19 nt, Artificial Sequence
  Description of Artificial Sequence: Synthetic oligonucleotide
  Sense strand starting at position 1330 of SEQ ID NO: 1882450
gaguucguucuguagauuu

SEQ ID NO: 2122075 - RNA, 19 nt, Artificial Sequence
  Description of Artificial Sequence: Synthetic oligonucleotide
  Antisense strand to SEQ ID NO: 2122074
aaaucuacagaacgaacuc

SEQ ID NO: 2122076 - RNA, 19 nt, Artificial Sequence
  Description of Artificial Sequence: Synthetic oligonucleotide
  Sense strand starting at position 1432 of SEQ ID NO: 1882450
uccugaaauguguaacuau

SEQ ID NO: 2122077 - RNA, 19 nt, Artificial Sequence
  Description of Artificial Sequence: Synthetic oligonucleotide
  Antisense strand to SEQ ID NO: 2122076
auaguuacacauuucagga

SEQ ID NO: 2122078 - RNA, 19 nt, Artificial Sequence
  Description of Artificial Sequence: Synthetic oligonucleotide
  Sense strand starting at position 1517 of SEQ ID NO: 1882450
ugccuuugaucccugauaa

SEQ ID NO: 2122079 - RNA, 19 nt, Artificial Sequence
  Description of Artificial Sequence: Synthetic oligonucleotide
  Antisense strand to SEQ ID NO: 2122078
uuaucagggaucaaaggca

SEQ ID NO: 2122080 - RNA, 19 nt, Artificial Sequence
  Description of Artificial Sequence: Synthetic oligonucleotide
  Sense strand starting at position 1518 of SEQ ID NO: 1882450
gccuuugaucccugauaaa

SEQ ID NO: 2122081 - RNA, 19 nt, Artificial Sequence
  Description of Artificial Sequence: Synthetic oligonucleotide
  Antisense strand to SEQ ID NO: 2122080
uuuaucagggaucaaaggc

SEQ ID NO: 2122082 - RNA, 19 nt, Artificial Sequence
  Description of Artificial Sequence: Synthetic oligonucleotide
  Sense strand starting at position 1612 of SEQ ID NO: 1882450
gagaaauguuuagcuuaac

SEQ ID NO: 2122083 - RNA, 19 nt, Artificial Sequence
  Description of Artificial Sequence: Synthetic oligonucleotide
  Antisense strand to SEQ ID NO: 2122082
guuaagcuaaacauuucuc

SEQ ID NO: 2122084 - RNA, 19 nt, Artificial Sequence
  Description of Artificial Sequence: Synthetic oligonucleotide
  Sense strand starting at position 1622 of SEQ ID NO: 1882450
uagcuuaacguauagguaa

SEQ ID NO: 2122085 - RNA, 19 nt, Artificial Sequence
  Description of Artificial Sequence: Synthetic oligonucleotide
  Antisense strand to SEQ ID NO: 2122084
uuaccuauacguuaagcua

SEQ ID NO: 2122086 - RNA, 19 nt, Artificial Sequence
  Description of Artificial Sequence: Synthetic oligonucleotide
  Sense strand starting at position 1803 of SEQ ID NO: 1882450
uuggaugacuuagucaauu

SEQ ID NO: 2122087 - RNA, 19 nt, Artificial Sequence
  Description of Artificial Sequence: Synthetic oligonucleotide
  Antisense strand to SEQ ID NO: 2122086
aauugacuaagucauccaa

SEQ ID NO: 2122088 - RNA, 19 nt, Artificial Sequence
  Description of Artificial Sequence: Synthetic oligonucleotide
  Sense strand starting at position 1914 of SEQ ID NO: 1882450
guugacuuccaaggcagaa

SEQ ID NO: 2122089 - RNA, 19 nt, Artificial Sequence
  Description of Artificial Sequence: Synthetic oligonucleotide
  Antisense strand to SEQ ID NO: 2122088
uucugccuuggaagucaac

SEQ ID NO: 2122090 - RNA, 19 nt, Artificial Sequence
  Description of Artificial Sequence: Synthetic oligonucleotide
  Sense strand starting at position 1992 of SEQ ID NO: 1882450
acaguaucugucgcucagu

SEQ ID NO: 2122091 - RNA, 19 nt, Artificial Sequence
  Description of Artificial Sequence: Synthetic oligonucleotide
  Antisense strand to SEQ ID NO: 2122090
acugagcgacagauacugu

SEQ ID NO: 2122092 - RNA, 19 nt, Artificial Sequence
  Description of Artificial Sequence: Synthetic oligonucleotide
  Sense strand starting at position 2058 of SEQ ID NO: 1882450
ccaguaccauuugaagaua

SEQ ID NO: 2122093 - RNA, 19 nt, Artificial Sequence
  Description of Artificial Sequence: Synthetic oligonucleotide
  Antisense strand to SEQ ID NO: 2122092
uaucuucaaaugguacugg

SEQ ID NO: 2122094 - RNA, 19 nt, Artificial Sequence
  Description of Artificial Sequence: Synthetic oligonucleotide
  Sense strand starting at position 2432 of SEQ ID NO: 1882450
agcucacuccugcacagaa

SEQ ID NO: 2122095 - RNA, 19 nt, Artificial Sequence
  Description of Artificial Sequence: Synthetic oligonucleotide
  Antisense strand to SEQ ID NO: 2122094
uucugugcaggagugagcu

SEQ ID NO: 2122096 - RNA, 19 nt, Artificial Sequence
  Description of Artificial Sequence: Synthetic oligonucleotide
  Sense strand starting at position 2752 of SEQ ID NO: 1882450
gcuaaacuggucuaaggua

SEQ ID NO: 2122097 - RNA, 19 nt, Artificial Sequence
  Description of Artificial Sequence: Synthetic oligonucleotide
  Antisense strand to SEQ ID NO: 2122096
uaccuuagaccaguuuagc

SEQ ID NO: 2122098 - RNA, 19 nt, Artificial Sequence
  Description of Artificial Sequence: Synthetic oligonucleotide
  Sense strand starting at position 2858 of SEQ ID NO: 1882450
gguggcauauaauuccaaa

SEQ ID NO: 2122099 - RNA, 19 nt, Artificial Sequence
  Description of Artificial Sequence: Synthetic oligonucleotide
  Antisense strand to SEQ ID NO: 2122098
uuuggaauuauaugccacc

SEQ ID NO: 2122100 - RNA, 19 nt, Artificial Sequence
  Description of Artificial Sequence: Synthetic oligonucleotide
  Sense strand starting at position 2960 of SEQ ID NO: 1882450
uuuaaauucuaggugauga

SEQ ID NO: 2122101 - RNA, 19 nt, Artificial Sequence
  Description of Artificial Sequence: Synthetic oligonucleotide
  Antisense strand to SEQ ID NO: 2122100
ucaucaccuagaauuuaaa

SEQ ID NO: 2122102 - RNA, 19 nt, Artificial Sequence
  Description of Artificial Sequence: Synthetic oligonucleotide
  Sense strand starting at position 2961 of SEQ ID NO: 1882450
uuaaauucuaggugaugag

SEQ ID NO: 2122103 - RNA, 19 nt, Artificial Sequence
  Description of Artificial Sequence: Synthetic oligonucleotide
  Antisense strand to SEQ ID NO: 2122102
cucaucaccuagaauuuaa

SEQ ID NO: 2122104 - RNA, 19 nt, Artificial Sequence
  Description of Artificial Sequence: Synthetic oligonucleotide
  Sense strand starting at position 2986 of SEQ ID NO: 1882450
aggguaucaucccuaccuu

SEQ ID NO: 2122105 - RNA, 19 nt, Artificial Sequence
  Description of Artificial Sequence: Synthetic oligonucleotide
  Antisense strand to SEQ ID NO: 2122104
aagguagggaugauacccu

SEQ ID NO: 2122106 - RNA, 19 nt, Artificial Sequence
  Description of Artificial Sequence: Synthetic oligonucleotide
  Sense strand starting at position 3042 of SEQ ID NO: 1882450
acaccauuacuauaagugu

SEQ ID NO: 2122107 - RNA, 19 nt, Artificial Sequence
  Description of Artificial Sequence: Synthetic oligonucleotide
  Antisense strand to SEQ ID NO: 2122106
acacuuauaguaauggugu

SEQ ID NO: 2122108 - RNA, 19 nt, Artificial Sequence
  Description of Artificial Sequence: Synthetic oligonucleotide
  Sense strand starting at position 3045 of SEQ ID NO: 1882450
ccauuacuauaaguguuau

SEQ ID NO: 2122109 - RNA, 19 nt, Artificial Sequence
  Description of Artificial Sequence: Synthetic oligonucleotide
  Antisense strand to SEQ ID NO: 2122108
auaacacuuauaguaaugg

SEQ ID NO: 2122110 - RNA, 19 nt, Artificial Sequence
  Description of Artificial Sequence: Synthetic oligonucleotide
  Sense strand starting at position 3055 of SEQ ID NO: 1882450
aaguguuaugaugggucaa

SEQ ID NO: 2122111 - RNA, 19 nt, Artificial Sequence
  Description of Artificial Sequence: Synthetic oligonucleotide
  Antisense strand to SEQ ID NO: 2122110
uugacccaucauaacacuu

SEQ ID NO: 2122112 - RNA, 19 nt, Artificial Sequence
  Description of Artificial Sequence: Synthetic oligonucleotide
  Sense strand starting at position 3056 of SEQ ID NO: 1882450
aguguuaugaugggucaaa

SEQ ID NO: 2122113 - RNA, 19 nt, Artificial Sequence
  Description of Artificial Sequence: Synthetic oligonucleotide
  Antisense strand to SEQ ID NO: 2122112
uuugacccaucauaacacu

SEQ ID NO: 2122114 - RNA, 19 nt, Artificial Sequence
  Description of Artificial Sequence: Synthetic oligonucleotide
  Sense strand starting at position 3107 of SEQ ID NO: 1882450
agucuugaagccugaauaa

SEQ ID NO: 2122115 - RNA, 19 nt, Artificial Sequence
  Description of Artificial Sequence: Synthetic oligonucleotide
  Antisense strand to SEQ ID NO: 2122114
uuauucaggcuucaagacu

SEQ ID NO: 2122116 - RNA, 19 nt, Artificial Sequence
  Description of Artificial Sequence: Synthetic oligonucleotide
  Sense strand starting at position 3141 of SEQ ID NO: 1882450
gauggugcuaaugggaauu

SEQ ID NO: 2122117 - RNA, 19 nt, Artificial Sequence
  Description of Artificial Sequence: Synthetic oligonucleotide
  Antisense strand to SEQ ID NO: 2122116
aauucccauuagcaccauc

SEQ ID NO: 2122118 - RNA, 19 nt, Artificial Sequence
  Description of Artificial Sequence: Synthetic oligonucleotide
  Sense strand starting at position 3181 of SEQ ID NO: 1882450
aagauaguguagcuuaaag

SEQ ID NO: 2122119 - RNA, 19 nt, Artificial Sequence
  Description of Artificial Sequence: Synthetic oligonucleotide
  Antisense strand to SEQ ID NO: 2122118
cuuuaagcuacacuaucuu

SEQ ID NO: 2122120 - RNA, 19 nt, Artificial Sequence
  Description of Artificial Sequence: Synthetic oligonucleotide
  Sense strand starting at position 3183 of SEQ ID NO: 1882450
gauaguguagcuuaaagug

SEQ ID NO: 2122121 - RNA, 19 nt, Artificial Sequence
  Description of Artificial Sequence: Synthetic oligonucleotide
  Antisense strand to SEQ ID NO: 2122120
cacuuuaagcuacacuauc

SEQ ID NO: 2122122 - RNA, 19 nt, Artificial Sequence
  Description of Artificial Sequence: Synthetic oligonucleotide
  Sense strand starting at position 3190 of SEQ ID NO: 1882450
uagcuuaaaguguaccaga

SEQ ID NO: 2122123 - RNA, 19 nt, Artificial Sequence
  Description of Artificial Sequence: Synthetic oligonucleotide
  Antisense strand to SEQ ID NO: 2122122
ucugguacacuuuaagcua

SEQ ID NO: 2122124 - RNA, 19 nt, Artificial Sequence
  Description of Artificial Sequence: Synthetic oligonucleotide
  Sense strand starting at position 3252 of SEQ ID NO: 1882450
ugcugaggccuuuaagaau

SEQ ID NO: 2122125 - RNA, 19 nt, Artificial Sequence
  Description of Artificial Sequence: Synthetic oligonucleotide
  Antisense strand to SEQ ID NO: 2122124
auucuuaaaggccucagca

SEQ ID NO: 2122126 - RNA, 19 nt, Artificial Sequence
  Description of Artificial Sequence: Synthetic oligonucleotide
  Sense strand starting at position 3279 of SEQ ID NO: 1882450
gguggagucaaagaugcau

SEQ ID NO: 2122127 - RNA, 19 nt, Artificial Sequence
  Description of Artificial Sequence: Synthetic oligonucleotide
  Antisense strand to SEQ ID NO: 2122126
augcaucuuugacuccacc

SEQ ID NO: 2122128 - RNA, 19 nt, Artificial Sequence
  Description of Artificial Sequence: Synthetic oligonucleotide
  Sense strand starting at position 3287 of SEQ ID NO: 1882450
caaagaugcauguggguga

SEQ ID NO: 2122129 - RNA, 19 nt, Artificial Sequence
  Description of Artificial Sequence: Synthetic oligonucleotide
  Antisense strand to SEQ ID NO: 2122128
ucacccacaugcaucuuug

SEQ ID NO: 2122130 - RNA, 19 nt, Artificial Sequence
  Description of Artificial Sequence: Synthetic oligonucleotide
  Sense strand starting at position 3367 of SEQ ID NO: 1882450
gggcauuaucuccaaacga

SEQ ID NO: 2122131 - RNA, 19 nt, Artificial Sequence
  Description of Artificial Sequence: Synthetic oligonucleotide
  Antisense strand to SEQ ID NO: 2122130
ucguuuggagauaaugccc

SEQ ID NO: 2122132 - RNA, 19 nt, Artificial Sequence
  Description of Artificial Sequence: Synthetic oligonucleotide
  Sense strand starting at position 3389 of SEQ ID NO: 1882450
guacgagugaaagauagua

SEQ ID NO: 2122133 - RNA, 19 nt, Artificial Sequence
  Description of Artificial Sequence: Synthetic oligonucleotide
  Antisense strand to SEQ ID NO: 2122132
uacuaucuuucacucguac

SEQ ID NO: 2122134 - RNA, 19 nt, Artificial Sequence
  Description of Artificial Sequence: Synthetic oligonucleotide
  Sense strand starting at position 3486 of SEQ ID NO: 1882450
aaagaaucacugcaguagu

SEQ ID NO: 2122135 - RNA, 19 nt, Artificial Sequence
  Description of Artificial Sequence: Synthetic oligonucleotide
  Antisense strand to SEQ ID NO: 2122134
acuacugcagugauucuuu

SEQ ID NO: 2122136 - RNA, 19 nt, Artificial Sequence
  Description of Artificial Sequence: Synthetic oligonucleotide
  Sense strand starting at position 3489 of SEQ ID NO: 1882450
gaaucacugcaguagugua

SEQ ID NO: 2122137 - RNA, 19 nt, Artificial Sequence
  Description of Artificial Sequence: Synthetic oligonucleotide
  Antisense strand to SEQ ID NO: 2122136
uacacuacugcagugauuc

SEQ ID NO: 2122138 - RNA, 19 nt, Artificial Sequence
  Description of Artificial Sequence: Synthetic oligonucleotide
  Sense strand starting at position 3594 of SEQ ID NO: 1882450
agcagaauucagugaguga

SEQ ID NO: 2122139 - RNA, 19 nt, Artificial Sequence
  Description of Artificial Sequence: Synthetic oligonucleotide
  Antisense strand to SEQ ID NO: 2122138
ucacucacugaauucugcu

SEQ ID NO: 2122140 - RNA, 19 nt, Artificial Sequence
  Description of Artificial Sequence: Synthetic oligonucleotide
  Sense strand starting at position 3597 of SEQ ID NO: 1882450
agaauucagugagugagua

SEQ ID NO: 2122141 - RNA, 19 nt, Artificial Sequence
  Description of Artificial Sequence: Synthetic oligonucleotide
  Antisense strand to SEQ ID NO: 2122140
uacucacucacugaauucu

SEQ ID NO: 2122142 - RNA, 19 nt, Artificial Sequence
  Description of Artificial Sequence: Synthetic oligonucleotide
  Sense strand starting at position 3641 of SEQ ID NO: 1882450
uggagaagucauggguaau

SEQ ID NO: 2122143 - RNA, 19 nt, Artificial Sequence
  Description of Artificial Sequence: Synthetic oligonucleotide
  Antisense strand to SEQ ID NO: 2122142
auuacccaugacuucucca

SEQ ID NO: 2122144 - RNA, 19 nt, Artificial Sequence
  Description of Artificial Sequence: Synthetic oligonucleotide
  Sense strand starting at position 3642 of SEQ ID NO: 1882450
ggagaagucauggguaauu

SEQ ID NO: 2122145 - RNA, 19 nt, Artificial Sequence
  Description of Artificial Sequence: Synthetic oligonucleotide
  Antisense strand to SEQ ID NO: 2122144
aauuacccaugacuucucc

SEQ ID NO: 2122146 - RNA, 19 nt, Artificial Sequence
  Description of Artificial Sequence: Synthetic oligonucleotide
  Sense strand starting at position 10 of SEQ ID NO: 1882451
gugggugcuguguccuaca

SEQ ID NO: 2122147 - RNA, 19 nt, Artificial Sequence
  Description of Artificial Sequence: Synthetic oligonucleotide
  Antisense strand to SEQ ID NO: 2122146
uguaggacacagcacccac

SEQ ID NO: 2122148 - RNA, 19 nt, Artificial Sequence
  Description of Artificial Sequence: Synthetic oligonucleotide
  Sense strand starting at position 105 of SEQ ID NO: 1882451
ugaaaucugccaggauauu

SEQ ID NO: 2122149 - RNA, 19 nt, Artificial Sequence
  Description of Artificial Sequence: Synthetic oligonucleotide
  Antisense strand to SEQ ID NO: 2122148
aauauccuggcagauuuca

SEQ ID NO: 2122150 - RNA, 19 nt, Artificial Sequence
  Description of Artificial Sequence: Synthetic oligonucleotide
  Sense strand starting at position 117 of SEQ ID NO: 1882451
ggauauuucuguccaugcu

SEQ ID NO: 2122151 - RNA, 19 nt, Artificial Sequence
  Description of Artificial Sequence: Synthetic oligonucleotide
  Antisense strand to SEQ ID NO: 2122150
agcauggacagaaauaucc

SEQ ID NO: 2122152 - RNA, 19 nt, Artificial Sequence
  Description of Artificial Sequence: Synthetic oligonucleotide
  Sense strand starting at position 272 of SEQ ID NO: 1882451
uaaacuuuacuggguaaag

SEQ ID NO: 2122153 - RNA, 19 nt, Artificial Sequence
  Description of Artificial Sequence: Synthetic oligonucleotide
  Antisense strand to SEQ ID NO: 2122152
cuuuacccaguaaaguuua

SEQ ID NO: 2122154 - RNA, 19 nt, Artificial Sequence
  Description of Artificial Sequence: Synthetic oligonucleotide
  Sense strand starting at position 273 of SEQ ID NO: 1882451
aaacuuuacuggguaaagu

SEQ ID NO: 2122155 - RNA, 19 nt, Artificial Sequence
  Description of Artificial Sequence: Synthetic oligonucleotide
  Antisense strand to SEQ ID NO: 2122154
acuuuacccaguaaaguuu

SEQ ID NO: 2122156 - RNA, 19 nt, Artificial Sequence
  Description of Artificial Sequence: Synthetic oligonucleotide
  Sense strand starting at position 283 of SEQ ID NO: 1882451
ggguaaaguaucugauuga

SEQ ID NO: 2122157 - RNA, 19 nt, Artificial Sequence
  Description of Artificial Sequence: Synthetic oligonucleotide
  Antisense strand to SEQ ID NO: 2122156
ucaaucagauacuuuaccc

SEQ ID NO: 2122158 - RNA, 19 nt, Artificial Sequence
  Description of Artificial Sequence: Synthetic oligonucleotide
  Sense strand starting at position 563 of SEQ ID NO: 1882451
ucauauguuaacuggagga

SEQ ID NO: 2122159 - RNA, 19 nt, Artificial Sequence
  Description of Artificial Sequence: Synthetic oligonucleotide
  Antisense strand to SEQ ID NO: 2122158
uccuccaguuaacauauga

SEQ ID NO: 2122160 - RNA, 19 nt, Artificial Sequence
  Description of Artificial Sequence: Synthetic oligonucleotide
  Sense strand starting at position 642 of SEQ ID NO: 1882451
uguaauauuugacuucggu

SEQ ID NO: 2122161 - RNA, 19 nt, Artificial Sequence
  Description of Artificial Sequence: Synthetic oligonucleotide
  Antisense strand to SEQ ID NO: 2122160
accgaagucaaauauuaca

SEQ ID NO: 2122162 - RNA, 19 nt, Artificial Sequence
  Description of Artificial Sequence: Synthetic oligonucleotide
  Sense strand starting at position 716 of SEQ ID NO: 1882451
ggugaauuauaugcaacag

SEQ ID NO: 2122163 - RNA, 19 nt, Artificial Sequence
  Description of Artificial Sequence: Synthetic oligonucleotide
  Antisense strand to SEQ ID NO: 2122162
cuguugcauauaauucacc

SEQ ID NO: 2122164 - RNA, 19 nt, Artificial Sequence
  Description of Artificial Sequence: Synthetic oligonucleotide
  Sense strand starting at position 1048 of SEQ ID NO: 1882451
ucugucaugaaggauguua

SEQ ID NO: 2122165 - RNA, 19 nt, Artificial Sequence
  Description of Artificial Sequence: Synthetic oligonucleotide
  Antisense strand to SEQ ID NO: 2122164
uaacauccuucaugacaga

SEQ ID NO: 2122166 - RNA, 19 nt, Artificial Sequence
  Description of Artificial Sequence: Synthetic oligonucleotide
  Sense strand starting at position 1050 of SEQ ID NO: 1882451
ugucaugaaggauguuacu

SEQ ID NO: 2122167 - RNA, 19 nt, Artificial Sequence
  Description of Artificial Sequence: Synthetic oligonucleotide
  Antisense strand to SEQ ID NO: 2122166
aguaacauccuucaugaca

SEQ ID NO: 2122168 - RNA, 19 nt, Artificial Sequence
  Description of Artificial Sequence: Synthetic oligonucleotide
  Sense strand starting at position 1110 of SEQ ID NO: 1882451
ggauacaucuaucuguacu

SEQ ID NO: 2122169 - RNA, 19 nt, Artificial Sequence
  Description of Artificial Sequence: Synthetic oligonucleotide
  Antisense strand to SEQ ID NO: 2122168
aguacagauagauguaucc

SEQ ID NO: 2122170 - RNA, 19 nt, Artificial Sequence
  Description of Artificial Sequence: Synthetic oligonucleotide
  Sense strand starting at position 1422 of SEQ ID NO: 1882451
auggcauuauaaccagagu

SEQ ID NO: 2122171 - RNA, 19 nt, Artificial Sequence
  Description of Artificial Sequence: Synthetic oligonucleotide
  Antisense strand to SEQ ID NO: 2122170
acucugguuauaaugccau

SEQ ID NO: 2122172 - RNA, 19 nt, Artificial Sequence
  Description of Artificial Sequence: Synthetic oligonucleotide
  Sense strand starting at position 1425 of SEQ ID NO: 1882451
gcauuauaaccagagucau

SEQ ID NO: 2122173 - RNA, 19 nt, Artificial Sequence
  Description of Artificial Sequence: Synthetic oligonucleotide
  Antisense strand to SEQ ID NO: 2122172
augacucugguuauaaugc

SEQ ID NO: 2122174 - RNA, 19 nt, Artificial Sequence
  Description of Artificial Sequence: Synthetic oligonucleotide
  Sense strand starting at position 1506 of SEQ ID NO: 1882451
auauaaugguaguuggauu

SEQ ID NO: 2122175 - RNA, 19 nt, Artificial Sequence
  Description of Artificial Sequence: Synthetic oligonucleotide
  Antisense strand to SEQ ID NO: 2122174
aauccaacuaccauuauau

SEQ ID NO: 2122176 - RNA, 19 nt, Artificial Sequence
  Description of Artificial Sequence: Synthetic oligonucleotide
  Sense strand starting at position 1846 of SEQ ID NO: 1882451
aggugagggucccuuaaag

SEQ ID NO: 2122177 - RNA, 19 nt, Artificial Sequence
  Description of Artificial Sequence: Synthetic oligonucleotide
  Antisense strand to SEQ ID NO: 2122176
cuuuaagggacccucaccu

SEQ ID NO: 2122178 - RNA, 19 nt, Artificial Sequence
  Description of Artificial Sequence: Synthetic oligonucleotide
  Sense strand starting at position 2171 of SEQ ID NO: 1882451
uaguaagcaguuuauagaa

SEQ ID NO: 2122179 - RNA, 19 nt, Artificial Sequence
  Description of Artificial Sequence: Synthetic oligonucleotide
  Antisense strand to SEQ ID NO: 2122178
uucuauaaacugcuuacua

SEQ ID NO: 2122180 - RNA, 19 nt, Artificial Sequence
  Description of Artificial Sequence: Synthetic oligonucleotide
  Sense strand starting at position 2476 of SEQ ID NO: 1882451
aauugacacugaguguauu

SEQ ID NO: 2122181 - RNA, 19 nt, Artificial Sequence
  Description of Artificial Sequence: Synthetic oligonucleotide
  Antisense strand to SEQ ID NO: 2122180
aauacacucagugucaauu

SEQ ID NO: 2122182 - RNA, 19 nt, Artificial Sequence
  Description of Artificial Sequence: Synthetic oligonucleotide
  Sense strand starting at position 2477 of SEQ ID NO: 1882451
auugacacugaguguauua

SEQ ID NO: 2122183 - RNA, 19 nt, Artificial Sequence
  Description of Artificial Sequence: Synthetic oligonucleotide
  Antisense strand to SEQ ID NO: 2122182
uaauacacucagugucaau

SEQ ID NO: 2122184 - RNA, 19 nt, Artificial Sequence
  Description of Artificial Sequence: Synthetic oligonucleotide
  Sense strand starting at position 2523 of SEQ ID NO: 1882451
guuaguggcauugcuguua

SEQ ID NO: 2122185 - RNA, 19 nt, Artificial Sequence
  Description of Artificial Sequence: Synthetic oligonucleotide
  Antisense strand to SEQ ID NO: 2122184
uaacagcaaugccacuaac

SEQ ID NO: 2122186 - RNA, 19 nt, Artificial Sequence
  Description of Artificial Sequence: Synthetic oligonucleotide
  Sense strand starting at position 2527 of SEQ ID NO: 1882451
guggcauugcuguuauguu

SEQ ID NO: 2122187 - RNA, 19 nt, Artificial Sequence
  Description of Artificial Sequence: Synthetic oligonucleotide
  Antisense strand to SEQ ID NO: 2122186
aacauaacagcaaugccac

SEQ ID NO: 2122188 - RNA, 19 nt, Artificial Sequence
  Description of Artificial Sequence: Synthetic oligonucleotide
  Sense strand starting at position 2643 of SEQ ID NO: 1882451
augauaacuggguggguuu

SEQ ID NO: 2122189 - RNA, 19 nt, Artificial Sequence
  Description of Artificial Sequence: Synthetic oligonucleotide
  Antisense strand to SEQ ID NO: 2122188
aaacccacccaguuaucau

SEQ ID NO: 2122190 - RNA, 19 nt, Artificial Sequence
  Description of Artificial Sequence: Synthetic oligonucleotide
  Sense strand starting at position 2644 of SEQ ID NO: 1882451
ugauaacuggguggguuua

SEQ ID NO: 2122191 - RNA, 19 nt, Artificial Sequence
  Description of Artificial Sequence: Synthetic oligonucleotide
  Antisense strand to SEQ ID NO: 2122190
uaaacccacccaguuauca

SEQ ID NO: 2122192 - RNA, 19 nt, Artificial Sequence
  Description of Artificial Sequence: Synthetic oligonucleotide
  Sense strand starting at position 2710 of SEQ ID NO: 1882451
auggaauucuucucuguac

SEQ ID NO: 2122193 - RNA, 19 nt, Artificial Sequence
  Description of Artificial Sequence: Synthetic oligonucleotide
  Antisense strand to SEQ ID NO: 2122192
guacagagaagaauuccau

SEQ ID NO: 2122194 - RNA, 19 nt, Artificial Sequence
  Description of Artificial Sequence: Synthetic oligonucleotide
  Sense strand starting at position 2712 of SEQ ID NO: 1882451
ggaauucuucucuguacua

SEQ ID NO: 2122195 - RNA, 19 nt, Artificial Sequence
  Description of Artificial Sequence: Synthetic oligonucleotide
  Antisense strand to SEQ ID NO: 2122194
uaguacagagaagaauucc

SEQ ID NO: 2122196 - RNA, 19 nt, Artificial Sequence
  Description of Artificial Sequence: Synthetic oligonucleotide
  Sense strand starting at position 2932 of SEQ ID NO: 1882451
auguguaugcaggaacuaa

SEQ ID NO: 2122197 - RNA, 19 nt, Artificial Sequence
  Description of Artificial Sequence: Synthetic oligonucleotide
  Antisense strand to SEQ ID NO: 2122196
uuaguuccugcauacacau

SEQ ID NO: 2122198 - RNA, 19 nt, Artificial Sequence
  Description of Artificial Sequence: Synthetic oligonucleotide
  Sense strand starting at position 2983 of SEQ ID NO: 1882451
uuauuauuggcuggacuaa

SEQ ID NO: 2122199 - RNA, 19 nt, Artificial Sequence
  Description of Artificial Sequence: Synthetic oligonucleotide
  Antisense strand to SEQ ID NO: 2122198
uuaguccagccaauaauaa

SEQ ID NO: 2122200 - RNA, 19 nt, Artificial Sequence
  Description of Artificial Sequence: Synthetic oligonucleotide
  Sense strand starting at position 3005 of SEQ ID NO: 1882451
cccagacuuguuuauauau

SEQ ID NO: 2122201 - RNA, 19 nt, Artificial Sequence
  Description of Artificial Sequence: Synthetic oligonucleotide
  Antisense strand to SEQ ID NO: 2122200
auauauaaacaagucuggg

SEQ ID NO: 2122202 - RNA, 19 nt, Artificial Sequence
  Description of Artificial Sequence: Synthetic oligonucleotide
  Sense strand starting at position 3060 of SEQ ID NO: 1882451
guaccagugcuacaauaag

SEQ ID NO: 2122203 - RNA, 19 nt, Artificial Sequence
  Description of Artificial Sequence: Synthetic oligonucleotide
  Antisense strand to SEQ ID NO: 2122202
cuuauuguagcacugguac

SEQ ID NO: 2122204 - RNA, 19 nt, Artificial Sequence
  Description of Artificial Sequence: Synthetic oligonucleotide
  Sense strand starting at position 3080 of SEQ ID NO: 1882451
acucauaguuuguugaaug

SEQ ID NO: 2122205 - RNA, 19 nt, Artificial Sequence
  Description of Artificial Sequence: Synthetic oligonucleotide
  Antisense strand to SEQ ID NO: 2122204
cauucaacaaacuaugagu

SEQ ID NO: 2122206 - RNA, 19 nt, Artificial Sequence
  Description of Artificial Sequence: Synthetic oligonucleotide
  Sense strand starting at position 3196 of SEQ ID NO: 1882451
aguuacaaggucugaaaca

SEQ ID NO: 2122207 - RNA, 19 nt, Artificial Sequence
  Description of Artificial Sequence: Synthetic oligonucleotide
  Antisense strand to SEQ ID NO: 2122206
uguuucagaccuuguaacu

SEQ ID NO: 2122208 - RNA, 19 nt, Artificial Sequence
  Description of Artificial Sequence: Synthetic oligonucleotide
  Sense strand starting at position 3284 of SEQ ID NO: 1882451
uuagaaguggcuugaagaa

SEQ ID NO: 2122209 - RNA, 19 nt, Artificial Sequence
  Description of Artificial Sequence: Synthetic oligonucleotide
  Antisense strand to SEQ ID NO: 2122208
uucuucaagccacuucuaa

SEQ ID NO: 2122210 - RNA, 19 nt, Artificial Sequence
  Description of Artificial Sequence: Synthetic oligonucleotide
  Sense strand starting at position 3324 of SEQ ID NO: 1882451
ggugguauacaguagguaa

SEQ ID NO: 2122211 - RNA, 19 nt, Artificial Sequence
  Description of Artificial Sequence: Synthetic oligonucleotide
  Antisense strand to SEQ ID NO: 2122210
uuaccuacuguauaccacc

SEQ ID NO: 2122212 - RNA, 19 nt, Artificial Sequence
  Description of Artificial Sequence: Synthetic oligonucleotide
  Sense strand starting at position 3362 of SEQ ID NO: 1882451
cagagcaaauguuugagaa

SEQ ID NO: 2122213 - RNA, 19 nt, Artificial Sequence
  Description of Artificial Sequence: Synthetic oligonucleotide
  Antisense strand to SEQ ID NO: 2122212
uucucaaacauuugcucug

SEQ ID NO: 2122214 - RNA, 19 nt, Artificial Sequence
  Description of Artificial Sequence: Synthetic oligonucleotide
  Sense strand starting at position 3363 of SEQ ID NO: 1882451
agagcaaauguuugagaaa

SEQ ID NO: 2122215 - RNA, 19 nt, Artificial Sequence
  Description of Artificial Sequence: Synthetic oligonucleotide
  Antisense strand to SEQ ID NO: 2122214
uuucucaaacauuugcucu

SEQ ID NO: 2122216 - RNA, 19 nt, Artificial Sequence
  Description of Artificial Sequence: Synthetic oligonucleotide
  Sense strand starting at position 3396 of SEQ ID NO: 1882451
aagagaagaugagaauaaa

SEQ ID NO: 2122217 - RNA, 19 nt, Artificial Sequence
  Description of Artificial Sequence: Synthetic oligonucleotide
  Antisense strand to SEQ ID NO: 2122216
uuuauucucaucuucucuu

SEQ ID NO: 2122218 - RNA, 19 nt, Artificial Sequence
  Description of Artificial Sequence: Synthetic oligonucleotide
  Sense strand starting at position 3486 of SEQ ID NO: 1882451
auuagaauucuugaucugu

SEQ ID NO: 2122219 - RNA, 19 nt, Artificial Sequence
  Description of Artificial Sequence: Synthetic oligonucleotide
  Antisense strand to SEQ ID NO: 2122218
acagaucaagaauucuaau

SEQ ID NO: 2122220 - RNA, 19 nt, Artificial Sequence
  Description of Artificial Sequence: Synthetic oligonucleotide
  Sense strand starting at position 3774 of SEQ ID NO: 1882451
cuugucagguauuuagcaa

SEQ ID NO: 2122221 - RNA, 19 nt, Artificial Sequence
  Description of Artificial Sequence: Synthetic oligonucleotide
  Antisense strand to SEQ ID NO: 2122220
uugcuaaauaccugacaag

SEQ ID NO: 2122222 - RNA, 19 nt, Artificial Sequence
  Description of Artificial Sequence: Synthetic oligonucleotide
  Sense strand starting at position 3934 of SEQ ID NO: 1882451
augagaaaguccuugaagu

SEQ ID NO: 2122223 - RNA, 19 nt, Artificial Sequence
  Description of Artificial Sequence: Synthetic oligonucleotide
  Antisense strand to SEQ ID NO: 2122222
acuucaaggacuuucucau

SEQ ID NO: 2122224 - RNA, 19 nt, Artificial Sequence
  Description of Artificial Sequence: Synthetic oligonucleotide
  Sense strand starting at position 3935 of SEQ ID NO: 1882451
ugagaaaguccuugaaguu

SEQ ID NO: 2122225 - RNA, 19 nt, Artificial Sequence
  Description of Artificial Sequence: Synthetic oligonucleotide
  Antisense strand to SEQ ID NO: 2122224
aacuucaaggacuuucuca

SEQ ID NO: 2122226 - RNA, 19 nt, Artificial Sequence
  Description of Artificial Sequence: Synthetic oligonucleotide
  Sense strand starting at position 221 of SEQ ID NO: 1882452
agcuguuagcuuccucagu

SEQ ID NO: 2122227 - RNA, 19 nt, Artificial Sequence
  Description of Artificial Sequence: Synthetic oligonucleotide
  Antisense strand to SEQ ID NO: 2122226
acugaggaagcuaacagcu

SEQ ID NO: 2122228 - RNA, 19 nt, Artificial Sequence
  Description of Artificial Sequence: Synthetic oligonucleotide
  Sense strand starting at position 414 of SEQ ID NO: 1882452
auuugucuggccuguauca

SEQ ID NO: 2122229 - RNA, 19 nt, Artificial Sequence
  Description of Artificial Sequence: Synthetic oligonucleotide
  Antisense strand to SEQ ID NO: 2122228
ugauacaggccagacaaau

SEQ ID NO: 2122230 - RNA, 19 nt, Artificial Sequence
  Description of Artificial Sequence: Synthetic oligonucleotide
  Sense strand starting at position 530 of SEQ ID NO: 1882452
ucuguuuaucgagaacuca

SEQ ID NO: 2122231 - RNA, 19 nt, Artificial Sequence
  Description of Artificial Sequence: Synthetic oligonucleotide
  Antisense strand to SEQ ID NO: 2122230
ugaguucucgauaaacaga

SEQ ID NO: 2122232 - RNA, 19 nt, Artificial Sequence
  Description of Artificial Sequence: Synthetic oligonucleotide
  Sense strand starting at position 636 of SEQ ID NO: 1882452
acaaaucuauguguauuga

SEQ ID NO: 2122233 - RNA, 19 nt, Artificial Sequence
  Description of Artificial Sequence: Synthetic oligonucleotide
  Antisense strand to SEQ ID NO: 2122232
ucaauacacauagauuugu

SEQ ID NO: 2122234 - RNA, 19 nt, Artificial Sequence
  Description of Artificial Sequence: Synthetic oligonucleotide
  Sense strand starting at position 730 of SEQ ID NO: 1882452
gcuugaauuccguagagaa

SEQ ID NO: 2122235 - RNA, 19 nt, Artificial Sequence
  Description of Artificial Sequence: Synthetic oligonucleotide
  Antisense strand to SEQ ID NO: 2122234
uucucuacggaauucaagc

SEQ ID NO: 2122236 - RNA, 19 nt, Artificial Sequence
  Description of Artificial Sequence: Synthetic oligonucleotide
  Sense strand starting at position 865 of SEQ ID NO: 1882452
auagguguuacuugaucag

SEQ ID NO: 2122237 - RNA, 19 nt, Artificial Sequence
  Description of Artificial Sequence: Synthetic oligonucleotide
  Antisense strand to SEQ ID NO: 2122236
cugaucaaguaacaccuau

SEQ ID NO: 2122238 - RNA, 19 nt, Artificial Sequence
  Description of Artificial Sequence: Synthetic oligonucleotide
  Sense strand starting at position 868 of SEQ ID NO: 1882452
gguguuacuugaucagaga

SEQ ID NO: 2122239 - RNA, 19 nt, Artificial Sequence
  Description of Artificial Sequence: Synthetic oligonucleotide
  Antisense strand to SEQ ID NO: 2122238
ucucugaucaaguaacacc

SEQ ID NO: 2122240 - RNA, 19 nt, Artificial Sequence
  Description of Artificial Sequence: Synthetic oligonucleotide
  Sense strand starting at position 869 of SEQ ID NO: 1882452
guguuacuugaucagagac

SEQ ID NO: 2122241 - RNA, 19 nt, Artificial Sequence
  Description of Artificial Sequence: Synthetic oligonucleotide
  Antisense strand to SEQ ID NO: 2122240
gucucugaucaaguaacac

SEQ ID NO: 2122242 - RNA, 19 nt, Artificial Sequence
  Description of Artificial Sequence: Synthetic oligonucleotide
  Sense strand starting at position 908 of SEQ ID NO: 1882452
ugagaaagguaguuaucag

SEQ ID NO: 2122243 - RNA, 19 nt, Artificial Sequence
  Description of Artificial Sequence: Synthetic oligonucleotide
  Antisense strand to SEQ ID NO: 2122242
cugauaacuaccuuucuca

SEQ ID NO: 2122244 - RNA, 19 nt, Artificial Sequence
  Description of Artificial Sequence: Synthetic oligonucleotide
  Sense strand starting at position 945 of SEQ ID NO: 1882452
gugcaaaggccuuaagaca

SEQ ID NO: 2122245 - RNA, 19 nt, Artificial Sequence
  Description of Artificial Sequence: Synthetic oligonucleotide
  Antisense strand to SEQ ID NO: 2122244
ugucuuaaggccuuugcac

SEQ ID NO: 2122246 - RNA, 19 nt, Artificial Sequence
  Description of Artificial Sequence: Synthetic oligonucleotide
  Sense strand starting at position 994 of SEQ ID NO: 1882452
ccagaaagccuugaggcua

SEQ ID NO: 2122247 - RNA, 19 nt, Artificial Sequence
  Description of Artificial Sequence: Synthetic oligonucleotide
  Antisense strand to SEQ ID NO: 2122246
uagccucaaggcuuucugg

SEQ ID NO: 2122248 - RNA, 19 nt, Artificial Sequence
  Description of Artificial Sequence: Synthetic oligonucleotide
  Sense strand starting at position 1077 of SEQ ID NO: 1882452
uuccuaggguagguaaauu

SEQ ID NO: 2122249 - RNA, 19 nt, Artificial Sequence
  Description of Artificial Sequence: Synthetic oligonucleotide
  Antisense strand to SEQ ID NO: 2122248
aauuuaccuacccuaggaa

SEQ ID NO: 2122250 - RNA, 19 nt, Artificial Sequence
  Description of Artificial Sequence: Synthetic oligonucleotide
  Sense strand starting at position 1088 of SEQ ID NO: 1882452
gguaaauuaauguggacaa

SEQ ID NO: 2122251 - RNA, 19 nt, Artificial Sequence
  Description of Artificial Sequence: Synthetic oligonucleotide
  Antisense strand to SEQ ID NO: 2122250
uuguccacauuaauuuacc

SEQ ID NO: 2122252 - RNA, 19 nt, Artificial Sequence
  Description of Artificial Sequence: Synthetic oligonucleotide
  Sense strand starting at position 1191 of SEQ ID NO: 1882452
cuacuacaagagugcauua

SEQ ID NO: 2122253 - RNA, 19 nt, Artificial Sequence
  Description of Artificial Sequence: Synthetic oligonucleotide
  Antisense strand to SEQ ID NO: 2122252
uaaugcacucuuguaguag

SEQ ID NO: 2122254 - RNA, 19 nt, Artificial Sequence
  Description of Artificial Sequence: Synthetic oligonucleotide
  Sense strand starting at position 1193 of SEQ ID NO: 1882452
acuacaagagugcauuaau

SEQ ID NO: 2122255 - RNA, 19 nt, Artificial Sequence
  Description of Artificial Sequence: Synthetic oligonucleotide
  Antisense strand to SEQ ID NO: 2122254
auuaaugcacucuuguagu

SEQ ID NO: 2122256 - RNA, 19 nt, Artificial Sequence
  Description of Artificial Sequence: Synthetic oligonucleotide
  Sense strand starting at position 1309 of SEQ ID NO: 1882452
gcaaaugagucacuagacu

SEQ ID NO: 2122257 - RNA, 19 nt, Artificial Sequence
  Description of Artificial Sequence: Synthetic oligonucleotide
  Antisense strand to SEQ ID NO: 2122256
agucuagugacucauuugc

SEQ ID NO: 2122258 - RNA, 19 nt, Artificial Sequence
  Description of Artificial Sequence: Synthetic oligonucleotide
  Sense strand starting at position 1329 of SEQ ID NO: 1882452
ucaucaccuggguaaaguu

SEQ ID NO: 2122259 - RNA, 19 nt, Artificial Sequence
  Description of Artificial Sequence: Synthetic oligonucleotide
  Antisense strand to SEQ ID NO: 2122258
aacuuuacccaggugauga

SEQ ID NO: 2122260 - RNA, 19 nt, Artificial Sequence
  Description of Artificial Sequence: Synthetic oligonucleotide
  Sense strand starting at position 1337 of SEQ ID NO: 1882452
uggguaaaguuacucuuaa

SEQ ID NO: 2122261 - RNA, 19 nt, Artificial Sequence
  Description of Artificial Sequence: Synthetic oligonucleotide
  Antisense strand to SEQ ID NO: 2122260
uuaagaguaacuuuaccca

SEQ ID NO: 2122262 - RNA, 19 nt, Artificial Sequence
  Description of Artificial Sequence: Synthetic oligonucleotide
  Sense strand starting at position 1338 of SEQ ID NO: 1882452
ggguaaaguuacucuuaag

SEQ ID NO: 2122263 - RNA, 19 nt, Artificial Sequence
  Description of Artificial Sequence: Synthetic oligonucleotide
  Antisense strand to SEQ ID NO: 2122262
cuuaagaguaacuuuaccc

SEQ ID NO: 2122264 - RNA, 19 nt, Artificial Sequence
  Description of Artificial Sequence: Synthetic oligonucleotide
  Sense strand starting at position 1460 of SEQ ID NO: 1882452
gcuguuugacaacacuauu

SEQ ID NO: 2122265 - RNA, 19 nt, Artificial Sequence
  Description of Artificial Sequence: Synthetic oligonucleotide
  Antisense strand to SEQ ID NO: 2122264
aauaguguugucaaacagc

SEQ ID NO: 2122266 - RNA, 19 nt, Artificial Sequence
  Description of Artificial Sequence: Synthetic oligonucleotide
  Sense strand starting at position 1886 of SEQ ID NO: 1882452
cggaguauccuacaacaac

SEQ ID NO: 2122267 - RNA, 19 nt, Artificial Sequence
  Description of Artificial Sequence: Synthetic oligonucleotide
  Antisense strand to SEQ ID NO: 2122266
guuguuguaggauacuccg

SEQ ID NO: 2122268 - RNA, 19 nt, Artificial Sequence
  Description of Artificial Sequence: Synthetic oligonucleotide
  Sense strand starting at position 1929 of SEQ ID NO: 1882452
uggguuaauuuagaaacau

SEQ ID NO: 2122269 - RNA, 19 nt, Artificial Sequence
  Description of Artificial Sequence: Synthetic oligonucleotide
  Antisense strand to SEQ ID NO: 2122268
auguuucuaaauuaaccca

SEQ ID NO: 2122270 - RNA, 19 nt, Artificial Sequence
  Description of Artificial Sequence: Synthetic oligonucleotide
  Sense strand starting at position 2046 of SEQ ID NO: 1882452
ucucuaagacaguguagaa

SEQ ID NO: 2122271 - RNA, 19 nt, Artificial Sequence
  Description of Artificial Sequence: Synthetic oligonucleotide
  Antisense strand to SEQ ID NO: 2122270
uucuacacugucuuagaga

SEQ ID NO: 2122272 - RNA, 19 nt, Artificial Sequence
  Description of Artificial Sequence: Synthetic oligonucleotide
  Sense strand starting at position 2573 of SEQ ID NO: 1882452
gaagauaugucauugguua

SEQ ID NO: 2122273 - RNA, 19 nt, Artificial Sequence
  Description of Artificial Sequence: Synthetic oligonucleotide
  Antisense strand to SEQ ID NO: 2122272
uaaccaaugacauaucuuc

SEQ ID NO: 2122274 - RNA, 19 nt, Artificial Sequence
  Description of Artificial Sequence: Synthetic oligonucleotide
  Sense strand starting at position 2574 of SEQ ID NO: 1882452
aagauaugucauugguuag

SEQ ID NO: 2122275 - RNA, 19 nt, Artificial Sequence
  Description of Artificial Sequence: Synthetic oligonucleotide
  Antisense strand to SEQ ID NO: 2122274
cuaaccaaugacauaucuu

SEQ ID NO: 2122276 - RNA, 19 nt, Artificial Sequence
  Description of Artificial Sequence: Synthetic oligonucleotide
  Sense strand starting at position 2654 of SEQ ID NO: 1882452
ggguauaacuaaccucuga

SEQ ID NO: 2122277 - RNA, 19 nt, Artificial Sequence
  Description of Artificial Sequence: Synthetic oligonucleotide
  Antisense strand to SEQ ID NO: 2122276
ucagagguuaguuauaccc

SEQ ID NO: 2122278 - RNA, 19 nt, Artificial Sequence
  Description of Artificial Sequence: Synthetic oligonucleotide
  Sense strand starting at position 3275 of SEQ ID NO: 1882452
auauuagagcuguaaacac

SEQ ID NO: 2122279 - RNA, 19 nt, Artificial Sequence
  Description of Artificial Sequence: Synthetic oligonucleotide
  Antisense strand to SEQ ID NO: 2122278
guguuuacagcucuaauau

SEQ ID NO: 2122280 - RNA, 19 nt, Artificial Sequence
  Description of Artificial Sequence: Synthetic oligonucleotide
  Sense strand starting at position 3336 of SEQ ID NO: 1882452
ggauuaucaugaucuuauc

SEQ ID NO: 2122281 - RNA, 19 nt, Artificial Sequence
  Description of Artificial Sequence: Synthetic oligonucleotide
  Antisense strand to SEQ ID NO: 2122280
gauaagaucaugauaaucc

SEQ ID NO: 2122282 - RNA, 19 nt, Artificial Sequence
  Description of Artificial Sequence: Synthetic oligonucleotide
  Sense strand starting at position 3418 of SEQ ID NO: 1882452
guuaguacugagugaggaa

SEQ ID NO: 2122283 - RNA, 19 nt, Artificial Sequence
  Description of Artificial Sequence: Synthetic oligonucleotide
  Antisense strand to SEQ ID NO: 2122282
uuccucacucaguacuaac

SEQ ID NO: 2122284 - RNA, 19 nt, Artificial Sequence
  Description of Artificial Sequence: Synthetic oligonucleotide
  Sense strand starting at position 3454 of SEQ ID NO: 1882452
uagggaugugcaggaaacu

SEQ ID NO: 2122285 - RNA, 19 nt, Artificial Sequence
  Description of Artificial Sequence: Synthetic oligonucleotide
  Antisense strand to SEQ ID NO: 2122284
aguuuccugcacaucccua

SEQ ID NO: 2122286 - RNA, 19 nt, Artificial Sequence
  Description of Artificial Sequence: Synthetic oligonucleotide
  Sense strand starting at position 3464 of SEQ ID NO: 1882452
caggaaacuuguguuaaca

SEQ ID NO: 2122287 - RNA, 19 nt, Artificial Sequence
  Description of Artificial Sequence: Synthetic oligonucleotide
  Antisense strand to SEQ ID NO: 2122286
uguuaacacaaguuuccug

SEQ ID NO: 2122288 - RNA, 19 nt, Artificial Sequence
  Description of Artificial Sequence: Synthetic oligonucleotide
  Sense strand starting at position 3581 of SEQ ID NO: 1882452
uguacuuuccaccauguaa

SEQ ID NO: 2122289 - RNA, 19 nt, Artificial Sequence
  Description of Artificial Sequence: Synthetic oligonucleotide
  Antisense strand to SEQ ID NO: 2122288
uuacaugguggaaaguaca

SEQ ID NO: 2122290 - RNA, 19 nt, Artificial Sequence
  Description of Artificial Sequence: Synthetic oligonucleotide
  Sense strand starting at position 3600 of SEQ ID NO: 1882452
uggcguucuaacgugaguu

SEQ ID NO: 2122291 - RNA, 19 nt, Artificial Sequence
  Description of Artificial Sequence: Synthetic oligonucleotide
  Antisense strand to SEQ ID NO: 2122290
aacucacguuagaacgcca

SEQ ID NO: 2122292 - RNA, 19 nt, Artificial Sequence
  Description of Artificial Sequence: Synthetic oligonucleotide
  Sense strand starting at position 3643 of SEQ ID NO: 1882452
gauggcguuccaguacgua

SEQ ID NO: 2122293 - RNA, 19 nt, Artificial Sequence
  Description of Artificial Sequence: Synthetic oligonucleotide
  Antisense strand to SEQ ID NO: 2122292
uacguacuggaacgccauc

SEQ ID NO: 2122294 - RNA, 19 nt, Artificial Sequence
  Description of Artificial Sequence: Synthetic oligonucleotide
  Sense strand starting at position 3672 of SEQ ID NO: 1882452
ucgagcaguuaccuuauuu

SEQ ID NO: 2122295 - RNA, 19 nt, Artificial Sequence
  Description of Artificial Sequence: Synthetic oligonucleotide
  Antisense strand to SEQ ID NO: 2122294
aaauaagguaacugcucga

SEQ ID NO: 2122296 - RNA, 19 nt, Artificial Sequence
  Description of Artificial Sequence: Synthetic oligonucleotide
  Sense strand starting at position 3860 of SEQ ID NO: 1882452
ugaaaucaucacggagauu

SEQ ID NO: 2122297 - RNA, 19 nt, Artificial Sequence
  Description of Artificial Sequence: Synthetic oligonucleotide
  Antisense strand to SEQ ID NO: 2122296
aaucuccgugaugauuuca

SEQ ID NO: 2122298 - RNA, 19 nt, Artificial Sequence
  Description of Artificial Sequence: Synthetic oligonucleotide
  Sense strand starting at position 3879 of SEQ ID NO: 1882452
uuuggaauaguuuacuagu

SEQ ID NO: 2122299 - RNA, 19 nt, Artificial Sequence
  Description of Artificial Sequence: Synthetic oligonucleotide
  Antisense strand to SEQ ID NO: 2122298
acuaguaaacuauuccaaa

SEQ ID NO: 2122300 - RNA, 19 nt, Artificial Sequence
  Description of Artificial Sequence: Synthetic oligonucleotide
  Sense strand starting at position 3881 of SEQ ID NO: 1882452
uggaauaguuuacuaguuu

SEQ ID NO: 2122301 - RNA, 19 nt, Artificial Sequence
  Description of Artificial Sequence: Synthetic oligonucleotide
  Antisense strand to SEQ ID NO: 2122300
aaacuaguaaacuauucca

SEQ ID NO: 2122302 - RNA, 19 nt, Artificial Sequence
  Description of Artificial Sequence: Synthetic oligonucleotide
  Sense strand starting at position 3905 of SEQ ID NO: 1882452
gcauguucagcgucaauug

SEQ ID NO: 2122303 - RNA, 19 nt, Artificial Sequence
  Description of Artificial Sequence: Synthetic oligonucleotide
  Antisense strand to SEQ ID NO: 2122302
caauugacgcugaacaugc

SEQ ID NO: 2122304 - RNA, 19 nt, Artificial Sequence
  Description of Artificial Sequence: Synthetic oligonucleotide
  Sense strand starting at position 3915 of SEQ ID NO: 1882452
cgucaauugguccaaucag

SEQ ID NO: 2122305 - RNA, 19 nt, Artificial Sequence
  Description of Artificial Sequence: Synthetic oligonucleotide
  Antisense strand to SEQ ID NO: 2122304
cugauuggaccaauugacg

SEQ ID NO: 2122306 - RNA, 19 nt, Artificial Sequence
  Description of Artificial Sequence: Synthetic oligonucleotide
  Sense strand starting at position 26 of SEQ ID NO: 1882453
gauuccgucuugguaggau

SEQ ID NO: 2122307 - RNA, 19 nt, Artificial Sequence
  Description of Artificial Sequence: Synthetic oligonucleotide
  Antisense strand to SEQ ID NO: 2122306
auccuaccaagacggaauc

SEQ ID NO: 2122308 - RNA, 19 nt, Artificial Sequence
  Description of Artificial Sequence: Synthetic oligonucleotide
  Sense strand starting at position 29 of SEQ ID NO: 1882453
uccgucuugguaggauauu

SEQ ID NO: 2122309 - RNA, 19 nt, Artificial Sequence
  Description of Artificial Sequence: Synthetic oligonucleotide
  Antisense strand to SEQ ID NO: 2122308
aauauccuaccaagacgga

SEQ ID NO: 2122310 - RNA, 19 nt, Artificial Sequence
  Description of Artificial Sequence: Synthetic oligonucleotide
  Sense strand starting at position 65 of SEQ ID NO: 1882453
acauuacuucuagguuaua

SEQ ID NO: 2122311 - RNA, 19 nt, Artificial Sequence
  Description of Artificial Sequence: Synthetic oligonucleotide
  Antisense strand to SEQ ID NO: 2122310
uauaaccuagaaguaaugu

SEQ ID NO: 2122312 - RNA, 19 nt, Artificial Sequence
  Description of Artificial Sequence: Synthetic oligonucleotide
  Sense strand starting at position 146 of SEQ ID NO: 1882453
auuguaaugucuccaccuu

SEQ ID NO: 2122313 - RNA, 19 nt, Artificial Sequence
  Description of Artificial Sequence: Synthetic oligonucleotide
  Antisense strand to SEQ ID NO: 2122312
aagguggagacauuacaau

SEQ ID NO: 2122314 - RNA, 19 nt, Artificial Sequence
  Description of Artificial Sequence: Synthetic oligonucleotide
  Sense strand starting at position 893 of SEQ ID NO: 1882453
uucuaacugguaugagauc

SEQ ID NO: 2122315 - RNA, 19 nt, Artificial Sequence
  Description of Artificial Sequence: Synthetic oligonucleotide
  Antisense strand to SEQ ID NO: 2122314
gaucucauaccaguuagaa

SEQ ID NO: 2122316 - RNA, 19 nt, Artificial Sequence
  Description of Artificial Sequence: Synthetic oligonucleotide
  Sense strand starting at position 1261 of SEQ ID NO: 1882453
gaaguccuugcccauaagu

SEQ ID NO: 2122317 - RNA, 19 nt, Artificial Sequence
  Description of Artificial Sequence: Synthetic oligonucleotide
  Antisense strand to SEQ ID NO: 2122316
acuuaugggcaaggacuuc

SEQ ID NO: 2122318 - RNA, 19 nt, Artificial Sequence
  Description of Artificial Sequence: Synthetic oligonucleotide
  Sense strand starting at position 1263 of SEQ ID NO: 1882453
aguccuugcccauaaguuu

SEQ ID NO: 2122319 - RNA, 19 nt, Artificial Sequence
  Description of Artificial Sequence: Synthetic oligonucleotide
  Antisense strand to SEQ ID NO: 2122318
aaacuuaugggcaaggacu

SEQ ID NO: 2122320 - RNA, 19 nt, Artificial Sequence
  Description of Artificial Sequence: Synthetic oligonucleotide
  Sense strand starting at position 1420 of SEQ ID NO: 1882453
uacugacuuuggucuuagu

SEQ ID NO: 2122321 - RNA, 19 nt, Artificial Sequence
  Description of Artificial Sequence: Synthetic oligonucleotide
  Antisense strand to SEQ ID NO: 2122320
acuaagaccaaagucagua

SEQ ID NO: 2122322 - RNA, 19 nt, Artificial Sequence
  Description of Artificial Sequence: Synthetic oligonucleotide
  Sense strand starting at position 1707 of SEQ ID NO: 1882453
guaucauaccauugagguc

SEQ ID NO: 2122323 - RNA, 19 nt, Artificial Sequence
  Description of Artificial Sequence: Synthetic oligonucleotide
  Antisense strand to SEQ ID NO: 2122322
gaccucaaugguaugauac

SEQ ID NO: 2122324 - RNA, 19 nt, Artificial Sequence
  Description of Artificial Sequence: Synthetic oligonucleotide
  Sense strand starting at position 1838 of SEQ ID NO: 1882453
ucugcuaauguuggaugaa

SEQ ID NO: 2122325 - RNA, 19 nt, Artificial Sequence
  Description of Artificial Sequence: Synthetic oligonucleotide
  Antisense strand to SEQ ID NO: 2122324
uucauccaacauuagcaga

SEQ ID NO: 2122326 - RNA, 19 nt, Artificial Sequence
  Description of Artificial Sequence: Synthetic oligonucleotide
  Sense strand starting at position 1841 of SEQ ID NO: 1882453
gcuaauguuggaugaaaug

SEQ ID NO: 2122327 - RNA, 19 nt, Artificial Sequence
  Description of Artificial Sequence: Synthetic oligonucleotide
  Antisense strand to SEQ ID NO: 2122326
cauuucauccaacauuagc

SEQ ID NO: 2122328 - RNA, 19 nt, Artificial Sequence
  Description of Artificial Sequence: Synthetic oligonucleotide
  Sense strand starting at position 1859 of SEQ ID NO: 1882453
guucuauauccauaaguua

SEQ ID NO: 2122329 - RNA, 19 nt, Artificial Sequence
  Description of Artificial Sequence: Synthetic oligonucleotide
  Antisense strand to SEQ ID NO: 2122328
uaacuuauggauauagaac

SEQ ID NO: 2122330 - RNA, 19 nt, Artificial Sequence
  Description of Artificial Sequence: Synthetic oligonucleotide
  Sense strand starting at position 1873 of SEQ ID NO: 1882453
aguuauauaugucuccauu

SEQ ID NO: 2122331 - RNA, 19 nt, Artificial Sequence
  Description of Artificial Sequence: Synthetic oligonucleotide
  Antisense strand to SEQ ID NO: 2122330
aauggagacauauauaacu

SEQ ID NO: 2122332 - RNA, 19 nt, Artificial Sequence
  Description of Artificial Sequence: Synthetic oligonucleotide
  Sense strand starting at position 1875 of SEQ ID NO: 1882453
uuauauaugucuccauuga

SEQ ID NO: 2122333 - RNA, 19 nt, Artificial Sequence
  Description of Artificial Sequence: Synthetic oligonucleotide
  Antisense strand to SEQ ID NO: 2122332
ucaauggagacauauauaa

SEQ ID NO: 2122334 - RNA, 19 nt, Artificial Sequence
  Description of Artificial Sequence: Synthetic oligonucleotide
  Sense strand starting at position 1879 of SEQ ID NO: 1882453
auaugucuccauugauaug

SEQ ID NO: 2122335 - RNA, 19 nt, Artificial Sequence
  Description of Artificial Sequence: Synthetic oligonucleotide
  Antisense strand to SEQ ID NO: 2122334
cauaucaauggagacauau

SEQ ID NO: 2122336 - RNA, 19 nt, Artificial Sequence
  Description of Artificial Sequence: Synthetic oligonucleotide
  Sense strand starting at position 1885 of SEQ ID NO: 1882453
cuccauugauauguauaua

SEQ ID NO: 2122337 - RNA, 19 nt, Artificial Sequence
  Description of Artificial Sequence: Synthetic oligonucleotide
  Antisense strand to SEQ ID NO: 2122336
uauauacauaucaauggag

SEQ ID NO: 2122338 - RNA, 19 nt, Artificial Sequence
  Description of Artificial Sequence: Synthetic oligonucleotide
  Sense strand starting at position 2062 of SEQ ID NO: 1882453
uagugaaguuuccuuguau

SEQ ID NO: 2122339 - RNA, 19 nt, Artificial Sequence
  Description of Artificial Sequence: Synthetic oligonucleotide
  Antisense strand to SEQ ID NO: 2122338
auacaaggaaacuucacua

SEQ ID NO: 2122340 - RNA, 19 nt, Artificial Sequence
  Description of Artificial Sequence: Synthetic oligonucleotide
  Sense strand starting at position 2063 of SEQ ID NO: 1882453
agugaaguuuccuuguauu

SEQ ID NO: 2122341 - RNA, 19 nt, Artificial Sequence
  Description of Artificial Sequence: Synthetic oligonucleotide
  Antisense strand to SEQ ID NO: 2122340
aauacaaggaaacuucacu

SEQ ID NO: 2122342 - RNA, 19 nt, Artificial Sequence
  Description of Artificial Sequence: Synthetic oligonucleotide
  Sense strand starting at position 2126 of SEQ ID NO: 1882453
cugugauguugaguacauu

SEQ ID NO: 2122343 - RNA, 19 nt, Artificial Sequence
  Description of Artificial Sequence: Synthetic oligonucleotide
  Antisense strand to SEQ ID NO: 2122342
aauguacucaacaucacag

SEQ ID NO: 2122344 - RNA, 19 nt, Artificial Sequence
  Description of Artificial Sequence: Synthetic oligonucleotide
  Sense strand starting at position 2135 of SEQ ID NO: 1882453
ugaguacauuuguauuuag

SEQ ID NO: 2122345 - RNA, 19 nt, Artificial Sequence
  Description of Artificial Sequence: Synthetic oligonucleotide
  Antisense strand to SEQ ID NO: 2122344
cuaaauacaaauguacuca

SEQ ID NO: 2122346 - RNA, 19 nt, Artificial Sequence
  Description of Artificial Sequence: Synthetic oligonucleotide
  Sense strand starting at position 2159 of SEQ ID NO: 1882453
uuauguccucuugauaagu

SEQ ID NO: 2122347 - RNA, 19 nt, Artificial Sequence
  Description of Artificial Sequence: Synthetic oligonucleotide
  Antisense strand to SEQ ID NO: 2122346
acuuaucaagaggacauaa

SEQ ID NO: 2122348 - RNA, 19 nt, Artificial Sequence
  Description of Artificial Sequence: Synthetic oligonucleotide
  Sense strand starting at position 2169 of SEQ ID NO: 1882453
uugauaaguugaccucauu

SEQ ID NO: 2122349 - RNA, 19 nt, Artificial Sequence
  Description of Artificial Sequence: Synthetic oligonucleotide
  Antisense strand to SEQ ID NO: 2122348
aaugaggucaacuuaucaa

SEQ ID NO: 2122350 - RNA, 19 nt, Artificial Sequence
  Description of Artificial Sequence: Synthetic oligonucleotide
  Sense strand starting at position 2221 of SEQ ID NO: 1882453
uuugauguagucuaccuua

SEQ ID NO: 2122351 - RNA, 19 nt, Artificial Sequence
  Description of Artificial Sequence: Synthetic oligonucleotide
  Antisense strand to SEQ ID NO: 2122350
uaagguagacuacaucaaa

SEQ ID NO: 2122352 - RNA, 19 nt, Artificial Sequence
  Description of Artificial Sequence: Synthetic oligonucleotide
  Sense strand starting at position 2229 of SEQ ID NO: 1882453
agucuaccuuaucuaguau

SEQ ID NO: 2122353 - RNA, 19 nt, Artificial Sequence
  Description of Artificial Sequence: Synthetic oligonucleotide
  Antisense strand to SEQ ID NO: 2122352
auacuagauaagguagacu

SEQ ID NO: 2122354 - RNA, 19 nt, Artificial Sequence
  Description of Artificial Sequence: Synthetic oligonucleotide
  Sense strand starting at position 2349 of SEQ ID NO: 1882453
guaguauagaguugggacu

SEQ ID NO: 2122355 - RNA, 19 nt, Artificial Sequence
  Description of Artificial Sequence: Synthetic oligonucleotide
  Antisense strand to SEQ ID NO: 2122354
agucccaacucuauacuac

SEQ ID NO: 2122356 - RNA, 19 nt, Artificial Sequence
  Description of Artificial Sequence: Synthetic oligonucleotide
  Sense strand starting at position 2474 of SEQ ID NO: 1882453
auagauccuucguuacuuu

SEQ ID NO: 2122357 - RNA, 19 nt, Artificial Sequence
  Description of Artificial Sequence: Synthetic oligonucleotide
  Antisense strand to SEQ ID NO: 2122356
aaaguaacgaaggaucuau

SEQ ID NO: 2122358 - RNA, 19 nt, Artificial Sequence
  Description of Artificial Sequence: Synthetic oligonucleotide
  Sense strand starting at position 2565 of SEQ ID NO: 1882453
gcguauuuacuauaggcuu

SEQ ID NO: 2122359 - RNA, 19 nt, Artificial Sequence
  Description of Artificial Sequence: Synthetic oligonucleotide
  Antisense strand to SEQ ID NO: 2122358
aagccuauaguaaauacgc

SEQ ID NO: 2122360 - RNA, 19 nt, Artificial Sequence
  Description of Artificial Sequence: Synthetic oligonucleotide
  Sense strand starting at position 2590 of SEQ ID NO: 1882453
ugugguuagcaugauguuu

SEQ ID NO: 2122361 - RNA, 19 nt, Artificial Sequence
  Description of Artificial Sequence: Synthetic oligonucleotide
  Antisense strand to SEQ ID NO: 2122360
aaacaucaugcuaaccaca

SEQ ID NO: 2122362 - RNA, 19 nt, Artificial Sequence
  Description of Artificial Sequence: Synthetic oligonucleotide
  Sense strand starting at position 2595 of SEQ ID NO: 1882453
uuagcaugauguuuacaua

SEQ ID NO: 2122363 - RNA, 19 nt, Artificial Sequence
  Description of Artificial Sequence: Synthetic oligonucleotide
  Antisense strand to SEQ ID NO: 2122362
uauguaaacaucaugcuaa

SEQ ID NO: 2122364 - RNA, 19 nt, Artificial Sequence
  Description of Artificial Sequence: Synthetic oligonucleotide
  Sense strand starting at position 2647 of SEQ ID NO: 1882453
uugauaacuugacuuugau

SEQ ID NO: 2122365 - RNA, 19 nt, Artificial Sequence
  Description of Artificial Sequence: Synthetic oligonucleotide
  Antisense strand to SEQ ID NO: 2122364
aucaaagucaaguuaucaa

SEQ ID NO: 2122366 - RNA, 19 nt, Artificial Sequence
  Description of Artificial Sequence: Synthetic oligonucleotide
  Sense strand starting at position 2653 of SEQ ID NO: 1882453
acuugacuuugauugcauu

SEQ ID NO: 2122367 - RNA, 19 nt, Artificial Sequence
  Description of Artificial Sequence: Synthetic oligonucleotide
  Antisense strand to SEQ ID NO: 2122366
aaugcaaucaaagucaagu

SEQ ID NO: 2122368 - RNA, 19 nt, Artificial Sequence
  Description of Artificial Sequence: Synthetic oligonucleotide
  Sense strand starting at position 2654 of SEQ ID NO: 1882453
cuugacuuugauugcauua

SEQ ID NO: 2122369 - RNA, 19 nt, Artificial Sequence
  Description of Artificial Sequence: Synthetic oligonucleotide
  Antisense strand to SEQ ID NO: 2122368
uaaugcaaucaaagucaag

SEQ ID NO: 2122370 - RNA, 19 nt, Artificial Sequence
  Description of Artificial Sequence: Synthetic oligonucleotide
  Sense strand starting at position 2688 of SEQ ID NO: 1882453
acaucuuauguuugacauc

SEQ ID NO: 2122371 - RNA, 19 nt, Artificial Sequence
  Description of Artificial Sequence: Synthetic oligonucleotide
  Antisense strand to SEQ ID NO: 2122370
gaugucaaacauaagaugu

SEQ ID NO: 2122372 - RNA, 19 nt, Artificial Sequence
  Description of Artificial Sequence: Synthetic oligonucleotide
  Sense strand starting at position 2723 of SEQ ID NO: 1882453
ucuauuguguaucccuuaa

SEQ ID NO: 2122373 - RNA, 19 nt, Artificial Sequence
  Description of Artificial Sequence: Synthetic oligonucleotide
  Antisense strand to SEQ ID NO: 2122372
uuaagggauacacaauaga

SEQ ID NO: 2122374 - RNA, 19 nt, Artificial Sequence
  Description of Artificial Sequence: Synthetic oligonucleotide
  Sense strand starting at position 2941 of SEQ ID NO: 1882453
guacaacugaucugauggu

SEQ ID NO: 2122375 - RNA, 19 nt, Artificial Sequence
  Description of Artificial Sequence: Synthetic oligonucleotide
  Antisense strand to SEQ ID NO: 2122374
accaucagaucaguuguac

SEQ ID NO: 2122376 - RNA, 19 nt, Artificial Sequence
  Description of Artificial Sequence: Synthetic oligonucleotide
  Sense strand starting at position 2945 of SEQ ID NO: 1882453
aacugaucugauggugaug

SEQ ID NO: 2122377 - RNA, 19 nt, Artificial Sequence
  Description of Artificial Sequence: Synthetic oligonucleotide
  Antisense strand to SEQ ID NO: 2122376
caucaccaucagaucaguu

SEQ ID NO: 2122378 - RNA, 19 nt, Artificial Sequence
  Description of Artificial Sequence: Synthetic oligonucleotide
  Sense strand starting at position 2960 of SEQ ID NO: 1882453
gaugaaugugcucagcuuu

SEQ ID NO: 2122379 - RNA, 19 nt, Artificial Sequence
  Description of Artificial Sequence: Synthetic oligonucleotide
  Antisense strand to SEQ ID NO: 2122378
aaagcugagcacauucauc

SEQ ID NO: 2122380 - RNA, 19 nt, Artificial Sequence
  Description of Artificial Sequence: Synthetic oligonucleotide
  Sense strand starting at position 2977 of SEQ ID NO: 1882453
uuucuuuaucuagagaguu

SEQ ID NO: 2122381 - RNA, 19 nt, Artificial Sequence
  Description of Artificial Sequence: Synthetic oligonucleotide
  Antisense strand to SEQ ID NO: 2122380
aacucucuagauaaagaaa

SEQ ID NO: 2122382 - RNA, 19 nt, Artificial Sequence
  Description of Artificial Sequence: Synthetic oligonucleotide
  Sense strand starting at position 3173 of SEQ ID NO: 1882453
accaguaaacauuggcaaa

SEQ ID NO: 2122383 - RNA, 19 nt, Artificial Sequence
  Description of Artificial Sequence: Synthetic oligonucleotide
  Antisense strand to SEQ ID NO: 2122382
uuugccaauguuuacuggu

SEQ ID NO: 2122384 - RNA, 19 nt, Artificial Sequence
  Description of Artificial Sequence: Synthetic oligonucleotide
  Sense strand starting at position 3965 of SEQ ID NO: 1882453
accggagaucauuguguua

SEQ ID NO: 2122385 - RNA, 19 nt, Artificial Sequence
  Description of Artificial Sequence: Synthetic oligonucleotide
  Antisense strand to SEQ ID NO: 2122384
uaacacaaugaucuccggu

SEQ ID NO: 2122386 - RNA, 19 nt, Artificial Sequence
  Description of Artificial Sequence: Synthetic oligonucleotide
  Sense strand starting at position 36 of SEQ ID NO: 1882454
gcucaagggacugaauguu

SEQ ID NO: 2122387 - RNA, 19 nt, Artificial Sequence
  Description of Artificial Sequence: Synthetic oligonucleotide
  Antisense strand to SEQ ID NO: 2122386
aacauucagucccuugagc

SEQ ID NO: 2122388 - RNA, 19 nt, Artificial Sequence
  Description of Artificial Sequence: Synthetic oligonucleotide
  Sense strand starting at position 114 of SEQ ID NO: 1882454
ggaauacgaucccugcaga

SEQ ID NO: 2122389 - RNA, 19 nt, Artificial Sequence
  Description of Artificial Sequence: Synthetic oligonucleotide
  Antisense strand to SEQ ID NO: 2122388
ucugcagggaucguauucc

SEQ ID NO: 2122390 - RNA, 19 nt, Artificial Sequence
  Description of Artificial Sequence: Synthetic oligonucleotide
  Sense strand starting at position 115 of SEQ ID NO: 1882454
gaauacgaucccugcagaa

SEQ ID NO: 2122391 - RNA, 19 nt, Artificial Sequence
  Description of Artificial Sequence: Synthetic oligonucleotide
  Antisense strand to SEQ ID NO: 2122390
uucugcagggaucguauuc

SEQ ID NO: 2122392 - RNA, 19 nt, Artificial Sequence
  Description of Artificial Sequence: Synthetic oligonucleotide
  Sense strand starting at position 117 of SEQ ID NO: 1882454
auacgaucccugcagaauc

SEQ ID NO: 2122393 - RNA, 19 nt, Artificial Sequence
  Description of Artificial Sequence: Synthetic oligonucleotide
  Antisense strand to SEQ ID NO: 2122392
gauucugcagggaucguau

SEQ ID NO: 2122394 - RNA, 19 nt, Artificial Sequence
  Description of Artificial Sequence: Synthetic oligonucleotide
  Sense strand starting at position 127 of SEQ ID NO: 1882454
ugcagaaucgcucagcaca

SEQ ID NO: 2122395 - RNA, 19 nt, Artificial Sequence
  Description of Artificial Sequence: Synthetic oligonucleotide
  Antisense strand to SEQ ID NO: 2122394
ugugcugagcgauucugca

SEQ ID NO: 2122396 - RNA, 19 nt, Artificial Sequence
  Description of Artificial Sequence: Synthetic oligonucleotide
  Sense strand starting at position 264 of SEQ ID NO: 1882454
uggagucccugguuucuga

SEQ ID NO: 2122397 - RNA, 19 nt, Artificial Sequence
  Description of Artificial Sequence: Synthetic oligonucleotide
  Antisense strand to SEQ ID NO: 2122396
ucagaaaccagggacucca

SEQ ID NO: 2122398 - RNA, 19 nt, Artificial Sequence
  Description of Artificial Sequence: Synthetic oligonucleotide
  Sense strand starting at position 317 of SEQ ID NO: 1882454
ccuaguguagaguagugau

SEQ ID NO: 2122399 - RNA, 19 nt, Artificial Sequence
  Description of Artificial Sequence: Synthetic oligonucleotide
  Antisense strand to SEQ ID NO: 2122398
aucacuacucuacacuagg

SEQ ID NO: 2122400 - RNA, 19 nt, Artificial Sequence
  Description of Artificial Sequence: Synthetic oligonucleotide
  Sense strand starting at position 404 of SEQ ID NO: 1882454
agaggcuuguuaccugaaa

SEQ ID NO: 2122401 - RNA, 19 nt, Artificial Sequence
  Description of Artificial Sequence: Synthetic oligonucleotide
  Antisense strand to SEQ ID NO: 2122400
uuucagguaacaagccucu

SEQ ID NO: 2122402 - RNA, 19 nt, Artificial Sequence
  Description of Artificial Sequence: Synthetic oligonucleotide
  Sense strand starting at position 500 of SEQ ID NO: 1882454
uccuuucuccuguagguau

SEQ ID NO: 2122403 - RNA, 19 nt, Artificial Sequence
  Description of Artificial Sequence: Synthetic oligonucleotide
  Antisense strand to SEQ ID NO: 2122402
auaccuacaggagaaagga

SEQ ID NO: 2122404 - RNA, 19 nt, Artificial Sequence
  Description of Artificial Sequence: Synthetic oligonucleotide
  Sense strand starting at position 507 of SEQ ID NO: 1882454
uccuguagguaucuaagua

SEQ ID NO: 2122405 - RNA, 19 nt, Artificial Sequence
  Description of Artificial Sequence: Synthetic oligonucleotide
  Antisense strand to SEQ ID NO: 2122404
uacuuagauaccuacagga

SEQ ID NO: 2122406 - RNA, 19 nt, Artificial Sequence
  Description of Artificial Sequence: Synthetic oligonucleotide
  Sense strand starting at position 508 of SEQ ID NO: 1882454
ccuguagguaucuaaguac

SEQ ID NO: 2122407 - RNA, 19 nt, Artificial Sequence
  Description of Artificial Sequence: Synthetic oligonucleotide
  Antisense strand to SEQ ID NO: 2122406
guacuuagauaccuacagg

SEQ ID NO: 2122408 - RNA, 19 nt, Artificial Sequence
  Description of Artificial Sequence: Synthetic oligonucleotide
  Sense strand starting at position 511 of SEQ ID NO: 1882454
guagguaucuaaguacauu

SEQ ID NO: 2122409 - RNA, 19 nt, Artificial Sequence
  Description of Artificial Sequence: Synthetic oligonucleotide
  Antisense strand to SEQ ID NO: 2122408
aauguacuuagauaccuac

SEQ ID NO: 2122410 - RNA, 19 nt, Artificial Sequence
  Description of Artificial Sequence: Synthetic oligonucleotide
  Sense strand starting at position 535 of SEQ ID NO: 1882454
aguuacugauagcucuaaa

SEQ ID NO: 2122411 - RNA, 19 nt, Artificial Sequence
  Description of Artificial Sequence: Synthetic oligonucleotide
  Antisense strand to SEQ ID NO: 2122410
uuuagagcuaucaguaacu

SEQ ID NO: 2122412 - RNA, 19 nt, Artificial Sequence
  Description of Artificial Sequence: Synthetic oligonucleotide
  Sense strand starting at position 789 of SEQ ID NO: 1882454
aagguagaugaauguagua

SEQ ID NO: 2122413 - RNA, 19 nt, Artificial Sequence
  Description of Artificial Sequence: Synthetic oligonucleotide
  Antisense strand to SEQ ID NO: 2122412
uacuacauucaucuaccuu

SEQ ID NO: 2122414 - RNA, 19 nt, Artificial Sequence
  Description of Artificial Sequence: Synthetic oligonucleotide
  Sense strand starting at position 791 of SEQ ID NO: 1882454
gguagaugaauguaguaau

SEQ ID NO: 2122415 - RNA, 19 nt, Artificial Sequence
  Description of Artificial Sequence: Synthetic oligonucleotide
  Antisense strand to SEQ ID NO: 2122414
auuacuacauucaucuacc

SEQ ID NO: 2122416 - RNA, 19 nt, Artificial Sequence
  Description of Artificial Sequence: Synthetic oligonucleotide
  Sense strand starting at position 957 of SEQ ID NO: 1882454
aucugaagccauuaucugu

SEQ ID NO: 2122417 - RNA, 19 nt, Artificial Sequence
  Description of Artificial Sequence: Synthetic oligonucleotide
  Antisense strand to SEQ ID NO: 2122416
acagauaauggcuucagau

SEQ ID NO: 2122418 - RNA, 19 nt, Artificial Sequence
  Description of Artificial Sequence: Synthetic oligonucleotide
  Sense strand starting at position 970 of SEQ ID NO: 1882454
aucugucuguuggugacau

SEQ ID NO: 2122419 - RNA, 19 nt, Artificial Sequence
  Description of Artificial Sequence: Synthetic oligonucleotide
  Antisense strand to SEQ ID NO: 2122418
augucaccaacagacagau

SEQ ID NO: 2122420 - RNA, 19 nt, Artificial Sequence
  Description of Artificial Sequence: Synthetic oligonucleotide
  Sense strand starting at position 1071 of SEQ ID NO: 1882454
ugauuuauucguuggaguu

SEQ ID NO: 2122421 - RNA, 19 nt, Artificial Sequence
  Description of Artificial Sequence: Synthetic oligonucleotide
  Antisense strand to SEQ ID NO: 2122420
aacuccaacgaauaaauca

SEQ ID NO: 2122422 - RNA, 19 nt, Artificial Sequence
  Description of Artificial Sequence: Synthetic oligonucleotide
  Sense strand starting at position 1072 of SEQ ID NO: 1882454
gauuuauucguuggaguuu

SEQ ID NO: 2122423 - RNA, 19 nt, Artificial Sequence
  Description of Artificial Sequence: Synthetic oligonucleotide
  Antisense strand to SEQ ID NO: 2122422
aaacuccaacgaauaaauc

SEQ ID NO: 2122424 - RNA, 19 nt, Artificial Sequence
  Description of Artificial Sequence: Synthetic oligonucleotide
  Sense strand starting at position 1101 of SEQ ID NO: 1882454
cagagaauaguauguuaaa

SEQ ID NO: 2122425 - RNA, 19 nt, Artificial Sequence
  Description of Artificial Sequence: Synthetic oligonucleotide
  Antisense strand to SEQ ID NO: 2122424
uuuaacauacuauucucug

SEQ ID NO: 2122426 - RNA, 19 nt, Artificial Sequence
  Description of Artificial Sequence: Synthetic oligonucleotide
  Sense strand starting at position 1178 of SEQ ID NO: 1882454
cgagguaaacuuuaagugu

SEQ ID NO: 2122427 - RNA, 19 nt, Artificial Sequence
  Description of Artificial Sequence: Synthetic oligonucleotide
  Antisense strand to SEQ ID NO: 2122426
acacuuaaaguuuaccucg

SEQ ID NO: 2122428 - RNA, 19 nt, Artificial Sequence
  Description of Artificial Sequence: Synthetic oligonucleotide
  Sense strand starting at position 1181 of SEQ ID NO: 1882454
gguaaacuuuaaguguaaa

SEQ ID NO: 2122429 - RNA, 19 nt, Artificial Sequence
  Description of Artificial Sequence: Synthetic oligonucleotide
  Antisense strand to SEQ ID NO: 2122428
uuuacacuuaaaguuuacc

SEQ ID NO: 2122430 - RNA, 19 nt, Artificial Sequence
  Description of Artificial Sequence: Synthetic oligonucleotide
  Sense strand starting at position 1405 of SEQ ID NO: 1882454
acgggcuuugcugagcaau

SEQ ID NO: 2122431 - RNA, 19 nt, Artificial Sequence
  Description of Artificial Sequence: Synthetic oligonucleotide
  Antisense strand to SEQ ID NO: 2122430
auugcucagcaaagcccgu

SEQ ID NO: 2122432 - RNA, 19 nt, Artificial Sequence
  Description of Artificial Sequence: Synthetic oligonucleotide
  Sense strand starting at position 1523 of SEQ ID NO: 1882454
agggcauggacuggauaua

SEQ ID NO: 2122433 - RNA, 19 nt, Artificial Sequence
  Description of Artificial Sequence: Synthetic oligonucleotide
  Antisense strand to SEQ ID NO: 2122432
uauauccaguccaugcccu

SEQ ID NO: 2122434 - RNA, 19 nt, Artificial Sequence
  Description of Artificial Sequence: Synthetic oligonucleotide
  Sense strand starting at position 1665 of SEQ ID NO: 1882454
cugugaugauggagaggaa

SEQ ID NO: 2122435 - RNA, 19 nt, Artificial Sequence
  Description of Artificial Sequence: Synthetic oligonucleotide
  Antisense strand to SEQ ID NO: 2122434
uuccucuccaucaucacag

SEQ ID NO: 2122436 - RNA, 19 nt, Artificial Sequence
  Description of Artificial Sequence: Synthetic oligonucleotide
  Sense strand starting at position 1741 of SEQ ID NO: 1882454
aguacucacucacugaaga

SEQ ID NO: 2122437 - RNA, 19 nt, Artificial Sequence
  Description of Artificial Sequence: Synthetic oligonucleotide
  Antisense strand to SEQ ID NO: 2122436
ucuucagugagugaguacu

SEQ ID NO: 2122438 - RNA, 19 nt, Artificial Sequence
  Description of Artificial Sequence: Synthetic oligonucleotide
  Sense strand starting at position 1887 of SEQ ID NO: 1882454
augggaaguugacugguau

SEQ ID NO: 2122439 - RNA, 19 nt, Artificial Sequence
  Description of Artificial Sequence: Synthetic oligonucleotide
  Antisense strand to SEQ ID NO: 2122438
auaccagucaacuucccau

SEQ ID NO: 2122440 - RNA, 19 nt, Artificial Sequence
  Description of Artificial Sequence: Synthetic oligonucleotide
  Sense strand starting at position 1888 of SEQ ID NO: 1882454
ugggaaguugacugguauc

SEQ ID NO: 2122441 - RNA, 19 nt, Artificial Sequence
  Description of Artificial Sequence: Synthetic oligonucleotide
  Antisense strand to SEQ ID NO: 2122440
gauaccagucaacuuccca

SEQ ID NO: 2122442 - RNA, 19 nt, Artificial Sequence
  Description of Artificial Sequence: Synthetic oligonucleotide
  Sense strand starting at position 1907 of SEQ ID NO: 1882454
gguguaucaguguauacga

SEQ ID NO: 2122443 - RNA, 19 nt, Artificial Sequence
  Description of Artificial Sequence: Synthetic oligonucleotide
  Antisense strand to SEQ ID NO: 2122442
ucguauacacugauacacc

SEQ ID NO: 2122444 - RNA, 19 nt, Artificial Sequence
  Description of Artificial Sequence: Synthetic oligonucleotide
  Sense strand starting at position 2044 of SEQ ID NO: 1882454
cauggaguuagugguagau

SEQ ID NO: 2122445 - RNA, 19 nt, Artificial Sequence
  Description of Artificial Sequence: Synthetic oligonucleotide
  Antisense strand to SEQ ID NO: 2122444
aucuaccacuaacuccaug

SEQ ID NO: 2122446 - RNA, 19 nt, Artificial Sequence
  Description of Artificial Sequence: Synthetic oligonucleotide
  Sense strand starting at position 2396 of SEQ ID NO: 1882454
uugugcauugcagauaacu

SEQ ID NO: 2122447 - RNA, 19 nt, Artificial Sequence
  Description of Artificial Sequence: Synthetic oligonucleotide
  Antisense strand to SEQ ID NO: 2122446
aguuaucugcaaugcacaa

SEQ ID NO: 2122448 - RNA, 19 nt, Artificial Sequence
  Description of Artificial Sequence: Synthetic oligonucleotide
  Sense strand starting at position 3206 of SEQ ID NO: 1882454
guuucaugagguugaagga

SEQ ID NO: 2122449 - RNA, 19 nt, Artificial Sequence
  Description of Artificial Sequence: Synthetic oligonucleotide
  Antisense strand to SEQ ID NO: 2122448
uccuucaaccucaugaaac

SEQ ID NO: 2122450 - RNA, 19 nt, Artificial Sequence
  Description of Artificial Sequence: Synthetic oligonucleotide
  Sense strand starting at position 3226 of SEQ ID NO: 1882454
aggagccauuuauauaaca

SEQ ID NO: 2122451 - RNA, 19 nt, Artificial Sequence
  Description of Artificial Sequence: Synthetic oligonucleotide
  Antisense strand to SEQ ID NO: 2122450
uguuauauaaauggcuccu

SEQ ID NO: 2122452 - RNA, 19 nt, Artificial Sequence
  Description of Artificial Sequence: Synthetic oligonucleotide
  Sense strand starting at position 3292 of SEQ ID NO: 1882454
uagagaaucuagcuagguu

SEQ ID NO: 2122453 - RNA, 19 nt, Artificial Sequence
  Description of Artificial Sequence: Synthetic oligonucleotide
  Antisense strand to SEQ ID NO: 2122452
aaccuagcuagauucucua

SEQ ID NO: 2122454 - RNA, 19 nt, Artificial Sequence
  Description of Artificial Sequence: Synthetic oligonucleotide
  Sense strand starting at position 3295 of SEQ ID NO: 1882454
agaaucuagcuagguuaau

SEQ ID NO: 2122455 - RNA, 19 nt, Artificial Sequence
  Description of Artificial Sequence: Synthetic oligonucleotide
  Antisense strand to SEQ ID NO: 2122454
auuaaccuagcuagauucu

SEQ ID NO: 2122456 - RNA, 19 nt, Artificial Sequence
  Description of Artificial Sequence: Synthetic oligonucleotide
  Sense strand starting at position 3296 of SEQ ID NO: 1882454
gaaucuagcuagguuaauu

SEQ ID NO: 2122457 - RNA, 19 nt, Artificial Sequence
  Description of Artificial Sequence: Synthetic oligonucleotide
  Antisense strand to SEQ ID NO: 2122456
aauuaaccuagcuagauuc

SEQ ID NO: 2122458 - RNA, 19 nt, Artificial Sequence
  Description of Artificial Sequence: Synthetic oligonucleotide
  Sense strand starting at position 3322 of SEQ ID NO: 1882454
guggcuauacucgacaaca

SEQ ID NO: 2122459 - RNA, 19 nt, Artificial Sequence
  Description of Artificial Sequence: Synthetic oligonucleotide
  Antisense strand to SEQ ID NO: 2122458
uguugucgaguauagccac

SEQ ID NO: 2122460 - RNA, 19 nt, Artificial Sequence
  Description of Artificial Sequence: Synthetic oligonucleotide
  Sense strand starting at position 3361 of SEQ ID NO: 1882454
cgaccuucuaguggaagau

SEQ ID NO: 2122461 - RNA, 19 nt, Artificial Sequence
  Description of Artificial Sequence: Synthetic oligonucleotide
  Antisense strand to SEQ ID NO: 2122460
aucuuccacuagaaggucg

SEQ ID NO: 2122462 - RNA, 19 nt, Artificial Sequence
  Description of Artificial Sequence: Synthetic oligonucleotide
  Sense strand starting at position 3591 of SEQ ID NO: 1882454
gacagcaugucagcuuaca

SEQ ID NO: 2122463 - RNA, 19 nt, Artificial Sequence
  Description of Artificial Sequence: Synthetic oligonucleotide
  Antisense strand to SEQ ID NO: 2122462
uguaagcugacaugcuguc

SEQ ID NO: 2122464 - RNA, 19 nt, Artificial Sequence
  Description of Artificial Sequence: Synthetic oligonucleotide
  Sense strand starting at position 3599 of SEQ ID NO: 1882454
gucagcuuacagcaugauu

SEQ ID NO: 2122465 - RNA, 19 nt, Artificial Sequence
  Description of Artificial Sequence: Synthetic oligonucleotide
  Antisense strand to SEQ ID NO: 2122464
aaucaugcuguaagcugac

SEQ ID NO: 2122466 - RNA, 19 nt, Artificial Sequence
  Description of Artificial Sequence: Synthetic oligonucleotide
  Sense strand starting at position 191 of SEQ ID NO: 1882455
aguacaagguuaucucaaa

SEQ ID NO: 2122467 - RNA, 19 nt, Artificial Sequence
  Description of Artificial Sequence: Synthetic oligonucleotide
  Antisense strand to SEQ ID NO: 2122466
uuugagauaaccuuguacu

SEQ ID NO: 2122468 - RNA, 19 nt, Artificial Sequence
  Description of Artificial Sequence: Synthetic oligonucleotide
  Sense strand starting at position 192 of SEQ ID NO: 1882455
guacaagguuaucucaaau

SEQ ID NO: 2122469 - RNA, 19 nt, Artificial Sequence
  Description of Artificial Sequence: Synthetic oligonucleotide
  Antisense strand to SEQ ID NO: 2122468
auuugagauaaccuuguac

SEQ ID NO: 2122470 - RNA, 19 nt, Artificial Sequence
  Description of Artificial Sequence: Synthetic oligonucleotide
  Sense strand starting at position 206 of SEQ ID NO: 1882455
caaauauagguguaucagu

SEQ ID NO: 2122471 - RNA, 19 nt, Artificial Sequence
  Description of Artificial Sequence: Synthetic oligonucleotide
  Antisense strand to SEQ ID NO: 2122470
acugauacaccuauauuug

SEQ ID NO: 2122472 - RNA, 19 nt, Artificial Sequence
  Description of Artificial Sequence: Synthetic oligonucleotide
  Sense strand starting at position 211 of SEQ ID NO: 1882455
auagguguaucaguauaaa

SEQ ID NO: 2122473 - RNA, 19 nt, Artificial Sequence
  Description of Artificial Sequence: Synthetic oligonucleotide
  Antisense strand to SEQ ID NO: 2122472
uuuauacugauacaccuau

SEQ ID NO: 2122474 - RNA, 19 nt, Artificial Sequence
  Description of Artificial Sequence: Synthetic oligonucleotide
  Sense strand starting at position 214 of SEQ ID NO: 1882455
gguguaucaguauaaauga

SEQ ID NO: 2122475 - RNA, 19 nt, Artificial Sequence
  Description of Artificial Sequence: Synthetic oligonucleotide
  Antisense strand to SEQ ID NO: 2122474
ucauuuauacugauacacc

SEQ ID NO: 2122476 - RNA, 19 nt, Artificial Sequence
  Description of Artificial Sequence: Synthetic oligonucleotide
  Sense strand starting at position 302 of SEQ ID NO: 1882455
agaugcaucaaaugguaga

SEQ ID NO: 2122477 - RNA, 19 nt, Artificial Sequence
  Description of Artificial Sequence: Synthetic oligonucleotide
  Antisense strand to SEQ ID NO: 2122476
ucuaccauuugaugcaucu

SEQ ID NO: 2122478 - RNA, 19 nt, Artificial Sequence
  Description of Artificial Sequence: Synthetic oligonucleotide
  Sense strand starting at position 710 of SEQ ID NO: 1882455
gguggauaauaugcucaca

SEQ ID NO: 2122479 - RNA, 19 nt, Artificial Sequence
  Description of Artificial Sequence: Synthetic oligonucleotide
  Antisense strand to SEQ ID NO: 2122478
ugugagcauauuauccacc

SEQ ID NO: 2122480 - RNA, 19 nt, Artificial Sequence
  Description of Artificial Sequence: Synthetic oligonucleotide
  Sense strand starting at position 712 of SEQ ID NO: 1882455
uggauaauaugcucacaua

SEQ ID NO: 2122481 - RNA, 19 nt, Artificial Sequence
  Description of Artificial Sequence: Synthetic oligonucleotide
  Antisense strand to SEQ ID NO: 2122480
uaugugagcauauuaucca

SEQ ID NO: 2122482 - RNA, 19 nt, Artificial Sequence
  Description of Artificial Sequence: Synthetic oligonucleotide
  Sense strand starting at position 854 of SEQ ID NO: 1882455
acugcaaaucgacauauua

SEQ ID NO: 2122483 - RNA, 19 nt, Artificial Sequence
  Description of Artificial Sequence: Synthetic oligonucleotide
  Antisense strand to SEQ ID NO: 2122482
uaauaugucgauuugcagu

SEQ ID NO: 2122484 - RNA, 19 nt, Artificial Sequence
  Description of Artificial Sequence: Synthetic oligonucleotide
  Sense strand starting at position 1051 of SEQ ID NO: 1882455
aguccucaggcucaaagau

SEQ ID NO: 2122485 - RNA, 19 nt, Artificial Sequence
  Description of Artificial Sequence: Synthetic oligonucleotide
  Antisense strand to SEQ ID NO: 2122484
aucuuugagccugaggacu

SEQ ID NO: 2122486 - RNA, 19 nt, Artificial Sequence
  Description of Artificial Sequence: Synthetic oligonucleotide
  Sense strand starting at position 1190 of SEQ ID NO: 1882455
ggauaaaguuacuuugaau

SEQ ID NO: 2122487 - RNA, 19 nt, Artificial Sequence
  Description of Artificial Sequence: Synthetic oligonucleotide
  Antisense strand to SEQ ID NO: 2122486
auucaaaguaacuuuaucc

SEQ ID NO: 2122488 - RNA, 19 nt, Artificial Sequence
  Description of Artificial Sequence: Synthetic oligonucleotide
  Sense strand starting at position 1248 of SEQ ID NO: 1882455
ggaaauccuuuagugauag

SEQ ID NO: 2122489 - RNA, 19 nt, Artificial Sequence
  Description of Artificial Sequence: Synthetic oligonucleotide
  Antisense strand to SEQ ID NO: 2122488
cuaucacuaaaggauuucc

SEQ ID NO: 2122490 - RNA, 19 nt, Artificial Sequence
  Description of Artificial Sequence: Synthetic oligonucleotide
  Sense strand starting at position 1677 of SEQ ID NO: 1882455
aaauauauguguuuagagg

SEQ ID NO: 2122491 - RNA, 19 nt, Artificial Sequence
  Description of Artificial Sequence: Synthetic oligonucleotide
  Antisense strand to SEQ ID NO: 2122490
ccucuaaacacauauauuu

SEQ ID NO: 2122492 - RNA, 19 nt, Artificial Sequence
  Description of Artificial Sequence: Synthetic oligonucleotide
  Sense strand starting at position 1678 of SEQ ID NO: 1882455
aauauauguguuuagaggu

SEQ ID NO: 2122493 - RNA, 19 nt, Artificial Sequence
  Description of Artificial Sequence: Synthetic oligonucleotide
  Antisense strand to SEQ ID NO: 2122492
accucuaaacacauauauu

SEQ ID NO: 2122494 - RNA, 19 nt, Artificial Sequence
  Description of Artificial Sequence: Synthetic oligonucleotide
  Sense strand starting at position 1865 of SEQ ID NO: 1882455
agugaaacaccucgauauc

SEQ ID NO: 2122495 - RNA, 19 nt, Artificial Sequence
  Description of Artificial Sequence: Synthetic oligonucleotide
  Antisense strand to SEQ ID NO: 2122494
gauaucgagguguuucacu

SEQ ID NO: 2122496 - RNA, 19 nt, Artificial Sequence
  Description of Artificial Sequence: Synthetic oligonucleotide
  Sense strand starting at position 1866 of SEQ ID NO: 1882455
gugaaacaccucgauauca

SEQ ID NO: 2122497 - RNA, 19 nt, Artificial Sequence
  Description of Artificial Sequence: Synthetic oligonucleotide
  Antisense strand to SEQ ID NO: 2122496
ugauaucgagguguuucac

SEQ ID NO: 2122498 - RNA, 19 nt, Artificial Sequence
  Description of Artificial Sequence: Synthetic oligonucleotide
  Sense strand starting at position 1961 of SEQ ID NO: 1882455
gagaguaagaaguguaacu

SEQ ID NO: 2122499 - RNA, 19 nt, Artificial Sequence
  Description of Artificial Sequence: Synthetic oligonucleotide
  Antisense strand to SEQ ID NO: 2122498
aguuacacuucuuacucuc

SEQ ID NO: 2122500 - RNA, 19 nt, Artificial Sequence
  Description of Artificial Sequence: Synthetic oligonucleotide
  Sense strand starting at position 1963 of SEQ ID NO: 1882455
gaguaagaaguguaacugu

SEQ ID NO: 2122501 - RNA, 19 nt, Artificial Sequence
  Description of Artificial Sequence: Synthetic oligonucleotide
  Antisense strand to SEQ ID NO: 2122500
acaguuacacuucuuacuc

SEQ ID NO: 2122502 - RNA, 19 nt, Artificial Sequence
  Description of Artificial Sequence: Synthetic oligonucleotide
  Sense strand starting at position 2047 of SEQ ID NO: 1882455
ugacuuguauuugcccaua

SEQ ID NO: 2122503 - RNA, 19 nt, Artificial Sequence
  Description of Artificial Sequence: Synthetic oligonucleotide
  Antisense strand to SEQ ID NO: 2122502
uaugggcaaauacaaguca

SEQ ID NO: 2122504 - RNA, 19 nt, Artificial Sequence
  Description of Artificial Sequence: Synthetic oligonucleotide
  Sense strand starting at position 2070 of SEQ ID NO: 1882455
gcugacuucugcuuauuua

SEQ ID NO: 2122505 - RNA, 19 nt, Artificial Sequence
  Description of Artificial Sequence: Synthetic oligonucleotide
  Antisense strand to SEQ ID NO: 2122504
uaaauaagcagaagucagc

SEQ ID NO: 2122506 - RNA, 19 nt, Artificial Sequence
  Description of Artificial Sequence: Synthetic oligonucleotide
  Sense strand starting at position 2108 of SEQ ID NO: 1882455
uugacacaauugguauauu

SEQ ID NO: 2122507 - RNA, 19 nt, Artificial Sequence
  Description of Artificial Sequence: Synthetic oligonucleotide
  Antisense strand to SEQ ID NO: 2122506
aauauaccaauugugucaa

SEQ ID NO: 2122508 - RNA, 19 nt, Artificial Sequence
  Description of Artificial Sequence: Synthetic oligonucleotide
  Sense strand starting at position 2225 of SEQ ID NO: 1882455
ggagaagaugucuagcagu

SEQ ID NO: 2122509 - RNA, 19 nt, Artificial Sequence
  Description of Artificial Sequence: Synthetic oligonucleotide
  Antisense strand to SEQ ID NO: 2122508
acugcuagacaucuucucc

SEQ ID NO: 2122510 - RNA, 19 nt, Artificial Sequence
  Description of Artificial Sequence: Synthetic oligonucleotide
  Sense strand starting at position 2304 of SEQ ID NO: 1882455
ccaaguaacccaugggaca

SEQ ID NO: 2122511 - RNA, 19 nt, Artificial Sequence
  Description of Artificial Sequence: Synthetic oligonucleotide
  Antisense strand to SEQ ID NO: 2122510
ugucccauggguuacuugg

SEQ ID NO: 2122512 - RNA, 19 nt, Artificial Sequence
  Description of Artificial Sequence: Synthetic oligonucleotide
  Sense strand starting at position 2305 of SEQ ID NO: 1882455
caaguaacccaugggacau

SEQ ID NO: 2122513 - RNA, 19 nt, Artificial Sequence
  Description of Artificial Sequence: Synthetic oligonucleotide
  Antisense strand to SEQ ID NO: 2122512
augucccauggguuacuug

SEQ ID NO: 2122514 - RNA, 19 nt, Artificial Sequence
  Description of Artificial Sequence: Synthetic oligonucleotide
  Sense strand starting at position 2416 of SEQ ID NO: 1882455
acuaaugacuaguuauaug

SEQ ID NO: 2122515 - RNA, 19 nt, Artificial Sequence
  Description of Artificial Sequence: Synthetic oligonucleotide
  Antisense strand to SEQ ID NO: 2122514
cauauaacuagucauuagu

SEQ ID NO: 2122516 - RNA, 19 nt, Artificial Sequence
  Description of Artificial Sequence: Synthetic oligonucleotide
  Sense strand starting at position 2713 of SEQ ID NO: 1882455
gauaguucuugauugacac

SEQ ID NO: 2122517 - RNA, 19 nt, Artificial Sequence
  Description of Artificial Sequence: Synthetic oligonucleotide
  Antisense strand to SEQ ID NO: 2122516
gugucaaucaagaacuauc

SEQ ID NO: 2122518 - RNA, 19 nt, Artificial Sequence
  Description of Artificial Sequence: Synthetic oligonucleotide
  Sense strand starting at position 2714 of SEQ ID NO: 1882455
auaguucuugauugacaca

SEQ ID NO: 2122519 - RNA, 19 nt, Artificial Sequence
  Description of Artificial Sequence: Synthetic oligonucleotide
  Antisense strand to SEQ ID NO: 2122518
ugugucaaucaagaacuau

SEQ ID NO: 2122520 - RNA, 19 nt, Artificial Sequence
  Description of Artificial Sequence: Synthetic oligonucleotide
  Sense strand starting at position 2798 of SEQ ID NO: 1882455
cagggagaguuucugacuu

SEQ ID NO: 2122521 - RNA, 19 nt, Artificial Sequence
  Description of Artificial Sequence: Synthetic oligonucleotide
  Antisense strand to SEQ ID NO: 2122520
aagucagaaacucucccug

SEQ ID NO: 2122522 - RNA, 19 nt, Artificial Sequence
  Description of Artificial Sequence: Synthetic oligonucleotide
  Sense strand starting at position 3054 of SEQ ID NO: 1882455
ugcuaugaaauaugggauu

SEQ ID NO: 2122523 - RNA, 19 nt, Artificial Sequence
  Description of Artificial Sequence: Synthetic oligonucleotide
  Antisense strand to SEQ ID NO: 2122522
aaucccauauuucauagca

SEQ ID NO: 2122524 - RNA, 19 nt, Artificial Sequence
  Description of Artificial Sequence: Synthetic oligonucleotide
  Sense strand starting at position 3103 of SEQ ID NO: 1882455
agagauugacuuuggcuua

SEQ ID NO: 2122525 - RNA, 19 nt, Artificial Sequence
  Description of Artificial Sequence: Synthetic oligonucleotide
  Antisense strand to SEQ ID NO: 2122524
uaagccaaagucaaucucu

SEQ ID NO: 2122526 - RNA, 19 nt, Artificial Sequence
  Description of Artificial Sequence: Synthetic oligonucleotide
  Sense strand starting at position 3108 of SEQ ID NO: 1882455
uugacuuuggcuuaaacau

SEQ ID NO: 2122527 - RNA, 19 nt, Artificial Sequence
  Description of Artificial Sequence: Synthetic oligonucleotide
  Antisense strand to SEQ ID NO: 2122526
auguuuaagccaaagucaa

SEQ ID NO: 2122528 - RNA, 19 nt, Artificial Sequence
  Description of Artificial Sequence: Synthetic oligonucleotide
  Sense strand starting at position 3296 of SEQ ID NO: 1882455
acucuaugagcuugauaug

SEQ ID NO: 2122529 - RNA, 19 nt, Artificial Sequence
  Description of Artificial Sequence: Synthetic oligonucleotide
  Antisense strand to SEQ ID NO: 2122528
cauaucaagcucauagagu

SEQ ID NO: 2122530 - RNA, 19 nt, Artificial Sequence
  Description of Artificial Sequence: Synthetic oligonucleotide
  Sense strand starting at position 3348 of SEQ ID NO: 1882455
uuucuauuuguugguagua

SEQ ID NO: 2122531 - RNA, 19 nt, Artificial Sequence
  Description of Artificial Sequence: Synthetic oligonucleotide
  Antisense strand to SEQ ID NO: 2122530
uacuaccaacaaauagaaa

SEQ ID NO: 2122532 - RNA, 19 nt, Artificial Sequence
  Description of Artificial Sequence: Synthetic oligonucleotide
  Sense strand starting at position 3388 of SEQ ID NO: 1882455
ugggacaguacugguuaaa

SEQ ID NO: 2122533 - RNA, 19 nt, Artificial Sequence
  Description of Artificial Sequence: Synthetic oligonucleotide
  Antisense strand to SEQ ID NO: 2122532
uuuaaccaguacuguccca

SEQ ID NO: 2122534 - RNA, 19 nt, Artificial Sequence
  Description of Artificial Sequence: Synthetic oligonucleotide
  Sense strand starting at position 3498 of SEQ ID NO: 1882455
aggagaaccucucuguuga

SEQ ID NO: 2122535 - RNA, 19 nt, Artificial Sequence
  Description of Artificial Sequence: Synthetic oligonucleotide
  Antisense strand to SEQ ID NO: 2122534
ucaacagagagguucuccu

SEQ ID NO: 2122536 - RNA, 19 nt, Artificial Sequence
  Description of Artificial Sequence: Synthetic oligonucleotide
  Sense strand starting at position 3499 of SEQ ID NO: 1882455
ggagaaccucucuguugag

SEQ ID NO: 2122537 - RNA, 19 nt, Artificial Sequence
  Description of Artificial Sequence: Synthetic oligonucleotide
  Antisense strand to SEQ ID NO: 2122536
cucaacagagagguucucc

SEQ ID NO: 2122538 - RNA, 19 nt, Artificial Sequence
  Description of Artificial Sequence: Synthetic oligonucleotide
  Sense strand starting at position 3694 of SEQ ID NO: 1882455
aaccucaaggucugugaua

SEQ ID NO: 2122539 - RNA, 19 nt, Artificial Sequence
  Description of Artificial Sequence: Synthetic oligonucleotide
  Antisense strand to SEQ ID NO: 2122538
uaucacagaccuugagguu

SEQ ID NO: 2122540 - RNA, 19 nt, Artificial Sequence
  Description of Artificial Sequence: Synthetic oligonucleotide
  Sense strand starting at position 3695 of SEQ ID NO: 1882455
accucaaggucugugauaa

SEQ ID NO: 2122541 - RNA, 19 nt, Artificial Sequence
  Description of Artificial Sequence: Synthetic oligonucleotide
  Antisense strand to SEQ ID NO: 2122540
uuaucacagaccuugaggu

SEQ ID NO: 2122542 - RNA, 19 nt, Artificial Sequence
  Description of Artificial Sequence: Synthetic oligonucleotide
  Sense strand starting at position 3938 of SEQ ID NO: 1882455
gaucucuagugggcacaaa

SEQ ID NO: 2122543 - RNA, 19 nt, Artificial Sequence
  Description of Artificial Sequence: Synthetic oligonucleotide
  Antisense strand to SEQ ID NO: 2122542
uuugugcccacuagagauc

SEQ ID NO: 2122544 - RNA, 19 nt, Artificial Sequence
  Description of Artificial Sequence: Synthetic oligonucleotide
  Sense strand starting at position 3939 of SEQ ID NO: 1882455
aucucuagugggcacaaau

SEQ ID NO: 2122545 - RNA, 19 nt, Artificial Sequence
  Description of Artificial Sequence: Synthetic oligonucleotide
  Antisense strand to SEQ ID NO: 2122544
auuugugcccacuagagau

SEQ ID NO: 2122546 - RNA, 19 nt, Artificial Sequence
  Description of Artificial Sequence: Synthetic oligonucleotide
  Sense strand starting at position 14 of SEQ ID NO: 1882456
uuaacuuucuguguaacca

SEQ ID NO: 2122547 - RNA, 19 nt, Artificial Sequence
  Description of Artificial Sequence: Synthetic oligonucleotide
  Antisense strand to SEQ ID NO: 2122546
ugguuacacagaaaguuaa

SEQ ID NO: 2122548 - RNA, 19 nt, Artificial Sequence
  Description of Artificial Sequence: Synthetic oligonucleotide
  Sense strand starting at position 127 of SEQ ID NO: 1882456
gggaguucucauugacuuu

SEQ ID NO: 2122549 - RNA, 19 nt, Artificial Sequence
  Description of Artificial Sequence: Synthetic oligonucleotide
  Antisense strand to SEQ ID NO: 2122548
aaagucaaugagaacuccc

SEQ ID NO: 2122550 - RNA, 19 nt, Artificial Sequence
  Description of Artificial Sequence: Synthetic oligonucleotide
  Sense strand starting at position 737 of SEQ ID NO: 1882456
gugaacauguaaguaaauu

SEQ ID NO: 2122551 - RNA, 19 nt, Artificial Sequence
  Description of Artificial Sequence: Synthetic oligonucleotide
  Antisense strand to SEQ ID NO: 2122550
aauuuacuuacauguucac

SEQ ID NO: 2122552 - RNA, 19 nt, Artificial Sequence
  Description of Artificial Sequence: Synthetic oligonucleotide
  Sense strand starting at position 983 of SEQ ID NO: 1882456
uggucuauaggcgacuuau

SEQ ID NO: 2122553 - RNA, 19 nt, Artificial Sequence
  Description of Artificial Sequence: Synthetic oligonucleotide
  Antisense strand to SEQ ID NO: 2122552
auaagucgccuauagacca

SEQ ID NO: 2122554 - RNA, 19 nt, Artificial Sequence
  Description of Artificial Sequence: Synthetic oligonucleotide
  Sense strand starting at position 1253 of SEQ ID NO: 1882456
guuguucugcuggucagua

SEQ ID NO: 2122555 - RNA, 19 nt, Artificial Sequence
  Description of Artificial Sequence: Synthetic oligonucleotide
  Antisense strand to SEQ ID NO: 2122554
uacugaccagcagaacaac

SEQ ID NO: 2122556 - RNA, 19 nt, Artificial Sequence
  Description of Artificial Sequence: Synthetic oligonucleotide
  Sense strand starting at position 1598 of SEQ ID NO: 1882456
auaucaguaagauggaguu

SEQ ID NO: 2122557 - RNA, 19 nt, Artificial Sequence
  Description of Artificial Sequence: Synthetic oligonucleotide
  Antisense strand to SEQ ID NO: 2122556
aacuccaucuuacugauau

SEQ ID NO: 2122558 - RNA, 19 nt, Artificial Sequence
  Description of Artificial Sequence: Synthetic oligonucleotide
  Sense strand starting at position 1605 of SEQ ID NO: 1882456
uaagauggaguuugaguuu

SEQ ID NO: 2122559 - RNA, 19 nt, Artificial Sequence
  Description of Artificial Sequence: Synthetic oligonucleotide
  Antisense strand to SEQ ID NO: 2122558
aaacucaaacuccaucuua

SEQ ID NO: 2122560 - RNA, 19 nt, Artificial Sequence
  Description of Artificial Sequence: Synthetic oligonucleotide
  Sense strand starting at position 1608 of SEQ ID NO: 1882456
gauggaguuugaguuuaac

SEQ ID NO: 2122561 - RNA, 19 nt, Artificial Sequence
  Description of Artificial Sequence: Synthetic oligonucleotide
  Antisense strand to SEQ ID NO: 2122560
guuaaacucaaacuccauc

SEQ ID NO: 2122562 - RNA, 19 nt, Artificial Sequence
  Description of Artificial Sequence: Synthetic oligonucleotide
  Sense strand starting at position 1611 of SEQ ID NO: 1882456
ggaguuugaguuuaacuuu

SEQ ID NO: 2122563 - RNA, 19 nt, Artificial Sequence
  Description of Artificial Sequence: Synthetic oligonucleotide
  Antisense strand to SEQ ID NO: 2122562
aaaguuaaacucaaacucc

SEQ ID NO: 2122564 - RNA, 19 nt, Artificial Sequence
  Description of Artificial Sequence: Synthetic oligonucleotide
  Sense strand starting at position 1664 of SEQ ID NO: 1882456
agcgaugcuauugaugaca

SEQ ID NO: 2122565 - RNA, 19 nt, Artificial Sequence
  Description of Artificial Sequence: Synthetic oligonucleotide
  Antisense strand to SEQ ID NO: 2122564
ugucaucaauagcaucgcu

SEQ ID NO: 2122566 - RNA, 19 nt, Artificial Sequence
  Description of Artificial Sequence: Synthetic oligonucleotide
  Sense strand starting at position 2254 of SEQ ID NO: 1882456
auuauaucaccuuguguag

SEQ ID NO: 2122567 - RNA, 19 nt, Artificial Sequence
  Description of Artificial Sequence: Synthetic oligonucleotide
  Antisense strand to SEQ ID NO: 2122566
cuacacaaggugauauaau

SEQ ID NO: 2122568 - RNA, 19 nt, Artificial Sequence
  Description of Artificial Sequence: Synthetic oligonucleotide
  Sense strand starting at position 2257 of SEQ ID NO: 1882456
auaucaccuuguguagaaa

SEQ ID NO: 2122569 - RNA, 19 nt, Artificial Sequence
  Description of Artificial Sequence: Synthetic oligonucleotide
  Antisense strand to SEQ ID NO: 2122568
uuucuacacaaggugauau

SEQ ID NO: 2122570 - RNA, 19 nt, Artificial Sequence
  Description of Artificial Sequence: Synthetic oligonucleotide
  Sense strand starting at position 2260 of SEQ ID NO: 1882456
ucaccuuguguagaaauga

SEQ ID NO: 2122571 - RNA, 19 nt, Artificial Sequence
  Description of Artificial Sequence: Synthetic oligonucleotide
  Antisense strand to SEQ ID NO: 2122570
ucauuucuacacaagguga

SEQ ID NO: 2122572 - RNA, 19 nt, Artificial Sequence
  Description of Artificial Sequence: Synthetic oligonucleotide
  Sense strand starting at position 2265 of SEQ ID NO: 1882456
uuguguagaaaugagcaua

SEQ ID NO: 2122573 - RNA, 19 nt, Artificial Sequence
  Description of Artificial Sequence: Synthetic oligonucleotide
  Antisense strand to SEQ ID NO: 2122572
uaugcucauuucuacacaa

SEQ ID NO: 2122574 - RNA, 19 nt, Artificial Sequence
  Description of Artificial Sequence: Synthetic oligonucleotide
  Sense strand starting at position 2312 of SEQ ID NO: 1882456
auaauaagggcuugcaauu

SEQ ID NO: 2122575 - RNA, 19 nt, Artificial Sequence
  Description of Artificial Sequence: Synthetic oligonucleotide
  Antisense strand to SEQ ID NO: 2122574
aauugcaagcccuuauuau

SEQ ID NO: 2122576 - RNA, 19 nt, Artificial Sequence
  Description of Artificial Sequence: Synthetic oligonucleotide
  Sense strand starting at position 2465 of SEQ ID NO: 1882456
cuaaaucauccguaaugcu

SEQ ID NO: 2122577 - RNA, 19 nt, Artificial Sequence
  Description of Artificial Sequence: Synthetic oligonucleotide
  Antisense strand to SEQ ID NO: 2122576
agcauuacggaugauuuag

SEQ ID NO: 2122578 - RNA, 19 nt, Artificial Sequence
  Description of Artificial Sequence: Synthetic oligonucleotide
  Sense strand starting at position 2524 of SEQ ID NO: 1882456
auaguaucauaguuaguug

SEQ ID NO: 2122579 - RNA, 19 nt, Artificial Sequence
  Description of Artificial Sequence: Synthetic oligonucleotide
  Antisense strand to SEQ ID NO: 2122578
caacuaacuaugauacuau

SEQ ID NO: 2122580 - RNA, 19 nt, Artificial Sequence
  Description of Artificial Sequence: Synthetic oligonucleotide
  Sense strand starting at position 2573 of SEQ ID NO: 1882456
gguaaauuacaugguauug

SEQ ID NO: 2122581 - RNA, 19 nt, Artificial Sequence
  Description of Artificial Sequence: Synthetic oligonucleotide
  Antisense strand to SEQ ID NO: 2122580
caauaccauguaauuuacc

SEQ ID NO: 2122582 - RNA, 19 nt, Artificial Sequence
  Description of Artificial Sequence: Synthetic oligonucleotide
  Sense strand starting at position 2652 of SEQ ID NO: 1882456
cugggagaaucucuacuca

SEQ ID NO: 2122583 - RNA, 19 nt, Artificial Sequence
  Description of Artificial Sequence: Synthetic oligonucleotide
  Antisense strand to SEQ ID NO: 2122582
ugaguagagauucucccag

SEQ ID NO: 2122584 - RNA, 19 nt, Artificial Sequence
  Description of Artificial Sequence: Synthetic oligonucleotide
  Sense strand starting at position 2943 of SEQ ID NO: 1882456
gagcaauuagaaugaguug

SEQ ID NO: 2122585 - RNA, 19 nt, Artificial Sequence
  Description of Artificial Sequence: Synthetic oligonucleotide
  Antisense strand to SEQ ID NO: 2122584
caacucauucuaauugcuc

SEQ ID NO: 2122586 - RNA, 19 nt, Artificial Sequence
  Description of Artificial Sequence: Synthetic oligonucleotide
  Sense strand starting at position 2946 of SEQ ID NO: 1882456
caauuagaaugaguugcuu

SEQ ID NO: 2122587 - RNA, 19 nt, Artificial Sequence
  Description of Artificial Sequence: Synthetic oligonucleotide
  Antisense strand to SEQ ID NO: 2122586
aagcaacucauucuaauug

SEQ ID NO: 2122588 - RNA, 19 nt, Artificial Sequence
  Description of Artificial Sequence: Synthetic oligonucleotide
  Sense strand starting at position 3095 of SEQ ID NO: 1882456
uguaacuaggguugggaau

SEQ ID NO: 2122589 - RNA, 19 nt, Artificial Sequence
  Description of Artificial Sequence: Synthetic oligonucleotide
  Antisense strand to SEQ ID NO: 2122588
auucccaacccuaguuaca

SEQ ID NO: 2122590 - RNA, 19 nt, Artificial Sequence
  Description of Artificial Sequence: Synthetic oligonucleotide
  Sense strand starting at position 3096 of SEQ ID NO: 1882456
guaacuaggguugggaaua

SEQ ID NO: 2122591 - RNA, 19 nt, Artificial Sequence
  Description of Artificial Sequence: Synthetic oligonucleotide
  Antisense strand to SEQ ID NO: 2122590
uauucccaacccuaguuac

SEQ ID NO: 2122592 - RNA, 19 nt, Artificial Sequence
  Description of Artificial Sequence: Synthetic oligonucleotide
  Sense strand starting at position 3222 of SEQ ID NO: 1882456
cagggacuuucugcuucua

SEQ ID NO: 2122593 - RNA, 19 nt, Artificial Sequence
  Description of Artificial Sequence: Synthetic oligonucleotide
  Antisense strand to SEQ ID NO: 2122592
uagaagcagaaagucccug

SEQ ID NO: 2122594 - RNA, 19 nt, Artificial Sequence
  Description of Artificial Sequence: Synthetic oligonucleotide
  Sense strand starting at position 3363 of SEQ ID NO: 1882456
gauggugagaguugucacu

SEQ ID NO: 2122595 - RNA, 19 nt, Artificial Sequence
  Description of Artificial Sequence: Synthetic oligonucleotide
  Antisense strand to SEQ ID NO: 2122594
agugacaacucucaccauc

SEQ ID NO: 2122596 - RNA, 19 nt, Artificial Sequence
  Description of Artificial Sequence: Synthetic oligonucleotide
  Sense strand starting at position 3365 of SEQ ID NO: 1882456
uggugagaguugucacuac

SEQ ID NO: 2122597 - RNA, 19 nt, Artificial Sequence
  Description of Artificial Sequence: Synthetic oligonucleotide
  Antisense strand to SEQ ID NO: 2122596
guagugacaacucucacca

SEQ ID NO: 2122598 - RNA, 19 nt, Artificial Sequence
  Description of Artificial Sequence: Synthetic oligonucleotide
  Sense strand starting at position 3369 of SEQ ID NO: 1882456
gagaguugucacuacuauc

SEQ ID NO: 2122599 - RNA, 19 nt, Artificial Sequence
  Description of Artificial Sequence: Synthetic oligonucleotide
  Antisense strand to SEQ ID NO: 2122598
gauaguagugacaacucuc

SEQ ID NO: 2122600 - RNA, 19 nt, Artificial Sequence
  Description of Artificial Sequence: Synthetic oligonucleotide
  Sense strand starting at position 3436 of SEQ ID NO: 1882456
cgagguugacagcaguaau

SEQ ID NO: 2122601 - RNA, 19 nt, Artificial Sequence
  Description of Artificial Sequence: Synthetic oligonucleotide
  Antisense strand to SEQ ID NO: 2122600
auuacugcugucaaccucg

SEQ ID NO: 2122602 - RNA, 19 nt, Artificial Sequence
  Description of Artificial Sequence: Synthetic oligonucleotide
  Sense strand starting at position 3439 of SEQ ID NO: 1882456
gguugacagcaguaauaaa

SEQ ID NO: 2122603 - RNA, 19 nt, Artificial Sequence
  Description of Artificial Sequence: Synthetic oligonucleotide
  Antisense strand to SEQ ID NO: 2122602
uuuauuacugcugucaacc

SEQ ID NO: 2122604 - RNA, 19 nt, Artificial Sequence
  Description of Artificial Sequence: Synthetic oligonucleotide
  Sense strand starting at position 3482 of SEQ ID NO: 1882456
ucagcacuaccaugugaua

SEQ ID NO: 2122605 - RNA, 19 nt, Artificial Sequence
  Description of Artificial Sequence: Synthetic oligonucleotide
  Antisense strand to SEQ ID NO: 2122604
uaucacaugguagugcuga

SEQ ID NO: 2122606 - RNA, 19 nt, Artificial Sequence
  Description of Artificial Sequence: Synthetic oligonucleotide
  Sense strand starting at position 3493 of SEQ ID NO: 1882456
augugauacgacuauucua

SEQ ID NO: 2122607 - RNA, 19 nt, Artificial Sequence
  Description of Artificial Sequence: Synthetic oligonucleotide
  Antisense strand to SEQ ID NO: 2122606
uagaauagucguaucacau

SEQ ID NO: 2122608 - RNA, 19 nt, Artificial Sequence
  Description of Artificial Sequence: Synthetic oligonucleotide
  Sense strand starting at position 3611 of SEQ ID NO: 1882456
aauauuguagccuggagaa

SEQ ID NO: 2122609 - RNA, 19 nt, Artificial Sequence
  Description of Artificial Sequence: Synthetic oligonucleotide
  Antisense strand to SEQ ID NO: 2122608
uucuccaggcuacaauauu

SEQ ID NO: 2122610 - RNA, 19 nt, Artificial Sequence
  Description of Artificial Sequence: Synthetic oligonucleotide
  Sense strand starting at position 3613 of SEQ ID NO: 1882456
uauuguagccuggagaacu

SEQ ID NO: 2122611 - RNA, 19 nt, Artificial Sequence
  Description of Artificial Sequence: Synthetic oligonucleotide
  Antisense strand to SEQ ID NO: 2122610
aguucuccaggcuacaaua

SEQ ID NO: 2122612 - RNA, 19 nt, Artificial Sequence
  Description of Artificial Sequence: Synthetic oligonucleotide
  Sense strand starting at position 3666 of SEQ ID NO: 1882456
gucuccugucaguaaucaa

SEQ ID NO: 2122613 - RNA, 19 nt, Artificial Sequence
  Description of Artificial Sequence: Synthetic oligonucleotide
  Antisense strand to SEQ ID NO: 2122612
uugauuacugacaggagac

SEQ ID NO: 2122614 - RNA, 19 nt, Artificial Sequence
  Description of Artificial Sequence: Synthetic oligonucleotide
  Sense strand starting at position 3669 of SEQ ID NO: 1882456
uccugucaguaaucaaauu

SEQ ID NO: 2122615 - RNA, 19 nt, Artificial Sequence
  Description of Artificial Sequence: Synthetic oligonucleotide
  Antisense strand to SEQ ID NO: 2122614
aauuugauuacugacagga

SEQ ID NO: 2122616 - RNA, 19 nt, Artificial Sequence
  Description of Artificial Sequence: Synthetic oligonucleotide
  Sense strand starting at position 3814 of SEQ ID NO: 1882456
gcucuuauggauuaaacau

SEQ ID NO: 2122617 - RNA, 19 nt, Artificial Sequence
  Description of Artificial Sequence: Synthetic oligonucleotide
  Antisense strand to SEQ ID NO: 2122616
auguuuaauccauaagagc

SEQ ID NO: 2122618 - RNA, 19 nt, Artificial Sequence
  Description of Artificial Sequence: Synthetic oligonucleotide
  Sense strand starting at position 3853 of SEQ ID NO: 1882456
ggacuuaauuuccagauca

SEQ ID NO: 2122619 - RNA, 19 nt, Artificial Sequence
  Description of Artificial Sequence: Synthetic oligonucleotide
  Antisense strand to SEQ ID NO: 2122618
ugaucuggaaauuaagucc

SEQ ID NO: 2122620 - RNA, 19 nt, Artificial Sequence
  Description of Artificial Sequence: Synthetic oligonucleotide
  Sense strand starting at position 3909 of SEQ ID NO: 1882456
aaggaagucugccuuauuc

SEQ ID NO: 2122621 - RNA, 19 nt, Artificial Sequence
  Description of Artificial Sequence: Synthetic oligonucleotide
  Antisense strand to SEQ ID NO: 2122620
gaauaaggcagacuuccuu

SEQ ID NO: 2122622 - RNA, 19 nt, Artificial Sequence
  Description of Artificial Sequence: Synthetic oligonucleotide
  Sense strand starting at position 3911 of SEQ ID NO: 1882456
ggaagucugccuuauucga

SEQ ID NO: 2122623 - RNA, 19 nt, Artificial Sequence
  Description of Artificial Sequence: Synthetic oligonucleotide
  Antisense strand to SEQ ID NO: 2122622
ucgaauaaggcagacuucc

SEQ ID NO: 2122624 - RNA, 19 nt, Artificial Sequence
  Description of Artificial Sequence: Synthetic oligonucleotide
  Sense strand starting at position 3949 of SEQ ID NO: 1882456
uuuaacuggugaucuugaa

SEQ ID NO: 2122625 - RNA, 19 nt, Artificial Sequence
  Description of Artificial Sequence: Synthetic oligonucleotide
  Antisense strand to SEQ ID NO: 2122624
uucaagaucaccaguuaaa

SEQ ID NO: 2122626 - RNA, 19 nt, Artificial Sequence
  Description of Artificial Sequence: Synthetic oligonucleotide
  Sense strand starting at position 87 of SEQ ID NO: 1882457
cagaaaugccgagaaguua

SEQ ID NO: 2122627 - RNA, 19 nt, Artificial Sequence
  Description of Artificial Sequence: Synthetic oligonucleotide
  Antisense strand to SEQ ID NO: 2122626
uaacuucucggcauuucug

SEQ ID NO: 2122628 - RNA, 19 nt, Artificial Sequence
  Description of Artificial Sequence: Synthetic oligonucleotide
  Sense strand starting at position 96 of SEQ ID NO: 1882457
cgagaaguuagauaguauu

SEQ ID NO: 2122629 - RNA, 19 nt, Artificial Sequence
  Description of Artificial Sequence: Synthetic oligonucleotide
  Antisense strand to SEQ ID NO: 2122628
aauacuaucuaacuucucg

SEQ ID NO: 2122630 - RNA, 19 nt, Artificial Sequence
  Description of Artificial Sequence: Synthetic oligonucleotide
  Sense strand starting at position 769 of SEQ ID NO: 1882457
uugguauuacuugaguaga

SEQ ID NO: 2122631 - RNA, 19 nt, Artificial Sequence
  Description of Artificial Sequence: Synthetic oligonucleotide
  Antisense strand to SEQ ID NO: 2122630
ucuacucaaguaauaccaa

SEQ ID NO: 2122632 - RNA, 19 nt, Artificial Sequence
  Description of Artificial Sequence: Synthetic oligonucleotide
  Sense strand starting at position 771 of SEQ ID NO: 1882457
gguauuacuugaguagaac

SEQ ID NO: 2122633 - RNA, 19 nt, Artificial Sequence
  Description of Artificial Sequence: Synthetic oligonucleotide
  Antisense strand to SEQ ID NO: 2122632
guucuacucaaguaauacc

SEQ ID NO: 2122634 - RNA, 19 nt, Artificial Sequence
  Description of Artificial Sequence: Synthetic oligonucleotide
  Sense strand starting at position 772 of SEQ ID NO: 1882457
guauuacuugaguagaacu

SEQ ID NO: 2122635 - RNA, 19 nt, Artificial Sequence
  Description of Artificial Sequence: Synthetic oligonucleotide
  Antisense strand to SEQ ID NO: 2122634
aguucuacucaaguaauac

SEQ ID NO: 2122636 - RNA, 19 nt, Artificial Sequence
  Description of Artificial Sequence: Synthetic oligonucleotide
  Sense strand starting at position 830 of SEQ ID NO: 1882457
guaagcuuugcugugaugu

SEQ ID NO: 2122637 - RNA, 19 nt, Artificial Sequence
  Description of Artificial Sequence: Synthetic oligonucleotide
  Antisense strand to SEQ ID NO: 2122636
acaucacagcaaagcuuac

SEQ ID NO: 2122638 - RNA, 19 nt, Artificial Sequence
  Description of Artificial Sequence: Synthetic oligonucleotide
  Sense strand starting at position 1059 of SEQ ID NO: 1882457
uggauaacguaccuaauua

SEQ ID NO: 2122639 - RNA, 19 nt, Artificial Sequence
  Description of Artificial Sequence: Synthetic oligonucleotide
  Antisense strand to SEQ ID NO: 2122638
uaauuagguacguuaucca

SEQ ID NO: 2122640 - RNA, 19 nt, Artificial Sequence
  Description of Artificial Sequence: Synthetic oligonucleotide
  Sense strand starting at position 1075 of SEQ ID NO: 1882457
uuaggcuaccaguaaacaa

SEQ ID NO: 2122641 - RNA, 19 nt, Artificial Sequence
  Description of Artificial Sequence: Synthetic oligonucleotide
  Antisense strand to SEQ ID NO: 2122640
uuguuuacugguagccuaa

SEQ ID NO: 2122642 - RNA, 19 nt, Artificial Sequence
  Description of Artificial Sequence: Synthetic oligonucleotide
  Sense strand starting at position 1172 of SEQ ID NO: 1882457
ugagguuacaguugaaacu

SEQ ID NO: 2122643 - RNA, 19 nt, Artificial Sequence
  Description of Artificial Sequence: Synthetic oligonucleotide
  Antisense strand to SEQ ID NO: 2122642
aguuucaacuguaaccuca

SEQ ID NO: 2122644 - RNA, 19 nt, Artificial Sequence
  Description of Artificial Sequence: Synthetic oligonucleotide
  Sense strand starting at position 1183 of SEQ ID NO: 1882457
uugaaacuauggguuauca

SEQ ID NO: 2122645 - RNA, 19 nt, Artificial Sequence
  Description of Artificial Sequence: Synthetic oligonucleotide
  Antisense strand to SEQ ID NO: 2122644
ugauaacccauaguuucaa

SEQ ID NO: 2122646 - RNA, 19 nt, Artificial Sequence
  Description of Artificial Sequence: Synthetic oligonucleotide
  Sense strand starting at position 1187 of SEQ ID NO: 1882457
aacuauggguuaucaaugu

SEQ ID NO: 2122647 - RNA, 19 nt, Artificial Sequence
  Description of Artificial Sequence: Synthetic oligonucleotide
  Antisense strand to SEQ ID NO: 2122646
acauugauaacccauaguu

SEQ ID NO: 2122648 - RNA, 19 nt, Artificial Sequence
  Description of Artificial Sequence: Synthetic oligonucleotide
  Sense strand starting at position 1194 of SEQ ID NO: 1882457
gguuaucaauguccacaga

SEQ ID NO: 2122649 - RNA, 19 nt, Artificial Sequence
  Description of Artificial Sequence: Synthetic oligonucleotide
  Antisense strand to SEQ ID NO: 2122648
ucuguggacauugauaacc

SEQ ID NO: 2122650 - RNA, 19 nt, Artificial Sequence
  Description of Artificial Sequence: Synthetic oligonucleotide
  Sense strand starting at position 1195 of SEQ ID NO: 1882457
guuaucaauguccacagaa

SEQ ID NO: 2122651 - RNA, 19 nt, Artificial Sequence
  Description of Artificial Sequence: Synthetic oligonucleotide
  Antisense strand to SEQ ID NO: 2122650
uucuguggacauugauaac

SEQ ID NO: 2122652 - RNA, 19 nt, Artificial Sequence
  Description of Artificial Sequence: Synthetic oligonucleotide
  Sense strand starting at position 1213 of SEQ ID NO: 1882457
auauacuggcccuagguaa

SEQ ID NO: 2122653 - RNA, 19 nt, Artificial Sequence
  Description of Artificial Sequence: Synthetic oligonucleotide
  Antisense strand to SEQ ID NO: 2122652
uuaccuagggccaguauau

SEQ ID NO: 2122654 - RNA, 19 nt, Artificial Sequence
  Description of Artificial Sequence: Synthetic oligonucleotide
  Sense strand starting at position 1265 of SEQ ID NO: 1882457
uuuacauaugcucauguga

SEQ ID NO: 2122655 - RNA, 19 nt, Artificial Sequence
  Description of Artificial Sequence: Synthetic oligonucleotide
  Antisense strand to SEQ ID NO: 2122654
ucacaugagcauauguaaa

SEQ ID NO: 2122656 - RNA, 19 nt, Artificial Sequence
  Description of Artificial Sequence: Synthetic oligonucleotide
  Sense strand starting at position 1498 of SEQ ID NO: 1882457
uaauauucccgaggaagua

SEQ ID NO: 2122657 - RNA, 19 nt, Artificial Sequence
  Description of Artificial Sequence: Synthetic oligonucleotide
  Antisense strand to SEQ ID NO: 2122656
uacuuccucgggaauauua

SEQ ID NO: 2122658 - RNA, 19 nt, Artificial Sequence
  Description of Artificial Sequence: Synthetic oligonucleotide
  Sense strand starting at position 1517 of SEQ ID NO: 1882457
acaguaugguacuuauuaa

SEQ ID NO: 2122659 - RNA, 19 nt, Artificial Sequence
  Description of Artificial Sequence: Synthetic oligonucleotide
  Antisense strand to SEQ ID NO: 2122658
uuaauaaguaccauacugu

SEQ ID NO: 2122660 - RNA, 19 nt, Artificial Sequence
  Description of Artificial Sequence: Synthetic oligonucleotide
  Sense strand starting at position 1524 of SEQ ID NO: 1882457
gguacuuauuaagccaaau

SEQ ID NO: 2122661 - RNA, 19 nt, Artificial Sequence
  Description of Artificial Sequence: Synthetic oligonucleotide
  Antisense strand to SEQ ID NO: 2122660
auuuggcuuaauaaguacc

SEQ ID NO: 2122662 - RNA, 19 nt, Artificial Sequence
  Description of Artificial Sequence: Synthetic oligonucleotide
  Sense strand starting at position 1771 of SEQ ID NO: 1882457
agagcucuugcucacagaa

SEQ ID NO: 2122663 - RNA, 19 nt, Artificial Sequence
  Description of Artificial Sequence: Synthetic oligonucleotide
  Antisense strand to SEQ ID NO: 2122662
uucugugagcaagagcucu

SEQ ID NO: 2122664 - RNA, 19 nt, Artificial Sequence
  Description of Artificial Sequence: Synthetic oligonucleotide
  Sense strand starting at position 1784 of SEQ ID NO: 1882457
acagaagacauccgugacu

SEQ ID NO: 2122665 - RNA, 19 nt, Artificial Sequence
  Description of Artificial Sequence: Synthetic oligonucleotide
  Antisense strand to SEQ ID NO: 2122664
agucacggaugucuucugu

SEQ ID NO: 2122666 - RNA, 19 nt, Artificial Sequence
  Description of Artificial Sequence: Synthetic oligonucleotide
  Sense strand starting at position 2037 of SEQ ID NO: 1882457
agaccuuuaugagccucaa

SEQ ID NO: 2122667 - RNA, 19 nt, Artificial Sequence
  Description of Artificial Sequence: Synthetic oligonucleotide
  Antisense strand to SEQ ID NO: 2122666
uugaggcucauaaaggucu

SEQ ID NO: 2122668 - RNA, 19 nt, Artificial Sequence
  Description of Artificial Sequence: Synthetic oligonucleotide
  Sense strand starting at position 2196 of SEQ ID NO: 1882457
gguauacgccuugaacaag

SEQ ID NO: 2122669 - RNA, 19 nt, Artificial Sequence
  Description of Artificial Sequence: Synthetic oligonucleotide
  Antisense strand to SEQ ID NO: 2122668
cuuguucaaggcguauacc

SEQ ID NO: 2122670 - RNA, 19 nt, Artificial Sequence
  Description of Artificial Sequence: Synthetic oligonucleotide
  Sense strand starting at position 2362 of SEQ ID NO: 1882457
ugcuuauagugacugagaa

SEQ ID NO: 2122671 - RNA, 19 nt, Artificial Sequence
  Description of Artificial Sequence: Synthetic oligonucleotide
  Antisense strand to SEQ ID NO: 2122670
uucucagucacuauaagca

SEQ ID NO: 2122672 - RNA, 19 nt, Artificial Sequence
  Description of Artificial Sequence: Synthetic oligonucleotide
  Sense strand starting at position 2363 of SEQ ID NO: 1882457
gcuuauagugacugagaaa

SEQ ID NO: 2122673 - RNA, 19 nt, Artificial Sequence
  Description of Artificial Sequence: Synthetic oligonucleotide
  Antisense strand to SEQ ID NO: 2122672
uuucucagucacuauaagc

SEQ ID NO: 2122674 - RNA, 19 nt, Artificial Sequence
  Description of Artificial Sequence: Synthetic oligonucleotide
  Sense strand starting at position 2535 of SEQ ID NO: 1882457
gcgcgcuuccaaguauaaa

SEQ ID NO: 2122675 - RNA, 19 nt, Artificial Sequence
  Description of Artificial Sequence: Synthetic oligonucleotide
  Antisense strand to SEQ ID NO: 2122674
uuuauacuuggaagcgcgc

SEQ ID NO: 2122676 - RNA, 19 nt, Artificial Sequence
  Description of Artificial Sequence: Synthetic oligonucleotide
  Sense strand starting at position 2600 of SEQ ID NO: 1882457
uucuuaaucgucuagaaua

SEQ ID NO: 2122677 - RNA, 19 nt, Artificial Sequence
  Description of Artificial Sequence: Synthetic oligonucleotide
  Antisense strand to SEQ ID NO: 2122676
uauucuagacgauuaagaa

SEQ ID NO: 2122678 - RNA, 19 nt, Artificial Sequence
  Description of Artificial Sequence: Synthetic oligonucleotide
  Sense strand starting at position 2751 of SEQ ID NO: 1882457
uuggaugaguaauauuuag

SEQ ID NO: 2122679 - RNA, 19 nt, Artificial Sequence
  Description of Artificial Sequence: Synthetic oligonucleotide
  Antisense strand to SEQ ID NO: 2122678
cuaaauauuacucauccaa

SEQ ID NO: 2122680 - RNA, 19 nt, Artificial Sequence
  Description of Artificial Sequence: Synthetic oligonucleotide
  Sense strand starting at position 2776 of SEQ ID NO: 1882457
ucgcuuucuguugcaggua

SEQ ID NO: 2122681 - RNA, 19 nt, Artificial Sequence
  Description of Artificial Sequence: Synthetic oligonucleotide
  Antisense strand to SEQ ID NO: 2122680
uaccugcaacagaaagcga

SEQ ID NO: 2122682 - RNA, 19 nt, Artificial Sequence
  Description of Artificial Sequence: Synthetic oligonucleotide
  Sense strand starting at position 3011 of SEQ ID NO: 1882457
auggcaucagcucauuaau

SEQ ID NO: 2122683 - RNA, 19 nt, Artificial Sequence
  Description of Artificial Sequence: Synthetic oligonucleotide
  Antisense strand to SEQ ID NO: 2122682
auuaaugagcugaugccau

SEQ ID NO: 2122684 - RNA, 19 nt, Artificial Sequence
  Description of Artificial Sequence: Synthetic oligonucleotide
  Sense strand starting at position 3211 of SEQ ID NO: 1882457
auugcuucuccagagagau

SEQ ID NO: 2122685 - RNA, 19 nt, Artificial Sequence
  Description of Artificial Sequence: Synthetic oligonucleotide
  Antisense strand to SEQ ID NO: 2122684
aucucucuggagaagcaau

SEQ ID NO: 2122686 - RNA, 19 nt, Artificial Sequence
  Description of Artificial Sequence: Synthetic oligonucleotide
  Sense strand starting at position 3315 of SEQ ID NO: 1882457
ccugaagucccugacuacu

SEQ ID NO: 2122687 - RNA, 19 nt, Artificial Sequence
  Description of Artificial Sequence: Synthetic oligonucleotide
  Antisense strand to SEQ ID NO: 2122686
aguagucagggacuucagg

SEQ ID NO: 2122688 - RNA, 19 nt, Artificial Sequence
  Description of Artificial Sequence: Synthetic oligonucleotide
  Sense strand starting at position 3323 of SEQ ID NO: 1882457
cccugacuacuguggagau

SEQ ID NO: 2122689 - RNA, 19 nt, Artificial Sequence
  Description of Artificial Sequence: Synthetic oligonucleotide
  Antisense strand to SEQ ID NO: 2122688
aucuccacaguagucaggg

SEQ ID NO: 2122690 - RNA, 19 nt, Artificial Sequence
  Description of Artificial Sequence: Synthetic oligonucleotide
  Sense strand starting at position 3568 of SEQ ID NO: 1882457
uuguuacaccucugaauga

SEQ ID NO: 2122691 - RNA, 19 nt, Artificial Sequence
  Description of Artificial Sequence: Synthetic oligonucleotide
  Antisense strand to SEQ ID NO: 2122690
ucauucagagguguaacaa

SEQ ID NO: 2122692 - RNA, 19 nt, Artificial Sequence
  Description of Artificial Sequence: Synthetic oligonucleotide
  Sense strand starting at position 3767 of SEQ ID NO: 1882457
acaguaaagcaggguauua

SEQ ID NO: 2122693 - RNA, 19 nt, Artificial Sequence
  Description of Artificial Sequence: Synthetic oligonucleotide
  Antisense strand to SEQ ID NO: 2122692
uaauacccugcuuuacugu

SEQ ID NO: 2122694 - RNA, 19 nt, Artificial Sequence
  Description of Artificial Sequence: Synthetic oligonucleotide
  Sense strand starting at position 3777 of SEQ ID NO: 1882457
aggguauuaagaggcagua

SEQ ID NO: 2122695 - RNA, 19 nt, Artificial Sequence
  Description of Artificial Sequence: Synthetic oligonucleotide
  Antisense strand to SEQ ID NO: 2122694
uacugccucuuaauacccu

SEQ ID NO: 2122696 - RNA, 19 nt, Artificial Sequence
  Description of Artificial Sequence: Synthetic oligonucleotide
  Sense strand starting at position 3779 of SEQ ID NO: 1882457
gguauuaagaggcaguaau

SEQ ID NO: 2122697 - RNA, 19 nt, Artificial Sequence
  Description of Artificial Sequence: Synthetic oligonucleotide
  Antisense strand to SEQ ID NO: 2122696
auuacugccucuuaauacc

SEQ ID NO: 2122698 - RNA, 19 nt, Artificial Sequence
  Description of Artificial Sequence: Synthetic oligonucleotide
  Sense strand starting at position 3846 of SEQ ID NO: 1882457
gaaggcaggugaucaguaa

SEQ ID NO: 2122699 - RNA, 19 nt, Artificial Sequence
  Description of Artificial Sequence: Synthetic oligonucleotide
  Antisense strand to SEQ ID NO: 2122698
uuacugaucaccugccuuc

SEQ ID NO: 2122700 - RNA, 19 nt, Artificial Sequence
  Description of Artificial Sequence: Synthetic oligonucleotide
  Sense strand starting at position 3870 of SEQ ID NO: 1882457
gugaaccagguguacauua

SEQ ID NO: 2122701 - RNA, 19 nt, Artificial Sequence
  Description of Artificial Sequence: Synthetic oligonucleotide
  Antisense strand to SEQ ID NO: 2122700
uaauguacaccugguucac

SEQ ID NO: 2122702 - RNA, 19 nt, Artificial Sequence
  Description of Artificial Sequence: Synthetic oligonucleotide
  Sense strand starting at position 3872 of SEQ ID NO: 1882457
gaaccagguguacauuauu

SEQ ID NO: 2122703 - RNA, 19 nt, Artificial Sequence
  Description of Artificial Sequence: Synthetic oligonucleotide
  Antisense strand to SEQ ID NO: 2122702
aauaauguacaccugguuc

SEQ ID NO: 2122704 - RNA, 19 nt, Artificial Sequence
  Description of Artificial Sequence: Synthetic oligonucleotide
  Sense strand starting at position 3908 of SEQ ID NO: 1882457
ggaccuuuauucucaaagu

SEQ ID NO: 2122705 - RNA, 19 nt, Artificial Sequence
  Description of Artificial Sequence: Synthetic oligonucleotide
  Antisense strand to SEQ ID NO: 2122704
acuuugagaauaaaggucc

SEQ ID NO: 2122706 - RNA, 19 nt, Artificial Sequence
  Description of Artificial Sequence: Synthetic oligonucleotide
  Sense strand starting at position 96 of SEQ ID NO: 1882458
gcuccucugagcuaacgau

SEQ ID NO: 2122707 - RNA, 19 nt, Artificial Sequence
  Description of Artificial Sequence: Synthetic oligonucleotide
  Antisense strand to SEQ ID NO: 2122706
aucguuagcucagaggagc

SEQ ID NO: 2122708 - RNA, 19 nt, Artificial Sequence
  Description of Artificial Sequence: Synthetic oligonucleotide
  Sense strand starting at position 262 of SEQ ID NO: 1882458
ggaauuagauaauauagga

SEQ ID NO: 2122709 - RNA, 19 nt, Artificial Sequence
  Description of Artificial Sequence: Synthetic oligonucleotide
  Antisense strand to SEQ ID NO: 2122708
uccuauauuaucuaauucc

SEQ ID NO: 2122710 - RNA, 19 nt, Artificial Sequence
  Description of Artificial Sequence: Synthetic oligonucleotide
  Sense strand starting at position 290 of SEQ ID NO: 1882458
guuagaaauauccagucgu

SEQ ID NO: 2122711 - RNA, 19 nt, Artificial Sequence
  Description of Artificial Sequence: Synthetic oligonucleotide
  Antisense strand to SEQ ID NO: 2122710
acgacuggauauuucuaac

SEQ ID NO: 2122712 - RNA, 19 nt, Artificial Sequence
  Description of Artificial Sequence: Synthetic oligonucleotide
  Sense strand starting at position 318 of SEQ ID NO: 1882458
gacacaugugagugcagaa

SEQ ID NO: 2122713 - RNA, 19 nt, Artificial Sequence
  Description of Artificial Sequence: Synthetic oligonucleotide
  Antisense strand to SEQ ID NO: 2122712
uucugcacucacauguguc

SEQ ID NO: 2122714 - RNA, 19 nt, Artificial Sequence
  Description of Artificial Sequence: Synthetic oligonucleotide
  Sense strand starting at position 331 of SEQ ID NO: 1882458
gcagaaggcuaagcuauuu

SEQ ID NO: 2122715 - RNA, 19 nt, Artificial Sequence
  Description of Artificial Sequence: Synthetic oligonucleotide
  Antisense strand to SEQ ID NO: 2122714
aaauagcuuagccuucugc

SEQ ID NO: 2122716 - RNA, 19 nt, Artificial Sequence
  Description of Artificial Sequence: Synthetic oligonucleotide
  Sense strand starting at position 372 of SEQ ID NO: 1882458
uguuguuuccaauagcaga

SEQ ID NO: 2122717 - RNA, 19 nt, Artificial Sequence
  Description of Artificial Sequence: Synthetic oligonucleotide
  Antisense strand to SEQ ID NO: 2122716
ucugcuauuggaaacaaca

SEQ ID NO: 2122718 - RNA, 19 nt, Artificial Sequence
  Description of Artificial Sequence: Synthetic oligonucleotide
  Sense strand starting at position 636 of SEQ ID NO: 1882458
cacugaaagucuuuggaua

SEQ ID NO: 2122719 - RNA, 19 nt, Artificial Sequence
  Description of Artificial Sequence: Synthetic oligonucleotide
  Antisense strand to SEQ ID NO: 2122718
uauccaaagacuuucagug

SEQ ID NO: 2122720 - RNA, 19 nt, Artificial Sequence
  Description of Artificial Sequence: Synthetic oligonucleotide
  Sense strand starting at position 637 of SEQ ID NO: 1882458
acugaaagucuuuggauau

SEQ ID NO: 2122721 - RNA, 19 nt, Artificial Sequence
  Description of Artificial Sequence: Synthetic oligonucleotide
  Antisense strand to SEQ ID NO: 2122720
auauccaaagacuuucagu

SEQ ID NO: 2122722 - RNA, 19 nt, Artificial Sequence
  Description of Artificial Sequence: Synthetic oligonucleotide
  Sense strand starting at position 761 of SEQ ID NO: 1882458
cgacuauuauccuuggcaa

SEQ ID NO: 2122723 - RNA, 19 nt, Artificial Sequence
  Description of Artificial Sequence: Synthetic oligonucleotide
  Antisense strand to SEQ ID NO: 2122722
uugccaaggauaauagucg

SEQ ID NO: 2122724 - RNA, 19 nt, Artificial Sequence
  Description of Artificial Sequence: Synthetic oligonucleotide
  Sense strand starting at position 763 of SEQ ID NO: 1882458
acuauuauccuuggcaaag

SEQ ID NO: 2122725 - RNA, 19 nt, Artificial Sequence
  Description of Artificial Sequence: Synthetic oligonucleotide
  Antisense strand to SEQ ID NO: 2122724
cuuugccaaggauaauagu

SEQ ID NO: 2122726 - RNA, 19 nt, Artificial Sequence
  Description of Artificial Sequence: Synthetic oligonucleotide
  Sense strand starting at position 764 of SEQ ID NO: 1882458
cuauuauccuuggcaaagu

SEQ ID NO: 2122727 - RNA, 19 nt, Artificial Sequence
  Description of Artificial Sequence: Synthetic oligonucleotide
  Antisense strand to SEQ ID NO: 2122726
acuuugccaaggauaauag

SEQ ID NO: 2122728 - RNA, 19 nt, Artificial Sequence
  Description of Artificial Sequence: Synthetic oligonucleotide
  Sense strand starting at position 806 of SEQ ID NO: 1882458
cagcauuucucggcccuga

SEQ ID NO: 2122729 - RNA, 19 nt, Artificial Sequence
  Description of Artificial Sequence: Synthetic oligonucleotide
  Antisense strand to SEQ ID NO: 2122728
ucagggccgagaaaugcug

SEQ ID NO: 2122730 - RNA, 19 nt, Artificial Sequence
  Description of Artificial Sequence: Synthetic oligonucleotide
  Sense strand starting at position 1060 of SEQ ID NO: 1882458
uugauugaguaccuauauu

SEQ ID NO: 2122731 - RNA, 19 nt, Artificial Sequence
  Description of Artificial Sequence: Synthetic oligonucleotide
  Antisense strand to SEQ ID NO: 2122730
aauauagguacucaaucaa

SEQ ID NO: 2122732 - RNA, 19 nt, Artificial Sequence
  Description of Artificial Sequence: Synthetic oligonucleotide
  Sense strand starting at position 1131 of SEQ ID NO: 1882458
gcuaauugucuaugacauu

SEQ ID NO: 2122733 - RNA, 19 nt, Artificial Sequence
  Description of Artificial Sequence: Synthetic oligonucleotide
  Antisense strand to SEQ ID NO: 2122732
aaugucauagacaauuagc

SEQ ID NO: 2122734 - RNA, 19 nt, Artificial Sequence
  Description of Artificial Sequence: Synthetic oligonucleotide
  Sense strand starting at position 1137 of SEQ ID NO: 1882458
ugucuaugacauugguauu

SEQ ID NO: 2122735 - RNA, 19 nt, Artificial Sequence
  Description of Artificial Sequence: Synthetic oligonucleotide
  Antisense strand to SEQ ID NO: 2122734
aauaccaaugucauagaca

SEQ ID NO: 2122736 - RNA, 19 nt, Artificial Sequence
  Description of Artificial Sequence: Synthetic oligonucleotide
  Sense strand starting at position 1203 of SEQ ID NO: 1882458
ugauaagacuuauaagagg

SEQ ID NO: 2122737 - RNA, 19 nt, Artificial Sequence
  Description of Artificial Sequence: Synthetic oligonucleotide
  Antisense strand to SEQ ID NO: 2122736
ccucuuauaagucuuauca

SEQ ID NO: 2122738 - RNA, 19 nt, Artificial Sequence
  Description of Artificial Sequence: Synthetic oligonucleotide
  Sense strand starting at position 1275 of SEQ ID NO: 1882458
agauguggccgccaucaaa

SEQ ID NO: 2122739 - RNA, 19 nt, Artificial Sequence
  Description of Artificial Sequence: Synthetic oligonucleotide
  Antisense strand to SEQ ID NO: 2122738
uuugauggcggccacaucu

SEQ ID NO: 2122740 - RNA, 19 nt, Artificial Sequence
  Description of Artificial Sequence: Synthetic oligonucleotide
  Sense strand starting at position 1306 of SEQ ID NO: 1882458
aaggcauggucucucaauu

SEQ ID NO: 2122741 - RNA, 19 nt, Artificial Sequence
  Description of Artificial Sequence: Synthetic oligonucleotide
  Antisense strand to SEQ ID NO: 2122740
aauugagagaccaugccuu

SEQ ID NO: 2122742 - RNA, 19 nt, Artificial Sequence
  Description of Artificial Sequence: Synthetic oligonucleotide
  Sense strand starting at position 1418 of SEQ ID NO: 1882458
ggaucucaaugauccucau

SEQ ID NO: 2122743 - RNA, 19 nt, Artificial Sequence
  Description of Artificial Sequence: Synthetic oligonucleotide
  Antisense strand to SEQ ID NO: 2122742
augaggaucauugagaucc

SEQ ID NO: 2122744 - RNA, 19 nt, Artificial Sequence
  Description of Artificial Sequence: Synthetic oligonucleotide
  Sense strand starting at position 1465 of SEQ ID NO: 1882458
ugaaacuauucugcgugaa

SEQ ID NO: 2122745 - RNA, 19 nt, Artificial Sequence
  Description of Artificial Sequence: Synthetic oligonucleotide
  Antisense strand to SEQ ID NO: 2122744
uucacgcagaauaguuuca

SEQ ID NO: 2122746 - RNA, 19 nt, Artificial Sequence
  Description of Artificial Sequence: Synthetic oligonucleotide
  Sense strand starting at position 1466 of SEQ ID NO: 1882458
gaaacuauucugcgugaag

SEQ ID NO: 2122747 - RNA, 19 nt, Artificial Sequence
  Description of Artificial Sequence: Synthetic oligonucleotide
  Antisense strand to SEQ ID NO: 2122746
cuucacgcagaauaguuuc

SEQ ID NO: 2122748 - RNA, 19 nt, Artificial Sequence
  Description of Artificial Sequence: Synthetic oligonucleotide
  Sense strand starting at position 1467 of SEQ ID NO: 1882458
aaacuauucugcgugaagg

SEQ ID NO: 2122749 - RNA, 19 nt, Artificial Sequence
  Description of Artificial Sequence: Synthetic oligonucleotide
  Antisense strand to SEQ ID NO: 2122748
ccuucacgcagaauaguuu

SEQ ID NO: 2122750 - RNA, 19 nt, Artificial Sequence
  Description of Artificial Sequence: Synthetic oligonucleotide
  Sense strand starting at position 1517 of SEQ ID NO: 1882458
cggagucuugggugacaaa

SEQ ID NO: 2122751 - RNA, 19 nt, Artificial Sequence
  Description of Artificial Sequence: Synthetic oligonucleotide
  Antisense strand to SEQ ID NO: 2122750
uuugucacccaagacuccg

SEQ ID NO: 2122752 - RNA, 19 nt, Artificial Sequence
  Description of Artificial Sequence: Synthetic oligonucleotide
  Sense strand starting at position 1530 of SEQ ID NO: 1882458
gacaaagucgcucauugau

SEQ ID NO: 2122753 - RNA, 19 nt, Artificial Sequence
  Description of Artificial Sequence: Synthetic oligonucleotide
  Antisense strand to SEQ ID NO: 2122752
aucaaugagcgacuuuguc

SEQ ID NO: 2122754 - RNA, 19 nt, Artificial Sequence
  Description of Artificial Sequence: Synthetic oligonucleotide
  Sense strand starting at position 1691 of SEQ ID NO: 1882458
gucaaucaagcuugacacu

SEQ ID NO: 2122755 - RNA, 19 nt, Artificial Sequence
  Description of Artificial Sequence: Synthetic oligonucleotide
  Antisense strand to SEQ ID NO: 2122754
agugucaagcuugauugac

SEQ ID NO: 2122756 - RNA, 19 nt, Artificial Sequence
  Description of Artificial Sequence: Synthetic oligonucleotide
  Sense strand starting at position 1779 of SEQ ID NO: 1882458
ugcuuaaauacuggaggau

SEQ ID NO: 2122757 - RNA, 19 nt, Artificial Sequence
  Description of Artificial Sequence: Synthetic oligonucleotide
  Antisense strand to SEQ ID NO: 2122756
auccuccaguauuuaagca

SEQ ID NO: 2122758 - RNA, 19 nt, Artificial Sequence
  Description of Artificial Sequence: Synthetic oligonucleotide
  Sense strand starting at position 1791 of SEQ ID NO: 1882458
ggaggauucugaccaguac

SEQ ID NO: 2122759 - RNA, 19 nt, Artificial Sequence
  Description of Artificial Sequence: Synthetic oligonucleotide
  Antisense strand to SEQ ID NO: 2122758
guacuggucagaauccucc

SEQ ID NO: 2122760 - RNA, 19 nt, Artificial Sequence
  Description of Artificial Sequence: Synthetic oligonucleotide
  Sense strand starting at position 1800 of SEQ ID NO: 1882458
ugaccaguacaaugcuaaa

SEQ ID NO: 2122761 - RNA, 19 nt, Artificial Sequence
  Description of Artificial Sequence: Synthetic oligonucleotide
  Antisense strand to SEQ ID NO: 2122760
uuuagcauuguacugguca

SEQ ID NO: 2122762 - RNA, 19 nt, Artificial Sequence
  Description of Artificial Sequence: Synthetic oligonucleotide
  Sense strand starting at position 1882 of SEQ ID NO: 1882458
uaacuugcucccugugaag

SEQ ID NO: 2122763 - RNA, 19 nt, Artificial Sequence
  Description of Artificial Sequence: Synthetic oligonucleotide
  Antisense strand to SEQ ID NO: 2122762
cuucacagggagcaaguua

SEQ ID NO: 2122764 - RNA, 19 nt, Artificial Sequence
  Description of Artificial Sequence: Synthetic oligonucleotide
  Sense strand starting at position 2057 of SEQ ID NO: 1882458
gugugucuccuagacacua

SEQ ID NO: 2122765 - RNA, 19 nt, Artificial Sequence
  Description of Artificial Sequence: Synthetic oligonucleotide
  Antisense strand to SEQ ID NO: 2122764
uagugucuaggagacacac

SEQ ID NO: 2122766 - RNA, 19 nt, Artificial Sequence
  Description of Artificial Sequence: Synthetic oligonucleotide
  Sense strand starting at position 2139 of SEQ ID NO: 1882458
ccaugugcuguugaggaau

SEQ ID NO: 2122767 - RNA, 19 nt, Artificial Sequence
  Description of Artificial Sequence: Synthetic oligonucleotide
  Antisense strand to SEQ ID NO: 2122766
auuccucaacagcacaugg

SEQ ID NO: 2122768 - RNA, 19 nt, Artificial Sequence
  Description of Artificial Sequence: Synthetic oligonucleotide
  Sense strand starting at position 2142 of SEQ ID NO: 1882458
ugugcuguugaggaauuaa

SEQ ID NO: 2122769 - RNA, 19 nt, Artificial Sequence
  Description of Artificial Sequence: Synthetic oligonucleotide
  Antisense strand to SEQ ID NO: 2122768
uuaauuccucaacagcaca

SEQ ID NO: 2122770 - RNA, 19 nt, Artificial Sequence
  Description of Artificial Sequence: Synthetic oligonucleotide
  Sense strand starting at position 2902 of SEQ ID NO: 1882458
ggcaaacacgauuauuaac

SEQ ID NO: 2122771 - RNA, 19 nt, Artificial Sequence
  Description of Artificial Sequence: Synthetic oligonucleotide
  Antisense strand to SEQ ID NO: 2122770
guuaauaaucguguuugcc

SEQ ID NO: 2122772 - RNA, 19 nt, Artificial Sequence
  Description of Artificial Sequence: Synthetic oligonucleotide
  Sense strand starting at position 3197 of SEQ ID NO: 1882458
gaaacugcagagugauaca

SEQ ID NO: 2122773 - RNA, 19 nt, Artificial Sequence
  Description of Artificial Sequence: Synthetic oligonucleotide
  Antisense strand to SEQ ID NO: 2122772
uguaucacucugcaguuuc

SEQ ID NO: 2122774 - RNA, 19 nt, Artificial Sequence
  Description of Artificial Sequence: Synthetic oligonucleotide
  Sense strand starting at position 3278 of SEQ ID NO: 1882458
gcgucauacauuguccagu

SEQ ID NO: 2122775 - RNA, 19 nt, Artificial Sequence
  Description of Artificial Sequence: Synthetic oligonucleotide
  Antisense strand to SEQ ID NO: 2122774
acuggacaauguaugacgc

SEQ ID NO: 2122776 - RNA, 19 nt, Artificial Sequence
  Description of Artificial Sequence: Synthetic oligonucleotide
  Sense strand starting at position 3345 of SEQ ID NO: 1882458
ugagaacagucuuuccauu

SEQ ID NO: 2122777 - RNA, 19 nt, Artificial Sequence
  Description of Artificial Sequence: Synthetic oligonucleotide
  Antisense strand to SEQ ID NO: 2122776
aauggaaagacuguucuca

SEQ ID NO: 2122778 - RNA, 19 nt, Artificial Sequence
  Description of Artificial Sequence: Synthetic oligonucleotide
  Sense strand starting at position 3582 of SEQ ID NO: 1882458
agaaguuuccaucaguuga

SEQ ID NO: 2122779 - RNA, 19 nt, Artificial Sequence
  Description of Artificial Sequence: Synthetic oligonucleotide
  Antisense strand to SEQ ID NO: 2122778
ucaacugauggaaacuucu

SEQ ID NO: 2122780 - RNA, 19 nt, Artificial Sequence
  Description of Artificial Sequence: Synthetic oligonucleotide
  Sense strand starting at position 3785 of SEQ ID NO: 1882458
auuccuguucgccacauga

SEQ ID NO: 2122781 - RNA, 19 nt, Artificial Sequence
  Description of Artificial Sequence: Synthetic oligonucleotide
  Antisense strand to SEQ ID NO: 2122780
ucauguggcgaacaggaau

SEQ ID NO: 2122782 - RNA, 19 nt, Artificial Sequence
  Description of Artificial Sequence: Synthetic oligonucleotide
  Sense strand starting at position 3794 of SEQ ID NO: 1882458
cgccacaugagcugagaau

SEQ ID NO: 2122783 - RNA, 19 nt, Artificial Sequence
  Description of Artificial Sequence: Synthetic oligonucleotide
  Antisense strand to SEQ ID NO: 2122782
auucucagcucauguggcg

SEQ ID NO: 2122784 - RNA, 19 nt, Artificial Sequence
  Description of Artificial Sequence: Synthetic oligonucleotide
  Sense strand starting at position 3976 of SEQ ID NO: 1882458
ccagcuugcagcgauagaa

SEQ ID NO: 2122785 - RNA, 19 nt, Artificial Sequence
  Description of Artificial Sequence: Synthetic oligonucleotide
  Antisense strand to SEQ ID NO: 2122784
uucuaucgcugcaagcugg

SEQ ID NO: 2122786 - RNA, 19 nt, Artificial Sequence
  Description of Artificial Sequence: Synthetic oligonucleotide
  Sense strand starting at position 52 of SEQ ID NO: 1882459
ugcucuggaggcugagaua

SEQ ID NO: 2122787 - RNA, 19 nt, Artificial Sequence
  Description of Artificial Sequence: Synthetic oligonucleotide
  Antisense strand to SEQ ID NO: 2122786
uaucucagccuccagagca

SEQ ID NO: 2122788 - RNA, 19 nt, Artificial Sequence
  Description of Artificial Sequence: Synthetic oligonucleotide
  Sense strand starting at position 68 of SEQ ID NO: 1882459
auaggagucuuccuugaac

SEQ ID NO: 2122789 - RNA, 19 nt, Artificial Sequence
  Description of Artificial Sequence: Synthetic oligonucleotide
  Antisense strand to SEQ ID NO: 2122788
guucaaggaagacuccuau

SEQ ID NO: 2122790 - RNA, 19 nt, Artificial Sequence
  Description of Artificial Sequence: Synthetic oligonucleotide
  Sense strand starting at position 70 of SEQ ID NO: 1882459
aggagucuuccuugaacuu

SEQ ID NO: 2122791 - RNA, 19 nt, Artificial Sequence
  Description of Artificial Sequence: Synthetic oligonucleotide
  Antisense strand to SEQ ID NO: 2122790
aaguucaaggaagacuccu

SEQ ID NO: 2122792 - RNA, 19 nt, Artificial Sequence
  Description of Artificial Sequence: Synthetic oligonucleotide
  Sense strand starting at position 71 of SEQ ID NO: 1882459
ggagucuuccuugaacuug

SEQ ID NO: 2122793 - RNA, 19 nt, Artificial Sequence
  Description of Artificial Sequence: Synthetic oligonucleotide
  Antisense strand to SEQ ID NO: 2122792
caaguucaaggaagacucc

SEQ ID NO: 2122794 - RNA, 19 nt, Artificial Sequence
  Description of Artificial Sequence: Synthetic oligonucleotide
  Sense strand starting at position 384 of SEQ ID NO: 1882459
gggaaaugugccgaguccu

SEQ ID NO: 2122795 - RNA, 19 nt, Artificial Sequence
  Description of Artificial Sequence: Synthetic oligonucleotide
  Antisense strand to SEQ ID NO: 2122794
aggacucggcacauuuccc

SEQ ID NO: 2122796 - RNA, 19 nt, Artificial Sequence
  Description of Artificial Sequence: Synthetic oligonucleotide
  Sense strand starting at position 498 of SEQ ID NO: 1882459
gagagaaggccguguggau

SEQ ID NO: 2122797 - RNA, 19 nt, Artificial Sequence
  Description of Artificial Sequence: Synthetic oligonucleotide
  Antisense strand to SEQ ID NO: 2122796
auccacacggccuucucuc

SEQ ID NO: 2122798 - RNA, 19 nt, Artificial Sequence
  Description of Artificial Sequence: Synthetic oligonucleotide
  Sense strand starting at position 763 of SEQ ID NO: 1882459
cugagacauugagcccaaa

SEQ ID NO: 2122799 - RNA, 19 nt, Artificial Sequence
  Description of Artificial Sequence: Synthetic oligonucleotide
  Antisense strand to SEQ ID NO: 2122798
uuugggcucaaugucucag

SEQ ID NO: 2122800 - RNA, 19 nt, Artificial Sequence
  Description of Artificial Sequence: Synthetic oligonucleotide
  Sense strand starting at position 766 of SEQ ID NO: 1882459
agacauugagcccaaacgu

SEQ ID NO: 2122801 - RNA, 19 nt, Artificial Sequence
  Description of Artificial Sequence: Synthetic oligonucleotide
  Antisense strand to SEQ ID NO: 2122800
acguuugggcucaaugucu

SEQ ID NO: 2122802 - RNA, 19 nt, Artificial Sequence
  Description of Artificial Sequence: Synthetic oligonucleotide
  Sense strand starting at position 774 of SEQ ID NO: 1882459
agcccaaacguuuauacuu

SEQ ID NO: 2122803 - RNA, 19 nt, Artificial Sequence
  Description of Artificial Sequence: Synthetic oligonucleotide
  Antisense strand to SEQ ID NO: 2122802
aaguauaaacguuugggcu

SEQ ID NO: 2122804 - RNA, 19 nt, Artificial Sequence
  Description of Artificial Sequence: Synthetic oligonucleotide
  Sense strand starting at position 779 of SEQ ID NO: 1882459
aaacguuuauacuuuguga

SEQ ID NO: 2122805 - RNA, 19 nt, Artificial Sequence
  Description of Artificial Sequence: Synthetic oligonucleotide
  Antisense strand to SEQ ID NO: 2122804
ucacaaaguauaaacguuu

SEQ ID NO: 2122806 - RNA, 19 nt, Artificial Sequence
  Description of Artificial Sequence: Synthetic oligonucleotide
  Sense strand starting at position 787 of SEQ ID NO: 1882459
auacuuugugauuauccua

SEQ ID NO: 2122807 - RNA, 19 nt, Artificial Sequence
  Description of Artificial Sequence: Synthetic oligonucleotide
  Antisense strand to SEQ ID NO: 2122806
uaggauaaucacaaaguau

SEQ ID NO: 2122808 - RNA, 19 nt, Artificial Sequence
  Description of Artificial Sequence: Synthetic oligonucleotide
  Sense strand starting at position 790 of SEQ ID NO: 1882459
cuuugugauuauccuaaug

SEQ ID NO: 2122809 - RNA, 19 nt, Artificial Sequence
  Description of Artificial Sequence: Synthetic oligonucleotide
  Antisense strand to SEQ ID NO: 2122808
cauuaggauaaucacaaag

SEQ ID NO: 2122810 - RNA, 19 nt, Artificial Sequence
  Description of Artificial Sequence: Synthetic oligonucleotide
  Sense strand starting at position 806 of SEQ ID NO: 1882459
auggguaccgugcaaagaa

SEQ ID NO: 2122811 - RNA, 19 nt, Artificial Sequence
  Description of Artificial Sequence: Synthetic oligonucleotide
  Antisense strand to SEQ ID NO: 2122810
uucuuugcacgguacccau

SEQ ID NO: 2122812 - RNA, 19 nt, Artificial Sequence
  Description of Artificial Sequence: Synthetic oligonucleotide
  Sense strand starting at position 881 of SEQ ID NO: 1882459
auuggaaaugccuaagucu

SEQ ID NO: 2122813 - RNA, 19 nt, Artificial Sequence
  Description of Artificial Sequence: Synthetic oligonucleotide
  Antisense strand to SEQ ID NO: 2122812
agacuuaggcauuuccaau

SEQ ID NO: 2122814 - RNA, 19 nt, Artificial Sequence
  Description of Artificial Sequence: Synthetic oligonucleotide
  Sense strand starting at position 884 of SEQ ID NO: 1882459
ggaaaugccuaagucuagu

SEQ ID NO: 2122815 - RNA, 19 nt, Artificial Sequence
  Description of Artificial Sequence: Synthetic oligonucleotide
  Antisense strand to SEQ ID NO: 2122814
acuagacuuaggcauuucc

SEQ ID NO: 2122816 - RNA, 19 nt, Artificial Sequence
  Description of Artificial Sequence: Synthetic oligonucleotide
  Sense strand starting at position 912 of SEQ ID NO: 1882459
acagcugagccauaauaca

SEQ ID NO: 2122817 - RNA, 19 nt, Artificial Sequence
  Description of Artificial Sequence: Synthetic oligonucleotide
  Antisense strand to SEQ ID NO: 2122816
uguauuauggcucagcugu

SEQ ID NO: 2122818 - RNA, 19 nt, Artificial Sequence
  Description of Artificial Sequence: Synthetic oligonucleotide
  Sense strand starting at position 1222 of SEQ ID NO: 1882459
agcagugucccugacauga

SEQ ID NO: 2122819 - RNA, 19 nt, Artificial Sequence
  Description of Artificial Sequence: Synthetic oligonucleotide
  Antisense strand to SEQ ID NO: 2122818
ucaugucagggacacugcu

SEQ ID NO: 2122820 - RNA, 19 nt, Artificial Sequence
  Description of Artificial Sequence: Synthetic oligonucleotide
  Sense strand starting at position 1519 of SEQ ID NO: 1882459
gcuguuagagccucgcaga

SEQ ID NO: 2122821 - RNA, 19 nt, Artificial Sequence
  Description of Artificial Sequence: Synthetic oligonucleotide
  Antisense strand to SEQ ID NO: 2122820
ucugcgaggcucuaacagc

SEQ ID NO: 2122822 - RNA, 19 nt, Artificial Sequence
  Description of Artificial Sequence: Synthetic oligonucleotide
  Sense strand starting at position 2124 of SEQ ID NO: 1882459
gugcuuaucaaaugaggua

SEQ ID NO: 2122823 - RNA, 19 nt, Artificial Sequence
  Description of Artificial Sequence: Synthetic oligonucleotide
  Antisense strand to SEQ ID NO: 2122822
uaccucauuugauaagcac

SEQ ID NO: 2122824 - RNA, 19 nt, Artificial Sequence
  Description of Artificial Sequence: Synthetic oligonucleotide
  Sense strand starting at position 2217 of SEQ ID NO: 1882459
agcucagaagugugagauc

SEQ ID NO: 2122825 - RNA, 19 nt, Artificial Sequence
  Description of Artificial Sequence: Synthetic oligonucleotide
  Antisense strand to SEQ ID NO: 2122824
gaucucacacuucugagcu

SEQ ID NO: 2122826 - RNA, 19 nt, Artificial Sequence
  Description of Artificial Sequence: Synthetic oligonucleotide
  Sense strand starting at position 2228 of SEQ ID NO: 1882459
gugagaucagcccaggcaa

SEQ ID NO: 2122827 - RNA, 19 nt, Artificial Sequence
  Description of Artificial Sequence: Synthetic oligonucleotide
  Antisense strand to SEQ ID NO: 2122826
uugccugggcugaucucac

SEQ ID NO: 2122828 - RNA, 19 nt, Artificial Sequence
  Description of Artificial Sequence: Synthetic oligonucleotide
  Sense strand starting at position 2448 of SEQ ID NO: 1882459
cgcugugagaagcacuuua

SEQ ID NO: 2122829 - RNA, 19 nt, Artificial Sequence
  Description of Artificial Sequence: Synthetic oligonucleotide
  Antisense strand to SEQ ID NO: 2122828
uaaagugcuucucacagcg

SEQ ID NO: 2122830 - RNA, 19 nt, Artificial Sequence
  Description of Artificial Sequence: Synthetic oligonucleotide
  Sense strand starting at position 2768 of SEQ ID NO: 1882459
gagccugaugaguguugga

SEQ ID NO: 2122831 - RNA, 19 nt, Artificial Sequence
  Description of Artificial Sequence: Synthetic oligonucleotide
  Antisense strand to SEQ ID NO: 2122830
uccaacacucaucaggcuc

SEQ ID NO: 2122832 - RNA, 19 nt, Artificial Sequence
  Description of Artificial Sequence: Synthetic oligonucleotide
  Sense strand starting at position 2792 of SEQ ID NO: 1882459
cuuucucuccuguggaaac

SEQ ID NO: 2122833 - RNA, 19 nt, Artificial Sequence
  Description of Artificial Sequence: Synthetic oligonucleotide
  Antisense strand to SEQ ID NO: 2122832
guuuccacaggagagaaag

SEQ ID NO: 2122834 - RNA, 19 nt, Artificial Sequence
  Description of Artificial Sequence: Synthetic oligonucleotide
  Sense strand starting at position 2807 of SEQ ID NO: 1882459
aaaccaucucgaggagguu

SEQ ID NO: 2122835 - RNA, 19 nt, Artificial Sequence
  Description of Artificial Sequence: Synthetic oligonucleotide
  Antisense strand to SEQ ID NO: 2122834
aaccuccucgagaugguuu

SEQ ID NO: 2122836 - RNA, 19 nt, Artificial Sequence
  Description of Artificial Sequence: Synthetic oligonucleotide
  Sense strand starting at position 2854 of SEQ ID NO: 1882459
guuggucagcuccaacuua

SEQ ID NO: 2122837 - RNA, 19 nt, Artificial Sequence
  Description of Artificial Sequence: Synthetic oligonucleotide
  Antisense strand to SEQ ID NO: 2122836
uaaguuggagcugaccaac

SEQ ID NO: 2122838 - RNA, 19 nt, Artificial Sequence
  Description of Artificial Sequence: Synthetic oligonucleotide
  Sense strand starting at position 2987 of SEQ ID NO: 1882459
cugcuucgugccuuugcaa

SEQ ID NO: 2122839 - RNA, 19 nt, Artificial Sequence
  Description of Artificial Sequence: Synthetic oligonucleotide
  Antisense strand to SEQ ID NO: 2122838
uugcaaaggcacgaagcag

SEQ ID NO: 2122840 - RNA, 19 nt, Artificial Sequence
  Description of Artificial Sequence: Synthetic oligonucleotide
  Sense strand starting at position 2988 of SEQ ID NO: 1882459
ugcuucgugccuuugcaaa

SEQ ID NO: 2122841 - RNA, 19 nt, Artificial Sequence
  Description of Artificial Sequence: Synthetic oligonucleotide
  Antisense strand to SEQ ID NO: 2122840
uuugcaaaggcacgaagca

SEQ ID NO: 2122842 - RNA, 19 nt, Artificial Sequence
  Description of Artificial Sequence: Synthetic oligonucleotide
  Sense strand starting at position 3053 of SEQ ID NO: 1882459
cuuagcugugaaggagaaa

SEQ ID NO: 2122843 - RNA, 19 nt, Artificial Sequence
  Description of Artificial Sequence: Synthetic oligonucleotide
  Antisense strand to SEQ ID NO: 2122842
uuucuccuucacagcuaag

SEQ ID NO: 2122844 - RNA, 19 nt, Artificial Sequence
  Description of Artificial Sequence: Synthetic oligonucleotide
  Sense strand starting at position 3251 of SEQ ID NO: 1882459
gugugcauaguccauuaca

SEQ ID NO: 2122845 - RNA, 19 nt, Artificial Sequence
  Description of Artificial Sequence: Synthetic oligonucleotide
  Antisense strand to SEQ ID NO: 2122844
uguaauggacuaugcacac

SEQ ID NO: 2122846 - RNA, 19 nt, Artificial Sequence
  Description of Artificial Sequence: Synthetic oligonucleotide
  Sense strand starting at position 3454 of SEQ ID NO: 1882459
guuacaaaucuguauuauc

SEQ ID NO: 2122847 - RNA, 19 nt, Artificial Sequence
  Description of Artificial Sequence: Synthetic oligonucleotide
  Antisense strand to SEQ ID NO: 2122846
gauaauacagauuuguaac

SEQ ID NO: 2122848 - RNA, 19 nt, Artificial Sequence
  Description of Artificial Sequence: Synthetic oligonucleotide
  Sense strand starting at position 3488 of SEQ ID NO: 1882459
guauauagcugaucauuaa

SEQ ID NO: 2122849 - RNA, 19 nt, Artificial Sequence
  Description of Artificial Sequence: Synthetic oligonucleotide
  Antisense strand to SEQ ID NO: 2122848
uuaaugaucagcuauauac

SEQ ID NO: 2122850 - RNA, 19 nt, Artificial Sequence
  Description of Artificial Sequence: Synthetic oligonucleotide
  Sense strand starting at position 3507 of SEQ ID NO: 1882459
uaagguguauaaguacaau

SEQ ID NO: 2122851 - RNA, 19 nt, Artificial Sequence
  Description of Artificial Sequence: Synthetic oligonucleotide
  Antisense strand to SEQ ID NO: 2122850
auuguacuuauacaccuua

SEQ ID NO: 2122852 - RNA, 19 nt, Artificial Sequence
  Description of Artificial Sequence: Synthetic oligonucleotide
  Sense strand starting at position 3510 of SEQ ID NO: 1882459
gguguauaaguacaaugua

SEQ ID NO: 2122853 - RNA, 19 nt, Artificial Sequence
  Description of Artificial Sequence: Synthetic oligonucleotide
  Antisense strand to SEQ ID NO: 2122852
uacauuguacuuauacacc

SEQ ID NO: 2122854 - RNA, 19 nt, Artificial Sequence
  Description of Artificial Sequence: Synthetic oligonucleotide
  Sense strand starting at position 3808 of SEQ ID NO: 1882459
ccacguuuccuuuaaugau

SEQ ID NO: 2122855 - RNA, 19 nt, Artificial Sequence
  Description of Artificial Sequence: Synthetic oligonucleotide
  Antisense strand to SEQ ID NO: 2122854
aucauuaaaggaaacgugg

SEQ ID NO: 2122856 - RNA, 19 nt, Artificial Sequence
  Description of Artificial Sequence: Synthetic oligonucleotide
  Sense strand starting at position 3852 of SEQ ID NO: 1882459
gcaugaaguuucuuacuca

SEQ ID NO: 2122857 - RNA, 19 nt, Artificial Sequence
  Description of Artificial Sequence: Synthetic oligonucleotide
  Antisense strand to SEQ ID NO: 2122856
ugaguaagaaacuucaugc

SEQ ID NO: 2122858 - RNA, 19 nt, Artificial Sequence
  Description of Artificial Sequence: Synthetic oligonucleotide
  Sense strand starting at position 3855 of SEQ ID NO: 1882459
ugaaguuucuuacucagac

SEQ ID NO: 2122859 - RNA, 19 nt, Artificial Sequence
  Description of Artificial Sequence: Synthetic oligonucleotide
  Antisense strand to SEQ ID NO: 2122858
gucugaguaagaaacuuca

SEQ ID NO: 2122860 - RNA, 19 nt, Artificial Sequence
  Description of Artificial Sequence: Synthetic oligonucleotide
  Sense strand starting at position 3935 of SEQ ID NO: 1882459
gagaauaaucgcgagaauc

SEQ ID NO: 2122861 - RNA, 19 nt, Artificial Sequence
  Description of Artificial Sequence: Synthetic oligonucleotide
  Antisense strand to SEQ ID NO: 2122860
gauucucgcgauuauucuc

SEQ ID NO: 2122862 - RNA, 19 nt, Artificial Sequence
  Description of Artificial Sequence: Synthetic oligonucleotide
  Sense strand starting at position 3937 of SEQ ID NO: 1882459
gaauaaucgcgagaaucag

SEQ ID NO: 2122863 - RNA, 19 nt, Artificial Sequence
  Description of Artificial Sequence: Synthetic oligonucleotide
  Antisense strand to SEQ ID NO: 2122862
cugauucucgcgauuauuc

SEQ ID NO: 2122864 - RNA, 19 nt, Artificial Sequence
  Description of Artificial Sequence: Synthetic oligonucleotide
  Sense strand starting at position 3957 of SEQ ID NO: 1882459
ccugcuuggcacuauuaca

SEQ ID NO: 2122865 - RNA, 19 nt, Artificial Sequence
  Description of Artificial Sequence: Synthetic oligonucleotide
  Antisense strand to SEQ ID NO: 2122864
uguaauagugccaagcagg

SEQ ID NO: 2122866 - RNA, 19 nt, Artificial Sequence
  Description of Artificial Sequence: Synthetic oligonucleotide
  Sense strand starting at position 164 of SEQ ID NO: 1882460
accaguaaacccuaauugu

SEQ ID NO: 2122867 - RNA, 19 nt, Artificial Sequence
  Description of Artificial Sequence: Synthetic oligonucleotide
  Antisense strand to SEQ ID NO: 2122866
acaauuaggguuuacuggu

SEQ ID NO: 2122868 - RNA, 19 nt, Artificial Sequence
  Description of Artificial Sequence: Synthetic oligonucleotide
  Sense strand starting at position 172 of SEQ ID NO: 1882460
acccuaauuguuugauggu

SEQ ID NO: 2122869 - RNA, 19 nt, Artificial Sequence
  Description of Artificial Sequence: Synthetic oligonucleotide
  Antisense strand to SEQ ID NO: 2122868
accaucaaacaauuagggu

SEQ ID NO: 2122870 - RNA, 19 nt, Artificial Sequence
  Description of Artificial Sequence: Synthetic oligonucleotide
  Sense strand starting at position 189 of SEQ ID NO: 1882460
guuguaaguagucacuuga

SEQ ID NO: 2122871 - RNA, 19 nt, Artificial Sequence
  Description of Artificial Sequence: Synthetic oligonucleotide
  Antisense strand to SEQ ID NO: 2122870
ucaagugacuacuuacaac

SEQ ID NO: 2122872 - RNA, 19 nt, Artificial Sequence
  Description of Artificial Sequence: Synthetic oligonucleotide
  Sense strand starting at position 345 of SEQ ID NO: 1882460
uuugccuaucuguagaaag

SEQ ID NO: 2122873 - RNA, 19 nt, Artificial Sequence
  Description of Artificial Sequence: Synthetic oligonucleotide
  Antisense strand to SEQ ID NO: 2122872
cuuucuacagauaggcaaa

SEQ ID NO: 2122874 - RNA, 19 nt, Artificial Sequence
  Description of Artificial Sequence: Synthetic oligonucleotide
  Sense strand starting at position 378 of SEQ ID NO: 1882460
gaagguggccuguaacuca

SEQ ID NO: 2122875 - RNA, 19 nt, Artificial Sequence
  Description of Artificial Sequence: Synthetic oligonucleotide
  Antisense strand to SEQ ID NO: 2122874
ugaguuacaggccaccuuc

SEQ ID NO: 2122876 - RNA, 19 nt, Artificial Sequence
  Description of Artificial Sequence: Synthetic oligonucleotide
  Sense strand starting at position 439 of SEQ ID NO: 1882460
gggagcaaugacugaguca

SEQ ID NO: 2122877 - RNA, 19 nt, Artificial Sequence
  Description of Artificial Sequence: Synthetic oligonucleotide
  Antisense strand to SEQ ID NO: 2122876
ugacucagucauugcuccc

SEQ ID NO: 2122878 - RNA, 19 nt, Artificial Sequence
  Description of Artificial Sequence: Synthetic oligonucleotide
  Sense strand starting at position 490 of SEQ ID NO: 1882460
aggagauaaguuugccaca

SEQ ID NO: 2122879 - RNA, 19 nt, Artificial Sequence
  Description of Artificial Sequence: Synthetic oligonucleotide
  Antisense strand to SEQ ID NO: 2122878
uguggcaaacuuaucuccu

SEQ ID NO: 2122880 - RNA, 19 nt, Artificial Sequence
  Description of Artificial Sequence: Synthetic oligonucleotide
  Sense strand starting at position 492 of SEQ ID NO: 1882460
gagauaaguuugccacacu

SEQ ID NO: 2122881 - RNA, 19 nt, Artificial Sequence
  Description of Artificial Sequence: Synthetic oligonucleotide
  Antisense strand to SEQ ID NO: 2122880
aguguggcaaacuuaucuc

SEQ ID NO: 2122882 - RNA, 19 nt, Artificial Sequence
  Description of Artificial Sequence: Synthetic oligonucleotide
  Sense strand starting at position 513 of SEQ ID NO: 1882460
gacugaugguccucaaguu

SEQ ID NO: 2122883 - RNA, 19 nt, Artificial Sequence
  Description of Artificial Sequence: Synthetic oligonucleotide
  Antisense strand to SEQ ID NO: 2122882
aacuugaggaccaucaguc

SEQ ID NO: 2122884 - RNA, 19 nt, Artificial Sequence
  Description of Artificial Sequence: Synthetic oligonucleotide
  Sense strand starting at position 551 of SEQ ID NO: 1882460
cuaagauucggugacucca

SEQ ID NO: 2122885 - RNA, 19 nt, Artificial Sequence
  Description of Artificial Sequence: Synthetic oligonucleotide
  Antisense strand to SEQ ID NO: 2122884
uggagucaccgaaucuuag

SEQ ID NO: 2122886 - RNA, 19 nt, Artificial Sequence
  Description of Artificial Sequence: Synthetic oligonucleotide
  Sense strand starting at position 597 of SEQ ID NO: 1882460
ggcagauccagaggaugau

SEQ ID NO: 2122887 - RNA, 19 nt, Artificial Sequence
  Description of Artificial Sequence: Synthetic oligonucleotide
  Antisense strand to SEQ ID NO: 2122886
aucauccucuggaucugcc

SEQ ID NO: 2122888 - RNA, 19 nt, Artificial Sequence
  Description of Artificial Sequence: Synthetic oligonucleotide
  Sense strand starting at position 654 of SEQ ID NO: 1882460
uggguaaugguucaucuga

SEQ ID NO: 2122889 - RNA, 19 nt, Artificial Sequence
  Description of Artificial Sequence: Synthetic oligonucleotide
  Antisense strand to SEQ ID NO: 2122888
ucagaugaaccauuaccca

SEQ ID NO: 2122890 - RNA, 19 nt, Artificial Sequence
  Description of Artificial Sequence: Synthetic oligonucleotide
  Sense strand starting at position 699 of SEQ ID NO: 1882460
gggauuguucugcaggguu

SEQ ID NO: 2122891 - RNA, 19 nt, Artificial Sequence
  Description of Artificial Sequence: Synthetic oligonucleotide
  Antisense strand to SEQ ID NO: 2122890
aacccugcagaacaauccc

SEQ ID NO: 2122892 - RNA, 19 nt, Artificial Sequence
  Description of Artificial Sequence: Synthetic oligonucleotide
  Sense strand starting at position 809 of SEQ ID NO: 1882460
guggaaacugaagguuaga

SEQ ID NO: 2122893 - RNA, 19 nt, Artificial Sequence
  Description of Artificial Sequence: Synthetic oligonucleotide
  Antisense strand to SEQ ID NO: 2122892
ucuaaccuucaguuuccac

SEQ ID NO: 2122894 - RNA, 19 nt, Artificial Sequence
  Description of Artificial Sequence: Synthetic oligonucleotide
  Sense strand starting at position 1123 of SEQ ID NO: 1882460
gugggugaccgcucgucau

SEQ ID NO: 2122895 - RNA, 19 nt, Artificial Sequence
  Description of Artificial Sequence: Synthetic oligonucleotide
  Antisense strand to SEQ ID NO: 2122894
augacgagcggucacccac

SEQ ID NO: 2122896 - RNA, 19 nt, Artificial Sequence
  Description of Artificial Sequence: Synthetic oligonucleotide
  Sense strand starting at position 1386 of SEQ ID NO: 1882460
auguuuacugagcacuagu

SEQ ID NO: 2122897 - RNA, 19 nt, Artificial Sequence
  Description of Artificial Sequence: Synthetic oligonucleotide
  Antisense strand to SEQ ID NO: 2122896
acuagugcucaguaaacau

SEQ ID NO: 2122898 - RNA, 19 nt, Artificial Sequence
  Description of Artificial Sequence: Synthetic oligonucleotide
  Sense strand starting at position 1910 of SEQ ID NO: 1882460
ugaugaaagauguggugga

SEQ ID NO: 2122899 - RNA, 19 nt, Artificial Sequence
  Description of Artificial Sequence: Synthetic oligonucleotide
  Antisense strand to SEQ ID NO: 2122898
uccaccacaucuuucauca

SEQ ID NO: 2122900 - RNA, 19 nt, Artificial Sequence
  Description of Artificial Sequence: Synthetic oligonucleotide
  Sense strand starting at position 1950 of SEQ ID NO: 1882460
ggagucuggagaugugaca

SEQ ID NO: 2122901 - RNA, 19 nt, Artificial Sequence
  Description of Artificial Sequence: Synthetic oligonucleotide
  Antisense strand to SEQ ID NO: 2122900
ugucacaucuccagacucc

SEQ ID NO: 2122902 - RNA, 19 nt, Artificial Sequence
  Description of Artificial Sequence: Synthetic oligonucleotide
  Sense strand starting at position 2012 of SEQ ID NO: 1882460
ccaggauccugaguuuaug

SEQ ID NO: 2122903 - RNA, 19 nt, Artificial Sequence
  Description of Artificial Sequence: Synthetic oligonucleotide
  Antisense strand to SEQ ID NO: 2122902
cauaaacucaggauccugg

SEQ ID NO: 2122904 - RNA, 19 nt, Artificial Sequence
  Description of Artificial Sequence: Synthetic oligonucleotide
  Sense strand starting at position 2199 of SEQ ID NO: 1882460
agcacuuugcaguaccaaa

SEQ ID NO: 2122905 - RNA, 19 nt, Artificial Sequence
  Description of Artificial Sequence: Synthetic oligonucleotide
  Antisense strand to SEQ ID NO: 2122904
uuugguacugcaaagugcu

SEQ ID NO: 2122906 - RNA, 19 nt, Artificial Sequence
  Description of Artificial Sequence: Synthetic oligonucleotide
  Sense strand starting at position 2452 of SEQ ID NO: 1882460
ugaaaucacucggccugaa

SEQ ID NO: 2122907 - RNA, 19 nt, Artificial Sequence
  Description of Artificial Sequence: Synthetic oligonucleotide
  Antisense strand to SEQ ID NO: 2122906
uucaggccgagugauuuca

SEQ ID NO: 2122908 - RNA, 19 nt, Artificial Sequence
  Description of Artificial Sequence: Synthetic oligonucleotide
  Sense strand starting at position 2791 of SEQ ID NO: 1882460
caauccugugauuguauga

SEQ ID NO: 2122909 - RNA, 19 nt, Artificial Sequence
  Description of Artificial Sequence: Synthetic oligonucleotide
  Antisense strand to SEQ ID NO: 2122908
ucauacaaucacaggauug

SEQ ID NO: 2122910 - RNA, 19 nt, Artificial Sequence
  Description of Artificial Sequence: Synthetic oligonucleotide
  Sense strand starting at position 2804 of SEQ ID NO: 1882460
guaugaugacuguaggcuu

SEQ ID NO: 2122911 - RNA, 19 nt, Artificial Sequence
  Description of Artificial Sequence: Synthetic oligonucleotide
  Antisense strand to SEQ ID NO: 2122910
aagccuacagucaucauac

SEQ ID NO: 2122912 - RNA, 19 nt, Artificial Sequence
  Description of Artificial Sequence: Synthetic oligonucleotide
  Sense strand starting at position 2807 of SEQ ID NO: 1882460
ugaugacuguaggcuugau

SEQ ID NO: 2122913 - RNA, 19 nt, Artificial Sequence
  Description of Artificial Sequence: Synthetic oligonucleotide
  Antisense strand to SEQ ID NO: 2122912
aucaagccuacagucauca

SEQ ID NO: 2122914 - RNA, 19 nt, Artificial Sequence
  Description of Artificial Sequence: Synthetic oligonucleotide
  Sense strand starting at position 2811 of SEQ ID NO: 1882460
gacuguaggcuugaucauc

SEQ ID NO: 2122915 - RNA, 19 nt, Artificial Sequence
  Description of Artificial Sequence: Synthetic oligonucleotide
  Antisense strand to SEQ ID NO: 2122914
gaugaucaagccuacaguc

SEQ ID NO: 2122916 - RNA, 19 nt, Artificial Sequence
  Description of Artificial Sequence: Synthetic oligonucleotide
  Sense strand starting at position 3041 of SEQ ID NO: 1882460
cuuccugagaaaugugguu

SEQ ID NO: 2122917 - RNA, 19 nt, Artificial Sequence
  Description of Artificial Sequence: Synthetic oligonucleotide
  Antisense strand to SEQ ID NO: 2122916
aaccacauuucucaggaag

SEQ ID NO: 2122918 - RNA, 19 nt, Artificial Sequence
  Description of Artificial Sequence: Synthetic oligonucleotide
  Sense strand starting at position 3043 of SEQ ID NO: 1882460
uccugagaaaugugguuaa

SEQ ID NO: 2122919 - RNA, 19 nt, Artificial Sequence
  Description of Artificial Sequence: Synthetic oligonucleotide
  Antisense strand to SEQ ID NO: 2122918
uuaaccacauuucucagga

SEQ ID NO: 2122920 - RNA, 19 nt, Artificial Sequence
  Description of Artificial Sequence: Synthetic oligonucleotide
  Sense strand starting at position 3046 of SEQ ID NO: 1882460
ugagaaaugugguuaaccu

SEQ ID NO: 2122921 - RNA, 19 nt, Artificial Sequence
  Description of Artificial Sequence: Synthetic oligonucleotide
  Antisense strand to SEQ ID NO: 2122920
agguuaaccacauuucuca

SEQ ID NO: 2122922 - RNA, 19 nt, Artificial Sequence
  Description of Artificial Sequence: Synthetic oligonucleotide
  Sense strand starting at position 3281 of SEQ ID NO: 1882460
gcuccauuggauugggaag

SEQ ID NO: 2122923 - RNA, 19 nt, Artificial Sequence
  Description of Artificial Sequence: Synthetic oligonucleotide
  Antisense strand to SEQ ID NO: 2122922
cuucccaauccaauggagc

SEQ ID NO: 2122924 - RNA, 19 nt, Artificial Sequence
  Description of Artificial Sequence: Synthetic oligonucleotide
  Sense strand starting at position 3307 of SEQ ID NO: 1882460
aagagagacaggcgucauu

SEQ ID NO: 2122925 - RNA, 19 nt, Artificial Sequence
  Description of Artificial Sequence: Synthetic oligonucleotide
  Antisense strand to SEQ ID NO: 2122924
aaugacgccugucucucuu

SEQ ID NO: 2122926 - RNA, 19 nt, Artificial Sequence
  Description of Artificial Sequence: Synthetic oligonucleotide
  Sense strand starting at position 3390 of SEQ ID NO: 1882460
cacagaaaugagugacugu

SEQ ID NO: 2122927 - RNA, 19 nt, Artificial Sequence
  Description of Artificial Sequence: Synthetic oligonucleotide
  Antisense strand to SEQ ID NO: 2122926
acagucacucauuucugug

SEQ ID NO: 2122928 - RNA, 19 nt, Artificial Sequence
  Description of Artificial Sequence: Synthetic oligonucleotide
  Sense strand starting at position 3431 of SEQ ID NO: 1882460
gugaaaguaugagugugaa

SEQ ID NO: 2122929 - RNA, 19 nt, Artificial Sequence
  Description of Artificial Sequence: Synthetic oligonucleotide
  Antisense strand to SEQ ID NO: 2122928
uucacacucauacuuucac

SEQ ID NO: 2122930 - RNA, 19 nt, Artificial Sequence
  Description of Artificial Sequence: Synthetic oligonucleotide
  Sense strand starting at position 3450 of SEQ ID NO: 1882460
ugugucuauaugggaacau

SEQ ID NO: 2122931 - RNA, 19 nt, Artificial Sequence
  Description of Artificial Sequence: Synthetic oligonucleotide
  Antisense strand to SEQ ID NO: 2122930
auguucccauauagacaca

SEQ ID NO: 2122932 - RNA, 19 nt, Artificial Sequence
  Description of Artificial Sequence: Synthetic oligonucleotide
  Sense strand starting at position 3460 of SEQ ID NO: 1882460
ugggaacauauaugugauu

SEQ ID NO: 2122933 - RNA, 19 nt, Artificial Sequence
  Description of Artificial Sequence: Synthetic oligonucleotide
  Antisense strand to SEQ ID NO: 2122932
aaucacauauauguuccca

SEQ ID NO: 2122934 - RNA, 19 nt, Artificial Sequence
  Description of Artificial Sequence: Synthetic oligonucleotide
  Sense strand starting at position 3462 of SEQ ID NO: 1882460
ggaacauauaugugauugu

SEQ ID NO: 2122935 - RNA, 19 nt, Artificial Sequence
  Description of Artificial Sequence: Synthetic oligonucleotide
  Antisense strand to SEQ ID NO: 2122934
acaaucacauauauguucc

SEQ ID NO: 2122936 - RNA, 19 nt, Artificial Sequence
  Description of Artificial Sequence: Synthetic oligonucleotide
  Sense strand starting at position 3465 of SEQ ID NO: 1882460
acauauaugugauuguaug

SEQ ID NO: 2122937 - RNA, 19 nt, Artificial Sequence
  Description of Artificial Sequence: Synthetic oligonucleotide
  Antisense strand to SEQ ID NO: 2122936
cauacaaucacauauaugu

SEQ ID NO: 2122938 - RNA, 19 nt, Artificial Sequence
  Description of Artificial Sequence: Synthetic oligonucleotide
  Sense strand starting at position 3548 of SEQ ID NO: 1882460
gcaugaguggcugugugua

SEQ ID NO: 2122939 - RNA, 19 nt, Artificial Sequence
  Description of Artificial Sequence: Synthetic oligonucleotide
  Antisense strand to SEQ ID NO: 2122938
uacacacagccacucaugc

SEQ ID NO: 2122940 - RNA, 19 nt, Artificial Sequence
  Description of Artificial Sequence: Synthetic oligonucleotide
  Sense strand starting at position 3634 of SEQ ID NO: 1882460
acuauaaaccugggcaauu

SEQ ID NO: 2122941 - RNA, 19 nt, Artificial Sequence
  Description of Artificial Sequence: Synthetic oligonucleotide
  Antisense strand to SEQ ID NO: 2122940
aauugcccagguuuauagu

SEQ ID NO: 2122942 - RNA, 19 nt, Artificial Sequence
  Description of Artificial Sequence: Synthetic oligonucleotide
  Sense strand starting at position 3876 of SEQ ID NO: 1882460
aguguugccggcagaaguu

SEQ ID NO: 2122943 - RNA, 19 nt, Artificial Sequence
  Description of Artificial Sequence: Synthetic oligonucleotide
  Antisense strand to SEQ ID NO: 2122942
aacuucugccggcaacacu

SEQ ID NO: 2122944 - RNA, 19 nt, Artificial Sequence
  Description of Artificial Sequence: Synthetic oligonucleotide
  Sense strand starting at position 3931 of SEQ ID NO: 1882460
ggcagaaguaaccaagcuu

SEQ ID NO: 2122945 - RNA, 19 nt, Artificial Sequence
  Description of Artificial Sequence: Synthetic oligonucleotide
  Antisense strand to SEQ ID NO: 2122944
aagcuugguuacuucugcc

SEQ ID NO: 2122946 - RNA, 19 nt, Artificial Sequence
  Description of Artificial Sequence: Synthetic oligonucleotide
  Sense strand starting at position 70 of SEQ ID NO: 1882461
gggauauccgccuaagagu

SEQ ID NO: 2122947 - RNA, 19 nt, Artificial Sequence
  Description of Artificial Sequence: Synthetic oligonucleotide
  Antisense strand to SEQ ID NO: 2122946
acucuuaggcggauauccc

SEQ ID NO: 2122948 - RNA, 19 nt, Artificial Sequence
  Description of Artificial Sequence: Synthetic oligonucleotide
  Sense strand starting at position 77 of SEQ ID NO: 1882461
ccgccuaagaguuauguga

SEQ ID NO: 2122949 - RNA, 19 nt, Artificial Sequence
  Description of Artificial Sequence: Synthetic oligonucleotide
  Antisense strand to SEQ ID NO: 2122948
ucacauaacucuuaggcgg

SEQ ID NO: 2122950 - RNA, 19 nt, Artificial Sequence
  Description of Artificial Sequence: Synthetic oligonucleotide
  Sense strand starting at position 113 of SEQ ID NO: 1882461
guggguuagauaugaguuu

SEQ ID NO: 2122951 - RNA, 19 nt, Artificial Sequence
  Description of Artificial Sequence: Synthetic oligonucleotide
  Antisense strand to SEQ ID NO: 2122950
aaacucauaucuaacccac

SEQ ID NO: 2122952 - RNA, 19 nt, Artificial Sequence
  Description of Artificial Sequence: Synthetic oligonucleotide
  Sense strand starting at position 125 of SEQ ID NO: 1882461
ugaguuuaacuagguaugu

SEQ ID NO: 2122953 - RNA, 19 nt, Artificial Sequence
  Description of Artificial Sequence: Synthetic oligonucleotide
  Antisense strand to SEQ ID NO: 2122952
acauaccuaguuaaacuca

SEQ ID NO: 2122954 - RNA, 19 nt, Artificial Sequence
  Description of Artificial Sequence: Synthetic oligonucleotide
  Sense strand starting at position 126 of SEQ ID NO: 1882461
gaguuuaacuagguauguu

SEQ ID NO: 2122955 - RNA, 19 nt, Artificial Sequence
  Description of Artificial Sequence: Synthetic oligonucleotide
  Antisense strand to SEQ ID NO: 2122954
aacauaccuaguuaaacuc

SEQ ID NO: 2122956 - RNA, 19 nt, Artificial Sequence
  Description of Artificial Sequence: Synthetic oligonucleotide
  Sense strand starting at position 127 of SEQ ID NO: 1882461
aguuuaacuagguauguuu

SEQ ID NO: 2122957 - RNA, 19 nt, Artificial Sequence
  Description of Artificial Sequence: Synthetic oligonucleotide
  Antisense strand to SEQ ID NO: 2122956
aaacauaccuaguuaaacu

SEQ ID NO: 2122958 - RNA, 19 nt, Artificial Sequence
  Description of Artificial Sequence: Synthetic oligonucleotide
  Sense strand starting at position 153 of SEQ ID NO: 1882461
auugauagacucugauuau

SEQ ID NO: 2122959 - RNA, 19 nt, Artificial Sequence
  Description of Artificial Sequence: Synthetic oligonucleotide
  Antisense strand to SEQ ID NO: 2122958
auaaucagagucuaucaau

SEQ ID NO: 2122960 - RNA, 19 nt, Artificial Sequence
  Description of Artificial Sequence: Synthetic oligonucleotide
  Sense strand starting at position 219 of SEQ ID NO: 1882461
ucuccauugucccuaagga

SEQ ID NO: 2122961 - RNA, 19 nt, Artificial Sequence
  Description of Artificial Sequence: Synthetic oligonucleotide
  Antisense strand to SEQ ID NO: 2122960
uccuuagggacaauggaga

SEQ ID NO: 2122962 - RNA, 19 nt, Artificial Sequence
  Description of Artificial Sequence: Synthetic oligonucleotide
  Sense strand starting at position 292 of SEQ ID NO: 1882461
uguugccaaguauauuaua

SEQ ID NO: 2122963 - RNA, 19 nt, Artificial Sequence
  Description of Artificial Sequence: Synthetic oligonucleotide
  Antisense strand to SEQ ID NO: 2122962
uauaauauacuuggcaaca

SEQ ID NO: 2122964 - RNA, 19 nt, Artificial Sequence
  Description of Artificial Sequence: Synthetic oligonucleotide
  Sense strand starting at position 339 of SEQ ID NO: 1882461
gggcauggcccugacacau

SEQ ID NO: 2122965 - RNA, 19 nt, Artificial Sequence
  Description of Artificial Sequence: Synthetic oligonucleotide
  Antisense strand to SEQ ID NO: 2122964
augugucagggccaugccc

SEQ ID NO: 2122966 - RNA, 19 nt, Artificial Sequence
  Description of Artificial Sequence: Synthetic oligonucleotide
  Sense strand starting at position 359 of SEQ ID NO: 1882461
uccuucugguauucuagaa

SEQ ID NO: 2122967 - RNA, 19 nt, Artificial Sequence
  Description of Artificial Sequence: Synthetic oligonucleotide
  Antisense strand to SEQ ID NO: 2122966
uucuagaauaccagaagga

SEQ ID NO: 2122968 - RNA, 19 nt, Artificial Sequence
  Description of Artificial Sequence: Synthetic oligonucleotide
  Sense strand starting at position 363 of SEQ ID NO: 1882461
ucugguauucuagaaaugu

SEQ ID NO: 2122969 - RNA, 19 nt, Artificial Sequence
  Description of Artificial Sequence: Synthetic oligonucleotide
  Antisense strand to SEQ ID NO: 2122968
acauuucuagaauaccaga

SEQ ID NO: 2122970 - RNA, 19 nt, Artificial Sequence
  Description of Artificial Sequence: Synthetic oligonucleotide
  Sense strand starting at position 514 of SEQ ID NO: 1882461
uccaguacucucugggaaa

SEQ ID NO: 2122971 - RNA, 19 nt, Artificial Sequence
  Description of Artificial Sequence: Synthetic oligonucleotide
  Antisense strand to SEQ ID NO: 2122970
uuucccagagaguacugga

SEQ ID NO: 2122972 - RNA, 19 nt, Artificial Sequence
  Description of Artificial Sequence: Synthetic oligonucleotide
  Sense strand starting at position 516 of SEQ ID NO: 1882461
caguacucucugggaaacu

SEQ ID NO: 2122973 - RNA, 19 nt, Artificial Sequence
  Description of Artificial Sequence: Synthetic oligonucleotide
  Antisense strand to SEQ ID NO: 2122972
aguuucccagagaguacug

SEQ ID NO: 2122974 - RNA, 19 nt, Artificial Sequence
  Description of Artificial Sequence: Synthetic oligonucleotide
  Sense strand starting at position 559 of SEQ ID NO: 1882461
agaaucacuuuauuggcaa

SEQ ID NO: 2122975 - RNA, 19 nt, Artificial Sequence
  Description of Artificial Sequence: Synthetic oligonucleotide
  Antisense strand to SEQ ID NO: 2122974
uugccaauaaagugauucu

SEQ ID NO: 2122976 - RNA, 19 nt, Artificial Sequence
  Description of Artificial Sequence: Synthetic oligonucleotide
  Sense strand starting at position 620 of SEQ ID NO: 1882461
uguaauuagcagcauugau

SEQ ID NO: 2122977 - RNA, 19 nt, Artificial Sequence
  Description of Artificial Sequence: Synthetic oligonucleotide
  Antisense strand to SEQ ID NO: 2122976
aucaaugcugcuaauuaca

SEQ ID NO: 2122978 - RNA, 19 nt, Artificial Sequence
  Description of Artificial Sequence: Synthetic oligonucleotide
  Sense strand starting at position 630 of SEQ ID NO: 1882461
agcauugaugcacauuauu

SEQ ID NO: 2122979 - RNA, 19 nt, Artificial Sequence
  Description of Artificial Sequence: Synthetic oligonucleotide
  Antisense strand to SEQ ID NO: 2122978
aauaaugugcaucaaugcu

SEQ ID NO: 2122980 - RNA, 19 nt, Artificial Sequence
  Description of Artificial Sequence: Synthetic oligonucleotide
  Sense strand starting at position 659 of SEQ ID NO: 1882461
uggacaguuugagcaaagu

SEQ ID NO: 2122981 - RNA, 19 nt, Artificial Sequence
  Description of Artificial Sequence: Synthetic oligonucleotide
  Antisense strand to SEQ ID NO: 2122980
acuuugcucaaacugucca

SEQ ID NO: 2122982 - RNA, 19 nt, Artificial Sequence
  Description of Artificial Sequence: Synthetic oligonucleotide
  Sense strand starting at position 777 of SEQ ID NO: 1882461
caacgaaggcugggagaua

SEQ ID NO: 2122983 - RNA, 19 nt, Artificial Sequence
  Description of Artificial Sequence: Synthetic oligonucleotide
  Antisense strand to SEQ ID NO: 2122982
uaucucccagccuucguug

SEQ ID NO: 2122984 - RNA, 19 nt, Artificial Sequence
  Description of Artificial Sequence: Synthetic oligonucleotide
  Sense strand starting at position 821 of SEQ ID NO: 1882461
cuuguucuggcagcgaguu

SEQ ID NO: 2122985 - RNA, 19 nt, Artificial Sequence
  Description of Artificial Sequence: Synthetic oligonucleotide
  Antisense strand to SEQ ID NO: 2122984
aacucgcugccagaacaag

SEQ ID NO: 2122986 - RNA, 19 nt, Artificial Sequence
  Description of Artificial Sequence: Synthetic oligonucleotide
  Sense strand starting at position 833 of SEQ ID NO: 1882461
gcgaguuuaguucaggaaa

SEQ ID NO: 2122987 - RNA, 19 nt, Artificial Sequence
  Description of Artificial Sequence: Synthetic oligonucleotide
  Antisense strand to SEQ ID NO: 2122986
uuuccugaacuaaacucgc

SEQ ID NO: 2122988 - RNA, 19 nt, Artificial Sequence
  Description of Artificial Sequence: Synthetic oligonucleotide
  Sense strand starting at position 845 of SEQ ID NO: 1882461
caggaaauuugcugagaau

SEQ ID NO: 2122989 - RNA, 19 nt, Artificial Sequence
  Description of Artificial Sequence: Synthetic oligonucleotide
  Antisense strand to SEQ ID NO: 2122988
auucucagcaaauuuccug

SEQ ID NO: 2122990 - RNA, 19 nt, Artificial Sequence
  Description of Artificial Sequence: Synthetic oligonucleotide
  Sense strand starting at position 920 of SEQ ID NO: 1882461
aaauguuuccucugacagg

SEQ ID NO: 2122991 - RNA, 19 nt, Artificial Sequence
  Description of Artificial Sequence: Synthetic oligonucleotide
  Antisense strand to SEQ ID NO: 2122990
ccugucagaggaaacauuu

SEQ ID NO: 2122992 - RNA, 19 nt, Artificial Sequence
  Description of Artificial Sequence: Synthetic oligonucleotide
  Sense strand starting at position 1417 of SEQ ID NO: 1882461
aggccaggaugcuuugaaa

SEQ ID NO: 2122993 - RNA, 19 nt, Artificial Sequence
  Description of Artificial Sequence: Synthetic oligonucleotide
  Antisense strand to SEQ ID NO: 2122992
uuucaaagcauccuggccu

SEQ ID NO: 2122994 - RNA, 19 nt, Artificial Sequence
  Description of Artificial Sequence: Synthetic oligonucleotide
  Sense strand starting at position 1766 of SEQ ID NO: 1882461
agcguagaggguuaaguaa

SEQ ID NO: 2122995 - RNA, 19 nt, Artificial Sequence
  Description of Artificial Sequence: Synthetic oligonucleotide
  Antisense strand to SEQ ID NO: 2122994
uuacuuaacccucuacgcu

SEQ ID NO: 2122996 - RNA, 19 nt, Artificial Sequence
  Description of Artificial Sequence: Synthetic oligonucleotide
  Sense strand starting at position 2261 of SEQ ID NO: 1882461
aggaacacacugugugaaa

SEQ ID NO: 2122997 - RNA, 19 nt, Artificial Sequence
  Description of Artificial Sequence: Synthetic oligonucleotide
  Antisense strand to SEQ ID NO: 2122996
uuucacacaguguguuccu

SEQ ID NO: 2122998 - RNA, 19 nt, Artificial Sequence
  Description of Artificial Sequence: Synthetic oligonucleotide
  Sense strand starting at position 2313 of SEQ ID NO: 1882461
gguccaaucuaugucauca

SEQ ID NO: 2122999 - RNA, 19 nt, Artificial Sequence
  Description of Artificial Sequence: Synthetic oligonucleotide
  Antisense strand to SEQ ID NO: 2122998
ugaugacauagauuggacc

SEQ ID NO: 2123000 - RNA, 19 nt, Artificial Sequence
  Description of Artificial Sequence: Synthetic oligonucleotide
  Sense strand starting at position 2403 of SEQ ID NO: 1882461
uagauaaaggcauguggaa

SEQ ID NO: 2123001 - RNA, 19 nt, Artificial Sequence
  Description of Artificial Sequence: Synthetic oligonucleotide
  Antisense strand to SEQ ID NO: 2123000
uuccacaugccuuuaucua

SEQ ID NO: 2123002 - RNA, 19 nt, Artificial Sequence
  Description of Artificial Sequence: Synthetic oligonucleotide
  Sense strand starting at position 2560 of SEQ ID NO: 1882461
gaccuuacgguuugggaau

SEQ ID NO: 2123003 - RNA, 19 nt, Artificial Sequence
  Description of Artificial Sequence: Synthetic oligonucleotide
  Antisense strand to SEQ ID NO: 2123002
auucccaaaccguaagguc

SEQ ID NO: 2123004 - RNA, 19 nt, Artificial Sequence
  Description of Artificial Sequence: Synthetic oligonucleotide
  Sense strand starting at position 2571 of SEQ ID NO: 1882461
uugggaaucuccucuagcu

SEQ ID NO: 2123005 - RNA, 19 nt, Artificial Sequence
  Description of Artificial Sequence: Synthetic oligonucleotide
  Antisense strand to SEQ ID NO: 2123004
agcuagaggagauucccaa

SEQ ID NO: 2123006 - RNA, 19 nt, Artificial Sequence
  Description of Artificial Sequence: Synthetic oligonucleotide
  Sense strand starting at position 2573 of SEQ ID NO: 1882461
gggaaucuccucuagcuuu

SEQ ID NO: 2123007 - RNA, 19 nt, Artificial Sequence
  Description of Artificial Sequence: Synthetic oligonucleotide
  Antisense strand to SEQ ID NO: 2123006
aaagcuagaggagauuccc

SEQ ID NO: 2123008 - RNA, 19 nt, Artificial Sequence
  Description of Artificial Sequence: Synthetic oligonucleotide
  Sense strand starting at position 2639 of SEQ ID NO: 1882461
agggauggugauugagcua

SEQ ID NO: 2123009 - RNA, 19 nt, Artificial Sequence
  Description of Artificial Sequence: Synthetic oligonucleotide
  Antisense strand to SEQ ID NO: 2123008
uagcucaaucaccaucccu

SEQ ID NO: 2123010 - RNA, 19 nt, Artificial Sequence
  Description of Artificial Sequence: Synthetic oligonucleotide
  Sense strand starting at position 2642 of SEQ ID NO: 1882461
gauggugauugagcuaucu

SEQ ID NO: 2123011 - RNA, 19 nt, Artificial Sequence
  Description of Artificial Sequence: Synthetic oligonucleotide
  Antisense strand to SEQ ID NO: 2123010
agauagcucaaucaccauc

SEQ ID NO: 2123012 - RNA, 19 nt, Artificial Sequence
  Description of Artificial Sequence: Synthetic oligonucleotide
  Sense strand starting at position 3166 of SEQ ID NO: 1882461
gggucaccucauuauucca

SEQ ID NO: 2123013 - RNA, 19 nt, Artificial Sequence
  Description of Artificial Sequence: Synthetic oligonucleotide
  Antisense strand to SEQ ID NO: 2123012
uggaauaaugaggugaccc

SEQ ID NO: 2123014 - RNA, 19 nt, Artificial Sequence
  Description of Artificial Sequence: Synthetic oligonucleotide
  Sense strand starting at position 3201 of SEQ ID NO: 1882461
acugauauugagcauccuu

SEQ ID NO: 2123015 - RNA, 19 nt, Artificial Sequence
  Description of Artificial Sequence: Synthetic oligonucleotide
  Antisense strand to SEQ ID NO: 2123014
aaggaugcucaauaucagu

SEQ ID NO: 2123016 - RNA, 19 nt, Artificial Sequence
  Description of Artificial Sequence: Synthetic oligonucleotide
  Sense strand starting at position 3278 of SEQ ID NO: 1882461
ggaaguggguucuuaaccu

SEQ ID NO: 2123017 - RNA, 19 nt, Artificial Sequence
  Description of Artificial Sequence: Synthetic oligonucleotide
  Antisense strand to SEQ ID NO: 2123016
agguuaagaacccacuucc

SEQ ID NO: 2123018 - RNA, 19 nt, Artificial Sequence
  Description of Artificial Sequence: Synthetic oligonucleotide
  Sense strand starting at position 3303 of SEQ ID NO: 1882461
ugucuagacuccucaggau

SEQ ID NO: 2123019 - RNA, 19 nt, Artificial Sequence
  Description of Artificial Sequence: Synthetic oligonucleotide
  Antisense strand to SEQ ID NO: 2123018
auccugaggagucuagaca

SEQ ID NO: 2123020 - RNA, 19 nt, Artificial Sequence
  Description of Artificial Sequence: Synthetic oligonucleotide
  Sense strand starting at position 3312 of SEQ ID NO: 1882461
uccucaggauguucugaaa

SEQ ID NO: 2123021 - RNA, 19 nt, Artificial Sequence
  Description of Artificial Sequence: Synthetic oligonucleotide
  Antisense strand to SEQ ID NO: 2123020
uuucagaacauccugagga

SEQ ID NO: 2123022 - RNA, 19 nt, Artificial Sequence
  Description of Artificial Sequence: Synthetic oligonucleotide
  Sense strand starting at position 3362 of SEQ ID NO: 1882461
gaaaccaguuaugccgaaa

SEQ ID NO: 2123023 - RNA, 19 nt, Artificial Sequence
  Description of Artificial Sequence: Synthetic oligonucleotide
  Antisense strand to SEQ ID NO: 2123022
uuucggcauaacugguuuc

SEQ ID NO: 2123024 - RNA, 19 nt, Artificial Sequence
  Description of Artificial Sequence: Synthetic oligonucleotide
  Sense strand starting at position 3423 of SEQ ID NO: 1882461
caggaugucacucagcgua

SEQ ID NO: 2123025 - RNA, 19 nt, Artificial Sequence
  Description of Artificial Sequence: Synthetic oligonucleotide
  Antisense strand to SEQ ID NO: 2123024
uacgcugagugacauccug

SEQ ID NO: 2123026 - RNA, 19 nt, Artificial Sequence
  Description of Artificial Sequence: Synthetic oligonucleotide
  Sense strand starting at position 152 of SEQ ID NO: 1882462
ccuuaaugguaucugggaa

SEQ ID NO: 2123027 - RNA, 19 nt, Artificial Sequence
  Description of Artificial Sequence: Synthetic oligonucleotide
  Antisense strand to SEQ ID NO: 2123026
uucccagauaccauuaagg

SEQ ID NO: 2123028 - RNA, 19 nt, Artificial Sequence
  Description of Artificial Sequence: Synthetic oligonucleotide
  Sense strand starting at position 153 of SEQ ID NO: 1882462
cuuaaugguaucugggaac

SEQ ID NO: 2123029 - RNA, 19 nt, Artificial Sequence
  Description of Artificial Sequence: Synthetic oligonucleotide
  Antisense strand to SEQ ID NO: 2123028
guucccagauaccauuaag

SEQ ID NO: 2123030 - RNA, 19 nt, Artificial Sequence
  Description of Artificial Sequence: Synthetic oligonucleotide
  Sense strand starting at position 570 of SEQ ID NO: 1882462
ucuguaaugucauuaacuu

SEQ ID NO: 2123031 - RNA, 19 nt, Artificial Sequence
  Description of Artificial Sequence: Synthetic oligonucleotide
  Antisense strand to SEQ ID NO: 2123030
aaguuaaugacauuacaga

SEQ ID NO: 2123032 - RNA, 19 nt, Artificial Sequence
  Description of Artificial Sequence: Synthetic oligonucleotide
  Sense strand starting at position 571 of SEQ ID NO: 1882462
cuguaaugucauuaacuuu

SEQ ID NO: 2123033 - RNA, 19 nt, Artificial Sequence
  Description of Artificial Sequence: Synthetic oligonucleotide
  Antisense strand to SEQ ID NO: 2123032
aaaguuaaugacauuacag

SEQ ID NO: 2123034 - RNA, 19 nt, Artificial Sequence
  Description of Artificial Sequence: Synthetic oligonucleotide
  Sense strand starting at position 644 of SEQ ID NO: 1882462
caugguguuacgcaagguu

SEQ ID NO: 2123035 - RNA, 19 nt, Artificial Sequence
  Description of Artificial Sequence: Synthetic oligonucleotide
  Antisense strand to SEQ ID NO: 2123034
aaccuugcguaacaccaug

SEQ ID NO: 2123036 - RNA, 19 nt, Artificial Sequence
  Description of Artificial Sequence: Synthetic oligonucleotide
  Sense strand starting at position 766 of SEQ ID NO: 1882462
augauuauguuacuuggaa

SEQ ID NO: 2123037 - RNA, 19 nt, Artificial Sequence
  Description of Artificial Sequence: Synthetic oligonucleotide
  Antisense strand to SEQ ID NO: 2123036
uuccaaguaacauaaucau

SEQ ID NO: 2123038 - RNA, 19 nt, Artificial Sequence
  Description of Artificial Sequence: Synthetic oligonucleotide
  Sense strand starting at position 767 of SEQ ID NO: 1882462
ugauuauguuacuuggaau

SEQ ID NO: 2123039 - RNA, 19 nt, Artificial Sequence
  Description of Artificial Sequence: Synthetic oligonucleotide
  Antisense strand to SEQ ID NO: 2123038
auuccaaguaacauaauca

SEQ ID NO: 2123040 - RNA, 19 nt, Artificial Sequence
  Description of Artificial Sequence: Synthetic oligonucleotide
  Sense strand starting at position 852 of SEQ ID NO: 1882462
acaguaguacucuauguac

SEQ ID NO: 2123041 - RNA, 19 nt, Artificial Sequence
  Description of Artificial Sequence: Synthetic oligonucleotide
  Antisense strand to SEQ ID NO: 2123040
guacauagaguacuacugu

SEQ ID NO: 2123042 - RNA, 19 nt, Artificial Sequence
  Description of Artificial Sequence: Synthetic oligonucleotide
  Sense strand starting at position 854 of SEQ ID NO: 1882462
aguaguacucuauguacua

SEQ ID NO: 2123043 - RNA, 19 nt, Artificial Sequence
  Description of Artificial Sequence: Synthetic oligonucleotide
  Antisense strand to SEQ ID NO: 2123042
uaguacauagaguacuacu

SEQ ID NO: 2123044 - RNA, 19 nt, Artificial Sequence
  Description of Artificial Sequence: Synthetic oligonucleotide
  Sense strand starting at position 855 of SEQ ID NO: 1882462
guaguacucuauguacuac

SEQ ID NO: 2123045 - RNA, 19 nt, Artificial Sequence
  Description of Artificial Sequence: Synthetic oligonucleotide
  Antisense strand to SEQ ID NO: 2123044
guaguacauagaguacuac

SEQ ID NO: 2123046 - RNA, 19 nt, Artificial Sequence
  Description of Artificial Sequence: Synthetic oligonucleotide
  Sense strand starting at position 861 of SEQ ID NO: 1882462
cucuauguacuacagugaa

SEQ ID NO: 2123047 - RNA, 19 nt, Artificial Sequence
  Description of Artificial Sequence: Synthetic oligonucleotide
  Antisense strand to SEQ ID NO: 2123046
uucacuguaguacauagag

SEQ ID NO: 2123048 - RNA, 19 nt, Artificial Sequence
  Description of Artificial Sequence: Synthetic oligonucleotide
  Sense strand starting at position 960 of SEQ ID NO: 1882462
cuguuuguacguguaaguu

SEQ ID NO: 2123049 - RNA, 19 nt, Artificial Sequence
  Description of Artificial Sequence: Synthetic oligonucleotide
  Antisense strand to SEQ ID NO: 2123048
aacuuacacguacaaacag

SEQ ID NO: 2123050 - RNA, 19 nt, Artificial Sequence
  Description of Artificial Sequence: Synthetic oligonucleotide
  Sense strand starting at position 997 of SEQ ID NO: 1882462
uuauaacaggcuuguauau

SEQ ID NO: 2123051 - RNA, 19 nt, Artificial Sequence
  Description of Artificial Sequence: Synthetic oligonucleotide
  Antisense strand to SEQ ID NO: 2123050
auauacaagccuguuauaa

SEQ ID NO: 2123052 - RNA, 19 nt, Artificial Sequence
  Description of Artificial Sequence: Synthetic oligonucleotide
  Sense strand starting at position 1039 of SEQ ID NO: 1882462
auggccuaguaucuacaua

SEQ ID NO: 2123053 - RNA, 19 nt, Artificial Sequence
  Description of Artificial Sequence: Synthetic oligonucleotide
  Antisense strand to SEQ ID NO: 2123052
uauguagauacuaggccau

SEQ ID NO: 2123054 - RNA, 19 nt, Artificial Sequence
  Description of Artificial Sequence: Synthetic oligonucleotide
  Sense strand starting at position 1119 of SEQ ID NO: 1882462
cuaagcgacucaucuguga

SEQ ID NO: 2123055 - RNA, 19 nt, Artificial Sequence
  Description of Artificial Sequence: Synthetic oligonucleotide
  Antisense strand to SEQ ID NO: 2123054
ucacagaugagucgcuuag

SEQ ID NO: 2123056 - RNA, 19 nt, Artificial Sequence
  Description of Artificial Sequence: Synthetic oligonucleotide
  Sense strand starting at position 1253 of SEQ ID NO: 1882462
agguauuaauaugucugga

SEQ ID NO: 2123057 - RNA, 19 nt, Artificial Sequence
  Description of Artificial Sequence: Synthetic oligonucleotide
  Antisense strand to SEQ ID NO: 2123056
uccagacauauuaauaccu

SEQ ID NO: 2123058 - RNA, 19 nt, Artificial Sequence
  Description of Artificial Sequence: Synthetic oligonucleotide
  Sense strand starting at position 1255 of SEQ ID NO: 1882462
guauuaauaugucuggaaa

SEQ ID NO: 2123059 - RNA, 19 nt, Artificial Sequence
  Description of Artificial Sequence: Synthetic oligonucleotide
  Antisense strand to SEQ ID NO: 2123058
uuuccagacauauuaauac

SEQ ID NO: 2123060 - RNA, 19 nt, Artificial Sequence
  Description of Artificial Sequence: Synthetic oligonucleotide
  Sense strand starting at position 1256 of SEQ ID NO: 1882462
uauuaauaugucuggaaag

SEQ ID NO: 2123061 - RNA, 19 nt, Artificial Sequence
  Description of Artificial Sequence: Synthetic oligonucleotide
  Antisense strand to SEQ ID NO: 2123060
cuuuccagacauauuaaua

SEQ ID NO: 2123062 - RNA, 19 nt, Artificial Sequence
  Description of Artificial Sequence: Synthetic oligonucleotide
  Sense strand starting at position 1378 of SEQ ID NO: 1882462
acuuauaaccuguggacca

SEQ ID NO: 2123063 - RNA, 19 nt, Artificial Sequence
  Description of Artificial Sequence: Synthetic oligonucleotide
  Antisense strand to SEQ ID NO: 2123062
ugguccacagguuauaagu

SEQ ID NO: 2123064 - RNA, 19 nt, Artificial Sequence
  Description of Artificial Sequence: Synthetic oligonucleotide
  Sense strand starting at position 1389 of SEQ ID NO: 1882462
guggaccacguuuauuaga

SEQ ID NO: 2123065 - RNA, 19 nt, Artificial Sequence
  Description of Artificial Sequence: Synthetic oligonucleotide
  Antisense strand to SEQ ID NO: 2123064
ucuaauaaacgugguccac

SEQ ID NO: 2123066 - RNA, 19 nt, Artificial Sequence
  Description of Artificial Sequence: Synthetic oligonucleotide
  Sense strand starting at position 1391 of SEQ ID NO: 1882462
ggaccacguuuauuagaag

SEQ ID NO: 2123067 - RNA, 19 nt, Artificial Sequence
  Description of Artificial Sequence: Synthetic oligonucleotide
  Antisense strand to SEQ ID NO: 2123066
cuucuaauaaacguggucc

SEQ ID NO: 2123068 - RNA, 19 nt, Artificial Sequence
  Description of Artificial Sequence: Synthetic oligonucleotide
  Sense strand starting at position 1421 of SEQ ID NO: 1882462
uccugaaacuuccugcaga

SEQ ID NO: 2123069 - RNA, 19 nt, Artificial Sequence
  Description of Artificial Sequence: Synthetic oligonucleotide
  Antisense strand to SEQ ID NO: 2123068
ucugcaggaaguuucagga

SEQ ID NO: 2123070 - RNA, 19 nt, Artificial Sequence
  Description of Artificial Sequence: Synthetic oligonucleotide
  Sense strand starting at position 1506 of SEQ ID NO: 1882462
gccauuccuguguauaucu

SEQ ID NO: 2123071 - RNA, 19 nt, Artificial Sequence
  Description of Artificial Sequence: Synthetic oligonucleotide
  Antisense strand to SEQ ID NO: 2123070
agauauacacaggaauggc

SEQ ID NO: 2123072 - RNA, 19 nt, Artificial Sequence
  Description of Artificial Sequence: Synthetic oligonucleotide
  Sense strand starting at position 1573 of SEQ ID NO: 1882462
accagcauguucuugcaaa

SEQ ID NO: 2123073 - RNA, 19 nt, Artificial Sequence
  Description of Artificial Sequence: Synthetic oligonucleotide
  Antisense strand to SEQ ID NO: 2123072
uuugcaagaacaugcuggu

SEQ ID NO: 2123074 - RNA, 19 nt, Artificial Sequence
  Description of Artificial Sequence: Synthetic oligonucleotide
  Sense strand starting at position 1671 of SEQ ID NO: 1882462
cuaccucuuccacauguga

SEQ ID NO: 2123075 - RNA, 19 nt, Artificial Sequence
  Description of Artificial Sequence: Synthetic oligonucleotide
  Antisense strand to SEQ ID NO: 2123074
ucacauguggaagagguag

SEQ ID NO: 2123076 - RNA, 19 nt, Artificial Sequence
  Description of Artificial Sequence: Synthetic oligonucleotide
  Sense strand starting at position 1684 of SEQ ID NO: 1882462
augugauauguguguacau

SEQ ID NO: 2123077 - RNA, 19 nt, Artificial Sequence
  Description of Artificial Sequence: Synthetic oligonucleotide
  Antisense strand to SEQ ID NO: 2123076
auguacacacauaucacau

SEQ ID NO: 2123078 - RNA, 19 nt, Artificial Sequence
  Description of Artificial Sequence: Synthetic oligonucleotide
  Sense strand starting at position 1685 of SEQ ID NO: 1882462
ugugauauguguguacaua

SEQ ID NO: 2123079 - RNA, 19 nt, Artificial Sequence
  Description of Artificial Sequence: Synthetic oligonucleotide
  Antisense strand to SEQ ID NO: 2123078
uauguacacacauaucaca

SEQ ID NO: 2123080 - RNA, 19 nt, Artificial Sequence
  Description of Artificial Sequence: Synthetic oligonucleotide
  Sense strand starting at position 1686 of SEQ ID NO: 1882462
gugauauguguguacauac

SEQ ID NO: 2123081 - RNA, 19 nt, Artificial Sequence
  Description of Artificial Sequence: Synthetic oligonucleotide
  Antisense strand to SEQ ID NO: 2123080
guauguacacacauaucac

SEQ ID NO: 2123082 - RNA, 19 nt, Artificial Sequence
  Description of Artificial Sequence: Synthetic oligonucleotide
  Sense strand starting at position 1754 of SEQ ID NO: 1882462
gugaucuguguguacacau

SEQ ID NO: 2123083 - RNA, 19 nt, Artificial Sequence
  Description of Artificial Sequence: Synthetic oligonucleotide
  Antisense strand to SEQ ID NO: 2123082
auguguacacacagaucac

SEQ ID NO: 2123084 - RNA, 19 nt, Artificial Sequence
  Description of Artificial Sequence: Synthetic oligonucleotide
  Sense strand starting at position 1761 of SEQ ID NO: 1882462
guguguacacaugacaagu

SEQ ID NO: 2123085 - RNA, 19 nt, Artificial Sequence
  Description of Artificial Sequence: Synthetic oligonucleotide
  Antisense strand to SEQ ID NO: 2123084
acuugucauguguacacac

SEQ ID NO: 2123086 - RNA, 19 nt, Artificial Sequence
  Description of Artificial Sequence: Synthetic oligonucleotide
  Sense strand starting at position 1892 of SEQ ID NO: 1882462
cagagauguguuuggaagc

SEQ ID NO: 2123087 - RNA, 19 nt, Artificial Sequence
  Description of Artificial Sequence: Synthetic oligonucleotide
  Antisense strand to SEQ ID NO: 2123086
gcuuccaaacacaucucug

SEQ ID NO: 2123088 - RNA, 19 nt, Artificial Sequence
  Description of Artificial Sequence: Synthetic oligonucleotide
  Sense strand starting at position 2046 of SEQ ID NO: 1882462
uaagaaugguucucggaca

SEQ ID NO: 2123089 - RNA, 19 nt, Artificial Sequence
  Description of Artificial Sequence: Synthetic oligonucleotide
  Antisense strand to SEQ ID NO: 2123088
uguccgagaaccauucuua

SEQ ID NO: 2123090 - RNA, 19 nt, Artificial Sequence
  Description of Artificial Sequence: Synthetic oligonucleotide
  Sense strand starting at position 2886 of SEQ ID NO: 1882462
acguuauuuccgggugaca

SEQ ID NO: 2123091 - RNA, 19 nt, Artificial Sequence
  Description of Artificial Sequence: Synthetic oligonucleotide
  Antisense strand to SEQ ID NO: 2123090
ugucacccggaaauaacgu

SEQ ID NO: 2123092 - RNA, 19 nt, Artificial Sequence
  Description of Artificial Sequence: Synthetic oligonucleotide
  Sense strand starting at position 2888 of SEQ ID NO: 1882462
guuauuuccgggugacaac

SEQ ID NO: 2123093 - RNA, 19 nt, Artificial Sequence
  Description of Artificial Sequence: Synthetic oligonucleotide
  Antisense strand to SEQ ID NO: 2123092
guugucacccggaaauaac

SEQ ID NO: 2123094 - RNA, 19 nt, Artificial Sequence
  Description of Artificial Sequence: Synthetic oligonucleotide
  Sense strand starting at position 3035 of SEQ ID NO: 1882462
cuuuaacuacgucgauaau

SEQ ID NO: 2123095 - RNA, 19 nt, Artificial Sequence
  Description of Artificial Sequence: Synthetic oligonucleotide
  Antisense strand to SEQ ID NO: 2123094
auuaucgacguaguuaaag

SEQ ID NO: 2123096 - RNA, 19 nt, Artificial Sequence
  Description of Artificial Sequence: Synthetic oligonucleotide
  Sense strand starting at position 3036 of SEQ ID NO: 1882462
uuuaacuacgucgauaaua

SEQ ID NO: 2123097 - RNA, 19 nt, Artificial Sequence
  Description of Artificial Sequence: Synthetic oligonucleotide
  Antisense strand to SEQ ID NO: 2123096
uauuaucgacguaguuaaa

SEQ ID NO: 2123098 - RNA, 19 nt, Artificial Sequence
  Description of Artificial Sequence: Synthetic oligonucleotide
  Sense strand starting at position 3038 of SEQ ID NO: 1882462
uaacuacgucgauaauaug

SEQ ID NO: 2123099 - RNA, 19 nt, Artificial Sequence
  Description of Artificial Sequence: Synthetic oligonucleotide
  Antisense strand to SEQ ID NO: 2123098
cauauuaucgacguaguua

SEQ ID NO: 2123100 - RNA, 19 nt, Artificial Sequence
  Description of Artificial Sequence: Synthetic oligonucleotide
  Sense strand starting at position 3049 of SEQ ID NO: 1882462
auaauaugacuccggcgau

SEQ ID NO: 2123101 - RNA, 19 nt, Artificial Sequence
  Description of Artificial Sequence: Synthetic oligonucleotide
  Antisense strand to SEQ ID NO: 2123100
aucgccggagucauauuau

SEQ ID NO: 2123102 - RNA, 19 nt, Artificial Sequence
  Description of Artificial Sequence: Synthetic oligonucleotide
  Sense strand starting at position 3278 of SEQ ID NO: 1882462
cuaaguuucggcgcucagu

SEQ ID NO: 2123103 - RNA, 19 nt, Artificial Sequence
  Description of Artificial Sequence: Synthetic oligonucleotide
  Antisense strand to SEQ ID NO: 2123102
acugagcgccgaaacuuag

SEQ ID NO: 2123104 - RNA, 19 nt, Artificial Sequence
  Description of Artificial Sequence: Synthetic oligonucleotide
  Sense strand starting at position 3938 of SEQ ID NO: 1882462
gcaugauccgcggcgggaa

SEQ ID NO: 2123105 - RNA, 19 nt, Artificial Sequence
  Description of Artificial Sequence: Synthetic oligonucleotide
  Antisense strand to SEQ ID NO: 2123104
uucccgccgcggaucaugc

SEQ ID NO: 2123106 - RNA, 19 nt, Artificial Sequence
  Description of Artificial Sequence: Synthetic oligonucleotide
  Sense strand starting at position 140 of SEQ ID NO: 1882463
uuuggacauauguggaagu

SEQ ID NO: 2123107 - RNA, 19 nt, Artificial Sequence
  Description of Artificial Sequence: Synthetic oligonucleotide
  Antisense strand to SEQ ID NO: 2123106
acuuccacauauguccaaa

SEQ ID NO: 2123108 - RNA, 19 nt, Artificial Sequence
  Description of Artificial Sequence: Synthetic oligonucleotide
  Sense strand starting at position 159 of SEQ ID NO: 1882463
gcuauuuguguuuaugcag

SEQ ID NO: 2123109 - RNA, 19 nt, Artificial Sequence
  Description of Artificial Sequence: Synthetic oligonucleotide
  Antisense strand to SEQ ID NO: 2123108
cugcauaaacacaaauagc

SEQ ID NO: 2123110 - RNA, 19 nt, Artificial Sequence
  Description of Artificial Sequence: Synthetic oligonucleotide
  Sense strand starting at position 162 of SEQ ID NO: 1882463
auuuguguuuaugcagauc

SEQ ID NO: 2123111 - RNA, 19 nt, Artificial Sequence
  Description of Artificial Sequence: Synthetic oligonucleotide
  Antisense strand to SEQ ID NO: 2123110
gaucugcauaaacacaaau

SEQ ID NO: 2123112 - RNA, 19 nt, Artificial Sequence
  Description of Artificial Sequence: Synthetic oligonucleotide
  Sense strand starting at position 384 of SEQ ID NO: 1882463
aagaauuucuuguugcugu

SEQ ID NO: 2123113 - RNA, 19 nt, Artificial Sequence
  Description of Artificial Sequence: Synthetic oligonucleotide
  Antisense strand to SEQ ID NO: 2123112
acagcaacaagaaauucuu

SEQ ID NO: 2123114 - RNA, 19 nt, Artificial Sequence
  Description of Artificial Sequence: Synthetic oligonucleotide
  Sense strand starting at position 466 of SEQ ID NO: 1882463
cccaauaagguucgaauca

SEQ ID NO: 2123115 - RNA, 19 nt, Artificial Sequence
  Description of Artificial Sequence: Synthetic oligonucleotide
  Antisense strand to SEQ ID NO: 2123114
ugauucgaaccuuauuggg

SEQ ID NO: 2123116 - RNA, 19 nt, Artificial Sequence
  Description of Artificial Sequence: Synthetic oligonucleotide
  Sense strand starting at position 863 of SEQ ID NO: 1882463
uuugaaagguauccucuua

SEQ ID NO: 2123117 - RNA, 19 nt, Artificial Sequence
  Description of Artificial Sequence: Synthetic oligonucleotide
  Antisense strand to SEQ ID NO: 2123116
uaagaggauaccuuucaaa

SEQ ID NO: 2123118 - RNA, 19 nt, Artificial Sequence
  Description of Artificial Sequence: Synthetic oligonucleotide
  Sense strand starting at position 886 of SEQ ID NO: 1882463
uguggugacccucaaauau

SEQ ID NO: 2123119 - RNA, 19 nt, Artificial Sequence
  Description of Artificial Sequence: Synthetic oligonucleotide
  Antisense strand to SEQ ID NO: 2123118
auauuugagggucaccaca

SEQ ID NO: 2123120 - RNA, 19 nt, Artificial Sequence
  Description of Artificial Sequence: Synthetic oligonucleotide
  Sense strand starting at position 969 of SEQ ID NO: 1882463
ggaucaugagcagggcaaa

SEQ ID NO: 2123121 - RNA, 19 nt, Artificial Sequence
  Description of Artificial Sequence: Synthetic oligonucleotide
  Antisense strand to SEQ ID NO: 2123120
uuugcccugcucaugaucc

SEQ ID NO: 2123122 - RNA, 19 nt, Artificial Sequence
  Description of Artificial Sequence: Synthetic oligonucleotide
  Sense strand starting at position 1185 of SEQ ID NO: 1882463
aggaauguggacugaguuu

SEQ ID NO: 2123123 - RNA, 19 nt, Artificial Sequence
  Description of Artificial Sequence: Synthetic oligonucleotide
  Antisense strand to SEQ ID NO: 2123122
aaacucaguccacauuccu

SEQ ID NO: 2123124 - RNA, 19 nt, Artificial Sequence
  Description of Artificial Sequence: Synthetic oligonucleotide
  Sense strand starting at position 1342 of SEQ ID NO: 1882463
gaagguccaugguuauaaa

SEQ ID NO: 2123125 - RNA, 19 nt, Artificial Sequence
  Description of Artificial Sequence: Synthetic oligonucleotide
  Antisense strand to SEQ ID NO: 2123124
uuuauaaccauggaccuuc

SEQ ID NO: 2123126 - RNA, 19 nt, Artificial Sequence
  Description of Artificial Sequence: Synthetic oligonucleotide
  Sense strand starting at position 1510 of SEQ ID NO: 1882463
ucauauucucacugggauu

SEQ ID NO: 2123127 - RNA, 19 nt, Artificial Sequence
  Description of Artificial Sequence: Synthetic oligonucleotide
  Antisense strand to SEQ ID NO: 2123126
aaucccagugagaauauga

SEQ ID NO: 2123128 - RNA, 19 nt, Artificial Sequence
  Description of Artificial Sequence: Synthetic oligonucleotide
  Sense strand starting at position 1687 of SEQ ID NO: 1882463
aaaguuugggcauauauua

SEQ ID NO: 2123129 - RNA, 19 nt, Artificial Sequence
  Description of Artificial Sequence: Synthetic oligonucleotide
  Antisense strand to SEQ ID NO: 2123128
uaauauaugcccaaacuuu

SEQ ID NO: 2123130 - RNA, 19 nt, Artificial Sequence
  Description of Artificial Sequence: Synthetic oligonucleotide
  Sense strand starting at position 1772 of SEQ ID NO: 1882463
gauauuuguugggugcuuu

SEQ ID NO: 2123131 - RNA, 19 nt, Artificial Sequence
  Description of Artificial Sequence: Synthetic oligonucleotide
  Antisense strand to SEQ ID NO: 2123130
aaagcacccaacaaauauc

SEQ ID NO: 2123132 - RNA, 19 nt, Artificial Sequence
  Description of Artificial Sequence: Synthetic oligonucleotide
  Sense strand starting at position 1851 of SEQ ID NO: 1882463
cccugcucucaagaaugua

SEQ ID NO: 2123133 - RNA, 19 nt, Artificial Sequence
  Description of Artificial Sequence: Synthetic oligonucleotide
  Antisense strand to SEQ ID NO: 2123132
uacauucuugagagcaggg

SEQ ID NO: 2123134 - RNA, 19 nt, Artificial Sequence
  Description of Artificial Sequence: Synthetic oligonucleotide
  Sense strand starting at position 1896 of SEQ ID NO: 1882463
ccauuaaggucacuuaaga

SEQ ID NO: 2123135 - RNA, 19 nt, Artificial Sequence
  Description of Artificial Sequence: Synthetic oligonucleotide
  Antisense strand to SEQ ID NO: 2123134
ucuuaagugaccuuaaugg

SEQ ID NO: 2123136 - RNA, 19 nt, Artificial Sequence
  Description of Artificial Sequence: Synthetic oligonucleotide
  Sense strand starting at position 1926 of SEQ ID NO: 1882463
aggugaauaggaugauguu

SEQ ID NO: 2123137 - RNA, 19 nt, Artificial Sequence
  Description of Artificial Sequence: Synthetic oligonucleotide
  Antisense strand to SEQ ID NO: 2123136
aacaucauccuauucaccu

SEQ ID NO: 2123138 - RNA, 19 nt, Artificial Sequence
  Description of Artificial Sequence: Synthetic oligonucleotide
  Sense strand starting at position 2409 of SEQ ID NO: 1882463
ucagaaguucugcaacaaa

SEQ ID NO: 2123139 - RNA, 19 nt, Artificial Sequence
  Description of Artificial Sequence: Synthetic oligonucleotide
  Antisense strand to SEQ ID NO: 2123138
uuuguugcagaacuucuga

SEQ ID NO: 2123140 - RNA, 19 nt, Artificial Sequence
  Description of Artificial Sequence: Synthetic oligonucleotide
  Sense strand starting at position 2451 of SEQ ID NO: 1882463
cccagaacucccuaagugu

SEQ ID NO: 2123141 - RNA, 19 nt, Artificial Sequence
  Description of Artificial Sequence: Synthetic oligonucleotide
  Antisense strand to SEQ ID NO: 2123140
acacuuagggaguucuggg

SEQ ID NO: 2123142 - RNA, 19 nt, Artificial Sequence
  Description of Artificial Sequence: Synthetic oligonucleotide
  Sense strand starting at position 2557 of SEQ ID NO: 1882463
gaauuagagaaccguguga

SEQ ID NO: 2123143 - RNA, 19 nt, Artificial Sequence
  Description of Artificial Sequence: Synthetic oligonucleotide
  Antisense strand to SEQ ID NO: 2123142
ucacacgguucucuaauuc

SEQ ID NO: 2123144 - RNA, 19 nt, Artificial Sequence
  Description of Artificial Sequence: Synthetic oligonucleotide
  Sense strand starting at position 2559 of SEQ ID NO: 1882463
auuagagaaccgugugaga

SEQ ID NO: 2123145 - RNA, 19 nt, Artificial Sequence
  Description of Artificial Sequence: Synthetic oligonucleotide
  Antisense strand to SEQ ID NO: 2123144
ucucacacgguucucuaau

SEQ ID NO: 2123146 - RNA, 19 nt, Artificial Sequence
  Description of Artificial Sequence: Synthetic oligonucleotide
  Sense strand starting at position 2561 of SEQ ID NO: 1882463
uagagaaccgugugagaca

SEQ ID NO: 2123147 - RNA, 19 nt, Artificial Sequence
  Description of Artificial Sequence: Synthetic oligonucleotide
  Antisense strand to SEQ ID NO: 2123146
ugucucacacgguucucua

SEQ ID NO: 2123148 - RNA, 19 nt, Artificial Sequence
  Description of Artificial Sequence: Synthetic oligonucleotide
  Sense strand starting at position 2636 of SEQ ID NO: 1882463
uuaugaucuagacggguga

SEQ ID NO: 2123149 - RNA, 19 nt, Artificial Sequence
  Description of Artificial Sequence: Synthetic oligonucleotide
  Antisense strand to SEQ ID NO: 2123148
ucacccgucuagaucauaa

SEQ ID NO: 2123150 - RNA, 19 nt, Artificial Sequence
  Description of Artificial Sequence: Synthetic oligonucleotide
  Sense strand starting at position 2637 of SEQ ID NO: 1882463
uaugaucuagacgggugaa

SEQ ID NO: 2123151 - RNA, 19 nt, Artificial Sequence
  Description of Artificial Sequence: Synthetic oligonucleotide
  Antisense strand to SEQ ID NO: 2123150
uucacccgucuagaucaua

SEQ ID NO: 2123152 - RNA, 19 nt, Artificial Sequence
  Description of Artificial Sequence: Synthetic oligonucleotide
  Sense strand starting at position 2640 of SEQ ID NO: 1882463
gaucuagacgggugaagaa

SEQ ID NO: 2123153 - RNA, 19 nt, Artificial Sequence
  Description of Artificial Sequence: Synthetic oligonucleotide
  Antisense strand to SEQ ID NO: 2123152
uucuucacccgucuagauc

SEQ ID NO: 2123154 - RNA, 19 nt, Artificial Sequence
  Description of Artificial Sequence: Synthetic oligonucleotide
  Sense strand starting at position 2789 of SEQ ID NO: 1882463
agguguagacaaugauuau

SEQ ID NO: 2123155 - RNA, 19 nt, Artificial Sequence
  Description of Artificial Sequence: Synthetic oligonucleotide
  Antisense strand to SEQ ID NO: 2123154
auaaucauugucuacaccu

SEQ ID NO: 2123156 - RNA, 19 nt, Artificial Sequence
  Description of Artificial Sequence: Synthetic oligonucleotide
  Sense strand starting at position 2808 of SEQ ID NO: 1882463
uagggacuuugacuuucua

SEQ ID NO: 2123157 - RNA, 19 nt, Artificial Sequence
  Description of Artificial Sequence: Synthetic oligonucleotide
  Antisense strand to SEQ ID NO: 2123156
uagaaagucaaagucccua

SEQ ID NO: 2123158 - RNA, 19 nt, Artificial Sequence
  Description of Artificial Sequence: Synthetic oligonucleotide
  Sense strand starting at position 3128 of SEQ ID NO: 1882463
ggcugacuucagggaugag

SEQ ID NO: 2123159 - RNA, 19 nt, Artificial Sequence
  Description of Artificial Sequence: Synthetic oligonucleotide
  Antisense strand to SEQ ID NO: 2123158
cucaucccugaagucagcc

SEQ ID NO: 2123160 - RNA, 19 nt, Artificial Sequence
  Description of Artificial Sequence: Synthetic oligonucleotide
  Sense strand starting at position 3174 of SEQ ID NO: 1882463
uucccuuuggacuagucau

SEQ ID NO: 2123161 - RNA, 19 nt, Artificial Sequence
  Description of Artificial Sequence: Synthetic oligonucleotide
  Antisense strand to SEQ ID NO: 2123160
augacuaguccaaagggaa

SEQ ID NO: 2123162 - RNA, 19 nt, Artificial Sequence
  Description of Artificial Sequence: Synthetic oligonucleotide
  Sense strand starting at position 3180 of SEQ ID NO: 1882463
uuggacuagucauccaauu

SEQ ID NO: 2123163 - RNA, 19 nt, Artificial Sequence
  Description of Artificial Sequence: Synthetic oligonucleotide
  Antisense strand to SEQ ID NO: 2123162
aauuggaugacuaguccaa

SEQ ID NO: 2123164 - RNA, 19 nt, Artificial Sequence
  Description of Artificial Sequence: Synthetic oligonucleotide
  Sense strand starting at position 3197 of SEQ ID NO: 1882463
uugguaugugaugacuuua

SEQ ID NO: 2123165 - RNA, 19 nt, Artificial Sequence
  Description of Artificial Sequence: Synthetic oligonucleotide
  Antisense strand to SEQ ID NO: 2123164
uaaagucaucacauaccaa

SEQ ID NO: 2123166 - RNA, 19 nt, Artificial Sequence
  Description of Artificial Sequence: Synthetic oligonucleotide
  Sense strand starting at position 3202 of SEQ ID NO: 1882463
augugaugacuuuauaccu

SEQ ID NO: 2123167 - RNA, 19 nt, Artificial Sequence
  Description of Artificial Sequence: Synthetic oligonucleotide
  Antisense strand to SEQ ID NO: 2123166
agguauaaagucaucacau

SEQ ID NO: 2123168 - RNA, 19 nt, Artificial Sequence
  Description of Artificial Sequence: Synthetic oligonucleotide
  Sense strand starting at position 3299 of SEQ ID NO: 1882463
uuugguugcuccucaauuu

SEQ ID NO: 2123169 - RNA, 19 nt, Artificial Sequence
  Description of Artificial Sequence: Synthetic oligonucleotide
  Antisense strand to SEQ ID NO: 2123168
aaauugaggagcaaccaaa

SEQ ID NO: 2123170 - RNA, 19 nt, Artificial Sequence
  Description of Artificial Sequence: Synthetic oligonucleotide
  Sense strand starting at position 3528 of SEQ ID NO: 1882463
agaagauaugcaugaacuu

SEQ ID NO: 2123171 - RNA, 19 nt, Artificial Sequence
  Description of Artificial Sequence: Synthetic oligonucleotide
  Antisense strand to SEQ ID NO: 2123170
aaguucaugcauaucuucu

SEQ ID NO: 2123172 - RNA, 19 nt, Artificial Sequence
  Description of Artificial Sequence: Synthetic oligonucleotide
  Sense strand starting at position 3606 of SEQ ID NO: 1882463
agguauaacauguaagguu

SEQ ID NO: 2123173 - RNA, 19 nt, Artificial Sequence
  Description of Artificial Sequence: Synthetic oligonucleotide
  Antisense strand to SEQ ID NO: 2123172
aaccuuacauguuauaccu

SEQ ID NO: 2123174 - RNA, 19 nt, Artificial Sequence
  Description of Artificial Sequence: Synthetic oligonucleotide
  Sense strand starting at position 3619 of SEQ ID NO: 1882463
aagguuagaccauguaaac

SEQ ID NO: 2123175 - RNA, 19 nt, Artificial Sequence
  Description of Artificial Sequence: Synthetic oligonucleotide
  Antisense strand to SEQ ID NO: 2123174
guuuacauggucuaaccuu

SEQ ID NO: 2123176 - RNA, 19 nt, Artificial Sequence
  Description of Artificial Sequence: Synthetic oligonucleotide
  Sense strand starting at position 3631 of SEQ ID NO: 1882463
uguaaacuugcugaaauuc

SEQ ID NO: 2123177 - RNA, 19 nt, Artificial Sequence
  Description of Artificial Sequence: Synthetic oligonucleotide
  Antisense strand to SEQ ID NO: 2123176
gaauuucagcaaguuuaca

SEQ ID NO: 2123178 - RNA, 19 nt, Artificial Sequence
  Description of Artificial Sequence: Synthetic oligonucleotide
  Sense strand starting at position 3754 of SEQ ID NO: 1882463
uuguguugggaugguauuu

SEQ ID NO: 2123179 - RNA, 19 nt, Artificial Sequence
  Description of Artificial Sequence: Synthetic oligonucleotide
  Antisense strand to SEQ ID NO: 2123178
aaauaccaucccaacacaa

SEQ ID NO: 2123180 - RNA, 19 nt, Artificial Sequence
  Description of Artificial Sequence: Synthetic oligonucleotide
  Sense strand starting at position 3837 of SEQ ID NO: 1882463
uuauucuauuccgucauuu

SEQ ID NO: 2123181 - RNA, 19 nt, Artificial Sequence
  Description of Artificial Sequence: Synthetic oligonucleotide
  Antisense strand to SEQ ID NO: 2123180
aaaugacggaauagaauaa

SEQ ID NO: 2123182 - RNA, 19 nt, Artificial Sequence
  Description of Artificial Sequence: Synthetic oligonucleotide
  Sense strand starting at position 3872 of SEQ ID NO: 1882463
uggacagauuguuuacuua

SEQ ID NO: 2123183 - RNA, 19 nt, Artificial Sequence
  Description of Artificial Sequence: Synthetic oligonucleotide
  Antisense strand to SEQ ID NO: 2123182
uaaguaaacaaucugucca

SEQ ID NO: 2123184 - RNA, 19 nt, Artificial Sequence
  Description of Artificial Sequence: Synthetic oligonucleotide
  Sense strand starting at position 3875 of SEQ ID NO: 1882463
acagauuguuuacuuauag

SEQ ID NO: 2123185 - RNA, 19 nt, Artificial Sequence
  Description of Artificial Sequence: Synthetic oligonucleotide
  Antisense strand to SEQ ID NO: 2123184
cuauaaguaaacaaucugu

SEQ ID NO: 2123186 - RNA, 19 nt, Artificial Sequence
  Description of Artificial Sequence: Synthetic oligonucleotide
  Sense strand starting at position 20 of SEQ ID NO: 1882464
uuggaauuccucgguuaca

SEQ ID NO: 2123187 - RNA, 19 nt, Artificial Sequence
  Description of Artificial Sequence: Synthetic oligonucleotide
  Antisense strand to SEQ ID NO: 2123186
uguaaccgaggaauuccaa

SEQ ID NO: 2123188 - RNA, 19 nt, Artificial Sequence
  Description of Artificial Sequence: Synthetic oligonucleotide
  Sense strand starting at position 21 of SEQ ID NO: 1882464
uggaauuccucgguuacaa

SEQ ID NO: 2123189 - RNA, 19 nt, Artificial Sequence
  Description of Artificial Sequence: Synthetic oligonucleotide
  Antisense strand to SEQ ID NO: 2123188
uuguaaccgaggaauucca

SEQ ID NO: 2123190 - RNA, 19 nt, Artificial Sequence
  Description of Artificial Sequence: Synthetic oligonucleotide
  Sense strand starting at position 23 of SEQ ID NO: 1882464
gaauuccucgguuacaaca

SEQ ID NO: 2123191 - RNA, 19 nt, Artificial Sequence
  Description of Artificial Sequence: Synthetic oligonucleotide
  Antisense strand to SEQ ID NO: 2123190
uguuguaaccgaggaauuc

SEQ ID NO: 2123192 - RNA, 19 nt, Artificial Sequence
  Description of Artificial Sequence: Synthetic oligonucleotide
  Sense strand starting at position 149 of SEQ ID NO: 1882464
cugugcugugaguaacaga

SEQ ID NO: 2123193 - RNA, 19 nt, Artificial Sequence
  Description of Artificial Sequence: Synthetic oligonucleotide
  Antisense strand to SEQ ID NO: 2123192
ucuguuacucacagcacag

SEQ ID NO: 2123194 - RNA, 19 nt, Artificial Sequence
  Description of Artificial Sequence: Synthetic oligonucleotide
  Sense strand starting at position 341 of SEQ ID NO: 1882464
uuuacuuauucuuuggagu

SEQ ID NO: 2123195 - RNA, 19 nt, Artificial Sequence
  Description of Artificial Sequence: Synthetic oligonucleotide
  Antisense strand to SEQ ID NO: 2123194
acuccaaagaauaaguaaa

SEQ ID NO: 2123196 - RNA, 19 nt, Artificial Sequence
  Description of Artificial Sequence: Synthetic oligonucleotide
  Sense strand starting at position 342 of SEQ ID NO: 1882464
uuacuuauucuuuggaguu

SEQ ID NO: 2123197 - RNA, 19 nt, Artificial Sequence
  Description of Artificial Sequence: Synthetic oligonucleotide
  Antisense strand to SEQ ID NO: 2123196
aacuccaaagaauaaguaa

SEQ ID NO: 2123198 - RNA, 19 nt, Artificial Sequence
  Description of Artificial Sequence: Synthetic oligonucleotide
  Sense strand starting at position 589 of SEQ ID NO: 1882464
uuucuucugggugggaaua

SEQ ID NO: 2123199 - RNA, 19 nt, Artificial Sequence
  Description of Artificial Sequence: Synthetic oligonucleotide
  Antisense strand to SEQ ID NO: 2123198
uauucccacccagaagaaa

SEQ ID NO: 2123200 - RNA, 19 nt, Artificial Sequence
  Description of Artificial Sequence: Synthetic oligonucleotide
  Sense strand starting at position 601 of SEQ ID NO: 1882464
gggaauaguaauugcuucu

SEQ ID NO: 2123201 - RNA, 19 nt, Artificial Sequence
  Description of Artificial Sequence: Synthetic oligonucleotide
  Antisense strand to SEQ ID NO: 2123200
agaagcaauuacuauuccc

SEQ ID NO: 2123202 - RNA, 19 nt, Artificial Sequence
  Description of Artificial Sequence: Synthetic oligonucleotide
  Sense strand starting at position 673 of SEQ ID NO: 1882464
cgagcaauuucccaaagaa

SEQ ID NO: 2123203 - RNA, 19 nt, Artificial Sequence
  Description of Artificial Sequence: Synthetic oligonucleotide
  Antisense strand to SEQ ID NO: 2123202
uucuuugggaaauugcucg

SEQ ID NO: 2123204 - RNA, 19 nt, Artificial Sequence
  Description of Artificial Sequence: Synthetic oligonucleotide
  Sense strand starting at position 725 of SEQ ID NO: 1882464
aagugacagcaaugauaag

SEQ ID NO: 2123205 - RNA, 19 nt, Artificial Sequence
  Description of Artificial Sequence: Synthetic oligonucleotide
  Antisense strand to SEQ ID NO: 2123204
cuuaucauugcugucacuu

SEQ ID NO: 2123206 - RNA, 19 nt, Artificial Sequence
  Description of Artificial Sequence: Synthetic oligonucleotide
  Sense strand starting at position 750 of SEQ ID NO: 1882464
acugcuuugaacugacgau

SEQ ID NO: 2123207 - RNA, 19 nt, Artificial Sequence
  Description of Artificial Sequence: Synthetic oligonucleotide
  Antisense strand to SEQ ID NO: 2123206
aucgucaguucaaagcagu

SEQ ID NO: 2123208 - RNA, 19 nt, Artificial Sequence
  Description of Artificial Sequence: Synthetic oligonucleotide
  Sense strand starting at position 779 of SEQ ID NO: 1882464
cccacugugguuuaccaaa

SEQ ID NO: 2123209 - RNA, 19 nt, Artificial Sequence
  Description of Artificial Sequence: Synthetic oligonucleotide
  Antisense strand to SEQ ID NO: 2123208
uuugguaaaccacaguggg

SEQ ID NO: 2123210 - RNA, 19 nt, Artificial Sequence
  Description of Artificial Sequence: Synthetic oligonucleotide
  Sense strand starting at position 916 of SEQ ID NO: 1882464
ggucuuggaagucaucaag

SEQ ID NO: 2123211 - RNA, 19 nt, Artificial Sequence
  Description of Artificial Sequence: Synthetic oligonucleotide
  Antisense strand to SEQ ID NO: 2123210
cuugaugacuuccaagacc

SEQ ID NO: 2123212 - RNA, 19 nt, Artificial Sequence
  Description of Artificial Sequence: Synthetic oligonucleotide
  Sense strand starting at position 922 of SEQ ID NO: 1882464
ggaagucaucaaggaguga

SEQ ID NO: 2123213 - RNA, 19 nt, Artificial Sequence
  Description of Artificial Sequence: Synthetic oligonucleotide
  Antisense strand to SEQ ID NO: 2123212
ucacuccuugaugacuucc

SEQ ID NO: 2123214 - RNA, 19 nt, Artificial Sequence
  Description of Artificial Sequence: Synthetic oligonucleotide
  Sense strand starting at position 926 of SEQ ID NO: 1882464
gucaucaaggagugagaca

SEQ ID NO: 2123215 - RNA, 19 nt, Artificial Sequence
  Description of Artificial Sequence: Synthetic oligonucleotide
  Antisense strand to SEQ ID NO: 2123214
ugucucacuccuugaugac

SEQ ID NO: 2123216 - RNA, 19 nt, Artificial Sequence
  Description of Artificial Sequence: Synthetic oligonucleotide
  Sense strand starting at position 937 of SEQ ID NO: 1882464
gugagacaugagcagcuua

SEQ ID NO: 2123217 - RNA, 19 nt, Artificial Sequence
  Description of Artificial Sequence: Synthetic oligonucleotide
  Antisense strand to SEQ ID NO: 2123216
uaagcugcucaugucucac

SEQ ID NO: 2123218 - RNA, 19 nt, Artificial Sequence
  Description of Artificial Sequence: Synthetic oligonucleotide
  Sense strand starting at position 1007 of SEQ ID NO: 1882464
caggauguggguugacaga

SEQ ID NO: 2123219 - RNA, 19 nt, Artificial Sequence
  Description of Artificial Sequence: Synthetic oligonucleotide
  Antisense strand to SEQ ID NO: 2123218
ucugucaacccacauccug

SEQ ID NO: 2123220 - RNA, 19 nt, Artificial Sequence
  Description of Artificial Sequence: Synthetic oligonucleotide
  Sense strand starting at position 1659 of SEQ ID NO: 1882464
auguacauuuaagggauua

SEQ ID NO: 2123221 - RNA, 19 nt, Artificial Sequence
  Description of Artificial Sequence: Synthetic oligonucleotide
  Antisense strand to SEQ ID NO: 2123220
uaaucccuuaaauguacau

SEQ ID NO: 2123222 - RNA, 19 nt, Artificial Sequence
  Description of Artificial Sequence: Synthetic oligonucleotide
  Sense strand starting at position 1776 of SEQ ID NO: 1882464
uguagaaaugaugagcuuu

SEQ ID NO: 2123223 - RNA, 19 nt, Artificial Sequence
  Description of Artificial Sequence: Synthetic oligonucleotide
  Antisense strand to SEQ ID NO: 2123222
aaagcucaucauuucuaca

SEQ ID NO: 2123224 - RNA, 19 nt, Artificial Sequence
  Description of Artificial Sequence: Synthetic oligonucleotide
  Sense strand starting at position 1817 of SEQ ID NO: 1882464
guuaaauaacgcuauucua

SEQ ID NO: 2123225 - RNA, 19 nt, Artificial Sequence
  Description of Artificial Sequence: Synthetic oligonucleotide
  Antisense strand to SEQ ID NO: 2123224
uagaauagcguuauuuaac

SEQ ID NO: 2123226 - RNA, 19 nt, Artificial Sequence
  Description of Artificial Sequence: Synthetic oligonucleotide
  Sense strand starting at position 1887 of SEQ ID NO: 1882464
uggauaaugcuagaugcuu

SEQ ID NO: 2123227 - RNA, 19 nt, Artificial Sequence
  Description of Artificial Sequence: Synthetic oligonucleotide
  Antisense strand to SEQ ID NO: 2123226
aagcaucuagcauuaucca

SEQ ID NO: 2123228 - RNA, 19 nt, Artificial Sequence
  Description of Artificial Sequence: Synthetic oligonucleotide
  Sense strand starting at position 2263 of SEQ ID NO: 1882464
ucuuaaugcuaauuggaaa

SEQ ID NO: 2123229 - RNA, 19 nt, Artificial Sequence
  Description of Artificial Sequence: Synthetic oligonucleotide
  Antisense strand to SEQ ID NO: 2123228
uuuccaauuagcauuaaga

SEQ ID NO: 2123230 - RNA, 19 nt, Artificial Sequence
  Description of Artificial Sequence: Synthetic oligonucleotide
  Sense strand starting at position 2421 of SEQ ID NO: 1882464
caccuuagccucugggaua

SEQ ID NO: 2123231 - RNA, 19 nt, Artificial Sequence
  Description of Artificial Sequence: Synthetic oligonucleotide
  Antisense strand to SEQ ID NO: 2123230
uaucccagaggcuaaggug

SEQ ID NO: 2123232 - RNA, 19 nt, Artificial Sequence
  Description of Artificial Sequence: Synthetic oligonucleotide
  Sense strand starting at position 2426 of SEQ ID NO: 1882464
uagccucugggauagcuaa

SEQ ID NO: 2123233 - RNA, 19 nt, Artificial Sequence
  Description of Artificial Sequence: Synthetic oligonucleotide
  Antisense strand to SEQ ID NO: 2123232
uuagcuaucccagaggcua

SEQ ID NO: 2123234 - RNA, 19 nt, Artificial Sequence
  Description of Artificial Sequence: Synthetic oligonucleotide
  Sense strand starting at position 2433 of SEQ ID NO: 1882464
ugggauagcuaagugugaa

SEQ ID NO: 2123235 - RNA, 19 nt, Artificial Sequence
  Description of Artificial Sequence: Synthetic oligonucleotide
  Antisense strand to SEQ ID NO: 2123234
uucacacuuagcuauccca

SEQ ID NO: 2123236 - RNA, 19 nt, Artificial Sequence
  Description of Artificial Sequence: Synthetic oligonucleotide
  Sense strand starting at position 2434 of SEQ ID NO: 1882464
gggauagcuaagugugaac

SEQ ID NO: 2123237 - RNA, 19 nt, Artificial Sequence
  Description of Artificial Sequence: Synthetic oligonucleotide
  Antisense strand to SEQ ID NO: 2123236
guucacacuuagcuauccc

SEQ ID NO: 2123238 - RNA, 19 nt, Artificial Sequence
  Description of Artificial Sequence: Synthetic oligonucleotide
  Sense strand starting at position 2595 of SEQ ID NO: 1882464
ccugguccugcuuaagauu

SEQ ID NO: 2123239 - RNA, 19 nt, Artificial Sequence
  Description of Artificial Sequence: Synthetic oligonucleotide
  Antisense strand to SEQ ID NO: 2123238
aaucuuaagcaggaccagg

SEQ ID NO: 2123240 - RNA, 19 nt, Artificial Sequence
  Description of Artificial Sequence: Synthetic oligonucleotide
  Sense strand starting at position 2657 of SEQ ID NO: 1882464
gcuugcucuccagaagaaa

SEQ ID NO: 2123241 - RNA, 19 nt, Artificial Sequence
  Description of Artificial Sequence: Synthetic oligonucleotide
  Antisense strand to SEQ ID NO: 2123240
uuucuucuggagagcaagc

SEQ ID NO: 2123242 - RNA, 19 nt, Artificial Sequence
  Description of Artificial Sequence: Synthetic oligonucleotide
  Sense strand starting at position 2681 of SEQ ID NO: 1882464
acuaaauaagugggugagu

SEQ ID NO: 2123243 - RNA, 19 nt, Artificial Sequence
  Description of Artificial Sequence: Synthetic oligonucleotide
  Antisense strand to SEQ ID NO: 2123242
acucacccacuuauuuagu

SEQ ID NO: 2123244 - RNA, 19 nt, Artificial Sequence
  Description of Artificial Sequence: Synthetic oligonucleotide
  Sense strand starting at position 2707 of SEQ ID NO: 1882464
uacgaaguuguauggaauc

SEQ ID NO: 2123245 - RNA, 19 nt, Artificial Sequence
  Description of Artificial Sequence: Synthetic oligonucleotide
  Antisense strand to SEQ ID NO: 2123244
gauuccauacaacuucgua

SEQ ID NO: 2123246 - RNA, 19 nt, Artificial Sequence
  Description of Artificial Sequence: Synthetic oligonucleotide
  Sense strand starting at position 2761 of SEQ ID NO: 1882464
uguuuaaugcaagagaggu

SEQ ID NO: 2123247 - RNA, 19 nt, Artificial Sequence
  Description of Artificial Sequence: Synthetic oligonucleotide
  Antisense strand to SEQ ID NO: 2123246
accucucuugcauuaaaca

SEQ ID NO: 2123248 - RNA, 19 nt, Artificial Sequence
  Description of Artificial Sequence: Synthetic oligonucleotide
  Sense strand starting at position 2860 of SEQ ID NO: 1882464
uguuaagugccauggagga

SEQ ID NO: 2123249 - RNA, 19 nt, Artificial Sequence
  Description of Artificial Sequence: Synthetic oligonucleotide
  Antisense strand to SEQ ID NO: 2123248
uccuccauggcacuuaaca

SEQ ID NO: 2123250 - RNA, 19 nt, Artificial Sequence
  Description of Artificial Sequence: Synthetic oligonucleotide
  Sense strand starting at position 2928 of SEQ ID NO: 1882464
cguugucagagucagauau

SEQ ID NO: 2123251 - RNA, 19 nt, Artificial Sequence
  Description of Artificial Sequence: Synthetic oligonucleotide
  Antisense strand to SEQ ID NO: 2123250
auaucugacucugacaacg

SEQ ID NO: 2123252 - RNA, 19 nt, Artificial Sequence
  Description of Artificial Sequence: Synthetic oligonucleotide
  Sense strand starting at position 3460 of SEQ ID NO: 1882464
uuggaauuagguuagcaua

SEQ ID NO: 2123253 - RNA, 19 nt, Artificial Sequence
  Description of Artificial Sequence: Synthetic oligonucleotide
  Antisense strand to SEQ ID NO: 2123252
uaugcuaaccuaauuccaa

SEQ ID NO: 2123254 - RNA, 19 nt, Artificial Sequence
  Description of Artificial Sequence: Synthetic oligonucleotide
  Sense strand starting at position 3462 of SEQ ID NO: 1882464
ggaauuagguuagcauaaa

SEQ ID NO: 2123255 - RNA, 19 nt, Artificial Sequence
  Description of Artificial Sequence: Synthetic oligonucleotide
  Antisense strand to SEQ ID NO: 2123254
uuuaugcuaaccuaauucc

SEQ ID NO: 2123256 - RNA, 19 nt, Artificial Sequence
  Description of Artificial Sequence: Synthetic oligonucleotide
  Sense strand starting at position 3616 of SEQ ID NO: 1882464
cucacaaauguuuguuuaa

SEQ ID NO: 2123257 - RNA, 19 nt, Artificial Sequence
  Description of Artificial Sequence: Synthetic oligonucleotide
  Antisense strand to SEQ ID NO: 2123256
uuaaacaaacauuugugag

SEQ ID NO: 2123258 - RNA, 19 nt, Artificial Sequence
  Description of Artificial Sequence: Synthetic oligonucleotide
  Sense strand starting at position 3694 of SEQ ID NO: 1882464
caaggaucuuccguaguaa

SEQ ID NO: 2123259 - RNA, 19 nt, Artificial Sequence
  Description of Artificial Sequence: Synthetic oligonucleotide
  Antisense strand to SEQ ID NO: 2123258
uuacuacggaagauccuug

SEQ ID NO: 2123260 - RNA, 19 nt, Artificial Sequence
  Description of Artificial Sequence: Synthetic oligonucleotide
  Sense strand starting at position 3695 of SEQ ID NO: 1882464
aaggaucuuccguaguaau

SEQ ID NO: 2123261 - RNA, 19 nt, Artificial Sequence
  Description of Artificial Sequence: Synthetic oligonucleotide
  Antisense strand to SEQ ID NO: 2123260
auuacuacggaagauccuu

SEQ ID NO: 2123262 - RNA, 19 nt, Artificial Sequence
  Description of Artificial Sequence: Synthetic oligonucleotide
  Sense strand starting at position 3724 of SEQ ID NO: 1882464
auaguauuaagauguaguc

SEQ ID NO: 2123263 - RNA, 19 nt, Artificial Sequence
  Description of Artificial Sequence: Synthetic oligonucleotide
  Antisense strand to SEQ ID NO: 2123262
gacuacaucuuaauacuau

SEQ ID NO: 2123264 - RNA, 19 nt, Artificial Sequence
  Description of Artificial Sequence: Synthetic oligonucleotide
  Sense strand starting at position 3931 of SEQ ID NO: 1882464
cuuaucuugcuugaguaca

SEQ ID NO: 2123265 - RNA, 19 nt, Artificial Sequence
  Description of Artificial Sequence: Synthetic oligonucleotide
  Antisense strand to SEQ ID NO: 2123264
uguacucaagcaagauaag

SEQ ID NO: 2123266 - RNA, 19 nt, Artificial Sequence
  Description of Artificial Sequence: Synthetic oligonucleotide
  Sense strand starting at position 51 of SEQ ID NO: 1882465
ggugguucugaggguuaaa

SEQ ID NO: 2123267 - RNA, 19 nt, Artificial Sequence
  Description of Artificial Sequence: Synthetic oligonucleotide
  Antisense strand to SEQ ID NO: 2123266
uuuaacccucagaaccacc

SEQ ID NO: 2123268 - RNA, 19 nt, Artificial Sequence
  Description of Artificial Sequence: Synthetic oligonucleotide
  Sense strand starting at position 87 of SEQ ID NO: 1882465
augcuuagaacaggaugau

SEQ ID NO: 2123269 - RNA, 19 nt, Artificial Sequence
  Description of Artificial Sequence: Synthetic oligonucleotide
  Antisense strand to SEQ ID NO: 2123268
aucauccuguucuaagcau

SEQ ID NO: 2123270 - RNA, 19 nt, Artificial Sequence
  Description of Artificial Sequence: Synthetic oligonucleotide
  Sense strand starting at position 115 of SEQ ID NO: 1882465
cucacuuaauuaguguauu

SEQ ID NO: 2123271 - RNA, 19 nt, Artificial Sequence
  Description of Artificial Sequence: Synthetic oligonucleotide
  Antisense strand to SEQ ID NO: 2123270
aauacacuaauuaagugag

SEQ ID NO: 2123272 - RNA, 19 nt, Artificial Sequence
  Description of Artificial Sequence: Synthetic oligonucleotide
  Sense strand starting at position 169 of SEQ ID NO: 1882465
ugcuauugauguguuauuu

SEQ ID NO: 2123273 - RNA, 19 nt, Artificial Sequence
  Description of Artificial Sequence: Synthetic oligonucleotide
  Antisense strand to SEQ ID NO: 2123272
aaauaacacaucaauagca

SEQ ID NO: 2123274 - RNA, 19 nt, Artificial Sequence
  Description of Artificial Sequence: Synthetic oligonucleotide
  Sense strand starting at position 400 of SEQ ID NO: 1882465
acaagcucucuaggacaau

SEQ ID NO: 2123275 - RNA, 19 nt, Artificial Sequence
  Description of Artificial Sequence: Synthetic oligonucleotide
  Antisense strand to SEQ ID NO: 2123274
auuguccuagagagcuugu

SEQ ID NO: 2123276 - RNA, 19 nt, Artificial Sequence
  Description of Artificial Sequence: Synthetic oligonucleotide
  Sense strand starting at position 811 of SEQ ID NO: 1882465
ggacucuauuuauauaaag

SEQ ID NO: 2123277 - RNA, 19 nt, Artificial Sequence
  Description of Artificial Sequence: Synthetic oligonucleotide
  Antisense strand to SEQ ID NO: 2123276
cuuuauauaaauagagucc

SEQ ID NO: 2123278 - RNA, 19 nt, Artificial Sequence
  Description of Artificial Sequence: Synthetic oligonucleotide
  Sense strand starting at position 984 of SEQ ID NO: 1882465
uggcuacucugcuuugaaa

SEQ ID NO: 2123279 - RNA, 19 nt, Artificial Sequence
  Description of Artificial Sequence: Synthetic oligonucleotide
  Antisense strand to SEQ ID NO: 2123278
uuucaaagcagaguagcca

SEQ ID NO: 2123280 - RNA, 19 nt, Artificial Sequence
  Description of Artificial Sequence: Synthetic oligonucleotide
  Sense strand starting at position 986 of SEQ ID NO: 1882465
gcuacucugcuuugaaaua

SEQ ID NO: 2123281 - RNA, 19 nt, Artificial Sequence
  Description of Artificial Sequence: Synthetic oligonucleotide
  Antisense strand to SEQ ID NO: 2123280
uauuucaaagcagaguagc

SEQ ID NO: 2123282 - RNA, 19 nt, Artificial Sequence
  Description of Artificial Sequence: Synthetic oligonucleotide
  Sense strand starting at position 1046 of SEQ ID NO: 1882465
ugagauuuauuccacaaug

SEQ ID NO: 2123283 - RNA, 19 nt, Artificial Sequence
  Description of Artificial Sequence: Synthetic oligonucleotide
  Antisense strand to SEQ ID NO: 2123282
cauuguggaauaaaucuca

SEQ ID NO: 2123284 - RNA, 19 nt, Artificial Sequence
  Description of Artificial Sequence: Synthetic oligonucleotide
  Sense strand starting at position 1244 of SEQ ID NO: 1882465
gcgugaugccggccugagu

SEQ ID NO: 2123285 - RNA, 19 nt, Artificial Sequence
  Description of Artificial Sequence: Synthetic oligonucleotide
  Antisense strand to SEQ ID NO: 2123284
acucaggccggcaucacgc

SEQ ID NO: 2123286 - RNA, 19 nt, Artificial Sequence
  Description of Artificial Sequence: Synthetic oligonucleotide
  Sense strand starting at position 1259 of SEQ ID NO: 1882465
gagucagacucauuaagau

SEQ ID NO: 2123287 - RNA, 19 nt, Artificial Sequence
  Description of Artificial Sequence: Synthetic oligonucleotide
  Antisense strand to SEQ ID NO: 2123286
aucuuaaugagucugacuc

SEQ ID NO: 2123288 - RNA, 19 nt, Artificial Sequence
  Description of Artificial Sequence: Synthetic oligonucleotide
  Sense strand starting at position 1725 of SEQ ID NO: 1882465
accuuaauuccugggugag

SEQ ID NO: 2123289 - RNA, 19 nt, Artificial Sequence
  Description of Artificial Sequence: Synthetic oligonucleotide
  Antisense strand to SEQ ID NO: 2123288
cucacccaggaauuaaggu

SEQ ID NO: 2123290 - RNA, 19 nt, Artificial Sequence
  Description of Artificial Sequence: Synthetic oligonucleotide
  Sense strand starting at position 1726 of SEQ ID NO: 1882465
ccuuaauuccugggugagu

SEQ ID NO: 2123291 - RNA, 19 nt, Artificial Sequence
  Description of Artificial Sequence: Synthetic oligonucleotide
  Antisense strand to SEQ ID NO: 2123290
acucacccaggaauuaagg

SEQ ID NO: 2123292 - RNA, 19 nt, Artificial Sequence
  Description of Artificial Sequence: Synthetic oligonucleotide
  Sense strand starting at position 1728 of SEQ ID NO: 1882465
uuaauuccugggugaguga

SEQ ID NO: 2123293 - RNA, 19 nt, Artificial Sequence
  Description of Artificial Sequence: Synthetic oligonucleotide
  Antisense strand to SEQ ID NO: 2123292
ucacucacccaggaauuaa

SEQ ID NO: 2123294 - RNA, 19 nt, Artificial Sequence
  Description of Artificial Sequence: Synthetic oligonucleotide
  Sense strand starting at position 1735 of SEQ ID NO: 1882465
cugggugagugacauuuaa

SEQ ID NO: 2123295 - RNA, 19 nt, Artificial Sequence
  Description of Artificial Sequence: Synthetic oligonucleotide
  Antisense strand to SEQ ID NO: 2123294
uuaaaugucacucacccag

SEQ ID NO: 2123296 - RNA, 19 nt, Artificial Sequence
  Description of Artificial Sequence: Synthetic oligonucleotide
  Sense strand starting at position 1868 of SEQ ID NO: 1882465
augcauggcuccucauuaa

SEQ ID NO: 2123297 - RNA, 19 nt, Artificial Sequence
  Description of Artificial Sequence: Synthetic oligonucleotide
  Antisense strand to SEQ ID NO: 2123296
uuaaugaggagccaugcau

SEQ ID NO: 2123298 - RNA, 19 nt, Artificial Sequence
  Description of Artificial Sequence: Synthetic oligonucleotide
  Sense strand starting at position 2007 of SEQ ID NO: 1882465
ggccuuuacgugucuuauu

SEQ ID NO: 2123299 - RNA, 19 nt, Artificial Sequence
  Description of Artificial Sequence: Synthetic oligonucleotide
  Antisense strand to SEQ ID NO: 2123298
aauaagacacguaaaggcc

SEQ ID NO: 2123300 - RNA, 19 nt, Artificial Sequence
  Description of Artificial Sequence: Synthetic oligonucleotide
  Sense strand starting at position 2008 of SEQ ID NO: 1882465
gccuuuacgugucuuauuu

SEQ ID NO: 2123301 - RNA, 19 nt, Artificial Sequence
  Description of Artificial Sequence: Synthetic oligonucleotide
  Antisense strand to SEQ ID NO: 2123300
aaauaagacacguaaaggc

SEQ ID NO: 2123302 - RNA, 19 nt, Artificial Sequence
  Description of Artificial Sequence: Synthetic oligonucleotide
  Sense strand starting at position 2222 of SEQ ID NO: 1882465
caaggucugucaguaguaa

SEQ ID NO: 2123303 - RNA, 19 nt, Artificial Sequence
  Description of Artificial Sequence: Synthetic oligonucleotide
  Antisense strand to SEQ ID NO: 2123302
uuacuacugacagaccuug

SEQ ID NO: 2123304 - RNA, 19 nt, Artificial Sequence
  Description of Artificial Sequence: Synthetic oligonucleotide
  Sense strand starting at position 2223 of SEQ ID NO: 1882465
aaggucugucaguaguaag

SEQ ID NO: 2123305 - RNA, 19 nt, Artificial Sequence
  Description of Artificial Sequence: Synthetic oligonucleotide
  Antisense strand to SEQ ID NO: 2123304
cuuacuacugacagaccuu

SEQ ID NO: 2123306 - RNA, 19 nt, Artificial Sequence
  Description of Artificial Sequence: Synthetic oligonucleotide
  Sense strand starting at position 2713 of SEQ ID NO: 1882465
ucuggacaucucugagcuu

SEQ ID NO: 2123307 - RNA, 19 nt, Artificial Sequence
  Description of Artificial Sequence: Synthetic oligonucleotide
  Antisense strand to SEQ ID NO: 2123306
aagcucagagauguccaga

SEQ ID NO: 2123308 - RNA, 19 nt, Artificial Sequence
  Description of Artificial Sequence: Synthetic oligonucleotide
  Sense strand starting at position 2716 of SEQ ID NO: 1882465
ggacaucucugagcuucuu

SEQ ID NO: 2123309 - RNA, 19 nt, Artificial Sequence
  Description of Artificial Sequence: Synthetic oligonucleotide
  Antisense strand to SEQ ID NO: 2123308
aagaagcucagagaugucc

SEQ ID NO: 2123310 - RNA, 19 nt, Artificial Sequence
  Description of Artificial Sequence: Synthetic oligonucleotide
  Sense strand starting at position 2734 of SEQ ID NO: 1882465
uccguuucucacguguaaa

SEQ ID NO: 2123311 - RNA, 19 nt, Artificial Sequence
  Description of Artificial Sequence: Synthetic oligonucleotide
  Antisense strand to SEQ ID NO: 2123310
uuuacacgugagaaacgga

SEQ ID NO: 2123312 - RNA, 19 nt, Artificial Sequence
  Description of Artificial Sequence: Synthetic oligonucleotide
  Sense strand starting at position 2819 of SEQ ID NO: 1882465
cuggaaaguccuggaaguc

SEQ ID NO: 2123313 - RNA, 19 nt, Artificial Sequence
  Description of Artificial Sequence: Synthetic oligonucleotide
  Antisense strand to SEQ ID NO: 2123312
gacuuccaggacuuuccag

SEQ ID NO: 2123314 - RNA, 19 nt, Artificial Sequence
  Description of Artificial Sequence: Synthetic oligonucleotide
  Sense strand starting at position 2820 of SEQ ID NO: 1882465
uggaaaguccuggaagucu

SEQ ID NO: 2123315 - RNA, 19 nt, Artificial Sequence
  Description of Artificial Sequence: Synthetic oligonucleotide
  Antisense strand to SEQ ID NO: 2123314
agacuuccaggacuuucca

SEQ ID NO: 2123316 - RNA, 19 nt, Artificial Sequence
  Description of Artificial Sequence: Synthetic oligonucleotide
  Sense strand starting at position 2837 of SEQ ID NO: 1882465
cuccuucuucucgagaacu

SEQ ID NO: 2123317 - RNA, 19 nt, Artificial Sequence
  Description of Artificial Sequence: Synthetic oligonucleotide
  Antisense strand to SEQ ID NO: 2123316
aguucucgagaagaaggag

SEQ ID NO: 2123318 - RNA, 19 nt, Artificial Sequence
  Description of Artificial Sequence: Synthetic oligonucleotide
  Sense strand starting at position 2839 of SEQ ID NO: 1882465
ccuucuucucgagaacuuu

SEQ ID NO: 2123319 - RNA, 19 nt, Artificial Sequence
  Description of Artificial Sequence: Synthetic oligonucleotide
  Antisense strand to SEQ ID NO: 2123318
aaaguucucgagaagaagg

SEQ ID NO: 2123320 - RNA, 19 nt, Artificial Sequence
  Description of Artificial Sequence: Synthetic oligonucleotide
  Sense strand starting at position 3273 of SEQ ID NO: 1882465
cccacaguccguuacaaau

SEQ ID NO: 2123321 - RNA, 19 nt, Artificial Sequence
  Description of Artificial Sequence: Synthetic oligonucleotide
  Antisense strand to SEQ ID NO: 2123320
auuuguaacggacuguggg

SEQ ID NO: 2123322 - RNA, 19 nt, Artificial Sequence
  Description of Artificial Sequence: Synthetic oligonucleotide
  Sense strand starting at position 3314 of SEQ ID NO: 1882465
uggagugucuggcugagaa

SEQ ID NO: 2123323 - RNA, 19 nt, Artificial Sequence
  Description of Artificial Sequence: Synthetic oligonucleotide
  Antisense strand to SEQ ID NO: 2123322
uucucagccagacacucca

SEQ ID NO: 2123324 - RNA, 19 nt, Artificial Sequence
  Description of Artificial Sequence: Synthetic oligonucleotide
  Sense strand starting at position 3315 of SEQ ID NO: 1882465
ggagugucuggcugagaag

SEQ ID NO: 2123325 - RNA, 19 nt, Artificial Sequence
  Description of Artificial Sequence: Synthetic oligonucleotide
  Antisense strand to SEQ ID NO: 2123324
cuucucagccagacacucc

SEQ ID NO: 2123326 - RNA, 19 nt, Artificial Sequence
  Description of Artificial Sequence: Synthetic oligonucleotide
  Sense strand starting at position 3316 of SEQ ID NO: 1882465
gagugucuggcugagaagu

SEQ ID NO: 2123327 - RNA, 19 nt, Artificial Sequence
  Description of Artificial Sequence: Synthetic oligonucleotide
  Antisense strand to SEQ ID NO: 2123326
acuucucagccagacacuc

SEQ ID NO: 2123328 - RNA, 19 nt, Artificial Sequence
  Description of Artificial Sequence: Synthetic oligonucleotide
  Sense strand starting at position 3361 of SEQ ID NO: 1882465
ucagaacccuuuguguaua

SEQ ID NO: 2123329 - RNA, 19 nt, Artificial Sequence
  Description of Artificial Sequence: Synthetic oligonucleotide
  Antisense strand to SEQ ID NO: 2123328
uauacacaaaggguucuga

SEQ ID NO: 2123330 - RNA, 19 nt, Artificial Sequence
  Description of Artificial Sequence: Synthetic oligonucleotide
  Sense strand starting at position 3364 of SEQ ID NO: 1882465
gaacccuuuguguauaugu

SEQ ID NO: 2123331 - RNA, 19 nt, Artificial Sequence
  Description of Artificial Sequence: Synthetic oligonucleotide
  Antisense strand to SEQ ID NO: 2123330
acauauacacaaaggguuc

SEQ ID NO: 2123332 - RNA, 19 nt, Artificial Sequence
  Description of Artificial Sequence: Synthetic oligonucleotide
  Sense strand starting at position 3450 of SEQ ID NO: 1882465
ggaugaagaauuggucuuu

SEQ ID NO: 2123333 - RNA, 19 nt, Artificial Sequence
  Description of Artificial Sequence: Synthetic oligonucleotide
  Antisense strand to SEQ ID NO: 2123332
aaagaccaauucuucaucc

SEQ ID NO: 2123334 - RNA, 19 nt, Artificial Sequence
  Description of Artificial Sequence: Synthetic oligonucleotide
  Sense strand starting at position 3490 of SEQ ID NO: 1882465
ggagaagucagaggucuuc

SEQ ID NO: 2123335 - RNA, 19 nt, Artificial Sequence
  Description of Artificial Sequence: Synthetic oligonucleotide
  Antisense strand to SEQ ID NO: 2123334
gaagaccucugacuucucc

SEQ ID NO: 2123336 - RNA, 19 nt, Artificial Sequence
  Description of Artificial Sequence: Synthetic oligonucleotide
  Sense strand starting at position 3890 of SEQ ID NO: 1882465
ggaggucuugcuuagucau

SEQ ID NO: 2123337 - RNA, 19 nt, Artificial Sequence
  Description of Artificial Sequence: Synthetic oligonucleotide
  Antisense strand to SEQ ID NO: 2123336
augacuaagcaagaccucc

SEQ ID NO: 2123338 - RNA, 19 nt, Artificial Sequence
  Description of Artificial Sequence: Synthetic oligonucleotide
  Sense strand starting at position 3907 of SEQ ID NO: 1882465
auacgauccucuguggauu

SEQ ID NO: 2123339 - RNA, 19 nt, Artificial Sequence
  Description of Artificial Sequence: Synthetic oligonucleotide
  Antisense strand to SEQ ID NO: 2123338
aauccacagaggaucguau

SEQ ID NO: 2123340 - RNA, 19 nt, Artificial Sequence
  Description of Artificial Sequence: Synthetic oligonucleotide
  Sense strand starting at position 3908 of SEQ ID NO: 1882465
uacgauccucuguggauua

SEQ ID NO: 2123341 - RNA, 19 nt, Artificial Sequence
  Description of Artificial Sequence: Synthetic oligonucleotide
  Antisense strand to SEQ ID NO: 2123340
uaauccacagaggaucgua

SEQ ID NO: 2123342 - RNA, 19 nt, Artificial Sequence
  Description of Artificial Sequence: Synthetic oligonucleotide
  Sense strand starting at position 3910 of SEQ ID NO: 1882465
cgauccucuguggauuagu

SEQ ID NO: 2123343 - RNA, 19 nt, Artificial Sequence
  Description of Artificial Sequence: Synthetic oligonucleotide
  Antisense strand to SEQ ID NO: 2123342
acuaauccacagaggaucg

SEQ ID NO: 2123344 - RNA, 19 nt, Artificial Sequence
  Description of Artificial Sequence: Synthetic oligonucleotide
  Sense strand starting at position 3913 of SEQ ID NO: 1882465
uccucuguggauuagugua

SEQ ID NO: 2123345 - RNA, 19 nt, Artificial Sequence
  Description of Artificial Sequence: Synthetic oligonucleotide
  Antisense strand to SEQ ID NO: 2123344
uacacuaauccacagagga

SEQ ID NO: 2123346 - RNA, 19 nt, Artificial Sequence
  Description of Artificial Sequence: Synthetic oligonucleotide
  Sense strand starting at position 17 of SEQ ID NO: 1882466
ugggauaagugauuaacuu

SEQ ID NO: 2123347 - RNA, 19 nt, Artificial Sequence
  Description of Artificial Sequence: Synthetic oligonucleotide
  Antisense strand to SEQ ID NO: 2123346
aaguuaaucacuuauccca

SEQ ID NO: 2123348 - RNA, 19 nt, Artificial Sequence
  Description of Artificial Sequence: Synthetic oligonucleotide
  Sense strand starting at position 486 of SEQ ID NO: 1882466
gugucuuugcauccagcau

SEQ ID NO: 2123349 - RNA, 19 nt, Artificial Sequence
  Description of Artificial Sequence: Synthetic oligonucleotide
  Antisense strand to SEQ ID NO: 2123348
augcuggaugcaaagacac

SEQ ID NO: 2123350 - RNA, 19 nt, Artificial Sequence
  Description of Artificial Sequence: Synthetic oligonucleotide
  Sense strand starting at position 524 of SEQ ID NO: 1882466
ugcaguaucaugggacaca

SEQ ID NO: 2123351 - RNA, 19 nt, Artificial Sequence
  Description of Artificial Sequence: Synthetic oligonucleotide
  Antisense strand to SEQ ID NO: 2123350
ugugucccaugauacugca

SEQ ID NO: 2123352 - RNA, 19 nt, Artificial Sequence
  Description of Artificial Sequence: Synthetic oligonucleotide
  Sense strand starting at position 1159 of SEQ ID NO: 1882466
auugguuucggaggauaga

SEQ ID NO: 2123353 - RNA, 19 nt, Artificial Sequence
  Description of Artificial Sequence: Synthetic oligonucleotide
  Antisense strand to SEQ ID NO: 2123352
ucuauccuccgaaaccaau

SEQ ID NO: 2123354 - RNA, 19 nt, Artificial Sequence
  Description of Artificial Sequence: Synthetic oligonucleotide
  Sense strand starting at position 1160 of SEQ ID NO: 1882466
uugguuucggaggauagau

SEQ ID NO: 2123355 - RNA, 19 nt, Artificial Sequence
  Description of Artificial Sequence: Synthetic oligonucleotide
  Antisense strand to SEQ ID NO: 2123354
aucuauccuccgaaaccaa

SEQ ID NO: 2123356 - RNA, 19 nt, Artificial Sequence
  Description of Artificial Sequence: Synthetic oligonucleotide
  Sense strand starting at position 1180 of SEQ ID NO: 1882466
gauaauaaacagugaugcu

SEQ ID NO: 2123357 - RNA, 19 nt, Artificial Sequence
  Description of Artificial Sequence: Synthetic oligonucleotide
  Antisense strand to SEQ ID NO: 2123356
agcaucacuguuuauuauc

SEQ ID NO: 2123358 - RNA, 19 nt, Artificial Sequence
  Description of Artificial Sequence: Synthetic oligonucleotide
  Sense strand starting at position 1202 of SEQ ID NO: 1882466
agaguaguuguguaugaaa

SEQ ID NO: 2123359 - RNA, 19 nt, Artificial Sequence
  Description of Artificial Sequence: Synthetic oligonucleotide
  Antisense strand to SEQ ID NO: 2123358
uuucauacacaacuacucu

SEQ ID NO: 2123360 - RNA, 19 nt, Artificial Sequence
  Description of Artificial Sequence: Synthetic oligonucleotide
  Sense strand starting at position 1380 of SEQ ID NO: 1882466
gggcuaaagagguaauagu

SEQ ID NO: 2123361 - RNA, 19 nt, Artificial Sequence
  Description of Artificial Sequence: Synthetic oligonucleotide
  Antisense strand to SEQ ID NO: 2123360
acuauuaccucuuuagccc

SEQ ID NO: 2123362 - RNA, 19 nt, Artificial Sequence
  Description of Artificial Sequence: Synthetic oligonucleotide
  Sense strand starting at position 1389 of SEQ ID NO: 1882466
agguaauagugaguaauaa

SEQ ID NO: 2123363 - RNA, 19 nt, Artificial Sequence
  Description of Artificial Sequence: Synthetic oligonucleotide
  Antisense strand to SEQ ID NO: 2123362
uuauuacucacuauuaccu

SEQ ID NO: 2123364 - RNA, 19 nt, Artificial Sequence
  Description of Artificial Sequence: Synthetic oligonucleotide
  Sense strand starting at position 1400 of SEQ ID NO: 1882466
aguaauaaggauuguggua

SEQ ID NO: 2123365 - RNA, 19 nt, Artificial Sequence
  Description of Artificial Sequence: Synthetic oligonucleotide
  Antisense strand to SEQ ID NO: 2123364
uaccacaauccuuauuacu

SEQ ID NO: 2123366 - RNA, 19 nt, Artificial Sequence
  Description of Artificial Sequence: Synthetic oligonucleotide
  Sense strand starting at position 1477 of SEQ ID NO: 1882466
guagcuaugcaggacuaaa

SEQ ID NO: 2123367 - RNA, 19 nt, Artificial Sequence
  Description of Artificial Sequence: Synthetic oligonucleotide
  Antisense strand to SEQ ID NO: 2123366
uuuaguccugcauagcuac

SEQ ID NO: 2123368 - RNA, 19 nt, Artificial Sequence
  Description of Artificial Sequence: Synthetic oligonucleotide
  Sense strand starting at position 1592 of SEQ ID NO: 1882466
cugaaaccaugucugcaaa

SEQ ID NO: 2123369 - RNA, 19 nt, Artificial Sequence
  Description of Artificial Sequence: Synthetic oligonucleotide
  Antisense strand to SEQ ID NO: 2123368
uuugcagacaugguuucag

SEQ ID NO: 2123370 - RNA, 19 nt, Artificial Sequence
  Description of Artificial Sequence: Synthetic oligonucleotide
  Sense strand starting at position 1594 of SEQ ID NO: 1882466
gaaaccaugucugcaaaga

SEQ ID NO: 2123371 - RNA, 19 nt, Artificial Sequence
  Description of Artificial Sequence: Synthetic oligonucleotide
  Antisense strand to SEQ ID NO: 2123370
ucuuugcagacaugguuuc

SEQ ID NO: 2123372 - RNA, 19 nt, Artificial Sequence
  Description of Artificial Sequence: Synthetic oligonucleotide
  Sense strand starting at position 1608 of SEQ ID NO: 1882466
aaagaagguuuggucaguu

SEQ ID NO: 2123373 - RNA, 19 nt, Artificial Sequence
  Description of Artificial Sequence: Synthetic oligonucleotide
  Antisense strand to SEQ ID NO: 2123372
aacugaccaaaccuucuuu

SEQ ID NO: 2123374 - RNA, 19 nt, Artificial Sequence
  Description of Artificial Sequence: Synthetic oligonucleotide
  Sense strand starting at position 1689 of SEQ ID NO: 1882466
gauaauguggcauauaauc

SEQ ID NO: 2123375 - RNA, 19 nt, Artificial Sequence
  Description of Artificial Sequence: Synthetic oligonucleotide
  Antisense strand to SEQ ID NO: 2123374
gauuauaugccacauuauc

SEQ ID NO: 2123376 - RNA, 19 nt, Artificial Sequence
  Description of Artificial Sequence: Synthetic oligonucleotide
  Sense strand starting at position 1764 of SEQ ID NO: 1882466
cuaguuuaacuuugagaag

SEQ ID NO: 2123377 - RNA, 19 nt, Artificial Sequence
  Description of Artificial Sequence: Synthetic oligonucleotide
  Antisense strand to SEQ ID NO: 2123376
cuucucaaaguuaaacuag

SEQ ID NO: 2123378 - RNA, 19 nt, Artificial Sequence
  Description of Artificial Sequence: Synthetic oligonucleotide
  Sense strand starting at position 1792 of SEQ ID NO: 1882466
cugguugaaauagguagau

SEQ ID NO: 2123379 - RNA, 19 nt, Artificial Sequence
  Description of Artificial Sequence: Synthetic oligonucleotide
  Antisense strand to SEQ ID NO: 2123378
aucuaccuauuucaaccag

SEQ ID NO: 2123380 - RNA, 19 nt, Artificial Sequence
  Description of Artificial Sequence: Synthetic oligonucleotide
  Sense strand starting at position 1984 of SEQ ID NO: 1882466
ggugaccaauaaucuauua

SEQ ID NO: 2123381 - RNA, 19 nt, Artificial Sequence
  Description of Artificial Sequence: Synthetic oligonucleotide
  Antisense strand to SEQ ID NO: 2123380
uaauagauuauuggucacc

SEQ ID NO: 2123382 - RNA, 19 nt, Artificial Sequence
  Description of Artificial Sequence: Synthetic oligonucleotide
  Sense strand starting at position 2164 of SEQ ID NO: 1882466
aaagauaugccugauaugu

SEQ ID NO: 2123383 - RNA, 19 nt, Artificial Sequence
  Description of Artificial Sequence: Synthetic oligonucleotide
  Antisense strand to SEQ ID NO: 2123382
acauaucaggcauaucuuu

SEQ ID NO: 2123384 - RNA, 19 nt, Artificial Sequence
  Description of Artificial Sequence: Synthetic oligonucleotide
  Sense strand starting at position 2199 of SEQ ID NO: 1882466
uuggcuuuccaagaaagua

SEQ ID NO: 2123385 - RNA, 19 nt, Artificial Sequence
  Description of Artificial Sequence: Synthetic oligonucleotide
  Antisense strand to SEQ ID NO: 2123384
uacuuucuuggaaagccaa

SEQ ID NO: 2123386 - RNA, 19 nt, Artificial Sequence
  Description of Artificial Sequence: Synthetic oligonucleotide
  Sense strand starting at position 2215 of SEQ ID NO: 1882466
guaauauuggacugagacu

SEQ ID NO: 2123387 - RNA, 19 nt, Artificial Sequence
  Description of Artificial Sequence: Synthetic oligonucleotide
  Antisense strand to SEQ ID NO: 2123386
agucucaguccaauauuac

SEQ ID NO: 2123388 - RNA, 19 nt, Artificial Sequence
  Description of Artificial Sequence: Synthetic oligonucleotide
  Sense strand starting at position 2274 of SEQ ID NO: 1882466
gagaauuaaguauguugag

SEQ ID NO: 2123389 - RNA, 19 nt, Artificial Sequence
  Description of Artificial Sequence: Synthetic oligonucleotide
  Antisense strand to SEQ ID NO: 2123388
cucaacauacuuaauucuc

SEQ ID NO: 2123390 - RNA, 19 nt, Artificial Sequence
  Description of Artificial Sequence: Synthetic oligonucleotide
  Sense strand starting at position 2275 of SEQ ID NO: 1882466
agaauuaaguauguugaga

SEQ ID NO: 2123391 - RNA, 19 nt, Artificial Sequence
  Description of Artificial Sequence: Synthetic oligonucleotide
  Antisense strand to SEQ ID NO: 2123390
ucucaacauacuuaauucu

SEQ ID NO: 2123392 - RNA, 19 nt, Artificial Sequence
  Description of Artificial Sequence: Synthetic oligonucleotide
  Sense strand starting at position 2364 of SEQ ID NO: 1882466
agaagaauaagcuagcgau

SEQ ID NO: 2123393 - RNA, 19 nt, Artificial Sequence
  Description of Artificial Sequence: Synthetic oligonucleotide
  Antisense strand to SEQ ID NO: 2123392
aucgcuagcuuauucuucu

SEQ ID NO: 2123394 - RNA, 19 nt, Artificial Sequence
  Description of Artificial Sequence: Synthetic oligonucleotide
  Sense strand starting at position 2370 of SEQ ID NO: 1882466
auaagcuagcgauaugauu

SEQ ID NO: 2123395 - RNA, 19 nt, Artificial Sequence
  Description of Artificial Sequence: Synthetic oligonucleotide
  Antisense strand to SEQ ID NO: 2123394
aaucauaucgcuagcuuau

SEQ ID NO: 2123396 - RNA, 19 nt, Artificial Sequence
  Description of Artificial Sequence: Synthetic oligonucleotide
  Sense strand starting at position 2522 of SEQ ID NO: 1882466
gcugccaugugauuuaaau

SEQ ID NO: 2123397 - RNA, 19 nt, Artificial Sequence
  Description of Artificial Sequence: Synthetic oligonucleotide
  Antisense strand to SEQ ID NO: 2123396
auuuaaaucacauggcagc

SEQ ID NO: 2123398 - RNA, 19 nt, Artificial Sequence
  Description of Artificial Sequence: Synthetic oligonucleotide
  Sense strand starting at position 2568 of SEQ ID NO: 1882466
ucuguaauucuggaagagu

SEQ ID NO: 2123399 - RNA, 19 nt, Artificial Sequence
  Description of Artificial Sequence: Synthetic oligonucleotide
  Antisense strand to SEQ ID NO: 2123398
acucuuccagaauuacaga

SEQ ID NO: 2123400 - RNA, 19 nt, Artificial Sequence
  Description of Artificial Sequence: Synthetic oligonucleotide
  Sense strand starting at position 2669 of SEQ ID NO: 1882466
agcagaauaucacugggau

SEQ ID NO: 2123401 - RNA, 19 nt, Artificial Sequence
  Description of Artificial Sequence: Synthetic oligonucleotide
  Antisense strand to SEQ ID NO: 2123400
aucccagugauauucugcu

SEQ ID NO: 2123402 - RNA, 19 nt, Artificial Sequence
  Description of Artificial Sequence: Synthetic oligonucleotide
  Sense strand starting at position 2670 of SEQ ID NO: 1882466
gcagaauaucacugggauu

SEQ ID NO: 2123403 - RNA, 19 nt, Artificial Sequence
  Description of Artificial Sequence: Synthetic oligonucleotide
  Antisense strand to SEQ ID NO: 2123402
aaucccagugauauucugc

SEQ ID NO: 2123404 - RNA, 19 nt, Artificial Sequence
  Description of Artificial Sequence: Synthetic oligonucleotide
  Sense strand starting at position 2739 of SEQ ID NO: 1882466
ugagaaaugugucuaaagu

SEQ ID NO: 2123405 - RNA, 19 nt, Artificial Sequence
  Description of Artificial Sequence: Synthetic oligonucleotide
  Antisense strand to SEQ ID NO: 2123404
acuuuagacacauuucuca

SEQ ID NO: 2123406 - RNA, 19 nt, Artificial Sequence
  Description of Artificial Sequence: Synthetic oligonucleotide
  Sense strand starting at position 2749 of SEQ ID NO: 1882466
gucuaaaguaaggagguua

SEQ ID NO: 2123407 - RNA, 19 nt, Artificial Sequence
  Description of Artificial Sequence: Synthetic oligonucleotide
  Antisense strand to SEQ ID NO: 2123406
uaaccuccuuacuuuagac

SEQ ID NO: 2123408 - RNA, 19 nt, Artificial Sequence
  Description of Artificial Sequence: Synthetic oligonucleotide
  Sense strand starting at position 2806 of SEQ ID NO: 1882466
agaguacuccuguaccauu

SEQ ID NO: 2123409 - RNA, 19 nt, Artificial Sequence
  Description of Artificial Sequence: Synthetic oligonucleotide
  Antisense strand to SEQ ID NO: 2123408
aaugguacaggaguacucu

SEQ ID NO: 2123410 - RNA, 19 nt, Artificial Sequence
  Description of Artificial Sequence: Synthetic oligonucleotide
  Sense strand starting at position 2860 of SEQ ID NO: 1882466
agaggagcuguacagucau

SEQ ID NO: 2123411 - RNA, 19 nt, Artificial Sequence
  Description of Artificial Sequence: Synthetic oligonucleotide
  Antisense strand to SEQ ID NO: 2123410
augacuguacagcuccucu

SEQ ID NO: 2123412 - RNA, 19 nt, Artificial Sequence
  Description of Artificial Sequence: Synthetic oligonucleotide
  Sense strand starting at position 3012 of SEQ ID NO: 1882466
cugaaaguccuauaguacu

SEQ ID NO: 2123413 - RNA, 19 nt, Artificial Sequence
  Description of Artificial Sequence: Synthetic oligonucleotide
  Antisense strand to SEQ ID NO: 2123412
aguacuauaggacuuucag

SEQ ID NO: 2123414 - RNA, 19 nt, Artificial Sequence
  Description of Artificial Sequence: Synthetic oligonucleotide
  Sense strand starting at position 3020 of SEQ ID NO: 1882466
ccuauaguacuuuauaguu

SEQ ID NO: 2123415 - RNA, 19 nt, Artificial Sequence
  Description of Artificial Sequence: Synthetic oligonucleotide
  Antisense strand to SEQ ID NO: 2123414
aacuauaaaguacuauagg

SEQ ID NO: 2123416 - RNA, 19 nt, Artificial Sequence
  Description of Artificial Sequence: Synthetic oligonucleotide
  Sense strand starting at position 3400 of SEQ ID NO: 1882466
gguagucugguggaaguaa

SEQ ID NO: 2123417 - RNA, 19 nt, Artificial Sequence
  Description of Artificial Sequence: Synthetic oligonucleotide
  Antisense strand to SEQ ID NO: 2123416
uuacuuccaccagacuacc

SEQ ID NO: 2123418 - RNA, 19 nt, Artificial Sequence
  Description of Artificial Sequence: Synthetic oligonucleotide
  Sense strand starting at position 3543 of SEQ ID NO: 1882466
ucaagauagcuacagcaga

SEQ ID NO: 2123419 - RNA, 19 nt, Artificial Sequence
  Description of Artificial Sequence: Synthetic oligonucleotide
  Antisense strand to SEQ ID NO: 2123418
ucugcuguagcuaucuuga

SEQ ID NO: 2123420 - RNA, 19 nt, Artificial Sequence
  Description of Artificial Sequence: Synthetic oligonucleotide
  Sense strand starting at position 3952 of SEQ ID NO: 1882466
gucacauauggcuagaacu

SEQ ID NO: 2123421 - RNA, 19 nt, Artificial Sequence
  Description of Artificial Sequence: Synthetic oligonucleotide
  Antisense strand to SEQ ID NO: 2123420
aguucuagccauaugugac

SEQ ID NO: 2123422 - RNA, 19 nt, Artificial Sequence
  Description of Artificial Sequence: Synthetic oligonucleotide
  Sense strand starting at position 3970 of SEQ ID NO: 1882466
uguauuuccugucugcaua

SEQ ID NO: 2123423 - RNA, 19 nt, Artificial Sequence
  Description of Artificial Sequence: Synthetic oligonucleotide
  Antisense strand to SEQ ID NO: 2123422
uaugcagacaggaaauaca

SEQ ID NO: 2123424 - RNA, 19 nt, Artificial Sequence
  Description of Artificial Sequence: Synthetic oligonucleotide
  Sense strand starting at position 3971 of SEQ ID NO: 1882466
guauuuccugucugcauau

SEQ ID NO: 2123425 - RNA, 19 nt, Artificial Sequence
  Description of Artificial Sequence: Synthetic oligonucleotide
  Antisense strand to SEQ ID NO: 2123424
auaugcagacaggaaauac

SEQ ID NO: 2123426 - RNA, 19 nt, Artificial Sequence
  Description of Artificial Sequence: Synthetic oligonucleotide
  Sense strand starting at position 63 of SEQ ID NO: 1882467
cguugcaugugauuuagau

SEQ ID NO: 2123427 - RNA, 19 nt, Artificial Sequence
  Description of Artificial Sequence: Synthetic oligonucleotide
  Antisense strand to SEQ ID NO: 2123426
aucuaaaucacaugcaacg

SEQ ID NO: 2123428 - RNA, 19 nt, Artificial Sequence
  Description of Artificial Sequence: Synthetic oligonucleotide
  Sense strand starting at position 174 of SEQ ID NO: 1882467
ucauaaccucagugugaga

SEQ ID NO: 2123429 - RNA, 19 nt, Artificial Sequence
  Description of Artificial Sequence: Synthetic oligonucleotide
  Antisense strand to SEQ ID NO: 2123428
ucucacacugagguuauga

SEQ ID NO: 2123430 - RNA, 19 nt, Artificial Sequence
  Description of Artificial Sequence: Synthetic oligonucleotide
  Sense strand starting at position 265 of SEQ ID NO: 1882467
ugaguauggguuggacaua

SEQ ID NO: 2123431 - RNA, 19 nt, Artificial Sequence
  Description of Artificial Sequence: Synthetic oligonucleotide
  Antisense strand to SEQ ID NO: 2123430
uauguccaacccauacuca

SEQ ID NO: 2123432 - RNA, 19 nt, Artificial Sequence
  Description of Artificial Sequence: Synthetic oligonucleotide
  Sense strand starting at position 391 of SEQ ID NO: 1882467
aauggaauuugaggguaga

SEQ ID NO: 2123433 - RNA, 19 nt, Artificial Sequence
  Description of Artificial Sequence: Synthetic oligonucleotide
  Antisense strand to SEQ ID NO: 2123432
ucuacccucaaauuccauu

SEQ ID NO: 2123434 - RNA, 19 nt, Artificial Sequence
  Description of Artificial Sequence: Synthetic oligonucleotide
  Sense strand starting at position 402 of SEQ ID NO: 1882467
aggguagaauuaucaggua

SEQ ID NO: 2123435 - RNA, 19 nt, Artificial Sequence
  Description of Artificial Sequence: Synthetic oligonucleotide
  Antisense strand to SEQ ID NO: 2123434
uaccugauaauucuacccu

SEQ ID NO: 2123436 - RNA, 19 nt, Artificial Sequence
  Description of Artificial Sequence: Synthetic oligonucleotide
  Sense strand starting at position 407 of SEQ ID NO: 1882467
agaauuaucagguauggcu

SEQ ID NO: 2123437 - RNA, 19 nt, Artificial Sequence
  Description of Artificial Sequence: Synthetic oligonucleotide
  Antisense strand to SEQ ID NO: 2123436
agccauaccugauaauucu

SEQ ID NO: 2123438 - RNA, 19 nt, Artificial Sequence
  Description of Artificial Sequence: Synthetic oligonucleotide
  Sense strand starting at position 472 of SEQ ID NO: 1882467
acuccuagguuucuagaau

SEQ ID NO: 2123439 - RNA, 19 nt, Artificial Sequence
  Description of Artificial Sequence: Synthetic oligonucleotide
  Antisense strand to SEQ ID NO: 2123438
auucuagaaaccuaggagu

SEQ ID NO: 2123440 - RNA, 19 nt, Artificial Sequence
  Description of Artificial Sequence: Synthetic oligonucleotide
  Sense strand starting at position 478 of SEQ ID NO: 1882467
agguuucuagaaugaguga

SEQ ID NO: 2123441 - RNA, 19 nt, Artificial Sequence
  Description of Artificial Sequence: Synthetic oligonucleotide
  Antisense strand to SEQ ID NO: 2123440
ucacucauucuagaaaccu

SEQ ID NO: 2123442 - RNA, 19 nt, Artificial Sequence
  Description of Artificial Sequence: Synthetic oligonucleotide
  Sense strand starting at position 789 of SEQ ID NO: 1882467
gagcacuguccacagaagu

SEQ ID NO: 2123443 - RNA, 19 nt, Artificial Sequence
  Description of Artificial Sequence: Synthetic oligonucleotide
  Antisense strand to SEQ ID NO: 2123442
acuucuguggacagugcuc

SEQ ID NO: 2123444 - RNA, 19 nt, Artificial Sequence
  Description of Artificial Sequence: Synthetic oligonucleotide
  Sense strand starting at position 800 of SEQ ID NO: 1882467
acagaaguggcaugacauu

SEQ ID NO: 2123445 - RNA, 19 nt, Artificial Sequence
  Description of Artificial Sequence: Synthetic oligonucleotide
  Antisense strand to SEQ ID NO: 2123444
aaugucaugccacuucugu

SEQ ID NO: 2123446 - RNA, 19 nt, Artificial Sequence
  Description of Artificial Sequence: Synthetic oligonucleotide
  Sense strand starting at position 867 of SEQ ID NO: 1882467
acaugagcacauugaauau

SEQ ID NO: 2123447 - RNA, 19 nt, Artificial Sequence
  Description of Artificial Sequence: Synthetic oligonucleotide
  Antisense strand to SEQ ID NO: 2123446
auauucaaugugcucaugu

SEQ ID NO: 2123448 - RNA, 19 nt, Artificial Sequence
  Description of Artificial Sequence: Synthetic oligonucleotide
  Sense strand starting at position 988 of SEQ ID NO: 1882467
auaauaggugucugaagga

SEQ ID NO: 2123449 - RNA, 19 nt, Artificial Sequence
  Description of Artificial Sequence: Synthetic oligonucleotide
  Antisense strand to SEQ ID NO: 2123448
uccuucagacaccuauuau

SEQ ID NO: 2123450 - RNA, 19 nt, Artificial Sequence
  Description of Artificial Sequence: Synthetic oligonucleotide
  Sense strand starting at position 1046 of SEQ ID NO: 1882467
cccucugucccuuaagaug

SEQ ID NO: 2123451 - RNA, 19 nt, Artificial Sequence
  Description of Artificial Sequence: Synthetic oligonucleotide
  Antisense strand to SEQ ID NO: 2123450
caucuuaagggacagaggg

SEQ ID NO: 2123452 - RNA, 19 nt, Artificial Sequence
  Description of Artificial Sequence: Synthetic oligonucleotide
  Sense strand starting at position 1363 of SEQ ID NO: 1882467
ggcaaauagugacuauaag

SEQ ID NO: 2123453 - RNA, 19 nt, Artificial Sequence
  Description of Artificial Sequence: Synthetic oligonucleotide
  Antisense strand to SEQ ID NO: 2123452
cuuauagucacuauuugcc

SEQ ID NO: 2123454 - RNA, 19 nt, Artificial Sequence
  Description of Artificial Sequence: Synthetic oligonucleotide
  Sense strand starting at position 1634 of SEQ ID NO: 1882467
acacuagggcuuugagaag

SEQ ID NO: 2123455 - RNA, 19 nt, Artificial Sequence
  Description of Artificial Sequence: Synthetic oligonucleotide
  Antisense strand to SEQ ID NO: 2123454
cuucucaaagcccuagugu

SEQ ID NO: 2123456 - RNA, 19 nt, Artificial Sequence
  Description of Artificial Sequence: Synthetic oligonucleotide
  Sense strand starting at position 1645 of SEQ ID NO: 1882467
uugagaagcaugcaugacu

SEQ ID NO: 2123457 - RNA, 19 nt, Artificial Sequence
  Description of Artificial Sequence: Synthetic oligonucleotide
  Antisense strand to SEQ ID NO: 2123456
agucaugcaugcuucucaa

SEQ ID NO: 2123458 - RNA, 19 nt, Artificial Sequence
  Description of Artificial Sequence: Synthetic oligonucleotide
  Sense strand starting at position 1789 of SEQ ID NO: 1882467
accaguauaccacagaguu

SEQ ID NO: 2123459 - RNA, 19 nt, Artificial Sequence
  Description of Artificial Sequence: Synthetic oligonucleotide
  Antisense strand to SEQ ID NO: 2123458
aacucugugguauacuggu

SEQ ID NO: 2123460 - RNA, 19 nt, Artificial Sequence
  Description of Artificial Sequence: Synthetic oligonucleotide
  Sense strand starting at position 1823 of SEQ ID NO: 1882467
ccuuauuuauuggagauca

SEQ ID NO: 2123461 - RNA, 19 nt, Artificial Sequence
  Description of Artificial Sequence: Synthetic oligonucleotide
  Antisense strand to SEQ ID NO: 2123460
ugaucuccaauaaauaagg

SEQ ID NO: 2123462 - RNA, 19 nt, Artificial Sequence
  Description of Artificial Sequence: Synthetic oligonucleotide
  Sense strand starting at position 2016 of SEQ ID NO: 1882467
cuuauaauagauugaagca

SEQ ID NO: 2123463 - RNA, 19 nt, Artificial Sequence
  Description of Artificial Sequence: Synthetic oligonucleotide
  Antisense strand to SEQ ID NO: 2123462
ugcuucaaucuauuauaag

SEQ ID NO: 2123464 - RNA, 19 nt, Artificial Sequence
  Description of Artificial Sequence: Synthetic oligonucleotide
  Sense strand starting at position 2038 of SEQ ID NO: 1882467
uuuauuugcuguuccugau

SEQ ID NO: 2123465 - RNA, 19 nt, Artificial Sequence
  Description of Artificial Sequence: Synthetic oligonucleotide
  Antisense strand to SEQ ID NO: 2123464
aucaggaacagcaaauaaa

SEQ ID NO: 2123466 - RNA, 19 nt, Artificial Sequence
  Description of Artificial Sequence: Synthetic oligonucleotide
  Sense strand starting at position 2140 of SEQ ID NO: 1882467
cuucuucuuugagugaaca

SEQ ID NO: 2123467 - RNA, 19 nt, Artificial Sequence
  Description of Artificial Sequence: Synthetic oligonucleotide
  Antisense strand to SEQ ID NO: 2123466
uguucacucaaagaagaag

SEQ ID NO: 2123468 - RNA, 19 nt, Artificial Sequence
  Description of Artificial Sequence: Synthetic oligonucleotide
  Sense strand starting at position 2158 of SEQ ID NO: 1882467
aucgaaugucuuuggauga

SEQ ID NO: 2123469 - RNA, 19 nt, Artificial Sequence
  Description of Artificial Sequence: Synthetic oligonucleotide
  Antisense strand to SEQ ID NO: 2123468
ucauccaaagacauucgau

SEQ ID NO: 2123470 - RNA, 19 nt, Artificial Sequence
  Description of Artificial Sequence: Synthetic oligonucleotide
  Sense strand starting at position 2447 of SEQ ID NO: 1882467
ggaagcagugggcaauauu

SEQ ID NO: 2123471 - RNA, 19 nt, Artificial Sequence
  Description of Artificial Sequence: Synthetic oligonucleotide
  Antisense strand to SEQ ID NO: 2123470
aauauugcccacugcuucc

SEQ ID NO: 2123472 - RNA, 19 nt, Artificial Sequence
  Description of Artificial Sequence: Synthetic oligonucleotide
  Sense strand starting at position 2509 of SEQ ID NO: 1882467
augaaaugucacuguucua

SEQ ID NO: 2123473 - RNA, 19 nt, Artificial Sequence
  Description of Artificial Sequence: Synthetic oligonucleotide
  Antisense strand to SEQ ID NO: 2123472
uagaacagugacauuucau

SEQ ID NO: 2123474 - RNA, 19 nt, Artificial Sequence
  Description of Artificial Sequence: Synthetic oligonucleotide
  Sense strand starting at position 2541 of SEQ ID NO: 1882467
ccuauuaacaugugggaga

SEQ ID NO: 2123475 - RNA, 19 nt, Artificial Sequence
  Description of Artificial Sequence: Synthetic oligonucleotide
  Antisense strand to SEQ ID NO: 2123474
ucucccacauguuaauagg

SEQ ID NO: 2123476 - RNA, 19 nt, Artificial Sequence
  Description of Artificial Sequence: Synthetic oligonucleotide
  Sense strand starting at position 2660 of SEQ ID NO: 1882467
acuccauaucugugugaaa

SEQ ID NO: 2123477 - RNA, 19 nt, Artificial Sequence
  Description of Artificial Sequence: Synthetic oligonucleotide
  Antisense strand to SEQ ID NO: 2123476
uuucacacagauauggagu

SEQ ID NO: 2123478 - RNA, 19 nt, Artificial Sequence
  Description of Artificial Sequence: Synthetic oligonucleotide
  Sense strand starting at position 2669 of SEQ ID NO: 1882467
cugugugaaaucgaauagu

SEQ ID NO: 2123479 - RNA, 19 nt, Artificial Sequence
  Description of Artificial Sequence: Synthetic oligonucleotide
  Antisense strand to SEQ ID NO: 2123478
acuauucgauuucacacag

SEQ ID NO: 2123480 - RNA, 19 nt, Artificial Sequence
  Description of Artificial Sequence: Synthetic oligonucleotide
  Sense strand starting at position 2672 of SEQ ID NO: 1882467
ugugaaaucgaauagugua

SEQ ID NO: 2123481 - RNA, 19 nt, Artificial Sequence
  Description of Artificial Sequence: Synthetic oligonucleotide
  Antisense strand to SEQ ID NO: 2123480
uacacuauucgauuucaca

SEQ ID NO: 2123482 - RNA, 19 nt, Artificial Sequence
  Description of Artificial Sequence: Synthetic oligonucleotide
  Sense strand starting at position 2679 of SEQ ID NO: 1882467
ucgaauaguguagaaaucu

SEQ ID NO: 2123483 - RNA, 19 nt, Artificial Sequence
  Description of Artificial Sequence: Synthetic oligonucleotide
  Antisense strand to SEQ ID NO: 2123482
agauuucuacacuauucga

SEQ ID NO: 2123484 - RNA, 19 nt, Artificial Sequence
  Description of Artificial Sequence: Synthetic oligonucleotide
  Sense strand starting at position 2789 of SEQ ID NO: 1882467
cacacuacgguuggaaauu

SEQ ID NO: 2123485 - RNA, 19 nt, Artificial Sequence
  Description of Artificial Sequence: Synthetic oligonucleotide
  Antisense strand to SEQ ID NO: 2123484
aauuuccaaccguagugug

SEQ ID NO: 2123486 - RNA, 19 nt, Artificial Sequence
  Description of Artificial Sequence: Synthetic oligonucleotide
  Sense strand starting at position 2853 of SEQ ID NO: 1882467
auucuugaaguaugaaugu

SEQ ID NO: 2123487 - RNA, 19 nt, Artificial Sequence
  Description of Artificial Sequence: Synthetic oligonucleotide
  Antisense strand to SEQ ID NO: 2123486
acauucauacuucaagaau

SEQ ID NO: 2123488 - RNA, 19 nt, Artificial Sequence
  Description of Artificial Sequence: Synthetic oligonucleotide
  Sense strand starting at position 2875 of SEQ ID NO: 1882467
ugagguaucagucauugug

SEQ ID NO: 2123489 - RNA, 19 nt, Artificial Sequence
  Description of Artificial Sequence: Synthetic oligonucleotide
  Antisense strand to SEQ ID NO: 2123488
cacaaugacugauaccuca

SEQ ID NO: 2123490 - RNA, 19 nt, Artificial Sequence
  Description of Artificial Sequence: Synthetic oligonucleotide
  Sense strand starting at position 2921 of SEQ ID NO: 1882467
aagaguauccuaugcacag

SEQ ID NO: 2123491 - RNA, 19 nt, Artificial Sequence
  Description of Artificial Sequence: Synthetic oligonucleotide
  Antisense strand to SEQ ID NO: 2123490
cugugcauaggauacucuu

SEQ ID NO: 2123492 - RNA, 19 nt, Artificial Sequence
  Description of Artificial Sequence: Synthetic oligonucleotide
  Sense strand starting at position 3019 of SEQ ID NO: 1882467
ugguaaauugauuggacca

SEQ ID NO: 2123493 - RNA, 19 nt, Artificial Sequence
  Description of Artificial Sequence: Synthetic oligonucleotide
  Antisense strand to SEQ ID NO: 2123492
ugguccaaucaauuuacca

SEQ ID NO: 2123494 - RNA, 19 nt, Artificial Sequence
  Description of Artificial Sequence: Synthetic oligonucleotide
  Sense strand starting at position 3256 of SEQ ID NO: 1882467
aagggauaucuuggcugga

SEQ ID NO: 2123495 - RNA, 19 nt, Artificial Sequence
  Description of Artificial Sequence: Synthetic oligonucleotide
  Antisense strand to SEQ ID NO: 2123494
uccagccaagauaucccuu

SEQ ID NO: 2123496 - RNA, 19 nt, Artificial Sequence
  Description of Artificial Sequence: Synthetic oligonucleotide
  Sense strand starting at position 3324 of SEQ ID NO: 1882467
agagauccucuguacauuc

SEQ ID NO: 2123497 - RNA, 19 nt, Artificial Sequence
  Description of Artificial Sequence: Synthetic oligonucleotide
  Antisense strand to SEQ ID NO: 2123496
gaauguacagaggaucucu

SEQ ID NO: 2123498 - RNA, 19 nt, Artificial Sequence
  Description of Artificial Sequence: Synthetic oligonucleotide
  Sense strand starting at position 3449 of SEQ ID NO: 1882467
gaaagugacacgggcuaaa

SEQ ID NO: 2123499 - RNA, 19 nt, Artificial Sequence
  Description of Artificial Sequence: Synthetic oligonucleotide
  Antisense strand to SEQ ID NO: 2123498
uuuagcccgugucacuuuc

SEQ ID NO: 2123500 - RNA, 19 nt, Artificial Sequence
  Description of Artificial Sequence: Synthetic oligonucleotide
  Sense strand starting at position 3556 of SEQ ID NO: 1882467
ggaugagaagaguggcuuu

SEQ ID NO: 2123501 - RNA, 19 nt, Artificial Sequence
  Description of Artificial Sequence: Synthetic oligonucleotide
  Antisense strand to SEQ ID NO: 2123500
aaagccacucuucucaucc

SEQ ID NO: 2123502 - RNA, 19 nt, Artificial Sequence
  Description of Artificial Sequence: Synthetic oligonucleotide
  Sense strand starting at position 3559 of SEQ ID NO: 1882467
ugagaagaguggcuuugaa

SEQ ID NO: 2123503 - RNA, 19 nt, Artificial Sequence
  Description of Artificial Sequence: Synthetic oligonucleotide
  Antisense strand to SEQ ID NO: 2123502
uucaaagccacucuucuca

SEQ ID NO: 2123504 - RNA, 19 nt, Artificial Sequence
  Description of Artificial Sequence: Synthetic oligonucleotide
  Sense strand starting at position 3873 of SEQ ID NO: 1882467
uguauuagaggucaggguu

SEQ ID NO: 2123505 - RNA, 19 nt, Artificial Sequence
  Description of Artificial Sequence: Synthetic oligonucleotide
  Antisense strand to SEQ ID NO: 2123504
aacccugaccucuaauaca

SEQ ID NO: 2123506 - RNA, 19 nt, Artificial Sequence
  Description of Artificial Sequence: Synthetic oligonucleotide
  Sense strand starting at position 45 of SEQ ID NO: 1882468
uugugauuguaugcauaua

SEQ ID NO: 2123507 - RNA, 19 nt, Artificial Sequence
  Description of Artificial Sequence: Synthetic oligonucleotide
  Antisense strand to SEQ ID NO: 2123506
uauaugcauacaaucacaa

SEQ ID NO: 2123508 - RNA, 19 nt, Artificial Sequence
  Description of Artificial Sequence: Synthetic oligonucleotide
  Sense strand starting at position 138 of SEQ ID NO: 1882468
acaacaaugcagcguaauu

SEQ ID NO: 2123509 - RNA, 19 nt, Artificial Sequence
  Description of Artificial Sequence: Synthetic oligonucleotide
  Antisense strand to SEQ ID NO: 2123508
aauuacgcugcauuguugu

SEQ ID NO: 2123510 - RNA, 19 nt, Artificial Sequence
  Description of Artificial Sequence: Synthetic oligonucleotide
  Sense strand starting at position 143 of SEQ ID NO: 1882468
aaugcagcguaauuagaau

SEQ ID NO: 2123511 - RNA, 19 nt, Artificial Sequence
  Description of Artificial Sequence: Synthetic oligonucleotide
  Antisense strand to SEQ ID NO: 2123510
auucuaauuacgcugcauu

SEQ ID NO: 2123512 - RNA, 19 nt, Artificial Sequence
  Description of Artificial Sequence: Synthetic oligonucleotide
  Sense strand starting at position 192 of SEQ ID NO: 1882468
ggcuccaucuggucauuau

SEQ ID NO: 2123513 - RNA, 19 nt, Artificial Sequence
  Description of Artificial Sequence: Synthetic oligonucleotide
  Antisense strand to SEQ ID NO: 2123512
auaaugaccagauggagcc

SEQ ID NO: 2123514 - RNA, 19 nt, Artificial Sequence
  Description of Artificial Sequence: Synthetic oligonucleotide
  Sense strand starting at position 196 of SEQ ID NO: 1882468
ccaucuggucauuaucuau

SEQ ID NO: 2123515 - RNA, 19 nt, Artificial Sequence
  Description of Artificial Sequence: Synthetic oligonucleotide
  Antisense strand to SEQ ID NO: 2123514
auagauaaugaccagaugg

SEQ ID NO: 2123516 - RNA, 19 nt, Artificial Sequence
  Description of Artificial Sequence: Synthetic oligonucleotide
  Sense strand starting at position 202 of SEQ ID NO: 1882468
ggucauuaucuauaguaac

SEQ ID NO: 2123517 - RNA, 19 nt, Artificial Sequence
  Description of Artificial Sequence: Synthetic oligonucleotide
  Antisense strand to SEQ ID NO: 2123516
guuacuauagauaaugacc

SEQ ID NO: 2123518 - RNA, 19 nt, Artificial Sequence
  Description of Artificial Sequence: Synthetic oligonucleotide
  Sense strand starting at position 250 of SEQ ID NO: 1882468
guaacuacacaaugguaaa

SEQ ID NO: 2123519 - RNA, 19 nt, Artificial Sequence
  Description of Artificial Sequence: Synthetic oligonucleotide
  Antisense strand to SEQ ID NO: 2123518
uuuaccauuguguaguuac

SEQ ID NO: 2123520 - RNA, 19 nt, Artificial Sequence
  Description of Artificial Sequence: Synthetic oligonucleotide
  Sense strand starting at position 271 of SEQ ID NO: 1882468
uguuccagugcaugucaua

SEQ ID NO: 2123521 - RNA, 19 nt, Artificial Sequence
  Description of Artificial Sequence: Synthetic oligonucleotide
  Antisense strand to SEQ ID NO: 2123520
uaugacaugcacuggaaca

SEQ ID NO: 2123522 - RNA, 19 nt, Artificial Sequence
  Description of Artificial Sequence: Synthetic oligonucleotide
  Sense strand starting at position 278 of SEQ ID NO: 1882468
gugcaugucauaggauaaa

SEQ ID NO: 2123523 - RNA, 19 nt, Artificial Sequence
  Description of Artificial Sequence: Synthetic oligonucleotide
  Antisense strand to SEQ ID NO: 2123522
uuuauccuaugacaugcac

SEQ ID NO: 2123524 - RNA, 19 nt, Artificial Sequence
  Description of Artificial Sequence: Synthetic oligonucleotide
  Sense strand starting at position 433 of SEQ ID NO: 1882468
uuuacuuuggauuguguaa

SEQ ID NO: 2123525 - RNA, 19 nt, Artificial Sequence
  Description of Artificial Sequence: Synthetic oligonucleotide
  Antisense strand to SEQ ID NO: 2123524
uuacacaauccaaaguaaa

SEQ ID NO: 2123526 - RNA, 19 nt, Artificial Sequence
  Description of Artificial Sequence: Synthetic oligonucleotide
  Sense strand starting at position 445 of SEQ ID NO: 1882468
uguguaacuguugggaaau

SEQ ID NO: 2123527 - RNA, 19 nt, Artificial Sequence
  Description of Artificial Sequence: Synthetic oligonucleotide
  Antisense strand to SEQ ID NO: 2123526
auuucccaacaguuacaca

SEQ ID NO: 2123528 - RNA, 19 nt, Artificial Sequence
  Description of Artificial Sequence: Synthetic oligonucleotide
  Sense strand starting at position 447 of SEQ ID NO: 1882468
uguaacuguugggaaauga

SEQ ID NO: 2123529 - RNA, 19 nt, Artificial Sequence
  Description of Artificial Sequence: Synthetic oligonucleotide
  Antisense strand to SEQ ID NO: 2123528
ucauuucccaacaguuaca

SEQ ID NO: 2123530 - RNA, 19 nt, Artificial Sequence
  Description of Artificial Sequence: Synthetic oligonucleotide
  Sense strand starting at position 470 of SEQ ID NO: 1882468
aguugauauuuccugugua

SEQ ID NO: 2123531 - RNA, 19 nt, Artificial Sequence
  Description of Artificial Sequence: Synthetic oligonucleotide
  Antisense strand to SEQ ID NO: 2123530
uacacaggaaauaucaacu

SEQ ID NO: 2123532 - RNA, 19 nt, Artificial Sequence
  Description of Artificial Sequence: Synthetic oligonucleotide
  Sense strand starting at position 471 of SEQ ID NO: 1882468
guugauauuuccuguguaa

SEQ ID NO: 2123533 - RNA, 19 nt, Artificial Sequence
  Description of Artificial Sequence: Synthetic oligonucleotide
  Antisense strand to SEQ ID NO: 2123532
uuacacaggaaauaucaac

SEQ ID NO: 2123534 - RNA, 19 nt, Artificial Sequence
  Description of Artificial Sequence: Synthetic oligonucleotide
  Sense strand starting at position 623 of SEQ ID NO: 1882468
ugccaaggaguguauauaa

SEQ ID NO: 2123535 - RNA, 19 nt, Artificial Sequence
  Description of Artificial Sequence: Synthetic oligonucleotide
  Antisense strand to SEQ ID NO: 2123534
uuauauacacuccuuggca

SEQ ID NO: 2123536 - RNA, 19 nt, Artificial Sequence
  Description of Artificial Sequence: Synthetic oligonucleotide
  Sense strand starting at position 658 of SEQ ID NO: 1882468
ucuuacgauuucuggagau

SEQ ID NO: 2123537 - RNA, 19 nt, Artificial Sequence
  Description of Artificial Sequence: Synthetic oligonucleotide
  Antisense strand to SEQ ID NO: 2123536
aucuccagaaaucguaaga

SEQ ID NO: 2123538 - RNA, 19 nt, Artificial Sequence
  Description of Artificial Sequence: Synthetic oligonucleotide
  Sense strand starting at position 742 of SEQ ID NO: 1882468
auaugagcauaccaaagau

SEQ ID NO: 2123539 - RNA, 19 nt, Artificial Sequence
  Description of Artificial Sequence: Synthetic oligonucleotide
  Antisense strand to SEQ ID NO: 2123538
aucuuugguaugcucauau

SEQ ID NO: 2123540 - RNA, 19 nt, Artificial Sequence
  Description of Artificial Sequence: Synthetic oligonucleotide
  Sense strand starting at position 758 of SEQ ID NO: 1882468
gauuguuuguaugaccaau

SEQ ID NO: 2123541 - RNA, 19 nt, Artificial Sequence
  Description of Artificial Sequence: Synthetic oligonucleotide
  Antisense strand to SEQ ID NO: 2123540
auuggucauacaaacaauc

SEQ ID NO: 2123542 - RNA, 19 nt, Artificial Sequence
  Description of Artificial Sequence: Synthetic oligonucleotide
  Sense strand starting at position 799 of SEQ ID NO: 1882468
uacugaaguccuggaguuu

SEQ ID NO: 2123543 - RNA, 19 nt, Artificial Sequence
  Description of Artificial Sequence: Synthetic oligonucleotide
  Antisense strand to SEQ ID NO: 2123542
aaacuccaggacuucagua

SEQ ID NO: 2123544 - RNA, 19 nt, Artificial Sequence
  Description of Artificial Sequence: Synthetic oligonucleotide
  Sense strand starting at position 973 of SEQ ID NO: 1882468
uguagcagucagugucaua

SEQ ID NO: 2123545 - RNA, 19 nt, Artificial Sequence
  Description of Artificial Sequence: Synthetic oligonucleotide
  Antisense strand to SEQ ID NO: 2123544
uaugacacugacugcuaca

SEQ ID NO: 2123546 - RNA, 19 nt, Artificial Sequence
  Description of Artificial Sequence: Synthetic oligonucleotide
  Sense strand starting at position 1335 of SEQ ID NO: 1882468
gugauuugguaggaagcuu

SEQ ID NO: 2123547 - RNA, 19 nt, Artificial Sequence
  Description of Artificial Sequence: Synthetic oligonucleotide
  Antisense strand to SEQ ID NO: 2123546
aagcuuccuaccaaaucac

SEQ ID NO: 2123548 - RNA, 19 nt, Artificial Sequence
  Description of Artificial Sequence: Synthetic oligonucleotide
  Sense strand starting at position 1588 of SEQ ID NO: 1882468
cugggagaguccucauuau

SEQ ID NO: 2123549 - RNA, 19 nt, Artificial Sequence
  Description of Artificial Sequence: Synthetic oligonucleotide
  Antisense strand to SEQ ID NO: 2123548
auaaugaggacucucccag

SEQ ID NO: 2123550 - RNA, 19 nt, Artificial Sequence
  Description of Artificial Sequence: Synthetic oligonucleotide
  Sense strand starting at position 1592 of SEQ ID NO: 1882468
gagaguccucauuaugguu

SEQ ID NO: 2123551 - RNA, 19 nt, Artificial Sequence
  Description of Artificial Sequence: Synthetic oligonucleotide
  Antisense strand to SEQ ID NO: 2123550
aaccauaaugaggacucuc

SEQ ID NO: 2123552 - RNA, 19 nt, Artificial Sequence
  Description of Artificial Sequence: Synthetic oligonucleotide
  Sense strand starting at position 1600 of SEQ ID NO: 1882468
ucauuaugguugcuuuaaa

SEQ ID NO: 2123553 - RNA, 19 nt, Artificial Sequence
  Description of Artificial Sequence: Synthetic oligonucleotide
  Antisense strand to SEQ ID NO: 2123552
uuuaaagcaaccauaauga

SEQ ID NO: 2123554 - RNA, 19 nt, Artificial Sequence
  Description of Artificial Sequence: Synthetic oligonucleotide
  Sense strand starting at position 1614 of SEQ ID NO: 1882468
uuaaauguagaccgacauu

SEQ ID NO: 2123555 - RNA, 19 nt, Artificial Sequence
  Description of Artificial Sequence: Synthetic oligonucleotide
  Antisense strand to SEQ ID NO: 2123554
aaugucggucuacauuuaa

SEQ ID NO: 2123556 - RNA, 19 nt, Artificial Sequence
  Description of Artificial Sequence: Synthetic oligonucleotide
  Sense strand starting at position 1787 of SEQ ID NO: 1882468
ggaccuauuuaguggcaca

SEQ ID NO: 2123557 - RNA, 19 nt, Artificial Sequence
  Description of Artificial Sequence: Synthetic oligonucleotide
  Antisense strand to SEQ ID NO: 2123556
ugugccacuaaauaggucc

SEQ ID NO: 2123558 - RNA, 19 nt, Artificial Sequence
  Description of Artificial Sequence: Synthetic oligonucleotide
  Sense strand starting at position 1807 of SEQ ID NO: 1882468
guaguauccauagaagcga

SEQ ID NO: 2123559 - RNA, 19 nt, Artificial Sequence
  Description of Artificial Sequence: Synthetic oligonucleotide
  Antisense strand to SEQ ID NO: 2123558
ucgcuucuauggauacuac

SEQ ID NO: 2123560 - RNA, 19 nt, Artificial Sequence
  Description of Artificial Sequence: Synthetic oligonucleotide
  Sense strand starting at position 1882 of SEQ ID NO: 1882468
cccacuugugacggaaaua

SEQ ID NO: 2123561 - RNA, 19 nt, Artificial Sequence
  Description of Artificial Sequence: Synthetic oligonucleotide
  Antisense strand to SEQ ID NO: 2123560
uauuuccgucacaaguggg

SEQ ID NO: 2123562 - RNA, 19 nt, Artificial Sequence
  Description of Artificial Sequence: Synthetic oligonucleotide
  Sense strand starting at position 1883 of SEQ ID NO: 1882468
ccacuugugacggaaauau

SEQ ID NO: 2123563 - RNA, 19 nt, Artificial Sequence
  Description of Artificial Sequence: Synthetic oligonucleotide
  Antisense strand to SEQ ID NO: 2123562
auauuuccgucacaagugg

SEQ ID NO: 2123564 - RNA, 19 nt, Artificial Sequence
  Description of Artificial Sequence: Synthetic oligonucleotide
  Sense strand starting at position 1893 of SEQ ID NO: 1882468
cggaaauaugcuuguggga

SEQ ID NO: 2123565 - RNA, 19 nt, Artificial Sequence
  Description of Artificial Sequence: Synthetic oligonucleotide
  Antisense strand to SEQ ID NO: 2123564
ucccacaagcauauuuccg

SEQ ID NO: 2123566 - RNA, 19 nt, Artificial Sequence
  Description of Artificial Sequence: Synthetic oligonucleotide
  Sense strand starting at position 2102 of SEQ ID NO: 1882468
uggacaucucuccagcaua

SEQ ID NO: 2123567 - RNA, 19 nt, Artificial Sequence
  Description of Artificial Sequence: Synthetic oligonucleotide
  Antisense strand to SEQ ID NO: 2123566
uaugcuggagagaugucca

SEQ ID NO: 2123568 - RNA, 19 nt, Artificial Sequence
  Description of Artificial Sequence: Synthetic oligonucleotide
  Sense strand starting at position 2273 of SEQ ID NO: 1882468
cuggaugcaguuuguuaaa

SEQ ID NO: 2123569 - RNA, 19 nt, Artificial Sequence
  Description of Artificial Sequence: Synthetic oligonucleotide
  Antisense strand to SEQ ID NO: 2123568
uuuaacaaacugcauccag

SEQ ID NO: 2123570 - RNA, 19 nt, Artificial Sequence
  Description of Artificial Sequence: Synthetic oligonucleotide
  Sense strand starting at position 2275 of SEQ ID NO: 1882468
ggaugcaguuuguuaaauu

SEQ ID NO: 2123571 - RNA, 19 nt, Artificial Sequence
  Description of Artificial Sequence: Synthetic oligonucleotide
  Antisense strand to SEQ ID NO: 2123570
aauuuaacaaacugcaucc

SEQ ID NO: 2123572 - RNA, 19 nt, Artificial Sequence
  Description of Artificial Sequence: Synthetic oligonucleotide
  Sense strand starting at position 2372 of SEQ ID NO: 1882468
gcuugugccauauguguaa

SEQ ID NO: 2123573 - RNA, 19 nt, Artificial Sequence
  Description of Artificial Sequence: Synthetic oligonucleotide
  Antisense strand to SEQ ID NO: 2123572
uuacacauauggcacaagc

SEQ ID NO: 2123574 - RNA, 19 nt, Artificial Sequence
  Description of Artificial Sequence: Synthetic oligonucleotide
  Sense strand starting at position 2374 of SEQ ID NO: 1882468
uugugccauauguguaaua

SEQ ID NO: 2123575 - RNA, 19 nt, Artificial Sequence
  Description of Artificial Sequence: Synthetic oligonucleotide
  Antisense strand to SEQ ID NO: 2123574
uauuacacauauggcacaa

SEQ ID NO: 2123576 - RNA, 19 nt, Artificial Sequence
  Description of Artificial Sequence: Synthetic oligonucleotide
  Sense strand starting at position 2376 of SEQ ID NO: 1882468
gugccauauguguaauauu

SEQ ID NO: 2123577 - RNA, 19 nt, Artificial Sequence
  Description of Artificial Sequence: Synthetic oligonucleotide
  Antisense strand to SEQ ID NO: 2123576
aauauuacacauauggcac

SEQ ID NO: 2123578 - RNA, 19 nt, Artificial Sequence
  Description of Artificial Sequence: Synthetic oligonucleotide
  Sense strand starting at position 2379 of SEQ ID NO: 1882468
ccauauguguaauauuaga

SEQ ID NO: 2123579 - RNA, 19 nt, Artificial Sequence
  Description of Artificial Sequence: Synthetic oligonucleotide
  Antisense strand to SEQ ID NO: 2123578
ucuaauauuacacauaugg

SEQ ID NO: 2123580 - RNA, 19 nt, Artificial Sequence
  Description of Artificial Sequence: Synthetic oligonucleotide
  Sense strand starting at position 3021 of SEQ ID NO: 1882468
gcucuauaucgauagagau

SEQ ID NO: 2123581 - RNA, 19 nt, Artificial Sequence
  Description of Artificial Sequence: Synthetic oligonucleotide
  Antisense strand to SEQ ID NO: 2123580
aucucuaucgauauagagc

SEQ ID NO: 2123582 - RNA, 19 nt, Artificial Sequence
  Description of Artificial Sequence: Synthetic oligonucleotide
  Sense strand starting at position 3266 of SEQ ID NO: 1882468
gcucuauaucuauagagau

SEQ ID NO: 2123583 - RNA, 19 nt, Artificial Sequence
  Description of Artificial Sequence: Synthetic oligonucleotide
  Antisense strand to SEQ ID NO: 2123582
aucucuauagauauagagc

SEQ ID NO: 2123584 - RNA, 19 nt, Artificial Sequence
  Description of Artificial Sequence: Synthetic oligonucleotide
  Sense strand starting at position 3939 of SEQ ID NO: 1882468
gauauagaguuauguagag

SEQ ID NO: 2123585 - RNA, 19 nt, Artificial Sequence
  Description of Artificial Sequence: Synthetic oligonucleotide
  Antisense strand to SEQ ID NO: 2123584
cucuacauaacucuauauc

SEQ ID NO: 2123586 - RNA, 19 nt, Artificial Sequence
  Description of Artificial Sequence: Synthetic oligonucleotide
  Sense strand starting at position 2261 of SEQ ID NO: 1882469
auagguuagcuuugugaca

SEQ ID NO: 2123587 - RNA, 19 nt, Artificial Sequence
  Description of Artificial Sequence: Synthetic oligonucleotide
  Antisense strand to SEQ ID NO: 2123586
ugucacaaagcuaaccuau

SEQ ID NO: 2123588 - RNA, 19 nt, Artificial Sequence
  Description of Artificial Sequence: Synthetic oligonucleotide
  Sense strand starting at position 2262 of SEQ ID NO: 1882469
uagguuagcuuugugacaa

SEQ ID NO: 2123589 - RNA, 19 nt, Artificial Sequence
  Description of Artificial Sequence: Synthetic oligonucleotide
  Antisense strand to SEQ ID NO: 2123588
uugucacaaagcuaaccua

SEQ ID NO: 2123590 - RNA, 19 nt, Artificial Sequence
  Description of Artificial Sequence: Synthetic oligonucleotide
  Sense strand starting at position 2407 of SEQ ID NO: 1882469
uacaucgauucguuccuua

SEQ ID NO: 2123591 - RNA, 19 nt, Artificial Sequence
  Description of Artificial Sequence: Synthetic oligonucleotide
  Antisense strand to SEQ ID NO: 2123590
uaaggaacgaaucgaugua

SEQ ID NO: 2123592 - RNA, 19 nt, Artificial Sequence
  Description of Artificial Sequence: Synthetic oligonucleotide
  Sense strand starting at position 2410 of SEQ ID NO: 1882469
aucgauucguuccuuagaa

SEQ ID NO: 2123593 - RNA, 19 nt, Artificial Sequence
  Description of Artificial Sequence: Synthetic oligonucleotide
  Antisense strand to SEQ ID NO: 2123592
uucuaaggaacgaaucgau

SEQ ID NO: 2123594 - RNA, 19 nt, Artificial Sequence
  Description of Artificial Sequence: Synthetic oligonucleotide
  Sense strand starting at position 2411 of SEQ ID NO: 1882469
ucgauucguuccuuagaau

SEQ ID NO: 2123595 - RNA, 19 nt, Artificial Sequence
  Description of Artificial Sequence: Synthetic oligonucleotide
  Antisense strand to SEQ ID NO: 2123594
auucuaaggaacgaaucga

SEQ ID NO: 2123596 - RNA, 19 nt, Artificial Sequence
  Description of Artificial Sequence: Synthetic oligonucleotide
  Sense strand starting at position 2412 of SEQ ID NO: 1882469
cgauucguuccuuagaaua

SEQ ID NO: 2123597 - RNA, 19 nt, Artificial Sequence
  Description of Artificial Sequence: Synthetic oligonucleotide
  Antisense strand to SEQ ID NO: 2123596
uauucuaaggaacgaaucg

SEQ ID NO: 2123598 - RNA, 19 nt, Artificial Sequence
  Description of Artificial Sequence: Synthetic oligonucleotide
  Sense strand starting at position 2484 of SEQ ID NO: 1882469
acaggcaggcuaugugaaa

SEQ ID NO: 2123599 - RNA, 19 nt, Artificial Sequence
  Description of Artificial Sequence: Synthetic oligonucleotide
  Antisense strand to SEQ ID NO: 2123598
uuucacauagccugccugu

SEQ ID NO: 2123600 - RNA, 19 nt, Artificial Sequence
  Description of Artificial Sequence: Synthetic oligonucleotide
  Sense strand starting at position 2504 of SEQ ID NO: 1882469
gagcacguuccggaucaau

SEQ ID NO: 2123601 - RNA, 19 nt, Artificial Sequence
  Description of Artificial Sequence: Synthetic oligonucleotide
  Antisense strand to SEQ ID NO: 2123600
auugauccggaacgugcuc

SEQ ID NO: 2123602 - RNA, 19 nt, Artificial Sequence
  Description of Artificial Sequence: Synthetic oligonucleotide
  Sense strand starting at position 2667 of SEQ ID NO: 1882469
ggaaguguccugcacucuu

SEQ ID NO: 2123603 - RNA, 19 nt, Artificial Sequence
  Description of Artificial Sequence: Synthetic oligonucleotide
  Antisense strand to SEQ ID NO: 2123602
aagagugcaggacacuucc

SEQ ID NO: 2123604 - RNA, 19 nt, Artificial Sequence
  Description of Artificial Sequence: Synthetic oligonucleotide
  Sense strand starting at position 2731 of SEQ ID NO: 1882469
cuuugcaagguuuggaauu

SEQ ID NO: 2123605 - RNA, 19 nt, Artificial Sequence
  Description of Artificial Sequence: Synthetic oligonucleotide
  Antisense strand to SEQ ID NO: 2123604
aauuccaaaccuugcaaag

SEQ ID NO: 2123606 - RNA, 19 nt, Artificial Sequence
  Description of Artificial Sequence: Synthetic oligonucleotide
  Sense strand starting at position 2745 of SEQ ID NO: 1882469
gaauuugaauuguggaggu

SEQ ID NO: 2123607 - RNA, 19 nt, Artificial Sequence
  Description of Artificial Sequence: Synthetic oligonucleotide
  Antisense strand to SEQ ID NO: 2123606
accuccacaauucaaauuc

SEQ ID NO: 2123608 - RNA, 19 nt, Artificial Sequence
  Description of Artificial Sequence: Synthetic oligonucleotide
  Sense strand starting at position 2749 of SEQ ID NO: 1882469
uugaauuguggagguaaac

SEQ ID NO: 2123609 - RNA, 19 nt, Artificial Sequence
  Description of Artificial Sequence: Synthetic oligonucleotide
  Antisense strand to SEQ ID NO: 2123608
guuuaccuccacaauucaa

SEQ ID NO: 2123610 - RNA, 19 nt, Artificial Sequence
  Description of Artificial Sequence: Synthetic oligonucleotide
  Sense strand starting at position 2759 of SEQ ID NO: 1882469
gagguaaacuggcuguaau

SEQ ID NO: 2123611 - RNA, 19 nt, Artificial Sequence
  Description of Artificial Sequence: Synthetic oligonucleotide
  Antisense strand to SEQ ID NO: 2123610
auuacagccaguuuaccuc

SEQ ID NO: 2123612 - RNA, 19 nt, Artificial Sequence
  Description of Artificial Sequence: Synthetic oligonucleotide
  Sense strand starting at position 2760 of SEQ ID NO: 1882469
agguaaacuggcuguaaua

SEQ ID NO: 2123613 - RNA, 19 nt, Artificial Sequence
  Description of Artificial Sequence: Synthetic oligonucleotide
  Antisense strand to SEQ ID NO: 2123612
uauuacagccaguuuaccu

SEQ ID NO: 2123614 - RNA, 19 nt, Artificial Sequence
  Description of Artificial Sequence: Synthetic oligonucleotide
  Sense strand starting at position 2762 of SEQ ID NO: 1882469
guaaacuggcuguaauagu

SEQ ID NO: 2123615 - RNA, 19 nt, Artificial Sequence
  Description of Artificial Sequence: Synthetic oligonucleotide
  Antisense strand to SEQ ID NO: 2123614
acuauuacagccaguuuac

SEQ ID NO: 2123616 - RNA, 19 nt, Artificial Sequence
  Description of Artificial Sequence: Synthetic oligonucleotide
  Sense strand starting at position 2771 of SEQ ID NO: 1882469
cuguaauagucuccagaca

SEQ ID NO: 2123617 - RNA, 19 nt, Artificial Sequence
  Description of Artificial Sequence: Synthetic oligonucleotide
  Antisense strand to SEQ ID NO: 2123616
ugucuggagacuauuacag

SEQ ID NO: 2123618 - RNA, 19 nt, Artificial Sequence
  Description of Artificial Sequence: Synthetic oligonucleotide
  Sense strand starting at position 2772 of SEQ ID NO: 1882469
uguaauagucuccagacag

SEQ ID NO: 2123619 - RNA, 19 nt, Artificial Sequence
  Description of Artificial Sequence: Synthetic oligonucleotide
  Antisense strand to SEQ ID NO: 2123618
cugucuggagacuauuaca

SEQ ID NO: 2123620 - RNA, 19 nt, Artificial Sequence
  Description of Artificial Sequence: Synthetic oligonucleotide
  Sense strand starting at position 2846 of SEQ ID NO: 1882469
ggcauuuagcacugcugau

SEQ ID NO: 2123621 - RNA, 19 nt, Artificial Sequence
  Description of Artificial Sequence: Synthetic oligonucleotide
  Antisense strand to SEQ ID NO: 2123620
aucagcagugcuaaaugcc

SEQ ID NO: 2123622 - RNA, 19 nt, Artificial Sequence
  Description of Artificial Sequence: Synthetic oligonucleotide
  Sense strand starting at position 2850 of SEQ ID NO: 1882469
uuuagcacugcugauguaa

SEQ ID NO: 2123623 - RNA, 19 nt, Artificial Sequence
  Description of Artificial Sequence: Synthetic oligonucleotide
  Antisense strand to SEQ ID NO: 2123622
uuacaucagcagugcuaaa

SEQ ID NO: 2123624 - RNA, 19 nt, Artificial Sequence
  Description of Artificial Sequence: Synthetic oligonucleotide
  Sense strand starting at position 2858 of SEQ ID NO: 1882469
ugcugauguaaauagaagu

SEQ ID NO: 2123625 - RNA, 19 nt, Artificial Sequence
  Description of Artificial Sequence: Synthetic oligonucleotide
  Antisense strand to SEQ ID NO: 2123624
acuucuauuuacaucagca

SEQ ID NO: 2123626 - RNA, 19 nt, Artificial Sequence
  Description of Artificial Sequence: Synthetic oligonucleotide
  Sense strand starting at position 2981 of SEQ ID NO: 1882469
aguuauuaauaagaggauc

SEQ ID NO: 2123627 - RNA, 19 nt, Artificial Sequence
  Description of Artificial Sequence: Synthetic oligonucleotide
  Antisense strand to SEQ ID NO: 2123626
gauccucuuauuaauaacu

SEQ ID NO: 2123628 - RNA, 19 nt, Artificial Sequence
  Description of Artificial Sequence: Synthetic oligonucleotide
  Sense strand starting at position 3056 of SEQ ID NO: 1882469
cuuugaugauagucuuaga

SEQ ID NO: 2123629 - RNA, 19 nt, Artificial Sequence
  Description of Artificial Sequence: Synthetic oligonucleotide
  Antisense strand to SEQ ID NO: 2123628
ucuaagacuaucaucaaag

SEQ ID NO: 2123630 - RNA, 19 nt, Artificial Sequence
  Description of Artificial Sequence: Synthetic oligonucleotide
  Sense strand starting at position 3059 of SEQ ID NO: 1882469
ugaugauagucuuagaaua

SEQ ID NO: 2123631 - RNA, 19 nt, Artificial Sequence
  Description of Artificial Sequence: Synthetic oligonucleotide
  Antisense strand to SEQ ID NO: 2123630
uauucuaagacuaucauca

SEQ ID NO: 2123632 - RNA, 19 nt, Artificial Sequence
  Description of Artificial Sequence: Synthetic oligonucleotide
  Sense strand starting at position 3061 of SEQ ID NO: 1882469
augauagucuuagaauaug

SEQ ID NO: 2123633 - RNA, 19 nt, Artificial Sequence
  Description of Artificial Sequence: Synthetic oligonucleotide
  Antisense strand to SEQ ID NO: 2123632
cauauucuaagacuaucau

SEQ ID NO: 2123634 - RNA, 19 nt, Artificial Sequence
  Description of Artificial Sequence: Synthetic oligonucleotide
  Sense strand starting at position 3067 of SEQ ID NO: 1882469
gucuuagaauaugcacauu

SEQ ID NO: 2123635 - RNA, 19 nt, Artificial Sequence
  Description of Artificial Sequence: Synthetic oligonucleotide
  Antisense strand to SEQ ID NO: 2123634
aaugugcauauucuaagac

SEQ ID NO: 2123636 - RNA, 19 nt, Artificial Sequence
  Description of Artificial Sequence: Synthetic oligonucleotide
  Sense strand starting at position 3234 of SEQ ID NO: 1882469
gcacacgcagcuuaauaaa

SEQ ID NO: 2123637 - RNA, 19 nt, Artificial Sequence
  Description of Artificial Sequence: Synthetic oligonucleotide
  Antisense strand to SEQ ID NO: 2123636
uuuauuaagcugcgugugc

SEQ ID NO: 2123638 - RNA, 19 nt, Artificial Sequence
  Description of Artificial Sequence: Synthetic oligonucleotide
  Sense strand starting at position 3274 of SEQ ID NO: 1882469
uuugauaggcagcaauaua

SEQ ID NO: 2123639 - RNA, 19 nt, Artificial Sequence
  Description of Artificial Sequence: Synthetic oligonucleotide
  Antisense strand to SEQ ID NO: 2123638
uauauugcugccuaucaaa

SEQ ID NO: 2123640 - RNA, 19 nt, Artificial Sequence
  Description of Artificial Sequence: Synthetic oligonucleotide
  Sense strand starting at position 3368 of SEQ ID NO: 1882469
caaagauauuuguggauga

SEQ ID NO: 2123641 - RNA, 19 nt, Artificial Sequence
  Description of Artificial Sequence: Synthetic oligonucleotide
  Antisense strand to SEQ ID NO: 2123640
ucauccacaaauaucuuug

SEQ ID NO: 2123642 - RNA, 19 nt, Artificial Sequence
  Description of Artificial Sequence: Synthetic oligonucleotide
  Sense strand starting at position 3369 of SEQ ID NO: 1882469
aaagauauuuguggaugag

SEQ ID NO: 2123643 - RNA, 19 nt, Artificial Sequence
  Description of Artificial Sequence: Synthetic oligonucleotide
  Antisense strand to SEQ ID NO: 2123642
cucauccacaaauaucuuu

SEQ ID NO: 2123644 - RNA, 19 nt, Artificial Sequence
  Description of Artificial Sequence: Synthetic oligonucleotide
  Sense strand starting at position 3597 of SEQ ID NO: 1882469
guuugaacugcuuacacga

SEQ ID NO: 2123645 - RNA, 19 nt, Artificial Sequence
  Description of Artificial Sequence: Synthetic oligonucleotide
  Antisense strand to SEQ ID NO: 2123644
ucguguaagcaguucaaac

SEQ ID NO: 2123646 - RNA, 19 nt, Artificial Sequence
  Description of Artificial Sequence: Synthetic oligonucleotide
  Sense strand starting at position 3604 of SEQ ID NO: 1882469
cugcuuacacgaugaauua

SEQ ID NO: 2123647 - RNA, 19 nt, Artificial Sequence
  Description of Artificial Sequence: Synthetic oligonucleotide
  Antisense strand to SEQ ID NO: 2123646
uaauucaucguguaagcag

SEQ ID NO: 2123648 - RNA, 19 nt, Artificial Sequence
  Description of Artificial Sequence: Synthetic oligonucleotide
  Sense strand starting at position 3684 of SEQ ID NO: 1882469
auguuaaugcuaugaaagu

SEQ ID NO: 2123649 - RNA, 19 nt, Artificial Sequence
  Description of Artificial Sequence: Synthetic oligonucleotide
  Antisense strand to SEQ ID NO: 2123648
acuuucauagcauuaacau

SEQ ID NO: 2123650 - RNA, 19 nt, Artificial Sequence
  Description of Artificial Sequence: Synthetic oligonucleotide
  Sense strand starting at position 3712 of SEQ ID NO: 1882469
ccuaaucuguuagagagga

SEQ ID NO: 2123651 - RNA, 19 nt, Artificial Sequence
  Description of Artificial Sequence: Synthetic oligonucleotide
  Antisense strand to SEQ ID NO: 2123650
uccucucuaacagauuagg

SEQ ID NO: 2123652 - RNA, 19 nt, Artificial Sequence
  Description of Artificial Sequence: Synthetic oligonucleotide
  Sense strand starting at position 3729 of SEQ ID NO: 1882469
gaacaacagucguuguaug

SEQ ID NO: 2123653 - RNA, 19 nt, Artificial Sequence
  Description of Artificial Sequence: Synthetic oligonucleotide
  Antisense strand to SEQ ID NO: 2123652
cauacaacgacuguuguuc

SEQ ID NO: 2123654 - RNA, 19 nt, Artificial Sequence
  Description of Artificial Sequence: Synthetic oligonucleotide
  Sense strand starting at position 3736 of SEQ ID NO: 1882469
agucguuguauguauauuu

SEQ ID NO: 2123655 - RNA, 19 nt, Artificial Sequence
  Description of Artificial Sequence: Synthetic oligonucleotide
  Antisense strand to SEQ ID NO: 2123654
aaauauacauacaacgacu

SEQ ID NO: 2123656 - RNA, 19 nt, Artificial Sequence
  Description of Artificial Sequence: Synthetic oligonucleotide
  Sense strand starting at position 3804 of SEQ ID NO: 1882469
cuuagagacuugucagagu

SEQ ID NO: 2123657 - RNA, 19 nt, Artificial Sequence
  Description of Artificial Sequence: Synthetic oligonucleotide
  Antisense strand to SEQ ID NO: 2123656
acucugacaagucucuaag

SEQ ID NO: 2123658 - RNA, 19 nt, Artificial Sequence
  Description of Artificial Sequence: Synthetic oligonucleotide
  Sense strand starting at position 3831 of SEQ ID NO: 1882469
ggcugaauuuaacaaauaa

SEQ ID NO: 2123659 - RNA, 19 nt, Artificial Sequence
  Description of Artificial Sequence: Synthetic oligonucleotide
  Antisense strand to SEQ ID NO: 2123658
uuauuuguuaaauucagcc

SEQ ID NO: 2123660 - RNA, 19 nt, Artificial Sequence
  Description of Artificial Sequence: Synthetic oligonucleotide
  Sense strand starting at position 3852 of SEQ ID NO: 1882469
uugugaauccuaggcugaa

SEQ ID NO: 2123661 - RNA, 19 nt, Artificial Sequence
  Description of Artificial Sequence: Synthetic oligonucleotide
  Antisense strand to SEQ ID NO: 2123660
uucagccuaggauucacaa

SEQ ID NO: 2123662 - RNA, 19 nt, Artificial Sequence
  Description of Artificial Sequence: Synthetic oligonucleotide
  Sense strand starting at position 3853 of SEQ ID NO: 1882469
ugugaauccuaggcugaac

SEQ ID NO: 2123663 - RNA, 19 nt, Artificial Sequence
  Description of Artificial Sequence: Synthetic oligonucleotide
  Antisense strand to SEQ ID NO: 2123662
guucagccuaggauucaca

SEQ ID NO: 2123664 - RNA, 19 nt, Artificial Sequence
  Description of Artificial Sequence: Synthetic oligonucleotide
  Sense strand starting at position 3892 of SEQ ID NO: 1882469
gaucuuuaguuauuggagu

SEQ ID NO: 2123665 - RNA, 19 nt, Artificial Sequence
  Description of Artificial Sequence: Synthetic oligonucleotide
  Antisense strand to SEQ ID NO: 2123664
acuccaauaacuaaagauc

SEQ ID NO: 2123666 - RNA, 19 nt, Artificial Sequence
  Description of Artificial Sequence: Synthetic oligonucleotide
  Sense strand starting at position 35 of SEQ ID NO: 1882470
ggcauauguggagggaagu

SEQ ID NO: 2123667 - RNA, 19 nt, Artificial Sequence
  Description of Artificial Sequence: Synthetic oligonucleotide
  Antisense strand to SEQ ID NO: 2123666
acuucccuccacauaugcc

SEQ ID NO: 2123668 - RNA, 19 nt, Artificial Sequence
  Description of Artificial Sequence: Synthetic oligonucleotide
  Sense strand starting at position 36 of SEQ ID NO: 1882470
gcauauguggagggaagua

SEQ ID NO: 2123669 - RNA, 19 nt, Artificial Sequence
  Description of Artificial Sequence: Synthetic oligonucleotide
  Antisense strand to SEQ ID NO: 2123668
uacuucccuccacauaugc

SEQ ID NO: 2123670 - RNA, 19 nt, Artificial Sequence
  Description of Artificial Sequence: Synthetic oligonucleotide
  Sense strand starting at position 80 of SEQ ID NO: 1882470
caugcaugucuagagcuga

SEQ ID NO: 2123671 - RNA, 19 nt, Artificial Sequence
  Description of Artificial Sequence: Synthetic oligonucleotide
  Antisense strand to SEQ ID NO: 2123670
ucagcucuagacaugcaug

SEQ ID NO: 2123672 - RNA, 19 nt, Artificial Sequence
  Description of Artificial Sequence: Synthetic oligonucleotide
  Sense strand starting at position 288 of SEQ ID NO: 1882470
gcuacagauguauacacau

SEQ ID NO: 2123673 - RNA, 19 nt, Artificial Sequence
  Description of Artificial Sequence: Synthetic oligonucleotide
  Antisense strand to SEQ ID NO: 2123672
auguguauacaucuguagc

SEQ ID NO: 2123674 - RNA, 19 nt, Artificial Sequence
  Description of Artificial Sequence: Synthetic oligonucleotide
  Sense strand starting at position 588 of SEQ ID NO: 1882470
gagauaaaccuauguaguc

SEQ ID NO: 2123675 - RNA, 19 nt, Artificial Sequence
  Description of Artificial Sequence: Synthetic oligonucleotide
  Antisense strand to SEQ ID NO: 2123674
gacuacauagguuuaucuc

SEQ ID NO: 2123676 - RNA, 19 nt, Artificial Sequence
  Description of Artificial Sequence: Synthetic oligonucleotide
  Sense strand starting at position 589 of SEQ ID NO: 1882470
agauaaaccuauguagucu

SEQ ID NO: 2123677 - RNA, 19 nt, Artificial Sequence
  Description of Artificial Sequence: Synthetic oligonucleotide
  Antisense strand to SEQ ID NO: 2123676
agacuacauagguuuaucu

SEQ ID NO: 2123678 - RNA, 19 nt, Artificial Sequence
  Description of Artificial Sequence: Synthetic oligonucleotide
  Sense strand starting at position 848 of SEQ ID NO: 1882470
guccacauauaguuuauaa

SEQ ID NO: 2123679 - RNA, 19 nt, Artificial Sequence
  Description of Artificial Sequence: Synthetic oligonucleotide
  Antisense strand to SEQ ID NO: 2123678
uuauaaacuauauguggac

SEQ ID NO: 2123680 - RNA, 19 nt, Artificial Sequence
  Description of Artificial Sequence: Synthetic oligonucleotide
  Sense strand starting at position 850 of SEQ ID NO: 1882470
ccacauauaguuuauaagu

SEQ ID NO: 2123681 - RNA, 19 nt, Artificial Sequence
  Description of Artificial Sequence: Synthetic oligonucleotide
  Antisense strand to SEQ ID NO: 2123680
acuuauaaacuauaugugg

SEQ ID NO: 2123682 - RNA, 19 nt, Artificial Sequence
  Description of Artificial Sequence: Synthetic oligonucleotide
  Sense strand starting at position 1103 of SEQ ID NO: 1882470
acuuguuaugcaggaauag

SEQ ID NO: 2123683 - RNA, 19 nt, Artificial Sequence
  Description of Artificial Sequence: Synthetic oligonucleotide
  Antisense strand to SEQ ID NO: 2123682
cuauuccugcauaacaagu

SEQ ID NO: 2123684 - RNA, 19 nt, Artificial Sequence
  Description of Artificial Sequence: Synthetic oligonucleotide
  Sense strand starting at position 1154 of SEQ ID NO: 1882470
uuaauucuugcugggauga

SEQ ID NO: 2123685 - RNA, 19 nt, Artificial Sequence
  Description of Artificial Sequence: Synthetic oligonucleotide
  Antisense strand to SEQ ID NO: 2123684
ucaucccagcaagaauuaa

SEQ ID NO: 2123686 - RNA, 19 nt, Artificial Sequence
  Description of Artificial Sequence: Synthetic oligonucleotide
  Sense strand starting at position 1155 of SEQ ID NO: 1882470
uaauucuugcugggaugaa

SEQ ID NO: 2123687 - RNA, 19 nt, Artificial Sequence
  Description of Artificial Sequence: Synthetic oligonucleotide
  Antisense strand to SEQ ID NO: 2123686
uucaucccagcaagaauua

SEQ ID NO: 2123688 - RNA, 19 nt, Artificial Sequence
  Description of Artificial Sequence: Synthetic oligonucleotide
  Sense strand starting at position 1207 of SEQ ID NO: 1882470
uuaggagauuuguacuuaa

SEQ ID NO: 2123689 - RNA, 19 nt, Artificial Sequence
  Description of Artificial Sequence: Synthetic oligonucleotide
  Antisense strand to SEQ ID NO: 2123688
uuaaguacaaaucuccuaa

SEQ ID NO: 2123690 - RNA, 19 nt, Artificial Sequence
  Description of Artificial Sequence: Synthetic oligonucleotide
  Sense strand starting at position 1355 of SEQ ID NO: 1882470
acaaauuauguguauguac

SEQ ID NO: 2123691 - RNA, 19 nt, Artificial Sequence
  Description of Artificial Sequence: Synthetic oligonucleotide
  Antisense strand to SEQ ID NO: 2123690
guacauacacauaauuugu

SEQ ID NO: 2123692 - RNA, 19 nt, Artificial Sequence
  Description of Artificial Sequence: Synthetic oligonucleotide
  Sense strand starting at position 1364 of SEQ ID NO: 1882470
guguauguaccacagauuc

SEQ ID NO: 2123693 - RNA, 19 nt, Artificial Sequence
  Description of Artificial Sequence: Synthetic oligonucleotide
  Antisense strand to SEQ ID NO: 2123692
gaaucugugguacauacac

SEQ ID NO: 2123694 - RNA, 19 nt, Artificial Sequence
  Description of Artificial Sequence: Synthetic oligonucleotide
  Sense strand starting at position 1390 of SEQ ID NO: 1882470
uuuggaaaugcuuauacau

SEQ ID NO: 2123695 - RNA, 19 nt, Artificial Sequence
  Description of Artificial Sequence: Synthetic oligonucleotide
  Antisense strand to SEQ ID NO: 2123694
auguauaagcauuuccaaa

SEQ ID NO: 2123696 - RNA, 19 nt, Artificial Sequence
  Description of Artificial Sequence: Synthetic oligonucleotide
  Sense strand starting at position 1409 of SEQ ID NO: 1882470
uugauagcucuaugaauau

SEQ ID NO: 2123697 - RNA, 19 nt, Artificial Sequence
  Description of Artificial Sequence: Synthetic oligonucleotide
  Antisense strand to SEQ ID NO: 2123696
auauucauagagcuaucaa

SEQ ID NO: 2123698 - RNA, 19 nt, Artificial Sequence
  Description of Artificial Sequence: Synthetic oligonucleotide
  Sense strand starting at position 1528 of SEQ ID NO: 1882470
cccuuuggucuguaucaca

SEQ ID NO: 2123699 - RNA, 19 nt, Artificial Sequence
  Description of Artificial Sequence: Synthetic oligonucleotide
  Antisense strand to SEQ ID NO: 2123698
ugugauacagaccaaaggg

SEQ ID NO: 2123700 - RNA, 19 nt, Artificial Sequence
  Description of Artificial Sequence: Synthetic oligonucleotide
  Sense strand starting at position 1567 of SEQ ID NO: 1882470
gguacaguauuugacauaa

SEQ ID NO: 2123701 - RNA, 19 nt, Artificial Sequence
  Description of Artificial Sequence: Synthetic oligonucleotide
  Antisense strand to SEQ ID NO: 2123700
uuaugucaaauacuguacc

SEQ ID NO: 2123702 - RNA, 19 nt, Artificial Sequence
  Description of Artificial Sequence: Synthetic oligonucleotide
  Sense strand starting at position 1596 of SEQ ID NO: 1882470
auguaugacuucuuaagug

SEQ ID NO: 2123703 - RNA, 19 nt, Artificial Sequence
  Description of Artificial Sequence: Synthetic oligonucleotide
  Antisense strand to SEQ ID NO: 2123702
cacuuaagaagucauacau

SEQ ID NO: 2123704 - RNA, 19 nt, Artificial Sequence
  Description of Artificial Sequence: Synthetic oligonucleotide
  Sense strand starting at position 2113 of SEQ ID NO: 1882470
ugcguuucucuggaauaaa

SEQ ID NO: 2123705 - RNA, 19 nt, Artificial Sequence
  Description of Artificial Sequence: Synthetic oligonucleotide
  Antisense strand to SEQ ID NO: 2123704
uuuauuccagagaaacgca

SEQ ID NO: 2123706 - RNA, 19 nt, Artificial Sequence
  Description of Artificial Sequence: Synthetic oligonucleotide
  Sense strand starting at position 2162 of SEQ ID NO: 1882470
aacacaaguucgguaacau

SEQ ID NO: 2123707 - RNA, 19 nt, Artificial Sequence
  Description of Artificial Sequence: Synthetic oligonucleotide
  Antisense strand to SEQ ID NO: 2123706
auguuaccgaacuuguguu

SEQ ID NO: 2123708 - RNA, 19 nt, Artificial Sequence
  Description of Artificial Sequence: Synthetic oligonucleotide
  Sense strand starting at position 2163 of SEQ ID NO: 1882470
acacaaguucgguaacauu

SEQ ID NO: 2123709 - RNA, 19 nt, Artificial Sequence
  Description of Artificial Sequence: Synthetic oligonucleotide
  Antisense strand to SEQ ID NO: 2123708
aauguuaccgaacuugugu

SEQ ID NO: 2123710 - RNA, 19 nt, Artificial Sequence
  Description of Artificial Sequence: Synthetic oligonucleotide
  Sense strand starting at position 2263 of SEQ ID NO: 1882470
guaucuugacauggauucu

SEQ ID NO: 2123711 - RNA, 19 nt, Artificial Sequence
  Description of Artificial Sequence: Synthetic oligonucleotide
  Antisense strand to SEQ ID NO: 2123710
agaauccaugucaagauac

SEQ ID NO: 2123712 - RNA, 19 nt, Artificial Sequence
  Description of Artificial Sequence: Synthetic oligonucleotide
  Sense strand starting at position 2607 of SEQ ID NO: 1882470
auacuacuugcaggaagaa

SEQ ID NO: 2123713 - RNA, 19 nt, Artificial Sequence
  Description of Artificial Sequence: Synthetic oligonucleotide
  Antisense strand to SEQ ID NO: 2123712
uucuuccugcaaguaguau

SEQ ID NO: 2123714 - RNA, 19 nt, Artificial Sequence
  Description of Artificial Sequence: Synthetic oligonucleotide
  Sense strand starting at position 2867 of SEQ ID NO: 1882470
cgauuccucucccugggaa

SEQ ID NO: 2123715 - RNA, 19 nt, Artificial Sequence
  Description of Artificial Sequence: Synthetic oligonucleotide
  Antisense strand to SEQ ID NO: 2123714
uucccagggagaggaaucg

SEQ ID NO: 2123716 - RNA, 19 nt, Artificial Sequence
  Description of Artificial Sequence: Synthetic oligonucleotide
  Sense strand starting at position 2869 of SEQ ID NO: 1882470
auuccucucccugggaaau

SEQ ID NO: 2123717 - RNA, 19 nt, Artificial Sequence
  Description of Artificial Sequence: Synthetic oligonucleotide
  Antisense strand to SEQ ID NO: 2123716
auuucccagggagaggaau

SEQ ID NO: 2123718 - RNA, 19 nt, Artificial Sequence
  Description of Artificial Sequence: Synthetic oligonucleotide
  Sense strand starting at position 3157 of SEQ ID NO: 1882470
auccuaguuguauacaaua

SEQ ID NO: 2123719 - RNA, 19 nt, Artificial Sequence
  Description of Artificial Sequence: Synthetic oligonucleotide
  Antisense strand to SEQ ID NO: 2123718
uauuguauacaacuaggau

SEQ ID NO: 2123720 - RNA, 19 nt, Artificial Sequence
  Description of Artificial Sequence: Synthetic oligonucleotide
  Sense strand starting at position 3280 of SEQ ID NO: 1882470
uagacagauuggccucagu

SEQ ID NO: 2123721 - RNA, 19 nt, Artificial Sequence
  Description of Artificial Sequence: Synthetic oligonucleotide
  Antisense strand to SEQ ID NO: 2123720
acugaggccaaucugucua

SEQ ID NO: 2123722 - RNA, 19 nt, Artificial Sequence
  Description of Artificial Sequence: Synthetic oligonucleotide
  Sense strand starting at position 3283 of SEQ ID NO: 1882470
acagauuggccucaguuau

SEQ ID NO: 2123723 - RNA, 19 nt, Artificial Sequence
  Description of Artificial Sequence: Synthetic oligonucleotide
  Antisense strand to SEQ ID NO: 2123722
auaacugaggccaaucugu

SEQ ID NO: 2123724 - RNA, 19 nt, Artificial Sequence
  Description of Artificial Sequence: Synthetic oligonucleotide
  Sense strand starting at position 3370 of SEQ ID NO: 1882470
ggcuaauugccacauuauu

SEQ ID NO: 2123725 - RNA, 19 nt, Artificial Sequence
  Description of Artificial Sequence: Synthetic oligonucleotide
  Antisense strand to SEQ ID NO: 2123724
aauaauguggcaauuagcc

SEQ ID NO: 2123726 - RNA, 19 nt, Artificial Sequence
  Description of Artificial Sequence: Synthetic oligonucleotide
  Sense strand starting at position 3454 of SEQ ID NO: 1882470
auaauauaucugugucuga

SEQ ID NO: 2123727 - RNA, 19 nt, Artificial Sequence
  Description of Artificial Sequence: Synthetic oligonucleotide
  Antisense strand to SEQ ID NO: 2123726
ucagacacagauauauuau

SEQ ID NO: 2123728 - RNA, 19 nt, Artificial Sequence
  Description of Artificial Sequence: Synthetic oligonucleotide
  Sense strand starting at position 3457 of SEQ ID NO: 1882470
auauaucugugucugacau

SEQ ID NO: 2123729 - RNA, 19 nt, Artificial Sequence
  Description of Artificial Sequence: Synthetic oligonucleotide
  Antisense strand to SEQ ID NO: 2123728
augucagacacagauauau

SEQ ID NO: 2123730 - RNA, 19 nt, Artificial Sequence
  Description of Artificial Sequence: Synthetic oligonucleotide
  Sense strand starting at position 3564 of SEQ ID NO: 1882470
uacaaugucuggcugacaa

SEQ ID NO: 2123731 - RNA, 19 nt, Artificial Sequence
  Description of Artificial Sequence: Synthetic oligonucleotide
  Antisense strand to SEQ ID NO: 2123730
uugucagccagacauugua

SEQ ID NO: 2123732 - RNA, 19 nt, Artificial Sequence
  Description of Artificial Sequence: Synthetic oligonucleotide
  Sense strand starting at position 3566 of SEQ ID NO: 1882470
caaugucuggcugacaaga

SEQ ID NO: 2123733 - RNA, 19 nt, Artificial Sequence
  Description of Artificial Sequence: Synthetic oligonucleotide
  Antisense strand to SEQ ID NO: 2123732
ucuugucagccagacauug

SEQ ID NO: 2123734 - RNA, 19 nt, Artificial Sequence
  Description of Artificial Sequence: Synthetic oligonucleotide
  Sense strand starting at position 3629 of SEQ ID NO: 1882470
uugugcauucuauaaugau

SEQ ID NO: 2123735 - RNA, 19 nt, Artificial Sequence
  Description of Artificial Sequence: Synthetic oligonucleotide
  Antisense strand to SEQ ID NO: 2123734
aucauuauagaaugcacaa

SEQ ID NO: 2123736 - RNA, 19 nt, Artificial Sequence
  Description of Artificial Sequence: Synthetic oligonucleotide
  Sense strand starting at position 3664 of SEQ ID NO: 1882470
ugaugaaacucugccaaau

SEQ ID NO: 2123737 - RNA, 19 nt, Artificial Sequence
  Description of Artificial Sequence: Synthetic oligonucleotide
  Antisense strand to SEQ ID NO: 2123736
auuuggcagaguuucauca

SEQ ID NO: 2123738 - RNA, 19 nt, Artificial Sequence
  Description of Artificial Sequence: Synthetic oligonucleotide
  Sense strand starting at position 3726 of SEQ ID NO: 1882470
uaguaagaauguguaauag

SEQ ID NO: 2123739 - RNA, 19 nt, Artificial Sequence
  Description of Artificial Sequence: Synthetic oligonucleotide
  Antisense strand to SEQ ID NO: 2123738
cuauuacacauucuuacua

SEQ ID NO: 2123740 - RNA, 19 nt, Artificial Sequence
  Description of Artificial Sequence: Synthetic oligonucleotide
  Sense strand starting at position 3736 of SEQ ID NO: 1882470
guguaauagccucaaagaa

SEQ ID NO: 2123741 - RNA, 19 nt, Artificial Sequence
  Description of Artificial Sequence: Synthetic oligonucleotide
  Antisense strand to SEQ ID NO: 2123740
uucuuugaggcuauuacac

SEQ ID NO: 2123742 - RNA, 19 nt, Artificial Sequence
  Description of Artificial Sequence: Synthetic oligonucleotide
  Sense strand starting at position 3952 of SEQ ID NO: 1882470
ggcuucuuagaugaccauu

SEQ ID NO: 2123743 - RNA, 19 nt, Artificial Sequence
  Description of Artificial Sequence: Synthetic oligonucleotide
  Antisense strand to SEQ ID NO: 2123742
aauggucaucuaagaagcc

SEQ ID NO: 2123744 - RNA, 19 nt, Artificial Sequence
  Description of Artificial Sequence: Synthetic oligonucleotide
  Sense strand starting at position 3960 of SEQ ID NO: 1882470
agaugaccauuugauaaac

SEQ ID NO: 2123745 - RNA, 19 nt, Artificial Sequence
  Description of Artificial Sequence: Synthetic oligonucleotide
  Antisense strand to SEQ ID NO: 2123744
guuuaucaaauggucaucu

SEQ ID NO: 2123746 - RNA, 19 nt, Artificial Sequence
  Description of Artificial Sequence: Synthetic oligonucleotide
  Sense strand starting at position 36 of SEQ ID NO: 1882471
ucuggaggcuuagagaaga

SEQ ID NO: 2123747 - RNA, 19 nt, Artificial Sequence
  Description of Artificial Sequence: Synthetic oligonucleotide
  Antisense strand to SEQ ID NO: 2123746
ucuucucuaagccuccaga

SEQ ID NO: 2123748 - RNA, 19 nt, Artificial Sequence
  Description of Artificial Sequence: Synthetic oligonucleotide
  Sense strand starting at position 105 of SEQ ID NO: 1882471
cugucauacuggcucaaua

SEQ ID NO: 2123749 - RNA, 19 nt, Artificial Sequence
  Description of Artificial Sequence: Synthetic oligonucleotide
  Antisense strand to SEQ ID NO: 2123748
uauugagccaguaugacag

SEQ ID NO: 2123750 - RNA, 19 nt, Artificial Sequence
  Description of Artificial Sequence: Synthetic oligonucleotide
  Sense strand starting at position 107 of SEQ ID NO: 1882471
gucauacuggcucaauaau

SEQ ID NO: 2123751 - RNA, 19 nt, Artificial Sequence
  Description of Artificial Sequence: Synthetic oligonucleotide
  Antisense strand to SEQ ID NO: 2123750
auuauugagccaguaugac

SEQ ID NO: 2123752 - RNA, 19 nt, Artificial Sequence
  Description of Artificial Sequence: Synthetic oligonucleotide
  Sense strand starting at position 217 of SEQ ID NO: 1882471
agaaguuucggugggugau

SEQ ID NO: 2123753 - RNA, 19 nt, Artificial Sequence
  Description of Artificial Sequence: Synthetic oligonucleotide
  Antisense strand to SEQ ID NO: 2123752
aucacccaccgaaacuucu

SEQ ID NO: 2123754 - RNA, 19 nt, Artificial Sequence
  Description of Artificial Sequence: Synthetic oligonucleotide
  Sense strand starting at position 218 of SEQ ID NO: 1882471
gaaguuucggugggugaug

SEQ ID NO: 2123755 - RNA, 19 nt, Artificial Sequence
  Description of Artificial Sequence: Synthetic oligonucleotide
  Antisense strand to SEQ ID NO: 2123754
caucacccaccgaaacuuc

SEQ ID NO: 2123756 - RNA, 19 nt, Artificial Sequence
  Description of Artificial Sequence: Synthetic oligonucleotide
  Sense strand starting at position 226 of SEQ ID NO: 1882471
ggugggugauggguagaua

SEQ ID NO: 2123757 - RNA, 19 nt, Artificial Sequence
  Description of Artificial Sequence: Synthetic oligonucleotide
  Antisense strand to SEQ ID NO: 2123756
uaucuacccaucacccacc

SEQ ID NO: 2123758 - RNA, 19 nt, Artificial Sequence
  Description of Artificial Sequence: Synthetic oligonucleotide
  Sense strand starting at position 227 of SEQ ID NO: 1882471
gugggugauggguagauau

SEQ ID NO: 2123759 - RNA, 19 nt, Artificial Sequence
  Description of Artificial Sequence: Synthetic oligonucleotide
  Antisense strand to SEQ ID NO: 2123758
auaucuacccaucacccac

SEQ ID NO: 2123760 - RNA, 19 nt, Artificial Sequence
  Description of Artificial Sequence: Synthetic oligonucleotide
  Sense strand starting at position 872 of SEQ ID NO: 1882471
cauacugcagucuggagaa

SEQ ID NO: 2123761 - RNA, 19 nt, Artificial Sequence
  Description of Artificial Sequence: Synthetic oligonucleotide
  Antisense strand to SEQ ID NO: 2123760
uucuccagacugcaguaug

SEQ ID NO: 2123762 - RNA, 19 nt, Artificial Sequence
  Description of Artificial Sequence: Synthetic oligonucleotide
  Sense strand starting at position 920 of SEQ ID NO: 1882471
ggaagagggucuugacauc

SEQ ID NO: 2123763 - RNA, 19 nt, Artificial Sequence
  Description of Artificial Sequence: Synthetic oligonucleotide
  Antisense strand to SEQ ID NO: 2123762
gaugucaagacccucuucc

SEQ ID NO: 2123764 - RNA, 19 nt, Artificial Sequence
  Description of Artificial Sequence: Synthetic oligonucleotide
  Sense strand starting at position 927 of SEQ ID NO: 1882471
ggucuugacauccaggcau

SEQ ID NO: 2123765 - RNA, 19 nt, Artificial Sequence
  Description of Artificial Sequence: Synthetic oligonucleotide
  Antisense strand to SEQ ID NO: 2123764
augccuggaugucaagacc

SEQ ID NO: 2123766 - RNA, 19 nt, Artificial Sequence
  Description of Artificial Sequence: Synthetic oligonucleotide
  Sense strand starting at position 1162 of SEQ ID NO: 1882471
ccaacaauguguguuagca

SEQ ID NO: 2123767 - RNA, 19 nt, Artificial Sequence
  Description of Artificial Sequence: Synthetic oligonucleotide
  Antisense strand to SEQ ID NO: 2123766
ugcuaacacacauuguugg

SEQ ID NO: 2123768 - RNA, 19 nt, Artificial Sequence
  Description of Artificial Sequence: Synthetic oligonucleotide
  Sense strand starting at position 1609 of SEQ ID NO: 1882471
ggcucauuggcauggagga

SEQ ID NO: 2123769 - RNA, 19 nt, Artificial Sequence
  Description of Artificial Sequence: Synthetic oligonucleotide
  Antisense strand to SEQ ID NO: 2123768
uccuccaugccaaugagcc

SEQ ID NO: 2123770 - RNA, 19 nt, Artificial Sequence
  Description of Artificial Sequence: Synthetic oligonucleotide
  Sense strand starting at position 1732 of SEQ ID NO: 1882471
gaaacagauucccaggaag

SEQ ID NO: 2123771 - RNA, 19 nt, Artificial Sequence
  Description of Artificial Sequence: Synthetic oligonucleotide
  Antisense strand to SEQ ID NO: 2123770
cuuccugggaaucuguuuc

SEQ ID NO: 2123772 - RNA, 19 nt, Artificial Sequence
  Description of Artificial Sequence: Synthetic oligonucleotide
  Sense strand starting at position 2194 of SEQ ID NO: 1882471
aucccauugugcccagauu

SEQ ID NO: 2123773 - RNA, 19 nt, Artificial Sequence
  Description of Artificial Sequence: Synthetic oligonucleotide
  Antisense strand to SEQ ID NO: 2123772
aaucugggcacaaugggau

SEQ ID NO: 2123774 - RNA, 19 nt, Artificial Sequence
  Description of Artificial Sequence: Synthetic oligonucleotide
  Sense strand starting at position 2321 of SEQ ID NO: 1882471
cgcguucucaguggugaac

SEQ ID NO: 2123775 - RNA, 19 nt, Artificial Sequence
  Description of Artificial Sequence: Synthetic oligonucleotide
  Antisense strand to SEQ ID NO: 2123774
guucaccacugagaacgcg

SEQ ID NO: 2123776 - RNA, 19 nt, Artificial Sequence
  Description of Artificial Sequence: Synthetic oligonucleotide
  Sense strand starting at position 2406 of SEQ ID NO: 1882471
gaaguauggacagagcagu

SEQ ID NO: 2123777 - RNA, 19 nt, Artificial Sequence
  Description of Artificial Sequence: Synthetic oligonucleotide
  Antisense strand to SEQ ID NO: 2123776
acugcucuguccauacuuc

SEQ ID NO: 2123778 - RNA, 19 nt, Artificial Sequence
  Description of Artificial Sequence: Synthetic oligonucleotide
  Sense strand starting at position 2712 of SEQ ID NO: 1882471
gggugucagcuagguguga

SEQ ID NO: 2123779 - RNA, 19 nt, Artificial Sequence
  Description of Artificial Sequence: Synthetic oligonucleotide
  Antisense strand to SEQ ID NO: 2123778
ucacaccuagcugacaccc

SEQ ID NO: 2123780 - RNA, 19 nt, Artificial Sequence
  Description of Artificial Sequence: Synthetic oligonucleotide
  Sense strand starting at position 2721 of SEQ ID NO: 1882471
cuaggugugacguaucuga

SEQ ID NO: 2123781 - RNA, 19 nt, Artificial Sequence
  Description of Artificial Sequence: Synthetic oligonucleotide
  Antisense strand to SEQ ID NO: 2123780
ucagauacgucacaccuag

SEQ ID NO: 2123782 - RNA, 19 nt, Artificial Sequence
  Description of Artificial Sequence: Synthetic oligonucleotide
  Sense strand starting at position 2725 of SEQ ID NO: 1882471
gugugacguaucugauuua

SEQ ID NO: 2123783 - RNA, 19 nt, Artificial Sequence
  Description of Artificial Sequence: Synthetic oligonucleotide
  Antisense strand to SEQ ID NO: 2123782
uaaaucagauacgucacac

SEQ ID NO: 2123784 - RNA, 19 nt, Artificial Sequence
  Description of Artificial Sequence: Synthetic oligonucleotide
  Sense strand starting at position 3020 of SEQ ID NO: 1882471
aggcaauggugauaccacu

SEQ ID NO: 2123785 - RNA, 19 nt, Artificial Sequence
  Description of Artificial Sequence: Synthetic oligonucleotide
  Antisense strand to SEQ ID NO: 2123784
agugguaucaccauugccu

SEQ ID NO: 2123786 - RNA, 19 nt, Artificial Sequence
  Description of Artificial Sequence: Synthetic oligonucleotide
  Sense strand starting at position 3036 of SEQ ID NO: 1882471
acuuccugagcuggagaau

SEQ ID NO: 2123787 - RNA, 19 nt, Artificial Sequence
  Description of Artificial Sequence: Synthetic oligonucleotide
  Antisense strand to SEQ ID NO: 2123786
auucuccagcucaggaagu

SEQ ID NO: 2123788 - RNA, 19 nt, Artificial Sequence
  Description of Artificial Sequence: Synthetic oligonucleotide
  Sense strand starting at position 3067 of SEQ ID NO: 1882471
gcagguuuaggcugggaau

SEQ ID NO: 2123789 - RNA, 19 nt, Artificial Sequence
  Description of Artificial Sequence: Synthetic oligonucleotide
  Antisense strand to SEQ ID NO: 2123788
auucccagccuaaaccugc

SEQ ID NO: 2123790 - RNA, 19 nt, Artificial Sequence
  Description of Artificial Sequence: Synthetic oligonucleotide
  Sense strand starting at position 3105 of SEQ ID NO: 1882471
ggaaguuaaacguacguuu

SEQ ID NO: 2123791 - RNA, 19 nt, Artificial Sequence
  Description of Artificial Sequence: Synthetic oligonucleotide
  Antisense strand to SEQ ID NO: 2123790
aaacguacguuuaacuucc

SEQ ID NO: 2123792 - RNA, 19 nt, Artificial Sequence
  Description of Artificial Sequence: Synthetic oligonucleotide
  Sense strand starting at position 3107 of SEQ ID NO: 1882471
aaguuaaacguacguuuga

SEQ ID NO: 2123793 - RNA, 19 nt, Artificial Sequence
  Description of Artificial Sequence: Synthetic oligonucleotide
  Antisense strand to SEQ ID NO: 2123792
ucaaacguacguuuaacuu

SEQ ID NO: 2123794 - RNA, 19 nt, Artificial Sequence
  Description of Artificial Sequence: Synthetic oligonucleotide
  Sense strand starting at position 3116 of SEQ ID NO: 1882471
guacguuugagaugccuau

SEQ ID NO: 2123795 - RNA, 19 nt, Artificial Sequence
  Description of Artificial Sequence: Synthetic oligonucleotide
  Antisense strand to SEQ ID NO: 2123794
auaggcaucucaaacguac

SEQ ID NO: 2123796 - RNA, 19 nt, Artificial Sequence
  Description of Artificial Sequence: Synthetic oligonucleotide
  Sense strand starting at position 3151 of SEQ ID NO: 1882471
uggcuacagugcuuguaau

SEQ ID NO: 2123797 - RNA, 19 nt, Artificial Sequence
  Description of Artificial Sequence: Synthetic oligonucleotide
  Antisense strand to SEQ ID NO: 2123796
auuacaagcacuguagcca

SEQ ID NO: 2123798 - RNA, 19 nt, Artificial Sequence
  Description of Artificial Sequence: Synthetic oligonucleotide
  Sense strand starting at position 3152 of SEQ ID NO: 1882471
ggcuacagugcuuguaauc

SEQ ID NO: 2123799 - RNA, 19 nt, Artificial Sequence
  Description of Artificial Sequence: Synthetic oligonucleotide
  Antisense strand to SEQ ID NO: 2123798
gauuacaagcacuguagcc

SEQ ID NO: 2123800 - RNA, 19 nt, Artificial Sequence
  Description of Artificial Sequence: Synthetic oligonucleotide
  Sense strand starting at position 3298 of SEQ ID NO: 1882471
gguggccagguuuacaaua

SEQ ID NO: 2123801 - RNA, 19 nt, Artificial Sequence
  Description of Artificial Sequence: Synthetic oligonucleotide
  Antisense strand to SEQ ID NO: 2123800
uauuguaaaccuggccacc

SEQ ID NO: 2123802 - RNA, 19 nt, Artificial Sequence
  Description of Artificial Sequence: Synthetic oligonucleotide
  Sense strand starting at position 3303 of SEQ ID NO: 1882471
ccagguuuacaauauuguu

SEQ ID NO: 2123803 - RNA, 19 nt, Artificial Sequence
  Description of Artificial Sequence: Synthetic oligonucleotide
  Antisense strand to SEQ ID NO: 2123802
aacaauauuguaaaccugg

SEQ ID NO: 2123804 - RNA, 19 nt, Artificial Sequence
  Description of Artificial Sequence: Synthetic oligonucleotide
  Sense strand starting at position 3335 of SEQ ID NO: 1882471
agaggcuuagucuggagau

SEQ ID NO: 2123805 - RNA, 19 nt, Artificial Sequence
  Description of Artificial Sequence: Synthetic oligonucleotide
  Antisense strand to SEQ ID NO: 2123804
aucuccagacuaagccucu

SEQ ID NO: 2123806 - RNA, 19 nt, Artificial Sequence
  Description of Artificial Sequence: Synthetic oligonucleotide
  Sense strand starting at position 3337 of SEQ ID NO: 1882471
aggcuuagucuggagauga

SEQ ID NO: 2123807 - RNA, 19 nt, Artificial Sequence
  Description of Artificial Sequence: Synthetic oligonucleotide
  Antisense strand to SEQ ID NO: 2123806
ucaucuccagacuaagccu

SEQ ID NO: 2123808 - RNA, 19 nt, Artificial Sequence
  Description of Artificial Sequence: Synthetic oligonucleotide
  Sense strand starting at position 3341 of SEQ ID NO: 1882471
uuagucuggagaugauaua

SEQ ID NO: 2123809 - RNA, 19 nt, Artificial Sequence
  Description of Artificial Sequence: Synthetic oligonucleotide
  Antisense strand to SEQ ID NO: 2123808
uauaucaucuccagacuaa

SEQ ID NO: 2123810 - RNA, 19 nt, Artificial Sequence
  Description of Artificial Sequence: Synthetic oligonucleotide
  Sense strand starting at position 3362 of SEQ ID NO: 1882471
cuggagagucgucagcgua

SEQ ID NO: 2123811 - RNA, 19 nt, Artificial Sequence
  Description of Artificial Sequence: Synthetic oligonucleotide
  Antisense strand to SEQ ID NO: 2123810
uacgcugacgacucuccag

SEQ ID NO: 2123812 - RNA, 19 nt, Artificial Sequence
  Description of Artificial Sequence: Synthetic oligonucleotide
  Sense strand starting at position 3363 of SEQ ID NO: 1882471
uggagagucgucagcguau

SEQ ID NO: 2123813 - RNA, 19 nt, Artificial Sequence
  Description of Artificial Sequence: Synthetic oligonucleotide
  Antisense strand to SEQ ID NO: 2123812
auacgcugacgacucucca

SEQ ID NO: 2123814 - RNA, 19 nt, Artificial Sequence
  Description of Artificial Sequence: Synthetic oligonucleotide
  Sense strand starting at position 3364 of SEQ ID NO: 1882471
ggagagucgucagcguaua

SEQ ID NO: 2123815 - RNA, 19 nt, Artificial Sequence
  Description of Artificial Sequence: Synthetic oligonucleotide
  Antisense strand to SEQ ID NO: 2123814
uauacgcugacgacucucc

SEQ ID NO: 2123816 - RNA, 19 nt, Artificial Sequence
  Description of Artificial Sequence: Synthetic oligonucleotide
  Sense strand starting at position 3365 of SEQ ID NO: 1882471
gagagucgucagcguauag

SEQ ID NO: 2123817 - RNA, 19 nt, Artificial Sequence
  Description of Artificial Sequence: Synthetic oligonucleotide
  Antisense strand to SEQ ID NO: 2123816
cuauacgcugacgacucuc

SEQ ID NO: 2123818 - RNA, 19 nt, Artificial Sequence
  Description of Artificial Sequence: Synthetic oligonucleotide
  Sense strand starting at position 3375 of SEQ ID NO: 1882471
agcguauaggugguguuua

SEQ ID NO: 2123819 - RNA, 19 nt, Artificial Sequence
  Description of Artificial Sequence: Synthetic oligonucleotide
  Antisense strand to SEQ ID NO: 2123818
uaaacaccaccuauacgcu

SEQ ID NO: 2123820 - RNA, 19 nt, Artificial Sequence
  Description of Artificial Sequence: Synthetic oligonucleotide
  Sense strand starting at position 3380 of SEQ ID NO: 1882471
auaggugguguuuaaagua

SEQ ID NO: 2123821 - RNA, 19 nt, Artificial Sequence
  Description of Artificial Sequence: Synthetic oligonucleotide
  Antisense strand to SEQ ID NO: 2123820
uacuuuaaacaccaccuau

SEQ ID NO: 2123822 - RNA, 19 nt, Artificial Sequence
  Description of Artificial Sequence: Synthetic oligonucleotide
  Sense strand starting at position 3966 of SEQ ID NO: 1882471
gcggcacuuggcugaguaa

SEQ ID NO: 2123823 - RNA, 19 nt, Artificial Sequence
  Description of Artificial Sequence: Synthetic oligonucleotide
  Antisense strand to SEQ ID NO: 2123822
uuacucagccaagugccgc

SEQ ID NO: 2123824 - RNA, 19 nt, Artificial Sequence
  Description of Artificial Sequence: Synthetic oligonucleotide
  Sense strand starting at position 3967 of SEQ ID NO: 1882471
cggcacuuggcugaguaaa

SEQ ID NO: 2123825 - RNA, 19 nt, Artificial Sequence
  Description of Artificial Sequence: Synthetic oligonucleotide
  Antisense strand to SEQ ID NO: 2123824
uuuacucagccaagugccg

SEQ ID NO: 2123826 - RNA, 19 nt, Artificial Sequence
  Description of Artificial Sequence: Synthetic oligonucleotide
  Sense strand starting at position 2258 of SEQ ID NO: 1882472
gccaguggaucaccugaaa

SEQ ID NO: 2123827 - RNA, 19 nt, Artificial Sequence
  Description of Artificial Sequence: Synthetic oligonucleotide
  Antisense strand to SEQ ID NO: 2123826
uuucaggugauccacuggc

SEQ ID NO: 2123828 - RNA, 19 nt, Artificial Sequence
  Description of Artificial Sequence: Synthetic oligonucleotide
  Sense strand starting at position 3064 of SEQ ID NO: 1882472
ggcggaucugucugggcaa

SEQ ID NO: 2123829 - RNA, 19 nt, Artificial Sequence
  Description of Artificial Sequence: Synthetic oligonucleotide
  Antisense strand to SEQ ID NO: 2123828
uugcccagacagauccgcc

SEQ ID NO: 2123830 - RNA, 19 nt, Artificial Sequence
  Description of Artificial Sequence: Synthetic oligonucleotide
  Sense strand starting at position 3158 of SEQ ID NO: 1882472
ccuccuagcuuuccuggaa

SEQ ID NO: 2123831 - RNA, 19 nt, Artificial Sequence
  Description of Artificial Sequence: Synthetic oligonucleotide
  Antisense strand to SEQ ID NO: 2123830
uuccaggaaagcuaggagg

SEQ ID NO: 2123832 - RNA, 19 nt, Artificial Sequence
  Description of Artificial Sequence: Synthetic oligonucleotide
  Sense strand starting at position 3352 of SEQ ID NO: 1882472
cggagaguuugggucuuca

SEQ ID NO: 2123833 - RNA, 19 nt, Artificial Sequence
  Description of Artificial Sequence: Synthetic oligonucleotide
  Antisense strand to SEQ ID NO: 2123832
ugaagacccaaacucuccg

SEQ ID NO: 2123834 - RNA, 19 nt, Artificial Sequence
  Description of Artificial Sequence: Synthetic oligonucleotide
  Sense strand starting at position 3414 of SEQ ID NO: 1882472
gggucucuuguaugagaaa

SEQ ID NO: 2123835 - RNA, 19 nt, Artificial Sequence
  Description of Artificial Sequence: Synthetic oligonucleotide
  Antisense strand to SEQ ID NO: 2123834
uuucucauacaagagaccc

SEQ ID NO: 2123836 - RNA, 19 nt, Artificial Sequence
  Description of Artificial Sequence: Synthetic oligonucleotide
  Sense strand starting at position 3415 of SEQ ID NO: 1882472
ggucucuuguaugagaaag

SEQ ID NO: 2123837 - RNA, 19 nt, Artificial Sequence
  Description of Artificial Sequence: Synthetic oligonucleotide
  Antisense strand to SEQ ID NO: 2123836
cuuucucauacaagagacc

SEQ ID NO: 2123838 - RNA, 19 nt, Artificial Sequence
  Description of Artificial Sequence: Synthetic oligonucleotide
  Sense strand starting at position 3417 of SEQ ID NO: 1882472
ucucuuguaugagaaagca

SEQ ID NO: 2123839 - RNA, 19 nt, Artificial Sequence
  Description of Artificial Sequence: Synthetic oligonucleotide
  Antisense strand to SEQ ID NO: 2123838
ugcuuucucauacaagaga

SEQ ID NO: 2123840 - RNA, 19 nt, Artificial Sequence
  Description of Artificial Sequence: Synthetic oligonucleotide
  Sense strand starting at position 3702 of SEQ ID NO: 1882472
guguguacuuggucugauu

SEQ ID NO: 2123841 - RNA, 19 nt, Artificial Sequence
  Description of Artificial Sequence: Synthetic oligonucleotide
  Antisense strand to SEQ ID NO: 2123840
aaucagaccaaguacacac

SEQ ID NO: 2123842 - RNA, 19 nt, Artificial Sequence
  Description of Artificial Sequence: Synthetic oligonucleotide
  Sense strand starting at position 3711 of SEQ ID NO: 1882472
uggucugauucggucuuca

SEQ ID NO: 2123843 - RNA, 19 nt, Artificial Sequence
  Description of Artificial Sequence: Synthetic oligonucleotide
  Antisense strand to SEQ ID NO: 2123842
ugaagaccgaaucagacca

SEQ ID NO: 2123844 - RNA, 19 nt, Artificial Sequence
  Description of Artificial Sequence: Synthetic oligonucleotide
  Sense strand starting at position 3770 of SEQ ID NO: 1882472
gugcgaugggcuugguuca

SEQ ID NO: 2123845 - RNA, 19 nt, Artificial Sequence
  Description of Artificial Sequence: Synthetic oligonucleotide
  Antisense strand to SEQ ID NO: 2123844
ugaaccaagcccaucgcac

SEQ ID NO: 2123846 - RNA, 19 nt, Artificial Sequence
  Description of Artificial Sequence: Synthetic oligonucleotide
  Sense strand starting at position 3898 of SEQ ID NO: 1882472
aauguuuggcaaggucuaa

SEQ ID NO: 2123847 - RNA, 19 nt, Artificial Sequence
  Description of Artificial Sequence: Synthetic oligonucleotide
  Antisense strand to SEQ ID NO: 2123846
uuagaccuugccaaacauu

SEQ ID NO: 2123848 - RNA, 19 nt, Artificial Sequence
  Description of Artificial Sequence: Synthetic oligonucleotide
  Sense strand starting at position 3902 of SEQ ID NO: 1882472
uuuggcaaggucuaaucua

SEQ ID NO: 2123849 - RNA, 19 nt, Artificial Sequence
  Description of Artificial Sequence: Synthetic oligonucleotide
  Antisense strand to SEQ ID NO: 2123848
uagauuagaccuugccaaa

SEQ ID NO: 2123850 - RNA, 19 nt, Artificial Sequence
  Description of Artificial Sequence: Synthetic oligonucleotide
  Sense strand starting at position 3917 of SEQ ID NO: 1882472
ucuauagucucaguaguua

SEQ ID NO: 2123851 - RNA, 19 nt, Artificial Sequence
  Description of Artificial Sequence: Synthetic oligonucleotide
  Antisense strand to SEQ ID NO: 2123850
uaacuacugagacuauaga

SEQ ID NO: 2123852 - RNA, 19 nt, Artificial Sequence
  Description of Artificial Sequence: Synthetic oligonucleotide
  Sense strand starting at position 3921 of SEQ ID NO: 1882472
uagucucaguaguuacaca

SEQ ID NO: 2123853 - RNA, 19 nt, Artificial Sequence
  Description of Artificial Sequence: Synthetic oligonucleotide
  Antisense strand to SEQ ID NO: 2123852
uguguaacuacugagacua

SEQ ID NO: 2123854 - RNA, 19 nt, Artificial Sequence
  Description of Artificial Sequence: Synthetic oligonucleotide
  Sense strand starting at position 3976 of SEQ ID NO: 1882472
ugggacaugucagacauau

SEQ ID NO: 2123855 - RNA, 19 nt, Artificial Sequence
  Description of Artificial Sequence: Synthetic oligonucleotide
  Antisense strand to SEQ ID NO: 2123854
auaugucugacauguccca

SEQ ID NO: 2123856 - RNA, 19 nt, Artificial Sequence
  Description of Artificial Sequence: Synthetic oligonucleotide
  Sense strand starting at position 95 of SEQ ID NO: 1882473
agucuucuggcucaaauau

SEQ ID NO: 2123857 - RNA, 19 nt, Artificial Sequence
  Description of Artificial Sequence: Synthetic oligonucleotide
  Antisense strand to SEQ ID NO: 2123856
auauuugagccagaagacu

SEQ ID NO: 2123858 - RNA, 19 nt, Artificial Sequence
  Description of Artificial Sequence: Synthetic oligonucleotide
  Sense strand starting at position 251 of SEQ ID NO: 1882473
aguugaacuuaguuaucuu

SEQ ID NO: 2123859 - RNA, 19 nt, Artificial Sequence
  Description of Artificial Sequence: Synthetic oligonucleotide
  Antisense strand to SEQ ID NO: 2123858
aagauaacuaaguucaacu

SEQ ID NO: 2123860 - RNA, 19 nt, Artificial Sequence
  Description of Artificial Sequence: Synthetic oligonucleotide
  Sense strand starting at position 268 of SEQ ID NO: 1882473
uuacgccugucauuugauu

SEQ ID NO: 2123861 - RNA, 19 nt, Artificial Sequence
  Description of Artificial Sequence: Synthetic oligonucleotide
  Antisense strand to SEQ ID NO: 2123860
aaucaaaugacaggcguaa

SEQ ID NO: 2123862 - RNA, 19 nt, Artificial Sequence
  Description of Artificial Sequence: Synthetic oligonucleotide
  Sense strand starting at position 336 of SEQ ID NO: 1882473
augacugcucaauaugcuu

SEQ ID NO: 2123863 - RNA, 19 nt, Artificial Sequence
  Description of Artificial Sequence: Synthetic oligonucleotide
  Antisense strand to SEQ ID NO: 2123862
aagcauauugagcagucau

SEQ ID NO: 2123864 - RNA, 19 nt, Artificial Sequence
  Description of Artificial Sequence: Synthetic oligonucleotide
  Sense strand starting at position 412 of SEQ ID NO: 1882473
gcaugaaauguacaugcau

SEQ ID NO: 2123865 - RNA, 19 nt, Artificial Sequence
  Description of Artificial Sequence: Synthetic oligonucleotide
  Antisense strand to SEQ ID NO: 2123864
augcauguacauuucaugc

SEQ ID NO: 2123866 - RNA, 19 nt, Artificial Sequence
  Description of Artificial Sequence: Synthetic oligonucleotide
  Sense strand starting at position 654 of SEQ ID NO: 1882473
ugcuuuaaauauguacuga

SEQ ID NO: 2123867 - RNA, 19 nt, Artificial Sequence
  Description of Artificial Sequence: Synthetic oligonucleotide
  Antisense strand to SEQ ID NO: 2123866
ucaguacauauuuaaagca

SEQ ID NO: 2123868 - RNA, 19 nt, Artificial Sequence
  Description of Artificial Sequence: Synthetic oligonucleotide
  Sense strand starting at position 945 of SEQ ID NO: 1882473
guggcuaugauugaugacu

SEQ ID NO: 2123869 - RNA, 19 nt, Artificial Sequence
  Description of Artificial Sequence: Synthetic oligonucleotide
  Antisense strand to SEQ ID NO: 2123868
agucaucaaucauagccac

SEQ ID NO: 2123870 - RNA, 19 nt, Artificial Sequence
  Description of Artificial Sequence: Synthetic oligonucleotide
  Sense strand starting at position 963 of SEQ ID NO: 1882473
ugucauagcugggugagaa

SEQ ID NO: 2123871 - RNA, 19 nt, Artificial Sequence
  Description of Artificial Sequence: Synthetic oligonucleotide
  Antisense strand to SEQ ID NO: 2123870
uucucacccagcuaugaca

SEQ ID NO: 2123872 - RNA, 19 nt, Artificial Sequence
  Description of Artificial Sequence: Synthetic oligonucleotide
  Sense strand starting at position 977 of SEQ ID NO: 1882473
gagaauacaugaggauuua

SEQ ID NO: 2123873 - RNA, 19 nt, Artificial Sequence
  Description of Artificial Sequence: Synthetic oligonucleotide
  Antisense strand to SEQ ID NO: 2123872
uaaauccucauguauucuc

SEQ ID NO: 2123874 - RNA, 19 nt, Artificial Sequence
  Description of Artificial Sequence: Synthetic oligonucleotide
  Sense strand starting at position 987 of SEQ ID NO: 1882473
gaggauuuauuauaccagu

SEQ ID NO: 2123875 - RNA, 19 nt, Artificial Sequence
  Description of Artificial Sequence: Synthetic oligonucleotide
  Antisense strand to SEQ ID NO: 2123874
acugguauaauaaauccuc

SEQ ID NO: 2123876 - RNA, 19 nt, Artificial Sequence
  Description of Artificial Sequence: Synthetic oligonucleotide
  Sense strand starting at position 1111 of SEQ ID NO: 1882473
augaaacaucaauguagug

SEQ ID NO: 2123877 - RNA, 19 nt, Artificial Sequence
  Description of Artificial Sequence: Synthetic oligonucleotide
  Antisense strand to SEQ ID NO: 2123876
cacuacauugauguuucau

SEQ ID NO: 2123878 - RNA, 19 nt, Artificial Sequence
  Description of Artificial Sequence: Synthetic oligonucleotide
  Sense strand starting at position 1356 of SEQ ID NO: 1882473
auuguuuaaagugagguua

SEQ ID NO: 2123879 - RNA, 19 nt, Artificial Sequence
  Description of Artificial Sequence: Synthetic oligonucleotide
  Antisense strand to SEQ ID NO: 2123878
uaaccucacuuuaaacaau

SEQ ID NO: 2123880 - RNA, 19 nt, Artificial Sequence
  Description of Artificial Sequence: Synthetic oligonucleotide
  Sense strand starting at position 1364 of SEQ ID NO: 1882473
aagugagguuaguuccuaa

SEQ ID NO: 2123881 - RNA, 19 nt, Artificial Sequence
  Description of Artificial Sequence: Synthetic oligonucleotide
  Antisense strand to SEQ ID NO: 2123880
uuaggaacuaaccucacuu

SEQ ID NO: 2123882 - RNA, 19 nt, Artificial Sequence
  Description of Artificial Sequence: Synthetic oligonucleotide
  Sense strand starting at position 1367 of SEQ ID NO: 1882473
ugagguuaguuccuaauac

SEQ ID NO: 2123883 - RNA, 19 nt, Artificial Sequence
  Description of Artificial Sequence: Synthetic oligonucleotide
  Antisense strand to SEQ ID NO: 2123882
guauuaggaacuaaccuca

SEQ ID NO: 2123884 - RNA, 19 nt, Artificial Sequence
  Description of Artificial Sequence: Synthetic oligonucleotide
  Sense strand starting at position 1419 of SEQ ID NO: 1882473
gguaacucuaagggugaua

SEQ ID NO: 2123885 - RNA, 19 nt, Artificial Sequence
  Description of Artificial Sequence: Synthetic oligonucleotide
  Antisense strand to SEQ ID NO: 2123884
uaucacccuuagaguuacc

SEQ ID NO: 2123886 - RNA, 19 nt, Artificial Sequence
  Description of Artificial Sequence: Synthetic oligonucleotide
  Sense strand starting at position 1421 of SEQ ID NO: 1882473
uaacucuaagggugauaua

SEQ ID NO: 2123887 - RNA, 19 nt, Artificial Sequence
  Description of Artificial Sequence: Synthetic oligonucleotide
  Antisense strand to SEQ ID NO: 2123886
uauaucacccuuagaguua

SEQ ID NO: 2123888 - RNA, 19 nt, Artificial Sequence
  Description of Artificial Sequence: Synthetic oligonucleotide
  Sense strand starting at position 1993 of SEQ ID NO: 1882473
gcaguugugcccuauuuga

SEQ ID NO: 2123889 - RNA, 19 nt, Artificial Sequence
  Description of Artificial Sequence: Synthetic oligonucleotide
  Antisense strand to SEQ ID NO: 2123888
ucaaauagggcacaacugc

SEQ ID NO: 2123890 - RNA, 19 nt, Artificial Sequence
  Description of Artificial Sequence: Synthetic oligonucleotide
  Sense strand starting at position 2109 of SEQ ID NO: 1882473
uguggaaaugaauggcuua

SEQ ID NO: 2123891 - RNA, 19 nt, Artificial Sequence
  Description of Artificial Sequence: Synthetic oligonucleotide
  Antisense strand to SEQ ID NO: 2123890
uaagccauucauuuccaca

SEQ ID NO: 2123892 - RNA, 19 nt, Artificial Sequence
  Description of Artificial Sequence: Synthetic oligonucleotide
  Sense strand starting at position 2110 of SEQ ID NO: 1882473
guggaaaugaauggcuuaa

SEQ ID NO: 2123893 - RNA, 19 nt, Artificial Sequence
  Description of Artificial Sequence: Synthetic oligonucleotide
  Antisense strand to SEQ ID NO: 2123892
uuaagccauucauuuccac

SEQ ID NO: 2123894 - RNA, 19 nt, Artificial Sequence
  Description of Artificial Sequence: Synthetic oligonucleotide
  Sense strand starting at position 2408 of SEQ ID NO: 1882473
uuagaaguaggguggaaua

SEQ ID NO: 2123895 - RNA, 19 nt, Artificial Sequence
  Description of Artificial Sequence: Synthetic oligonucleotide
  Antisense strand to SEQ ID NO: 2123894
uauuccacccuacuucuaa

SEQ ID NO: 2123896 - RNA, 19 nt, Artificial Sequence
  Description of Artificial Sequence: Synthetic oligonucleotide
  Sense strand starting at position 2419 of SEQ ID NO: 1882473
guggaauauaacuaguguu

SEQ ID NO: 2123897 - RNA, 19 nt, Artificial Sequence
  Description of Artificial Sequence: Synthetic oligonucleotide
  Antisense strand to SEQ ID NO: 2123896
aacacuaguuauauuccac

SEQ ID NO: 2123898 - RNA, 19 nt, Artificial Sequence
  Description of Artificial Sequence: Synthetic oligonucleotide
  Sense strand starting at position 2468 of SEQ ID NO: 1882473
uguagaauaugaucccagu

SEQ ID NO: 2123899 - RNA, 19 nt, Artificial Sequence
  Description of Artificial Sequence: Synthetic oligonucleotide
  Antisense strand to SEQ ID NO: 2123898
acugggaucauauucuaca

SEQ ID NO: 2123900 - RNA, 19 nt, Artificial Sequence
  Description of Artificial Sequence: Synthetic oligonucleotide
  Sense strand starting at position 2591 of SEQ ID NO: 1882473
aggugauuaugucuggaua

SEQ ID NO: 2123901 - RNA, 19 nt, Artificial Sequence
  Description of Artificial Sequence: Synthetic oligonucleotide
  Antisense strand to SEQ ID NO: 2123900
uauccagacauaaucaccu

SEQ ID NO: 2123902 - RNA, 19 nt, Artificial Sequence
  Description of Artificial Sequence: Synthetic oligonucleotide
  Sense strand starting at position 2592 of SEQ ID NO: 1882473
ggugauuaugucuggauag

SEQ ID NO: 2123903 - RNA, 19 nt, Artificial Sequence
  Description of Artificial Sequence: Synthetic oligonucleotide
  Antisense strand to SEQ ID NO: 2123902
cuauccagacauaaucacc

SEQ ID NO: 2123904 - RNA, 19 nt, Artificial Sequence
  Description of Artificial Sequence: Synthetic oligonucleotide
  Sense strand starting at position 2594 of SEQ ID NO: 1882473
ugauuaugucuggauagua

SEQ ID NO: 2123905 - RNA, 19 nt, Artificial Sequence
  Description of Artificial Sequence: Synthetic oligonucleotide
  Antisense strand to SEQ ID NO: 2123904
uacuauccagacauaauca

SEQ ID NO: 2123906 - RNA, 19 nt, Artificial Sequence
  Description of Artificial Sequence: Synthetic oligonucleotide
  Sense strand starting at position 2676 of SEQ ID NO: 1882473
gaaagacgccuagaaaugu

SEQ ID NO: 2123907 - RNA, 19 nt, Artificial Sequence
  Description of Artificial Sequence: Synthetic oligonucleotide
  Antisense strand to SEQ ID NO: 2123906
acauuucuaggcgucuuuc

SEQ ID NO: 2123908 - RNA, 19 nt, Artificial Sequence
  Description of Artificial Sequence: Synthetic oligonucleotide
  Sense strand starting at position 2799 of SEQ ID NO: 1882473
uuccucgggucauuacaaa

SEQ ID NO: 2123909 - RNA, 19 nt, Artificial Sequence
  Description of Artificial Sequence: Synthetic oligonucleotide
  Antisense strand to SEQ ID NO: 2123908
uuuguaaugacccgaggaa

SEQ ID NO: 2123910 - RNA, 19 nt, Artificial Sequence
  Description of Artificial Sequence: Synthetic oligonucleotide
  Sense strand starting at position 2819 of SEQ ID NO: 1882473
gggagcuguaugggacuua

SEQ ID NO: 2123911 - RNA, 19 nt, Artificial Sequence
  Description of Artificial Sequence: Synthetic oligonucleotide
  Antisense strand to SEQ ID NO: 2123910
uaagucccauacagcuccc

SEQ ID NO: 2123912 - RNA, 19 nt, Artificial Sequence
  Description of Artificial Sequence: Synthetic oligonucleotide
  Sense strand starting at position 2867 of SEQ ID NO: 1882473
guuuguuaagguuacuaag

SEQ ID NO: 2123913 - RNA, 19 nt, Artificial Sequence
  Description of Artificial Sequence: Synthetic oligonucleotide
  Antisense strand to SEQ ID NO: 2123912
cuuaguaaccuuaacaaac

SEQ ID NO: 2123914 - RNA, 19 nt, Artificial Sequence
  Description of Artificial Sequence: Synthetic oligonucleotide
  Sense strand starting at position 2876 of SEQ ID NO: 1882473
gguuacuaagcuuaaguaa

SEQ ID NO: 2123915 - RNA, 19 nt, Artificial Sequence
  Description of Artificial Sequence: Synthetic oligonucleotide
  Antisense strand to SEQ ID NO: 2123914
uuacuuaagcuuaguaacc

SEQ ID NO: 2123916 - RNA, 19 nt, Artificial Sequence
  Description of Artificial Sequence: Synthetic oligonucleotide
  Sense strand starting at position 2906 of SEQ ID NO: 1882473
acacauuauccuugggucu

SEQ ID NO: 2123917 - RNA, 19 nt, Artificial Sequence
  Description of Artificial Sequence: Synthetic oligonucleotide
  Antisense strand to SEQ ID NO: 2123916
agacccaaggauaaugugu

SEQ ID NO: 2123918 - RNA, 19 nt, Artificial Sequence
  Description of Artificial Sequence: Synthetic oligonucleotide
  Sense strand starting at position 3167 of SEQ ID NO: 1882473
ggagucuaugagugauucu

SEQ ID NO: 2123919 - RNA, 19 nt, Artificial Sequence
  Description of Artificial Sequence: Synthetic oligonucleotide
  Antisense strand to SEQ ID NO: 2123918
agaaucacucauagacucc

SEQ ID NO: 2123920 - RNA, 19 nt, Artificial Sequence
  Description of Artificial Sequence: Synthetic oligonucleotide
  Sense strand starting at position 3174 of SEQ ID NO: 1882473
augagugauucuccuuuaa

SEQ ID NO: 2123921 - RNA, 19 nt, Artificial Sequence
  Description of Artificial Sequence: Synthetic oligonucleotide
  Antisense strand to SEQ ID NO: 2123920
uuaaaggagaaucacucau

SEQ ID NO: 2123922 - RNA, 19 nt, Artificial Sequence
  Description of Artificial Sequence: Synthetic oligonucleotide
  Sense strand starting at position 3385 of SEQ ID NO: 1882473
auacaagagcacuguacau

SEQ ID NO: 2123923 - RNA, 19 nt, Artificial Sequence
  Description of Artificial Sequence: Synthetic oligonucleotide
  Antisense strand to SEQ ID NO: 2123922
auguacagugcucuuguau

SEQ ID NO: 2123924 - RNA, 19 nt, Artificial Sequence
  Description of Artificial Sequence: Synthetic oligonucleotide
  Sense strand starting at position 3395 of SEQ ID NO: 1882473
acuguacaucugcauacau

SEQ ID NO: 2123925 - RNA, 19 nt, Artificial Sequence
  Description of Artificial Sequence: Synthetic oligonucleotide
  Antisense strand to SEQ ID NO: 2123924
auguaugcagauguacagu

SEQ ID NO: 2123926 - RNA, 19 nt, Artificial Sequence
  Description of Artificial Sequence: Synthetic oligonucleotide
  Sense strand starting at position 3397 of SEQ ID NO: 1882473
uguacaucugcauacauua

SEQ ID NO: 2123927 - RNA, 19 nt, Artificial Sequence
  Description of Artificial Sequence: Synthetic oligonucleotide
  Antisense strand to SEQ ID NO: 2123926
uaauguaugcagauguaca

SEQ ID NO: 2123928 - RNA, 19 nt, Artificial Sequence
  Description of Artificial Sequence: Synthetic oligonucleotide
  Sense strand starting at position 3549 of SEQ ID NO: 1882473
gccuauaagggucauagca

SEQ ID NO: 2123929 - RNA, 19 nt, Artificial Sequence
  Description of Artificial Sequence: Synthetic oligonucleotide
  Antisense strand to SEQ ID NO: 2123928
ugcuaugacccuuauaggc

SEQ ID NO: 2123930 - RNA, 19 nt, Artificial Sequence
  Description of Artificial Sequence: Synthetic oligonucleotide
  Sense strand starting at position 3597 of SEQ ID NO: 1882473
uccaaaguacugugaauuc

SEQ ID NO: 2123931 - RNA, 19 nt, Artificial Sequence
  Description of Artificial Sequence: Synthetic oligonucleotide
  Antisense strand to SEQ ID NO: 2123930
gaauucacaguacuuugga

SEQ ID NO: 2123932 - RNA, 19 nt, Artificial Sequence
  Description of Artificial Sequence: Synthetic oligonucleotide
  Sense strand starting at position 3946 of SEQ ID NO: 1882473
uucuaagaagucuauguua

SEQ ID NO: 2123933 - RNA, 19 nt, Artificial Sequence
  Description of Artificial Sequence: Synthetic oligonucleotide
  Antisense strand to SEQ ID NO: 2123932
uaacauagacuucuuagaa

SEQ ID NO: 2123934 - RNA, 19 nt, Artificial Sequence
  Description of Artificial Sequence: Synthetic oligonucleotide
  Sense strand starting at position 3948 of SEQ ID NO: 1882473
cuaagaagucuauguuaua

SEQ ID NO: 2123935 - RNA, 19 nt, Artificial Sequence
  Description of Artificial Sequence: Synthetic oligonucleotide
  Antisense strand to SEQ ID NO: 2123934
uauaacauagacuucuuag

SEQ ID NO: 2123936 - RNA, 19 nt, Artificial Sequence
  Description of Artificial Sequence: Synthetic oligonucleotide
  Sense strand starting at position 126 of SEQ ID NO: 1882474
ugggcugugagugaacaau

SEQ ID NO: 2123937 - RNA, 19 nt, Artificial Sequence
  Description of Artificial Sequence: Synthetic oligonucleotide
  Antisense strand to SEQ ID NO: 2123936
auuguucacucacagccca

SEQ ID NO: 2123938 - RNA, 19 nt, Artificial Sequence
  Description of Artificial Sequence: Synthetic oligonucleotide
  Sense strand starting at position 163 of SEQ ID NO: 1882474
uagggugauucuuccuaca

SEQ ID NO: 2123939 - RNA, 19 nt, Artificial Sequence
  Description of Artificial Sequence: Synthetic oligonucleotide
  Antisense strand to SEQ ID NO: 2123938
uguaggaagaaucacccua

SEQ ID NO: 2123940 - RNA, 19 nt, Artificial Sequence
  Description of Artificial Sequence: Synthetic oligonucleotide
  Sense strand starting at position 165 of SEQ ID NO: 1882474
gggugauucuuccuacaca

SEQ ID NO: 2123941 - RNA, 19 nt, Artificial Sequence
  Description of Artificial Sequence: Synthetic oligonucleotide
  Antisense strand to SEQ ID NO: 2123940
uguguaggaagaaucaccc

SEQ ID NO: 2123942 - RNA, 19 nt, Artificial Sequence
  Description of Artificial Sequence: Synthetic oligonucleotide
  Sense strand starting at position 239 of SEQ ID NO: 1882474
auuggucugccagaaucua

SEQ ID NO: 2123943 - RNA, 19 nt, Artificial Sequence
  Description of Artificial Sequence: Synthetic oligonucleotide
  Antisense strand to SEQ ID NO: 2123942
uagauucuggcagaccaau

SEQ ID NO: 2123944 - RNA, 19 nt, Artificial Sequence
  Description of Artificial Sequence: Synthetic oligonucleotide
  Sense strand starting at position 344 of SEQ ID NO: 1882474
acgcucucaggauaaaguu

SEQ ID NO: 2123945 - RNA, 19 nt, Artificial Sequence
  Description of Artificial Sequence: Synthetic oligonucleotide
  Antisense strand to SEQ ID NO: 2123944
aacuuuauccugagagcgu

SEQ ID NO: 2123946 - RNA, 19 nt, Artificial Sequence
  Description of Artificial Sequence: Synthetic oligonucleotide
  Sense strand starting at position 649 of SEQ ID NO: 1882474
ucaagagcuguugagaugu

SEQ ID NO: 2123947 - RNA, 19 nt, Artificial Sequence
  Description of Artificial Sequence: Synthetic oligonucleotide
  Antisense strand to SEQ ID NO: 2123946
acaucucaacagcucuuga

SEQ ID NO: 2123948 - RNA, 19 nt, Artificial Sequence
  Description of Artificial Sequence: Synthetic oligonucleotide
  Sense strand starting at position 774 of SEQ ID NO: 1882474
cuugacugugaggaguaua

SEQ ID NO: 2123949 - RNA, 19 nt, Artificial Sequence
  Description of Artificial Sequence: Synthetic oligonucleotide
  Antisense strand to SEQ ID NO: 2123948
uauacuccucacagucaag

SEQ ID NO: 2123950 - RNA, 19 nt, Artificial Sequence
  Description of Artificial Sequence: Synthetic oligonucleotide
  Sense strand starting at position 777 of SEQ ID NO: 1882474
gacugugaggaguauaucu

SEQ ID NO: 2123951 - RNA, 19 nt, Artificial Sequence
  Description of Artificial Sequence: Synthetic oligonucleotide
  Antisense strand to SEQ ID NO: 2123950
agauauacuccucacaguc

SEQ ID NO: 2123952 - RNA, 19 nt, Artificial Sequence
  Description of Artificial Sequence: Synthetic oligonucleotide
  Sense strand starting at position 779 of SEQ ID NO: 1882474
cugugaggaguauaucuua

SEQ ID NO: 2123953 - RNA, 19 nt, Artificial Sequence
  Description of Artificial Sequence: Synthetic oligonucleotide
  Antisense strand to SEQ ID NO: 2123952
uaagauauacuccucacag

SEQ ID NO: 2123954 - RNA, 19 nt, Artificial Sequence
  Description of Artificial Sequence: Synthetic oligonucleotide
  Sense strand starting at position 782 of SEQ ID NO: 1882474
ugaggaguauaucuuauua

SEQ ID NO: 2123955 - RNA, 19 nt, Artificial Sequence
  Description of Artificial Sequence: Synthetic oligonucleotide
  Antisense strand to SEQ ID NO: 2123954
uaauaagauauacuccuca

SEQ ID NO: 2123956 - RNA, 19 nt, Artificial Sequence
  Description of Artificial Sequence: Synthetic oligonucleotide
  Sense strand starting at position 891 of SEQ ID NO: 1882474
aaguuauguguuuaugaga

SEQ ID NO: 2123957 - RNA, 19 nt, Artificial Sequence
  Description of Artificial Sequence: Synthetic oligonucleotide
  Antisense strand to SEQ ID NO: 2123956
ucucauaaacacauaacuu

SEQ ID NO: 2123958 - RNA, 19 nt, Artificial Sequence
  Description of Artificial Sequence: Synthetic oligonucleotide
  Sense strand starting at position 1150 of SEQ ID NO: 1882474
ggaaguuacccuuauuccu

SEQ ID NO: 2123959 - RNA, 19 nt, Artificial Sequence
  Description of Artificial Sequence: Synthetic oligonucleotide
  Antisense strand to SEQ ID NO: 2123958
aggaauaaggguaacuucc

SEQ ID NO: 2123960 - RNA, 19 nt, Artificial Sequence
  Description of Artificial Sequence: Synthetic oligonucleotide
  Sense strand starting at position 1201 of SEQ ID NO: 1882474
uuuaccuauccugauguua

SEQ ID NO: 2123961 - RNA, 19 nt, Artificial Sequence
  Description of Artificial Sequence: Synthetic oligonucleotide
  Antisense strand to SEQ ID NO: 2123960
uaacaucaggauagguaaa

SEQ ID NO: 2123962 - RNA, 19 nt, Artificial Sequence
  Description of Artificial Sequence: Synthetic oligonucleotide
  Sense strand starting at position 1335 of SEQ ID NO: 1882474
aaggauaagcuaggugauu

SEQ ID NO: 2123963 - RNA, 19 nt, Artificial Sequence
  Description of Artificial Sequence: Synthetic oligonucleotide
  Antisense strand to SEQ ID NO: 2123962
aaucaccuagcuuauccuu

SEQ ID NO: 2123964 - RNA, 19 nt, Artificial Sequence
  Description of Artificial Sequence: Synthetic oligonucleotide
  Sense strand starting at position 1405 of SEQ ID NO: 1882474
guuugauagcaucaucauu

SEQ ID NO: 2123965 - RNA, 19 nt, Artificial Sequence
  Description of Artificial Sequence: Synthetic oligonucleotide
  Antisense strand to SEQ ID NO: 2123964
aaugaugaugcuaucaaac

SEQ ID NO: 2123966 - RNA, 19 nt, Artificial Sequence
  Description of Artificial Sequence: Synthetic oligonucleotide
  Sense strand starting at position 1473 of SEQ ID NO: 1882474
ggagccuuuggccagaaca

SEQ ID NO: 2123967 - RNA, 19 nt, Artificial Sequence
  Description of Artificial Sequence: Synthetic oligonucleotide
  Antisense strand to SEQ ID NO: 2123966
uguucuggccaaaggcucc

SEQ ID NO: 2123968 - RNA, 19 nt, Artificial Sequence
  Description of Artificial Sequence: Synthetic oligonucleotide
  Sense strand starting at position 1475 of SEQ ID NO: 1882474
agccuuuggccagaacauu

SEQ ID NO: 2123969 - RNA, 19 nt, Artificial Sequence
  Description of Artificial Sequence: Synthetic oligonucleotide
  Antisense strand to SEQ ID NO: 2123968
aauguucuggccaaaggcu

SEQ ID NO: 2123970 - RNA, 19 nt, Artificial Sequence
  Description of Artificial Sequence: Synthetic oligonucleotide
  Sense strand starting at position 1486 of SEQ ID NO: 1882474
agaacauuccugcauaguc

SEQ ID NO: 2123971 - RNA, 19 nt, Artificial Sequence
  Description of Artificial Sequence: Synthetic oligonucleotide
  Antisense strand to SEQ ID NO: 2123970
gacuaugcaggaauguucu

SEQ ID NO: 2123972 - RNA, 19 nt, Artificial Sequence
  Description of Artificial Sequence: Synthetic oligonucleotide
  Sense strand starting at position 1569 of SEQ ID NO: 1882474
agcagaaguugagugacau

SEQ ID NO: 2123973 - RNA, 19 nt, Artificial Sequence
  Description of Artificial Sequence: Synthetic oligonucleotide
  Antisense strand to SEQ ID NO: 2123972
augucacucaacuucugcu

SEQ ID NO: 2123974 - RNA, 19 nt, Artificial Sequence
  Description of Artificial Sequence: Synthetic oligonucleotide
  Sense strand starting at position 1601 of SEQ ID NO: 1882474
cucagaagucagcaaucuu

SEQ ID NO: 2123975 - RNA, 19 nt, Artificial Sequence
  Description of Artificial Sequence: Synthetic oligonucleotide
  Antisense strand to SEQ ID NO: 2123974
aagauugcugacuucugag

SEQ ID NO: 2123976 - RNA, 19 nt, Artificial Sequence
  Description of Artificial Sequence: Synthetic oligonucleotide
  Sense strand starting at position 1686 of SEQ ID NO: 1882474
auuggagucuacuucuuga

SEQ ID NO: 2123977 - RNA, 19 nt, Artificial Sequence
  Description of Artificial Sequence: Synthetic oligonucleotide
  Antisense strand to SEQ ID NO: 2123976
ucaagaaguagacuccaau

SEQ ID NO: 2123978 - RNA, 19 nt, Artificial Sequence
  Description of Artificial Sequence: Synthetic oligonucleotide
  Sense strand starting at position 1808 of SEQ ID NO: 1882474
cuugucucucaguacacau

SEQ ID NO: 2123979 - RNA, 19 nt, Artificial Sequence
  Description of Artificial Sequence: Synthetic oligonucleotide
  Antisense strand to SEQ ID NO: 2123978
auguguacugagagacaag

SEQ ID NO: 2123980 - RNA, 19 nt, Artificial Sequence
  Description of Artificial Sequence: Synthetic oligonucleotide
  Sense strand starting at position 1829 of SEQ ID NO: 1882474
gcuuccucuguguuuaguu

SEQ ID NO: 2123981 - RNA, 19 nt, Artificial Sequence
  Description of Artificial Sequence: Synthetic oligonucleotide
  Antisense strand to SEQ ID NO: 2123980
aacuaaacacagaggaagc

SEQ ID NO: 2123982 - RNA, 19 nt, Artificial Sequence
  Description of Artificial Sequence: Synthetic oligonucleotide
  Sense strand starting at position 1905 of SEQ ID NO: 1882474
caguauguuguagaaguaa

SEQ ID NO: 2123983 - RNA, 19 nt, Artificial Sequence
  Description of Artificial Sequence: Synthetic oligonucleotide
  Antisense strand to SEQ ID NO: 2123982
uuacuucuacaacauacug

SEQ ID NO: 2123984 - RNA, 19 nt, Artificial Sequence
  Description of Artificial Sequence: Synthetic oligonucleotide
  Sense strand starting at position 1922 of SEQ ID NO: 1882474
aagugugcuuuagcauuua

SEQ ID NO: 2123985 - RNA, 19 nt, Artificial Sequence
  Description of Artificial Sequence: Synthetic oligonucleotide
  Antisense strand to SEQ ID NO: 2123984
uaaaugcuaaagcacacuu

SEQ ID NO: 2123986 - RNA, 19 nt, Artificial Sequence
  Description of Artificial Sequence: Synthetic oligonucleotide
  Sense strand starting at position 2070 of SEQ ID NO: 1882474
guaagugacauugguggaa

SEQ ID NO: 2123987 - RNA, 19 nt, Artificial Sequence
  Description of Artificial Sequence: Synthetic oligonucleotide
  Antisense strand to SEQ ID NO: 2123986
uuccaccaaugucacuuac

SEQ ID NO: 2123988 - RNA, 19 nt, Artificial Sequence
  Description of Artificial Sequence: Synthetic oligonucleotide
  Sense strand starting at position 2102 of SEQ ID NO: 1882474
agucacauugguggaagua

SEQ ID NO: 2123989 - RNA, 19 nt, Artificial Sequence
  Description of Artificial Sequence: Synthetic oligonucleotide
  Antisense strand to SEQ ID NO: 2123988
uacuuccaccaaugugacu

SEQ ID NO: 2123990 - RNA, 19 nt, Artificial Sequence
  Description of Artificial Sequence: Synthetic oligonucleotide
  Sense strand starting at position 2103 of SEQ ID NO: 1882474
gucacauugguggaaguau

SEQ ID NO: 2123991 - RNA, 19 nt, Artificial Sequence
  Description of Artificial Sequence: Synthetic oligonucleotide
  Antisense strand to SEQ ID NO: 2123990
auacuuccaccaaugugac

SEQ ID NO: 2123992 - RNA, 19 nt, Artificial Sequence
  Description of Artificial Sequence: Synthetic oligonucleotide
  Sense strand starting at position 2111 of SEQ ID NO: 1882474
gguggaaguaugcagacau

SEQ ID NO: 2123993 - RNA, 19 nt, Artificial Sequence
  Description of Artificial Sequence: Synthetic oligonucleotide
  Antisense strand to SEQ ID NO: 2123992
augucugcauacuuccacc

SEQ ID NO: 2123994 - RNA, 19 nt, Artificial Sequence
  Description of Artificial Sequence: Synthetic oligonucleotide
  Sense strand starting at position 2279 of SEQ ID NO: 1882474
gagggauaguuucucuuaa

SEQ ID NO: 2123995 - RNA, 19 nt, Artificial Sequence
  Description of Artificial Sequence: Synthetic oligonucleotide
  Antisense strand to SEQ ID NO: 2123994
uuaagagaaacuaucccuc

SEQ ID NO: 2123996 - RNA, 19 nt, Artificial Sequence
  Description of Artificial Sequence: Synthetic oligonucleotide
  Sense strand starting at position 2280 of SEQ ID NO: 1882474
agggauaguuucucuuaaa

SEQ ID NO: 2123997 - RNA, 19 nt, Artificial Sequence
  Description of Artificial Sequence: Synthetic oligonucleotide
  Antisense strand to SEQ ID NO: 2123996
uuuaagagaaacuaucccu

SEQ ID NO: 2123998 - RNA, 19 nt, Artificial Sequence
  Description of Artificial Sequence: Synthetic oligonucleotide
  Sense strand starting at position 2344 of SEQ ID NO: 1882474
guaguacgacauugagaau

SEQ ID NO: 2123999 - RNA, 19 nt, Artificial Sequence
  Description of Artificial Sequence: Synthetic oligonucleotide
  Antisense strand to SEQ ID NO: 2123998
auucucaaugucguacuac

SEQ ID NO: 2124000 - RNA, 19 nt, Artificial Sequence
  Description of Artificial Sequence: Synthetic oligonucleotide
  Sense strand starting at position 2853 of SEQ ID NO: 1882474
uuuggauggguguagaauu

SEQ ID NO: 2124001 - RNA, 19 nt, Artificial Sequence
  Description of Artificial Sequence: Synthetic oligonucleotide
  Antisense strand to SEQ ID NO: 2124000
aauucuacacccauccaaa

SEQ ID NO: 2124002 - RNA, 19 nt, Artificial Sequence
  Description of Artificial Sequence: Synthetic oligonucleotide
  Sense strand starting at position 2931 of SEQ ID NO: 1882474
gcugaagagcuuuaacuga

SEQ ID NO: 2124003 - RNA, 19 nt, Artificial Sequence
  Description of Artificial Sequence: Synthetic oligonucleotide
  Antisense strand to SEQ ID NO: 2124002
ucaguuaaagcucuucagc

SEQ ID NO: 2124004 - RNA, 19 nt, Artificial Sequence
  Description of Artificial Sequence: Synthetic oligonucleotide
  Sense strand starting at position 3148 of SEQ ID NO: 1882474
uucggugucacacaauaga

SEQ ID NO: 2124005 - RNA, 19 nt, Artificial Sequence
  Description of Artificial Sequence: Synthetic oligonucleotide
  Antisense strand to SEQ ID NO: 2124004
ucuauugugugacaccgaa

SEQ ID NO: 2124006 - RNA, 19 nt, Artificial Sequence
  Description of Artificial Sequence: Synthetic oligonucleotide
  Sense strand starting at position 3386 of SEQ ID NO: 1882474
aggagaaacuuugucucua

SEQ ID NO: 2124007 - RNA, 19 nt, Artificial Sequence
  Description of Artificial Sequence: Synthetic oligonucleotide
  Antisense strand to SEQ ID NO: 2124006
uagagacaaaguuucuccu

SEQ ID NO: 2124008 - RNA, 19 nt, Artificial Sequence
  Description of Artificial Sequence: Synthetic oligonucleotide
  Sense strand starting at position 3911 of SEQ ID NO: 1882474
cuaugcucacacgaaauga

SEQ ID NO: 2124009 - RNA, 19 nt, Artificial Sequence
  Description of Artificial Sequence: Synthetic oligonucleotide
  Antisense strand to SEQ ID NO: 2124008
ucauuucgugugagcauag

SEQ ID NO: 2124010 - RNA, 19 nt, Artificial Sequence
  Description of Artificial Sequence: Synthetic oligonucleotide
  Sense strand starting at position 3944 of SEQ ID NO: 1882474
agggaacuguucuuaacuu

SEQ ID NO: 2124011 - RNA, 19 nt, Artificial Sequence
  Description of Artificial Sequence: Synthetic oligonucleotide
  Antisense strand to SEQ ID NO: 2124010
aaguuaagaacaguucccu

SEQ ID NO: 2124012 - RNA, 19 nt, Artificial Sequence
  Description of Artificial Sequence: Synthetic oligonucleotide
  Sense strand starting at position 3974 of SEQ ID NO: 1882474
aucuaugucaggcagugaa

SEQ ID NO: 2124013 - RNA, 19 nt, Artificial Sequence
  Description of Artificial Sequence: Synthetic oligonucleotide
  Antisense strand to SEQ ID NO: 2124012
uucacugccugacauagau

SEQ ID NO: 2124014 - RNA, 19 nt, Artificial Sequence
  Description of Artificial Sequence: Synthetic oligonucleotide
  Sense strand starting at position 3978 of SEQ ID NO: 1882474
augucaggcagugaauagu

SEQ ID NO: 2124015 - RNA, 19 nt, Artificial Sequence
  Description of Artificial Sequence: Synthetic oligonucleotide
  Antisense strand to SEQ ID NO: 2124014
acuauucacugccugacau

SEQ ID NO: 2124016 - RNA, 19 nt, Artificial Sequence
  Description of Artificial Sequence: Synthetic oligonucleotide
  Sense strand starting at position 438 of SEQ ID NO: 1882475
uggcaauauuccucauaga

SEQ ID NO: 2124017 - RNA, 19 nt, Artificial Sequence
  Description of Artificial Sequence: Synthetic oligonucleotide
  Antisense strand to SEQ ID NO: 2124016
ucuaugaggaauauugcca

SEQ ID NO: 2124018 - RNA, 19 nt, Artificial Sequence
  Description of Artificial Sequence: Synthetic oligonucleotide
  Sense strand starting at position 439 of SEQ ID NO: 1882475
ggcaauauuccucauagau

SEQ ID NO: 2124019 - RNA, 19 nt, Artificial Sequence
  Description of Artificial Sequence: Synthetic oligonucleotide
  Antisense strand to SEQ ID NO: 2124018
aucuaugaggaauauugcc

SEQ ID NO: 2124020 - RNA, 19 nt, Artificial Sequence
  Description of Artificial Sequence: Synthetic oligonucleotide
  Sense strand starting at position 542 of SEQ ID NO: 1882475
ggagucacccauugaaaua

SEQ ID NO: 2124021 - RNA, 19 nt, Artificial Sequence
  Description of Artificial Sequence: Synthetic oligonucleotide
  Antisense strand to SEQ ID NO: 2124020
uauuucaaugggugacucc

SEQ ID NO: 2124022 - RNA, 19 nt, Artificial Sequence
  Description of Artificial Sequence: Synthetic oligonucleotide
  Sense strand starting at position 593 of SEQ ID NO: 1882475
gaguaacagcuguggaaau

SEQ ID NO: 2124023 - RNA, 19 nt, Artificial Sequence
  Description of Artificial Sequence: Synthetic oligonucleotide
  Antisense strand to SEQ ID NO: 2124022
auuuccacagcuguuacuc

SEQ ID NO: 2124024 - RNA, 19 nt, Artificial Sequence
  Description of Artificial Sequence: Synthetic oligonucleotide
  Sense strand starting at position 606 of SEQ ID NO: 1882475
ggaaaugaguguguuugag

SEQ ID NO: 2124025 - RNA, 19 nt, Artificial Sequence
  Description of Artificial Sequence: Synthetic oligonucleotide
  Antisense strand to SEQ ID NO: 2124024
cucaaacacacucauuucc

SEQ ID NO: 2124026 - RNA, 19 nt, Artificial Sequence
  Description of Artificial Sequence: Synthetic oligonucleotide
  Sense strand starting at position 608 of SEQ ID NO: 1882475
aaaugaguguguuugagau

SEQ ID NO: 2124027 - RNA, 19 nt, Artificial Sequence
  Description of Artificial Sequence: Synthetic oligonucleotide
  Antisense strand to SEQ ID NO: 2124026
aucucaaacacacucauuu

SEQ ID NO: 2124028 - RNA, 19 nt, Artificial Sequence
  Description of Artificial Sequence: Synthetic oligonucleotide
  Sense strand starting at position 649 of SEQ ID NO: 1882475
aaauccuaugucuggagua

SEQ ID NO: 2124029 - RNA, 19 nt, Artificial Sequence
  Description of Artificial Sequence: Synthetic oligonucleotide
  Antisense strand to SEQ ID NO: 2124028
uacuccagacauaggauuu

SEQ ID NO: 2124030 - RNA, 19 nt, Artificial Sequence
  Description of Artificial Sequence: Synthetic oligonucleotide
  Sense strand starting at position 651 of SEQ ID NO: 1882475
auccuaugucuggaguaau

SEQ ID NO: 2124031 - RNA, 19 nt, Artificial Sequence
  Description of Artificial Sequence: Synthetic oligonucleotide
  Antisense strand to SEQ ID NO: 2124030
auuacuccagacauaggau

SEQ ID NO: 2124032 - RNA, 19 nt, Artificial Sequence
  Description of Artificial Sequence: Synthetic oligonucleotide
  Sense strand starting at position 663 of SEQ ID NO: 1882475
gaguaauagcuguggaaau

SEQ ID NO: 2124033 - RNA, 19 nt, Artificial Sequence
  Description of Artificial Sequence: Synthetic oligonucleotide
  Antisense strand to SEQ ID NO: 2124032
auuuccacagcuauuacuc

SEQ ID NO: 2124034 - RNA, 19 nt, Artificial Sequence
  Description of Artificial Sequence: Synthetic oligonucleotide
  Sense strand starting at position 665 of SEQ ID NO: 1882475
guaauagcuguggaaauga

SEQ ID NO: 2124035 - RNA, 19 nt, Artificial Sequence
  Description of Artificial Sequence: Synthetic oligonucleotide
  Antisense strand to SEQ ID NO: 2124034
ucauuuccacagcuauuac

SEQ ID NO: 2124036 - RNA, 19 nt, Artificial Sequence
  Description of Artificial Sequence: Synthetic oligonucleotide
  Sense strand starting at position 675 of SEQ ID NO: 1882475
uggaaaugaguguguuuaa

SEQ ID NO: 2124037 - RNA, 19 nt, Artificial Sequence
  Description of Artificial Sequence: Synthetic oligonucleotide
  Antisense strand to SEQ ID NO: 2124036
uuaaacacacucauuucca

SEQ ID NO: 2124038 - RNA, 19 nt, Artificial Sequence
  Description of Artificial Sequence: Synthetic oligonucleotide
  Sense strand starting at position 676 of SEQ ID NO: 1882475
ggaaaugaguguguuuaag

SEQ ID NO: 2124039 - RNA, 19 nt, Artificial Sequence
  Description of Artificial Sequence: Synthetic oligonucleotide
  Antisense strand to SEQ ID NO: 2124038
cuuaaacacacucauuucc

SEQ ID NO: 2124040 - RNA, 19 nt, Artificial Sequence
  Description of Artificial Sequence: Synthetic oligonucleotide
  Sense strand starting at position 735 of SEQ ID NO: 1882475
gcaauagcuguggaaauga

SEQ ID NO: 2124041 - RNA, 19 nt, Artificial Sequence
  Description of Artificial Sequence: Synthetic oligonucleotide
  Antisense strand to SEQ ID NO: 2124040
ucauuuccacagcuauugc

SEQ ID NO: 2124042 - RNA, 19 nt, Artificial Sequence
  Description of Artificial Sequence: Synthetic oligonucleotide
  Sense strand starting at position 745 of SEQ ID NO: 1882475
uggaaaugaaugugucuga

SEQ ID NO: 2124043 - RNA, 19 nt, Artificial Sequence
  Description of Artificial Sequence: Synthetic oligonucleotide
  Antisense strand to SEQ ID NO: 2124042
ucagacacauucauuucca

SEQ ID NO: 2124044 - RNA, 19 nt, Artificial Sequence
  Description of Artificial Sequence: Synthetic oligonucleotide
  Sense strand starting at position 800 of SEQ ID NO: 1882475
cuagaauaauagcugugaa

SEQ ID NO: 2124045 - RNA, 19 nt, Artificial Sequence
  Description of Artificial Sequence: Synthetic oligonucleotide
  Antisense strand to SEQ ID NO: 2124044
uucacagcuauuauucuag

SEQ ID NO: 2124046 - RNA, 19 nt, Artificial Sequence
  Description of Artificial Sequence: Synthetic oligonucleotide
  Sense strand starting at position 818 of SEQ ID NO: 1882475
aaaugaguguguuugagac

SEQ ID NO: 2124047 - RNA, 19 nt, Artificial Sequence
  Description of Artificial Sequence: Synthetic oligonucleotide
  Antisense strand to SEQ ID NO: 2124046
gucucaaacacacucauuu

SEQ ID NO: 2124048 - RNA, 19 nt, Artificial Sequence
  Description of Artificial Sequence: Synthetic oligonucleotide
  Sense strand starting at position 1013 of SEQ ID NO: 1882475
uauauagaguggccuuuaa

SEQ ID NO: 2124049 - RNA, 19 nt, Artificial Sequence
  Description of Artificial Sequence: Synthetic oligonucleotide
  Antisense strand to SEQ ID NO: 2124048
uuaaaggccacucuauaua

SEQ ID NO: 2124050 - RNA, 19 nt, Artificial Sequence
  Description of Artificial Sequence: Synthetic oligonucleotide
  Sense strand starting at position 1372 of SEQ ID NO: 1882475
agaucuguacuugguaaau

SEQ ID NO: 2124051 - RNA, 19 nt, Artificial Sequence
  Description of Artificial Sequence: Synthetic oligonucleotide
  Antisense strand to SEQ ID NO: 2124050
auuuaccaaguacagaucu

SEQ ID NO: 2124052 - RNA, 19 nt, Artificial Sequence
  Description of Artificial Sequence: Synthetic oligonucleotide
  Sense strand starting at position 1623 of SEQ ID NO: 1882475
cugcucuuuggauauacuu

SEQ ID NO: 2124053 - RNA, 19 nt, Artificial Sequence
  Description of Artificial Sequence: Synthetic oligonucleotide
  Antisense strand to SEQ ID NO: 2124052
aaguauauccaaagagcag

SEQ ID NO: 2124054 - RNA, 19 nt, Artificial Sequence
  Description of Artificial Sequence: Synthetic oligonucleotide
  Sense strand starting at position 1690 of SEQ ID NO: 1882475
uuaagauauugcucaugaa

SEQ ID NO: 2124055 - RNA, 19 nt, Artificial Sequence
  Description of Artificial Sequence: Synthetic oligonucleotide
  Antisense strand to SEQ ID NO: 2124054
uucaugagcaauaucuuaa

SEQ ID NO: 2124056 - RNA, 19 nt, Artificial Sequence
  Description of Artificial Sequence: Synthetic oligonucleotide
  Sense strand starting at position 1800 of SEQ ID NO: 1882475
aagguaagauuguugauuc

SEQ ID NO: 2124057 - RNA, 19 nt, Artificial Sequence
  Description of Artificial Sequence: Synthetic oligonucleotide
  Antisense strand to SEQ ID NO: 2124056
gaaucaacaaucuuaccuu

SEQ ID NO: 2124058 - RNA, 19 nt, Artificial Sequence
  Description of Artificial Sequence: Synthetic oligonucleotide
  Sense strand starting at position 2075 of SEQ ID NO: 1882475
ucaugagccaaggguuuaa

SEQ ID NO: 2124059 - RNA, 19 nt, Artificial Sequence
  Description of Artificial Sequence: Synthetic oligonucleotide
  Antisense strand to SEQ ID NO: 2124058
uuaaacccuuggcucauga

SEQ ID NO: 2124060 - RNA, 19 nt, Artificial Sequence
  Description of Artificial Sequence: Synthetic oligonucleotide
  Sense strand starting at position 2100 of SEQ ID NO: 1882475
acuaguauuugugcaauuc

SEQ ID NO: 2124061 - RNA, 19 nt, Artificial Sequence
  Description of Artificial Sequence: Synthetic oligonucleotide
  Antisense strand to SEQ ID NO: 2124060
gaauugcacaaauacuagu

SEQ ID NO: 2124062 - RNA, 19 nt, Artificial Sequence
  Description of Artificial Sequence: Synthetic oligonucleotide
  Sense strand starting at position 2126 of SEQ ID NO: 1882475
agaugcuuuccauaacuga

SEQ ID NO: 2124063 - RNA, 19 nt, Artificial Sequence
  Description of Artificial Sequence: Synthetic oligonucleotide
  Antisense strand to SEQ ID NO: 2124062
ucaguuauggaaagcaucu

SEQ ID NO: 2124064 - RNA, 19 nt, Artificial Sequence
  Description of Artificial Sequence: Synthetic oligonucleotide
  Sense strand starting at position 2140 of SEQ ID NO: 1882475
acugaugcauucuuagacu

SEQ ID NO: 2124065 - RNA, 19 nt, Artificial Sequence
  Description of Artificial Sequence: Synthetic oligonucleotide
  Antisense strand to SEQ ID NO: 2124064
agucuaagaaugcaucagu

SEQ ID NO: 2124066 - RNA, 19 nt, Artificial Sequence
  Description of Artificial Sequence: Synthetic oligonucleotide
  Sense strand starting at position 2171 of SEQ ID NO: 1882475
uggaaagaucugugguuca

SEQ ID NO: 2124067 - RNA, 19 nt, Artificial Sequence
  Description of Artificial Sequence: Synthetic oligonucleotide
  Antisense strand to SEQ ID NO: 2124066
ugaaccacagaucuuucca

SEQ ID NO: 2124068 - RNA, 19 nt, Artificial Sequence
  Description of Artificial Sequence: Synthetic oligonucleotide
  Sense strand starting at position 2303 of SEQ ID NO: 1882475
gcuggugacaucugaagaa

SEQ ID NO: 2124069 - RNA, 19 nt, Artificial Sequence
  Description of Artificial Sequence: Synthetic oligonucleotide
  Antisense strand to SEQ ID NO: 2124068
uucuucagaugucaccagc

SEQ ID NO: 2124070 - RNA, 19 nt, Artificial Sequence
  Description of Artificial Sequence: Synthetic oligonucleotide
  Sense strand starting at position 2324 of SEQ ID NO: 1882475
agaguugggucaguagaug

SEQ ID NO: 2124071 - RNA, 19 nt, Artificial Sequence
  Description of Artificial Sequence: Synthetic oligonucleotide
  Antisense strand to SEQ ID NO: 2124070
caucuacugacccaacucu

SEQ ID NO: 2124072 - RNA, 19 nt, Artificial Sequence
  Description of Artificial Sequence: Synthetic oligonucleotide
  Sense strand starting at position 2417 of SEQ ID NO: 1882475
ucucaaauccaaggugacu

SEQ ID NO: 2124073 - RNA, 19 nt, Artificial Sequence
  Description of Artificial Sequence: Synthetic oligonucleotide
  Antisense strand to SEQ ID NO: 2124072
agucaccuuggauuugaga

SEQ ID NO: 2124074 - RNA, 19 nt, Artificial Sequence
  Description of Artificial Sequence: Synthetic oligonucleotide
  Sense strand starting at position 2473 of SEQ ID NO: 1882475
cuccaaucugaggguaauc

SEQ ID NO: 2124075 - RNA, 19 nt, Artificial Sequence
  Description of Artificial Sequence: Synthetic oligonucleotide
  Antisense strand to SEQ ID NO: 2124074
gauuacccucagauuggag

SEQ ID NO: 2124076 - RNA, 19 nt, Artificial Sequence
  Description of Artificial Sequence: Synthetic oligonucleotide
  Sense strand starting at position 2506 of SEQ ID NO: 1882475
agaaccauacccuguggaa

SEQ ID NO: 2124077 - RNA, 19 nt, Artificial Sequence
  Description of Artificial Sequence: Synthetic oligonucleotide
  Antisense strand to SEQ ID NO: 2124076
uuccacaggguaugguucu

SEQ ID NO: 2124078 - RNA, 19 nt, Artificial Sequence
  Description of Artificial Sequence: Synthetic oligonucleotide
  Sense strand starting at position 2538 of SEQ ID NO: 1882475
caggauaaucuggguaagu

SEQ ID NO: 2124079 - RNA, 19 nt, Artificial Sequence
  Description of Artificial Sequence: Synthetic oligonucleotide
  Antisense strand to SEQ ID NO: 2124078
acuuacccagauuauccug

SEQ ID NO: 2124080 - RNA, 19 nt, Artificial Sequence
  Description of Artificial Sequence: Synthetic oligonucleotide
  Sense strand starting at position 2539 of SEQ ID NO: 1882475
aggauaaucuggguaagua

SEQ ID NO: 2124081 - RNA, 19 nt, Artificial Sequence
  Description of Artificial Sequence: Synthetic oligonucleotide
  Antisense strand to SEQ ID NO: 2124080
uacuuacccagauuauccu

SEQ ID NO: 2124082 - RNA, 19 nt, Artificial Sequence
  Description of Artificial Sequence: Synthetic oligonucleotide
  Sense strand starting at position 2575 of SEQ ID NO: 1882475
gagaguuuaccauguuaau

SEQ ID NO: 2124083 - RNA, 19 nt, Artificial Sequence
  Description of Artificial Sequence: Synthetic oligonucleotide
  Antisense strand to SEQ ID NO: 2124082
auuaacaugguaaacucuc

SEQ ID NO: 2124084 - RNA, 19 nt, Artificial Sequence
  Description of Artificial Sequence: Synthetic oligonucleotide
  Sense strand starting at position 2828 of SEQ ID NO: 1882475
aggugaucaucagucagac

SEQ ID NO: 2124085 - RNA, 19 nt, Artificial Sequence
  Description of Artificial Sequence: Synthetic oligonucleotide
  Antisense strand to SEQ ID NO: 2124084
gucugacugaugaucaccu

SEQ ID NO: 2124086 - RNA, 19 nt, Artificial Sequence
  Description of Artificial Sequence: Synthetic oligonucleotide
  Sense strand starting at position 2917 of SEQ ID NO: 1882475
ggaagcaggccuugaugaa

SEQ ID NO: 2124087 - RNA, 19 nt, Artificial Sequence
  Description of Artificial Sequence: Synthetic oligonucleotide
  Antisense strand to SEQ ID NO: 2124086
uucaucaaggccugcuucc

SEQ ID NO: 2124088 - RNA, 19 nt, Artificial Sequence
  Description of Artificial Sequence: Synthetic oligonucleotide
  Sense strand starting at position 3495 of SEQ ID NO: 1882475
ggagguaguuccucagaug

SEQ ID NO: 2124089 - RNA, 19 nt, Artificial Sequence
  Description of Artificial Sequence: Synthetic oligonucleotide
  Antisense strand to SEQ ID NO: 2124088
caucugaggaacuaccucc

SEQ ID NO: 2124090 - RNA, 19 nt, Artificial Sequence
  Description of Artificial Sequence: Synthetic oligonucleotide
  Sense strand starting at position 3496 of SEQ ID NO: 1882475
gagguaguuccucagauga

SEQ ID NO: 2124091 - RNA, 19 nt, Artificial Sequence
  Description of Artificial Sequence: Synthetic oligonucleotide
  Antisense strand to SEQ ID NO: 2124090
ucaucugaggaacuaccuc

SEQ ID NO: 2124092 - RNA, 19 nt, Artificial Sequence
  Description of Artificial Sequence: Synthetic oligonucleotide
  Sense strand starting at position 3606 of SEQ ID NO: 1882475
uuuagacucuggcugaaga

SEQ ID NO: 2124093 - RNA, 19 nt, Artificial Sequence
  Description of Artificial Sequence: Synthetic oligonucleotide
  Antisense strand to SEQ ID NO: 2124092
ucuucagccagagucuaaa

SEQ ID NO: 2124094 - RNA, 19 nt, Artificial Sequence
  Description of Artificial Sequence: Synthetic oligonucleotide
  Sense strand starting at position 3888 of SEQ ID NO: 1882475
agaguaacugucugacaga

SEQ ID NO: 2124095 - RNA, 19 nt, Artificial Sequence
  Description of Artificial Sequence: Synthetic oligonucleotide
  Antisense strand to SEQ ID NO: 2124094
ucugucagacaguuacucu

SEQ ID NO: 2124096 - RNA, 19 nt, Artificial Sequence
  Description of Artificial Sequence: Synthetic oligonucleotide
  Sense strand starting at position 276 of SEQ ID NO: 1882476
gcugaccucauguaugaag

SEQ ID NO: 2124097 - RNA, 19 nt, Artificial Sequence
  Description of Artificial Sequence: Synthetic oligonucleotide
  Antisense strand to SEQ ID NO: 2124096
cuucauacaugaggucagc

SEQ ID NO: 2124098 - RNA, 19 nt, Artificial Sequence
  Description of Artificial Sequence: Synthetic oligonucleotide
  Sense strand starting at position 352 of SEQ ID NO: 1882476
gcugacucucuguaugaca

SEQ ID NO: 2124099 - RNA, 19 nt, Artificial Sequence
  Description of Artificial Sequence: Synthetic oligonucleotide
  Antisense strand to SEQ ID NO: 2124098
ugucauacagagagucagc

SEQ ID NO: 2124100 - RNA, 19 nt, Artificial Sequence
  Description of Artificial Sequence: Synthetic oligonucleotide
  Sense strand starting at position 354 of SEQ ID NO: 1882476
ugacucucuguaugacaca

SEQ ID NO: 2124101 - RNA, 19 nt, Artificial Sequence
  Description of Artificial Sequence: Synthetic oligonucleotide
  Antisense strand to SEQ ID NO: 2124100
ugugucauacagagaguca

SEQ ID NO: 2124102 - RNA, 19 nt, Artificial Sequence
  Description of Artificial Sequence: Synthetic oligonucleotide
  Sense strand starting at position 428 of SEQ ID NO: 1882476
gcugaccuucuguaugaca

SEQ ID NO: 2124103 - RNA, 19 nt, Artificial Sequence
  Description of Artificial Sequence: Synthetic oligonucleotide
  Antisense strand to SEQ ID NO: 2124102
ugucauacagaaggucagc

SEQ ID NO: 2124104 - RNA, 19 nt, Artificial Sequence
  Description of Artificial Sequence: Synthetic oligonucleotide
  Sense strand starting at position 430 of SEQ ID NO: 1882476
ugaccuucuguaugacaca

SEQ ID NO: 2124105 - RNA, 19 nt, Artificial Sequence
  Description of Artificial Sequence: Synthetic oligonucleotide
  Antisense strand to SEQ ID NO: 2124104
ugugucauacagaagguca

SEQ ID NO: 2124106 - RNA, 19 nt, Artificial Sequence
  Description of Artificial Sequence: Synthetic oligonucleotide
  Sense strand starting at position 539 of SEQ ID NO: 1882476
agugcugaccuguaugaag

SEQ ID NO: 2124107 - RNA, 19 nt, Artificial Sequence
  Description of Artificial Sequence: Synthetic oligonucleotide
  Antisense strand to SEQ ID NO: 2124106
cuucauacaggucagcacu

SEQ ID NO: 2124108 - RNA, 19 nt, Artificial Sequence
  Description of Artificial Sequence: Synthetic oligonucleotide
  Sense strand starting at position 577 of SEQ ID NO: 1882476
gcugacucucuguauaaca

SEQ ID NO: 2124109 - RNA, 19 nt, Artificial Sequence
  Description of Artificial Sequence: Synthetic oligonucleotide
  Antisense strand to SEQ ID NO: 2124108
uguuauacagagagucagc

SEQ ID NO: 2124110 - RNA, 19 nt, Artificial Sequence
  Description of Artificial Sequence: Synthetic oligonucleotide
  Sense strand starting at position 729 of SEQ ID NO: 1882476
gcugaucuucuguaugaag

SEQ ID NO: 2124111 - RNA, 19 nt, Artificial Sequence
  Description of Artificial Sequence: Synthetic oligonucleotide
  Antisense strand to SEQ ID NO: 2124110
cuucauacagaagaucagc

SEQ ID NO: 2124112 - RNA, 19 nt, Artificial Sequence
  Description of Artificial Sequence: Synthetic oligonucleotide
  Sense strand starting at position 881 of SEQ ID NO: 1882476
gcugacucucuguaugaag

SEQ ID NO: 2124113 - RNA, 19 nt, Artificial Sequence
  Description of Artificial Sequence: Synthetic oligonucleotide
  Antisense strand to SEQ ID NO: 2124112
cuucauacagagagucagc

SEQ ID NO: 2124114 - RNA, 19 nt, Artificial Sequence
  Description of Artificial Sequence: Synthetic oligonucleotide
  Sense strand starting at position 1053 of SEQ ID NO: 1882476
gggaaugcaccaugauauc

SEQ ID NO: 2124115 - RNA, 19 nt, Artificial Sequence
  Description of Artificial Sequence: Synthetic oligonucleotide
  Antisense strand to SEQ ID NO: 2124114
gauaucauggugcauuccc

SEQ ID NO: 2124116 - RNA, 19 nt, Artificial Sequence
  Description of Artificial Sequence: Synthetic oligonucleotide
  Sense strand starting at position 1143 of SEQ ID NO: 1882476
agucauugcugacugagau

SEQ ID NO: 2124117 - RNA, 19 nt, Artificial Sequence
  Description of Artificial Sequence: Synthetic oligonucleotide
  Antisense strand to SEQ ID NO: 2124116
aucucagucagcaaugacu

SEQ ID NO: 2124118 - RNA, 19 nt, Artificial Sequence
  Description of Artificial Sequence: Synthetic oligonucleotide
  Sense strand starting at position 1149 of SEQ ID NO: 1882476
ugcugacugagaugggauu

SEQ ID NO: 2124119 - RNA, 19 nt, Artificial Sequence
  Description of Artificial Sequence: Synthetic oligonucleotide
  Antisense strand to SEQ ID NO: 2124118
aaucccaucucagucagca

SEQ ID NO: 2124120 - RNA, 19 nt, Artificial Sequence
  Description of Artificial Sequence: Synthetic oligonucleotide
  Sense strand starting at position 2193 of SEQ ID NO: 1882476
ugaaucuuacccugcagaa

SEQ ID NO: 2124121 - RNA, 19 nt, Artificial Sequence
  Description of Artificial Sequence: Synthetic oligonucleotide
  Antisense strand to SEQ ID NO: 2124120
uucugcaggguaagauuca

SEQ ID NO: 2124122 - RNA, 19 nt, Artificial Sequence
  Description of Artificial Sequence: Synthetic oligonucleotide
  Sense strand starting at position 2284 of SEQ ID NO: 1882476
ggguuuccaaaugguuuaa

SEQ ID NO: 2124123 - RNA, 19 nt, Artificial Sequence
  Description of Artificial Sequence: Synthetic oligonucleotide
  Antisense strand to SEQ ID NO: 2124122
uuaaaccauuuggaaaccc

SEQ ID NO: 2124124 - RNA, 19 nt, Artificial Sequence
  Description of Artificial Sequence: Synthetic oligonucleotide
  Sense strand starting at position 2288 of SEQ ID NO: 1882476
uuccaaaugguuuaaaguu

SEQ ID NO: 2124125 - RNA, 19 nt, Artificial Sequence
  Description of Artificial Sequence: Synthetic oligonucleotide
  Antisense strand to SEQ ID NO: 2124124
aacuuuaaaccauuuggaa

SEQ ID NO: 2124126 - RNA, 19 nt, Artificial Sequence
  Description of Artificial Sequence: Synthetic oligonucleotide
  Sense strand starting at position 2352 of SEQ ID NO: 1882476
ggaagauccugugccuuaa

SEQ ID NO: 2124127 - RNA, 19 nt, Artificial Sequence
  Description of Artificial Sequence: Synthetic oligonucleotide
  Antisense strand to SEQ ID NO: 2124126
uuaaggcacaggaucuucc

SEQ ID NO: 2124128 - RNA, 19 nt, Artificial Sequence
  Description of Artificial Sequence: Synthetic oligonucleotide
  Sense strand starting at position 2428 of SEQ ID NO: 1882476
cugggagugcaccaugaua

SEQ ID NO: 2124129 - RNA, 19 nt, Artificial Sequence
  Description of Artificial Sequence: Synthetic oligonucleotide
  Antisense strand to SEQ ID NO: 2124128
uaucauggugcacucccag

SEQ ID NO: 2124130 - RNA, 19 nt, Artificial Sequence
  Description of Artificial Sequence: Synthetic oligonucleotide
  Sense strand starting at position 2430 of SEQ ID NO: 1882476
gggagugcaccaugauauc

SEQ ID NO: 2124131 - RNA, 19 nt, Artificial Sequence
  Description of Artificial Sequence: Synthetic oligonucleotide
  Antisense strand to SEQ ID NO: 2124130
gauaucauggugcacuccc

SEQ ID NO: 2124132 - RNA, 19 nt, Artificial Sequence
  Description of Artificial Sequence: Synthetic oligonucleotide
  Sense strand starting at position 2501 of SEQ ID NO: 1882476
gaacuucucccgugagaaa

SEQ ID NO: 2124133 - RNA, 19 nt, Artificial Sequence
  Description of Artificial Sequence: Synthetic oligonucleotide
  Antisense strand to SEQ ID NO: 2124132
uuucucacgggagaaguuc

SEQ ID NO: 2124134 - RNA, 19 nt, Artificial Sequence
  Description of Artificial Sequence: Synthetic oligonucleotide
  Sense strand starting at position 2502 of SEQ ID NO: 1882476
aacuucucccgugagaaac

SEQ ID NO: 2124135 - RNA, 19 nt, Artificial Sequence
  Description of Artificial Sequence: Synthetic oligonucleotide
  Antisense strand to SEQ ID NO: 2124134
guuucucacgggagaaguu

SEQ ID NO: 2124136 - RNA, 19 nt, Artificial Sequence
  Description of Artificial Sequence: Synthetic oligonucleotide
  Sense strand starting at position 2722 of SEQ ID NO: 1882476
ggucuuuauccacagagca

SEQ ID NO: 2124137 - RNA, 19 nt, Artificial Sequence
  Description of Artificial Sequence: Synthetic oligonucleotide
  Antisense strand to SEQ ID NO: 2124136
ugcucuguggauaaagacc

SEQ ID NO: 2124138 - RNA, 19 nt, Artificial Sequence
  Description of Artificial Sequence: Synthetic oligonucleotide
  Sense strand starting at position 2778 of SEQ ID NO: 1882476
uaugguuugacccagugga

SEQ ID NO: 2124139 - RNA, 19 nt, Artificial Sequence
  Description of Artificial Sequence: Synthetic oligonucleotide
  Antisense strand to SEQ ID NO: 2124138
uccacugggucaaaccaua

SEQ ID NO: 2124140 - RNA, 19 nt, Artificial Sequence
  Description of Artificial Sequence: Synthetic oligonucleotide
  Sense strand starting at position 2791 of SEQ ID NO: 1882476
aguggaggacuuuguuaag

SEQ ID NO: 2124141 - RNA, 19 nt, Artificial Sequence
  Description of Artificial Sequence: Synthetic oligonucleotide
  Antisense strand to SEQ ID NO: 2124140
cuuaacaaaguccuccacu

SEQ ID NO: 2124142 - RNA, 19 nt, Artificial Sequence
  Description of Artificial Sequence: Synthetic oligonucleotide
  Sense strand starting at position 2956 of SEQ ID NO: 1882476
ugucaucuccaguauaccu

SEQ ID NO: 2124143 - RNA, 19 nt, Artificial Sequence
  Description of Artificial Sequence: Synthetic oligonucleotide
  Antisense strand to SEQ ID NO: 2124142
agguauacuggagaugaca

SEQ ID NO: 2124144 - RNA, 19 nt, Artificial Sequence
  Description of Artificial Sequence: Synthetic oligonucleotide
  Sense strand starting at position 2991 of SEQ ID NO: 1882476
uccugaaguuguuuggaag

SEQ ID NO: 2124145 - RNA, 19 nt, Artificial Sequence
  Description of Artificial Sequence: Synthetic oligonucleotide
  Antisense strand to SEQ ID NO: 2124144
cuuccaaacaacuucagga

SEQ ID NO: 2124146 - RNA, 19 nt, Artificial Sequence
  Description of Artificial Sequence: Synthetic oligonucleotide
  Sense strand starting at position 3025 of SEQ ID NO: 1882476
agugaaagcgcacacauau

SEQ ID NO: 2124147 - RNA, 19 nt, Artificial Sequence
  Description of Artificial Sequence: Synthetic oligonucleotide
  Antisense strand to SEQ ID NO: 2124146
auaugugugcgcuuucacu

SEQ ID NO: 2124148 - RNA, 19 nt, Artificial Sequence
  Description of Artificial Sequence: Synthetic oligonucleotide
  Sense strand starting at position 3048 of SEQ ID NO: 1882476
aagcucugagcucaggauu

SEQ ID NO: 2124149 - RNA, 19 nt, Artificial Sequence
  Description of Artificial Sequence: Synthetic oligonucleotide
  Antisense strand to SEQ ID NO: 2124148
aauccugagcucagagcuu

SEQ ID NO: 2124150 - RNA, 19 nt, Artificial Sequence
  Description of Artificial Sequence: Synthetic oligonucleotide
  Sense strand starting at position 3174 of SEQ ID NO: 1882476
gagggauugccuuguagag

SEQ ID NO: 2124151 - RNA, 19 nt, Artificial Sequence
  Description of Artificial Sequence: Synthetic oligonucleotide
  Antisense strand to SEQ ID NO: 2124150
cucuacaaggcaaucccuc

SEQ ID NO: 2124152 - RNA, 19 nt, Artificial Sequence
  Description of Artificial Sequence: Synthetic oligonucleotide
  Sense strand starting at position 3197 of SEQ ID NO: 1882476
agaccuuccgcagaacaga

SEQ ID NO: 2124153 - RNA, 19 nt, Artificial Sequence
  Description of Artificial Sequence: Synthetic oligonucleotide
  Antisense strand to SEQ ID NO: 2124152
ucuguucugcggaaggucu

SEQ ID NO: 2124154 - RNA, 19 nt, Artificial Sequence
  Description of Artificial Sequence: Synthetic oligonucleotide
  Sense strand starting at position 3227 of SEQ ID NO: 1882476
ccuguucugcuggagaaug

SEQ ID NO: 2124155 - RNA, 19 nt, Artificial Sequence
  Description of Artificial Sequence: Synthetic oligonucleotide
  Antisense strand to SEQ ID NO: 2124154
cauucuccagcagaacagg

SEQ ID NO: 2124156 - RNA, 19 nt, Artificial Sequence
  Description of Artificial Sequence: Synthetic oligonucleotide
  Sense strand starting at position 3229 of SEQ ID NO: 1882476
uguucugcuggagaaugaa

SEQ ID NO: 2124157 - RNA, 19 nt, Artificial Sequence
  Description of Artificial Sequence: Synthetic oligonucleotide
  Antisense strand to SEQ ID NO: 2124156
uucauucuccagcagaaca

SEQ ID NO: 2124158 - RNA, 19 nt, Artificial Sequence
  Description of Artificial Sequence: Synthetic oligonucleotide
  Sense strand starting at position 3282 of SEQ ID NO: 1882476
gggcuugugcguucugaca

SEQ ID NO: 2124159 - RNA, 19 nt, Artificial Sequence
  Description of Artificial Sequence: Synthetic oligonucleotide
  Antisense strand to SEQ ID NO: 2124158
ugucagaacgcacaagccc

SEQ ID NO: 2124160 - RNA, 19 nt, Artificial Sequence
  Description of Artificial Sequence: Synthetic oligonucleotide
  Sense strand starting at position 3387 of SEQ ID NO: 1882476
ucuaucucuugggugauau

SEQ ID NO: 2124161 - RNA, 19 nt, Artificial Sequence
  Description of Artificial Sequence: Synthetic oligonucleotide
  Antisense strand to SEQ ID NO: 2124160
auaucacccaagagauaga

SEQ ID NO: 2124162 - RNA, 19 nt, Artificial Sequence
  Description of Artificial Sequence: Synthetic oligonucleotide
  Sense strand starting at position 3418 of SEQ ID NO: 1882476
agucuugacuuagucaaag

SEQ ID NO: 2124163 - RNA, 19 nt, Artificial Sequence
  Description of Artificial Sequence: Synthetic oligonucleotide
  Antisense strand to SEQ ID NO: 2124162
cuuugacuaagucaagacu

SEQ ID NO: 2124164 - RNA, 19 nt, Artificial Sequence
  Description of Artificial Sequence: Synthetic oligonucleotide
  Sense strand starting at position 3537 of SEQ ID NO: 1882476
ggcuuuguccacucgcuga

SEQ ID NO: 2124165 - RNA, 19 nt, Artificial Sequence
  Description of Artificial Sequence: Synthetic oligonucleotide
  Antisense strand to SEQ ID NO: 2124164
ucagcgaguggacaaagcc

SEQ ID NO: 2124166 - RNA, 19 nt, Artificial Sequence
  Description of Artificial Sequence: Synthetic oligonucleotide
  Sense strand starting at position 3723 of SEQ ID NO: 1882476
ggcccaggccacuaugauu

SEQ ID NO: 2124167 - RNA, 19 nt, Artificial Sequence
  Description of Artificial Sequence: Synthetic oligonucleotide
  Antisense strand to SEQ ID NO: 2124166
aaucauaguggccugggcc

SEQ ID NO: 2124168 - RNA, 19 nt, Artificial Sequence
  Description of Artificial Sequence: Synthetic oligonucleotide
  Sense strand starting at position 3747 of SEQ ID NO: 1882476
agucuccuuguuuaauaaa

SEQ ID NO: 2124169 - RNA, 19 nt, Artificial Sequence
  Description of Artificial Sequence: Synthetic oligonucleotide
  Antisense strand to SEQ ID NO: 2124168
uuuauuaaacaaggagacu

SEQ ID NO: 2124170 - RNA, 19 nt, Artificial Sequence
  Description of Artificial Sequence: Synthetic oligonucleotide
  Sense strand starting at position 3859 of SEQ ID NO: 1882476
cgaaguuaagcauaggauu

SEQ ID NO: 2124171 - RNA, 19 nt, Artificial Sequence
  Description of Artificial Sequence: Synthetic oligonucleotide
  Antisense strand to SEQ ID NO: 2124170
aauccuaugcuuaacuucg

SEQ ID NO: 2124172 - RNA, 19 nt, Artificial Sequence
  Description of Artificial Sequence: Synthetic oligonucleotide
  Sense strand starting at position 3936 of SEQ ID NO: 1882476
aguaauuucuguccgucuu

SEQ ID NO: 2124173 - RNA, 19 nt, Artificial Sequence
  Description of Artificial Sequence: Synthetic oligonucleotide
  Antisense strand to SEQ ID NO: 2124172
aagacggacagaaauuacu

SEQ ID NO: 2124174 - RNA, 19 nt, Artificial Sequence
  Description of Artificial Sequence: Synthetic oligonucleotide
  Sense strand starting at position 3972 of SEQ ID NO: 1882476
ugugacucuaaguauagua

SEQ ID NO: 2124175 - RNA, 19 nt, Artificial Sequence
  Description of Artificial Sequence: Synthetic oligonucleotide
  Antisense strand to SEQ ID NO: 2124174
uacuauacuuagagucaca

SEQ ID NO: 2124176 - RNA, 19 nt, Artificial Sequence
  Description of Artificial Sequence: Synthetic oligonucleotide
  Sense strand starting at position 363 of SEQ ID NO: 1882477
gguguucuaccucaaacau

SEQ ID NO: 2124177 - RNA, 19 nt, Artificial Sequence
  Description of Artificial Sequence: Synthetic oligonucleotide
  Antisense strand to SEQ ID NO: 2124176
auguuugagguagaacacc

SEQ ID NO: 2124178 - RNA, 19 nt, Artificial Sequence
  Description of Artificial Sequence: Synthetic oligonucleotide
  Sense strand starting at position 436 of SEQ ID NO: 1882477
ugguuagcuucuucuauuu

SEQ ID NO: 2124179 - RNA, 19 nt, Artificial Sequence
  Description of Artificial Sequence: Synthetic oligonucleotide
  Antisense strand to SEQ ID NO: 2124178
aaauagaagaagcuaacca

SEQ ID NO: 2124180 - RNA, 19 nt, Artificial Sequence
  Description of Artificial Sequence: Synthetic oligonucleotide
  Sense strand starting at position 610 of SEQ ID NO: 1882477
caguuaagacuauaggcau

SEQ ID NO: 2124181 - RNA, 19 nt, Artificial Sequence
  Description of Artificial Sequence: Synthetic oligonucleotide
  Antisense strand to SEQ ID NO: 2124180
augccuauagucuuaacug

SEQ ID NO: 2124182 - RNA, 19 nt, Artificial Sequence
  Description of Artificial Sequence: Synthetic oligonucleotide
  Sense strand starting at position 954 of SEQ ID NO: 1882477
gcuucaucugcguuguuga

SEQ ID NO: 2124183 - RNA, 19 nt, Artificial Sequence
  Description of Artificial Sequence: Synthetic oligonucleotide
  Antisense strand to SEQ ID NO: 2124182
ucaacaacgcagaugaagc

SEQ ID NO: 2124184 - RNA, 19 nt, Artificial Sequence
  Description of Artificial Sequence: Synthetic oligonucleotide
  Sense strand starting at position 1001 of SEQ ID NO: 1882477
gcuauauaguguucucuug

SEQ ID NO: 2124185 - RNA, 19 nt, Artificial Sequence
  Description of Artificial Sequence: Synthetic oligonucleotide
  Antisense strand to SEQ ID NO: 2124184
caagagaacacuauauagc

SEQ ID NO: 2124186 - RNA, 19 nt, Artificial Sequence
  Description of Artificial Sequence: Synthetic oligonucleotide
  Sense strand starting at position 1022 of SEQ ID NO: 1882477
uggcuauugcauggaacuu

SEQ ID NO: 2124187 - RNA, 19 nt, Artificial Sequence
  Description of Artificial Sequence: Synthetic oligonucleotide
  Antisense strand to SEQ ID NO: 2124186
aaguuccaugcaauagcca

SEQ ID NO: 2124188 - RNA, 19 nt, Artificial Sequence
  Description of Artificial Sequence: Synthetic oligonucleotide
  Sense strand starting at position 1023 of SEQ ID NO: 1882477
ggcuauugcauggaacuuu

SEQ ID NO: 2124189 - RNA, 19 nt, Artificial Sequence
  Description of Artificial Sequence: Synthetic oligonucleotide
  Antisense strand to SEQ ID NO: 2124188
aaaguuccaugcaauagcc

SEQ ID NO: 2124190 - RNA, 19 nt, Artificial Sequence
  Description of Artificial Sequence: Synthetic oligonucleotide
  Sense strand starting at position 1361 of SEQ ID NO: 1882477
auuuguagccacuggaguu

SEQ ID NO: 2124191 - RNA, 19 nt, Artificial Sequence
  Description of Artificial Sequence: Synthetic oligonucleotide
  Antisense strand to SEQ ID NO: 2124190
aacuccaguggcuacaaau

SEQ ID NO: 2124192 - RNA, 19 nt, Artificial Sequence
  Description of Artificial Sequence: Synthetic oligonucleotide
  Sense strand starting at position 1384 of SEQ ID NO: 1882477
ccagcuuaggauuauuaca

SEQ ID NO: 2124193 - RNA, 19 nt, Artificial Sequence
  Description of Artificial Sequence: Synthetic oligonucleotide
  Antisense strand to SEQ ID NO: 2124192
uguaauaauccuaagcugg

SEQ ID NO: 2124194 - RNA, 19 nt, Artificial Sequence
  Description of Artificial Sequence: Synthetic oligonucleotide
  Sense strand starting at position 1386 of SEQ ID NO: 1882477
agcuuaggauuauuacaaa

SEQ ID NO: 2124195 - RNA, 19 nt, Artificial Sequence
  Description of Artificial Sequence: Synthetic oligonucleotide
  Antisense strand to SEQ ID NO: 2124194
uuuguaauaauccuaagcu

SEQ ID NO: 2124196 - RNA, 19 nt, Artificial Sequence
  Description of Artificial Sequence: Synthetic oligonucleotide
  Sense strand starting at position 1408 of SEQ ID NO: 1882477
uguuguaugcuguauucuu

SEQ ID NO: 2124197 - RNA, 19 nt, Artificial Sequence
  Description of Artificial Sequence: Synthetic oligonucleotide
  Antisense strand to SEQ ID NO: 2124196
aagaauacagcauacaaca

SEQ ID NO: 2124198 - RNA, 19 nt, Artificial Sequence
  Description of Artificial Sequence: Synthetic oligonucleotide
  Sense strand starting at position 1418 of SEQ ID NO: 1882477
uguauucuuguacaucuau

SEQ ID NO: 2124199 - RNA, 19 nt, Artificial Sequence
  Description of Artificial Sequence: Synthetic oligonucleotide
  Antisense strand to SEQ ID NO: 2124198
auagauguacaagaauaca

SEQ ID NO: 2124200 - RNA, 19 nt, Artificial Sequence
  Description of Artificial Sequence: Synthetic oligonucleotide
  Sense strand starting at position 1424 of SEQ ID NO: 1882477
cuuguacaucuauauuguu

SEQ ID NO: 2124201 - RNA, 19 nt, Artificial Sequence
  Description of Artificial Sequence: Synthetic oligonucleotide
  Antisense strand to SEQ ID NO: 2124200
aacaauauagauguacaag

SEQ ID NO: 2124202 - RNA, 19 nt, Artificial Sequence
  Description of Artificial Sequence: Synthetic oligonucleotide
  Sense strand starting at position 1439 of SEQ ID NO: 1882477
uguuuauacaugugcagga

SEQ ID NO: 2124203 - RNA, 19 nt, Artificial Sequence
  Description of Artificial Sequence: Synthetic oligonucleotide
  Antisense strand to SEQ ID NO: 2124202
uccugcacauguauaaaca

SEQ ID NO: 2124204 - RNA, 19 nt, Artificial Sequence
  Description of Artificial Sequence: Synthetic oligonucleotide
  Sense strand starting at position 1443 of SEQ ID NO: 1882477
uauacaugugcaggaguuu

SEQ ID NO: 2124205 - RNA, 19 nt, Artificial Sequence
  Description of Artificial Sequence: Synthetic oligonucleotide
  Antisense strand to SEQ ID NO: 2124204
aaacuccugcacauguaua

SEQ ID NO: 2124206 - RNA, 19 nt, Artificial Sequence
  Description of Artificial Sequence: Synthetic oligonucleotide
  Sense strand starting at position 1483 of SEQ ID NO: 1882477
agaauuguuguaggguaua

SEQ ID NO: 2124207 - RNA, 19 nt, Artificial Sequence
  Description of Artificial Sequence: Synthetic oligonucleotide
  Antisense strand to SEQ ID NO: 2124206
uauacccuacaacaauucu

SEQ ID NO: 2124208 - RNA, 19 nt, Artificial Sequence
  Description of Artificial Sequence: Synthetic oligonucleotide
  Sense strand starting at position 1803 of SEQ ID NO: 1882477
cagugacagugacagauaa

SEQ ID NO: 2124209 - RNA, 19 nt, Artificial Sequence
  Description of Artificial Sequence: Synthetic oligonucleotide
  Antisense strand to SEQ ID NO: 2124208
uuaucugucacugucacug

SEQ ID NO: 2124210 - RNA, 19 nt, Artificial Sequence
  Description of Artificial Sequence: Synthetic oligonucleotide
  Sense strand starting at position 1959 of SEQ ID NO: 1882477
gugagacccucuccgcaau

SEQ ID NO: 2124211 - RNA, 19 nt, Artificial Sequence
  Description of Artificial Sequence: Synthetic oligonucleotide
  Antisense strand to SEQ ID NO: 2124210
auugcggagagggucucac

SEQ ID NO: 2124212 - RNA, 19 nt, Artificial Sequence
  Description of Artificial Sequence: Synthetic oligonucleotide
  Sense strand starting at position 2179 of SEQ ID NO: 1882477
ugaccuuuccuguacaagu

SEQ ID NO: 2124213 - RNA, 19 nt, Artificial Sequence
  Description of Artificial Sequence: Synthetic oligonucleotide
  Antisense strand to SEQ ID NO: 2124212
acuuguacaggaaagguca

SEQ ID NO: 2124214 - RNA, 19 nt, Artificial Sequence
  Description of Artificial Sequence: Synthetic oligonucleotide
  Sense strand starting at position 2350 of SEQ ID NO: 1882477
gggauaucauaucauauuu

SEQ ID NO: 2124215 - RNA, 19 nt, Artificial Sequence
  Description of Artificial Sequence: Synthetic oligonucleotide
  Antisense strand to SEQ ID NO: 2124214
aaauaugauaugauauccc

SEQ ID NO: 2124216 - RNA, 19 nt, Artificial Sequence
  Description of Artificial Sequence: Synthetic oligonucleotide
  Sense strand starting at position 2359 of SEQ ID NO: 1882477
uaucauauuugguguauga

SEQ ID NO: 2124217 - RNA, 19 nt, Artificial Sequence
  Description of Artificial Sequence: Synthetic oligonucleotide
  Antisense strand to SEQ ID NO: 2124216
ucauacaccaaauaugaua

SEQ ID NO: 2124218 - RNA, 19 nt, Artificial Sequence
  Description of Artificial Sequence: Synthetic oligonucleotide
  Sense strand starting at position 2396 of SEQ ID NO: 1882477
ugcucaguauuuguugaaa

SEQ ID NO: 2124219 - RNA, 19 nt, Artificial Sequence
  Description of Artificial Sequence: Synthetic oligonucleotide
  Antisense strand to SEQ ID NO: 2124218
uuucaacaaauacugagca

SEQ ID NO: 2124220 - RNA, 19 nt, Artificial Sequence
  Description of Artificial Sequence: Synthetic oligonucleotide
  Sense strand starting at position 2428 of SEQ ID NO: 1882477
uguaauggaggcugggaaa

SEQ ID NO: 2124221 - RNA, 19 nt, Artificial Sequence
  Description of Artificial Sequence: Synthetic oligonucleotide
  Antisense strand to SEQ ID NO: 2124220
uuucccagccuccauuaca

SEQ ID NO: 2124222 - RNA, 19 nt, Artificial Sequence
  Description of Artificial Sequence: Synthetic oligonucleotide
  Sense strand starting at position 2494 of SEQ ID NO: 1882477
ugucuuccaucuccagaca

SEQ ID NO: 2124223 - RNA, 19 nt, Artificial Sequence
  Description of Artificial Sequence: Synthetic oligonucleotide
  Antisense strand to SEQ ID NO: 2124222
ugucuggagauggaagaca

SEQ ID NO: 2124224 - RNA, 19 nt, Artificial Sequence
  Description of Artificial Sequence: Synthetic oligonucleotide
  Sense strand starting at position 2495 of SEQ ID NO: 1882477
gucuuccaucuccagacau

SEQ ID NO: 2124225 - RNA, 19 nt, Artificial Sequence
  Description of Artificial Sequence: Synthetic oligonucleotide
  Antisense strand to SEQ ID NO: 2124224
augucuggagauggaagac

SEQ ID NO: 2124226 - RNA, 19 nt, Artificial Sequence
  Description of Artificial Sequence: Synthetic oligonucleotide
  Sense strand starting at position 2538 of SEQ ID NO: 1882477
cucucugucuacucaaguu

SEQ ID NO: 2124227 - RNA, 19 nt, Artificial Sequence
  Description of Artificial Sequence: Synthetic oligonucleotide
  Antisense strand to SEQ ID NO: 2124226
aacuugaguagacagagag

SEQ ID NO: 2124228 - RNA, 19 nt, Artificial Sequence
  Description of Artificial Sequence: Synthetic oligonucleotide
  Sense strand starting at position 2674 of SEQ ID NO: 1882477
gguuaguugccagggagga

SEQ ID NO: 2124229 - RNA, 19 nt, Artificial Sequence
  Description of Artificial Sequence: Synthetic oligonucleotide
  Antisense strand to SEQ ID NO: 2124228
uccucccuggcaacuaacc

SEQ ID NO: 2124230 - RNA, 19 nt, Artificial Sequence
  Description of Artificial Sequence: Synthetic oligonucleotide
  Sense strand starting at position 2713 of SEQ ID NO: 1882477
ggacuuagcaccugcagau

SEQ ID NO: 2124231 - RNA, 19 nt, Artificial Sequence
  Description of Artificial Sequence: Synthetic oligonucleotide
  Antisense strand to SEQ ID NO: 2124230
aucugcaggugcuaagucc

SEQ ID NO: 2124232 - RNA, 19 nt, Artificial Sequence
  Description of Artificial Sequence: Synthetic oligonucleotide
  Sense strand starting at position 2776 of SEQ ID NO: 1882477
cagagaaagcagugcuaca

SEQ ID NO: 2124233 - RNA, 19 nt, Artificial Sequence
  Description of Artificial Sequence: Synthetic oligonucleotide
  Antisense strand to SEQ ID NO: 2124232
uguagcacugcuuucucug

SEQ ID NO: 2124234 - RNA, 19 nt, Artificial Sequence
  Description of Artificial Sequence: Synthetic oligonucleotide
  Sense strand starting at position 2991 of SEQ ID NO: 1882477
ggaugcugucagcauguuu

SEQ ID NO: 2124235 - RNA, 19 nt, Artificial Sequence
  Description of Artificial Sequence: Synthetic oligonucleotide
  Antisense strand to SEQ ID NO: 2124234
aaacaugcugacagcaucc

SEQ ID NO: 2124236 - RNA, 19 nt, Artificial Sequence
  Description of Artificial Sequence: Synthetic oligonucleotide
  Sense strand starting at position 3344 of SEQ ID NO: 1882477
aaggguuaguuugagaaga

SEQ ID NO: 2124237 - RNA, 19 nt, Artificial Sequence
  Description of Artificial Sequence: Synthetic oligonucleotide
  Antisense strand to SEQ ID NO: 2124236
ucuucucaaacuaacccuu

SEQ ID NO: 2124238 - RNA, 19 nt, Artificial Sequence
  Description of Artificial Sequence: Synthetic oligonucleotide
  Sense strand starting at position 3346 of SEQ ID NO: 1882477
ggguuaguuugagaagaaa

SEQ ID NO: 2124239 - RNA, 19 nt, Artificial Sequence
  Description of Artificial Sequence: Synthetic oligonucleotide
  Antisense strand to SEQ ID NO: 2124238
uuucuucucaaacuaaccc

SEQ ID NO: 2124240 - RNA, 19 nt, Artificial Sequence
  Description of Artificial Sequence: Synthetic oligonucleotide
  Sense strand starting at position 3416 of SEQ ID NO: 1882477
guaguugacuaagaagaga

SEQ ID NO: 2124241 - RNA, 19 nt, Artificial Sequence
  Description of Artificial Sequence: Synthetic oligonucleotide
  Antisense strand to SEQ ID NO: 2124240
ucucuucuuagucaacuac

SEQ ID NO: 2124242 - RNA, 19 nt, Artificial Sequence
  Description of Artificial Sequence: Synthetic oligonucleotide
  Sense strand starting at position 3527 of SEQ ID NO: 1882477
ccgccagcucuccagaaua

SEQ ID NO: 2124243 - RNA, 19 nt, Artificial Sequence
  Description of Artificial Sequence: Synthetic oligonucleotide
  Antisense strand to SEQ ID NO: 2124242
uauucuggagagcuggcgg

SEQ ID NO: 2124244 - RNA, 19 nt, Artificial Sequence
  Description of Artificial Sequence: Synthetic oligonucleotide
  Sense strand starting at position 3529 of SEQ ID NO: 1882477
gccagcucuccagaauaca

SEQ ID NO: 2124245 - RNA, 19 nt, Artificial Sequence
  Description of Artificial Sequence: Synthetic oligonucleotide
  Antisense strand to SEQ ID NO: 2124244
uguauucuggagagcuggc

SEQ ID NO: 2124246 - RNA, 19 nt, Artificial Sequence
  Description of Artificial Sequence: Synthetic oligonucleotide
  Sense strand starting at position 3747 of SEQ ID NO: 1882477
ggucucuucccgggacuca

SEQ ID NO: 2124247 - RNA, 19 nt, Artificial Sequence
  Description of Artificial Sequence: Synthetic oligonucleotide
  Antisense strand to SEQ ID NO: 2124246
ugagucccgggaagagacc

SEQ ID NO: 2124248 - RNA, 19 nt, Artificial Sequence
  Description of Artificial Sequence: Synthetic oligonucleotide
  Sense strand starting at position 3748 of SEQ ID NO: 1882477
gucucuucccgggacucaa

SEQ ID NO: 2124249 - RNA, 19 nt, Artificial Sequence
  Description of Artificial Sequence: Synthetic oligonucleotide
  Antisense strand to SEQ ID NO: 2124248
uugagucccgggaagagac

SEQ ID NO: 2124250 - RNA, 19 nt, Artificial Sequence
  Description of Artificial Sequence: Synthetic oligonucleotide
  Sense strand starting at position 3897 of SEQ ID NO: 1882477
gcgugacuuuaacucagga

SEQ ID NO: 2124251 - RNA, 19 nt, Artificial Sequence
  Description of Artificial Sequence: Synthetic oligonucleotide
  Antisense strand to SEQ ID NO: 2124250
uccugaguuaaagucacgc

SEQ ID NO: 2124252 - RNA, 19 nt, Artificial Sequence
  Description of Artificial Sequence: Synthetic oligonucleotide
  Sense strand starting at position 3937 of SEQ ID NO: 1882477
gcggauaacuggcuugaca

SEQ ID NO: 2124253 - RNA, 19 nt, Artificial Sequence
  Description of Artificial Sequence: Synthetic oligonucleotide
  Antisense strand to SEQ ID NO: 2124252
ugucaagccaguuauccgc

SEQ ID NO: 2124254 - RNA, 19 nt, Artificial Sequence
  Description of Artificial Sequence: Synthetic oligonucleotide
  Sense strand starting at position 3939 of SEQ ID NO: 1882477
ggauaacuggcuugacaag

SEQ ID NO: 2124255 - RNA, 19 nt, Artificial Sequence
  Description of Artificial Sequence: Synthetic oligonucleotide
  Antisense strand to SEQ ID NO: 2124254
cuugucaagccaguuaucc

SEQ ID NO: 2124256 - RNA, 19 nt, Artificial Sequence
  Description of Artificial Sequence: Synthetic oligonucleotide
  Sense strand starting at position 10 of SEQ ID NO: 1882478
uuuguaacaucuucgaggu

SEQ ID NO: 2124257 - RNA, 19 nt, Artificial Sequence
  Description of Artificial Sequence: Synthetic oligonucleotide
  Antisense strand to SEQ ID NO: 2124256
accucgaagauguuacaaa

SEQ ID NO: 2124258 - RNA, 19 nt, Artificial Sequence
  Description of Artificial Sequence: Synthetic oligonucleotide
  Sense strand starting at position 56 of SEQ ID NO: 1882478
caauuagugguuugaggca

SEQ ID NO: 2124259 - RNA, 19 nt, Artificial Sequence
  Description of Artificial Sequence: Synthetic oligonucleotide
  Antisense strand to SEQ ID NO: 2124258
ugccucaaaccacuaauug

SEQ ID NO: 2124260 - RNA, 19 nt, Artificial Sequence
  Description of Artificial Sequence: Synthetic oligonucleotide
  Sense strand starting at position 110 of SEQ ID NO: 1882478
ucucuucucuagucagguu

SEQ ID NO: 2124261 - RNA, 19 nt, Artificial Sequence
  Description of Artificial Sequence: Synthetic oligonucleotide
  Antisense strand to SEQ ID NO: 2124260
aaccugacuagagaagaga

SEQ ID NO: 2124262 - RNA, 19 nt, Artificial Sequence
  Description of Artificial Sequence: Synthetic oligonucleotide
  Sense strand starting at position 533 of SEQ ID NO: 1882478
ggaucucgcucacugcaaa

SEQ ID NO: 2124263 - RNA, 19 nt, Artificial Sequence
  Description of Artificial Sequence: Synthetic oligonucleotide
  Antisense strand to SEQ ID NO: 2124262
uuugcagugagcgagaucc

SEQ ID NO: 2124264 - RNA, 19 nt, Artificial Sequence
  Description of Artificial Sequence: Synthetic oligonucleotide
  Sense strand starting at position 683 of SEQ ID NO: 1882478
uggaauuaggcuugacaau

SEQ ID NO: 2124265 - RNA, 19 nt, Artificial Sequence
  Description of Artificial Sequence: Synthetic oligonucleotide
  Antisense strand to SEQ ID NO: 2124264
auugucaagccuaauucca

SEQ ID NO: 2124266 - RNA, 19 nt, Artificial Sequence
  Description of Artificial Sequence: Synthetic oligonucleotide
  Sense strand starting at position 745 of SEQ ID NO: 1882478
ugugaucguccacagguga

SEQ ID NO: 2124267 - RNA, 19 nt, Artificial Sequence
  Description of Artificial Sequence: Synthetic oligonucleotide
  Antisense strand to SEQ ID NO: 2124266
ucaccuguggacgaucaca

SEQ ID NO: 2124268 - RNA, 19 nt, Artificial Sequence
  Description of Artificial Sequence: Synthetic oligonucleotide
  Sense strand starting at position 1081 of SEQ ID NO: 1882478
aagcuaggucuagguaagu

SEQ ID NO: 2124269 - RNA, 19 nt, Artificial Sequence
  Description of Artificial Sequence: Synthetic oligonucleotide
  Antisense strand to SEQ ID NO: 2124268
acuuaccuagaccuagcuu

SEQ ID NO: 2124270 - RNA, 19 nt, Artificial Sequence
  Description of Artificial Sequence: Synthetic oligonucleotide
  Sense strand starting at position 1110 of SEQ ID NO: 1882478
cuugguguggcaaggaguu

SEQ ID NO: 2124271 - RNA, 19 nt, Artificial Sequence
  Description of Artificial Sequence: Synthetic oligonucleotide
  Antisense strand to SEQ ID NO: 2124270
aacuccuugccacaccaag

SEQ ID NO: 2124272 - RNA, 19 nt, Artificial Sequence
  Description of Artificial Sequence: Synthetic oligonucleotide
  Sense strand starting at position 1135 of SEQ ID NO: 1882478
acucgucuccucuauggau

SEQ ID NO: 2124273 - RNA, 19 nt, Artificial Sequence
  Description of Artificial Sequence: Synthetic oligonucleotide
  Antisense strand to SEQ ID NO: 2124272
auccauagaggagacgagu

SEQ ID NO: 2124274 - RNA, 19 nt, Artificial Sequence
  Description of Artificial Sequence: Synthetic oligonucleotide
  Sense strand starting at position 1137 of SEQ ID NO: 1882478
ucgucuccucuauggauuu

SEQ ID NO: 2124275 - RNA, 19 nt, Artificial Sequence
  Description of Artificial Sequence: Synthetic oligonucleotide
  Antisense strand to SEQ ID NO: 2124274
aaauccauagaggagacga

SEQ ID NO: 2124276 - RNA, 19 nt, Artificial Sequence
  Description of Artificial Sequence: Synthetic oligonucleotide
  Sense strand starting at position 1144 of SEQ ID NO: 1882478
cucuauggauuugacuuaa

SEQ ID NO: 2124277 - RNA, 19 nt, Artificial Sequence
  Description of Artificial Sequence: Synthetic oligonucleotide
  Antisense strand to SEQ ID NO: 2124276
uuaagucaaauccauagag

SEQ ID NO: 2124278 - RNA, 19 nt, Artificial Sequence
  Description of Artificial Sequence: Synthetic oligonucleotide
  Sense strand starting at position 1160 of SEQ ID NO: 1882478
uaaugcuauuuggucaagu

SEQ ID NO: 2124279 - RNA, 19 nt, Artificial Sequence
  Description of Artificial Sequence: Synthetic oligonucleotide
  Antisense strand to SEQ ID NO: 2124278
acuugaccaaauagcauua

SEQ ID NO: 2124280 - RNA, 19 nt, Artificial Sequence
  Description of Artificial Sequence: Synthetic oligonucleotide
  Sense strand starting at position 1161 of SEQ ID NO: 1882478
aaugcuauuuggucaaguc

SEQ ID NO: 2124281 - RNA, 19 nt, Artificial Sequence
  Description of Artificial Sequence: Synthetic oligonucleotide
  Antisense strand to SEQ ID NO: 2124280
gacuugaccaaauagcauu

SEQ ID NO: 2124282 - RNA, 19 nt, Artificial Sequence
  Description of Artificial Sequence: Synthetic oligonucleotide
  Sense strand starting at position 1176 of SEQ ID NO: 1882478
agucucacauggcuuaauu

SEQ ID NO: 2124283 - RNA, 19 nt, Artificial Sequence
  Description of Artificial Sequence: Synthetic oligonucleotide
  Antisense strand to SEQ ID NO: 2124282
aauuaagccaugugagacu

SEQ ID NO: 2124284 - RNA, 19 nt, Artificial Sequence
  Description of Artificial Sequence: Synthetic oligonucleotide
  Sense strand starting at position 1610 of SEQ ID NO: 1882478
ccuugugaaguggauguua

SEQ ID NO: 2124285 - RNA, 19 nt, Artificial Sequence
  Description of Artificial Sequence: Synthetic oligonucleotide
  Antisense strand to SEQ ID NO: 2124284
uaacauccacuucacaagg

SEQ ID NO: 2124286 - RNA, 19 nt, Artificial Sequence
  Description of Artificial Sequence: Synthetic oligonucleotide
  Sense strand starting at position 1612 of SEQ ID NO: 1882478
uugugaaguggauguuauc

SEQ ID NO: 2124287 - RNA, 19 nt, Artificial Sequence
  Description of Artificial Sequence: Synthetic oligonucleotide
  Antisense strand to SEQ ID NO: 2124286
gauaacauccacuucacaa

SEQ ID NO: 2124288 - RNA, 19 nt, Artificial Sequence
  Description of Artificial Sequence: Synthetic oligonucleotide
  Sense strand starting at position 1710 of SEQ ID NO: 1882478
acagaauaccagugagucu

SEQ ID NO: 2124289 - RNA, 19 nt, Artificial Sequence
  Description of Artificial Sequence: Synthetic oligonucleotide
  Antisense strand to SEQ ID NO: 2124288
agacucacugguauucugu

SEQ ID NO: 2124290 - RNA, 19 nt, Artificial Sequence
  Description of Artificial Sequence: Synthetic oligonucleotide
  Sense strand starting at position 1713 of SEQ ID NO: 1882478
gaauaccagugagucuuaa

SEQ ID NO: 2124291 - RNA, 19 nt, Artificial Sequence
  Description of Artificial Sequence: Synthetic oligonucleotide
  Antisense strand to SEQ ID NO: 2124290
uuaagacucacugguauuc

SEQ ID NO: 2124292 - RNA, 19 nt, Artificial Sequence
  Description of Artificial Sequence: Synthetic oligonucleotide
  Sense strand starting at position 1811 of SEQ ID NO: 1882478
ccaaguccacugcaguaau

SEQ ID NO: 2124293 - RNA, 19 nt, Artificial Sequence
  Description of Artificial Sequence: Synthetic oligonucleotide
  Antisense strand to SEQ ID NO: 2124292
auuacugcaguggacuugg

SEQ ID NO: 2124294 - RNA, 19 nt, Artificial Sequence
  Description of Artificial Sequence: Synthetic oligonucleotide
  Sense strand starting at position 2044 of SEQ ID NO: 1882478
ggguaagaaaugcagguau

SEQ ID NO: 2124295 - RNA, 19 nt, Artificial Sequence
  Description of Artificial Sequence: Synthetic oligonucleotide
  Antisense strand to SEQ ID NO: 2124294
auaccugcauuucuuaccc

SEQ ID NO: 2124296 - RNA, 19 nt, Artificial Sequence
  Description of Artificial Sequence: Synthetic oligonucleotide
  Sense strand starting at position 2229 of SEQ ID NO: 1882478
cuggaagaugggugacuua

SEQ ID NO: 2124297 - RNA, 19 nt, Artificial Sequence
  Description of Artificial Sequence: Synthetic oligonucleotide
  Antisense strand to SEQ ID NO: 2124296
uaagucacccaucuuccag

SEQ ID NO: 2124298 - RNA, 19 nt, Artificial Sequence
  Description of Artificial Sequence: Synthetic oligonucleotide
  Sense strand starting at position 2294 of SEQ ID NO: 1882478
agagcuggucugugauacu

SEQ ID NO: 2124299 - RNA, 19 nt, Artificial Sequence
  Description of Artificial Sequence: Synthetic oligonucleotide
  Antisense strand to SEQ ID NO: 2124298
aguaucacagaccagcucu

SEQ ID NO: 2124300 - RNA, 19 nt, Artificial Sequence
  Description of Artificial Sequence: Synthetic oligonucleotide
  Sense strand starting at position 2376 of SEQ ID NO: 1882478
gugggaggguccuauuuca

SEQ ID NO: 2124301 - RNA, 19 nt, Artificial Sequence
  Description of Artificial Sequence: Synthetic oligonucleotide
  Antisense strand to SEQ ID NO: 2124300
ugaaauaggacccucccac

SEQ ID NO: 2124302 - RNA, 19 nt, Artificial Sequence
  Description of Artificial Sequence: Synthetic oligonucleotide
  Sense strand starting at position 2898 of SEQ ID NO: 1882478
uaagaugaggccugagagu

SEQ ID NO: 2124303 - RNA, 19 nt, Artificial Sequence
  Description of Artificial Sequence: Synthetic oligonucleotide
  Antisense strand to SEQ ID NO: 2124302
acucucaggccucaucuua

SEQ ID NO: 2124304 - RNA, 19 nt, Artificial Sequence
  Description of Artificial Sequence: Synthetic oligonucleotide
  Sense strand starting at position 3104 of SEQ ID NO: 1882478
acuuaagagcuucguauug

SEQ ID NO: 2124305 - RNA, 19 nt, Artificial Sequence
  Description of Artificial Sequence: Synthetic oligonucleotide
  Antisense strand to SEQ ID NO: 2124304
caauacgaagcucuuaagu

SEQ ID NO: 2124306 - RNA, 19 nt, Artificial Sequence
  Description of Artificial Sequence: Synthetic oligonucleotide
  Sense strand starting at position 3436 of SEQ ID NO: 1882478
ucaggauuaugccuaagug

SEQ ID NO: 2124307 - RNA, 19 nt, Artificial Sequence
  Description of Artificial Sequence: Synthetic oligonucleotide
  Antisense strand to SEQ ID NO: 2124306
cacuuaggcauaauccuga

SEQ ID NO: 2124308 - RNA, 19 nt, Artificial Sequence
  Description of Artificial Sequence: Synthetic oligonucleotide
  Sense strand starting at position 3437 of SEQ ID NO: 1882478
caggauuaugccuaaguga

SEQ ID NO: 2124309 - RNA, 19 nt, Artificial Sequence
  Description of Artificial Sequence: Synthetic oligonucleotide
  Antisense strand to SEQ ID NO: 2124308
ucacuuaggcauaauccug

SEQ ID NO: 2124310 - RNA, 19 nt, Artificial Sequence
  Description of Artificial Sequence: Synthetic oligonucleotide
  Sense strand starting at position 3440 of SEQ ID NO: 1882478
gauuaugccuaagugauuc

SEQ ID NO: 2124311 - RNA, 19 nt, Artificial Sequence
  Description of Artificial Sequence: Synthetic oligonucleotide
  Antisense strand to SEQ ID NO: 2124310
gaaucacuuaggcauaauc

SEQ ID NO: 2124312 - RNA, 19 nt, Artificial Sequence
  Description of Artificial Sequence: Synthetic oligonucleotide
  Sense strand starting at position 3477 of SEQ ID NO: 1882478
uuugguuccucuguagaag

SEQ ID NO: 2124313 - RNA, 19 nt, Artificial Sequence
  Description of Artificial Sequence: Synthetic oligonucleotide
  Antisense strand to SEQ ID NO: 2124312
cuucuacagaggaaccaaa

SEQ ID NO: 2124314 - RNA, 19 nt, Artificial Sequence
  Description of Artificial Sequence: Synthetic oligonucleotide
  Sense strand starting at position 3478 of SEQ ID NO: 1882478
uugguuccucuguagaagu

SEQ ID NO: 2124315 - RNA, 19 nt, Artificial Sequence
  Description of Artificial Sequence: Synthetic oligonucleotide
  Antisense strand to SEQ ID NO: 2124314
acuucuacagaggaaccaa

SEQ ID NO: 2124316 - RNA, 19 nt, Artificial Sequence
  Description of Artificial Sequence: Synthetic oligonucleotide
  Sense strand starting at position 3480 of SEQ ID NO: 1882478
gguuccucuguagaaguuu

SEQ ID NO: 2124317 - RNA, 19 nt, Artificial Sequence
  Description of Artificial Sequence: Synthetic oligonucleotide
  Antisense strand to SEQ ID NO: 2124316
aaacuucuacagaggaacc

SEQ ID NO: 2124318 - RNA, 19 nt, Artificial Sequence
  Description of Artificial Sequence: Synthetic oligonucleotide
  Sense strand starting at position 3530 of SEQ ID NO: 1882478
uagggaaucaacugugugu

SEQ ID NO: 2124319 - RNA, 19 nt, Artificial Sequence
  Description of Artificial Sequence: Synthetic oligonucleotide
  Antisense strand to SEQ ID NO: 2124318
acacacaguugauucccua

SEQ ID NO: 2124320 - RNA, 19 nt, Artificial Sequence
  Description of Artificial Sequence: Synthetic oligonucleotide
  Sense strand starting at position 3577 of SEQ ID NO: 1882478
cucagaauuggguaucugu

SEQ ID NO: 2124321 - RNA, 19 nt, Artificial Sequence
  Description of Artificial Sequence: Synthetic oligonucleotide
  Antisense strand to SEQ ID NO: 2124320
acagauacccaauucugag

SEQ ID NO: 2124322 - RNA, 19 nt, Artificial Sequence
  Description of Artificial Sequence: Synthetic oligonucleotide
  Sense strand starting at position 3580 of SEQ ID NO: 1882478
agaauuggguaucuguagu

SEQ ID NO: 2124323 - RNA, 19 nt, Artificial Sequence
  Description of Artificial Sequence: Synthetic oligonucleotide
  Antisense strand to SEQ ID NO: 2124322
acuacagauacccaauucu

SEQ ID NO: 2124324 - RNA, 19 nt, Artificial Sequence
  Description of Artificial Sequence: Synthetic oligonucleotide
  Sense strand starting at position 3719 of SEQ ID NO: 1882478
guggguuuacaguauguga

SEQ ID NO: 2124325 - RNA, 19 nt, Artificial Sequence
  Description of Artificial Sequence: Synthetic oligonucleotide
  Antisense strand to SEQ ID NO: 2124324
ucacauacuguaaacccac

SEQ ID NO: 2124326 - RNA, 19 nt, Artificial Sequence
  Description of Artificial Sequence: Synthetic oligonucleotide
  Sense strand starting at position 3721 of SEQ ID NO: 1882478
ggguuuacaguaugugaga

SEQ ID NO: 2124327 - RNA, 19 nt, Artificial Sequence
  Description of Artificial Sequence: Synthetic oligonucleotide
  Antisense strand to SEQ ID NO: 2124326
ucucacauacuguaaaccc

SEQ ID NO: 2124328 - RNA, 19 nt, Artificial Sequence
  Description of Artificial Sequence: Synthetic oligonucleotide
  Sense strand starting at position 3723 of SEQ ID NO: 1882478
guuuacaguaugugagaca

SEQ ID NO: 2124329 - RNA, 19 nt, Artificial Sequence
  Description of Artificial Sequence: Synthetic oligonucleotide
  Antisense strand to SEQ ID NO: 2124328
ugucucacauacuguaaac

SEQ ID NO: 2124330 - RNA, 19 nt, Artificial Sequence
  Description of Artificial Sequence: Synthetic oligonucleotide
  Sense strand starting at position 3758 of SEQ ID NO: 1882478
guauaauaacggcacagua

SEQ ID NO: 2124331 - RNA, 19 nt, Artificial Sequence
  Description of Artificial Sequence: Synthetic oligonucleotide
  Antisense strand to SEQ ID NO: 2124330
uacugugccguuauuauac

SEQ ID NO: 2124332 - RNA, 19 nt, Artificial Sequence
  Description of Artificial Sequence: Synthetic oligonucleotide
  Sense strand starting at position 3961 of SEQ ID NO: 1882478
ccagcaaagcucugggacu

SEQ ID NO: 2124333 - RNA, 19 nt, Artificial Sequence
  Description of Artificial Sequence: Synthetic oligonucleotide
  Antisense strand to SEQ ID NO: 2124332
agucccagagcuuugcugg

SEQ ID NO: 2124334 - RNA, 19 nt, Artificial Sequence
  Description of Artificial Sequence: Synthetic oligonucleotide
  Sense strand starting at position 3967 of SEQ ID NO: 1882478
aagcucugggacugguaaa

SEQ ID NO: 2124335 - RNA, 19 nt, Artificial Sequence
  Description of Artificial Sequence: Synthetic oligonucleotide
  Antisense strand to SEQ ID NO: 2124334
uuuaccagucccagagcuu

SEQ ID NO: 2124336 - RNA, 19 nt, Artificial Sequence
  Description of Artificial Sequence: Synthetic oligonucleotide
  Sense strand starting at position 116 of SEQ ID NO: 1882479
cuuaaacucggcuggugua

SEQ ID NO: 2124337 - RNA, 19 nt, Artificial Sequence
  Description of Artificial Sequence: Synthetic oligonucleotide
  Antisense strand to SEQ ID NO: 2124336
uacaccagccgaguuuaag

SEQ ID NO: 2124338 - RNA, 19 nt, Artificial Sequence
  Description of Artificial Sequence: Synthetic oligonucleotide
  Sense strand starting at position 182 of SEQ ID NO: 1882479
ugacuuuccugguugucaa

SEQ ID NO: 2124339 - RNA, 19 nt, Artificial Sequence
  Description of Artificial Sequence: Synthetic oligonucleotide
  Antisense strand to SEQ ID NO: 2124338
uugacaaccaggaaaguca

SEQ ID NO: 2124340 - RNA, 19 nt, Artificial Sequence
  Description of Artificial Sequence: Synthetic oligonucleotide
  Sense strand starting at position 183 of SEQ ID NO: 1882479
gacuuuccugguugucaau

SEQ ID NO: 2124341 - RNA, 19 nt, Artificial Sequence
  Description of Artificial Sequence: Synthetic oligonucleotide
  Antisense strand to SEQ ID NO: 2124340
auugacaaccaggaaaguc

SEQ ID NO: 2124342 - RNA, 19 nt, Artificial Sequence
  Description of Artificial Sequence: Synthetic oligonucleotide
  Sense strand starting at position 185 of SEQ ID NO: 1882479
cuuuccugguugucaauga

SEQ ID NO: 2124343 - RNA, 19 nt, Artificial Sequence
  Description of Artificial Sequence: Synthetic oligonucleotide
  Antisense strand to SEQ ID NO: 2124342
ucauugacaaccaggaaag

SEQ ID NO: 2124344 - RNA, 19 nt, Artificial Sequence
  Description of Artificial Sequence: Synthetic oligonucleotide
  Sense strand starting at position 236 of SEQ ID NO: 1882479
ccucuugagucauccguga

SEQ ID NO: 2124345 - RNA, 19 nt, Artificial Sequence
  Description of Artificial Sequence: Synthetic oligonucleotide
  Antisense strand to SEQ ID NO: 2124344
ucacggaugacucaagagg

SEQ ID NO: 2124346 - RNA, 19 nt, Artificial Sequence
  Description of Artificial Sequence: Synthetic oligonucleotide
  Sense strand starting at position 238 of SEQ ID NO: 1882479
ucuugagucauccgugacu

SEQ ID NO: 2124347 - RNA, 19 nt, Artificial Sequence
  Description of Artificial Sequence: Synthetic oligonucleotide
  Antisense strand to SEQ ID NO: 2124346
agucacggaugacucaaga

SEQ ID NO: 2124348 - RNA, 19 nt, Artificial Sequence
  Description of Artificial Sequence: Synthetic oligonucleotide
  Sense strand starting at position 288 of SEQ ID NO: 1882479
gcugacaauuccuacugau

SEQ ID NO: 2124349 - RNA, 19 nt, Artificial Sequence
  Description of Artificial Sequence: Synthetic oligonucleotide
  Antisense strand to SEQ ID NO: 2124348
aucaguaggaauugucagc

SEQ ID NO: 2124350 - RNA, 19 nt, Artificial Sequence
  Description of Artificial Sequence: Synthetic oligonucleotide
  Sense strand starting at position 300 of SEQ ID NO: 1882479
uacugauccuuucccgaga

SEQ ID NO: 2124351 - RNA, 19 nt, Artificial Sequence
  Description of Artificial Sequence: Synthetic oligonucleotide
  Antisense strand to SEQ ID NO: 2124350
ucucgggaaaggaucagua

SEQ ID NO: 2124352 - RNA, 19 nt, Artificial Sequence
  Description of Artificial Sequence: Synthetic oligonucleotide
  Sense strand starting at position 313 of SEQ ID NO: 1882479
ccgagaggguccuuccagu

SEQ ID NO: 2124353 - RNA, 19 nt, Artificial Sequence
  Description of Artificial Sequence: Synthetic oligonucleotide
  Antisense strand to SEQ ID NO: 2124352
acuggaaggacccucucgg

SEQ ID NO: 2124354 - RNA, 19 nt, Artificial Sequence
  Description of Artificial Sequence: Synthetic oligonucleotide
  Sense strand starting at position 346 of SEQ ID NO: 1882479
uucugucacuguucugauu

SEQ ID NO: 2124355 - RNA, 19 nt, Artificial Sequence
  Description of Artificial Sequence: Synthetic oligonucleotide
  Antisense strand to SEQ ID NO: 2124354
aaucagaacagugacagaa

SEQ ID NO: 2124356 - RNA, 19 nt, Artificial Sequence
  Description of Artificial Sequence: Synthetic oligonucleotide
  Sense strand starting at position 753 of SEQ ID NO: 1882479
gugcccagccuauggauua

SEQ ID NO: 2124357 - RNA, 19 nt, Artificial Sequence
  Description of Artificial Sequence: Synthetic oligonucleotide
  Antisense strand to SEQ ID NO: 2124356
uaauccauaggcugggcac

SEQ ID NO: 2124358 - RNA, 19 nt, Artificial Sequence
  Description of Artificial Sequence: Synthetic oligonucleotide
  Sense strand starting at position 929 of SEQ ID NO: 1882479
ugauguaauugcuacuaac

SEQ ID NO: 2124359 - RNA, 19 nt, Artificial Sequence
  Description of Artificial Sequence: Synthetic oligonucleotide
  Antisense strand to SEQ ID NO: 2124358
guuaguagcaauuacauca

SEQ ID NO: 2124360 - RNA, 19 nt, Artificial Sequence
  Description of Artificial Sequence: Synthetic oligonucleotide
  Sense strand starting at position 1008 of SEQ ID NO: 1882479
acagccuucuucugaaaug

SEQ ID NO: 2124361 - RNA, 19 nt, Artificial Sequence
  Description of Artificial Sequence: Synthetic oligonucleotide
  Antisense strand to SEQ ID NO: 2124360
cauuucagaagaaggcugu

SEQ ID NO: 2124362 - RNA, 19 nt, Artificial Sequence
  Description of Artificial Sequence: Synthetic oligonucleotide
  Sense strand starting at position 1132 of SEQ ID NO: 1882479
gaccuuaugucacacagag

SEQ ID NO: 2124363 - RNA, 19 nt, Artificial Sequence
  Description of Artificial Sequence: Synthetic oligonucleotide
  Antisense strand to SEQ ID NO: 2124362
cucugugugacauaagguc

SEQ ID NO: 2124364 - RNA, 19 nt, Artificial Sequence
  Description of Artificial Sequence: Synthetic oligonucleotide
  Sense strand starting at position 1281 of SEQ ID NO: 1882479
cucuauagcgccuagaaca

SEQ ID NO: 2124365 - RNA, 19 nt, Artificial Sequence
  Description of Artificial Sequence: Synthetic oligonucleotide
  Antisense strand to SEQ ID NO: 2124364
uguucuaggcgcuauagag

SEQ ID NO: 2124366 - RNA, 19 nt, Artificial Sequence
  Description of Artificial Sequence: Synthetic oligonucleotide
  Sense strand starting at position 1294 of SEQ ID NO: 1882479
agaacaaugcuuugcccau

SEQ ID NO: 2124367 - RNA, 19 nt, Artificial Sequence
  Description of Artificial Sequence: Synthetic oligonucleotide
  Antisense strand to SEQ ID NO: 2124366
augggcaaagcauuguucu

SEQ ID NO: 2124368 - RNA, 19 nt, Artificial Sequence
  Description of Artificial Sequence: Synthetic oligonucleotide
  Sense strand starting at position 1321 of SEQ ID NO: 1882479
cucaguccucuuugaggau

SEQ ID NO: 2124369 - RNA, 19 nt, Artificial Sequence
  Description of Artificial Sequence: Synthetic oligonucleotide
  Antisense strand to SEQ ID NO: 2124368
auccucaaagaggacugag

SEQ ID NO: 2124370 - RNA, 19 nt, Artificial Sequence
  Description of Artificial Sequence: Synthetic oligonucleotide
  Sense strand starting at position 1654 of SEQ ID NO: 1882479
gcuggaguccuaggacucu

SEQ ID NO: 2124371 - RNA, 19 nt, Artificial Sequence
  Description of Artificial Sequence: Synthetic oligonucleotide
  Antisense strand to SEQ ID NO: 2124370
agaguccuaggacuccagc

SEQ ID NO: 2124372 - RNA, 19 nt, Artificial Sequence
  Description of Artificial Sequence: Synthetic oligonucleotide
  Sense strand starting at position 1660 of SEQ ID NO: 1882479
guccuaggacucuggguua

SEQ ID NO: 2124373 - RNA, 19 nt, Artificial Sequence
  Description of Artificial Sequence: Synthetic oligonucleotide
  Antisense strand to SEQ ID NO: 2124372
uaacccagaguccuaggac

SEQ ID NO: 2124374 - RNA, 19 nt, Artificial Sequence
  Description of Artificial Sequence: Synthetic oligonucleotide
  Sense strand starting at position 1754 of SEQ ID NO: 1882479
gagugugggccauaccaau

SEQ ID NO: 2124375 - RNA, 19 nt, Artificial Sequence
  Description of Artificial Sequence: Synthetic oligonucleotide
  Antisense strand to SEQ ID NO: 2124374
auugguauggcccacacuc

SEQ ID NO: 2124376 - RNA, 19 nt, Artificial Sequence
  Description of Artificial Sequence: Synthetic oligonucleotide
  Sense strand starting at position 2753 of SEQ ID NO: 1882479
cagcaaucauaaggugaga

SEQ ID NO: 2124377 - RNA, 19 nt, Artificial Sequence
  Description of Artificial Sequence: Synthetic oligonucleotide
  Antisense strand to SEQ ID NO: 2124376
ucucaccuuaugauugcug

SEQ ID NO: 2124378 - RNA, 19 nt, Artificial Sequence
  Description of Artificial Sequence: Synthetic oligonucleotide
  Sense strand starting at position 2847 of SEQ ID NO: 1882479
acaggaucccugcaaaugu

SEQ ID NO: 2124379 - RNA, 19 nt, Artificial Sequence
  Description of Artificial Sequence: Synthetic oligonucleotide
  Antisense strand to SEQ ID NO: 2124378
acauuugcagggauccugu

SEQ ID NO: 2124380 - RNA, 19 nt, Artificial Sequence
  Description of Artificial Sequence: Synthetic oligonucleotide
  Sense strand starting at position 3143 of SEQ ID NO: 1882479
gggaaacaagagcgauauu

SEQ ID NO: 2124381 - RNA, 19 nt, Artificial Sequence
  Description of Artificial Sequence: Synthetic oligonucleotide
  Antisense strand to SEQ ID NO: 2124380
aauaucgcucuuguuuccc

SEQ ID NO: 2124382 - RNA, 19 nt, Artificial Sequence
  Description of Artificial Sequence: Synthetic oligonucleotide
  Sense strand starting at position 3225 of SEQ ID NO: 1882479
ggugucuuuauauggagag

SEQ ID NO: 2124383 - RNA, 19 nt, Artificial Sequence
  Description of Artificial Sequence: Synthetic oligonucleotide
  Antisense strand to SEQ ID NO: 2124382
cucuccauauaaagacacc

SEQ ID NO: 2124384 - RNA, 19 nt, Artificial Sequence
  Description of Artificial Sequence: Synthetic oligonucleotide
  Sense strand starting at position 3318 of SEQ ID NO: 1882479
aaauuagacggaugcaguu

SEQ ID NO: 2124385 - RNA, 19 nt, Artificial Sequence
  Description of Artificial Sequence: Synthetic oligonucleotide
  Antisense strand to SEQ ID NO: 2124384
aacugcauccgucuaauuu

SEQ ID NO: 2124386 - RNA, 19 nt, Artificial Sequence
  Description of Artificial Sequence: Synthetic oligonucleotide
  Sense strand starting at position 3332 of SEQ ID NO: 1882479
caguuauaagcccaggaau

SEQ ID NO: 2124387 - RNA, 19 nt, Artificial Sequence
  Description of Artificial Sequence: Synthetic oligonucleotide
  Antisense strand to SEQ ID NO: 2124386
auuccugggcuuauaacug

SEQ ID NO: 2124388 - RNA, 19 nt, Artificial Sequence
  Description of Artificial Sequence: Synthetic oligonucleotide
  Sense strand starting at position 3422 of SEQ ID NO: 1882479
gagcguggcccugcugaua

SEQ ID NO: 2124389 - RNA, 19 nt, Artificial Sequence
  Description of Artificial Sequence: Synthetic oligonucleotide
  Antisense strand to SEQ ID NO: 2124388
uaucagcagggccacgcuc

SEQ ID NO: 2124390 - RNA, 19 nt, Artificial Sequence
  Description of Artificial Sequence: Synthetic oligonucleotide
  Sense strand starting at position 3509 of SEQ ID NO: 1882479
uuuguagcaguuuguuaua

SEQ ID NO: 2124391 - RNA, 19 nt, Artificial Sequence
  Description of Artificial Sequence: Synthetic oligonucleotide
  Antisense strand to SEQ ID NO: 2124390
uauaacaaacugcuacaaa

SEQ ID NO: 2124392 - RNA, 19 nt, Artificial Sequence
  Description of Artificial Sequence: Synthetic oligonucleotide
  Sense strand starting at position 3512 of SEQ ID NO: 1882479
guagcaguuuguuauagca

SEQ ID NO: 2124393 - RNA, 19 nt, Artificial Sequence
  Description of Artificial Sequence: Synthetic oligonucleotide
  Antisense strand to SEQ ID NO: 2124392
ugcuauaacaaacugcuac

SEQ ID NO: 2124394 - RNA, 19 nt, Artificial Sequence
  Description of Artificial Sequence: Synthetic oligonucleotide
  Sense strand starting at position 3534 of SEQ ID NO: 1882479
ccaggaagcuacuguagaa

SEQ ID NO: 2124395 - RNA, 19 nt, Artificial Sequence
  Description of Artificial Sequence: Synthetic oligonucleotide
  Antisense strand to SEQ ID NO: 2124394
uucuacaguagcuuccugg

SEQ ID NO: 2124396 - RNA, 19 nt, Artificial Sequence
  Description of Artificial Sequence: Synthetic oligonucleotide
  Sense strand starting at position 3544 of SEQ ID NO: 1882479
acuguagaagcguagacau

SEQ ID NO: 2124397 - RNA, 19 nt, Artificial Sequence
  Description of Artificial Sequence: Synthetic oligonucleotide
  Antisense strand to SEQ ID NO: 2124396
augucuacgcuucuacagu

SEQ ID NO: 2124398 - RNA, 19 nt, Artificial Sequence
  Description of Artificial Sequence: Synthetic oligonucleotide
  Sense strand starting at position 3576 of SEQ ID NO: 1882479
caaacaguauuggaaagau

SEQ ID NO: 2124399 - RNA, 19 nt, Artificial Sequence
  Description of Artificial Sequence: Synthetic oligonucleotide
  Antisense strand to SEQ ID NO: 2124398
aucuuuccaauacuguuug

SEQ ID NO: 2124400 - RNA, 19 nt, Artificial Sequence
  Description of Artificial Sequence: Synthetic oligonucleotide
  Sense strand starting at position 3658 of SEQ ID NO: 1882479
ugcagagacuaucagaaau

SEQ ID NO: 2124401 - RNA, 19 nt, Artificial Sequence
  Description of Artificial Sequence: Synthetic oligonucleotide
  Antisense strand to SEQ ID NO: 2124400
auuucugauagucucugca

SEQ ID NO: 2124402 - RNA, 19 nt, Artificial Sequence
  Description of Artificial Sequence: Synthetic oligonucleotide
  Sense strand starting at position 3690 of SEQ ID NO: 1882479
uugcauauagaauggguaa

SEQ ID NO: 2124403 - RNA, 19 nt, Artificial Sequence
  Description of Artificial Sequence: Synthetic oligonucleotide
  Antisense strand to SEQ ID NO: 2124402
uuacccauucuauaugcaa

SEQ ID NO: 2124404 - RNA, 19 nt, Artificial Sequence
  Description of Artificial Sequence: Synthetic oligonucleotide
  Sense strand starting at position 3691 of SEQ ID NO: 1882479
ugcauauagaauggguaaa

SEQ ID NO: 2124405 - RNA, 19 nt, Artificial Sequence
  Description of Artificial Sequence: Synthetic oligonucleotide
  Antisense strand to SEQ ID NO: 2124404
uuuacccauucuauaugca

SEQ ID NO: 2124406 - RNA, 19 nt, Artificial Sequence
  Description of Artificial Sequence: Synthetic oligonucleotide
  Sense strand starting at position 3703 of SEQ ID NO: 1882479
ggguaaagcuuggccagau

SEQ ID NO: 2124407 - RNA, 19 nt, Artificial Sequence
  Description of Artificial Sequence: Synthetic oligonucleotide
  Antisense strand to SEQ ID NO: 2124406
aucuggccaagcuuuaccc

SEQ ID NO: 2124408 - RNA, 19 nt, Artificial Sequence
  Description of Artificial Sequence: Synthetic oligonucleotide
  Sense strand starting at position 3704 of SEQ ID NO: 1882479
gguaaagcuuggccagaug

SEQ ID NO: 2124409 - RNA, 19 nt, Artificial Sequence
  Description of Artificial Sequence: Synthetic oligonucleotide
  Antisense strand to SEQ ID NO: 2124408
caucuggccaagcuuuacc

SEQ ID NO: 2124410 - RNA, 19 nt, Artificial Sequence
  Description of Artificial Sequence: Synthetic oligonucleotide
  Sense strand starting at position 51 of SEQ ID NO: 1882480
cuaggaagaguuggucacu

SEQ ID NO: 2124411 - RNA, 19 nt, Artificial Sequence
  Description of Artificial Sequence: Synthetic oligonucleotide
  Antisense strand to SEQ ID NO: 2124410
agugaccaacucuuccuag

SEQ ID NO: 2124412 - RNA, 19 nt, Artificial Sequence
  Description of Artificial Sequence: Synthetic oligonucleotide
  Sense strand starting at position 54 of SEQ ID NO: 1882480
ggaagaguuggucacucug

SEQ ID NO: 2124413 - RNA, 19 nt, Artificial Sequence
  Description of Artificial Sequence: Synthetic oligonucleotide
  Antisense strand to SEQ ID NO: 2124412
cagagugaccaacucuucc

SEQ ID NO: 2124414 - RNA, 19 nt, Artificial Sequence
  Description of Artificial Sequence: Synthetic oligonucleotide
  Sense strand starting at position 56 of SEQ ID NO: 1882480
aagaguuggucacucugau

SEQ ID NO: 2124415 - RNA, 19 nt, Artificial Sequence
  Description of Artificial Sequence: Synthetic oligonucleotide
  Antisense strand to SEQ ID NO: 2124414
aucagagugaccaacucuu

SEQ ID NO: 2124416 - RNA, 19 nt, Artificial Sequence
  Description of Artificial Sequence: Synthetic oligonucleotide
  Sense strand starting at position 268 of SEQ ID NO: 1882480
uuuguaguucgagaauauu

SEQ ID NO: 2124417 - RNA, 19 nt, Artificial Sequence
  Description of Artificial Sequence: Synthetic oligonucleotide
  Antisense strand to SEQ ID NO: 2124416
aauauucucgaacuacaaa

SEQ ID NO: 2124418 - RNA, 19 nt, Artificial Sequence
  Description of Artificial Sequence: Synthetic oligonucleotide
  Sense strand starting at position 279 of SEQ ID NO: 1882480
agaauauucugggucuccu

SEQ ID NO: 2124419 - RNA, 19 nt, Artificial Sequence
  Description of Artificial Sequence: Synthetic oligonucleotide
  Antisense strand to SEQ ID NO: 2124418
aggagacccagaauauucu

SEQ ID NO: 2124420 - RNA, 19 nt, Artificial Sequence
  Description of Artificial Sequence: Synthetic oligonucleotide
  Sense strand starting at position 510 of SEQ ID NO: 1882480
ugauuauggugcucagaau

SEQ ID NO: 2124421 - RNA, 19 nt, Artificial Sequence
  Description of Artificial Sequence: Synthetic oligonucleotide
  Antisense strand to SEQ ID NO: 2124420
auucugagcaccauaauca

SEQ ID NO: 2124422 - RNA, 19 nt, Artificial Sequence
  Description of Artificial Sequence: Synthetic oligonucleotide
  Sense strand starting at position 511 of SEQ ID NO: 1882480
gauuauggugcucagaaua

SEQ ID NO: 2124423 - RNA, 19 nt, Artificial Sequence
  Description of Artificial Sequence: Synthetic oligonucleotide
  Antisense strand to SEQ ID NO: 2124422
uauucugagcaccauaauc

SEQ ID NO: 2124424 - RNA, 19 nt, Artificial Sequence
  Description of Artificial Sequence: Synthetic oligonucleotide
  Sense strand starting at position 940 of SEQ ID NO: 1882480
uaaguauaaugagugucaa

SEQ ID NO: 2124425 - RNA, 19 nt, Artificial Sequence
  Description of Artificial Sequence: Synthetic oligonucleotide
  Antisense strand to SEQ ID NO: 2124424
uugacacucauuauacuua

SEQ ID NO: 2124426 - RNA, 19 nt, Artificial Sequence
  Description of Artificial Sequence: Synthetic oligonucleotide
  Sense strand starting at position 941 of SEQ ID NO: 1882480
aaguauaaugagugucaaa

SEQ ID NO: 2124427 - RNA, 19 nt, Artificial Sequence
  Description of Artificial Sequence: Synthetic oligonucleotide
  Antisense strand to SEQ ID NO: 2124426
uuugacacucauuauacuu

SEQ ID NO: 2124428 - RNA, 19 nt, Artificial Sequence
  Description of Artificial Sequence: Synthetic oligonucleotide
  Sense strand starting at position 1018 of SEQ ID NO: 1882480
ugagcaucucugggaccaa

SEQ ID NO: 2124429 - RNA, 19 nt, Artificial Sequence
  Description of Artificial Sequence: Synthetic oligonucleotide
  Antisense strand to SEQ ID NO: 2124428
uuggucccagagaugcuca

SEQ ID NO: 2124430 - RNA, 19 nt, Artificial Sequence
  Description of Artificial Sequence: Synthetic oligonucleotide
  Sense strand starting at position 1100 of SEQ ID NO: 1882480
gcuccaugcauggaagaga

SEQ ID NO: 2124431 - RNA, 19 nt, Artificial Sequence
  Description of Artificial Sequence: Synthetic oligonucleotide
  Antisense strand to SEQ ID NO: 2124430
ucucuuccaugcauggagc

SEQ ID NO: 2124432 - RNA, 19 nt, Artificial Sequence
  Description of Artificial Sequence: Synthetic oligonucleotide
  Sense strand starting at position 1158 of SEQ ID NO: 1882480
agcagacaaucauugaauu

SEQ ID NO: 2124433 - RNA, 19 nt, Artificial Sequence
  Description of Artificial Sequence: Synthetic oligonucleotide
  Antisense strand to SEQ ID NO: 2124432
aauucaaugauugucugcu

SEQ ID NO: 2124434 - RNA, 19 nt, Artificial Sequence
  Description of Artificial Sequence: Synthetic oligonucleotide
  Sense strand starting at position 1159 of SEQ ID NO: 1882480
gcagacaaucauugaauuc

SEQ ID NO: 2124435 - RNA, 19 nt, Artificial Sequence
  Description of Artificial Sequence: Synthetic oligonucleotide
  Antisense strand to SEQ ID NO: 2124434
gaauucaaugauugucugc

SEQ ID NO: 2124436 - RNA, 19 nt, Artificial Sequence
  Description of Artificial Sequence: Synthetic oligonucleotide
  Sense strand starting at position 1239 of SEQ ID NO: 1882480
gcaagaaagucagcaacua

SEQ ID NO: 2124437 - RNA, 19 nt, Artificial Sequence
  Description of Artificial Sequence: Synthetic oligonucleotide
  Antisense strand to SEQ ID NO: 2124436
uaguugcugacuuucuugc

SEQ ID NO: 2124438 - RNA, 19 nt, Artificial Sequence
  Description of Artificial Sequence: Synthetic oligonucleotide
  Sense strand starting at position 1519 of SEQ ID NO: 1882480
ggauaacuggucugccaga

SEQ ID NO: 2124439 - RNA, 19 nt, Artificial Sequence
  Description of Artificial Sequence: Synthetic oligonucleotide
  Antisense strand to SEQ ID NO: 2124438
ucuggcagaccaguuaucc

SEQ ID NO: 2124440 - RNA, 19 nt, Artificial Sequence
  Description of Artificial Sequence: Synthetic oligonucleotide
  Sense strand starting at position 1524 of SEQ ID NO: 1882480
acuggucugccagagggaa

SEQ ID NO: 2124441 - RNA, 19 nt, Artificial Sequence
  Description of Artificial Sequence: Synthetic oligonucleotide
  Antisense strand to SEQ ID NO: 2124440
uucccucuggcagaccagu

SEQ ID NO: 2124442 - RNA, 19 nt, Artificial Sequence
  Description of Artificial Sequence: Synthetic oligonucleotide
  Sense strand starting at position 1581 of SEQ ID NO: 1882480
gaaagaaagucuguuucuu

SEQ ID NO: 2124443 - RNA, 19 nt, Artificial Sequence
  Description of Artificial Sequence: Synthetic oligonucleotide
  Antisense strand to SEQ ID NO: 2124442
aagaaacagacuuucuuuc

SEQ ID NO: 2124444 - RNA, 19 nt, Artificial Sequence
  Description of Artificial Sequence: Synthetic oligonucleotide
  Sense strand starting at position 1858 of SEQ ID NO: 1882480
uuaggaagcuaagugauau

SEQ ID NO: 2124445 - RNA, 19 nt, Artificial Sequence
  Description of Artificial Sequence: Synthetic oligonucleotide
  Antisense strand to SEQ ID NO: 2124444
auaucacuuagcuuccuaa

SEQ ID NO: 2124446 - RNA, 19 nt, Artificial Sequence
  Description of Artificial Sequence: Synthetic oligonucleotide
  Sense strand starting at position 2161 of SEQ ID NO: 1882480
aaauuacuucuauggguga

SEQ ID NO: 2124447 - RNA, 19 nt, Artificial Sequence
  Description of Artificial Sequence: Synthetic oligonucleotide
  Antisense strand to SEQ ID NO: 2124446
ucacccauagaaguaauuu

SEQ ID NO: 2124448 - RNA, 19 nt, Artificial Sequence
  Description of Artificial Sequence: Synthetic oligonucleotide
  Sense strand starting at position 2166 of SEQ ID NO: 1882480
acuucuaugggugauguaa

SEQ ID NO: 2124449 - RNA, 19 nt, Artificial Sequence
  Description of Artificial Sequence: Synthetic oligonucleotide
  Antisense strand to SEQ ID NO: 2124448
uuacaucacccauagaagu

SEQ ID NO: 2124450 - RNA, 19 nt, Artificial Sequence
  Description of Artificial Sequence: Synthetic oligonucleotide
  Sense strand starting at position 2219 of SEQ ID NO: 1882480
gcaaguaaacucugacuca

SEQ ID NO: 2124451 - RNA, 19 nt, Artificial Sequence
  Description of Artificial Sequence: Synthetic oligonucleotide
  Antisense strand to SEQ ID NO: 2124450
ugagucagaguuuacuugc

SEQ ID NO: 2124452 - RNA, 19 nt, Artificial Sequence
  Description of Artificial Sequence: Synthetic oligonucleotide
  Sense strand starting at position 2240 of SEQ ID NO: 1882480
agaauaaguucuuuaagca

SEQ ID NO: 2124453 - RNA, 19 nt, Artificial Sequence
  Description of Artificial Sequence: Synthetic oligonucleotide
  Antisense strand to SEQ ID NO: 2124452
ugcuuaaagaacuuauucu

SEQ ID NO: 2124454 - RNA, 19 nt, Artificial Sequence
  Description of Artificial Sequence: Synthetic oligonucleotide
  Sense strand starting at position 2411 of SEQ ID NO: 1882480
gcauccaaacacuggaauu

SEQ ID NO: 2124455 - RNA, 19 nt, Artificial Sequence
  Description of Artificial Sequence: Synthetic oligonucleotide
  Antisense strand to SEQ ID NO: 2124454
aauuccaguguuuggaugc

SEQ ID NO: 2124456 - RNA, 19 nt, Artificial Sequence
  Description of Artificial Sequence: Synthetic oligonucleotide
  Sense strand starting at position 2511 of SEQ ID NO: 1882480
gagaaauauugacuggugu

SEQ ID NO: 2124457 - RNA, 19 nt, Artificial Sequence
  Description of Artificial Sequence: Synthetic oligonucleotide
  Antisense strand to SEQ ID NO: 2124456
acaccagucaauauuucuc

SEQ ID NO: 2124458 - RNA, 19 nt, Artificial Sequence
  Description of Artificial Sequence: Synthetic oligonucleotide
  Sense strand starting at position 2899 of SEQ ID NO: 1882480
gaccucauaugauugaugu

SEQ ID NO: 2124459 - RNA, 19 nt, Artificial Sequence
  Description of Artificial Sequence: Synthetic oligonucleotide
  Antisense strand to SEQ ID NO: 2124458
acaucaaucauaugagguc

SEQ ID NO: 2124460 - RNA, 19 nt, Artificial Sequence
  Description of Artificial Sequence: Synthetic oligonucleotide
  Sense strand starting at position 2978 of SEQ ID NO: 1882480
uuaaguacagagcauuaau

SEQ ID NO: 2124461 - RNA, 19 nt, Artificial Sequence
  Description of Artificial Sequence: Synthetic oligonucleotide
  Antisense strand to SEQ ID NO: 2124460
auuaaugcucuguacuuaa

SEQ ID NO: 2124462 - RNA, 19 nt, Artificial Sequence
  Description of Artificial Sequence: Synthetic oligonucleotide
  Sense strand starting at position 2981 of SEQ ID NO: 1882480
aguacagagcauuaauauc

SEQ ID NO: 2124463 - RNA, 19 nt, Artificial Sequence
  Description of Artificial Sequence: Synthetic oligonucleotide
  Antisense strand to SEQ ID NO: 2124462
gauauuaaugcucuguacu

SEQ ID NO: 2124464 - RNA, 19 nt, Artificial Sequence
  Description of Artificial Sequence: Synthetic oligonucleotide
  Sense strand starting at position 3003 of SEQ ID NO: 1882480
uuuguuaaaugagcaaaga

SEQ ID NO: 2124465 - RNA, 19 nt, Artificial Sequence
  Description of Artificial Sequence: Synthetic oligonucleotide
  Antisense strand to SEQ ID NO: 2124464
ucuuugcucauuuaacaaa

SEQ ID NO: 2124466 - RNA, 19 nt, Artificial Sequence
  Description of Artificial Sequence: Synthetic oligonucleotide
  Sense strand starting at position 3135 of SEQ ID NO: 1882480
ugaagcagacuuuaauguu

SEQ ID NO: 2124467 - RNA, 19 nt, Artificial Sequence
  Description of Artificial Sequence: Synthetic oligonucleotide
  Antisense strand to SEQ ID NO: 2124466
aacauuaaagucugcuuca

SEQ ID NO: 2124468 - RNA, 19 nt, Artificial Sequence
  Description of Artificial Sequence: Synthetic oligonucleotide
  Sense strand starting at position 3255 of SEQ ID NO: 1882480
ucuguuucgcagcuuuaua

SEQ ID NO: 2124469 - RNA, 19 nt, Artificial Sequence
  Description of Artificial Sequence: Synthetic oligonucleotide
  Antisense strand to SEQ ID NO: 2124468
uauaaagcugcgaaacaga

SEQ ID NO: 2124470 - RNA, 19 nt, Artificial Sequence
  Description of Artificial Sequence: Synthetic oligonucleotide
  Sense strand starting at position 3380 of SEQ ID NO: 1882480
ucaucaaagcuguaaaugu

SEQ ID NO: 2124471 - RNA, 19 nt, Artificial Sequence
  Description of Artificial Sequence: Synthetic oligonucleotide
  Antisense strand to SEQ ID NO: 2124470
acauuuacagcuuugauga

SEQ ID NO: 2124472 - RNA, 19 nt, Artificial Sequence
  Description of Artificial Sequence: Synthetic oligonucleotide
  Sense strand starting at position 3454 of SEQ ID NO: 1882480
gagaacaaggucugucaua

SEQ ID NO: 2124473 - RNA, 19 nt, Artificial Sequence
  Description of Artificial Sequence: Synthetic oligonucleotide
  Antisense strand to SEQ ID NO: 2124472
uaugacagaccuuguucuc

SEQ ID NO: 2124474 - RNA, 19 nt, Artificial Sequence
  Description of Artificial Sequence: Synthetic oligonucleotide
  Sense strand starting at position 3495 of SEQ ID NO: 1882480
auaggaauguccucucuau

SEQ ID NO: 2124475 - RNA, 19 nt, Artificial Sequence
  Description of Artificial Sequence: Synthetic oligonucleotide
  Antisense strand to SEQ ID NO: 2124474
auagagaggacauuccuau

SEQ ID NO: 2124476 - RNA, 19 nt, Artificial Sequence
  Description of Artificial Sequence: Synthetic oligonucleotide
  Sense strand starting at position 3524 of SEQ ID NO: 1882480
ggcaccuauuuguuuaauu

SEQ ID NO: 2124477 - RNA, 19 nt, Artificial Sequence
  Description of Artificial Sequence: Synthetic oligonucleotide
  Antisense strand to SEQ ID NO: 2124476
aauuaaacaaauaggugcc

SEQ ID NO: 2124478 - RNA, 19 nt, Artificial Sequence
  Description of Artificial Sequence: Synthetic oligonucleotide
  Sense strand starting at position 3640 of SEQ ID NO: 1882480
aggagcuuauaaucaguua

SEQ ID NO: 2124479 - RNA, 19 nt, Artificial Sequence
  Description of Artificial Sequence: Synthetic oligonucleotide
  Antisense strand to SEQ ID NO: 2124478
uaacugauuauaagcuccu

SEQ ID NO: 2124480 - RNA, 19 nt, Artificial Sequence
  Description of Artificial Sequence: Synthetic oligonucleotide
  Sense strand starting at position 3643 of SEQ ID NO: 1882480
agcuuauaaucaguuaaag

SEQ ID NO: 2124481 - RNA, 19 nt, Artificial Sequence
  Description of Artificial Sequence: Synthetic oligonucleotide
  Antisense strand to SEQ ID NO: 2124480
cuuuaacugauuauaagcu

SEQ ID NO: 2124482 - RNA, 19 nt, Artificial Sequence
  Description of Artificial Sequence: Synthetic oligonucleotide
  Sense strand starting at position 3846 of SEQ ID NO: 1882480
ccuaaauucugagugacuu

SEQ ID NO: 2124483 - RNA, 19 nt, Artificial Sequence
  Description of Artificial Sequence: Synthetic oligonucleotide
  Antisense strand to SEQ ID NO: 2124482
aagucacucagaauuuagg

SEQ ID NO: 2124484 - RNA, 19 nt, Artificial Sequence
  Description of Artificial Sequence: Synthetic oligonucleotide
  Sense strand starting at position 3847 of SEQ ID NO: 1882480
cuaaauucugagugacuuu

SEQ ID NO: 2124485 - RNA, 19 nt, Artificial Sequence
  Description of Artificial Sequence: Synthetic oligonucleotide
  Antisense strand to SEQ ID NO: 2124484
aaagucacucagaauuuag

SEQ ID NO: 2124486 - RNA, 19 nt, Artificial Sequence
  Description of Artificial Sequence: Synthetic oligonucleotide
  Sense strand starting at position 3969 of SEQ ID NO: 1882480
auacuauaaucugcaugga

SEQ ID NO: 2124487 - RNA, 19 nt, Artificial Sequence
  Description of Artificial Sequence: Synthetic oligonucleotide
  Antisense strand to SEQ ID NO: 2124486
uccaugcagauuauaguau

SEQ ID NO: 2124488 - RNA, 19 nt, Artificial Sequence
  Description of Artificial Sequence: Synthetic oligonucleotide
  Sense strand starting at position 3972 of SEQ ID NO: 1882480
cuauaaucugcauggauua

SEQ ID NO: 2124489 - RNA, 19 nt, Artificial Sequence
  Description of Artificial Sequence: Synthetic oligonucleotide
  Antisense strand to SEQ ID NO: 2124488
uaauccaugcagauuauag

SEQ ID NO: 2124490 - RNA, 19 nt, Artificial Sequence
  Description of Artificial Sequence: Synthetic oligonucleotide
  Sense strand starting at position 99 of SEQ ID NO: 1882481
gugguauugcuuuaaaccu

SEQ ID NO: 2124491 - RNA, 19 nt, Artificial Sequence
  Description of Artificial Sequence: Synthetic oligonucleotide
  Antisense strand to SEQ ID NO: 2124490
agguuuaaagcaauaccac

SEQ ID NO: 2124492 - RNA, 19 nt, Artificial Sequence
  Description of Artificial Sequence: Synthetic oligonucleotide
  Sense strand starting at position 131 of SEQ ID NO: 1882481
uugugcuaccugggauaaa

SEQ ID NO: 2124493 - RNA, 19 nt, Artificial Sequence
  Description of Artificial Sequence: Synthetic oligonucleotide
  Antisense strand to SEQ ID NO: 2124492
uuuaucccagguagcacaa

SEQ ID NO: 2124494 - RNA, 19 nt, Artificial Sequence
  Description of Artificial Sequence: Synthetic oligonucleotide
  Sense strand starting at position 134 of SEQ ID NO: 1882481
ugcuaccugggauaaagua

SEQ ID NO: 2124495 - RNA, 19 nt, Artificial Sequence
  Description of Artificial Sequence: Synthetic oligonucleotide
  Antisense strand to SEQ ID NO: 2124494
uacuuuaucccagguagca

SEQ ID NO: 2124496 - RNA, 19 nt, Artificial Sequence
  Description of Artificial Sequence: Synthetic oligonucleotide
  Sense strand starting at position 286 of SEQ ID NO: 1882481
agauccauaucagagagaa

SEQ ID NO: 2124497 - RNA, 19 nt, Artificial Sequence
  Description of Artificial Sequence: Synthetic oligonucleotide
  Antisense strand to SEQ ID NO: 2124496
uucucucugauauggaucu

SEQ ID NO: 2124498 - RNA, 19 nt, Artificial Sequence
  Description of Artificial Sequence: Synthetic oligonucleotide
  Sense strand starting at position 332 of SEQ ID NO: 1882481
gagucaagccuugaaaggu

SEQ ID NO: 2124499 - RNA, 19 nt, Artificial Sequence
  Description of Artificial Sequence: Synthetic oligonucleotide
  Antisense strand to SEQ ID NO: 2124498
accuuucaaggcuugacuc

SEQ ID NO: 2124500 - RNA, 19 nt, Artificial Sequence
  Description of Artificial Sequence: Synthetic oligonucleotide
  Sense strand starting at position 553 of SEQ ID NO: 1882481
auuguaaacuguccucaug

SEQ ID NO: 2124501 - RNA, 19 nt, Artificial Sequence
  Description of Artificial Sequence: Synthetic oligonucleotide
  Antisense strand to SEQ ID NO: 2124500
caugaggacaguuuacaau

SEQ ID NO: 2124502 - RNA, 19 nt, Artificial Sequence
  Description of Artificial Sequence: Synthetic oligonucleotide
  Sense strand starting at position 555 of SEQ ID NO: 1882481
uguaaacuguccucaugaa

SEQ ID NO: 2124503 - RNA, 19 nt, Artificial Sequence
  Description of Artificial Sequence: Synthetic oligonucleotide
  Antisense strand to SEQ ID NO: 2124502
uucaugaggacaguuuaca

SEQ ID NO: 2124504 - RNA, 19 nt, Artificial Sequence
  Description of Artificial Sequence: Synthetic oligonucleotide
  Sense strand starting at position 556 of SEQ ID NO: 1882481
guaaacuguccucaugaau

SEQ ID NO: 2124505 - RNA, 19 nt, Artificial Sequence
  Description of Artificial Sequence: Synthetic oligonucleotide
  Antisense strand to SEQ ID NO: 2124504
auucaugaggacaguuuac

SEQ ID NO: 2124506 - RNA, 19 nt, Artificial Sequence
  Description of Artificial Sequence: Synthetic oligonucleotide
  Sense strand starting at position 562 of SEQ ID NO: 1882481
uguccucaugaaugaaauc

SEQ ID NO: 2124507 - RNA, 19 nt, Artificial Sequence
  Description of Artificial Sequence: Synthetic oligonucleotide
  Antisense strand to SEQ ID NO: 2124506
gauuucauucaugaggaca

SEQ ID NO: 2124508 - RNA, 19 nt, Artificial Sequence
  Description of Artificial Sequence: Synthetic oligonucleotide
  Sense strand starting at position 614 of SEQ ID NO: 1882481
ugaucucaguguuuaauga

SEQ ID NO: 2124509 - RNA, 19 nt, Artificial Sequence
  Description of Artificial Sequence: Synthetic oligonucleotide
  Antisense strand to SEQ ID NO: 2124508
ucauuaaacacugagauca

SEQ ID NO: 2124510 - RNA, 19 nt, Artificial Sequence
  Description of Artificial Sequence: Synthetic oligonucleotide
  Sense strand starting at position 615 of SEQ ID NO: 1882481
gaucucaguguuuaaugaa

SEQ ID NO: 2124511 - RNA, 19 nt, Artificial Sequence
  Description of Artificial Sequence: Synthetic oligonucleotide
  Antisense strand to SEQ ID NO: 2124510
uucauuaaacacugagauc

SEQ ID NO: 2124512 - RNA, 19 nt, Artificial Sequence
  Description of Artificial Sequence: Synthetic oligonucleotide
  Sense strand starting at position 754 of SEQ ID NO: 1882481
auguguacucuuggaauca

SEQ ID NO: 2124513 - RNA, 19 nt, Artificial Sequence
  Description of Artificial Sequence: Synthetic oligonucleotide
  Antisense strand to SEQ ID NO: 2124512
ugauuccaagaguacacau

SEQ ID NO: 2124514 - RNA, 19 nt, Artificial Sequence
  Description of Artificial Sequence: Synthetic oligonucleotide
  Sense strand starting at position 765 of SEQ ID NO: 1882481
uggaaucagcuguaaauca

SEQ ID NO: 2124515 - RNA, 19 nt, Artificial Sequence
  Description of Artificial Sequence: Synthetic oligonucleotide
  Antisense strand to SEQ ID NO: 2124514
ugauuuacagcugauucca

SEQ ID NO: 2124516 - RNA, 19 nt, Artificial Sequence
  Description of Artificial Sequence: Synthetic oligonucleotide
  Sense strand starting at position 971 of SEQ ID NO: 1882481
auagaucugucuuuacuca

SEQ ID NO: 2124517 - RNA, 19 nt, Artificial Sequence
  Description of Artificial Sequence: Synthetic oligonucleotide
  Antisense strand to SEQ ID NO: 2124516
ugaguaaagacagaucuau

SEQ ID NO: 2124518 - RNA, 19 nt, Artificial Sequence
  Description of Artificial Sequence: Synthetic oligonucleotide
  Sense strand starting at position 1032 of SEQ ID NO: 1882481
uuugaaauucuccagugcu

SEQ ID NO: 2124519 - RNA, 19 nt, Artificial Sequence
  Description of Artificial Sequence: Synthetic oligonucleotide
  Antisense strand to SEQ ID NO: 2124518
agcacuggagaauuucaaa

SEQ ID NO: 2124520 - RNA, 19 nt, Artificial Sequence
  Description of Artificial Sequence: Synthetic oligonucleotide
  Sense strand starting at position 1081 of SEQ ID NO: 1882481
augacaucuccaugaguaa

SEQ ID NO: 2124521 - RNA, 19 nt, Artificial Sequence
  Description of Artificial Sequence: Synthetic oligonucleotide
  Antisense strand to SEQ ID NO: 2124520
uuacucauggagaugucau

SEQ ID NO: 2124522 - RNA, 19 nt, Artificial Sequence
  Description of Artificial Sequence: Synthetic oligonucleotide
  Sense strand starting at position 1152 of SEQ ID NO: 1882481
acuguauuccaauguuaga

SEQ ID NO: 2124523 - RNA, 19 nt, Artificial Sequence
  Description of Artificial Sequence: Synthetic oligonucleotide
  Antisense strand to SEQ ID NO: 2124522
ucuaacauuggaauacagu

SEQ ID NO: 2124524 - RNA, 19 nt, Artificial Sequence
  Description of Artificial Sequence: Synthetic oligonucleotide
  Sense strand starting at position 1211 of SEQ ID NO: 1882481
agaauuccaguuugaaagu

SEQ ID NO: 2124525 - RNA, 19 nt, Artificial Sequence
  Description of Artificial Sequence: Synthetic oligonucleotide
  Antisense strand to SEQ ID NO: 2124524
acuuucaaacuggaauucu

SEQ ID NO: 2124526 - RNA, 19 nt, Artificial Sequence
  Description of Artificial Sequence: Synthetic oligonucleotide
  Sense strand starting at position 1290 of SEQ ID NO: 1882481
aucacauuccuuuggagga

SEQ ID NO: 2124527 - RNA, 19 nt, Artificial Sequence
  Description of Artificial Sequence: Synthetic oligonucleotide
  Antisense strand to SEQ ID NO: 2124526
uccuccaaaggaaugugau

SEQ ID NO: 2124528 - RNA, 19 nt, Artificial Sequence
  Description of Artificial Sequence: Synthetic oligonucleotide
  Sense strand starting at position 1303 of SEQ ID NO: 1882481
ggaggaacuucuucuccua

SEQ ID NO: 2124529 - RNA, 19 nt, Artificial Sequence
  Description of Artificial Sequence: Synthetic oligonucleotide
  Antisense strand to SEQ ID NO: 2124528
uaggagaagaaguuccucc

SEQ ID NO: 2124530 - RNA, 19 nt, Artificial Sequence
  Description of Artificial Sequence: Synthetic oligonucleotide
  Sense strand starting at position 1306 of SEQ ID NO: 1882481
ggaacuucuucuccuaguu

SEQ ID NO: 2124531 - RNA, 19 nt, Artificial Sequence
  Description of Artificial Sequence: Synthetic oligonucleotide
  Antisense strand to SEQ ID NO: 2124530
aacuaggagaagaaguucc

SEQ ID NO: 2124532 - RNA, 19 nt, Artificial Sequence
  Description of Artificial Sequence: Synthetic oligonucleotide
  Sense strand starting at position 1541 of SEQ ID NO: 1882481
ugucuaagagcucacaucu

SEQ ID NO: 2124533 - RNA, 19 nt, Artificial Sequence
  Description of Artificial Sequence: Synthetic oligonucleotide
  Antisense strand to SEQ ID NO: 2124532
agaugugagcucuuagaca

SEQ ID NO: 2124534 - RNA, 19 nt, Artificial Sequence
  Description of Artificial Sequence: Synthetic oligonucleotide
  Sense strand starting at position 1572 of SEQ ID NO: 1882481
ugaggucuagccuaggcua

SEQ ID NO: 2124535 - RNA, 19 nt, Artificial Sequence
  Description of Artificial Sequence: Synthetic oligonucleotide
  Antisense strand to SEQ ID NO: 2124534
uagccuaggcuagaccuca

SEQ ID NO: 2124536 - RNA, 19 nt, Artificial Sequence
  Description of Artificial Sequence: Synthetic oligonucleotide
  Sense strand starting at position 1703 of SEQ ID NO: 1882481
guuuaaagcccaggaaacu

SEQ ID NO: 2124537 - RNA, 19 nt, Artificial Sequence
  Description of Artificial Sequence: Synthetic oligonucleotide
  Antisense strand to SEQ ID NO: 2124536
aguuuccugggcuuuaaac

SEQ ID NO: 2124538 - RNA, 19 nt, Artificial Sequence
  Description of Artificial Sequence: Synthetic oligonucleotide
  Sense strand starting at position 1713 of SEQ ID NO: 1882481
caggaaacuugucuggugu

SEQ ID NO: 2124539 - RNA, 19 nt, Artificial Sequence
  Description of Artificial Sequence: Synthetic oligonucleotide
  Antisense strand to SEQ ID NO: 2124538
acaccagacaaguuuccug

SEQ ID NO: 2124540 - RNA, 19 nt, Artificial Sequence
  Description of Artificial Sequence: Synthetic oligonucleotide
  Sense strand starting at position 1764 of SEQ ID NO: 1882481
agugaccuugcaggauaaa

SEQ ID NO: 2124541 - RNA, 19 nt, Artificial Sequence
  Description of Artificial Sequence: Synthetic oligonucleotide
  Antisense strand to SEQ ID NO: 2124540
uuuauccugcaaggucacu

SEQ ID NO: 2124542 - RNA, 19 nt, Artificial Sequence
  Description of Artificial Sequence: Synthetic oligonucleotide
  Sense strand starting at position 1773 of SEQ ID NO: 1882481
gcaggauaaagcuaagucu

SEQ ID NO: 2124543 - RNA, 19 nt, Artificial Sequence
  Description of Artificial Sequence: Synthetic oligonucleotide
  Antisense strand to SEQ ID NO: 2124542
agacuuagcuuuauccugc

SEQ ID NO: 2124544 - RNA, 19 nt, Artificial Sequence
  Description of Artificial Sequence: Synthetic oligonucleotide
  Sense strand starting at position 2083 of SEQ ID NO: 1882481
gagugucuuucccugagau

SEQ ID NO: 2124545 - RNA, 19 nt, Artificial Sequence
  Description of Artificial Sequence: Synthetic oligonucleotide
  Antisense strand to SEQ ID NO: 2124544
aucucagggaaagacacuc

SEQ ID NO: 2124546 - RNA, 19 nt, Artificial Sequence
  Description of Artificial Sequence: Synthetic oligonucleotide
  Sense strand starting at position 2084 of SEQ ID NO: 1882481
agugucuuucccugagaug

SEQ ID NO: 2124547 - RNA, 19 nt, Artificial Sequence
  Description of Artificial Sequence: Synthetic oligonucleotide
  Antisense strand to SEQ ID NO: 2124546
caucucagggaaagacacu

SEQ ID NO: 2124548 - RNA, 19 nt, Artificial Sequence
  Description of Artificial Sequence: Synthetic oligonucleotide
  Sense strand starting at position 2129 of SEQ ID NO: 1882481
agcuuaucaggauaugagu

SEQ ID NO: 2124549 - RNA, 19 nt, Artificial Sequence
  Description of Artificial Sequence: Synthetic oligonucleotide
  Antisense strand to SEQ ID NO: 2124548
acucauauccugauaagcu

SEQ ID NO: 2124550 - RNA, 19 nt, Artificial Sequence
  Description of Artificial Sequence: Synthetic oligonucleotide
  Sense strand starting at position 2137 of SEQ ID NO: 1882481
aggauaugagucugaagcu

SEQ ID NO: 2124551 - RNA, 19 nt, Artificial Sequence
  Description of Artificial Sequence: Synthetic oligonucleotide
  Antisense strand to SEQ ID NO: 2124550
agcuucagacucauauccu

SEQ ID NO: 2124552 - RNA, 19 nt, Artificial Sequence
  Description of Artificial Sequence: Synthetic oligonucleotide
  Sense strand starting at position 2267 of SEQ ID NO: 1882481
ugaagauguggcugagaua

SEQ ID NO: 2124553 - RNA, 19 nt, Artificial Sequence
  Description of Artificial Sequence: Synthetic oligonucleotide
  Antisense strand to SEQ ID NO: 2124552
uaucucagccacaucuuca

SEQ ID NO: 2124554 - RNA, 19 nt, Artificial Sequence
  Description of Artificial Sequence: Synthetic oligonucleotide
  Sense strand starting at position 2276 of SEQ ID NO: 1882481
ggcugagauaguuaaguua

SEQ ID NO: 2124555 - RNA, 19 nt, Artificial Sequence
  Description of Artificial Sequence: Synthetic oligonucleotide
  Antisense strand to SEQ ID NO: 2124554
uaacuuaacuaucucagcc

SEQ ID NO: 2124556 - RNA, 19 nt, Artificial Sequence
  Description of Artificial Sequence: Synthetic oligonucleotide
  Sense strand starting at position 2279 of SEQ ID NO: 1882481
ugagauaguuaaguuaggu

SEQ ID NO: 2124557 - RNA, 19 nt, Artificial Sequence
  Description of Artificial Sequence: Synthetic oligonucleotide
  Antisense strand to SEQ ID NO: 2124556
accuaacuuaacuaucuca

SEQ ID NO: 2124558 - RNA, 19 nt, Artificial Sequence
  Description of Artificial Sequence: Synthetic oligonucleotide
  Sense strand starting at position 2294 of SEQ ID NO: 1882481
agguuccugucauuugcau

SEQ ID NO: 2124559 - RNA, 19 nt, Artificial Sequence
  Description of Artificial Sequence: Synthetic oligonucleotide
  Antisense strand to SEQ ID NO: 2124558
augcaaaugacaggaaccu

SEQ ID NO: 2124560 - RNA, 19 nt, Artificial Sequence
  Description of Artificial Sequence: Synthetic oligonucleotide
  Sense strand starting at position 2428 of SEQ ID NO: 1882481
agucccauuccuuauaguu

SEQ ID NO: 2124561 - RNA, 19 nt, Artificial Sequence
  Description of Artificial Sequence: Synthetic oligonucleotide
  Antisense strand to SEQ ID NO: 2124560
aacuauaaggaaugggacu

SEQ ID NO: 2124562 - RNA, 19 nt, Artificial Sequence
  Description of Artificial Sequence: Synthetic oligonucleotide
  Sense strand starting at position 2684 of SEQ ID NO: 1882481
gugcaagcagaguacauau

SEQ ID NO: 2124563 - RNA, 19 nt, Artificial Sequence
  Description of Artificial Sequence: Synthetic oligonucleotide
  Antisense strand to SEQ ID NO: 2124562
auauguacucugcuugcac

SEQ ID NO: 2124564 - RNA, 19 nt, Artificial Sequence
  Description of Artificial Sequence: Synthetic oligonucleotide
  Sense strand starting at position 3278 of SEQ ID NO: 1882481
uguaguacaucuuugauug

SEQ ID NO: 2124565 - RNA, 19 nt, Artificial Sequence
  Description of Artificial Sequence: Synthetic oligonucleotide
  Antisense strand to SEQ ID NO: 2124564
caaucaaagauguacuaca

SEQ ID NO: 2124566 - RNA, 19 nt, Artificial Sequence
  Description of Artificial Sequence: Synthetic oligonucleotide
  Sense strand starting at position 3282 of SEQ ID NO: 1882481
guacaucuuugauugggaa

SEQ ID NO: 2124567 - RNA, 19 nt, Artificial Sequence
  Description of Artificial Sequence: Synthetic oligonucleotide
  Antisense strand to SEQ ID NO: 2124566
uucccaaucaaagauguac

SEQ ID NO: 2124568 - RNA, 19 nt, Artificial Sequence
  Description of Artificial Sequence: Synthetic oligonucleotide
  Sense strand starting at position 3741 of SEQ ID NO: 1882481
cacauuucugagugcuagu

SEQ ID NO: 2124569 - RNA, 19 nt, Artificial Sequence
  Description of Artificial Sequence: Synthetic oligonucleotide
  Antisense strand to SEQ ID NO: 2124568
acuagcacucagaaaugug

SEQ ID NO: 2124570 - RNA, 19 nt, Artificial Sequence
  Description of Artificial Sequence: Synthetic oligonucleotide
  Sense strand starting at position 38 of SEQ ID NO: 1882482
guaauagguuaacccaauu

SEQ ID NO: 2124571 - RNA, 19 nt, Artificial Sequence
  Description of Artificial Sequence: Synthetic oligonucleotide
  Antisense strand to SEQ ID NO: 2124570
aauuggguuaaccuauuac

SEQ ID NO: 2124572 - RNA, 19 nt, Artificial Sequence
  Description of Artificial Sequence: Synthetic oligonucleotide
  Sense strand starting at position 150 of SEQ ID NO: 1882482
ccuaauugggcucaacuuu

SEQ ID NO: 2124573 - RNA, 19 nt, Artificial Sequence
  Description of Artificial Sequence: Synthetic oligonucleotide
  Antisense strand to SEQ ID NO: 2124572
aaaguugagcccaauuagg

SEQ ID NO: 2124574 - RNA, 19 nt, Artificial Sequence
  Description of Artificial Sequence: Synthetic oligonucleotide
  Sense strand starting at position 288 of SEQ ID NO: 1882482
gcaggcuauccaugaagaa

SEQ ID NO: 2124575 - RNA, 19 nt, Artificial Sequence
  Description of Artificial Sequence: Synthetic oligonucleotide
  Antisense strand to SEQ ID NO: 2124574
uucuucauggauagccugc

SEQ ID NO: 2124576 - RNA, 19 nt, Artificial Sequence
  Description of Artificial Sequence: Synthetic oligonucleotide
  Sense strand starting at position 340 of SEQ ID NO: 1882482
gugguaacauaacuuacaa

SEQ ID NO: 2124577 - RNA, 19 nt, Artificial Sequence
  Description of Artificial Sequence: Synthetic oligonucleotide
  Antisense strand to SEQ ID NO: 2124576
uuguaaguuauguuaccac

SEQ ID NO: 2124578 - RNA, 19 nt, Artificial Sequence
  Description of Artificial Sequence: Synthetic oligonucleotide
  Sense strand starting at position 384 of SEQ ID NO: 1882482
augucuuaggcugaauaug

SEQ ID NO: 2124579 - RNA, 19 nt, Artificial Sequence
  Description of Artificial Sequence: Synthetic oligonucleotide
  Antisense strand to SEQ ID NO: 2124578
cauauucagccuaagacau

SEQ ID NO: 2124580 - RNA, 19 nt, Artificial Sequence
  Description of Artificial Sequence: Synthetic oligonucleotide
  Sense strand starting at position 426 of SEQ ID NO: 1882482
acuuuauuucuguguuuga

SEQ ID NO: 2124581 - RNA, 19 nt, Artificial Sequence
  Description of Artificial Sequence: Synthetic oligonucleotide
  Antisense strand to SEQ ID NO: 2124580
ucaaacacagaaauaaagu

SEQ ID NO: 2124582 - RNA, 19 nt, Artificial Sequence
  Description of Artificial Sequence: Synthetic oligonucleotide
  Sense strand starting at position 473 of SEQ ID NO: 1882482
auuggaaauuuccaaaugu

SEQ ID NO: 2124583 - RNA, 19 nt, Artificial Sequence
  Description of Artificial Sequence: Synthetic oligonucleotide
  Antisense strand to SEQ ID NO: 2124582
acauuuggaaauuuccaau

SEQ ID NO: 2124584 - RNA, 19 nt, Artificial Sequence
  Description of Artificial Sequence: Synthetic oligonucleotide
  Sense strand starting at position 501 of SEQ ID NO: 1882482
ucagaaucccaaugcugaa

SEQ ID NO: 2124585 - RNA, 19 nt, Artificial Sequence
  Description of Artificial Sequence: Synthetic oligonucleotide
  Antisense strand to SEQ ID NO: 2124584
uucagcauugggauucuga

SEQ ID NO: 2124586 - RNA, 19 nt, Artificial Sequence
  Description of Artificial Sequence: Synthetic oligonucleotide
  Sense strand starting at position 516 of SEQ ID NO: 1882482
ugaagaguacauggcuuua

SEQ ID NO: 2124587 - RNA, 19 nt, Artificial Sequence
  Description of Artificial Sequence: Synthetic oligonucleotide
  Antisense strand to SEQ ID NO: 2124586
uaaagccauguacucuuca

SEQ ID NO: 2124588 - RNA, 19 nt, Artificial Sequence
  Description of Artificial Sequence: Synthetic oligonucleotide
  Sense strand starting at position 518 of SEQ ID NO: 1882482
aagaguacauggcuuuaaa

SEQ ID NO: 2124589 - RNA, 19 nt, Artificial Sequence
  Description of Artificial Sequence: Synthetic oligonucleotide
  Antisense strand to SEQ ID NO: 2124588
uuuaaagccauguacucuu

SEQ ID NO: 2124590 - RNA, 19 nt, Artificial Sequence
  Description of Artificial Sequence: Synthetic oligonucleotide
  Sense strand starting at position 730 of SEQ ID NO: 1882482
uguguaauuuccucugagu

SEQ ID NO: 2124591 - RNA, 19 nt, Artificial Sequence
  Description of Artificial Sequence: Synthetic oligonucleotide
  Antisense strand to SEQ ID NO: 2124590
acucagaggaaauuacaca

SEQ ID NO: 2124592 - RNA, 19 nt, Artificial Sequence
  Description of Artificial Sequence: Synthetic oligonucleotide
  Sense strand starting at position 782 of SEQ ID NO: 1882482
augcaauacugacuugaaa

SEQ ID NO: 2124593 - RNA, 19 nt, Artificial Sequence
  Description of Artificial Sequence: Synthetic oligonucleotide
  Antisense strand to SEQ ID NO: 2124592
uuucaagucaguauugcau

SEQ ID NO: 2124594 - RNA, 19 nt, Artificial Sequence
  Description of Artificial Sequence: Synthetic oligonucleotide
  Sense strand starting at position 816 of SEQ ID NO: 1882482
gauaaacuuuguguuugga

SEQ ID NO: 2124595 - RNA, 19 nt, Artificial Sequence
  Description of Artificial Sequence: Synthetic oligonucleotide
  Antisense strand to SEQ ID NO: 2124594
uccaaacacaaaguuuauc

SEQ ID NO: 2124596 - RNA, 19 nt, Artificial Sequence
  Description of Artificial Sequence: Synthetic oligonucleotide
  Sense strand starting at position 818 of SEQ ID NO: 1882482
uaaacuuuguguuuggaaa

SEQ ID NO: 2124597 - RNA, 19 nt, Artificial Sequence
  Description of Artificial Sequence: Synthetic oligonucleotide
  Antisense strand to SEQ ID NO: 2124596
uuuccaaacacaaaguuua

SEQ ID NO: 2124598 - RNA, 19 nt, Artificial Sequence
  Description of Artificial Sequence: Synthetic oligonucleotide
  Sense strand starting at position 819 of SEQ ID NO: 1882482
aaacuuuguguuuggaaau

SEQ ID NO: 2124599 - RNA, 19 nt, Artificial Sequence
  Description of Artificial Sequence: Synthetic oligonucleotide
  Antisense strand to SEQ ID NO: 2124598
auuuccaaacacaaaguuu

SEQ ID NO: 2124600 - RNA, 19 nt, Artificial Sequence
  Description of Artificial Sequence: Synthetic oligonucleotide
  Sense strand starting at position 1049 of SEQ ID NO: 1882482
auauuaugguccuuuauca

SEQ ID NO: 2124601 - RNA, 19 nt, Artificial Sequence
  Description of Artificial Sequence: Synthetic oligonucleotide
  Antisense strand to SEQ ID NO: 2124600
ugauaaaggaccauaauau

SEQ ID NO: 2124602 - RNA, 19 nt, Artificial Sequence
  Description of Artificial Sequence: Synthetic oligonucleotide
  Sense strand starting at position 1068 of SEQ ID NO: 1882482
cuaaauauuccagggcaca

SEQ ID NO: 2124603 - RNA, 19 nt, Artificial Sequence
  Description of Artificial Sequence: Synthetic oligonucleotide
  Antisense strand to SEQ ID NO: 2124602
ugugcccuggaauauuuag

SEQ ID NO: 2124604 - RNA, 19 nt, Artificial Sequence
  Description of Artificial Sequence: Synthetic oligonucleotide
  Sense strand starting at position 1087 of SEQ ID NO: 1882482
uucuuaguacagggauacu

SEQ ID NO: 2124605 - RNA, 19 nt, Artificial Sequence
  Description of Artificial Sequence: Synthetic oligonucleotide
  Antisense strand to SEQ ID NO: 2124604
aguaucccuguacuaagaa

SEQ ID NO: 2124606 - RNA, 19 nt, Artificial Sequence
  Description of Artificial Sequence: Synthetic oligonucleotide
  Sense strand starting at position 1411 of SEQ ID NO: 1882482
cacugugcucggccuagua

SEQ ID NO: 2124607 - RNA, 19 nt, Artificial Sequence
  Description of Artificial Sequence: Synthetic oligonucleotide
  Antisense strand to SEQ ID NO: 2124606
uacuaggccgagcacagug

SEQ ID NO: 2124608 - RNA, 19 nt, Artificial Sequence
  Description of Artificial Sequence: Synthetic oligonucleotide
  Sense strand starting at position 1421 of SEQ ID NO: 1882482
ggccuaguacagggauauu

SEQ ID NO: 2124609 - RNA, 19 nt, Artificial Sequence
  Description of Artificial Sequence: Synthetic oligonucleotide
  Antisense strand to SEQ ID NO: 2124608
aauaucccuguacuaggcc

SEQ ID NO: 2124610 - RNA, 19 nt, Artificial Sequence
  Description of Artificial Sequence: Synthetic oligonucleotide
  Sense strand starting at position 1895 of SEQ ID NO: 1882482
uggguccuccauuauauaa

SEQ ID NO: 2124611 - RNA, 19 nt, Artificial Sequence
  Description of Artificial Sequence: Synthetic oligonucleotide
  Antisense strand to SEQ ID NO: 2124610
uuauauaauggaggaccca

SEQ ID NO: 2124612 - RNA, 19 nt, Artificial Sequence
  Description of Artificial Sequence: Synthetic oligonucleotide
  Sense strand starting at position 2102 of SEQ ID NO: 1882482
auugaugauucucuucuga

SEQ ID NO: 2124613 - RNA, 19 nt, Artificial Sequence
  Description of Artificial Sequence: Synthetic oligonucleotide
  Antisense strand to SEQ ID NO: 2124612
ucagaagagaaucaucaau

SEQ ID NO: 2124614 - RNA, 19 nt, Artificial Sequence
  Description of Artificial Sequence: Synthetic oligonucleotide
  Sense strand starting at position 2104 of SEQ ID NO: 1882482
ugaugauucucuucugauu

SEQ ID NO: 2124615 - RNA, 19 nt, Artificial Sequence
  Description of Artificial Sequence: Synthetic oligonucleotide
  Antisense strand to SEQ ID NO: 2124614
aaucagaagagaaucauca

SEQ ID NO: 2124616 - RNA, 19 nt, Artificial Sequence
  Description of Artificial Sequence: Synthetic oligonucleotide
  Sense strand starting at position 2162 of SEQ ID NO: 1882482
gugaauaucaggcagccaa

SEQ ID NO: 2124617 - RNA, 19 nt, Artificial Sequence
  Description of Artificial Sequence: Synthetic oligonucleotide
  Antisense strand to SEQ ID NO: 2124616
uuggcugccugauauucac

SEQ ID NO: 2124618 - RNA, 19 nt, Artificial Sequence
  Description of Artificial Sequence: Synthetic oligonucleotide
  Sense strand starting at position 2236 of SEQ ID NO: 1882482
cucacuagagcucagaagu

SEQ ID NO: 2124619 - RNA, 19 nt, Artificial Sequence
  Description of Artificial Sequence: Synthetic oligonucleotide
  Antisense strand to SEQ ID NO: 2124618
acuucugagcucuagugag

SEQ ID NO: 2124620 - RNA, 19 nt, Artificial Sequence
  Description of Artificial Sequence: Synthetic oligonucleotide
  Sense strand starting at position 2542 of SEQ ID NO: 1882482
gcacauuaccacgggauaa

SEQ ID NO: 2124621 - RNA, 19 nt, Artificial Sequence
  Description of Artificial Sequence: Synthetic oligonucleotide
  Antisense strand to SEQ ID NO: 2124620
uuaucccgugguaaugugc

SEQ ID NO: 2124622 - RNA, 19 nt, Artificial Sequence
  Description of Artificial Sequence: Synthetic oligonucleotide
  Sense strand starting at position 2640 of SEQ ID NO: 1882482
ccaguaaguccaggaacaa

SEQ ID NO: 2124623 - RNA, 19 nt, Artificial Sequence
  Description of Artificial Sequence: Synthetic oligonucleotide
  Antisense strand to SEQ ID NO: 2124622
uuguuccuggacuuacugg

SEQ ID NO: 2124624 - RNA, 19 nt, Artificial Sequence
  Description of Artificial Sequence: Synthetic oligonucleotide
  Sense strand starting at position 2946 of SEQ ID NO: 1882482
agauguuguccagaccuua

SEQ ID NO: 2124625 - RNA, 19 nt, Artificial Sequence
  Description of Artificial Sequence: Synthetic oligonucleotide
  Antisense strand to SEQ ID NO: 2124624
uaaggucuggacaacaucu

SEQ ID NO: 2124626 - RNA, 19 nt, Artificial Sequence
  Description of Artificial Sequence: Synthetic oligonucleotide
  Sense strand starting at position 3186 of SEQ ID NO: 1882482
uguaauaucagaugugaag

SEQ ID NO: 2124627 - RNA, 19 nt, Artificial Sequence
  Description of Artificial Sequence: Synthetic oligonucleotide
  Antisense strand to SEQ ID NO: 2124626
cuucacaucugauauuaca

SEQ ID NO: 2124628 - RNA, 19 nt, Artificial Sequence
  Description of Artificial Sequence: Synthetic oligonucleotide
  Sense strand starting at position 3245 of SEQ ID NO: 1882482
uaaacagauuuauaggguu

SEQ ID NO: 2124629 - RNA, 19 nt, Artificial Sequence
  Description of Artificial Sequence: Synthetic oligonucleotide
  Antisense strand to SEQ ID NO: 2124628
aacccuauaaaucuguuua

SEQ ID NO: 2124630 - RNA, 19 nt, Artificial Sequence
  Description of Artificial Sequence: Synthetic oligonucleotide
  Sense strand starting at position 3391 of SEQ ID NO: 1882482
agacaauacguccaaaggu

SEQ ID NO: 2124631 - RNA, 19 nt, Artificial Sequence
  Description of Artificial Sequence: Synthetic oligonucleotide
  Antisense strand to SEQ ID NO: 2124630
accuuuggacguauugucu

SEQ ID NO: 2124632 - RNA, 19 nt, Artificial Sequence
  Description of Artificial Sequence: Synthetic oligonucleotide
  Sense strand starting at position 3449 of SEQ ID NO: 1882482
cagagaugggcugguaaag

SEQ ID NO: 2124633 - RNA, 19 nt, Artificial Sequence
  Description of Artificial Sequence: Synthetic oligonucleotide
  Antisense strand to SEQ ID NO: 2124632
cuuuaccagcccaucucug

SEQ ID NO: 2124634 - RNA, 19 nt, Artificial Sequence
  Description of Artificial Sequence: Synthetic oligonucleotide
  Sense strand starting at position 3540 of SEQ ID NO: 1882482
uagaaaugguugcccacau

SEQ ID NO: 2124635 - RNA, 19 nt, Artificial Sequence
  Description of Artificial Sequence: Synthetic oligonucleotide
  Antisense strand to SEQ ID NO: 2124634
augugggcaaccauuucua

SEQ ID NO: 2124636 - RNA, 19 nt, Artificial Sequence
  Description of Artificial Sequence: Synthetic oligonucleotide
  Sense strand starting at position 3541 of SEQ ID NO: 1882482
agaaaugguugcccacauu

SEQ ID NO: 2124637 - RNA, 19 nt, Artificial Sequence
  Description of Artificial Sequence: Synthetic oligonucleotide
  Antisense strand to SEQ ID NO: 2124636
aaugugggcaaccauuucu

SEQ ID NO: 2124638 - RNA, 19 nt, Artificial Sequence
  Description of Artificial Sequence: Synthetic oligonucleotide
  Sense strand starting at position 3749 of SEQ ID NO: 1882482
augucauagugguuaagag

SEQ ID NO: 2124639 - RNA, 19 nt, Artificial Sequence
  Description of Artificial Sequence: Synthetic oligonucleotide
  Antisense strand to SEQ ID NO: 2124638
cucuuaaccacuaugacau

SEQ ID NO: 2124640 - RNA, 19 nt, Artificial Sequence
  Description of Artificial Sequence: Synthetic oligonucleotide
  Sense strand starting at position 3805 of SEQ ID NO: 1882482
cugcccuauuuguuaggua

SEQ ID NO: 2124641 - RNA, 19 nt, Artificial Sequence
  Description of Artificial Sequence: Synthetic oligonucleotide
  Antisense strand to SEQ ID NO: 2124640
uaccuaacaaauagggcag

SEQ ID NO: 2124642 - RNA, 19 nt, Artificial Sequence
  Description of Artificial Sequence: Synthetic oligonucleotide
  Sense strand starting at position 3889 of SEQ ID NO: 1882482
guagacugaaugugguaau

SEQ ID NO: 2124643 - RNA, 19 nt, Artificial Sequence
  Description of Artificial Sequence: Synthetic oligonucleotide
  Antisense strand to SEQ ID NO: 2124642
auuaccacauucagucuac

SEQ ID NO: 2124644 - RNA, 19 nt, Artificial Sequence
  Description of Artificial Sequence: Synthetic oligonucleotide
  Sense strand starting at position 3899 of SEQ ID NO: 1882482
ugugguaauauauggacaa

SEQ ID NO: 2124645 - RNA, 19 nt, Artificial Sequence
  Description of Artificial Sequence: Synthetic oligonucleotide
  Antisense strand to SEQ ID NO: 2124644
uuguccauauauuaccaca

SEQ ID NO: 2124646 - RNA, 19 nt, Artificial Sequence
  Description of Artificial Sequence: Synthetic oligonucleotide
  Sense strand starting at position 3945 of SEQ ID NO: 1882482
guguacaaucacuauuagu

SEQ ID NO: 2124647 - RNA, 19 nt, Artificial Sequence
  Description of Artificial Sequence: Synthetic oligonucleotide
  Antisense strand to SEQ ID NO: 2124646
acuaauagugauuguacac

SEQ ID NO: 2124648 - RNA, 19 nt, Artificial Sequence
  Description of Artificial Sequence: Synthetic oligonucleotide
  Sense strand starting at position 3958 of SEQ ID NO: 1882482
auuaguugucauuaccaga

SEQ ID NO: 2124649 - RNA, 19 nt, Artificial Sequence
  Description of Artificial Sequence: Synthetic oligonucleotide
  Antisense strand to SEQ ID NO: 2124648
ucugguaaugacaacuaau

SEQ ID NO: 2124650 - RNA, 19 nt, Artificial Sequence
  Description of Artificial Sequence: Synthetic oligonucleotide
  Sense strand starting at position 108 of SEQ ID NO: 1882483
gcaaucaaauagucauaug

SEQ ID NO: 2124651 - RNA, 19 nt, Artificial Sequence
  Description of Artificial Sequence: Synthetic oligonucleotide
  Antisense strand to SEQ ID NO: 2124650
cauaugacuauuugauugc

SEQ ID NO: 2124652 - RNA, 19 nt, Artificial Sequence
  Description of Artificial Sequence: Synthetic oligonucleotide
  Sense strand starting at position 130 of SEQ ID NO: 1882483
cuuggauauuuagauaauc

SEQ ID NO: 2124653 - RNA, 19 nt, Artificial Sequence
  Description of Artificial Sequence: Synthetic oligonucleotide
  Antisense strand to SEQ ID NO: 2124652
gauuaucuaaauauccaag

SEQ ID NO: 2124654 - RNA, 19 nt, Artificial Sequence
  Description of Artificial Sequence: Synthetic oligonucleotide
  Sense strand starting at position 520 of SEQ ID NO: 1882483
auugaaugauggucccuaa

SEQ ID NO: 2124655 - RNA, 19 nt, Artificial Sequence
  Description of Artificial Sequence: Synthetic oligonucleotide
  Antisense strand to SEQ ID NO: 2124654
uuagggaccaucauucaau

SEQ ID NO: 2124656 - RNA, 19 nt, Artificial Sequence
  Description of Artificial Sequence: Synthetic oligonucleotide
  Sense strand starting at position 610 of SEQ ID NO: 1882483
aguagagacuucucacuug

SEQ ID NO: 2124657 - RNA, 19 nt, Artificial Sequence
  Description of Artificial Sequence: Synthetic oligonucleotide
  Antisense strand to SEQ ID NO: 2124656
caagugagaagucucuacu

SEQ ID NO: 2124658 - RNA, 19 nt, Artificial Sequence
  Description of Artificial Sequence: Synthetic oligonucleotide
  Sense strand starting at position 616 of SEQ ID NO: 1882483
gacuucucacuuggagaca

SEQ ID NO: 2124659 - RNA, 19 nt, Artificial Sequence
  Description of Artificial Sequence: Synthetic oligonucleotide
  Antisense strand to SEQ ID NO: 2124658
ugucuccaagugagaaguc

SEQ ID NO: 2124660 - RNA, 19 nt, Artificial Sequence
  Description of Artificial Sequence: Synthetic oligonucleotide
  Sense strand starting at position 660 of SEQ ID NO: 1882483
caggauuucuugucagccu

SEQ ID NO: 2124661 - RNA, 19 nt, Artificial Sequence
  Description of Artificial Sequence: Synthetic oligonucleotide
  Antisense strand to SEQ ID NO: 2124660
aggcugacaagaaauccug

SEQ ID NO: 2124662 - RNA, 19 nt, Artificial Sequence
  Description of Artificial Sequence: Synthetic oligonucleotide
  Sense strand starting at position 801 of SEQ ID NO: 1882483
auauuucuuuaggagauug

SEQ ID NO: 2124663 - RNA, 19 nt, Artificial Sequence
  Description of Artificial Sequence: Synthetic oligonucleotide
  Antisense strand to SEQ ID NO: 2124662
caaucuccuaaagaaauau

SEQ ID NO: 2124664 - RNA, 19 nt, Artificial Sequence
  Description of Artificial Sequence: Synthetic oligonucleotide
  Sense strand starting at position 906 of SEQ ID NO: 1882483
agugauacccaacauguuu

SEQ ID NO: 2124665 - RNA, 19 nt, Artificial Sequence
  Description of Artificial Sequence: Synthetic oligonucleotide
  Antisense strand to SEQ ID NO: 2124664
aaacauguuggguaucacu

SEQ ID NO: 2124666 - RNA, 19 nt, Artificial Sequence
  Description of Artificial Sequence: Synthetic oligonucleotide
  Sense strand starting at position 993 of SEQ ID NO: 1882483
auccaaauccugcauaggu

SEQ ID NO: 2124667 - RNA, 19 nt, Artificial Sequence
  Description of Artificial Sequence: Synthetic oligonucleotide
  Antisense strand to SEQ ID NO: 2124666
accuaugcaggauuuggau

SEQ ID NO: 2124668 - RNA, 19 nt, Artificial Sequence
  Description of Artificial Sequence: Synthetic oligonucleotide
  Sense strand starting at position 995 of SEQ ID NO: 1882483
ccaaauccugcauagguaa

SEQ ID NO: 2124669 - RNA, 19 nt, Artificial Sequence
  Description of Artificial Sequence: Synthetic oligonucleotide
  Antisense strand to SEQ ID NO: 2124668
uuaccuaugcaggauuugg

SEQ ID NO: 2124670 - RNA, 19 nt, Artificial Sequence
  Description of Artificial Sequence: Synthetic oligonucleotide
  Sense strand starting at position 1177 of SEQ ID NO: 1882483
ugagcuggauucucccaaa

SEQ ID NO: 2124671 - RNA, 19 nt, Artificial Sequence
  Description of Artificial Sequence: Synthetic oligonucleotide
  Antisense strand to SEQ ID NO: 2124670
uuugggagaauccagcuca

SEQ ID NO: 2124672 - RNA, 19 nt, Artificial Sequence
  Description of Artificial Sequence: Synthetic oligonucleotide
  Sense strand starting at position 1287 of SEQ ID NO: 1882483
uuuagacggccagaaugau

SEQ ID NO: 2124673 - RNA, 19 nt, Artificial Sequence
  Description of Artificial Sequence: Synthetic oligonucleotide
  Antisense strand to SEQ ID NO: 2124672
aucauucuggccgucuaaa

SEQ ID NO: 2124674 - RNA, 19 nt, Artificial Sequence
  Description of Artificial Sequence: Synthetic oligonucleotide
  Sense strand starting at position 1520 of SEQ ID NO: 1882483
aaagguaucuagucucaga

SEQ ID NO: 2124675 - RNA, 19 nt, Artificial Sequence
  Description of Artificial Sequence: Synthetic oligonucleotide
  Antisense strand to SEQ ID NO: 2124674
ucugagacuagauaccuuu

SEQ ID NO: 2124676 - RNA, 19 nt, Artificial Sequence
  Description of Artificial Sequence: Synthetic oligonucleotide
  Sense strand starting at position 1570 of SEQ ID NO: 1882483
gugagugagcaagagucaa

SEQ ID NO: 2124677 - RNA, 19 nt, Artificial Sequence
  Description of Artificial Sequence: Synthetic oligonucleotide
  Antisense strand to SEQ ID NO: 2124676
uugacucuugcucacucac

SEQ ID NO: 2124678 - RNA, 19 nt, Artificial Sequence
  Description of Artificial Sequence: Synthetic oligonucleotide
  Sense strand starting at position 1588 of SEQ ID NO: 1882483
aauugaagauaguuugacu

SEQ ID NO: 2124679 - RNA, 19 nt, Artificial Sequence
  Description of Artificial Sequence: Synthetic oligonucleotide
  Antisense strand to SEQ ID NO: 2124678
agucaaacuaucuucaauu

SEQ ID NO: 2124680 - RNA, 19 nt, Artificial Sequence
  Description of Artificial Sequence: Synthetic oligonucleotide
  Sense strand starting at position 1853 of SEQ ID NO: 1882483
ucuagacaguaguuauaaa

SEQ ID NO: 2124681 - RNA, 19 nt, Artificial Sequence
  Description of Artificial Sequence: Synthetic oligonucleotide
  Antisense strand to SEQ ID NO: 2124680
uuuauaacuacugucuaga

SEQ ID NO: 2124682 - RNA, 19 nt, Artificial Sequence
  Description of Artificial Sequence: Synthetic oligonucleotide
  Sense strand starting at position 1875 of SEQ ID NO: 1882483
gccuaaugaguuuauaaua

SEQ ID NO: 2124683 - RNA, 19 nt, Artificial Sequence
  Description of Artificial Sequence: Synthetic oligonucleotide
  Antisense strand to SEQ ID NO: 2124682
uauuauaaacucauuaggc

SEQ ID NO: 2124684 - RNA, 19 nt, Artificial Sequence
  Description of Artificial Sequence: Synthetic oligonucleotide
  Sense strand starting at position 1888 of SEQ ID NO: 1882483
auaauacuucgcuaagaga

SEQ ID NO: 2124685 - RNA, 19 nt, Artificial Sequence
  Description of Artificial Sequence: Synthetic oligonucleotide
  Antisense strand to SEQ ID NO: 2124684
ucucuuagcgaaguauuau

SEQ ID NO: 2124686 - RNA, 19 nt, Artificial Sequence
  Description of Artificial Sequence: Synthetic oligonucleotide
  Sense strand starting at position 2258 of SEQ ID NO: 1882483
uacggucaugauuaacaca

SEQ ID NO: 2124687 - RNA, 19 nt, Artificial Sequence
  Description of Artificial Sequence: Synthetic oligonucleotide
  Antisense strand to SEQ ID NO: 2124686
uguguuaaucaugaccgua

SEQ ID NO: 2124688 - RNA, 19 nt, Artificial Sequence
  Description of Artificial Sequence: Synthetic oligonucleotide
  Sense strand starting at position 2384 of SEQ ID NO: 1882483
ucuugagaucaaggacucu

SEQ ID NO: 2124689 - RNA, 19 nt, Artificial Sequence
  Description of Artificial Sequence: Synthetic oligonucleotide
  Antisense strand to SEQ ID NO: 2124688
agaguccuugaucucaaga

SEQ ID NO: 2124690 - RNA, 19 nt, Artificial Sequence
  Description of Artificial Sequence: Synthetic oligonucleotide
  Sense strand starting at position 2390 of SEQ ID NO: 1882483
gaucaaggacucuguucua

SEQ ID NO: 2124691 - RNA, 19 nt, Artificial Sequence
  Description of Artificial Sequence: Synthetic oligonucleotide
  Antisense strand to SEQ ID NO: 2124690
uagaacagaguccuugauc

SEQ ID NO: 2124692 - RNA, 19 nt, Artificial Sequence
  Description of Artificial Sequence: Synthetic oligonucleotide
  Sense strand starting at position 2443 of SEQ ID NO: 1882483
gcuggaagccuggauagaa

SEQ ID NO: 2124693 - RNA, 19 nt, Artificial Sequence
  Description of Artificial Sequence: Synthetic oligonucleotide
  Antisense strand to SEQ ID NO: 2124692
uucuauccaggcuuccagc

SEQ ID NO: 2124694 - RNA, 19 nt, Artificial Sequence
  Description of Artificial Sequence: Synthetic oligonucleotide
  Sense strand starting at position 2459 of SEQ ID NO: 1882483
gaauauggagggugcuuaa

SEQ ID NO: 2124695 - RNA, 19 nt, Artificial Sequence
  Description of Artificial Sequence: Synthetic oligonucleotide
  Antisense strand to SEQ ID NO: 2124694
uuaagcacccuccauauuc

SEQ ID NO: 2124696 - RNA, 19 nt, Artificial Sequence
  Description of Artificial Sequence: Synthetic oligonucleotide
  Sense strand starting at position 2619 of SEQ ID NO: 1882483
gacagaugaagauguguca

SEQ ID NO: 2124697 - RNA, 19 nt, Artificial Sequence
  Description of Artificial Sequence: Synthetic oligonucleotide
  Antisense strand to SEQ ID NO: 2124696
ugacacaucuucaucuguc

SEQ ID NO: 2124698 - RNA, 19 nt, Artificial Sequence
  Description of Artificial Sequence: Synthetic oligonucleotide
  Sense strand starting at position 2640 of SEQ ID NO: 1882483
guggaaugugacuaguaca

SEQ ID NO: 2124699 - RNA, 19 nt, Artificial Sequence
  Description of Artificial Sequence: Synthetic oligonucleotide
  Antisense strand to SEQ ID NO: 2124698
uguacuagucacauuccac

SEQ ID NO: 2124700 - RNA, 19 nt, Artificial Sequence
  Description of Artificial Sequence: Synthetic oligonucleotide
  Sense strand starting at position 2645 of SEQ ID NO: 1882483
augugacuaguacacaauu

SEQ ID NO: 2124701 - RNA, 19 nt, Artificial Sequence
  Description of Artificial Sequence: Synthetic oligonucleotide
  Antisense strand to SEQ ID NO: 2124700
aauuguguacuagucacau

SEQ ID NO: 2124702 - RNA, 19 nt, Artificial Sequence
  Description of Artificial Sequence: Synthetic oligonucleotide
  Sense strand starting at position 2925 of SEQ ID NO: 1882483
aucguaauaguccaucaau

SEQ ID NO: 2124703 - RNA, 19 nt, Artificial Sequence
  Description of Artificial Sequence: Synthetic oligonucleotide
  Antisense strand to SEQ ID NO: 2124702
auugauggacuauuacgau

SEQ ID NO: 2124704 - RNA, 19 nt, Artificial Sequence
  Description of Artificial Sequence: Synthetic oligonucleotide
  Sense strand starting at position 2928 of SEQ ID NO: 1882483
guaauaguccaucaauuga

SEQ ID NO: 2124705 - RNA, 19 nt, Artificial Sequence
  Description of Artificial Sequence: Synthetic oligonucleotide
  Antisense strand to SEQ ID NO: 2124704
ucaauugauggacuauuac

SEQ ID NO: 2124706 - RNA, 19 nt, Artificial Sequence
  Description of Artificial Sequence: Synthetic oligonucleotide
  Sense strand starting at position 3241 of SEQ ID NO: 1882483
ggaaccucauaucugugaa

SEQ ID NO: 2124707 - RNA, 19 nt, Artificial Sequence
  Description of Artificial Sequence: Synthetic oligonucleotide
  Antisense strand to SEQ ID NO: 2124706
uucacagauaugagguucc

SEQ ID NO: 2124708 - RNA, 19 nt, Artificial Sequence
  Description of Artificial Sequence: Synthetic oligonucleotide
  Sense strand starting at position 3283 of SEQ ID NO: 1882483
ggauauuuguuucuuuguu

SEQ ID NO: 2124709 - RNA, 19 nt, Artificial Sequence
  Description of Artificial Sequence: Synthetic oligonucleotide
  Antisense strand to SEQ ID NO: 2124708
aacaaagaaacaaauaucc

SEQ ID NO: 2124710 - RNA, 19 nt, Artificial Sequence
  Description of Artificial Sequence: Synthetic oligonucleotide
  Sense strand starting at position 3298 of SEQ ID NO: 1882483
uguucuuuaucauuuagca

SEQ ID NO: 2124711 - RNA, 19 nt, Artificial Sequence
  Description of Artificial Sequence: Synthetic oligonucleotide
  Antisense strand to SEQ ID NO: 2124710
ugcuaaaugauaaagaaca

SEQ ID NO: 2124712 - RNA, 19 nt, Artificial Sequence
  Description of Artificial Sequence: Synthetic oligonucleotide
  Sense strand starting at position 3368 of SEQ ID NO: 1882483
uugucagaugcccaaauga

SEQ ID NO: 2124713 - RNA, 19 nt, Artificial Sequence
  Description of Artificial Sequence: Synthetic oligonucleotide
  Antisense strand to SEQ ID NO: 2124712
ucauuugggcaucugacaa

SEQ ID NO: 2124714 - RNA, 19 nt, Artificial Sequence
  Description of Artificial Sequence: Synthetic oligonucleotide
  Sense strand starting at position 3616 of SEQ ID NO: 1882483
agguuaucauuauucugaa

SEQ ID NO: 2124715 - RNA, 19 nt, Artificial Sequence
  Description of Artificial Sequence: Synthetic oligonucleotide
  Antisense strand to SEQ ID NO: 2124714
uucagaauaaugauaaccu

SEQ ID NO: 2124716 - RNA, 19 nt, Artificial Sequence
  Description of Artificial Sequence: Synthetic oligonucleotide
  Sense strand starting at position 3617 of SEQ ID NO: 1882483
gguuaucauuauucugaag

SEQ ID NO: 2124717 - RNA, 19 nt, Artificial Sequence
  Description of Artificial Sequence: Synthetic oligonucleotide
  Antisense strand to SEQ ID NO: 2124716
cuucagaauaaugauaacc

SEQ ID NO: 2124718 - RNA, 19 nt, Artificial Sequence
  Description of Artificial Sequence: Synthetic oligonucleotide
  Sense strand starting at position 3686 of SEQ ID NO: 1882483
agcugagaauaucugcaga

SEQ ID NO: 2124719 - RNA, 19 nt, Artificial Sequence
  Description of Artificial Sequence: Synthetic oligonucleotide
  Antisense strand to SEQ ID NO: 2124718
ucugcagauauucucagcu

SEQ ID NO: 2124720 - RNA, 19 nt, Artificial Sequence
  Description of Artificial Sequence: Synthetic oligonucleotide
  Sense strand starting at position 3688 of SEQ ID NO: 1882483
cugagaauaucugcagaag

SEQ ID NO: 2124721 - RNA, 19 nt, Artificial Sequence
  Description of Artificial Sequence: Synthetic oligonucleotide
  Antisense strand to SEQ ID NO: 2124720
cuucugcagauauucucag

SEQ ID NO: 2124722 - RNA, 19 nt, Artificial Sequence
  Description of Artificial Sequence: Synthetic oligonucleotide
  Sense strand starting at position 3691 of SEQ ID NO: 1882483
agaauaucugcagaagcuu

SEQ ID NO: 2124723 - RNA, 19 nt, Artificial Sequence
  Description of Artificial Sequence: Synthetic oligonucleotide
  Antisense strand to SEQ ID NO: 2124722
aagcuucugcagauauucu

SEQ ID NO: 2124724 - RNA, 19 nt, Artificial Sequence
  Description of Artificial Sequence: Synthetic oligonucleotide
  Sense strand starting at position 3739 of SEQ ID NO: 1882483
acuugauaugcuuagcaga

SEQ ID NO: 2124725 - RNA, 19 nt, Artificial Sequence
  Description of Artificial Sequence: Synthetic oligonucleotide
  Antisense strand to SEQ ID NO: 2124724
ucugcuaagcauaucaagu

SEQ ID NO: 2124726 - RNA, 19 nt, Artificial Sequence
  Description of Artificial Sequence: Synthetic oligonucleotide
  Sense strand starting at position 3905 of SEQ ID NO: 1882483
uugaccugaucaucaguaa

SEQ ID NO: 2124727 - RNA, 19 nt, Artificial Sequence
  Description of Artificial Sequence: Synthetic oligonucleotide
  Antisense strand to SEQ ID NO: 2124726
uuacugaugaucaggucaa

SEQ ID NO: 2124728 - RNA, 19 nt, Artificial Sequence
  Description of Artificial Sequence: Synthetic oligonucleotide
  Sense strand starting at position 3970 of SEQ ID NO: 1882483
cuaauuagugucuaaauac

SEQ ID NO: 2124729 - RNA, 19 nt, Artificial Sequence
  Description of Artificial Sequence: Synthetic oligonucleotide
  Antisense strand to SEQ ID NO: 2124728
guauuuagacacuaauuag

SEQ ID NO: 2124730 - RNA, 19 nt, Artificial Sequence
  Description of Artificial Sequence: Synthetic oligonucleotide
  Sense strand starting at position 179 of SEQ ID NO: 1882484
gguaauaagagucauaguc

SEQ ID NO: 2124731 - RNA, 19 nt, Artificial Sequence
  Description of Artificial Sequence: Synthetic oligonucleotide
  Antisense strand to SEQ ID NO: 2124730
gacuaugacucuuauuacc

SEQ ID NO: 2124732 - RNA, 19 nt, Artificial Sequence
  Description of Artificial Sequence: Synthetic oligonucleotide
  Sense strand starting at position 281 of SEQ ID NO: 1882484
guugaucuucuuuacucau

SEQ ID NO: 2124733 - RNA, 19 nt, Artificial Sequence
  Description of Artificial Sequence: Synthetic oligonucleotide
  Antisense strand to SEQ ID NO: 2124732
augaguaaagaagaucaac

SEQ ID NO: 2124734 - RNA, 19 nt, Artificial Sequence
  Description of Artificial Sequence: Synthetic oligonucleotide
  Sense strand starting at position 484 of SEQ ID NO: 1882484
aagguuauacauugaucag

SEQ ID NO: 2124735 - RNA, 19 nt, Artificial Sequence
  Description of Artificial Sequence: Synthetic oligonucleotide
  Antisense strand to SEQ ID NO: 2124734
cugaucaauguauaaccuu

SEQ ID NO: 2124736 - RNA, 19 nt, Artificial Sequence
  Description of Artificial Sequence: Synthetic oligonucleotide
  Sense strand starting at position 487 of SEQ ID NO: 1882484
guuauacauugaucaguug

SEQ ID NO: 2124737 - RNA, 19 nt, Artificial Sequence
  Description of Artificial Sequence: Synthetic oligonucleotide
  Antisense strand to SEQ ID NO: 2124736
caacugaucaauguauaac

SEQ ID NO: 2124738 - RNA, 19 nt, Artificial Sequence
  Description of Artificial Sequence: Synthetic oligonucleotide
  Sense strand starting at position 545 of SEQ ID NO: 1882484
cuguauucucccuagacca

SEQ ID NO: 2124739 - RNA, 19 nt, Artificial Sequence
  Description of Artificial Sequence: Synthetic oligonucleotide
  Antisense strand to SEQ ID NO: 2124738
uggucuagggagaauacag

SEQ ID NO: 2124740 - RNA, 19 nt, Artificial Sequence
  Description of Artificial Sequence: Synthetic oligonucleotide
  Sense strand starting at position 1220 of SEQ ID NO: 1882484
auuguuaaagaguauguca

SEQ ID NO: 2124741 - RNA, 19 nt, Artificial Sequence
  Description of Artificial Sequence: Synthetic oligonucleotide
  Antisense strand to SEQ ID NO: 2124740
ugacauacucuuuaacaau

SEQ ID NO: 2124742 - RNA, 19 nt, Artificial Sequence
  Description of Artificial Sequence: Synthetic oligonucleotide
  Sense strand starting at position 1588 of SEQ ID NO: 1882484
gguuuccaagacugaaauu

SEQ ID NO: 2124743 - RNA, 19 nt, Artificial Sequence
  Description of Artificial Sequence: Synthetic oligonucleotide
  Antisense strand to SEQ ID NO: 2124742
aauuucagucuuggaaacc

SEQ ID NO: 2124744 - RNA, 19 nt, Artificial Sequence
  Description of Artificial Sequence: Synthetic oligonucleotide
  Sense strand starting at position 1640 of SEQ ID NO: 1882484
auuagagauuuguaaccag

SEQ ID NO: 2124745 - RNA, 19 nt, Artificial Sequence
  Description of Artificial Sequence: Synthetic oligonucleotide
  Antisense strand to SEQ ID NO: 2124744
cugguuacaaaucucuaau

SEQ ID NO: 2124746 - RNA, 19 nt, Artificial Sequence
  Description of Artificial Sequence: Synthetic oligonucleotide
  Sense strand starting at position 1903 of SEQ ID NO: 1882484
gaaguauuagguuggcaca

SEQ ID NO: 2124747 - RNA, 19 nt, Artificial Sequence
  Description of Artificial Sequence: Synthetic oligonucleotide
  Antisense strand to SEQ ID NO: 2124746
ugugccaaccuaauacuuc

SEQ ID NO: 2124748 - RNA, 19 nt, Artificial Sequence
  Description of Artificial Sequence: Synthetic oligonucleotide
  Sense strand starting at position 2069 of SEQ ID NO: 1882484
ucgacaaguuuaccaaaca

SEQ ID NO: 2124749 - RNA, 19 nt, Artificial Sequence
  Description of Artificial Sequence: Synthetic oligonucleotide
  Antisense strand to SEQ ID NO: 2124748
uguuugguaaacuugucga

SEQ ID NO: 2124750 - RNA, 19 nt, Artificial Sequence
  Description of Artificial Sequence: Synthetic oligonucleotide
  Sense strand starting at position 2111 of SEQ ID NO: 1882484
ggucauaucuaaguauauu

SEQ ID NO: 2124751 - RNA, 19 nt, Artificial Sequence
  Description of Artificial Sequence: Synthetic oligonucleotide
  Antisense strand to SEQ ID NO: 2124750
aauauacuuagauaugacc

SEQ ID NO: 2124752 - RNA, 19 nt, Artificial Sequence
  Description of Artificial Sequence: Synthetic oligonucleotide
  Sense strand starting at position 2191 of SEQ ID NO: 1882484
aggcgaaacaucuaaaggu

SEQ ID NO: 2124753 - RNA, 19 nt, Artificial Sequence
  Description of Artificial Sequence: Synthetic oligonucleotide
  Antisense strand to SEQ ID NO: 2124752
accuuuagauguuucgccu

SEQ ID NO: 2124754 - RNA, 19 nt, Artificial Sequence
  Description of Artificial Sequence: Synthetic oligonucleotide
  Sense strand starting at position 2211 of SEQ ID NO: 1882484
ggcaaagaauacuauuuag

SEQ ID NO: 2124755 - RNA, 19 nt, Artificial Sequence
  Description of Artificial Sequence: Synthetic oligonucleotide
  Antisense strand to SEQ ID NO: 2124754
cuaaauaguauucuuugcc

SEQ ID NO: 2124756 - RNA, 19 nt, Artificial Sequence
  Description of Artificial Sequence: Synthetic oligonucleotide
  Sense strand starting at position 2306 of SEQ ID NO: 1882484
ugcaaauaccugugaacac

SEQ ID NO: 2124757 - RNA, 19 nt, Artificial Sequence
  Description of Artificial Sequence: Synthetic oligonucleotide
  Antisense strand to SEQ ID NO: 2124756
guguucacagguauuugca

SEQ ID NO: 2124758 - RNA, 19 nt, Artificial Sequence
  Description of Artificial Sequence: Synthetic oligonucleotide
  Sense strand starting at position 2329 of SEQ ID NO: 1882484
acacacauucgccagaaua

SEQ ID NO: 2124759 - RNA, 19 nt, Artificial Sequence
  Description of Artificial Sequence: Synthetic oligonucleotide
  Antisense strand to SEQ ID NO: 2124758
uauucuggcgaaugugugu

SEQ ID NO: 2124760 - RNA, 19 nt, Artificial Sequence
  Description of Artificial Sequence: Synthetic oligonucleotide
  Sense strand starting at position 2496 of SEQ ID NO: 1882484
gccuaauaggacuagcaua

SEQ ID NO: 2124761 - RNA, 19 nt, Artificial Sequence
  Description of Artificial Sequence: Synthetic oligonucleotide
  Antisense strand to SEQ ID NO: 2124760
uaugcuaguccuauuaggc

SEQ ID NO: 2124762 - RNA, 19 nt, Artificial Sequence
  Description of Artificial Sequence: Synthetic oligonucleotide
  Sense strand starting at position 2501 of SEQ ID NO: 1882484
auaggacuagcauaaguuu

SEQ ID NO: 2124763 - RNA, 19 nt, Artificial Sequence
  Description of Artificial Sequence: Synthetic oligonucleotide
  Antisense strand to SEQ ID NO: 2124762
aaacuuaugcuaguccuau

SEQ ID NO: 2124764 - RNA, 19 nt, Artificial Sequence
  Description of Artificial Sequence: Synthetic oligonucleotide
  Sense strand starting at position 2531 of SEQ ID NO: 1882484
cuauauaugcacugaugau

SEQ ID NO: 2124765 - RNA, 19 nt, Artificial Sequence
  Description of Artificial Sequence: Synthetic oligonucleotide
  Antisense strand to SEQ ID NO: 2124764
aucaucagugcauauauag

SEQ ID NO: 2124766 - RNA, 19 nt, Artificial Sequence
  Description of Artificial Sequence: Synthetic oligonucleotide
  Sense strand starting at position 2573 of SEQ ID NO: 1882484
gaagaacuccagugugaua

SEQ ID NO: 2124767 - RNA, 19 nt, Artificial Sequence
  Description of Artificial Sequence: Synthetic oligonucleotide
  Antisense strand to SEQ ID NO: 2124766
uaucacacuggaguucuuc

SEQ ID NO: 2124768 - RNA, 19 nt, Artificial Sequence
  Description of Artificial Sequence: Synthetic oligonucleotide
  Sense strand starting at position 2575 of SEQ ID NO: 1882484
agaacuccagugugauaua

SEQ ID NO: 2124769 - RNA, 19 nt, Artificial Sequence
  Description of Artificial Sequence: Synthetic oligonucleotide
  Antisense strand to SEQ ID NO: 2124768
uauaucacacuggaguucu

SEQ ID NO: 2124770 - RNA, 19 nt, Artificial Sequence
  Description of Artificial Sequence: Synthetic oligonucleotide
  Sense strand starting at position 2586 of SEQ ID NO: 1882484
gugauauaugaaugguaug

SEQ ID NO: 2124771 - RNA, 19 nt, Artificial Sequence
  Description of Artificial Sequence: Synthetic oligonucleotide
  Antisense strand to SEQ ID NO: 2124770
cauaccauucauauaucac

SEQ ID NO: 2124772 - RNA, 19 nt, Artificial Sequence
  Description of Artificial Sequence: Synthetic oligonucleotide
  Sense strand starting at position 2591 of SEQ ID NO: 1882484
auaugaaugguaugaugua

SEQ ID NO: 2124773 - RNA, 19 nt, Artificial Sequence
  Description of Artificial Sequence: Synthetic oligonucleotide
  Antisense strand to SEQ ID NO: 2124772
uacaucauaccauucauau

SEQ ID NO: 2124774 - RNA, 19 nt, Artificial Sequence
  Description of Artificial Sequence: Synthetic oligonucleotide
  Sense strand starting at position 2656 of SEQ ID NO: 1882484
ggaaacuucuaguuaacua

SEQ ID NO: 2124775 - RNA, 19 nt, Artificial Sequence
  Description of Artificial Sequence: Synthetic oligonucleotide
  Antisense strand to SEQ ID NO: 2124774
uaguuaacuagaaguuucc

SEQ ID NO: 2124776 - RNA, 19 nt, Artificial Sequence
  Description of Artificial Sequence: Synthetic oligonucleotide
  Sense strand starting at position 2765 of SEQ ID NO: 1882484
aguaaugcacuuuauagau

SEQ ID NO: 2124777 - RNA, 19 nt, Artificial Sequence
  Description of Artificial Sequence: Synthetic oligonucleotide
  Antisense strand to SEQ ID NO: 2124776
aucuauaaagugcauuacu

SEQ ID NO: 2124778 - RNA, 19 nt, Artificial Sequence
  Description of Artificial Sequence: Synthetic oligonucleotide
  Sense strand starting at position 2806 of SEQ ID NO: 1882484
ccucaaacuuugguauaga

SEQ ID NO: 2124779 - RNA, 19 nt, Artificial Sequence
  Description of Artificial Sequence: Synthetic oligonucleotide
  Antisense strand to SEQ ID NO: 2124778
ucuauaccaaaguuugagg

SEQ ID NO: 2124780 - RNA, 19 nt, Artificial Sequence
  Description of Artificial Sequence: Synthetic oligonucleotide
  Sense strand starting at position 2815 of SEQ ID NO: 1882484
uugguauagagaugguaca

SEQ ID NO: 2124781 - RNA, 19 nt, Artificial Sequence
  Description of Artificial Sequence: Synthetic oligonucleotide
  Antisense strand to SEQ ID NO: 2124780
uguaccaucucuauaccaa

SEQ ID NO: 2124782 - RNA, 19 nt, Artificial Sequence
  Description of Artificial Sequence: Synthetic oligonucleotide
  Sense strand starting at position 2816 of SEQ ID NO: 1882484
ugguauagagaugguacau

SEQ ID NO: 2124783 - RNA, 19 nt, Artificial Sequence
  Description of Artificial Sequence: Synthetic oligonucleotide
  Antisense strand to SEQ ID NO: 2124782
auguaccaucucuauacca

SEQ ID NO: 2124784 - RNA, 19 nt, Artificial Sequence
  Description of Artificial Sequence: Synthetic oligonucleotide
  Sense strand starting at position 2822 of SEQ ID NO: 1882484
agagaugguacauguaaau

SEQ ID NO: 2124785 - RNA, 19 nt, Artificial Sequence
  Description of Artificial Sequence: Synthetic oligonucleotide
  Antisense strand to SEQ ID NO: 2124784
auuuacauguaccaucucu

SEQ ID NO: 2124786 - RNA, 19 nt, Artificial Sequence
  Description of Artificial Sequence: Synthetic oligonucleotide
  Sense strand starting at position 2948 of SEQ ID NO: 1882484
auuguuaaucacuaagucu

SEQ ID NO: 2124787 - RNA, 19 nt, Artificial Sequence
  Description of Artificial Sequence: Synthetic oligonucleotide
  Antisense strand to SEQ ID NO: 2124786
agacuuagugauuaacaau

SEQ ID NO: 2124788 - RNA, 19 nt, Artificial Sequence
  Description of Artificial Sequence: Synthetic oligonucleotide
  Sense strand starting at position 3112 of SEQ ID NO: 1882484
agauguaauccuuggugaa

SEQ ID NO: 2124789 - RNA, 19 nt, Artificial Sequence
  Description of Artificial Sequence: Synthetic oligonucleotide
  Antisense strand to SEQ ID NO: 2124788
uucaccaaggauuacaucu

SEQ ID NO: 2124790 - RNA, 19 nt, Artificial Sequence
  Description of Artificial Sequence: Synthetic oligonucleotide
  Sense strand starting at position 3113 of SEQ ID NO: 1882484
gauguaauccuuggugaaa

SEQ ID NO: 2124791 - RNA, 19 nt, Artificial Sequence
  Description of Artificial Sequence: Synthetic oligonucleotide
  Antisense strand to SEQ ID NO: 2124790
uuucaccaaggauuacauc

SEQ ID NO: 2124792 - RNA, 19 nt, Artificial Sequence
  Description of Artificial Sequence: Synthetic oligonucleotide
  Sense strand starting at position 3114 of SEQ ID NO: 1882484
auguaauccuuggugaaau

SEQ ID NO: 2124793 - RNA, 19 nt, Artificial Sequence
  Description of Artificial Sequence: Synthetic oligonucleotide
  Antisense strand to SEQ ID NO: 2124792
auuucaccaaggauuacau

SEQ ID NO: 2124794 - RNA, 19 nt, Artificial Sequence
  Description of Artificial Sequence: Synthetic oligonucleotide
  Sense strand starting at position 3176 of SEQ ID NO: 1882484
aguuaagaaucagagauuu

SEQ ID NO: 2124795 - RNA, 19 nt, Artificial Sequence
  Description of Artificial Sequence: Synthetic oligonucleotide
  Antisense strand to SEQ ID NO: 2124794
aaaucucugauucuuaacu

SEQ ID NO: 2124796 - RNA, 19 nt, Artificial Sequence
  Description of Artificial Sequence: Synthetic oligonucleotide
  Sense strand starting at position 3211 of SEQ ID NO: 1882484
ggucuuaaagguuaagcau

SEQ ID NO: 2124797 - RNA, 19 nt, Artificial Sequence
  Description of Artificial Sequence: Synthetic oligonucleotide
  Antisense strand to SEQ ID NO: 2124796
augcuuaaccuuuaagacc

SEQ ID NO: 2124798 - RNA, 19 nt, Artificial Sequence
  Description of Artificial Sequence: Synthetic oligonucleotide
  Sense strand starting at position 3554 of SEQ ID NO: 1882484
gauugucucccauaggugu

SEQ ID NO: 2124799 - RNA, 19 nt, Artificial Sequence
  Description of Artificial Sequence: Synthetic oligonucleotide
  Antisense strand to SEQ ID NO: 2124798
acaccuaugggagacaauc

SEQ ID NO: 2124800 - RNA, 19 nt, Artificial Sequence
  Description of Artificial Sequence: Synthetic oligonucleotide
  Sense strand starting at position 3650 of SEQ ID NO: 1882484
gauagaaacuuccuguggu

SEQ ID NO: 2124801 - RNA, 19 nt, Artificial Sequence
  Description of Artificial Sequence: Synthetic oligonucleotide
  Antisense strand to SEQ ID NO: 2124800
accacaggaaguuucuauc

SEQ ID NO: 2124802 - RNA, 19 nt, Artificial Sequence
  Description of Artificial Sequence: Synthetic oligonucleotide
  Sense strand starting at position 3657 of SEQ ID NO: 1882484
acuuccuguggugaauaaa

SEQ ID NO: 2124803 - RNA, 19 nt, Artificial Sequence
  Description of Artificial Sequence: Synthetic oligonucleotide
  Antisense strand to SEQ ID NO: 2124802
uuuauucaccacaggaagu

SEQ ID NO: 2124804 - RNA, 19 nt, Artificial Sequence
  Description of Artificial Sequence: Synthetic oligonucleotide
  Sense strand starting at position 3675 of SEQ ID NO: 1882484
aaagaauggcguuacgaac

SEQ ID NO: 2124805 - RNA, 19 nt, Artificial Sequence
  Description of Artificial Sequence: Synthetic oligonucleotide
  Antisense strand to SEQ ID NO: 2124804
guucguaacgccauucuuu

SEQ ID NO: 2124806 - RNA, 19 nt, Artificial Sequence
  Description of Artificial Sequence: Synthetic oligonucleotide
  Sense strand starting at position 3873 of SEQ ID NO: 1882484
uuuauagacccagguuauu

SEQ ID NO: 2124807 - RNA, 19 nt, Artificial Sequence
  Description of Artificial Sequence: Synthetic oligonucleotide
  Antisense strand to SEQ ID NO: 2124806
aauaaccugggucuauaaa

SEQ ID NO: 2124808 - RNA, 19 nt, Artificial Sequence
  Description of Artificial Sequence: Synthetic oligonucleotide
  Sense strand starting at position 3982 of SEQ ID NO: 1882484
ugaagaaauuacuccaguc

SEQ ID NO: 2124809 - RNA, 19 nt, Artificial Sequence
  Description of Artificial Sequence: Synthetic oligonucleotide
  Antisense strand to SEQ ID NO: 2124808
gacuggaguaauuucuuca

SEQ ID NO: 2124810 - RNA, 19 nt, Artificial Sequence
  Description of Artificial Sequence: Synthetic oligonucleotide
  Sense strand starting at position 68 of SEQ ID NO: 1882485
gagguuaagacauggugga

SEQ ID NO: 2124811 - RNA, 19 nt, Artificial Sequence
  Description of Artificial Sequence: Synthetic oligonucleotide
  Antisense strand to SEQ ID NO: 2124810
uccaccaugucuuaaccuc

SEQ ID NO: 2124812 - RNA, 19 nt, Artificial Sequence
  Description of Artificial Sequence: Synthetic oligonucleotide
  Sense strand starting at position 69 of SEQ ID NO: 1882485
agguuaagacaugguggau

SEQ ID NO: 2124813 - RNA, 19 nt, Artificial Sequence
  Description of Artificial Sequence: Synthetic oligonucleotide
  Antisense strand to SEQ ID NO: 2124812
auccaccaugucuuaaccu

SEQ ID NO: 2124814 - RNA, 19 nt, Artificial Sequence
  Description of Artificial Sequence: Synthetic oligonucleotide
  Sense strand starting at position 75 of SEQ ID NO: 1882485
agacaugguggaugugaua

SEQ ID NO: 2124815 - RNA, 19 nt, Artificial Sequence
  Description of Artificial Sequence: Synthetic oligonucleotide
  Antisense strand to SEQ ID NO: 2124814
uaucacauccaccaugucu

SEQ ID NO: 2124816 - RNA, 19 nt, Artificial Sequence
  Description of Artificial Sequence: Synthetic oligonucleotide
  Sense strand starting at position 163 of SEQ ID NO: 1882485
aggaauaaguggcucuagu

SEQ ID NO: 2124817 - RNA, 19 nt, Artificial Sequence
  Description of Artificial Sequence: Synthetic oligonucleotide
  Antisense strand to SEQ ID NO: 2124816
acuagagccacuuauuccu

SEQ ID NO: 2124818 - RNA, 19 nt, Artificial Sequence
  Description of Artificial Sequence: Synthetic oligonucleotide
  Sense strand starting at position 189 of SEQ ID NO: 1882485
uggaauauugaaugccuau

SEQ ID NO: 2124819 - RNA, 19 nt, Artificial Sequence
  Description of Artificial Sequence: Synthetic oligonucleotide
  Antisense strand to SEQ ID NO: 2124818
auaggcauucaauauucca

SEQ ID NO: 2124820 - RNA, 19 nt, Artificial Sequence
  Description of Artificial Sequence: Synthetic oligonucleotide
  Sense strand starting at position 215 of SEQ ID NO: 1882485
ucaauaccuguugaauagu

SEQ ID NO: 2124821 - RNA, 19 nt, Artificial Sequence
  Description of Artificial Sequence: Synthetic oligonucleotide
  Antisense strand to SEQ ID NO: 2124820
acuauucaacagguauuga

SEQ ID NO: 2124822 - RNA, 19 nt, Artificial Sequence
  Description of Artificial Sequence: Synthetic oligonucleotide
  Sense strand starting at position 218 of SEQ ID NO: 1882485
auaccuguugaauaguaca

SEQ ID NO: 2124823 - RNA, 19 nt, Artificial Sequence
  Description of Artificial Sequence: Synthetic oligonucleotide
  Antisense strand to SEQ ID NO: 2124822
uguacuauucaacagguau

SEQ ID NO: 2124824 - RNA, 19 nt, Artificial Sequence
  Description of Artificial Sequence: Synthetic oligonucleotide
  Sense strand starting at position 396 of SEQ ID NO: 1882485
gagacaguaucuuucuguu

SEQ ID NO: 2124825 - RNA, 19 nt, Artificial Sequence
  Description of Artificial Sequence: Synthetic oligonucleotide
  Antisense strand to SEQ ID NO: 2124824
aacagaaagauacugucuc

SEQ ID NO: 2124826 - RNA, 19 nt, Artificial Sequence
  Description of Artificial Sequence: Synthetic oligonucleotide
  Sense strand starting at position 411 of SEQ ID NO: 1882485
uguugucacccagacucuu

SEQ ID NO: 2124827 - RNA, 19 nt, Artificial Sequence
  Description of Artificial Sequence: Synthetic oligonucleotide
  Antisense strand to SEQ ID NO: 2124826
aagagucugggugacaaca

SEQ ID NO: 2124828 - RNA, 19 nt, Artificial Sequence
  Description of Artificial Sequence: Synthetic oligonucleotide
  Sense strand starting at position 512 of SEQ ID NO: 1882485
guuggaacuacaggugaaa

SEQ ID NO: 2124829 - RNA, 19 nt, Artificial Sequence
  Description of Artificial Sequence: Synthetic oligonucleotide
  Antisense strand to SEQ ID NO: 2124828
uuucaccuguaguuccaac

SEQ ID NO: 2124830 - RNA, 19 nt, Artificial Sequence
  Description of Artificial Sequence: Synthetic oligonucleotide
  Sense strand starting at position 744 of SEQ ID NO: 1882485
cuugguaauugcuuuagga

SEQ ID NO: 2124831 - RNA, 19 nt, Artificial Sequence
  Description of Artificial Sequence: Synthetic oligonucleotide
  Antisense strand to SEQ ID NO: 2124830
uccuaaagcaauuaccaag

SEQ ID NO: 2124832 - RNA, 19 nt, Artificial Sequence
  Description of Artificial Sequence: Synthetic oligonucleotide
  Sense strand starting at position 746 of SEQ ID NO: 1882485
ugguaauugcuuuaggaga

SEQ ID NO: 2124833 - RNA, 19 nt, Artificial Sequence
  Description of Artificial Sequence: Synthetic oligonucleotide
  Antisense strand to SEQ ID NO: 2124832
ucuccuaaagcaauuacca

SEQ ID NO: 2124834 - RNA, 19 nt, Artificial Sequence
  Description of Artificial Sequence: Synthetic oligonucleotide
  Sense strand starting at position 970 of SEQ ID NO: 1882485
gcgcguuuaaucccagcua

SEQ ID NO: 2124835 - RNA, 19 nt, Artificial Sequence
  Description of Artificial Sequence: Synthetic oligonucleotide
  Antisense strand to SEQ ID NO: 2124834
uagcugggauuaaacgcgc

SEQ ID NO: 2124836 - RNA, 19 nt, Artificial Sequence
  Description of Artificial Sequence: Synthetic oligonucleotide
  Sense strand starting at position 1137 of SEQ ID NO: 1882485
ccagguaguucuguuagag

SEQ ID NO: 2124837 - RNA, 19 nt, Artificial Sequence
  Description of Artificial Sequence: Synthetic oligonucleotide
  Antisense strand to SEQ ID NO: 2124836
cucuaacagaacuaccugg

SEQ ID NO: 2124838 - RNA, 19 nt, Artificial Sequence
  Description of Artificial Sequence: Synthetic oligonucleotide
  Sense strand starting at position 1143 of SEQ ID NO: 1882485
aguucuguuagaggaugaa

SEQ ID NO: 2124839 - RNA, 19 nt, Artificial Sequence
  Description of Artificial Sequence: Synthetic oligonucleotide
  Antisense strand to SEQ ID NO: 2124838
uucauccucuaacagaacu

SEQ ID NO: 2124840 - RNA, 19 nt, Artificial Sequence
  Description of Artificial Sequence: Synthetic oligonucleotide
  Sense strand starting at position 1198 of SEQ ID NO: 1882485
uguuuaagaagcuguuaga

SEQ ID NO: 2124841 - RNA, 19 nt, Artificial Sequence
  Description of Artificial Sequence: Synthetic oligonucleotide
  Antisense strand to SEQ ID NO: 2124840
ucuaacagcuucuuaaaca

SEQ ID NO: 2124842 - RNA, 19 nt, Artificial Sequence
  Description of Artificial Sequence: Synthetic oligonucleotide
  Sense strand starting at position 1209 of SEQ ID NO: 1882485
cuguuagaaggccagauua

SEQ ID NO: 2124843 - RNA, 19 nt, Artificial Sequence
  Description of Artificial Sequence: Synthetic oligonucleotide
  Antisense strand to SEQ ID NO: 2124842
uaaucuggccuucuaacag

SEQ ID NO: 2124844 - RNA, 19 nt, Artificial Sequence
  Description of Artificial Sequence: Synthetic oligonucleotide
  Sense strand starting at position 1211 of SEQ ID NO: 1882485
guuagaaggccagauuauu

SEQ ID NO: 2124845 - RNA, 19 nt, Artificial Sequence
  Description of Artificial Sequence: Synthetic oligonucleotide
  Antisense strand to SEQ ID NO: 2124844
aauaaucuggccuucuaac

SEQ ID NO: 2124846 - RNA, 19 nt, Artificial Sequence
  Description of Artificial Sequence: Synthetic oligonucleotide
  Sense strand starting at position 1286 of SEQ ID NO: 1882485
ggaggugaggucuagucga

SEQ ID NO: 2124847 - RNA, 19 nt, Artificial Sequence
  Description of Artificial Sequence: Synthetic oligonucleotide
  Antisense strand to SEQ ID NO: 2124846
ucgacuagaccucaccucc

SEQ ID NO: 2124848 - RNA, 19 nt, Artificial Sequence
  Description of Artificial Sequence: Synthetic oligonucleotide
  Sense strand starting at position 1291 of SEQ ID NO: 1882485
ugaggucuagucgaugaag

SEQ ID NO: 2124849 - RNA, 19 nt, Artificial Sequence
  Description of Artificial Sequence: Synthetic oligonucleotide
  Antisense strand to SEQ ID NO: 2124848
cuucaucgacuagaccuca

SEQ ID NO: 2124850 - RNA, 19 nt, Artificial Sequence
  Description of Artificial Sequence: Synthetic oligonucleotide
  Sense strand starting at position 1293 of SEQ ID NO: 1882485
aggucuagucgaugaagaa

SEQ ID NO: 2124851 - RNA, 19 nt, Artificial Sequence
  Description of Artificial Sequence: Synthetic oligonucleotide
  Antisense strand to SEQ ID NO: 2124850
uucuucaucgacuagaccu

SEQ ID NO: 2124852 - RNA, 19 nt, Artificial Sequence
  Description of Artificial Sequence: Synthetic oligonucleotide
  Sense strand starting at position 1294 of SEQ ID NO: 1882485
ggucuagucgaugaagaaa

SEQ ID NO: 2124853 - RNA, 19 nt, Artificial Sequence
  Description of Artificial Sequence: Synthetic oligonucleotide
  Antisense strand to SEQ ID NO: 2124852
uuucuucaucgacuagacc

SEQ ID NO: 2124854 - RNA, 19 nt, Artificial Sequence
  Description of Artificial Sequence: Synthetic oligonucleotide
  Sense strand starting at position 1324 of SEQ ID NO: 1882485
gcccuuggacucuaggauu

SEQ ID NO: 2124855 - RNA, 19 nt, Artificial Sequence
  Description of Artificial Sequence: Synthetic oligonucleotide
  Antisense strand to SEQ ID NO: 2124854
aauccuagaguccaagggc

SEQ ID NO: 2124856 - RNA, 19 nt, Artificial Sequence
  Description of Artificial Sequence: Synthetic oligonucleotide
  Sense strand starting at position 1446 of SEQ ID NO: 1882485
auauauccguccuuugaac

SEQ ID NO: 2124857 - RNA, 19 nt, Artificial Sequence
  Description of Artificial Sequence: Synthetic oligonucleotide
  Antisense strand to SEQ ID NO: 2124856
guucaaaggacggauauau

SEQ ID NO: 2124858 - RNA, 19 nt, Artificial Sequence
  Description of Artificial Sequence: Synthetic oligonucleotide
  Sense strand starting at position 1600 of SEQ ID NO: 1882485
uguuaacagcuaugaaaga

SEQ ID NO: 2124859 - RNA, 19 nt, Artificial Sequence
  Description of Artificial Sequence: Synthetic oligonucleotide
  Antisense strand to SEQ ID NO: 2124858
ucuuucauagcuguuaaca

SEQ ID NO: 2124860 - RNA, 19 nt, Artificial Sequence
  Description of Artificial Sequence: Synthetic oligonucleotide
  Sense strand starting at position 1758 of SEQ ID NO: 1882485
cccacagauccugggacau

SEQ ID NO: 2124861 - RNA, 19 nt, Artificial Sequence
  Description of Artificial Sequence: Synthetic oligonucleotide
  Antisense strand to SEQ ID NO: 2124860
augucccaggaucuguggg

SEQ ID NO: 2124862 - RNA, 19 nt, Artificial Sequence
  Description of Artificial Sequence: Synthetic oligonucleotide
  Sense strand starting at position 1890 of SEQ ID NO: 1882485
uugagaauucugcagcaga

SEQ ID NO: 2124863 - RNA, 19 nt, Artificial Sequence
  Description of Artificial Sequence: Synthetic oligonucleotide
  Antisense strand to SEQ ID NO: 2124862
ucugcugcagaauucucaa

SEQ ID NO: 2124864 - RNA, 19 nt, Artificial Sequence
  Description of Artificial Sequence: Synthetic oligonucleotide
  Sense strand starting at position 1893 of SEQ ID NO: 1882485
agaauucugcagcagacau

SEQ ID NO: 2124865 - RNA, 19 nt, Artificial Sequence
  Description of Artificial Sequence: Synthetic oligonucleotide
  Antisense strand to SEQ ID NO: 2124864
augucugcugcagaauucu

SEQ ID NO: 2124866 - RNA, 19 nt, Artificial Sequence
  Description of Artificial Sequence: Synthetic oligonucleotide
  Sense strand starting at position 1903 of SEQ ID NO: 1882485
agcagacauagcuggaaga

SEQ ID NO: 2124867 - RNA, 19 nt, Artificial Sequence
  Description of Artificial Sequence: Synthetic oligonucleotide
  Antisense strand to SEQ ID NO: 2124866
ucuuccagcuaugucugcu

SEQ ID NO: 2124868 - RNA, 19 nt, Artificial Sequence
  Description of Artificial Sequence: Synthetic oligonucleotide
  Sense strand starting at position 1904 of SEQ ID NO: 1882485
gcagacauagcuggaagau

SEQ ID NO: 2124869 - RNA, 19 nt, Artificial Sequence
  Description of Artificial Sequence: Synthetic oligonucleotide
  Antisense strand to SEQ ID NO: 2124868
aucuuccagcuaugucugc

SEQ ID NO: 2124870 - RNA, 19 nt, Artificial Sequence
  Description of Artificial Sequence: Synthetic oligonucleotide
  Sense strand starting at position 1928 of SEQ ID NO: 1882485
cguauuaggcuggcgcaaa

SEQ ID NO: 2124871 - RNA, 19 nt, Artificial Sequence
  Description of Artificial Sequence: Synthetic oligonucleotide
  Antisense strand to SEQ ID NO: 2124870
uuugcgccagccuaauacg

SEQ ID NO: 2124872 - RNA, 19 nt, Artificial Sequence
  Description of Artificial Sequence: Synthetic oligonucleotide
  Sense strand starting at position 2062 of SEQ ID NO: 1882485
agcagaggaaucugccaua

SEQ ID NO: 2124873 - RNA, 19 nt, Artificial Sequence
  Description of Artificial Sequence: Synthetic oligonucleotide
  Antisense strand to SEQ ID NO: 2124872
uauggcagauuccucugcu

SEQ ID NO: 2124874 - RNA, 19 nt, Artificial Sequence
  Description of Artificial Sequence: Synthetic oligonucleotide
  Sense strand starting at position 2530 of SEQ ID NO: 1882485
acaucuaggcacugaauga

SEQ ID NO: 2124875 - RNA, 19 nt, Artificial Sequence
  Description of Artificial Sequence: Synthetic oligonucleotide
  Antisense strand to SEQ ID NO: 2124874
ucauucagugccuagaugu

SEQ ID NO: 2124876 - RNA, 19 nt, Artificial Sequence
  Description of Artificial Sequence: Synthetic oligonucleotide
  Sense strand starting at position 2701 of SEQ ID NO: 1882485
ggaauaauacuauguguaa

SEQ ID NO: 2124877 - RNA, 19 nt, Artificial Sequence
  Description of Artificial Sequence: Synthetic oligonucleotide
  Antisense strand to SEQ ID NO: 2124876
uuacacauaguauuauucc

SEQ ID NO: 2124878 - RNA, 19 nt, Artificial Sequence
  Description of Artificial Sequence: Synthetic oligonucleotide
  Sense strand starting at position 2779 of SEQ ID NO: 1882485
gucucugaacuauaaguaa

SEQ ID NO: 2124879 - RNA, 19 nt, Artificial Sequence
  Description of Artificial Sequence: Synthetic oligonucleotide
  Antisense strand to SEQ ID NO: 2124878
uuacuuauaguucagagac

SEQ ID NO: 2124880 - RNA, 19 nt, Artificial Sequence
  Description of Artificial Sequence: Synthetic oligonucleotide
  Sense strand starting at position 2827 of SEQ ID NO: 1882485
auggaaugguaauuacgua

SEQ ID NO: 2124881 - RNA, 19 nt, Artificial Sequence
  Description of Artificial Sequence: Synthetic oligonucleotide
  Antisense strand to SEQ ID NO: 2124880
uacguaauuaccauuccau

SEQ ID NO: 2124882 - RNA, 19 nt, Artificial Sequence
  Description of Artificial Sequence: Synthetic oligonucleotide
  Sense strand starting at position 2832 of SEQ ID NO: 1882485
augguaauuacguacaagu

SEQ ID NO: 2124883 - RNA, 19 nt, Artificial Sequence
  Description of Artificial Sequence: Synthetic oligonucleotide
  Antisense strand to SEQ ID NO: 2124882
acuuguacguaauuaccau

SEQ ID NO: 2124884 - RNA, 19 nt, Artificial Sequence
  Description of Artificial Sequence: Synthetic oligonucleotide
  Sense strand starting at position 3332 of SEQ ID NO: 1882485
guguuuaaacugcaauaau

SEQ ID NO: 2124885 - RNA, 19 nt, Artificial Sequence
  Description of Artificial Sequence: Synthetic oligonucleotide
  Antisense strand to SEQ ID NO: 2124884
auuauugcaguuuaaacac

SEQ ID NO: 2124886 - RNA, 19 nt, Artificial Sequence
  Description of Artificial Sequence: Synthetic oligonucleotide
  Sense strand starting at position 3614 of SEQ ID NO: 1882485
guacauauauguguccaua

SEQ ID NO: 2124887 - RNA, 19 nt, Artificial Sequence
  Description of Artificial Sequence: Synthetic oligonucleotide
  Antisense strand to SEQ ID NO: 2124886
uauggacacauauauguac

SEQ ID NO: 2124888 - RNA, 19 nt, Artificial Sequence
  Description of Artificial Sequence: Synthetic oligonucleotide
  Sense strand starting at position 3616 of SEQ ID NO: 1882485
acauauauguguccauaua

SEQ ID NO: 2124889 - RNA, 19 nt, Artificial Sequence
  Description of Artificial Sequence: Synthetic oligonucleotide
  Antisense strand to SEQ ID NO: 2124888
uauauggacacauauaugu

SEQ ID NO: 2124890 - RNA, 19 nt, Artificial Sequence
  Description of Artificial Sequence: Synthetic oligonucleotide
  Sense strand starting at position 44 of SEQ ID NO: 1882486
ggugaaagaucgcaacaau

SEQ ID NO: 2124891 - RNA, 19 nt, Artificial Sequence
  Description of Artificial Sequence: Synthetic oligonucleotide
  Antisense strand to SEQ ID NO: 2124890
auuguugcgaucuuucacc

SEQ ID NO: 2124892 - RNA, 19 nt, Artificial Sequence
  Description of Artificial Sequence: Synthetic oligonucleotide
  Sense strand starting at position 1997 of SEQ ID NO: 1882486
cuaauagucucauggcuuu

SEQ ID NO: 2124893 - RNA, 19 nt, Artificial Sequence
  Description of Artificial Sequence: Synthetic oligonucleotide
  Antisense strand to SEQ ID NO: 2124892
aaagccaugagacuauuag

SEQ ID NO: 2124894 - RNA, 19 nt, Artificial Sequence
  Description of Artificial Sequence: Synthetic oligonucleotide
  Sense strand starting at position 2093 of SEQ ID NO: 1882486
gugaaagcauguuaugcuu

SEQ ID NO: 2124895 - RNA, 19 nt, Artificial Sequence
  Description of Artificial Sequence: Synthetic oligonucleotide
  Antisense strand to SEQ ID NO: 2124894
aagcauaacaugcuuucac

SEQ ID NO: 2124896 - RNA, 19 nt, Artificial Sequence
  Description of Artificial Sequence: Synthetic oligonucleotide
  Sense strand starting at position 2099 of SEQ ID NO: 1882486
gcauguuaugcuugcauau

SEQ ID NO: 2124897 - RNA, 19 nt, Artificial Sequence
  Description of Artificial Sequence: Synthetic oligonucleotide
  Antisense strand to SEQ ID NO: 2124896
auaugcaagcauaacaugc

SEQ ID NO: 2124898 - RNA, 19 nt, Artificial Sequence
  Description of Artificial Sequence: Synthetic oligonucleotide
  Sense strand starting at position 2106 of SEQ ID NO: 1882486
augcuugcauaucgugaua

SEQ ID NO: 2124899 - RNA, 19 nt, Artificial Sequence
  Description of Artificial Sequence: Synthetic oligonucleotide
  Antisense strand to SEQ ID NO: 2124898
uaucacgauaugcaagcau

SEQ ID NO: 2124900 - RNA, 19 nt, Artificial Sequence
  Description of Artificial Sequence: Synthetic oligonucleotide
  Sense strand starting at position 2108 of SEQ ID NO: 1882486
gcuugcauaucgugauaug

SEQ ID NO: 2124901 - RNA, 19 nt, Artificial Sequence
  Description of Artificial Sequence: Synthetic oligonucleotide
  Antisense strand to SEQ ID NO: 2124900
cauaucacgauaugcaagc

SEQ ID NO: 2124902 - RNA, 19 nt, Artificial Sequence
  Description of Artificial Sequence: Synthetic oligonucleotide
  Sense strand starting at position 2111 of SEQ ID NO: 1882486
ugcauaucgugauaugcua

SEQ ID NO: 2124903 - RNA, 19 nt, Artificial Sequence
  Description of Artificial Sequence: Synthetic oligonucleotide
  Antisense strand to SEQ ID NO: 2124902
uagcauaucacgauaugca

SEQ ID NO: 2124904 - RNA, 19 nt, Artificial Sequence
  Description of Artificial Sequence: Synthetic oligonucleotide
  Sense strand starting at position 2119 of SEQ ID NO: 1882486
gugauaugcuacuugcaua

SEQ ID NO: 2124905 - RNA, 19 nt, Artificial Sequence
  Description of Artificial Sequence: Synthetic oligonucleotide
  Antisense strand to SEQ ID NO: 2124904
uaugcaaguagcauaucac

SEQ ID NO: 2124906 - RNA, 19 nt, Artificial Sequence
  Description of Artificial Sequence: Synthetic oligonucleotide
  Sense strand starting at position 2124 of SEQ ID NO: 1882486
augcuacuugcauauugau

SEQ ID NO: 2124907 - RNA, 19 nt, Artificial Sequence
  Description of Artificial Sequence: Synthetic oligonucleotide
  Antisense strand to SEQ ID NO: 2124906
aucaauaugcaaguagcau

SEQ ID NO: 2124908 - RNA, 19 nt, Artificial Sequence
  Description of Artificial Sequence: Synthetic oligonucleotide
  Sense strand starting at position 2130 of SEQ ID NO: 1882486
cuugcauauugauggauuu

SEQ ID NO: 2124909 - RNA, 19 nt, Artificial Sequence
  Description of Artificial Sequence: Synthetic oligonucleotide
  Antisense strand to SEQ ID NO: 2124908
aaauccaucaauaugcaag

SEQ ID NO: 2124910 - RNA, 19 nt, Artificial Sequence
  Description of Artificial Sequence: Synthetic oligonucleotide
  Sense strand starting at position 2452 of SEQ ID NO: 1882486
acaaauaauuagugagcca

SEQ ID NO: 2124911 - RNA, 19 nt, Artificial Sequence
  Description of Artificial Sequence: Synthetic oligonucleotide
  Antisense strand to SEQ ID NO: 2124910
uggcucacuaauuauuugu

SEQ ID NO: 2124912 - RNA, 19 nt, Artificial Sequence
  Description of Artificial Sequence: Synthetic oligonucleotide
  Sense strand starting at position 3228 of SEQ ID NO: 1882486
gagucucauggcugcacau

SEQ ID NO: 2124913 - RNA, 19 nt, Artificial Sequence
  Description of Artificial Sequence: Synthetic oligonucleotide
  Antisense strand to SEQ ID NO: 2124912
augugcagccaugagacuc

SEQ ID NO: 2124914 - RNA, 19 nt, Artificial Sequence
  Description of Artificial Sequence: Synthetic oligonucleotide
  Sense strand starting at position 3374 of SEQ ID NO: 1882486
cucggagucuucuacaucu

SEQ ID NO: 2124915 - RNA, 19 nt, Artificial Sequence
  Description of Artificial Sequence: Synthetic oligonucleotide
  Antisense strand to SEQ ID NO: 2124914
agauguagaagacuccgag

SEQ ID NO: 2124916 - RNA, 19 nt, Artificial Sequence
  Description of Artificial Sequence: Synthetic oligonucleotide
  Sense strand starting at position 4 of SEQ ID NO: 1882487
gagagaugagucgaugugu

SEQ ID NO: 2124917 - RNA, 19 nt, Artificial Sequence
  Description of Artificial Sequence: Synthetic oligonucleotide
  Antisense strand to SEQ ID NO: 2124916
acacaucgacucaucucuc

SEQ ID NO: 2124918 - RNA, 19 nt, Artificial Sequence
  Description of Artificial Sequence: Synthetic oligonucleotide
  Sense strand starting at position 71 of SEQ ID NO: 1882487
agauaauagcagugacagu

SEQ ID NO: 2124919 - RNA, 19 nt, Artificial Sequence
  Description of Artificial Sequence: Synthetic oligonucleotide
  Antisense strand to SEQ ID NO: 2124918
acugucacugcuauuaucu

SEQ ID NO: 2124920 - RNA, 19 nt, Artificial Sequence
  Description of Artificial Sequence: Synthetic oligonucleotide
  Sense strand starting at position 143 of SEQ ID NO: 1882487
ucccauuaccuggagucua

SEQ ID NO: 2124921 - RNA, 19 nt, Artificial Sequence
  Description of Artificial Sequence: Synthetic oligonucleotide
  Antisense strand to SEQ ID NO: 2124920
uagacuccagguaauggga

SEQ ID NO: 2124922 - RNA, 19 nt, Artificial Sequence
  Description of Artificial Sequence: Synthetic oligonucleotide
  Sense strand starting at position 254 of SEQ ID NO: 1882487
ccaauuaaagaaugagcuu

SEQ ID NO: 2124923 - RNA, 19 nt, Artificial Sequence
  Description of Artificial Sequence: Synthetic oligonucleotide
  Antisense strand to SEQ ID NO: 2124922
aagcucauucuuuaauugg

SEQ ID NO: 2124924 - RNA, 19 nt, Artificial Sequence
  Description of Artificial Sequence: Synthetic oligonucleotide
  Sense strand starting at position 257 of SEQ ID NO: 1882487
auuaaagaaugagcuugua

SEQ ID NO: 2124925 - RNA, 19 nt, Artificial Sequence
  Description of Artificial Sequence: Synthetic oligonucleotide
  Antisense strand to SEQ ID NO: 2124924
uacaagcucauucuuuaau

SEQ ID NO: 2124926 - RNA, 19 nt, Artificial Sequence
  Description of Artificial Sequence: Synthetic oligonucleotide
  Sense strand starting at position 277 of SEQ ID NO: 1882487
gggugaguagaaugauauc

SEQ ID NO: 2124927 - RNA, 19 nt, Artificial Sequence
  Description of Artificial Sequence: Synthetic oligonucleotide
  Antisense strand to SEQ ID NO: 2124926
gauaucauucuacucaccc

SEQ ID NO: 2124928 - RNA, 19 nt, Artificial Sequence
  Description of Artificial Sequence: Synthetic oligonucleotide
  Sense strand starting at position 288 of SEQ ID NO: 1882487
augauaucauucucucagu

SEQ ID NO: 2124929 - RNA, 19 nt, Artificial Sequence
  Description of Artificial Sequence: Synthetic oligonucleotide
  Antisense strand to SEQ ID NO: 2124928
acugagagaaugauaucau

SEQ ID NO: 2124930 - RNA, 19 nt, Artificial Sequence
  Description of Artificial Sequence: Synthetic oligonucleotide
  Sense strand starting at position 381 of SEQ ID NO: 1882487
ccagguuguccugaauaac

SEQ ID NO: 2124931 - RNA, 19 nt, Artificial Sequence
  Description of Artificial Sequence: Synthetic oligonucleotide
  Antisense strand to SEQ ID NO: 2124930
guuauucaggacaaccugg

SEQ ID NO: 2124932 - RNA, 19 nt, Artificial Sequence
  Description of Artificial Sequence: Synthetic oligonucleotide
  Sense strand starting at position 445 of SEQ ID NO: 1882487
ugguauuaacugugaccaa

SEQ ID NO: 2124933 - RNA, 19 nt, Artificial Sequence
  Description of Artificial Sequence: Synthetic oligonucleotide
  Antisense strand to SEQ ID NO: 2124932
uuggucacaguuaauacca

SEQ ID NO: 2124934 - RNA, 19 nt, Artificial Sequence
  Description of Artificial Sequence: Synthetic oligonucleotide
  Sense strand starting at position 585 of SEQ ID NO: 1882487
gaggcauacuuuccagauu

SEQ ID NO: 2124935 - RNA, 19 nt, Artificial Sequence
  Description of Artificial Sequence: Synthetic oligonucleotide
  Antisense strand to SEQ ID NO: 2124934
aaucuggaaaguaugccuc

SEQ ID NO: 2124936 - RNA, 19 nt, Artificial Sequence
  Description of Artificial Sequence: Synthetic oligonucleotide
  Sense strand starting at position 588 of SEQ ID NO: 1882487
gcauacuuuccagauugau

SEQ ID NO: 2124937 - RNA, 19 nt, Artificial Sequence
  Description of Artificial Sequence: Synthetic oligonucleotide
  Antisense strand to SEQ ID NO: 2124936
aucaaucuggaaaguaugc

SEQ ID NO: 2124938 - RNA, 19 nt, Artificial Sequence
  Description of Artificial Sequence: Synthetic oligonucleotide
  Sense strand starting at position 627 of SEQ ID NO: 1882487
cuggaaucagcuugggaga

SEQ ID NO: 2124939 - RNA, 19 nt, Artificial Sequence
  Description of Artificial Sequence: Synthetic oligonucleotide
  Antisense strand to SEQ ID NO: 2124938
ucucccaagcugauuccag

SEQ ID NO: 2124940 - RNA, 19 nt, Artificial Sequence
  Description of Artificial Sequence: Synthetic oligonucleotide
  Sense strand starting at position 628 of SEQ ID NO: 1882487
uggaaucagcuugggagau

SEQ ID NO: 2124941 - RNA, 19 nt, Artificial Sequence
  Description of Artificial Sequence: Synthetic oligonucleotide
  Antisense strand to SEQ ID NO: 2124940
aucucccaagcugauucca

SEQ ID NO: 2124942 - RNA, 19 nt, Artificial Sequence
  Description of Artificial Sequence: Synthetic oligonucleotide
  Sense strand starting at position 963 of SEQ ID NO: 1882487
ucuuuagugcuaugauuua

SEQ ID NO: 2124943 - RNA, 19 nt, Artificial Sequence
  Description of Artificial Sequence: Synthetic oligonucleotide
  Antisense strand to SEQ ID NO: 2124942
uaaaucauagcacuaaaga

SEQ ID NO: 2124944 - RNA, 19 nt, Artificial Sequence
  Description of Artificial Sequence: Synthetic oligonucleotide
  Sense strand starting at position 985 of SEQ ID NO: 1882487
aguguucuaccucagagaa

SEQ ID NO: 2124945 - RNA, 19 nt, Artificial Sequence
  Description of Artificial Sequence: Synthetic oligonucleotide
  Antisense strand to SEQ ID NO: 2124944
uucucugagguagaacacu

SEQ ID NO: 2124946 - RNA, 19 nt, Artificial Sequence
  Description of Artificial Sequence: Synthetic oligonucleotide
  Sense strand starting at position 1021 of SEQ ID NO: 1882487
ugagauuauaaagguagca

SEQ ID NO: 2124947 - RNA, 19 nt, Artificial Sequence
  Description of Artificial Sequence: Synthetic oligonucleotide
  Antisense strand to SEQ ID NO: 2124946
ugcuaccuuuauaaucuca

SEQ ID NO: 2124948 - RNA, 19 nt, Artificial Sequence
  Description of Artificial Sequence: Synthetic oligonucleotide
  Sense strand starting at position 1075 of SEQ ID NO: 1882487
aaagaaauccaguggucaa

SEQ ID NO: 2124949 - RNA, 19 nt, Artificial Sequence
  Description of Artificial Sequence: Synthetic oligonucleotide
  Antisense strand to SEQ ID NO: 2124948
uugaccacuggauuucuuu

SEQ ID NO: 2124950 - RNA, 19 nt, Artificial Sequence
  Description of Artificial Sequence: Synthetic oligonucleotide
  Sense strand starting at position 1078 of SEQ ID NO: 1882487
gaaauccaguggucaaaca

SEQ ID NO: 2124951 - RNA, 19 nt, Artificial Sequence
  Description of Artificial Sequence: Synthetic oligonucleotide
  Antisense strand to SEQ ID NO: 2124950
uguuugaccacuggauuuc

SEQ ID NO: 2124952 - RNA, 19 nt, Artificial Sequence
  Description of Artificial Sequence: Synthetic oligonucleotide
  Sense strand starting at position 1266 of SEQ ID NO: 1882487
gggccagaaccucacucau

SEQ ID NO: 2124953 - RNA, 19 nt, Artificial Sequence
  Description of Artificial Sequence: Synthetic oligonucleotide
  Antisense strand to SEQ ID NO: 2124952
augagugagguucuggccc

SEQ ID NO: 2124954 - RNA, 19 nt, Artificial Sequence
  Description of Artificial Sequence: Synthetic oligonucleotide
  Sense strand starting at position 1414 of SEQ ID NO: 1882487
uuuaaagagucagcucuaa

SEQ ID NO: 2124955 - RNA, 19 nt, Artificial Sequence
  Description of Artificial Sequence: Synthetic oligonucleotide
  Antisense strand to SEQ ID NO: 2124954
uuagagcugacucuuuaaa

SEQ ID NO: 2124956 - RNA, 19 nt, Artificial Sequence
  Description of Artificial Sequence: Synthetic oligonucleotide
  Sense strand starting at position 1475 of SEQ ID NO: 1882487
ucuuuagcgcuugcccaaa

SEQ ID NO: 2124957 - RNA, 19 nt, Artificial Sequence
  Description of Artificial Sequence: Synthetic oligonucleotide
  Antisense strand to SEQ ID NO: 2124956
uuugggcaagcgcuaaaga

SEQ ID NO: 2124958 - RNA, 19 nt, Artificial Sequence
  Description of Artificial Sequence: Synthetic oligonucleotide
  Sense strand starting at position 1558 of SEQ ID NO: 1882487
acauuaugggcuggauacu

SEQ ID NO: 2124959 - RNA, 19 nt, Artificial Sequence
  Description of Artificial Sequence: Synthetic oligonucleotide
  Antisense strand to SEQ ID NO: 2124958
aguauccagcccauaaugu

SEQ ID NO: 2124960 - RNA, 19 nt, Artificial Sequence
  Description of Artificial Sequence: Synthetic oligonucleotide
  Sense strand starting at position 1716 of SEQ ID NO: 1882487
gggauaacauugccuccua

SEQ ID NO: 2124961 - RNA, 19 nt, Artificial Sequence
  Description of Artificial Sequence: Synthetic oligonucleotide
  Antisense strand to SEQ ID NO: 2124960
uaggaggcaauguuauccc

SEQ ID NO: 2124962 - RNA, 19 nt, Artificial Sequence
  Description of Artificial Sequence: Synthetic oligonucleotide
  Sense strand starting at position 1717 of SEQ ID NO: 1882487
ggauaacauugccuccuau

SEQ ID NO: 2124963 - RNA, 19 nt, Artificial Sequence
  Description of Artificial Sequence: Synthetic oligonucleotide
  Antisense strand to SEQ ID NO: 2124962
auaggaggcaauguuaucc

SEQ ID NO: 2124964 - RNA, 19 nt, Artificial Sequence
  Description of Artificial Sequence: Synthetic oligonucleotide
  Sense strand starting at position 1737 of SEQ ID NO: 1882487
gacaacuacuagucuagga

SEQ ID NO: 2124965 - RNA, 19 nt, Artificial Sequence
  Description of Artificial Sequence: Synthetic oligonucleotide
  Antisense strand to SEQ ID NO: 2124964
uccuagacuaguaguuguc

SEQ ID NO: 2124966 - RNA, 19 nt, Artificial Sequence
  Description of Artificial Sequence: Synthetic oligonucleotide
  Sense strand starting at position 2220 of SEQ ID NO: 1882487
uuuaauuggccuggaauga

SEQ ID NO: 2124967 - RNA, 19 nt, Artificial Sequence
  Description of Artificial Sequence: Synthetic oligonucleotide
  Antisense strand to SEQ ID NO: 2124966
ucauuccaggccaauuaaa

SEQ ID NO: 2124968 - RNA, 19 nt, Artificial Sequence
  Description of Artificial Sequence: Synthetic oligonucleotide
  Sense strand starting at position 2278 of SEQ ID NO: 1882487
gugauauagagccaugacu

SEQ ID NO: 2124969 - RNA, 19 nt, Artificial Sequence
  Description of Artificial Sequence: Synthetic oligonucleotide
  Antisense strand to SEQ ID NO: 2124968
agucauggcucuauaucac

SEQ ID NO: 2124970 - RNA, 19 nt, Artificial Sequence
  Description of Artificial Sequence: Synthetic oligonucleotide
  Sense strand starting at position 2280 of SEQ ID NO: 1882487
gauauagagccaugacuga

SEQ ID NO: 2124971 - RNA, 19 nt, Artificial Sequence
  Description of Artificial Sequence: Synthetic oligonucleotide
  Antisense strand to SEQ ID NO: 2124970
ucagucauggcucuauauc

SEQ ID NO: 2124972 - RNA, 19 nt, Artificial Sequence
  Description of Artificial Sequence: Synthetic oligonucleotide
  Sense strand starting at position 2367 of SEQ ID NO: 1882487
agaagugcugcccaagaca

SEQ ID NO: 2124973 - RNA, 19 nt, Artificial Sequence
  Description of Artificial Sequence: Synthetic oligonucleotide
  Antisense strand to SEQ ID NO: 2124972
ugucuugggcagcacuucu

SEQ ID NO: 2124974 - RNA, 19 nt, Artificial Sequence
  Description of Artificial Sequence: Synthetic oligonucleotide
  Sense strand starting at position 3068 of SEQ ID NO: 1882487
acugguuuccauugagaaa

SEQ ID NO: 2124975 - RNA, 19 nt, Artificial Sequence
  Description of Artificial Sequence: Synthetic oligonucleotide
  Antisense strand to SEQ ID NO: 2124974
uuucucaauggaaaccagu

SEQ ID NO: 2124976 - RNA, 19 nt, Artificial Sequence
  Description of Artificial Sequence: Synthetic oligonucleotide
  Sense strand starting at position 3086 of SEQ ID NO: 1882487
aacaauuguuuggcacaga

SEQ ID NO: 2124977 - RNA, 19 nt, Artificial Sequence
  Description of Artificial Sequence: Synthetic oligonucleotide
  Antisense strand to SEQ ID NO: 2124976
ucugugccaaacaauuguu
